United States Patent Application Publication US 2022/0096574 A1 - sequence listing, part 4

SEQ ID NO: 10005 - protein, 259 aa, Limnohabitans sp.
  misc_feature (1)..(259): tr|A0A0P0MAX2|A0A0P0MAX2_9BURK Putative GTP cyclohydrol ase 1 type 2 OS=Limnohabitans sp. 63ED37-2 OX=1678128 G N=L63ED372_02574 PE=4 SV=1
MDTPDRPSTMTDAKTLGQAFDALLQPEKFRDYGPNGLQVEGDRQVRLLVSGVTASRALIEAAIEVQADAIVVHHGLFWRGQDGRVMGWMRERLRLLLAHGIHLFAYHLPLDAHPELGNNAQLARVLGLQADGRFGDQDLGFVGTGTQAWARPEALAEHVAAVLGRPVTCVGGSDRPVRRVAWCTGGAQGYFESAIAQGVDAFITGEISEPQAHLARETGVAFLACGHHATERYGAPALAAHVAQALGIEHRFIEIDNPA

SEQ ID NO: 10006 - protein, 231 aa, Limnoraphis robusta
  misc_feature (1)..(231): tr|A0A0F5YLQ6|A0A0F5YLQ6_9CYAN GTP cyclohydrolase 1 OS= Limnoraphis robusta CS-951 OX=1637645 GN=folE PE=3 SV=1
MTIASNGNSSKPANVSSRIQSRPDRTTSSSNGHPVEYQPLTEVSDEQMMEAVRTMLLGVGEDPEREGLLKTPKRVAEAMRFLTSGYSQSLEDLVNGAIFDEGHSEMVLVRDITVFSMCEHHMLPFMGKAHVAYIPNQKVIGLSKLARIVEMYARRLQVQERLTRQIAEAVQEVLEPQGVAVVIEASHMCMVMRGVQKPGSWTVTSAMLGVFQDEQKTREEFLNLIRHQSSF

SEQ ID NO: 10007 - protein, 239 aa, Limnospira indica; identical to SEQ ID NO: 4836
  misc_feature (1)..(239): tr|H1WA50|H1WA50_9CYAN GTP cyclohydrolase 1 OS=Limnospi ra indica PCC 8005 OX=376219 GN=folE2 PE=3 SV=1

SEQ ID NO: 10008 - protein, 215 aa, Limnospira indica; identical to SEQ ID NO: 4834
  misc_feature (1)..(215): tr|H1WDN4|H1WDN4_9CYAN GTP cyclohydrolase 1 OS=Limnospi ra indica PCC 8005 OX=376219 GN=folE1 PE=3 SV=1

SEQ ID NO: 10009 - protein, 239 aa, Limnothrix rosea
  misc_feature (1)..(239): tr|A0A1Q4R4E1|A0A1Q4R4E1_9CYAN GTP cyclohydrolase 1 OS= Limnothrix rosea IAM M-220 OX=454133 GN=folE PE=3 SV=1
MTTSSINGNNSSSSSIATDALGRDLADIVTRPDRNSNDGKTASIRPSSDESQKKMMEAVYTMLESVGEDPEREGLLKTPKRVAKAMAFLTQGYNQSLEELVNGAIFDEGHNEMVLVRDIDFFSLCEHHMLPFMGRAHVAYIPNQKVVGLSKLARIVEMYSRRLQVQERLTRQIAEAVEEILEPRGVAVVMEGMHMCMSMRGVQKPGSWTVTSAMIGSFQDEQKTREEFLNLIRHQPSFM

SEQ ID NO: 10010 - protein, 238 aa, Limnothrix sp.
  misc_feature (1)..(238): tr|A0A372DQ34|A0A372DQ34_9CYAN GTP cyclohydrolase 1 OS= Limnothrix sp. CACIAM 69d OX=1890733 GN=folE PE=3 SV=1
MTIAASNAISNGMVNPSSSATEDEGKGLLTRPDRNTHDGQPAQVHQPPAVSKDDMMDAVRTILLGVGEDPDREGLLKTPHRVAEAMRFLTSGYDMSLETLVNGAIFDEGHNEMVLVRDINFFSLCEHHMLPFMGRAHVAYIPNQKVVGLSKLARIVEMYARRLQVQERLTRQVAEAIQEVLEPRGVAVVMEGTHMCMSMRGVQKPGSWTVTSAMVGVFQEDQKTREEFLNLIRHQPSF

SEQ ID NO: 10011 - protein, 211 aa, Limnothrix sp.
  misc_feature (1)..(211): tr|A0A1C0V5H9|A0A1C0V5H9_9CYAN GTP cyclohydrolase 1 OS= Limnothrix sp. P13C2 OX=1880902 GN=folE PE=3 SV=1
MTLSIESPRPNLITTAAKSPVSQAEMEQAVRTLLIGLGEDPDREGLRDTPKRVVKALQFLTSGYRQSLDELLNGAVFHENANEMVLVRDIDLFSSCEHHILPIIGRAHVAYIPDGRVIGLSKIARICEMYARRLQVQERLTAQIADAIQGLLMPQGVAVVVEATHMCMVMRGVQKPGSWTVTSAVRGVFAEDPKTRQEFMDLVMHQRGFRA

SEQ ID NO: 10012 - protein, 197 aa, Lishizhenia tianjinensis
  misc_feature (1)..(197): tr|A0A1I7BNN6|A0A1I7BNN6_9FLAO GTP cyclohydrolase 1 OS= Lishizhenia tianjinensis OX=477690 GN=folE PE=3 SV=1
MQEKLIYDDKVTEKLSAVYKEVLGEIGEDPNREGLLKTPERVAKALQYLTKGYDEDPEEILKGALFNEEYSEMVIVKDIEVYSMCEHHMLPFFGKAHIAYIPDGKIVGLSKLPRVVDAFARRLQVQERLTIEIRDCIEKTLNPKGVAVVLECNHMCMQMRGVQKQNSSTTSSAFTGLFLSNDSTRKEFINLVQAKLH

SEQ ID NO: 10013 - protein, 175 aa, Listeria aquatica
  misc_feature (1)..(175): tr|W7B169|W7B169_9LIST GTP cyclohydrolase 1 OS=Listeria aquatica FSL S10-1188 OX=1265818 GN=folE PE=3 SV=1
MILEAVGENPEREGLIETPMRVARMYEEIFAGLHKDPSVHFNKVFEEQHDELVLVKDIRFSSVCEHHLVPFFGVAHVAYLPQNGRVAGLSKLARVVDDVSKRPQLQERITKTVAEIMMEKLNPLGVMVILEAEHMCMTIRGVNKPGAKTVTSAVRGAFRTDDKLRSEVLSLIKHS

SEQ ID NO: 10014 - protein, 188 aa, Listeria booriae
  misc_feature (1)..(188): tr|A0A099W877|A0A099W877_9LIST GTP cyclohydrolase 1 OS= Listeria booriae OX=1552123 GN=folE PE=3 SV=1
MEQIDKQKIADAVKVILEAVGENPEREGLLDTPMRVARMYEEVFSGLKKDPSVHFNTVFEEQHEELVLVKDIRFSSMCEHHLVPFFGVAHVAYLPQNGRVAGLSKLARVVDDVSKRPQLQERITTTVAEIMMDKLKPLGVMVIVEAEHMCMTIRGVNKPGAKTVTSAVRGAFRNDDKLRSEVMALIKN

SEQ ID NO: 10015 - protein, 188 aa, Listeria cornellensis
  misc_feature (1)..(188): tr|W7C5Y6|W7C5Y6_9LIST GTP cyclohydrolase 1 OS=Listeria cornellensis FSL F6-0969 OX=1265820 GN=folE PE=3 SV=1
MEQIDKQKIADAVKIILEAVGENPEREGLLDTPMRVARMYEEVFSGLQKDPSIHFNTVFEEQHEELVLVKDIRFSSMCEHHLVPFFGVAHVAYLPQNGRVAGLSKLARVVDDVSKRPQLQERITTTVAEIMMDKLKPLGVMVILEAEHMCMTIRGVNKPGARTVTSAVRGAFRNDDKLRSEVMALIKN

SEQ ID NO: 10016 - protein, 189 aa, Listeria fleischmannii
  misc_feature (1)..(189): tr|A0A0J8JAF4|A0A0J8JAF4_9LIST GTP cyclohydrolase 1 OS= Listeria fleischmannii 1991 OX=1430899 GN=folE PE=3 SV= 1
MEEINKKKIANAVREILEAVGENPDREGLLDTPMRVARMYEEVFSGLKKDPSIHFNTVFEEQHEELVLVRDIRFSSMCEHHLVPFFGVAHVAYLPQNGRVAGLSKLARVVDDVSKRPQLQERITTTVAETMMDKLNPLGVMVVLEAEHMCMTIRGVNKPGAKTITSAVRGAFRSDDKLRSEVMSLINHS

SEQ ID NO: 10017 - protein, 189 aa, Listeria fleischmannii; identical to SEQ ID NO: 10016
  misc_feature (1)..(189): tr|A0A2X3GNF9|A0A2X3GNF9_9LIST GTP cyclohydrolase 1 OS= Listeria fleischmannii subsp. fleischmannii OX=1671902 GN=folE PE=3 SV=1

SEQ ID NO: 10018 - protein, 188 aa, Listeria floridensis
  misc_feature (1)..(188): tr|W7C0K2|W7C0K2_9LIST GTP cyclohydrolase 1 OS=Listeria floridensis FSL S10-1187 OX=1265817 GN=folE PE=3 SV=1
MTEMNKEKIADAVRMILEAVGEDPDREGLLDTPMRVARMYEEIFAGLKKDPSVHFNKVFEEQHDELVLVKDIRFSSVCEHHLVPFFGVAHVAYLPQNGRVAGLSKLARVVDDVSKRPQLQERITTTVAEIMMDKLDPLGVMVILEAEHMCMTIRGVNKPGTKTVTSAVRGAFRKDDKLRSEVLSLIKH

SEQ ID NO: 10019 - protein, 188 aa, Listeria grandensis
  misc_feature (1)..(188): tr|W7BEZ4|W7BEZ4_9LIST GTP cyclohydrolase 1 OS=Listeria grandensis FSL F6-0971 OX=1265819 GN=folE PE=3 SV=1
MEQIDKQKIADAVKVILEAVGENPEREGLLDTPMRVARMYEEVFSGLKKDPSIHFDTVFEEQHEELVLVKDIRFSSMCEHHLVPFFGVAHVAYLPQNGRVAGLSKLARVVDDVSKRPQLQERITTTVAEIMMDKLKPLGVMVIVEAEHMCMTIRGVNKPGAKTVTSAVRGAFRNDDKLRSEVMSLIKN

SEQ ID NO: 10020 - protein, 185 aa, Listeria grayi
  misc_feature (1)..(185): tr|A0A378MIL6|A0A378MIL6_LISGR GTP cyclohydrolase 1 OS= Listeria grayi OX=1641 GN=folE PE=3 SV=1
MDKDKIAEAVKMILEAVGENPEREGLLDTPMRVARMYEEIFAGLHQDPSVHFNTVFEEQHEELVLVKDIRFSSMCEHHLVPFYGVAHVAYLPQHGRVAGLSKLARVVDDVSKRPQLQERITTTVAEIMMEKLKPLGVMVIIEAEHMCMTIRGVNKPGTKTITSAVRGAFRNDDKLRSEVMSLIKG

SEQ ID NO: 10021 - protein, 185 aa, Listeria grayi; identical to SEQ ID NO: 10020
  misc_feature (1)..(185): tr|D7UXX9|D7UXX9_LISGR GTP cyclohydrolase 1 OS=Listeria grayi DSM 20601 OX=525367 GN=folE PE=3 SV=1

SEQ ID NO: 10022 - protein, 189 aa, Listeria innocua
  misc_feature (1)..(189): sp|Q92A75|GCH1_LISIN GTP cyclohydrolase 1 OS=Listeria i nnocua serovar 6a (strain ATCC BAA-680 / CLIP 11262) OX =272626 GN=folE PE=3 SV=1
MEQIDKQKIADAVKVILEAVGENPEREGLIDTPMRVARMYEEVFAGLKKDPSVHFDTIFEEQHEELVLVKDIRFSSMCEHHLVPFFGVAHVAYLPQNGRVAGLSKLARVVDDVSRRPQLQERITTTVAEIMMDKLKPLGVMVIMEAEHMCMTIRGVNKPGTKTITSAVRGAFKNDDKLRSEVLALIKHN

SEQ ID NO: 10023 - protein, 189 aa, Listeria innocua; identical to SEQ ID NO: 10022
  misc_feature (1)..(189): tr|A0A3T1N2I2|A0A3T1N2I2_LISIO GTP cyclohydrolase 1 OS= Listeria innocua OX=1642 GN=folE PE=3 SV=1

SEQ ID NO: 10024 - protein, 189 aa, Listeria ivanovii
  misc_feature (1)..(189): tr|A0A097B6P0|A0A097B6P0_LISIV GTP cyclohydrolase 1 OS= Listeria ivanovii subsp. londoniensis OX=202752 GN=folE PE=3 SV=1
MEQIDKQKIADAVKVILEAVGENPEREGLIDTPMRVARMYEEVFAGLKKDPSVHFNTIFEEQHEELVLVRDIRFSSMCEHHLVPFFGVAHVAYLPQNGRVAGLSKLARVVDDVSKRPQLQERITTTVAEIMMDKLKPLGVMVIMEAEHMCMTIRGVNKPGTKTITSAVRGAFKNDDKLRSEVLALIKHN

SEQ ID NO: 10025 - protein, 189 aa, Listeria ivanovii
  misc_feature (1)..(189): tr|G2ZCM0|G2ZCM0_LISIP GTP cyclohydrolase 1 OS=Listeria ivanovii (strain ATCC BAA-678 / PAM 55) OX=881621 GN=f olE PE=3 SV=1
MEQIDKQKIADAVKVILEAVGENPEREGLIDTPMRVARMYEEVFAGLKKDPSVHFNTIFEEQHEELVLVRDIRFFSMCEHHLVPFFGVAHVAYLPQNGRVAGLSKLARVVDDVSKRPQLQERITTTVAEIMMDKLKPLGVMVIMEAEHMCMTIRGVNKPGTKTITSAVRGAFKNDDKLRSEVLALIKHN

SEQ ID NO: 10026 - protein, 189 aa, Listeria kieliensis
  misc_feature (1)..(189): tr|A0A3D8TTT4|A0A3D8TTT4_9LIST GTP cyclohydrolase 1 OS= Listeria kieliensis OX=1621700 GN=folE PE=3 SV=1
MTEMDKEKIADAVRMILEAVGENPEREGLIETPMRVARMYEEIFAGLHKDPSVHFNKVFEEQHDELVLVKDIRFSSVCEHHLVPFFGVAHVAYLPQNGRVAGLSKLARVVDDVSKRPQLQERITKTVAEIMMDKLDPLGVMVILEAEHMCMTIRGVNKPGTKTVTSAVRGAFRTDDKIRSEVLSLIKHS

SEQ ID NO: 10027 - protein, 189 aa, Listeria marthii
  misc_feature (1)..(189): tr|E3YRM5|E3YRM5_9LIST GTP cyclohydrolase 1 OS=Listeria marthii FSL S4-120 OX=702457 GN=folE PE=3 SV=1
MEQIDKQKIADAVKVILEAVGENPEREGLIDTPMRVARMYEEVFSGLKKDPSVHFDTIFEEQHEELVLVKDIRFSSMCEHHLVPFFGVAHVAYLPQNGRVAGLSKLARVVDDVSRRPQLQERITTNVAEIMMDKLKPLGVMVIMEAEHMCMTIRGVNKPGTKTITSAVRGAFKNDDKLRSEVLALIKHN

SEQ ID NO: 10028 - protein, 189 aa, Listeria monocytogenes
  misc_feature (1)..(189): sp|B8DBZ3|GCH1_LISMH GTP cyclohydrolase 1 OS=Listeria m onocytogenes serotype 4a (strain HCC23) OX=552536 GN=fo lE PE=3 SV=1
MEQIDKQKIADAVKVILEAVGENPDREGLIDTPMRVARMYEEVFAGLKKDPSVHFDTIFEEQHEELVLVKDIRFSSMCEHHLVPFFGVAHVAYLPQNGRVAGLSKLARVVDDVSRRPQLQERITTTVAEIMMDKLKPLGVMVIMEAEHMCMTIRGVNKPGTKTITSAVRGAFKNDDKLRSEVLALIKHN

SEQ ID NO: 10029 - protein, 189 aa, Listeria monocytogenes
  misc_feature (1)..(189): tr|A0A241SRE8|A0A241SRE8_LISMN GTP cyclohydrolase 1 OS= Listeria monocytogenes serotype 1/2b str. 10-0811 OX=11 96164 GN=folE PE=3 SV=1
MEQIDKQKIADAVKVILEAVGENPEREGLIDTPMRVARMYEEVFAGLKKDPSVHFDTIFEEQHEELVLVKDIRFSSMCEHHLVPFFGVAHVAYLPQNGRVAGLSKLARVVDDVSRRPQLQERITTTVAEIMMEKLKPLGVMVIMEAEHMCMTIRGVNKPGTKTITSAVRGAFKNDDKLRSEVLALIKHN

SEQ ID NO: 10030 - protein, 188 aa, Listeria riparia
  misc_feature (1)..(188): tr|W7D3A0|W7D3A0_9LIST GTP cyclohydrolase 1 OS=Listeria riparia FSL S10-1204 OX=1265816 GN=folE PE=3 SV=1
MEQIDKQKIADAVKVILEAVGENPEREGLLDTPMRVARMYEEVFSGLRKDPSVHFNTVFEEQHEELVLVKDIRFSSMCEHHLVPFFGVAHVAYLPQNGRVAGLSKLARVVDDVSKRPQLQERITTTVAEIMMDKLKPLGVMVIVEAEHMCMTIRGVNKPGAKTVTSAVRGAFRNDDKLRSEVMALIKN

SEQ ID NO: 10031 - protein, 188 aa, Listeria rocourtiae
  misc_feature (1)..(188): tr|A0A4R6ZSV0|A0A4R6ZSV0_9LIST GTP cyclohydrolase 1 OS= Listeria rocourtiae OX=647910 GN=folE PE=3 SV=1
MEQIDKQKIADAVKMILEAVGENPEREGLLDTPMRVARMYEEVFSGLKKDPSIHFNTVFEEQHEELVLVKDIRFSSMCEHHLVPFFGVAHVAYLPQNGRVAGLSKLARVVDDVSKRPQLQERITTTVAEIMMDKLKPLGVMVILEAEHMCMTIRGVNKPGARTVTSAVRGAFRNDDKLRSEIMALIKN

SEQ ID NO: 10032 - protein, 189 aa, Listeria seeligeri; identical to SEQ ID NO: 10024
  misc_feature (1)..(189): tr|A0A5B8ABK9|A0A5B8ABK9_LISSE GTP cyclohydrolase 1 OS= Listeria seeligeri OX=1640 GN=folE PE=3 SV=1

SEQ ID NO: 10033 - protein, 189 aa, Listeria seeligeri; identical to SEQ ID NO: 10024
  misc_feature (1)..(189): tr|E3ZRY9|E3ZRY9_LISSE GTP cyclohydrolase 1 OS=Listeria seeligeri FSL N1-067 OX=702453 GN=folE PE=3 SV=1

SEQ ID NO: 10034 - protein, 188 aa, Listeria sp.
  misc_feature (1)..(188): tr|A0A3N9TWU8|A0A3N9TWU8_9LIST GTP cyclohydrolase 1 OS= Listeria sp. SHR_NRA_18 OX=2269046 GN=folE PE=3 SV=1
MEQIDKQKIADAVKVILEAVGENPEREGLLDTPMRVARMYEEVFSGLQKDPSVHFNTVFEEQHEELVLVKDIRFSSMCEHHLVPFFGVAHVAYLPQNGRVAGLSKLARVVDDVSKRPQLQERITTTVAEIMMDKLKPLGVMVILEAEHMCMTIRGVNKPGARTVTSAVRGAFRNDDKLRSEVMALIKN

SEQ ID NO: 10035 - protein, 188 aa, Listeria weihenstephanensis
  misc_feature (1)..(188): tr|A0A1S7FTJ0|A0A1S7FTJ0_9LIST GTP cyclohydrolase 1 OS= Listeria weihenstephanensis OX=1006155 GN=folE PE=3 SV= 1
MEQIDKQKIADAVKVILEAVGENPEREGLLDTPMRVARMYEEVFSGLKKDPSIHFNTVFEEQHEELVLVKDIRFSSMCEHHLVPFFGVAHVAYLPQNGRVAGLSKLARVVDDVSKRPQLQERITTTVAEIMMDKLKPLGVMVIMEAEHMCMTIRGVNKPGAKTITSAVRGAFRNNDKLRSEVMALIKH

SEQ ID NO: 10036 - protein, 188 aa, Listeria weihenstephanensis; identical to SEQ ID NO: 10035
  misc_feature (1)..(188): tr|W7CMY2|W7CMY2_9LIST GTP cyclohydrolase 1 OS=Listeria weihenstephanensis FSL R9-0317 OX=1265845 GN=folE PE=3 SV=1

SEQ ID NO: 10037 - protein, 189 aa, Listeria welshimeri
  misc_feature (1)..(189): sp|A0AK45|GCH1_LISW6 GTP cyclohydrolase 1 OS=Listeria w elshimeri serovar 6b (strain ATCC 35897 / DSM 20650 / S LCC5334) OX=386043 GN=folE PE=3 SV=1
MEQIDKQKIADAVKVILEAVGENPEREGLIDTPMRVARMYEEVFSGLKKDPSIHFDTIFAEQHEELVLVKDIRFSSMCEHHLVPFFGVAHVAYLPQNGRVAGLSKLARVVDDVSKRPQLQERITTTVAEIMMDKLKPLGVMVIMEAEHMCMTIRGVNKPGTKTITSAVRGAFKNDDKLRSEVLALIKHN

SEQ ID NO: 10038 - protein, 188 aa, Listeriaceae bacterium; identical to SEQ ID NO: 10034
  misc_feature (1)..(188): tr|A0A099WJG9|A0A099WJG9_9LIST GTP cyclohydrolase 1 OS= Listeriaceae bacterium FSL A5-0209 OX=1497679 GN=folE P E=3 SV=1

SEQ ID NO: 10039 - protein, 366 aa, Litoreibacter albidus
  misc_feature (1)..(366): tr|A0A1H2SC31|A0A1H2SC31_9RHOB GTP cyclohydrolase FolE2 OS=Litoreibacter albidus OX=670155 GN=folE2 PE=3 SV=1
MNVHSPKSDEPTREEAEEALALLRQWAGNADPVEVAEMDPLISRLIPGAELANYPALARAYPEDFAVDEAYKASMPDLQNGPSSLIRGAKQHIQHVGISNFRLPIRVHTRDGDDLTLETSVTGTVSLEAEKKGINMSRIMRSFYRHAEQTFSFEVIEETLDAYKTDLESFDARIQMRFSFPMKVDSLRSGLSGYQYYDIALEVVDVAGTRKKILHLDYVYSSTCPCSLELSEHARQFRGQLATPHSQRSVARISVEVDSAATCLWFEDVIELCRAAVPTETQVMVKREDEQAFAELNAANPIFVEDAARSFCAQLQAEPRIKDFRVIASHQESLHSHDAVSVMTEGPTFAADSLDPKLFNTLFHVG

SEQ ID NO: 10040 - protein, 363 aa, Litoreibacter arenae
  misc_feature (1)..(363): tr|S9S1H7|S9S1H7_9RHOB GTP cyclohydrolase FolE2 OS=Lito reibacter arenae DSM 19593 OX=1123360 GN=folE2 PE=3 SV= 1
MNVHTPEPTREEAEAALALLRQWAGKVSAVEVADLDPLVSRLIPGQEVANYPALARAYPEEFAVDEAYRASMPDLQNGPSSLIRGAKQHIQHVGISNFRLPIRVHTRDGGDLTLETSVTGTVSLEAEKKGINMSRIMRSFYAQAEQTFSFDVIEATLDAYKTDLESFDARIQMRFSFPMKMQSLRSGLEGYQYYDIALEVVDTQGTRKKIMHLDYVYSSTCPCSLELSEHARQFRGQLATPHSQRSVARVSVEVDCERNCLWFEDLIELCRAAVPTETQVMVKREDEQAFAELNAANPIFVEDAARSFCEQLQADPRIKDFRVIASHQESLHSHDAVSVMTEGPTFAADSLDPKLFNTLFHVG

SEQ ID NO: 10041 - protein, 363 aa, Litoreibacter ascidiaceicola
  misc_feature (1)..(363): tr|A0A1M4T9G8|A0A1M4T9G8_9RHOB GTP cyclohydrolase FolE2 OS=Litoreibacter ascidiaceicola OX=1486859 GN=folE2 PE =3 SV=1
MNVHTPEPTREEAEAALALLRQWAGKVSAVEVADLDPLVSRLIPGQELANYPALARAYPEEFAVDEAYKASMPDLQNGPSSLIRGAKQHIQHVGISNFRLPIRFHTRGGDDLTLETSVTGTVSLEAEKKGINMSRIMRSFYAQAEQTFSFEVIEATLDAYKTDLESFDARIQMRFSFPMKVQSLRSGLEGYQYYDIALEVVDTQGTRKKILHLDYVYSSTCPCSLELSEHARQFRGQLATPHSQRSVARVSVEVDCERNCLWFEDLIELCRTAVPTETQVMVKREDEQAFAELNAANPIFVEDAARSFCEQLQADPRIKDFRVIASHQESLHSHDAVSVMTEGPTFAADSLDPKLFNTLFHVG

SEQ ID NO: 10042 - protein, 363 aa, Litoreibacter halocynthiae
  misc_feature (1)..(363): tr|A0A4R7LHS8|A0A4R7LHS8_9RHOB GTP cyclohydrolase FolE2 OS=Litoreibacter halocynthiae OX=1242689 GN=folE2 PE=3 SV=1
MNVHTPEPTREEAEAALALLRQWAGKVSPIEVADLDPLVSRLIPGQELANYPALARAYPEEFAVDEAYKATMPDLQNGPSSLIRGAKQHIQHVGISNFRLPIQVHTRDGDDLTLETSVTGTVSLEAEKKGINMSRIMRSFYRHAEQTFSFEVIEQTLDAYKTDLESFDARIQMRFSFPMKVQSLRSGLEGYQYYDIALEVVDTQGTRKKILHLDYVYSSTCPCSLELSEHARQYRGQLATPHSQRSVARVSVEVDSTQTCLWFEDLIELCRAAVPTETQVMVKREDEQAFAELNAANPIFVEDAARSFCEQLQADPRIKDFRVIASHQESLHSHDAVSVMTEGPTFAADSLDPKLFNTLFHVG

SEQ ID NO: 10043 - protein, 366 aa, Litoreibacter janthinus
  misc_feature (1)..(366): tr|A0A1I6HEQ4|A0A1I6HEQ4_9RHOB GTP cyclohydrolase FolE2 OS=Litoreibacter janthinus OX=670154 GN=folE2 PE=3 SV= 1
MNVHAPEPDEPTREEAEAALALLRRWAGKVSPVEVSDLDPLVSRLIPGQELANYPALARAYPEDFAVDEAYKASMPDLQNGPSSLIRGAKQHIQHVGISNFRLPVRVHTRGGGDLTLETSVTGTVSLEAEKKGINMSRIMRSFYKRAEQTFSFEVIEATLDAYKSDLESFDARIQMRFSFPMKVESLRSGLEGYQYYDLALEVVDTQGTRKKIMHLDYVYSSTCPCSLELSEHARQFRGQLATPHSQRSVARVSVEVDCKQNCLWFEDLIELCRAAVPTETQVMVKREDEQAFAELNAANPIFVEDAARSFCEQLKADPRIKDFRVVASHQESLHSHDAVSVMTEGPTFASDSLDPKLFNTLFHVG

SEQ ID NO: 10044 - protein, 363 aa, Litoreibacter meonggei
  misc_feature (1)..(363): tr|A0A497X4M6|A0A497X4M6_9RHOB GTP cyclohydrolase FolE2 OS=Litoreibacter meonggei OX=1049199 GN=folE2 PE=3 SV= 1
MNVHTPEPTREEAEAALALLRQWAGKVSAVEVADLDPLVSRLIPGQELANYPALARAYPEEFAVDEAYKATMPDLQNGPSSLIRGAKQHIQHVGISNFRLPIRVHTRDGDDLTLETSVTGTVSLEAEKKGINMSRIMRSFYAQAEQTFSFEVIEQTLDAYKTDLESFDARIQMRFSFPMKLQSLRSGLEGYQYYDIALEVVDTQGTRKKILHLDYVYSSTCPCSLELSEHARQYRGQLATPHSQRSVARVSVEVDCEQDCLWFEDLIELCRTAVPTETQVMVKREDEQAFAELNAANPIFVEDAARSFCEQLQADPRIKDFRVIASHQESLHSHDAVSVMTEGPTFAADSLDPKLFNTLFHVG

SEQ ID NO: 10045 - protein, 367 aa, Litoreibacter ponti
  misc_feature (1)..(367): tr|A0A2T6BK01|A0A2T6BK01_9RHOB GTP cyclohydrolase FolE2 OS=Litoreibacter ponti OX=1510457 GN=folE2 PE=3 SV=1
MNLHTPDLEREPTRADAERALALLRQWAGSVTDIEVADLDPLVSRLIPGQEVANYPALARAYPEDFAVDDAYKATMPDLQNGPSSLIRGAKQQIQHVGISNFRLPIRFHTRDNGDLTLETSVTGTVSLEAEKKGINMSRIMRSFYKQADETFSFEVIEKTLDAYKTDLESFDARIQMRFSFPMKVQSLRSGLEGYQYYDIALEVVDTAGERKKILHLDYVYSSTCPCSLELSEHARQFRGQLATPHSQRSVARVSVEVDCDADCLWFEDLIEMCRDAVPTETQVMVKREDEQAFAELNAANPIFVEDAARSFCAVLLADERIKDFRVVASHQESLHSHDAVSVLTEGETFASDSLDPKLFNTLFHVG

SEQ ID NO: 10046 - protein, 366 aa, Litoreibacter sp.
  misc_feature (1)..(366): tr|A0A5B8J3R2|A0A5B8J3R2_9RHOB GTP cyclohydrolase FolE2 OS=Litoreibacter sp. LN3S51 OX=2599296 GN=folE2 PE=3 S V=1
MNAPAKPTVTSPDRTDAERALRILRKWVEEADDAEIADLDPVVGRLREDRAVSNYPDLSRVYPEHFEVTADYKAGLPDLQNGPASLIRGARAQIQHVGISNFRLPIRYKLREGGELMLETSVTGTVSLEPEKKGINMSRIMRTFYRHSERTFSFEVIEAVLDDYKTDLESLDARIEMRFSFPVRQKALRSGLEGYQYYDIALELIEHQGQRRKIVHLDYVYSSTCPCSLELSEHARRSRNQLATPHSQRSVARVSVEMLGEECLWFEDLIDICRKAVPTETQVMVKREDEQAFAELNAANPIFVEDAARLFCEHLRADKRIGDFRVVASHQESLHSHDAVSILTHGDTFEVNSLDPRMMASLHHIG

SEQ ID NO: 10047 - protein, 223 aa, Litorilinea aerophila
  misc_feature (1)..(223): tr|A0A540VEM0|A0A540VEM0_9CHLR GTP cyclohydrolase 1 OS= Litorilinea aerophila OX=1204385 GN=folE PE=3 SV=1
MKHETILPVNGHAETVAQSQKVHEPDAPTAAGEDKPYDPVLADLVRQMLVRLGEDPTREGLVRTPQRVARAMGFLTSGYHISLDEVVNDAIFQDDGEEMVLVRDIEFYSLCEHHMLPFFGKVHIAYVPNGKIIGLSKLARIADLYARRLQVQERLTNQIADALEQVLAPRGVAVVAEAVHFCMMMRGVQKQHSATLTRAMRGVFKSDAQLRREFMDAVGQRQG

SEQ ID NO: 10048 - protein, 308 aa, Litorilituus sediminis
  misc_feature (1)..(308): tr|A0A4P6P9K4|A0A4P6P9K4_9GAMM GTP cyclohydrolase FolE2 OS=Litorilituus sediminis OX=718192 GN=folE2 PE=3 SV=1
MPTSMPDIANHTTAQTEGALDWVGMSKIEMPIMLASKGENDRMVSTHIDAFVNLKDPQAKGIHMSRLYLILDELSTSNTLSYQTLVSVLDSFVSSHDDLSDQAKVEFNFEYHLRRKSLISGKEGWKAYPVKLTGLLNQGKLTIELSVEVRYSSTCPCSAALSRQLIQQAFQQKFSGSEQVALNDVHEWLGTSEGIVATPHSQRSIAEVKVKLNNSLNEFPITELVNLLEDALQTPVQAAVKREDEQEFARLNGQNLMFCEDAARRVQHCLNQNEQYDDFWLRINHLESLHAHDAVSITTKGISGGYQP

SEQ ID NO: 10049 - protein, 212 aa, Litorilituus sediminis
  misc_feature (1)..(212): tr|A0A4P6P6P1|A0A4P6P6P1_9GAMM GTP cyclohydrolase 1 OS= Litorilituus sediminis OX=718192 GN=folE PE=3 SV=1
MISLEAALVRDTLVAKGLETPLLPSDMSADEKYLRIKGLLTEVVSTLGLDLQDDSLAETPHRIAKMYVHEIFSGLDYQNFPSISLIENKMAVDEMVKVSNINLTSTCEHHFVTIDGLAKVAYIPKDKILGLSKINRIVRFFAQRPQVQERLTQQILIAIQALTETDNVAVSIEATHYCVKSRGVMDVNSSTSTTALGGIFKSNPQTRAEFLM

SEQ ID NO: 10050 - protein, 308 aa, Litorilituus sp.
  misc_feature (1)..(308): tr|A0A502KPI6|A0A502KPI6_9GAMM GTP cyclohydrolase FolE2 OS=Litorilituus sp. RZ04 OX=2491017 GN=folE2 PE=3 SV=1
MPTSMPDIANHTRAQTEGTLDWVGMSNIEMPIMVASKGEAERMVSAHVDAFVNLKEAQAKGIHMSRLYLLLDELSTNGTLTYQSLVTLLDGFISSHDDLSDQAKVQFNFEYHLRRKSLISGKEGWKAYPVTVTGLLNQGQLTVELAIDVRYSSTCPCSAALARQLIQQAFQDKFSKQSELALADVHEWLGTTEGIVATPHSQRSVAEVKVKLNSQVSDFPITSLVDLIEDSLQTPVQAAVKREDEQEFARLNGQNLMFCEDAARRLQHSMNLATQYDDFWLKINHLESLHAHDAVSITTKGISGGYQP

SEQ ID NO: 10051 - protein, 366 aa, Litorimicrobium taeanense
  misc_feature (1)..(366): tr|A0A1H9ET56|A0A1H9ET56_9RHOB GTP cyclohydrolase FolE2 OS=Litorimicrobium taeanense OX=657014 GN=folE2 PE=3 S V=1
MNLHTPEIDRHPSRDEAAEALQQLRAWATRATPAEIADLDPSLARLLPHTAEDSYPVLSRSYPHAFEVDAAYKDDLPDLQNGPSSLIRGARKPIQHVGISNFRLPIRFHSRDSGDLALETSVTGTVSLEAEKKGINMSRIMRSFYAHAEKTFSFEVIQAALDDYKADLESFDARIQMRFSYPVRVESLRSGLHGYQYYDIALELVELAGQRKKIVHLDYVYSSTCPCSLELSEHARRARGQLATPHSQRSVARISVEVKDGDCLWFEDVIDMARAAVPTETQVMVKREDEQAFAELNAANPIFVEDAARLFCAQLEADPRVGDFRIVASHQESLHSHDAVSILTEGDTFTCDSIDPRLFNTLYHVG

SEQ ID NO: 10052 - protein, 206 aa, Litorimonas taeanensis
  misc_feature (1)..(206): tr|A0A420WE15|A0A420WE15_9RHOB GTP cyclohydrolase 1 OS= Litorimonas taeanensis OX=568099 GN=folE PE=3 SV=1
MKNDTVQKPTLKAVHSAPRPSQEEAMEAVRTLIAWAGDNPDREGLIDTPKRVVKAYKEWFRGYDMDPAEELSRVFEDVSGYDDMVVLREIDVESHCEHHIAPFLGKAYVAYLPTDKVVGISKLVKVVEIFAKRLQTQETMTAQIAEAIDEALKPRGSAIMIDAVHQCMSTRGVHHPDVSTITTQFTGEFKTNPQLQDRFLKLIGKA

SEQ ID NO: 10053 - protein, 384 aa, Loktanella atrilutea
  misc_feature (1)..(384): tr|A0A1M5ARI9|A0A1M5ARI9_9RHOB GTP cyclohydrolase FolE2 OS=Loktanella atrilutea OX=366533 GN=folE2 PE=3 SV=1
MRAPHLRASTPHKGSAVMNLQSRDLDRQPSRAEAEAALSLLRRWAGGATPEEIGALDPLVGRLLPGQAVSNYPALARAYPEDFEVDAAYRATMPDLQNGPASLIRGLPRQIQHVGISNFRLPIRFHTRAGGDLTLETSVTGTVSLDAEKKGINMSRIMRTFYQHAEETFSFDVIERALDAYMTDLDSFDARIQMRFSFPMKVQSLRSGLSGYQYYDIALELVEQSGVRQKIVHLDYVYSSTCPCSLELSEHARQFRGQLATPHSQRSVARLSVVLVPGQRVMWFEDLIDMARAAVPTETQVMVKREDEQAFAELNAANPIFVEDAARLFTEQLHLDQRVGDFRVVASHQESLHSHDAVSVLTEGPTFAAASLDPRLFASLHHAG

SEQ ID NO: 10054 - protein, 367 aa, Loktanella fryxellensis
  misc_feature (1)..(367): tr|A0A1H8GHL3|A0A1H8GHL3_9RHOB GTP cyclohydrolase FolE2 OS=Loktanella fryxellensis OX=245187 GN=folE2 PE=3 SV= 1
MNHHSRDMDRHPSRAEAEAALSLLRRWADTATADEITTLDPLVGRLIPGRAVPDYPALARAYPEDFAVDAAYKASMPDLQNGPSSLIRGAQQQIQHVGISNFRLPIRFHTRDNGDLTLETSVTGTVSLEAEKKGINMSRIMRTFYAHAEETFSFDVIERALDAYKTDLDSFDARIQMRFSFPMKVQSLRSGLQGYQYYDIALELVEQGGVRRKIVHLDYVYSSTCPCSLELSEHARQFRGQLATPHSQRSVARISVALEPGQPVTWFEDLIDMARAAVPTETQVMVKREDEQAFAELNAANPIFVEDAARLFTEQLQLDPRIGDFRVIASHQESLHSHDAVSVLTEGPTFAAQSLDPRLFASLFHVG

SEQ ID NO: 10055 - protein, 367 aa, Loktanella salsilacus
  misc_feature (1)..(367): tr|A0A1I4FTB4|A0A1I4FTB4_9RHOB GTP cyclohydrolase FolE2 OS=Loktanella salsilacus OX=195913 GN=folE2 PE=3 SV=1
MNIQSRDLDRQPSRAEAEAALSLLRRWAGDASAEEIVTLDPQIGSLLPGQSASDYPAMARVYPEDFVVDAAYKATLPDLQNGPTSLIRGAQRQIQHVGISNFRLPIRFHTRDAGDLTLETSVTGTVSLEAEKKGINMSRIMRTFYKHAEETFSFEVIERALDAYKTDLESFDARIQMRFSFPMKVESLRSGLSGYQYYDIALELVETDGVRRKIIHLDYVYSSTCPCSLELSEHARQFRGQLATPHSQRSVARVSVVLEPGQQTAWFEDLIEMARAAVPTETQVMVKREDEQAFAELNAANPIFVEDAARLFAEQLQMDPRIGDYRIVASHQESLHSHDAVSVLTEGPTFAAQSIDPRLFASLFHVG

SEQ ID NO: 10056 - protein, 367 aa, Loktanella sp.
  misc_feature (1)..(367): tr|A0A4Q3YEC6|A0A4Q3YEC6_9RHOB GTP cyclohydrolase FolE2 OS=Loktanella sp. IMCC34160 OX=2510646 GN=folE2 PE=3 S V=1
MNIHSVDLDRDPTRDEAETALALLRRWAGGVTPEEVATLDPLVSRLIPGQEVSNYPALARAYPEDFVVDDDYKASMPDLQNGPESLIKGAKRQIQHVGISNFRLPIRFHTRDNGDLTLETSVTGTVSLEAGKKGINMSRIMRSFYKYAEETFSFAVVERALDAYKADLDSFDARIQMRFSFPMKVKSLRSGLEGFQYYDIALELVEQNGVRKEIVHLDYVYSSTCPCSLELSEHARQFRGQLATPHSQRSVARVSVALEPGSKCLWFEDLIDMARVAVPTETQVMVKREDEQAFAELNAANPIFVEDAARLFAEQLQKDPRIGDFRVIASHQESLHSHDAVSVLTEGETFASQSLDPKLFNTLFHVG

SEQ ID NO: 10057 - protein, 367 aa, Loktanella sp.
  misc_feature (1)..(367): tr|A0A0F4RLV7|A0A0F4RLV7_9RHOB GTP cyclohydrolase FolE2 OS=Loktanella sp. S4079 OX=579483 GN=folE2 PE=3 SV=1
MNMHTSQLNDTLSREDAEAALAVLRRWASAVSAEEVATLDPLVSRLIPGQEVSNYPALARAYPDAFEVDDAYKASMPDLQNGPSSLIKGAKQQIQHVGISNFRLPIRFHTRDGGDLTLETSVTGTVSLDAEKKGINMSRIMRTFYKHAEETFSFDVIERALDAYKTDLESFDARIQMRFSFPMKVESLRSGLSGYQYYDIALELVESAGVRKQIIHLDYVYSSTCPCSLELSEHARQFRGQLATPHSQRSVARLSVLVDQTQSCLWFEDLIDRARLAVPTETQVMVKREDEQAFAELNAANPIFVEDAVRLFTEQLQAENRVSDFRVIASHQESLHSHDAVSVLTEGETFASESLDPKLFATLFHVG

SEQ ID NO: 10058 - protein, 218 aa, Lonepinella koalarum
  misc_feature (1)..(218): tr|A0A5D1ZMB8|A0A5D1ZMB8_9PAST GTP cyclohydrolase 1 OS= Lonepinella koalarum OX=53417 GN=folE PE=3 SV=1
MSNISAEAIKVRDALVVKGIETPMINLAKSKDQRRDEIEQKMRDVLTLIGLDLTDDSIEETPHRLAKMFVDEIFSGLDYVNFPKITNIENRMKVSEMVLVNDVTLTSTCEHHFVTIDGTVSVAYYPKKWVIGLSKINRVIAFFAQRPQVQERLTEQVLLAFQTILETEDVAVYVKATHFCVKCRGIKDSNSYTVTSAFGGVFLEDRETRKEFLSLINK

SEQ ID NO: 10059 - protein, 218 aa, Lonepinella koalarum
  misc_feature (1)..(218): tr|A0A4R1KSW6|A0A4R1KSW6_9PAST GTP cyclohydrolase 1 OS= Lonepinella koalarum OX=53417 GN=folE PE=3 SV=1
MSNILAEAIKVRDALVAKGIETPMINLTKSKDQRRDEIEQKMRDVLTLIGLDLTDDSIEETPHRLAKMFVDEIFSGLDYANFPKITNIENRMKVSEMVLVNDVTLTSTCEHHFVTIDGTVSVAYYPKKWVIGLSKINRVIAFFAQRPQVQERLTEQVLLAFQTILETEDVAVYVKATHFCVKCRGIKDSNSYTVTSAFGGVFLEDRETRKEFLSLINK

SEQ ID NO: 10060 - protein, 219 aa, Longibacter salinarum
  misc_feature (1)..(219): tr|A0A2A8CTU8|A0A2A8CTU8_9BACT GTP cyclohydrolase 1 OS= Longibacter salinarum OX=1850348 GN=folE PE=3 SV=1
MSEKKILSNELRMNGTPHGGPPRLYERRDLYDEQATTSIAENVQEVLSQLGEDPEREGLQKTPERVAKAYQFLTHGYSQDARAILEGALFEEAYDEMILVKDIELYSLCEHHMLPFYGKAHVAYIPNGRIVGLSKIPRTVEVFARRLQVQERLTMQIRDAIDDVLQPLGTAVVIEARHLCMMMRGAEKQNSMTTTSSMSGEFEEHRTRAEFMRLIRATD

SEQ ID NO: 10061 - protein, 219 aa, Longilinea arvoryzae
  misc_feature (1)..(219): tr|A0A0S7B5U9|A0A0S7B5U9_9CHLR GTP cyclohydrolase 1 OS= Longilinea arvoryzae OX=360412 GN=folE PE=3 SV=1
MHIHDDPDDSEYLESMKLQMRQISDEQFHKFEGYAAEIFSAFGLNLNTPATKDTPRRFIKALFDSTEGYDGDPKLLRIFDTECRGEPDCRLSQVVEGPIPFFALCEHHALPFYGMAYVGYIAHENIIGISKLTRLVRIFSKRFAVQERIGQQIADTLETMLHPHGVAVYLEAHHLCMEMRGVRETSPKTRTTVWRGYFAEDPSLRAEFFTACGLQRNER

SEQ ID NO: 10062 - protein, 211 aa, Longilinea arvoryzae
  misc_feature (1)..(211): tr|A0A0S7BK39|A0A0S7BK39_9CHLR GTP cyclohydrolase 1 OS= Longilinea arvoryzae OX=360412 GN=folE PE=3 SV=1
MDDNDGAVYKAAELFMDSEIDVDTIQNAVSSMLEAFGEDPKREGLVKTPDRVARMYEELLAGYRTDPIVMVNDALFDVEYDEMVVVRDIEFYSLCEHHMLPFIGRAHVAYIPKGRVIGLSKIPRVVDMFARRLQVQERMTRQIGDFINELLHPQGVAVVVEALHLCSMIRGVKKHDSRMTTSTMLGAFRTDLALRMEFLDNISRGAQPLHF

SEQ ID NO: 10063 - protein, 217 aa, Longimonas halophila
  misc_feature (1)..(217): tr|A0A2H3NN38|A0A2H3NN38_9BACT GTP cyclohydrolase 1 OS= Longimonas halophila OX=1469170 GN=folE PE=3 SV=1
MAEKKIVTDDIVENGTVVGDYPTHYERRDMYDAETTRDVADHVASIIQKLGEDPEREGLVKTPERVAKAYQFLTQGYAQDPKAILRQAMFEETYNEIILVKDIEVYSLCEHHMLPFFGKAHVAYIPDGHIVGLSKIPRTVEVFARRLQVQERLTLQIREAIDEVLKPQGAAVVIEAQHLCMMMRGVEKQNSCTTTSAVSGAFRNHSTRDEFMRLVRS

SEQ ID NO: 10064 - protein, 221 aa, Lonsdalea britannica
  misc_feature (1)..(221): tr|A0A1X3RUR8|A0A1X3RUR8_9GAMM GTP cyclohydrolase 1 OS= Lonsdalea britannica OX=1082704 GN=folE PE=3 SV=1
MSSPLTQEAALVHEALLARGLETPLRGEMLDRETRKSRIAEHMTEIMNLLSLDLTDDSLTETPHRIAKMYVDEIFSGLDYTNFPKITIIQNKMKVDEMVTVRDITLTSTCEHHFVTIDGKATVAYIPKDGVIGLSKINRIVQFFSQRPQVQERLTQQILVALQTLLGTNNVAVSIDAVHYCVKARGIRDATSATTTTSLGGLFKSSQNTRQEFLRAVRHHN

SEQ ID NO: 10065 - protein, 221 aa, Lonsdalea iberica
  misc_feature (1)..(221): tr|A0A1X3RZZ6|A0A1X3RZZ6_9GAMM GTP cyclohydrolase 1 OS= Lonsdalea iberica OX=1082703 GN=folE PE=3 SV=1
MSSPLTQEAALVHEALLARGLETPLRGEMLDRETRKSRIAEHMTEIMNLLSLDLTDDSLTETPHRIAKMYVEEIFAGLDYTNFPKITIIQNKMKVDEMVTVRDITLTSTCEHHFVTIDGKATVAYIPKDGVIGLSKINRIVQFFSQRPQVQERLTQQILVALQTLLGTNNVAVSIDAVHYCVKARGIRDATSATTTTSLGGLFKSSQNTRQEFLRAVRHHN

SEQ ID NO: 10066 - protein, 221 aa, Lonsdalea populi
  misc_feature (1)..(221): tr|A0A3N0UJ51|A0A3N0UJ51_9GAMM GTP cyclohydrolase 1 OS= Lonsdalea populi OX=1172565 GN=folE PE=3 SV=1
MSSPLTQEAALVHEALLARGLETPLCGEMLDRETRKTRIAEHMTEIMNLLSLDLTDDSLMETPHRIAKMYVDEIFSGLDYTNFPKITIIQNKMKVDEMVTVRDINLTSTCEHHFVTIDGKATVAYIPKDGVIGLSKINRIVQFFSQRPQVQERLTQQILVALQTLLGTNNVAVSIDAVHYCVKARGIRDATSATTTTSLGGLFKSSQNTRQEFLRAVRHHN

SEQ ID NO: 10067 - protein, 221 aa, Lonsdalea quercina
  misc_feature (1)..(221): tr|A0A1H4BPV3|A0A1H4BPV3_9GAMM GTP cyclohydrolase 1 OS= Lonsdalea quercina OX=71657 GN=folE PE=3 SV=1
MSSPLTQEAALVHEALLARGLETPLRGEMLDRETRKSRIAEHMTEIMNLLSLDLTDDSLTETPHRIAKMYVEEIFAGLDYTNFPKITIIQNKMKVDEMVTVRDITLTSTCEHHFVTIDGKATVAYIPKDGVIGLSKINRIVQFFAQRPQVQERLTQQILIALQTLLGTNNVAVSIDAVHYCVKARGIRDATSATTTTSLGGLFKSSQNTRQEFLRAVRHHN

SEQ ID NO: 10068 - protein, 263 aa, Lucifera butyrica
  misc_feature (1)..(263): tr|A0A498R2J7|A0A498R2J7_9FIRM GTP cyclohydrolase FolE2 OS=Lucifera butyrica OX=1351585 GN=folE2 PE=3 SV=1
MRDVQNSSDMRGIAIQKVGVKDVHLPFLIKTKEGHFQSVLAKIELTVDLPQEFKGTHMSRFIEVLSDWSQKPVSGREMENILTDTIQRLNAQSAELAIRFKYFVEKVAPVSQLKSMLDYDCSFTGKLAQGGKLDFTMGLAVPFTSLCPCSKEISRYGAHNQRGLMRVNLKYAKGKFIWIEDLAALMEAQGSCPVYPLLKREDEKYVTERAYENPKFVEDILRDLVLALRALDGVEWFEIHCENYESIHNHSAYAAHVETVGIC

SEQ ID NO: 10069 - protein, 184 aa, Luminiphilus syltensis
  misc_feature (1)..(184): tr|B8KRR5|B8KRR5_9GAMM GTP cyclohydrolase 1 OS=Luminiph ilus syltensis NOR5-1B OX=565045 GN=folE PE=3 SV=1
MEHHWQSIIEAIGEDVTRPGLEDTPKRAAKAFKFLTRGYDQELDTVVNNALFPTDSSEMVLVQDIEMYSLCEHHMLPFIGRCHVAYIPTGKVLGLSKVARIVDMYARRLQIQEQLTLQIANAVQQVTDAEGVGVIIEAEHMCMMMRGVEKQNSVTKTSTMLGSFREDARTRREFLSLLQLPRIR

SEQ ID NO: 10070 - protein, 226 aa, Lunatimonas lonarensis
  misc_feature (1)..(226): tr|R7ZLR2|R7ZLR2_9BACT GTP cyclohydrolase 1 OS=Lunatimo nas lonarensis OX=1232681 GN=folE PE=3 SV=1
MNTKDIDLVNAFDEMGDSHAASSHDTPLREDAFEMDDELKMELIEKHFREIMHILGLDLTDDSLRGTPKRVAKMFVQEVFSGLDPKNKPVGKLFENKYHYNEMLVEKDITFYSHCEHHFVPIYGKAHVAYISNGKVIGLSKINRIVQYYSKRPQVQERLTMQIGNELKEMLGTEDVAVVMDAYHMCVSSRGVKDVNSSTITSFYSGKFKEDEKRRTEFLKYLTLKK

SEQ ID NO: 10071 - protein, 307 aa, Luteibacter pinisoli
  misc_feature (1)..(307): tr|A0A4Y5Z4K3|A0A4Y5Z4K3_9GAMM GTP cyclohydrolase FolE2 OS=Luteibacter pinisoli OX=2589080 GN=folE2 PE=3 SV=1
MYIQDSPTRLLPDVASQEHALSIGTLDWVGMDGMEMPVAFDAGDGDVRSTGARVGAFVNLTQPEKRGIHMSRLYLLVSEALSAGPLTIGGIRALLGEFLSSHEGLSDHARITIGFEHLVRRRALRSDNSGWRAYPITIDATLRGNQFHLEVTTDVVYSSTCPASAALSRQLIQDNFAKSFPAEQALDRETILAWLGTEQGIIATPHAQRSTATIRVAPKGDQVFDLIGMIDRVEAALGTPVQTAVKRADEQAFALANGSNLMFCEDAARRIQKTLEAEPAVADFHVRVAHHESLHPHDAVAFASKAR

SEQ ID NO: 10072 - protein, 198 aa, Luteibacter pinisoli
  misc_feature (1)..(198): tr|A0A4Y5ZA28|A0A4Y5ZA28_9GAMM GTP cyclohydrolase 1 OS= Luteibacter pinisoli OX=2589080 GN=folE PE=3 SV=1
MSDDSSSRPVTREQAEEAVRTLLLWAGEDPKREGLLDTPKRVVKAYSDWFKGYDEDPAEYLRRTFKEVEGYDEMIVLRDIEFESHCEHHMAPIIGRAHVGYVPTDRVVGISKLARVVDGFARRFQVQEKLTAQIAHCIEDTLRPRGVGVVIDASHECMTTRGVHKRGVSMVTSQMLGSFREDPRTRGEFLRFVGVDRR

SEQ ID NO: 10073 - protein, 198 aa, Luteibacter rhizovicinus
  misc_feature (1)..(198): tr|A0A0G9HBH7|A0A0G9HBH7_9GAMM GTP cyclohydrolase 1 OS= Luteibacter rhizovicinus DSM 16549 OX=1440763 GN=folE P E=3 SV=1
MSDDATSRPVTREQAEEAVRTLLLWSGEDPTREGLLDTPKRVVKAYSDWFKGYDEDPAEYLRRTFKEVEGYDEMIVLRDIEFESHCEHHMAPIIGRAHVGYVPTDRVVGISKLARVVDGFARRFQVQEKLTAQIAHCIEDTLRPRGVGVVIDASHECMTTRGVHKRGVSMVTSQMLGSFREDPRTRGEFLRFVGVDRR

SEQ ID NO: 10074 - protein, 198 aa, Luteibacter rhizovicinus
  misc_feature (1)..(198): tr|A0A4R3YU35|A0A4R3YU35_9GAMM GTP cyclohydrolase 1 OS= Luteibacter rhizovicinus OX=242606 GN=folE PE=3 SV=1
MSDDAKPGSVTREQAEEAVRTLLVWAGEDPSREGLLDTPKRVVKAYSDWFNGYAVDPAEYLRRTFEEVAGYDEMVVLRDIEFESHCEHHMAPIVGRAHVGYIPTDRVVGISKLARVVDGFARRFQVQEKLTAQIAHCIDETLRPRGVGVVIDASHECMTTRGVHKRGVSMVTSQMLGSFREDPRTRGEFLRFVGVDRR

SEQ ID NO: 10075 - protein, 307 aa, Luteibacter sp.
  misc_feature (1)..(307): tr|A0A1K1NG47|A0A1K1NG47_9GAMM GTP cyclohydrolase FolE2 OS=Luteibacter sp. UNCMF366Tsu5.1 OX=1502758 GN=folE2 PE=3 SV=1
MYIHDSPHRLLPDVASQEHALAVGTLDWVGMDGMEMPVAFDAGDGDVRSTGARVGAFVDLKKPEARGIHMSRLYLLVSDALSAGPLTVAGVRSLLQSFLSSHEGLSDRARITIGFEHLVRRKSLRSENSGWRAYPVTIDATLNGDDFRIEITTDVVYSSTCPASAALSRQLIQDNFAKTFAAGEPLDRETILAWLGTEQGIVATPHAQRSTATIRVRPVGEGVFPLVDMIDNVEAALGTPVQTAVKRADEQAFALANGQNLMFCEDAARRIQKTLEADPRIADFHLRVAHHESLHPHDAVAFASKAR

SEQ ID NO: 10076 - protein, 308 aa, Luteibacter sp.
  misc_feature (1)..(308): tr|A0A1I0MDH8|A0A1I0MDH8_9GAMM GTP cyclohydrolase FolE2 OS=Luteibacter sp. 329MFSha OX=1798239 GN=folE2 PE=3 S V=1
MYIHDSPTRLLPDVASQEHALAIGTLDWVGMDGMEMPVAFDAGDGDVRSTGARVGAFVNLTKPEARGIHMSRLYLLVSDALSAGPLTVAGVRGLLESFLSSHEGLSDHARITIGFEHLVRRKSLRSDNSGWRAYPITIDATLSGSEFCLQITTDVVYSSTCPASAALSRQLIQDNFAKTFAADQPLDRETILAWLGTEQGIVATPHAQRSTATIRVKPTGEGVFNLIGMIDNVENALGTPVQTAVKRADEQAFALANGQNLMFCEDAARRIQKALSDDGNIADFHLRVAHHESLHPHDAVAFASKVQR

SEQ ID NO: 10077 - protein, 198 aa, Luteibacter yeojuensis
  misc_feature (1)..(198): tr|A0A0F3KZM2|A0A0F3KZM2_9GAMM GTP cyclohydrolase 1 OS= Luteibacter yeojuensis OX=345309 GN=folE PE=3 SV=1
MSDESRSRPVTREQAEEAVRTLLLWAGEDPKREGLLDTPKRVVKAYGDWFKGYDEDPAEYLRRTFKEVEGYDEMIVLRDIEFESHCEHHMAPIIGRAHVGYVPTDRVVGISKLARVVDGFARRFQVQEKLTAQIAHCIEDTLRPRGVGVVIDASHECMTTRGVHKRGVSMVTSQMLGSFREDPRTRGEFLRFVGVDRR

SEQ ID NO: 10078 - protein, 308 aa, Luteibacter yeojuensis
  misc_feature (1)..(308): tr|A0A561HAZ4|A0A561HAZ4_9GAMM GTP cyclohydrolase FolE2 OS=Luteibacter yeojuensis OX=345309 GN=folE2 PE=3 SV=1
MYIQDSPTRLLPDVASQEHALAIGTLDWVGMDGMEMPVAFDAGDGDVRATGARVGAFVNLNKSEARGIHMSRLYLLVSEALSAGPLTIGGIRDLLGQFLSSHEGLSDHARITIGFEHLVRRRALRSDNSGWRAYPITVDATLKGEAFHVEITTDVVYSSTCPASAALSRQLIQDSFAKAFPADQSMDRETILAWLGTEQGIVATPHAQRSTATIRVRPAGEGTFDLIGMIDRVESALGTPVQTAVKRADEQAFALANGSNLMFCEDAARRIQKTLDADDGIADFHVRVAHHESLHPHDAVAFSSKVRR

SEQ ID NO: 10079 - protein, 218 aa, Luteibaculum oceani
  misc_feature (1)..(218): tr|A0A5C6V0G9|A0A5C6V0G9_9FLAO GTP cyclohydrolase 1 OS= Luteibaculum oceani OX=1294296 GN=folE PE=3 SV=1
MKPETILQNITVSKNGESEEAYERIDRYHEKSIEKLSGLYEGVIQEIGEDPTREGLLKTPERVAKAIQFLTHGYSLDPAEILKSAMFKEEYRQMVLVKEIELYSMCEHHMLPFFGKAYVAYIPDGQIVGLSKIPRVVDAYARRLQVQERLTYQIRDCIQETLRPLGVAVVIEAQHMCMQMRGVQKQNSVTTTSAFTGEFLKENTRNEFISLISSDLNK

SEQ ID NO: 10080 - protein, 192 aa, Luteimicrobium subarcticum
  misc_feature (1)..(192): tr|A0A2M8WSM8|A0A2M8WSM8_9MICO GTP cyclohydrolase 1 OS= Luteimicrobium subarcticum OX=620910 GN=folE PE=3 SV=1
MSDKKSPVDLARAEAAVRELLLAIGEDPDRDGLADTPARVARSYREIFRGLHQSPAEVLSTTFDLGHEEMILVKDIEVYSTCEHHLVPFHGVAHVGYIPRDGRVTGLSKLARLVDVYAKRPQVQERLTSQVADALVEHLDALGVIVVVECEHLCMSMRGVRKPGARTVTSAVRGQMRDPATRAEAMSLILGR

SEQ ID NO: 10081 - protein, 211 aa, Luteimonas aestuarii
  misc_feature (1)..(211): tr|A0A4R5TMJ7|A0A4R5TMJ7_9GAMM GTP cyclohydrolase 1 OS= Luteimonas aestuarii OX=453837 GN=folE PE=3 SV=1
MSTLRSRGPPVSKHDDTRNGVPRDQAEEAVRTLLRWAGEDPAREGLLDTPKRVANAYGEWFSGYALDPDEYLARTFEEVAGYDEMIVLRDIEFESHCEHHMAPIIGRVHVGYLPKGKVVGISKLARVVEAYSKRFQVQEKMTAQIAGCIQRALAPHGVGVVVDGAHECMTTRGVHKRGVSMITSTMLGSFREDARTRAEFLRFIEAGGGRR

SEQ ID NO: 10082 - protein, 298 aa, Luteimonas aestuarii
  misc_feature (1)..(298): tr|A0A4V3ALZ4|A0A4V3ALZ4_9GAMM GTP cyclohydrolase FolE2 OS=Luteimonas aestuarii OX=453837 GN=folE2 PE=3 SV=1
MPDVAGDAARAARTLDWVGMDRIALPVRIAGEAGVAMQVPAAVDIAVDLRDADVRGIHMSRLYLRLQDALTAESPSHAGLRRVLQDCIDSQQGLSTRARIAIRYEHLLKRRALASDNSGWKAYPVEIVATLADGHLALDMTFSVDYSSTCPASAALSRQLNADRFAEDFATSGAVPAAGVRDWLASERGLAATPHAQRSRATITVGLRPAFDELPLASLVDAVEAALGTPVQTAVKREDEQAFAALNAANLMFCEDSARRIAAVLAGDARVEHYDATVSHLESLHAHDAVARVSGRNA

SEQ ID NO: 10083 - protein, 310 aa, Luteimonas cucumeris
  misc_feature (1)..(310): tr|A0A562L7E4|A0A562L7E4_9GAMM GTP cyclohydrolase FolE2 OS=Luteimonas cucumeris OX=985012 GN=folE2 PE=3 SV=1
MSSSPSIPSRLPDVADDAVALARQLSWVGMDRIALPLRVHGADGDTLQVAASIDAAVNLQDAGARGIHMSRLYLRLQDAFAGEALTPAGLRRVLQDMVESQRGLSTAARLVIRYDLLLKRRALASEHSGWKNYPVEIEATLRDGHLKLAVAFAAEYSSTCPASAALSRQLNAERFAEDFANAHPLSTGVVSEWLHSERGLAATPHAQRSRADVRVELRAAFDELPFTALIDSVEQAVGTPVQTAVKREDEQAFARLNAENLMFCEDAARRVAAALADDARVDRYDVTVSHFESLHAHDAVARVSGVGNRS

SEQ ID NO: 10084 - protein, 199 aa, Luteimonas cucumeris
  misc_feature (1)..(199): tr|A0A562KWL0|A0A562KWL0_9GAMM GTP cyclohydrolase 1 OS= Luteimonas cucumeris OX=985012 GN=folE PE=3 SV=1
MASNQDSSDVSRAQAEDAVRVLLRWAGEDPAREGLLDTPKRVVEAYRDWFSGYSDDPQEFLARTFKEVAGYDEMIVLRDIEFESHCEHHMAPIIGRAHVGYLPDGKVVGISKLARVVETYARRFQVQEKMTAQIATVIQEVLNPRGVGVVIEATHECMTTRGIHKRGVSMVTSKMLGGFRDDARTRAEFLRFIRDGHVG

SEQ ID NO: 10085 - protein, 308 aa, Luteimonas marina
  misc_feature (1)..(308): tr|A0A5C5UCZ8|A0A5C5UCZ8_9GAMM GTP cyclohydrolase FolE2 OS=Luteimonas marina OX=488485 GN=folE2 PE=3 SV=1
MVTTSSPRELPDVAGDAARAARALDWVGMDRIALPVRVAGADGDAPILVPASVDVAVDLRDPDARGIHMSRLYLRLQDALAAEPPGHAALRRVLQDCIDSQQGLSTRARIVIRYGHMLRRPALASDNAGWKTYPVELVAELADGHLALDLSFAVEYSSTCPASAALSRQLNAQRFAADFAAAKPLSTGVVRDWLASERGLAATPHAQRSRADVIVRLRPAFDQLPLAELVDAIEDALGTPVQTAVKREDEQAFAALNAANLMFCEDAARRVAAALAADARVERFDATVSHFESLHAHDAVARVSSAPR

SEQ ID NO: 10086 - protein, 200 aa, Luteimonas marina
  misc_feature (1)..(200): tr|A0A5C5U852|A0A5C5U852_9GAMM GTP cyclohydrolase 1 OS= Luteimonas marina OX=488485 GN=folE PE=3 SV=1
MSNQDDARNGVPRAQAEDAVRTLLRWAGEDPAREGLLDTPKRVVNAYTEWFNGYELDPDEYLARTFKEVAGYDEMIVLRDIEFESHCEHHMAPIIGRVHVGYLPDGKVVGISKLARVVEAYARRFQVQEKMTAQIAGCIQRALAPQGVGVVVDGSHECMTTRGVHKRGVSMVTSTMLGSFREDARTRAEFLRFIETGHRR

SEQ ID NO: 10087 - protein, 303 aa, Luteimonas sp.
  misc_feature (1)..(303): tr|A0A0H1ATE6|A0A0H1ATE6_9GAMM GTP cyclohydrolase FolE2 OS=Luteimonas sp. FCS-9 OX=1547516 GN=folE2 PE=3 SV=1
MNLPLPDVSLTEAASGASPLEWVGMQGIDLPVLLAEPGYRRVLHARADAQVDLPATHVKGIHMSRLYRLLDDGLGEDAALSPEGLRQLLQAMIASHGDCNSRNARLRLSFDLLVRRPALVSEGLAGWKAYPVTIHAALIGEVLTLRALVTVGYSSTCPCSAALSRQLVERGFLSAFPGPGSVEPAAVAAWLRRHATLATPHSQRSQAQVGIDVAPDVSTLGLLDLIGRVEQAVGTPVQTAVKRADEQAFAALNGQNLMFVEDAARRIHEALHETSANLRVHVRHLESLHPHDAVAWAGGGGLG

SEQ ID NO: 10088 - protein, 203 aa, Luteimonas sp.
  misc_feature (1)..(203): tr|A0A290XHQ5|A0A290XHQ5_9GAMM GTP cyclohydrolase 1 OS= Luteimonas sp. 100111 OX=2006110 GN=folE PE=3 SV=1
MTRSPDDDARHGVSRDEAESAVRTLLRWAGEDPAREGLLDTPRRVAKAYTEWFSGYALDADAYLARTFEEVAGYDEMIVLRDIEYESHCEHHMAPIIGKVHVGYLPAGKVVGISKLARVVEAYARRFQVQEKMTAQIAGCIQRALAPLGVGVVVEGAHECMTTRGVHKRGVSMITSTMLGSFREDARTRAEFLQFIQVGGVRR

SEQ ID NO: 10089 - protein, 203 aa, Luteimonas terrae
  misc_feature (1)..(203): tr|A0A4R5U666|A0A4R5U666_9GAMM GTP cyclohydrolase 1 OS= Luteimonas terrae OX=1530191 GN=folE PE=3 SV=1
MTQSPDFDARHGVSRDDAESAVRTLLRWAGEDPAREGLLDTPRRVADAYTEWFSGYATDADAYLARTFEEVAGYDEMIVLRDIEYESHCEHHMAPIIGKVHVGYLPAGKVVGISKLARVVEAYAKRFQVQEKMTAQIAGCIQRALAPLGVGVVVEGAHECMTTRGVHKRGVSMITSTMLGSFREDARTRAEFLQFIEVGGGRR

SEQ ID NO: 10090 - protein, 304 aa, Luteimonas terrae
  misc_feature (1)..(304): tr|A0A4R5UCW6|A0A4R5UCW6_9GAMM GTP cyclohydrolase FolE2 OS=Luteimonas terrae OX=1530191 GN=folE2 PE=3 SV=1
MSTASNTDRLPDVAGDKAQAARLLDWVGMGNIALPLRIEDANGGAVTVPASADIGVNLVDPDARGIHMSRLYLHLQDALSSRTLDRAALETVLRDCIESQRGLADRVQLTLRYGQLLRRPALASAHSGWKTYPVEIDAVLGPAGLALTLSLSVEYSSTCPASAALSRQLNAARFAGDFNTDTAGYDAVRDWLESPRGLAATPHAQRSRADVRLVLADSVDAFPILAIVDALEHALGTPVQTAVKREDEQAFASLNAENLMFCEDAARRVAAALSTDPRIACFDAKVSHFESLHAHDAVARVSGP

SEQ ID NO: 10091 - protein, 192 aa, Luteipulveratus halotolerans
  misc_feature (1)..(192): tr|A0A0L6CE56|A0A0L6CE56_9MICO GTP cyclohydrolase 1 OS= Luteipulveratus halotolerans OX=1631356 GN=folE PE=3 SV =1
MSTPRGIDLPRAAAAVRELLIALGEDPEREGLQDTPDRVARAYAEQFAGMHQDPAEALSRTFDVDHDEMVLVRDIEVYSTCEHHLVPFHGVAHVGYIPSKTGRVTGLSKLARLVDVFAKRPQVQERLTTQIADAIVDHLDAQGVIVVLECEHLCMSMRGVRKPGARTLTSAVRGQLRDPATRAEAMSLVMGR

SEQ ID NO: 10092 - protein, 192 aa, Luteipulveratus mongoliensis
  misc_feature (1)..(192): tr|A0A0K1JNB1|A0A0K1JNB1_9MICO GTP cyclohydrolase 1 OS= Luteipulveratus mongoliensis OX=571913 GN=folE PE=3 SV= 1
MSTPRPIDHERAAAAVRELLIAVGEDPDREGLKDTPDRVARAYAEAFAGMVQEPADVLARTFDVAHDELVLVKDIEVYSTCEHHLVPFHGLAHVGYIPDEHGRITGLSKLARLVDVFAKRPQVQERLTTQIADALTEHLNARGVIVVLECEHLCMSMRGVRKPGARTVTSAVRGQLRNPATRAEAMSLVMGR

SEQ ID NO: 10093 - protein, 148 aa, Luteitalea pratensis
  misc_feature (1)..(148): tr|A0A143PSB3|A0A143PSB3_9BACT GTP cyclohydrolase 1 OS= Luteitalea pratensis OX=1855912 GN=folE PE=3 SV=1
MKFLTSGYAADIGDILNGALFTVDYSEMVIVKDVDYYSLCEHHLLPFFGKCHVAYIPRTQVIGISKIPRLVDVFSRRLQVQERLTNEIAECIREAVDPLGVGVIMHGTHLCMAMRGVEKQNSATVTSAMLGTFRSDARTRAEFLQLAQ

SEQ ID NO: 10094 - protein, 195 aa, Luteococcus japonicus
  misc_feature (1)..(195): tr|A0A1R4ICP9|A0A1R4ICP9_9ACTN GTP cyclohydrolase 1 OS= Luteococcus japonicus LSP_Lj1 OX=1255658 GN=folE PE=3 S V=1
MSDIGKDIDQDRIAAAVREILYAVGEDPDREGLRETPARVARSYAEIFAGLGQDPAELLGTTFDISHDEMVLVRDIELWSMCEHHLVPFTGVAHVGYIPAKDGRVTGLSKLARLVDLYAKRPQVQERLTTQVADAIVEHLHARGVIVVIECEHLCMTMRGVRKPGAKTVTSAVRGYLRESATRAEAMALIMGGHR

SEQ ID NO: 10095 - protein, 209 aa, Luteococcus japonicus
  misc_feature (1)..(209): tr|A0A3N1ZTZ2|A0A3N1ZTZ2_9ACTN GTP cyclohydrolase 1 OS= Luteococcus japonicus OX=33984 GN=folE PE=3 SV=1
MCRATRGDGAYHGGVSDIGKDIDQDRIAAAVREILYAVGEDPDREGLRETPARVARSYAEIFAGLGQDPAELLGTTFDISHDEMVLVRDIELWSMCEHHLVPFTGVAHVGYIPAKDGRVTGLSKLARLVDLYAKRPQVQERLTTQVADAIVEHLHARGVIVVIECEHLCMTMRGVRKPGAKTVTSAVRGYLRESATRAEAMALIMGGHR

SEQ ID NO: 10096 - protein, 233 aa, Lutibacter agarilyticus
  misc_feature (1)..(233): tr|A0A238YQY3|A0A238YQY3_9FLAO GTP cyclohydrolase 1 OS= Lutibacter agarilyticus OX=1109740 GN=folE PE=3 SV=1
MKHQETLLNFPTNGNKLNGFSFDEIGDDHLYTGIDTPLTKDAFKLSDDEKKDKIAGLFAEIMQVMGLDLTDDSLNGTPKRVAKMYIDEIFSGLNPENKPKIALFENKYQYSQMLVEKNIQFYSNCEHHFVPIFGKVHVAYVSSGKVIGLSKINRIVQYFANRPQVQERLTNQIALELASVLETDDIAVIIDAKHLCVASRGIKDDSSATVTSYYGGIFNKPEKIVELQNYLKQ

SEQ ID NO: 10097 - protein, 228 aa, Lutibacter agarilyticus
  misc_feature (1)..(228): tr|A0A238XPD7|A0A238XPD7_9FLAO GTP cyclohydrolase 1 OS= Lutibacter agarilyticus OX=1109740 GN=folE PE=3 SV=1
MFEGKNIMIDKIDEMGEDHVGSSAKTPLRADAFDISNEEKRKRIEASVRDILDTLGMDLDDDSIKGTPRRVAKAYVNEIFGGLDPANKPKLSTFDNNYKYGEMLVEKNITVYSTCEHHLLPIIGRAHVAYISNGNVIGLSKMNRIVDYYAKRPQVQERLTMQVVQALQEAMGTENVACVIDAKHLCVNSRGVKDIASSTVTAEFGGKFKDPAVKKEFMDYINLDTIFE

SEQ ID NO: 10098 - protein, 233 aa, Lutibacter flavus
  misc_feature (1)..(233): tr|A0A238VTG0|A0A238VTG0_9FLAO GTP cyclohydrolase 1 OS= Lutibacter flavus OX=691689 GN=folE PE=3 SV=1
MKHQETLLNTPINGTKLNGFTFDEIGDDHLYTGIETPMTRDAFVLSDDEKKEKISHLFAQIMDVMGLDLTDDSLKGTPKRVAKMYIDEIFSGLNPVNKPKIALFDNKYQYNQMLVEKNIQFYSNCEHHFVPIFGKVHVAYVSSGKVIGLSKINRIVQYFANRPQVQERLTNQIALELSDILETDDVAVIIDAKHLCVASRGIKDDSSATVTSFFGGVFNNSKKIVELQNYLKL

SEQ ID NO: 10099 - protein, 228 aa, Lutibacter flavus
  misc_feature (1)..(228): tr|A0A238VC47|A0A238VC47_9FLAO GTP cyclohydrolase 1 OS= Lutibacter flavus OX=691689 GN=folE PE=3 SV=1
MFEGKDIMTNKIDERGDDHVGSSAKTPLRADAFDISDLEKVKRIQESVKDILETLGMDLEDDSLKGTPKRVAKAFVNELFSGLNPNNKPKLSTFDNNYKYGEMLVEKNITVYSTCEHHLLPIVGRAHVAYISSGRVIGLSKMNRLVDYFAKRPQVQERLTMQVVQALQLALGTDDVACVIDAKHLCVNSRGVRDIESSTVTSEFGGKFKDKEVRREFLDYIKMDTDFE

SEQ ID NO: 10100 - protein, 231 aa, Lutibacter maritimus
  misc_feature (1)..(231): tr|A0A1I6NV43|A0A1I6NV43_9FLAO GTP cyclohydrolase 1 OS= Lutibacter maritimus OX=593133 GN=folE PE=3 SV=1
MFESKNIMTNKIDERGDDHVGSSAKTPLRADAFEISDEEKRNRIESSVRDILETLGMDLQDDSLKGTPRRVAKAFVNELFSGLNPANKPKLSTFDNNYKYGEMLVEKNITVYSTCEHHLLPIVGRAHVAYISNGNVIGLSKMNRIVDYFAKRPQVQERLTMQVVQALQEALGTDDVACVIDAKHLCVNSRGVRDIESSTVTSEFGGKFKDKDIRREFLDYIKMDTNFNEIQ

SEQ ID NO: 10101 - protein, 224 aa, Lutibacter maritimus
  misc_feature (1)..(224): tr|A0A1I6SRX6|A0A1I6SRX6_9FLAO GTP cyclohydrolase 1 OS= Lutibacter maritimus OX=593133 GN=folE PE=3 SV=1
MKTTTTNNFDLITIDEIGDNHLYTTLETPMKKNAHKLSDTEKKETISYLFREIMDVLGLDLTDDSLKGTPDRVAKMYVDEIFAGLNPKNKPKIALFDNKYQYNQMLVEKNITFYSNCEHHFVPIFGKVHIAYISSGKVIGLSKLNRIVQYFALRPQVQERMTMQIGKELQEILQTDDVAVIVDAKHLCVASRGIKDDTSATVTTFYGGAFNNQQKIAELQNYLQ

SEQ ID NO: 10102 - protein, 233 aa, Lutibacter oceani
  misc_feature (1)..(233): tr|A0A3D9RJ02|A0A3D9RJ02_9FLAO GTP cyclohydrolase 1 OS= Lutibacter oceani OX=1853311 GN=folE PE=3 SV=1
MKHQETLLKFPINGTKLNGFTFDEIGDDHLYTGIETPLTADAFDISDEEKKDKIANLFSQIMEVMGLDLTDDSLKGTPKRVAKMYIEEIFSGLNPANKPKIALFENKYKYNQMLVEKNIQFYSNCEHHFVPIFGKVHVAYVSSGKVIGLSKINRIVQYFANRPQVQERLTNQIALELAEILDTKDIAVIVDAKHLCVASRGIKDDSSATVTSYYGGVFNTPEKIVELQNYLKL

SEQ ID NO: 10103 - protein, 228 aa, Lutibacter oceani
  misc_feature (1)..(228): tr|A0A3D9RZZ2|A0A3D9RZZ2_9FLAO GTP cyclohydrolase 1 OS= Lutibacter oceani OX=1853311 GN=folE PE=3 SV=1
MFEGKDIMTNKIDEIGDDHVGSSAKTPLRADAFDISDAEKRDRIEANIRDILDALGMDLEDDSIKGTPRRVAKAFVNELFSGLNPANKPKLSTFDNNYKYGEMLVEKNITVYSTCEHHLLPIVGRAHVAYISNGNVIGLSKMNRIVDYFAKRPQVQERLTMQVVQALQKALGTEDVACVIDAKHLCVNSRGVRDIESSTVTSEFGGKFKDKEVRREFLDYIKMDTDFE

SEQ ID NO: 10104 - protein, 233 aa, Lutibacter oricola
  misc_feature (1)..(233): tr|A0A1H3A8N6|A0A1H3A8N6_9FLAO GTP cyclohydrolase 1 OS= Lutibacter oricola OX=762486 GN=folE PE=3 SV=1
MKHPETLSNIHTSNNVLEGFSLEEIGDDHLYTGLETPLKKDAFELSDNFKKEQIADLFAQIMEVMGLDLTDDSLKGTPKRVAKMYIDEIFSGLNPANKPKIALFDNKYKYNQMLVEKNIQFYSNCEHHFVPIFGKVHVAYVSSGKVIGLSKINRIVKYFANRPQVQERLTNQIAKELENILNTKDIAVIVDAKHLCVASRGIKDDSSATVTSYYGGVFKSQDKIVELQNYLKL

SEQ ID NO: 10105 - protein, 220 aa, Lutibacter oricola
  misc_feature (1)..(220): tr|A0A1H3EV85|A0A1H3EV85_9FLAO GTP cyclohydrolase 1 OS= Lutibacter oricola OX=762486 GN=folE PE=3 SV=1
MNKEQIDIIGDNHISSNVDTPMRANAFEKSNDEKIKNIQHYFGKIMEELGLDLTDDSLSGTPYRVAKMYVKELFYGLNPENKPKLSVFENKYDYKKMLVEQNITIDSACEHHFLPITGHAHIAYIPKDKVVGLSKINRLVDYYSHRPQVQERLSLQILKDLQVTLNTEDVIVMINAKHLCVSSRGIKDKSSFTTTLEYGGCFKEKSFRDDFFKIINQKMI

SEQ ID NO: 10106 - protein, 221 aa, Lutibacter profundi
  misc_feature (1)..(221): tr|A0A0X8G8W7|A0A0X8G8W7_9FLAO GTP cyclohydrolase 1 OS= Lutibacter profundi OX=1622118 GN=folE PE=3 SV=1
MKNRIDELGDDHVGSSAKTPLRADAFDISDQEKLIKIESSVKDILTTLGMDLEDDSLKGTPQRVAKAYVNEIFSGLNPKNRPKLSTFDNNYKYGEMLVEKNITVYSTCEHHLLPIVGRAHVAYISNGNVIGLSKMNRIVDYYAKRPQVQERLTMQVVQALQEALGTEDVACVIDAKHLCVNSRGVRDIESSTVTSEFGGKFKNKEIKREFLDYIKMETDFE

SEQ ID NO: 10107 - protein, 221 aa, Lutibacter sp.
  misc_feature (1)..(221): tr|A0A2G1XXF7|A0A2G1XXF7_9FLAO GTP cyclohydrolase 1 OS= Lutibacter sp. OX=1925666 GN=folE PE=3 SV=1
MTNKTDEIGDDHIGSSAKTPLRADAFEISDKEKRKRIEASIRDILETLGMDLEDDSLKGTPRRVAKAYVNEIFGGLNPENKPKLSTFDNNYKYGEMLVEKNITVYSTCEHHLLPIVGKAHVAYISNGHVIGLSKMNRIVDYYAKRPQVQERLTMQIVQALQKALGTEDVACVIDAKHLCVNSRGVRDIVSSTVTSEFGGQFKETSKKQEFLDYIKIDTDFE

SEQ ID NO: 10108 - protein, 229 aa, Lutibacter sp.
  misc_feature (1)..(229): tr|A0A559RZA2|A0A559RZA2_9FLAO GTP cyclohydrolase 1 OS= Lutibacter sp. Hel_I_33_5 OX=1566289 GN=folE PE=3 SV=1
MFELNSKMNEERIEEIGENHVGTSATTPLRADAFNISDEEKIDKIQESVKDILETLGMDLTDDSLQGTPKRVAKAFVNELFMGLNPKNMPKASTFDNNYKYGEMLVEKNIVVYSTCEHHLLPIIGRAHVAYISDGKVIGLSKMNRIVEYFSKRPQVQERLTMQVVQSLQEALGTQDVACVIDAKHLCVNSRGIKDIESSTVTAEFGGKFKDRDRKREFLDYLKMDTDFD

SEQ ID NO: 10109 - protein, 215 aa, Lutibaculum baratangense
  misc_feature (1)..(215): tr|V4R8D9|V4R8D9_9RHIZ GTP cyclohydrolase 1 OS=Lutibacu lum baratangense AMV1 OX=631454 GN=folE PE=3 SV=1
MVERSGSKSAEATVHALVPPGERTPLKRPTREEAEAAVRTLIAWTGDDPLREGLLETPKRVTKAFQEFYRGYDDDPVEVLSRTFEDVGGYDDIVLLRDVPFNSHCEHHMVPFIGKAHVAYLPSGRVVGLSKLARVVEIYARRLQTQENLTAQVAATIDEVLKPRGVAVMIESEHMCMTLRGVQKNGSSTVTTMFTGEFRDDRDQKRRFLELVNGR

SEQ ID NO: 10110 - protein, 367 aa, Lutimaribacter litoralis
  misc_feature (1)..(367): tr|A0A521BFZ8|A0A521BFZ8_9RHOB GTP cyclohydrolase FolE2 OS=Lutimaribacter litoralis OX=1010611 GN=folE2 PE=3 S V=1
MTVHTPEIDRAYSRDDAVQALARLREWAGGASSEELAALDPALARLLRGTNAPDYPDLSREYPQDFTVDAAYKAGLPDLQNGPASLIKGAKRQIQHVGISNFRLPVRFHTRNDGDLTLETSVTGTVSLEAEKKGINMSRIMRSFYKHAEKTFSFEVIEAALEDYKSDLESFDARIQMRFSYPAKVESLRSGLMGYQYYDIALELVESAGQRKKIVHLDYVYSSTCPCSLELSEHARMTRGQLATPHSQRSVARISLVSAPGGDCLWFEDVIDMARAAVPTETQVMVKREDEQAFAELNAANPIFVEDAARLFCAQLQNDPRVGDFRVVASHQESLHSHDAVSILVEGDTFASESIDPRLFTTLFHVG

SEQ ID NO: 10111 - protein, 367 aa, Lutimaribacter pacificus
  misc_feature (1)..(367): tr|A0A1H0BCY5|A0A1H0BCY5_9RHOB GTP cyclohydrolase FolE2 OS=Lutimaribacter pacificus OX=391948 GN=folE2 PE=3 SV =1
MNIHTPEIDRQPDREDAREALMRLRRWAEGASVEEIADLDPAIARLLPGAGASDYPALSREYPEGFSVDSAYKASLPDMQNGPASLIRGEKQQIQHVGISNFRLPIQYHTRDNGDLTLETSVTGTVSLEADKKGINMSRIMRSFYKHAEKTFSFEVIEAALDDYMSDLESFDARIQMRFSYPVRVPSLRSGLAGYQYYDIALELVESAGVRKKIIHLDYVYSSTCPCSLELSEHARMTRGQLATPHSQRSVARISVELAPGGDCLWFEDLIDMARAAVPTETQVVVKREDEQAFAELNAANPIFVEDAARLFCERLKRDGRVGDFRVIASHQESLHSHDAVSVLTEGATFAAESLDPRLFASLFHVG

SEQ ID NO: 10112 - protein, 366 aa, Lutimaribacter saemankumensis
  misc_feature (1)..(366): tr|A0A1G8IGG6|A0A1G8IGG6_9RHOB GTP cyclohydrolase FolE2 OS=Lutimaribacter saemankumensis OX=490829 GN=folE2 PE =3 SV=1
MNIHTPDIDRQPDRDDAREALMRLRQWAEKASAEEISDLDPAIARLLPGAGAAKYPALSREYPDGFTVDTAYKASLPDLQNGPSSLIRGAKQQIQHVGISNFRLPIQYHTRDNGDLTLETSVTGTVSLEADKKGINMSRIMRSFYKHAEKTFSFGVIEAALEDYKTDLESFDARIQMRLSYPVKVPSLRSGLSGYQYYDIALELVERAGVRKKIIHLDYVYSSTCPCSLELSEHARMSRGQLATPHSQRSVARISVELAEGDCLWFEDLIDMAREAVPTETQVMVKREDEQAFAELNAANPIFVEDAARLFCEQLKRDERVGDFRVIASHQESLHSHDAVSVLTEGDTFACESLDPRLFASLFHVG

SEQ ID NO: 10113 - protein, 231 aa, Lyngbya aestuarii
  misc_feature (1)..(231): tr|U7QQ37|U7QQ37_9CYAN GTP cyclohydrolase 1 OS=Lyngbya aestuarii BL J OX=1348334 GN=folE PE=3 SV=1
MTIASNGNGSKPANGSSPILSRPDRTTSALNDHPIQKQPLTEVSDDQMMEAVRTMLLGVGEDPEREGLLKTPKRVAEAMRFLTSGYNQSLEDLVNEAIFDEGHEEMVLVRDITVFSMCEHHMLPFMGKAHVAYIPNQKVIGLSKLARIVEMYARRLQVQERLTRQIAEAVQGVLDPQGVAVVIEASHMCMVMRGVQKPGSWTVTSAMLGVFQEEQKTREEFLNLIRHQPSF

SEQ ID NO: 10114 - protein, 216 aa, Lyngbya aestuarii
  misc_feature (1)..(216): tr|U7QHK3|U7QHK3_9CYAN GTP cyclohydrolase 1 OS=Lyngbya aestuarii BL J OX=1348334 GN=folE PE=3 SV=1
MTLANSSPKGNQNGNLPNLKTQSELPVSEEEMRQAVRTLLLGLGENPDREGLKDTPKRVVKALKFLTSGYHQSLDELLNGAVFHEQTDEMVLVRDIDIFSSCEHHILPILGRAHVAYIPDGKVIGLSKVARICEMYARRLQVQERLTAQIADALQGLLNPKGVAVVVEASHMCMVMRGVQKVGSWTSTSAVRGVFAEDAKTRQEFMSLIRHTPSWS

SEQ ID NO: 10115 - protein, 212 aa, Lyngbya confervoides
  misc_feature (1)..(212): tr|A0A0C1VH57|A0A0C1VH57_9CYAN GTP cyclohydrolase 1 OS= Lyngbya confervoides BDU141951 OX=1574623 GN=folE PE=3 SV=1
MTLSISRDDMRSGTLKTKAEPPVSDKEMQQAVRTLLLGLGEDPDREGLVDTPKRVVKALKFLTSGYHQSLDELLNGAVFHENTNEMVLVRDIDLFSSCEHHILPILGRAHVAYIPNGKVIGLSKVARICEMYARRLQVQERLTAQIADALEGLLKPQGVAVVVEATHMCMVMRGVQKPGSWTTTSAMRGTFAEDPKTRQEFMSLIRHSPNFH

SEQ ID NO: 10116 - protein, 240 aa, Lyngbya confervoides; identical to SEQ ID NO: 8835
  misc_feature (1)..(240): tr|A0A0C1Y4L8|A0A0C1Y4L8_9CYAN GTP cyclohydrolase 1 OS= Lyngbya confervoides BDU141951 OX=1574623 GN=folE PE=3 SV=1

SEQ ID NO: 10117 - protein, 231 aa, Lyngbya sp.
  misc_feature (1)..(231): tr|A0YRC3|A0YRC3_LYNSP GTP cyclohydrolase 1 OS=Lyngbya sp. (strain PCC 8106) OX=313612 GN=folE PE=3 SV=1
MTIASNGNGSKPANGSSPILSRPDRTTSALNDHPVQQQPLTEVSDDQMMEAVRTMLLGVGEDPEREGLLKTPKRVADAMRFLTSGYNQSLEDLVNEAIFDEGHEEMVLVRDITVFSMCEHHMLPFMGKAHVAYIPNQKVIGLSKLARIVEMYARRLQVQERLTRQIAEAVQGVLDPQGVAVVIEASHMCMVMRGVQKPGSWTVTSAMVGVFQDEQKTREEFLNLIRHQPSF

SEQ ID NO: 10118 - protein, 127 aa, Lyngbya sp.
  misc_feature (1)..(127): tr|A0YW76|A0YW76_LYNSP GTP cyclohydrolase 1 OS=Lyngbya sp. (strain PCC 8106) OX=313612 GN=folE PE=3 SV=1
MLNGAIFHEQTDEMVLVRDIDIFSSCEHHILPILGRAHVAYIPDGKVIGLSKVARICEMYGRRLQVQERLTAQIADALQGLLKPKGVAVVVEASHMCMVMRGVQKVGSWTSTSAVRGVFAEDAKTRQ

SEQ ID NO: 10119 - protein, 189 aa, Lysinibacillus acetophenoni
  misc_feature (1)..(189): tr|A0A285U726|A0A285U726_9BACI GTP cyclohydrolase 1 OS= Lysinibacillus acetophenoni OX=614649 GN=folE PE=3 SV=1
MSNVDLMKIQEAIKMILDAVGEDVNREGLLDTPKRVAKMYEEMFSGIGQDPKEFFSTVFHEDHEELVLVKDIPFYSMCEHHLVPFYGKAHIAYIPRDGRVAGLSKLGRCVESVARRPQLQERITSTVADSIMEMLTPHGVYVVIEAEHMCMTMRGLKKPGSKTVTSVARGIFETDDAKRNEVISFIQMS

SEQ ID NO: 10120 - protein, 189 aa, Lysinibacillus boronitolerans
  misc_feature (1)..(189): tr|A0A0A3J204|A0A0A3J204_9BACI GTP cyclohydrolase 1 OS= Lysinibacillus boronitolerans JCM 21713 = 10a = NBRC 10 3108 OX=1294264 GN=folE PE=3 SV=1
MSNIDLLKIEEAVKMILEAVGEDVNREGLLDTPKRVAKMYAEMFSGLHEDAKDYFKTVFHEEHEELVLVKDIPFYSMCEHHLVPFYGKAHVAYIPNDGVVAGLSKLGRAVETIARRPQLQERITSSVADTIMEMLAPKGVYVVIEAEHMCMTMRGLKKPGSKTVTSVARGIYEEDEVKRREVLSFIQMS

SEQ ID NO: 10121 - protein, 189 aa, Lysinibacillus chungkukjangi
  misc_feature (1)..(189): tr|A0A318TG28|A0A318TG28_9BACI GTP cyclohydrolase 1 OS= Lysinibacillus chungkukjangi OX=1202712 GN=folE PE=3 SV =1
MSKVNLEKIEEAVKMILEAVGEDVDREGLLDTPKRVSKMYAEMFSGINQDPREFFSTVFHENHDELVLVKDIPFYSMCEHHLVPFYGKAHVAYLPQGGRVAGLSKLGRCVESVARRPQLQERITSTVADTIMEMLEPIGVYVVIEAEHMCMTMRGLKKPGAKTITSVARGVYAEDEVLRREVISFIQMS

SEQ ID NO: 10122 - protein, 189 aa, Lysinibacillus composti
  misc_feature (1)..(189): tr|A0A3N9UDH8|A0A3N9UDH8_9BACI GTP cyclohydrolase 1 OS= Lysinibacillus composti OX=720633 GN=folE PE=3 SV=1
MSKVDLNKIEEAVKMILEAVGEDTTREGLQDTPTRVAKMYAEMFSGINEDPREFFSTVFHEEHEELVLVKDIPFYSMCEHHLVPFYGKAHVAYIPHDGKVAGLSKLGRCVESVARRPQLQERITSTVADTLMEMLQPFGVYVVIEAEHMCMTMRGLKKPGSKTVTSVARGVFEEDEVKRREVISFIQMS

SEQ ID NO: 10123 - protein, 189 aa, Lysinibacillus contaminans
  misc_feature (1)..(189): tr|A0A0M8QAG8|A0A0M8QAG8_9BACI GTP cyclohydrolase 1 OS= Lysinibacillus contaminans OX=1293441 GN=folE PE=3 SV=1
MSNVDIKKIEDAVKMILEAVGEDINREGLLDTPKRVAKMYAEMFSGLHEDAKDYFKTVFHEDHEELVLVKDIPFYSMCEHHLVPFYGKAHVAYIPEGGVVAGLSKLGRAVETIARRPQLQERITSSVADTIMEMLSPKGVYVVIEAEHMCMTMRGLKKPGAKTVTSVARGVYAEDEVKRREVLSFIQMS

SEQ ID NO: 10124 - protein, 189 aa, Lysinibacillus endophyticus
  misc_feature (1)..(189): tr|A0A494Z156|A0A494Z156_9BACI GTP cyclohydrolase 1 OS= Lysinibacillus endophyticus OX=1978490 GN=folE PE=3 SV= 1
MSNVDLNKIEEAVKMILEAVGEDVNREGLLDTPSRVAKMYEEMFSGLNEDPREYFSTVFNENHDELVLVKDIPFYSMCEHHLVPFYGKAHVAYLPKEGKVAGLSKLGRCLESVARRPQLQERITATVADSIMEMLDPYGVYVVVEAEHMCMTMRGLKKPGSKTVTSAARGVYETDDVLRREVISFIQMS

SEQ ID NO: 10125 - protein, 189 aa, Lysinibacillus fusiformis
  misc_feature (1)..(189): tr|A0A1E4R583|A0A1E4R583_9BACI GTP cyclohydrolase 1 OS= Lysinibacillus fusiformis OX=28031 GN=folE PE=3 SV=1
MSNIDLLKIEEAVKMILEAVGEDVNREGLLDTPKRVAKMYAEMFSGLHEDAKDYFRTVFHEDHEELVLVKDIPFYSMCEHHLVPFYGKAHVAYIPNDGIVAGLSKLGRAVETIARRPQLQERITSSVADTIMEMLAPKGVYVVIEAEHMCMTMRGLKKPGSKTVTSVARGVYEHDEVKRREVLSFIQMS

SEQ ID NO: 10126 - protein, 189 aa, Lysinibacillus fusiformis
  misc_feature (1)..(189): tr|D7WYI8|D7WYI8_9BACI GTP cyclohydrolase 1 OS=Lysiniba cillus fusiformis ZC1 OX=714961 GN=folE PE=3 SV=1
MSNIDLLKIEEAVKMILEAVGEDVNREGLLDTPKRVAKMYAEMFSGLHEDAKDYFKTVFHEDHEELVLVKDIPFYSMCEHHLVPFYGKAHVAYIPNDGVVAGLSKLGRAVETIARRPQLQERITSSVADTIMEMLSPKGVYVVIEAEHMCMTMRGLKKPGSKTVTSVARGIYEKDEVKRREVLSFIQMS

SEQ ID NO: 10127 - protein, 189 aa, Lysinibacillus halotolerans
  misc_feature (1)..(189): tr|A0A3M8HER1|A0A3M8HER1_9BACI GTP cyclohydrolase 1 OS= Lysinibacillus halotolerans OX=1368476 GN=folE PE=3 SV= 1
MSKVNLQKIEEAVKMILEAVGENVDREGLLDTPKRVSKMYEEMFSGINEDPREFFSTVFHEDHEDLVLVKDIPFYSMCEHHLVPFYGKAHIAYLPKDGRVAGLSKLGRCVESVARRPQLQERITSTVADSIMEMLQPQGVYVVVEAEHMCMTMRGLKKPGSKTVTSVARGVYEEDEVLRREVISFIQMS

SEQ ID NO: 10128 - protein, 189 aa, Lysinibacillus macroides
  misc_feature (1)..(189): tr|A0A0M9DLV7|A0A0M9DLV7_9BACI GTP cyclohydrolase 1 OS= Lysinibacillus macroides OX=33935 GN=folE PE=3 SV=1
MSNIDLLKIEEAVKMILEAVGEDINREGLLDTPKRVAKMYAEMFSGLHEDAKDYFKTVFHEDHEELVLVKDIPFYSMCEHHLVPFYGKAHVAYIPNDGVVAGLSKLGRAVETIARRPQLQERITSSVAETIMEMLAPKGVYVVIEAEHMCMTMRGLKKPGSKTVTSVARGIYEEDEVKRREVLSFIQMS

SEQ ID NO: 10129 - protein, 282 aa, Lysinibacillus macroides
  misc_feature (1)..(282): tr|A0A0M9DL57|A0A0M9DL57_9BACI GTP cyclohydrolase FolE2 OS=Lysinibacillus macroides OX=33935 GN=folE2 PE=3 SV= 1
MNHKLKTLFHSDEAFLNQQEGLKDVQQQKGNFEFDIQEVGISNVKLPIILKEQERLQTPLATIKLTTSLKSNERGTHMSRLIQNLELYLAKPLTLPLVKELVQQIARSLAQERVDLAIDFPWVFDTTSPVMQLTSTQHANLQLNISYDSPQTMELWVVMKIGVTTLCPCSKEISMYGAHNQRGFITMQAKVDETAISDNWKHDLKNIALSNASAPIYNVLKREDEKFVTEEAYQNPRFVEDLARLVAADLEEVHWIKHYKVTCENEESIHLHNAIAVIESNK

SEQ ID NO: 10130 - protein, 189 aa, Lysinibacillus manganicus
  misc_feature (1)..(189): tr|A0A0A3IXK7|A0A0A3IXK7_9BACI GTP cyclohydrolase 1 OS= Lysinibacillus manganicus DSM 26584 OX=1384049 GN=folE PE=3 SV=1
MSNVDLKKIEEAVKMILEAVGEDVEREGLLDTPKRVSKMYEEMFSGIHQDPREFFSTVFHEDHEELVLVKDIPFHSMCEHHLVPFYGKAHVAYIPRDGRVAGLSKLGRCVEAVARRPQLQERITSTVADSLMEMLTPYGVYVVIEAEHMCMTMRGLKKPGSKTVTSVARGIFETDDVKRKEVISFIQMS

SEQ ID NO: 10131 - protein, 189 aa, Lysinibacillus mangiferihumi
  misc_feature (1)..(189): tr|A0A4U2Z1J8|A0A4U2Z1J8_9BACI GTP cyclohydrolase 1 OS= Lysinibacillus mangiferihumi OX=1130819 GN=folE PE=3 SV =1
MSNVDLLKIEQAVKMILEAVGEDVNREGLLDTPKRVAKMYAEMFSGLHEDAKDYFKTVFHEDHEELVLVKDIPFYSMCEHHLVPFYGKAHVAYIPNDGIVAGLSKLGRAVETIARRPQLQERITSSVADTIMEMLSPKGVYVVIEAEHMCMTMRGLKKPGSKTVTSVARGIYEQDEVKRREVLSFIQMS

SEQ ID NO: 10132 - protein, 189 aa, Lysinibacillus massiliensis
  misc_feature (1)..(189): tr|A0A0A3J044|A0A0A3J044_9BACI GTP cyclohydrolase 1 OS= Lysinibacillus massiliensis 4400831 = CIP 108448 = CCUG 49529 OX=1211035 GN=folE PE=3 SV=1
MSKVDLQKIEEAVKMILEAVGEDVNREGLLDTPKRVSKMYEEMFSGIGEDPREYFSTVFHEDHEELVLVKDIPFYSMCEHHLVPFYGKAHIAYIPRDGRVAGLSKLGRCVESVARRPQLQERITSTVADSIMEMLTPYGVYVVIEAEHMCMTMRGLKKPGSKTVTSAARGIFENDENKRREVISFIQMS

SEQ ID NO: 10133 - protein, 185 aa, Lysinibacillus massiliensis
  misc_feature (1)..(185): tr|A0A0A3IZZ0|A0A0A3IZZ0_9BACI GTP cyclohydrolase 1 OS= Lysinibacillus massiliensis 4400831 = CIP 108448 = CCUG 49529 OX=1211035 GN=folE PE=3 SV=1
MDNQIIEDAMRTILNELGEDIHREGLLDTPKRVAKMYREVFQGVGIDPEIALTTTFAEDYEGIVTVKDITFYTFCEHHIIPFFGKAHIGYIPNGRVVGLSKFARLVELTSQRPQVQERMTTQIANAIENVLQPKGVIVTLEAEHLCMCARGVKKPGTKTVTTIKKGLFASDVSLCEEFERSISRD

SEQ ID NO: 10134 - protein, 189 aa, Lysinibacillus odysseyi
  misc_feature (1)..(189): tr|A0A0A3IQ12|A0A0A3IQ12_9BACI GTP cyclohydrolase 1 OS= Lysinibacillus odysseyi 34hs-1 = NBRC 100172 OX=1220589 GN=folE PE=3 SV=1
MSNVDLKKIEEAVKMILEAVGEDVNREGLLDTPKRVSKMYAEMFSGLQEDPREYFSTVFHEDHEELVLVKDIPFYSMCEHHLVPFYGKAHIAYVPSDGKVAGLSKLGRCVESVARRPQLQERITSTVADAIMEMLNPKGVYVIVEAEHMCMTMRGLKKPGAKTVTSAARGIYETDDVKRSEIISFIQMS

SEQ ID NO: 10135 - protein, 189 aa, Lysinibacillus saudimassiliensis
  misc_feature (1)..(189): tr|A0A078MJB1|A0A078MJB1_9BACI GTP cyclohydrolase 1 OS= Lysinibacillus saudimassiliensis OX=1461583 GN=folE PE= 3 SV=1
MSKVDLPKIEEAVKMILEAVGEDVNREGLLDTPKRVAKMYAEMFSGLHEDARDYFQTVFHENHEELVLVKDIPFYSMCEHHLVPFYGKAHVAYIPQDGVVAGLSKLGRAVETIARRPQLQERITSSVAEVIMETLGAKGVYVIIEAEHMCMTMRGLKKPGAKTVTSVARGVYEQDDVLRREVVSFIQMS

SEQ ID NO: 10136 - protein, 189 aa, Lysinibacillus sinduriensis
  misc_feature (1)..(189): tr|A0A0A3HUZ8|A0A0A3HUZ8_9BACI GTP cyclohydrolase 1 OS= Lysinibacillus sinduriensis BLB-1 = JCM 15800 OX=138405 7 GN=folE PE=3 SV=1
MSKVDLEKIEEAVKMILEAVGEDVEREGLLDTPQRVSKMYAEMFSGIDEDPREFFSTVFHENHEELVLVKDIPFYSMCEHHLVPFYGKAHIAYLPQGGKVAGLSKLGRCVESVARRPQLQERITSTVADTLMEMLEPYGVYVVIEAEHMCMTMRGLKKPGSKTVTSVARGVYAENDVLRREVISFIQMS

SEQ ID NO: 10137 - protein, 189 aa, Lysinibacillus sp.
  misc_feature (1)..(189): tr|A0A0B1YAC1|A0A0B1YAC1_9BACI GTP cyclohydrolase 1 OS= Lysinibacillus sp. A1 OX=1571920 GN=folE PE=3 SV=1
MSNIDLLKIEEAVKMILEAVGEDVNREGLLDTPKRVAKMYAEMFSGLHEDAKDYFRTVFHEDHEELVLVKDIPFYSMCEHHLVPFYGKAHVAYIPNDGIVAGLSKLGRAVETIARRPQLQERITSSVADTIMEMLAPKGVYVVIEAEHMCMTMRGLKKPGSKTVTSVARGVYEQDEVKRREVLSFIQMS

SEQ ID NO: 10138 - protein, 189 aa, Lysinibacillus sp.
  misc_feature (1)..(189): tr|A0A4R7UA48|A0A4R7UA48_9BACI GTP cyclohydrolase 1 OS= Lysinibacillus sp. YR326 OX=1855296 GN=folE PE=3 SV=1
MSNVDLLKIEEAVKMILEAVGEDVNREGLLDTPKRVAKMYAEMFSGLHEDAKDYFKTVFHEDHEELVLVKDIPFYSMCEHHLVPFYGKAHVAYIPNDGIVAGLSKLGRAVETIARRPQLQERITSSVAETIMEMLSPKGVYVVIEAEHMCMTMRGLKKPGSKTVTSVARGIYEEDEVKRREVLSFIQMS

SEQ ID NO: 10139 - protein, 189 aa, Lysinibacillus sphaericus
  misc_feature (1)..(189): sp|B1HTA3|GCH1_LYSSC GTP cyclohydrolase 1 OS=Lysinibaci llus sphaericus (strain C3-41) OX=444177 GN=folE PE=3 S V=1
MSNIDLLKIEEAVKMILEAVGEDVNREGLLDTPKRVAKMYAEMFSGLHEDAKDYFRTVFHEDHEELVLVKDIPFYSMCEHHLVPFYGKAHVAYIPNDGIVAGLSKLGRAVETIARRPQLQERITSSVADTIMEMLAPKGVYVVIEAEHMCMTMRGLKKPGSKTVTSVARGVYEEDEVKRREVLSFIQMS

SEQ ID NO: 10140 - protein, 189 aa, Lysinibacillus sphaericus; identical to SEQ ID NO: 10131
  misc_feature (1)..(189): tr|A0A2S0K2K1|A0A2S0K2K1_LYSSH GTP cyclohydrolase 1 OS= Lysinibacillus sphaericus OX=1421 GN=folE PE=3 SV=1

SEQ ID NO: 10141 - protein, 189 aa, Lysinibacillus tabacifolii; identical to SEQ ID NO: 10131
  misc_feature (1)..(189): tr|A0A4V5TI27|A0A4V5TI27_9BACI GTP cyclohydrolase 1 OS= Lysinibacillus tabacifolii OX=1173107 GN=folE PE=3 SV=1

SEQ ID NO: 10142 - protein, 189 aa, Lysinibacillus telephonicus
  misc_feature (1)..(189): tr|A0A3S0JPY6|A0A3S0JPY6_9BACI GTP cyclohydrolase 1 OS= Lysinibacillus telephonicus OX=1714840 GN=folE PE=3 SV= 1
MSEVNLKKIEEAVKMILEAVGEDVNREGLIDTPKRVSKMYEEMFSGINEDPREFFSTVFHEEHEEVVLVKDIPFYSMCEHHLVPFYGKAHVAYIPKDGRVAGLSKLGRCVESVARRPQLQERITSTVADSIMEMLQPHGVYVVVEAEHMCMTMRGLKKPGSKTITSAARGNYENDDVLRREVISLIQMS

SEQ ID NO: 10143 - protein, 189 aa, Lysinibacillus varians; identical to SEQ ID NO: 10131
  misc_feature (1)..(189): tr|X2GJT9|X2GJT9_9BACI GTP cyclohydrolase 1 OS=Lysiniba cillus varians OX=1145276 GN=folE PE=3 SV=1

SEQ ID NO: 10144 - protein, 189 aa, Lysinibacillus xylanilyticus
  misc_feature (1)..(189): tr|A0A0K9FF09|A0A0K9FF09_9BACI GTP cyclohydrolase 1 OS= Lysinibacillus xylanilyticus OX=582475 GN=folE PE=3 SV= 1
MSNIDLLKIEEAVKMILEAVGEDVNREGLLDTPKRVAKMYAEMFSGLHEDAKDYFKTVFHEDHEELVLVKDIPFYSMCEHHLVPFYGKAHVAYIPNDGIVAGLSKLGRAVETIARRPQLQERITSSVAETIMEMLSPKGVYVVIEAEHMCMTMRGLKKPGSKTVTSVARGIYEEDEVKRREVLSFIQMS

SEQ ID NO: 10145 - protein, 189 aa, Lysinibacillus xylanilyticus; identical to SEQ ID NO: 10138
  misc_feature (1)..(189): tr|A0A2M9Q187|A0A2M9Q187_9BACI GTP cyclohydrolase 1 OS= Lysinibacillus xylanilyticus OX=582475 GN=folE PE=3 SV= 1

SEQ ID NO: 10146 - protein, 189 aa, Lysinibacillus xyleni
  misc_feature (1)..(189): tr|A0A285TDS9|A0A285TDS9_9BACI GTP cyclohydrolase 1 OS= Lysinibacillus xyleni OX=614648 GN=folE PE=3 SV=1
MSKVDLNKIEEAVKMILEAVGEDVDREGLLDTPSRVAKMYEEMFSGLNEDPREFFSTVFNENHDELVLVKDIPFYSMCEHHLVPFYGKAHIAYLPKEGKVAGLSKLGRCLESVARRPQLQERITATVADSIMEMLDPYGVYVVVEAEHMCMTMRGLKKPGSKTVTSAARGIYETEDVLRREVISFIQMS

SEQ ID NO: 10147 - protein, 188 aa, Lysinimicrobium mangrovi
  misc_feature (1)..(188): tr|A0A1H6YQI6|A0A1H6YQI6_9MICO GTP cyclohydrolase 1 OS= Lysinimicrobium mangrovi OX=1043493 GN=folE PE=3 SV=1
MAVDEPRIEAAVREILAAVGEDPDRDGLKDTPSRVARAYAEFFQGLHQDPADVLSAVFELGHEEMILVKDIELYSMCEHHLVPFHGVAHVAYIPGADGRITGLSKLARLVDVFAKRPQVQERLTTQVADALVDELGARGVIVVVEAEHLCMSMRGVRKPGSRTVTSAVRGIMRDAATRAEAMSLIVGK

SEQ ID NO: 10148 - protein, 195 aa, Lysinimonas sp.
  misc_feature (1)..(195): tr|A0A387B5J0|A0A387B5J0_9MICO GTP cyclohydrolase 1 OS= Lysinimonas sp. 2DFWR-13 OX=2419774 GN=folE PE=3 SV=1
MSIDSGRIEAAVVELLHAIGEDPARPGLVATPRRIAESYAELFAGVDEDPLVHLADAAEFTAGDAVGELVLVRDIAFRSTCEHHLLPFTGVAHLAYLPAGRIVGLGKLARVVETLSSRPQLQERLTDQIADTLERGLEPRGVLVVMDARHGCVTARGTRQADSTTVTVAGRGALADPGAQAGVLALIGAGGGGSA

SEQ ID NO: 10149 - protein, 200 aa, Lysinimonas sp.
  misc_feature (1)..(200): tr|A0A5C1Y8A6|A0A5C1Y8A6_9MICO GTP cyclohydrolase 1 OS= Lysinimonas sp. KACC 19322 OX=2592654 GN=folE PE=3 SV=1
MPIDSKRIEAAVVELLRAIGEDPARPGLAQTPERIAASYGELFAGLDEDPLEHLADAEEFTGEADGLGDLVLVRDISFRSTCEHHLLPFVGVAHLAYVPGERIVGLGKLARVVETLSSRPQLQERLTEQIADALDQGLAPRGALVVLDARHGCVSARGTRQVDSTTVTVASRGTLAEPAAQAGVLALIGSGIGAGAAGTP

SEQ ID NO: 10150 - protein, 311 aa, Lysobacter aestuarii
  misc_feature (1)..(311): tr|A0A508AFI3|A0A508AFI3_9GAMM GTP cyclohydrolase FolE2 OS=Lysobacter aestuarii OX=1706195 GN=folE2 PE=3 SV=1
MKPASASARHLPDVAHEAAAEARPLDWVGMANIALPLRVAAAGGEPIQVAASVDVGVNLKDPDARGIHMSRLYLHLQDAFASEIVTPAGLRRILQSLVASQKGLSTSARLVIRHDQMLLRPALASGNAGWKRYPVEIDAHLVDGHLRLGLAFSVEYSSTCPASAALSRQLNAERFNADFADARPISVGVVGDWLASERGLAATPHAQRSRASVRIQLRPQFEELPLANLIDALEQALGTPVQTAVKREDEQAFAALNAANLMFCEDAARRVASVLAHDPHVEHFDAEVEHYESLHPHDAVARISGQGPAVD

SEQ ID NO: 10151 - protein, 196 aa, Lysobacter aestuarii
  misc_feature (1)..(196): tr|A0A508AT08|A0A508AT08_9GAMM GTP cyclohydrolase 1 OS= Lysobacter aestuarii OX=1706195 GN=folE PE=3 SV=1
MADSRKPTREQAEAAVRTLLSWAGDDPGREGLADTPKRVVKAYSDWFSGYETDPAEYLKRTFEEVEGYDEMIVLRDIEFESHCEHHMAPIIGKAHVGYLPDGKVVGISKLARVVESFARRLQVQEKMTAQIAQVIQDVLQPRGVGVVIVGAHECMTTRGVHKRGVSMITSKMLGSFRDDARTRAEFLQFIDVGPGR

SEQ ID NO: 10152 - protein, 197 aa, Lysobacter antibioticus
  misc_feature (1)..(197): tr|A0A0S2DUG6|A0A0S2DUG6_9GAMM GTP cyclohydrolase 1 OS= Lysobacter antibioticus OX=84531 GN=folE PE=3 SV=1
MADNDSKPSREQAEAAVRTLLSWAGEDPAREGLLDTPKRVVEAYGDWFSGYGDDPREYLARTFEEVAGYDEMIVLRDIEFESHCEHHMAPIIGKAHVGYLPSGKVVGISKLARVVETYARRFQVQEKMTAQIAQSIQDVLQPLGVGVVIEGAHECMTTRGVHKRGVSMITSKMLGMFRDDARTRAEFLRFIDVGPGR

SEQ ID NO: 10153 - protein, 313 aa, Lysobacter antibioticus
  misc_feature (1)..(313): tr|A0A0S2FCZ9|A0A0S2FCZ9_9GAMM GTP cyclohydrolase FolE2 OS=Lysobacter antibioticus OX=84531 GN=folE2 PE=3 SV=1
MNPPNTPSALKPVLPDVAFDAAAAARPLDWVGMSNIALPLRIAAADGGSIQVAASVDVSVNLRDADARGIHMSRMYLHLQNAFASETVTPAGLRRVLQSLVDGQGGISSAARLVLRYEQLLLRPALASHNAGWKRYPVEIDARLLDGHLHLGLRFAIEYSSTCPASAALSRQLNAERFADDFAAAHPLSTAVVSDWLASERGLAATPHAQRSRADVRVELRPAFDEVPLVALIDAIEQALGTPVQTAVKREDEQAFARLNAENLMFCEDAARRVAAALSHDKRIERFDAQIAHFESLHAHDAVARVTGQGARD

SEQ ID NO: 10154 - protein, 196 aa, Lysobacter arseniciresistens
  misc_feature (1)..(196): tr|A0A0A0ESY8|A0A0A0ESY8_9GAMM GTP cyclohydrolase 1 OS= Lysobacter arseniciresistens ZS79 OX=913325 GN=folE PE= 3 SV=1
MADPTRPTREDAESAVRTLLRWAGEDPAREGLLDTPKRVAKAYQDWFSGYALDPDDYLARTFEEVCGYDELIVLRDIEFESHCEHHMAPIIGKAHVGYLPDGKVVGISKLARVVDAYSRRFQVQEKMTSQIADCIQRVLQPRGVGVVIEGAHECMTTRGVHKRGVSMITSKMLGSFREDARTRAEFLQFIDVGPGR

SEQ ID NO: 10155 - protein, 309 aa, Lysobacter arseniciresistens
  misc_feature (1)..(309): tr|A0A0A0EYP2|A0A0A0EYP2_9GAMM GTP cyclohydrolase FolE2 OS=Lysobacter arseniciresistens ZS79 OX=913325 GN=folE 2 PE=3 SV=1
MNTSPNAPRRLPDVAHDAAALARPLDWVGMSNIAVPLRVAGPAGESIQVAASVDVSVNLLDPDARGIHMSRLYLELQHAFATEVVTPAGLRRVLQTLVDTQSGLSGAARLVLRYDQLLLRPALASGNAGWKRYPVEIDACLVDGHLKLALRFAVEYSSTCPASAALSRQLNADRFAEDFADARPLAGAIHDWLASERGLAATPHAQRSRADVRVELRPAFDELPLTALIDALEQALATPVQTAVKREDEQAFARLNAANLMFCEDAARRVAAVLSDDRRIERFDAEVAHFESLHAHDAVARVTGSGAPA

SEQ ID NO: 10156 - protein, 311 aa, Lysobacter capsici
  misc_feature (1)..(311): tr|A0A125U029|A0A125U029_9GAMM GTP cyclohydrolase FolE2 OS=Lysobacter capsici AZ78 OX=1444315 GN=folE2 PE=3 SV =1
MTTSHLPHRSTLPDVAFDAAAAARPLDWVGMANIALPLRIASADGGAIQVAASVDVSVDLRDANARGIHMSRMYLQLQNAFASESLTPAGLRRVLQGLVDGQGGISSAARVVLRYEQLLLRPALASQNAGWKRYPVEIDARLIDGHLQLGLRFSVEYSSTCPASAALSRQLNAERFAADFAAVHPLSTAVVSDWLASERGLAATPHAQRSRADVRVELRPAFDELPLTALIDAIEQALGTPVQTAVKREDEQAFARLNAENLMFCEDAARRVAAALARDPRIERFDAQVSHFESLHAHDAVARVTGEGARD

SEQ ID NO: 10157 - protein, 197 aa, Lysobacter capsici
  misc_feature (1)..(197): tr|A0A291A7C5|A0A291A7C5_9GAMM GTP cyclohydrolase 1 OS= Lysobacter capsici OX=435897 GN=folE PE=3 SV=1
MADNDNKPSREQAEAAVRVLLSWAGEDPDREGLLDTPKRVVTAYGDWFSGYTDDPREYLARTFEEVAGYDEMIVLRDIEFESHCEHHMAPIIGKAHVGYLPSGKVVGISKLARVVETYARRFQVQEKMTAQIAQSIQDVLQPLGVGVVIEGAHECMTTRGVHKRGVSMITSKMLGMFRDDARTRAEFLRFIDVGPGR

SEQ ID NO: 10158 - protein, 196 aa, Lysobacter concretionis
  misc_feature (1)..(196): tr|A0A0A0EMR7|A0A0A0EMR7_9GAMM GTP cyclohydrolase 1 OS= Lysobacter concretionis Ko07 = DSM 16239 OX=1122185 GN= folE PE=3 SV=1
MADPDKPTREQAEAAVRTLLSWAGDDPTREGLLDTPKRVAKAYADWFSGYAMDPDEYLARTFEEVAGYDELIVLRDIRFESHCEHHMAPIIGRAHVGYLPDGKVVGISKLARVVDAYARRLQVQEKMTAQIADCIQRVLNPRGVGVVIEATHGCMTTRGVHKRGVSMITSKMLGGFRDDARTRSEFLQFIGSEPRR

SEQ ID NO: 10159 - protein, 197 aa, Lysobacter daejeonensis
  misc_feature (1)..(197): tr|A0A0A0ESF5|A0A0A0ESF5_9GAMM GTP cyclohydrolase 1 OS= Lysobacter daejeonensis GH1-9 OX=1385517 GN=folE PE=3 S V=1
MADTPRKPSREEAEAAIRTLLSWAGDDPAREGLIDTPKRVVEAYGDWFSGYGEDPAEYLKRTFEEVEGYDEMIVLRDIEFESHCEHHMAPIIGKAHVGYLPNGKVVGISKLARVVETYARRLQVQEKMTAQIAQVIQDVLQPRGVGVVVEGAHECMTTRGVHKRGVSMITSKMLGTFREDARTRAEFLRFIDVGPGR

SEQ ID NO: 10160 - protein, 208 aa, Lysobacter daejeonensis
  misc_feature (1)..(208): tr|A0A0A0EWV9|A0A0A0EWV9_9GAMM GTP cyclohydrolase 1 OS= Lysobacter daejeonensis GH1-9 OX=1385517 GN=folE PE=3 S V=1
MLDARLHSVDSTVPARGPAAGEPRPSRQEAEAAVRTLIRWAGDHPGREGLLDTPARVVRAYEEWFGGYALDPEVILGRHFDRAGYDDVVLLRDIPVRSVCEHHMAAIRGVAHVAYLPGERVVGISKLARLVDAYARRLQIQERLTAEIADTLQHVLQPRGVAVVVQASHDCIASRGVGMHGVAMVTRRLLGRFEQEPYRTDVLAALAV

SEQ ID NO: 10161 - protein, 194 aa, Lysobacter defluvii
  misc_feature (1)..(194): tr|A0A0A0M749|A0A0A0M749_9GAMM GTP cyclohydrolase 1 OS= Lysobacter defluvii IMMIB APB-9 = DSM 18482 OX=1385515 GN=folE PE=3 SV=1
MSDKHRPSREQAEDAVRTLLAWAGEDPAREGLVDTPRRVVEAYGDWFSGYEIDPDEYMGRTFEEVGGYDEMVVLRDIQFESHCEHHMAPIIGRAHVGYLPHGRVVGISKLARVVDAYARRFQVQEKMTAQIADCIQRALAPRGVGVVIEAAHECMTTRGVHKRGVAMTTSKMLGAFRDDARTRAEFLEFIRGGA

SEQ ID NO: 10162 - protein, 198 aa, Lysobacter dokdonensis
  misc_feature (1)..(198): tr|A0A0A2WF18|A0A0A2WF18_9GAMM GTP cyclohydrolase 1 OS= Lysobacter dokdonensis DS-58 OX=1300345 GN=folE PE=3 SV =1
MSDTRNNVSRSQAEDAIRTLLRWSGEDPAREGLIDTPKRVVKAYEDWFSGYALDPDDYLQRTFEEVEGYDELIVLRDIQFESHCEHHMAPIIGRAHVGYLPAGKVVGISKLARVVEAYARRFQVQEKMTAQIAGCIERALHPLGVGVVVEAAHECMTTRGVHKRGVSMVTSTMLGTFREDARTRGEFLQFISVGAGHR

SEQ ID NO: 10163 - protein, 299 aa, Lysobacter dokdonensis
  misc_feature (1)..(299): tr|A0A0A2WLR0|A0A0A2WLR0_9GAMM GTP cyclohydrolase FolE2 OS=Lysobacter dokdonensis DS-58 OX=1300345 GN=folE2 PE =3 SV=1
MLPDVAHEAAALARPLDWVGMDRIAVPVRIHDADGQAVQVAADVDVAVDLRDGQARGIHMSRLYLQLQQAFASEAITPGGLRRVLQGFVDSQKGASTRARLHIRYEHLLQRRALASDNVGWKRYPVTIEAELSEGHLHLALGFAVEYSSTCPASAALSRQVNAERFASDFAAARPMSTQVVAEWLASERGLAATPHAQRSRADVRVVLRPAFDELPLLDLVDAVEASLGTPVQTAVKREDEQAFAELNAANLMFCEDAARRVAGALSNDARIERYDIRVAHFESLHPHDAVARVSGTNA

SEQ ID NO: 10164 - protein, 197 aa, Lysobacter enzymogenes
  misc_feature (1)..(197): tr|A0A0S2DAA9|A0A0S2DAA9_LYSEN GTP cyclohydrolase 1 OS= Lysobacter enzymogenes OX=69 GN=folE PE=3 SV=1
MADTPDKPSREQAEAAVRTLLAWAGEDPSREGLLDTPKRVVTAYGDWFSGYDDDPREYLARTFEEVAGYDEMIVLRDIEFESHCEHHMAPIIGKAHVGYLPSGKVVGISKLARVVETYARRFQVQEKMTAQIAQSIQDVLQPLGVGVVVEGAHECMTTRGVHKRGVSMITSKMLGMFRDDARTRAEFLRFIDVGPGR

SEQ ID NO: 10165 - protein, 311 aa, Lysobacter enzymogenes
  misc_feature (1)..(311): tr|A0A1H3A7R6|A0A1H3A7R6_LYSEN GTP cyclohydrolase FolE2 OS=Lysobacter enzymogenes OX=69 GN=folE2 PE=3 SV=1
MNTPFVPSRSSLPDVAFDAAAAARPLDWVGMSHIALPLRIAGADGAAIQVPASVDVSVNLRDANARGIHMSRMYLHLQNAFASETVTPAGLRRVLQSLIEGQGGISSAARLVLRYEQLLLRPALASDNAGWKRYPVEIDARLVDGHLHLGLRFAVEYSSTCPASAALSRQLNAERFAADFAAAHPLSTAVVSDWLASERGLAATPHAQRSRADVRVELRPAFDELPLVALIDALETALATPVQTAVKREDEQAFARLNAENLMFCEDAARRVAAALSADPRIERFDAEVAHFESLHAHDAVARVTGQGARE

SEQ ID NO: 10166 - protein, 197 aa, Lysobacter gummosus
  misc_feature (1)..(197): tr|A0A0S2GE72|A0A0S2GE72_9GAMM GTP cyclohydrolase 1 OS= Lysobacter gummosus OX=262324 GN=folE PE=3 SV=1
MADTPDKPSRDQAEAAVRTLLAWAGEDPAREGLLDTPKRVVEAYGDWFSGYDDDPREYLARTFEEVAGYDEMIVLRDIEFESHCEHHMAPIIGKAHVGYLPNGKVVGISKLARVVETYARRFQVQEKMTAQIAQSIQDVLQPLGVGVVIEGAHECMTTRGVHKRGVSMITSKMLGMFRDDARTRAEFLRFIDVGPGR

SEQ ID NO: 10167 - protein, 300 aa, Lysobacter gummosus
  misc_feature (1)..(300): tr|A0A0S2G5E0|A0A0S2G5E0_9GAMM GTP cyclohydrolase FolE2 OS=Lysobacter gummosus OX=262324 GN=folE2 PE=3 SV=1
MPDVAFDAAAAARALDWVGMSNIALPLRIAGGDGTPIQVAASVDVSVNLRDANARGIHMSRMYLHLQNAFASETVTPAGLRRALQSLIDGQGGISNAARLVLRYEQLLLRPALASHNAGWKRYPVEIDARLIDGHLHLGLRFAVEYSSTCPASAALSRQLNAERFAADFAAAHPLSTAVVSDWLASERGMAATPHAQRSRADVRVELRPAFDELPLVALIDALERALATPVQTAVKREDEQAFARLNAENLMFCEDAARRVAAALSADARIERFDAEVAHFESLHAHDAVARVTGQGARE

SEQ ID NO: 10168 - protein, 203 aa, Lysobacter lycopersici
  misc_feature (1)..(203): tr|A0A516V656|A0A516V656_9GAMM GTP cyclohydrolase 1 OS= Lysobacter lycopersici OX=1324796 GN=folE PE=3 SV=1
MSDDNNPGDSRNDVTRRQAEDAVRTLLKWAGDDPSREGLLDTPKRVAKAYQDWFSGYALDPDDYMARTFEEVGGYDEMIVLRDIEYESHCEHHMAPIIGKVHVGYLPDGKVVGISKLARVVEAYARRFQVQEKMTAQIANCIQRALNPRGVGVVVEGAHECMTTRGIHKRGVSMVTSKMLGSFREDARTRGEFLRFIEVGNGH

SEQ ID NO: 10169 - protein, 309 aa, Lysobacter lycopersici
  misc_feature (1)..(309): tr|A0A516V3S3|A0A516V3S3_9GAMM GTP cyclohydrolase FolE2 OS=Lysobacter lycopersici OX=1324796 GN=folE2 PE=3 SV= 1
MARMANRNPAQLPDVAGDTVALARPLDWVGMDHIALPVRIPDGQGGQLQVAADIDVAVNLKNADARGIHMSRLYLQLQDGLAREAITPAGLRHLLQDGIASQQGLATQARLHIRYDALLQRPALESGFAGWKRYPVEIEATLADGHLQLALSFAVEYSSTCPASAALSRQANAERFAEDFAAARPLSVGVVRDWLASDRGMAATPHAQRSRAQVHVELKPQFEELPLLALVDALEAALATPVQTAVKREDEQAFARLNAENLMFCEDAARRVASVLANDPRVERYDATVSHFESLHPHDAMARVSGVNA

SEQ ID NO: 10170 - protein, 309 aa, Lysobacter maris
  misc_feature (1)..(309): tr|A0A508BDA8|A0A508BDA8_9GAMM GTP cyclohydrolase FolE2 OS=Lysobacter maris OX=1605891 GN=folE2 PE=3 SV=1
MTPPSSQTRQLPDVAFEAAAEARTLEWVGMSHIALPLRVATPGGEPVQVAASVDVAVSLDDADARGIHMSRLYLRLQDAFASEAVTPAGLRRVLQSLVDSQEGLSSSARLVLRYDQMLLRPALASGNAGWKRYPVEIEALLEDGHLRLSLAFSVEYSSTCPASAALSRQLNAERFVADFADARPISTSVVGDWLASERGLAATPHAQRSRASVRLQLRPQFEELPLAAMIDALEQRLATPVQTAVKRQDEQAFAALNAANLMFCEDAARRVASVLAHDPHVERFEAEVAHFESLHPHDAVARVSGSGPR

SEQ ID NO: 10171 - protein, 196 aa, Lysobacter maris
  misc_feature (1)..(196): tr|A0A2U9TED5|A0A2U9TED5_9GAMM GTP cyclohydrolase 1 OS= Lysobacter maris OX=1605891 GN=folE PE=3 SV=1
MADSDKPTREDAEAAVRTLLRWAGDDPAREGLLDTPKRVVKAYRDWFSGYAEDPADYLKRTFEEVEGYDEMIVLRDIEFESHCEHHMAPIIGKAHVGYLPNGKVVGISKLARVVETYARRLQVQEKMTAQIAQVIQDVLQPRGVGVVVIGAHECMTTRGVHKRGVSMVTSTMLGSFREDARTRAEFLRFIETSTGR

SEQ ID NO: 10172 - protein, 298 aa, Lysobacter pythonis
  misc_feature (1)..(298): tr|A0A3M2HXS0|A0A3M2HXS0_9GAMM GTP cyclohydrolase FolE2 OS=Lysobacter pythonis OX=2483112 GN=folE2 PE=3 SV=1
MSVSRPLPDVAFESAALARPLDWVGMEGIALPLALGGVRVPASIDVAVNLGEAGQRGIHMSRLYLKLQQVLPSARLDDANLRALMRGLIDSQEGIAQRARLVLRFDQLLERPALISANRGWKRYPVELALEAEEDALRAWLRVEVEYSSTCPASAALSRELNAEAFAAEFGEGVVEADAVRDWLASKAGLAATPHAQRSVATVRVALREGFEDLPLQALVDALEAALGTPVQTAVKREDEQAFARANAENLMFCEDAARRVGATLAALPWLAAWEASVAHLESLHAHDAVARLSGRND

SEQ ID NO: 10173 - protein, 193 aa, Lysobacter pythonis
  misc_feature (1)..(193): tr|A0A3M2HT13|A0A3M2HT13_9GAMM GTP cyclohydrolase 1 OS= Lysobacter pythonis OX=2483112 GN=folE PE=3 SV=1
MRHGVSREDAEEAVRTLLRWAGEDPAREGLLDTPKRVVKAYGDWFSGYAIDPDEYLLRTFEEVCGYDEMIVLRDIEYESHCEHHMAPIIGRVHVGYLPSGRVVGISKLARVVDAYARRFQVQEKMTAQIANCIQRALEPAGVAVVVEGAHECMTTRGVHKRGVSMVTSTMLGVFREDARTRKEFLSFIENGRR

SEQ ID NO: 10174 - protein, 197 aa, Lysobacter ruishenii
  misc_feature (1)..(197): tr|A0A562M0L0|A0A562M0L0_9GAMM GTP cyclohydrolase 1 OS= Lysobacter ruishenii OX=686800 GN=folE PE=3 SV=1
MADTPRKPSREEAEAAIRTLLSWAGDDPGREGLLDTPKRVVEAYGDWFSGYGEDPAEYLKRTFEEVEGYDEMIVLRDIEFESHCEHHMAPIIGKAHVGYLPDGKVVGISKLARVVETYARRLQVQEKMTAQIAQAIQDVLQPRGVAVVVEGSHECMTTRGVHKRGVSMITSTMLGTFREDARTRAEFLRFIDVGSGR

SEQ ID NO: 10175 - protein, 330 aa, Lysobacter ruishenii
  misc_feature (1)..(330): tr|A0A562LWA4|A0A562LWA4_9GAMM GTP cyclohydrolase FolE2 OS=Lysobacter ruishenii OX=686800 GN=folE2 PE=3 SV=1
MSRVAIPPSIPISLAVTTSINPPRILPDVAFDAAAAARPLDWVGMSNIALPLNVASGTGETLQVAASADVAVNLAKADARGIHMSRLYLELQHAFTGEVLTPAGLRRVLQTLVDTQAGLSSAARLVLRYEHLLLRPALASEHAGWKRYPVEIDARLEDGHLHLGLRFALEYSSTCPASAALSRQINAERFAEDFADARPMSTAVVRDWLASPRGLAATPHAQRSRADVHVALRPAFDELPLGHLIDELERGLATPVQTAVKREDEQAFARLNADNLMFCEDAARRVAAVLSGDPRVERFDATVSHFESLHAHDAVATVAGHGPASASPEG

SEQ ID NO: 10176 - protein, 201 aa, Lysobacter silvestris
  misc_feature (1)..(201): tr|A0A2K1Q173|A0A2K1Q173_9GAMM GTP cyclohydrolase 1 OS= Lysobacter silvestris OX=1645665 GN=folE PE=3 SV=1
MDEPDSPDRRNGVSRNDAEAAVRTLLRWAGDDPTREGLLDTPKRVVKAYGDWFSGYAIDPDDYLQRTFEEVEGYDEMIVLRDIEYESHCEHHMAPIIGRVHVGYLPKGRVVGISKLARVVEAYARRFQVQEKMTAQIAQCIQRALRPQGVAVVVEGAHECMTTRGIHKRGVSMMTSSMLGTFREDARTRNEFLGFIQPGRR

SEQ ID NO: 10177 - protein, 299 aa, Lysobacter silvestris
  misc_feature (1)..(299): tr|A0A2K1Q431|A0A2K1Q431_9GAMM GTP cyclohydrolase FolE2 OS=Lysobacter silvestris OX=1645665 GN=folE2 PE=3 SV=1
MNLESRKTLMPDVAHETATHARGLDWVGMEGIALPLRLDGDIIAPAIADVFVNLADANARGIHMSRLYLQLQESLANGDVSIARIGDFLQACIVSQNGLSTAARVRLRYDVLLERPALASANAGWRDYPIELEVELDGDGLRAAFTIELQYSSTCPASAALSRQVISEHFLRAFPNGGDAGEIAAWLASPAGMAATPHAQRSVARIRVELANGVDVLPIAVLVDAVERALGTPVQTAVKREDERAFAEANAANLMFCEDAARRVASVVSKMAGCLRYRVQVSHLESLHAHDAVAVVCSK

SEQ ID NO: 10178 - protein, 325 aa, Lysobacter soli
  misc_feature (1)..(325): tr|A0A3D8V833|A0A3D8V833_9GAMM GTP cyclohydrolase FolE2 OS=Lysobacter soli OX=453783 GN=folE2 PE=3 SV=1
MARLALPRANPTSSAVTTTSTTPRRLPDVAFDAAAAARPLDWVGMSNIALPLRVAGPDGEAITVAASVDVSVDLKDANARGIHMSRMYLQLQNAFASETVTPAGLRRVLQTLVEKQGGISTSARLVLRYEQLLLRRALASDNAGWKRYPVEIDATLRDGHLHLALAFSVEYSSTCPASAALSRQLNAERFAEDFAAARPLSAAVVSEWLASERGLAATPHAQRSRADVRVELRPAFDEVPLAALIDALETALATPVQTAVKREDEQAFARLNAENLMFCEDAARRVAAVLSADARIERFDAQVSHFESLHAHDAVARVTGQGASA

SEQ ID NO: 10179 - protein, 196 aa, Lysobacter soli
  misc_feature (1)..(196): tr|A0A3D8VA18|A0A3D8VA18_9GAMM GTP cyclohydrolase 1 OS= Lysobacter soli OX=453783 GN=folE PE=3 SV=1
MAQDDKPTRDQAEAAVRTLLRWAGDDPAREGLLDTPKRVAKAYQDWFSGYAEDPADYLMRTFKEVEGYDEMIVLRDIEFESHCEHHMAPIIGKAHVGYLPDGKVVGISKLARVVDAYARRLQVQEKMTAQIAQVIQDVLQPRGVGVVIEGAHECMTTRGVHKRGVSMITSKMLGSFREDARTRAEFLQFIDVGPGR

SEQ ID NO: 10180 - protein, 195 aa, Lysobacter sp.
  misc_feature (1)..(195): tr|A0A5C8KJF0|A0A5C8KJF0_9GAMM GTP cyclohydrolase 1 OS= Lysobacter sp. Alg18-2.2 OX=2603204 GN=folE PE=3 SV=1
MSKPDSAVTREAAEEAVRTLLRWSGDDPAREGLLDTPRRVVDAYSDWFCGYQVDPSEYLRRTFEEVAGYDEMVVLRDIGFESHCEHHMAPIIGVAHVGYLPTNKVVGISKLARVVEAYARRFQVQEKMTAQVAGCIQEVLQPRGVGVVIEASHQCMTTRGVHKTGVSMVTSQMLGSFREDPSTRAEFLRFIGSRG

SEQ ID NO: 10181 - protein, 196 aa, Lysobacter sp.
  misc_feature (1)..(196): tr|A0A0D0S3H1|A0A0D0S3H1_9GAMM GTP cyclohydrolase 1 OS= Lysobacter sp. A03 OX=1199154 GN=folE PE=3 SV=1
MADPVRPTREEAEAAVRTLLSWAGDDPAREGLIDTPKRVAKAYADWFSGYAIDPDEYLARTFEEVAGYDELIVLRDIRFESHCEHHMAPIIGRAHVGYLPDGKVVGISKLARVVDAYARRLQVQEKMTAQIADCIQRVLQPRGVGVVIEASHGCMTTRGVHKRGVAMVTSKMMGGFRDDGRTRAEFLQFIGSPSRS

SEQ ID NO: 10182 - protein, 205 aa, Lysobacter spongiicola
  misc_feature (1)..(205): tr|A0A1T4Q327|A0A1T4Q327_9GAMM GTP cyclohydrolase 1 OS= Lysobacter spongiicola DSM 21749 OX=1122188 GN=folE PE= 3 SV=1
MAEDPRQHDDLEQPRPTREDAEAAIATLLRWAGDDPSREGLLDTPRRVAKAYTEWFSGYGLDPDAYLARTFEEVAGYDELIVLRDIQFESHCEHHMAPIIGRVHVGYLPDNKVVGISKLARVVEAFSRRLQVQEKMTSQIADCIQRVLQPRGVGVVVEGAHQCMTTRGVYNRGVSMITSKMLGSFREDARTRAEFLQFIDVGPGR

SEQ ID NO: 10183 - protein, 227 aa, Lysobacter tolerans
  misc_feature (1)..(227): tr|A0A1N6RAU4|A0A1N6RAU4_9GAMM GTP cyclohydrolase 1 OS= Lysobacter tolerans OX=1604334 GN=folE PE=3 SV=1
MAACMAIRNQDGLWGCGIPASRYHARMNAPDDNDSRHGVGRTEAEAAVRTLLKWAGEDPTREGLLDTPKRVVKAYGDWFSGYAIDPDEYLSRTFEEVGGYDEMIVLRDIEYESHCEHHMAPIIGKVHVGYLPNGRVVGISKLARVVDAYARRFQVQEKMTAQIANCIQRALMPAGVAVVVEGAHECMTTRGVHKRGVSMVTSSMLGVFREDARTRKEFLSFIEGGRR

SEQ ID NO: 10184 - protein, 302 aa, Lysobacter tolerans
  misc_feature (1)..(302): tr|A0A1N6X2V7|A0A1N6X2V7_9GAMM GTP cyclohydrolase FolE2 OS=Lysobacter tolerans OX=1604334 GN=folE2 PE=3 SV=1
MLMSANRPLPDVAFDAAALSRALDWVGMEGIALPVRLSDRGLQAAARVDVGVNLRDPERRGIHMSRLYLQLQQALPQARLDSLELDGLLVGLIESQQGAADRVQLVLHYDHLLERPALVSQNAGWKRYPVQLRSERGPEGSRHWLSLSVEYSSTCPASAALSRELNAESFLAAFGEGDVDTDAVRDWLAGKDGLAATPHAQRSMAEVEVELADGFDHLPVAALADVLEQALGTPVQTAVKREDEQAFARANAQNLMFCEDAARRVGAALSSLPWVRTWQAKVSHLESLHAHDAVARVAGRND

SEQ ID NO: 10185 - protein, 195 aa, Macellibacteroides sp.
  misc_feature (1)..(195): tr|A0A1C2BRJ7|A0A1C2BRJ7_9PORP GTP cyclohydrolase 1 OS= Macellibacteroides sp. HH-ZS OX=1857568 GN=folE PE=3 SV =1
MKEVKEETLLKREELALHYSRILDLLGEDVEREGLIKTPERVAKAMQFLTKGYDEDPQKVLSAAMFEEEGYKQMVIVKDIDFFSLCEHHMLPFFGKAHVAYIPNKYITGLSKIPRVVDIFARRLQIQERMTLQIKECIQNTLNPLGVMVVIEAQHMCMQMRGVEKQNSLTTTSDFTGFFQQAKTREEFINLIKNK

SEQ ID NO: 10186 - protein, 292 aa, Macrococcus bohemicus
  misc_feature (1)..(292): tr|A0A4R5Y028|A0A4R5Y028_9STAP GTP cyclohydrolase FolE2 OS=Macrococcus bohemicus OX=1903056 GN=folE2 PE=3 SV=1
MDQYNLNTREGRWKHFGSVDPIKGSKPTEKEKMTDLQSSKKDFLFEIDHVGIKNLTYPVRLDGYQTAGTFSLSTHLAKDEKGINMSRILESVEAHYDNGLSLDFETLKAVLVTLQTVMHQKDATVDVDAKWFFDRFSPVTNLRAIGHADTRFSMTVEGDAVVNKSLTLTAMVTTLCPCSKEISEYSAHNQRGIVTVKADFAPEGELPDDFKERILEAMEVNASSMLYPILKRTDEKSVTERAYENPRFVEDLLRLIAADLVELEFVEGFTIECRNEESIHQHDAFARLTYKK

SEQ ID NO: 10187 - protein, 292 aa, Macrococcus bohemicus
  misc_feature (1)..(292): tr|A0A328A2R4|A0A328A2R4_9STAP GTP cyclohydrolase FolE2 OS=Macrococcus bohemicus OX=1903056 GN=folE2 PE=3 SV=1
MDQYNLNTREGRWKHFGSVDPIKGTKPTEKEKMTDLQSSKKDFLFEIDHVGIKNLTYPVRLDGYQTAGTFSLSTHLAKDEKGINMSRILESVEAHYDNGLSLDFETLKAVLVTLQTVMHQKDATVDVDAKWFFDRFSPVTNLRAIGHADTRFSMTVEGDAVVNKSLTLTAMVTTLCPCSKEISEYSAHNQRGIVTVKADFAPEGELPDDFKERILEAMEVNASSMLYPILKRTDEKSVTERAYENPRFVEDLLRLIAADLVELEFVEGFTIECRNEESIHQHDAFARLTYKK

SEQ ID NO: 10188 - protein, 290 aa, Macrococcus bovicus
  misc_feature (1)..(290): tr|A0A4R6BYH7|A0A4R6BYH7_9STAP GTP cyclohydrolase FolE2 OS=Macrococcus bovicus OX=69968 GN=folE2 PE=3 SV=1
MKEYNLKTREGRWRHFGSVDPIKGTKPTEKELMMDLQSSKKDFLFEIDHVGIKNLTYPVRIGDFQTVGHFSLSTHLAKDEKGINMSRILESVESHYENGLTLDFDTLKKVLITLQTAMKQKNASVEVEGVWFFDRYSPITNLKAVGHADTTFEMTVADEKVISQSLTIKAQVTTLCPCSKEISEYSAHNQRGVVTVKADLTEELPADYKEQMLEAMEINASSMLYPILKRTDEKSVTERAYENPRFVEDLLRLIAADLVELPFITGFEIECRNEESIHQHDAFARLKYSK

SEQ ID NO: 10189 - protein, 290 aa, Macrococcus brunensis
  misc_feature (1)..(290): tr|A0A4R6BDW7|A0A4R6BDW7_9STAP GTP cyclohydrolase FolE2 OS=Macrococcus brunensis OX=198483 GN=folE2 PE=3 SV=1
MKEYNLKTREGRWRHFGSVDPIKGTKPTEKELMMDLQSSKKDFLFEIDHVGIKNLTYPVRIGDFQTVGNFSLSTHLAKDEKGINMSRILESVESHYENGLTLDFDTLKKVLITLQTAMKQKNASVEVEGVWFFDRYSPITNLKAVGHADTTFEMTVADEEVISQSLTIKAQVTTLCPCSKEISEYSAHNQRGVVTVKADLAEELPADYKEQMLEAMEINASSMLYPILKRTDEKSVTERAYENPRFVEDLLRLIAADLVELPFIKGFEIECRNEESIHQHDAFARLKYSK

SEQ ID NO: 10190 - protein, 292 aa, Macrococcus canis
  misc_feature (1)..(292): tr|A0A4R6C4K5|A0A4R6C4K5_9STAP GTP cyclohydrolase FolE2 OS=Macrococcus canis OX=1855823 GN=folE2 PE=3 SV=1
MDQYNLNTREGRWKHFGSVDPIKGTKPTIKEEMTDLQSSKKDFLFEIDHVGIKNLTYPVRLDGYQTAGTFSLSTHLAKDEKGINMSRILESVEAHYDNGLPLDFDTLKAVLITLQTVMHQKDATVDVDAKWFFDRFSPVTNLRAVGHADTRFSMTVEGDTTVHKSLTLTAMVTTLCPCSKEISEYSAHNQRGIVTVKVDFAPEDELPADFKERILEAMEVNASSMLYPILKRTDEKSVTERAYENPRFVEDLLRLIAADLVELDFITGFTIECRNEESIHQHDAFARLTYNK

SEQ ID NO: 10191 - protein, 292 aa, Macrococcus canis
  misc_feature (1)..(292): tr|A0A1W7AEF7|A0A1W7AEF7_9STAP GTP cyclohydrolase FolE2 OS=Macrococcus canis OX=1855823 GN=folE2 PE=3 SV=1
MDQYNLNTREGRWKHFGSVDPIKGTKPTIKEEMTDLQSSKKDFLFEIDHVGIKNLTYPVRLDGYQTAGTFSLSTHLAKDEKGINMSRILESVEAHYDNGLPLDFDTLKAVLITLQTVMHQKDATVDVDAKWFFDRFSPVTNLRAVGHADTRFSMTVEGDTTVNKSLTLTAMVTTLCPCSKEISEYSAHNQRGIVTVKADFAPEDELPADFKERILEAMEVNASSMLYPILKRTDEKSVTERAYENPRFVEDLLRLIAADLVELDFITGFTIECRNEESIHQHDAFARLTYNK

SEQ ID NO: 10192 - protein, 290 aa, Macrococcus carouselicus
  misc_feature (1)..(290): tr|A0A4R6BHA7|A0A4R6BHA7_9STAP GTP cyclohydrolase FolE2 OS=Macrococcus carouselicus OX=69969 GN=folE2 PE=3 SV= 1
MKEYNLNTREGRWRHFGSVDPVKGTKPTEKERMTDLQSSKKDFLFEIDHVGIKNLTYPVRIGDFQTVGNFSLSTHLAKDEKGINMSRILESVESHYDGGLVLDFATLKKVLITLQTAMKQKEASVEVEGVWFFDRFSPVTNLKAVGHADTVFAMTVADEEVLNQSLTIKAEVTTLCPCSKEISEYSAHNQRGVVTVQADLTEDLPADFKEQMLEAMEINASSMLYPILKRTDEKSVTERAYENPRFVEDLLRLIAADLVELPFIKGFEIECRNEESIHQHDAFARLKYSK

SEQ ID NO: 10193 - protein, 292 aa, Macrococcus caseolyticus
  misc_feature (1)..(292): sp|B9E8N6|GCH4_MACCJ GTP cyclohydrolase FolE2 OS=Macroc occus caseolyticus (strain JCSC5402) OX=458233 GN=folE2 PE=3 SV=1
MDQYNLNTREGRWKHFGSVDPIKGTKPTEKEKMTDLQSSKKDFLFEIDHVGIKNLTYPVRLDGYQTAGTFSLSTHLAKDEKGINMSRILESVEAHYDNGLSLDFDTLKTVLITLQTVMHQKDATVDVDAKWFFDRFSPVTNLRAIGHADTRFSMTVEGDTTVNKSLTLTAMVTTLCPCSKEISEYSAHNQRGIVTVKADFAPEGELPANFKERILEAMEVNASSMLYPILKRTDEKSVTERAYENPRFVEDLLRLIAADLVELDFVTGFTIECRNEESIHQHDAFARLSYNK

SEQ ID NO: 10194 - protein, 292 aa, Macrococcus caseolyticus
  misc_feature (1)..(292): tr|A0A3B0ET09|A0A3B0ET09_9STAP GTP cyclohydrolase FolE2 OS=Macrococcus caseolyticus OX=69966 GN=folE2 PE=3 SV= 1
MDQYNLNTREGRWKHFGSVDPIKGTKPTEKEKMTDLQSSKKDFLFEIDHVGIKNLTYPVRLDGYQTAGTFSLSTHLAKDEKGINMSRILESVEAHYDNGLSLDFDTLKTVLITLQTVMHQKDATVDVDAKWFFDRFSPVTNLRAIGHADTRFSMTVEGDTTVNKSLTLTAMVTTLCPCSKEISEYSAHNQRGIVTVKADFAPEGELPVNFKERILEAMEVNASSMLYPILKRTDEKSVTERAYENPRFVEDLLRLIAADLVELDFVTGFTIECRNEESIHQHDAFARLTYNK

SEQ ID NO: 10195 - protein, 292 aa, Macrococcus epidermidis
  misc_feature (1)..(292): tr|A0A327ZS18|A0A327ZS18_9STAP GTP cyclohydrolase FolE2 OS=Macrococcus epidermidis OX=1902580 GN=folE2 PE=3 SV =1
MDQYNLNTREGRWKHFGSVDPIKGTKPTEKEKMTDLQSSKKDFLFEIDHVGIKNLTYPVRLDGYQTAGTFSLSTHLAKDEKGINMSRILESVEAHYENGLSLDFETLKAVLVTLQTVMHQKDATVDVDAKWFFDRFSPVTNLRAIGHADTRFSMTVEDETTVNKSLTLTAMVTTLCPCSKEISEYSAHNQRGIVTVKADFAPEGELPEDFKERILEAMEVNASSMLYPILKRTDEKSVTERAYENPRFVEDLLRLIAADLVELDFIEGFTIECRNEESIHQHDAFARLTYKK

SEQ ID NO: 10196 - protein, 292 aa, Macrococcus goetzii
  misc_feature (1)..(292): tr|A0A4R6CA43|A0A4R6CA43_9STAP GTP cyclohydrolase FolE2 OS=Macrococcus goetzii OX=1891097 GN=folE2 PE=3 SV=1
MDQYNLNTREGRWKHFGSVDPIKGTKPTEKEKMTDLQSSKKDFLFEIDHVGIKNLTYPVLLDGYQTAGTFSLSTHLAKDEKGINMSRILESVEAHYDNGLALDFETLKAVLVTLQTVMHQKDATVDVDAKWFFDRFSPVTNLRAIGHADTRFSMTVEDETTVNKSLTLTAMVTTLCPCSKEISEYSAHNQRGIVTVKADFAPEGELPEDFKERILEAMEVNASSMLYPILKRTDEKSVTERAYENPRFVEDLLRLIAADLVELDFIEGFTIECRNEESIHQHDAFARLTYKK

SEQ ID NO: 10197 - protein, 292 aa, Macrococcus goetzii
  misc_feature (1)..(292): tr|A0A2G5NT28|A0A2G5NT28_9STAP GTP cyclohydrolase FolE2 OS=Macrococcus goetzii OX=1891097 GN=folE2 PE=3 SV=1
MDQYNLNTREGRWKHFGSVDPIKGTKPTEKEKMTDLQSSKKDFLFEIDHVGIKNLTYPVRLDGYQTAGTFSLSTHLAKDEKGINMSRILESVEAHYDNGLALDFETLKAVLVTLQTVMHQKDATVDVDAKWFFDRFSPVTNLRAIGHADTRFSMTVEDETTVNKSLTLTAMVTTLCPCSKEISEYSAHNQRGIVTVKADFAPEGELPEDFKERILEAMEVNASSMLYPILKRTDEKSVTERAYENPRFVEDLLRLIAADLVELDFIEGFTIECRNEESIHQHDAFARLTYKK

SEQ ID NO: 10198 - protein, 290 aa, Macrococcus hajekii
  misc_feature (1)..(290): tr|A0A4R6BIA6|A0A4R6BIA6_9STAP GTP cyclohydrolase FolE2 OS=Macrococcus hajekii OX=198482 GN=folE2 PE=3 SV=1
MNEYNLNTREGRWRHFGSVDPIKGTKPTEKELMTDLQSSKKDFLFEIDHVGIKNLTYPVRIGDFQTVGNFSLSTHLAKDEKGINMSRILESVESHYDNGLTLDFDTLKKVLITLQTAMKQKNASVEVEGIWFFNRYSPITNLKAVGHADTTFAMMVADEEIISQSVTIKAQVTTLCPCSKEISEYSAHNQRGVITVKAYLEHSLPTDYKEQILEAMEINASSMLYPILKRTDEKSVTERAYENPRFVEDLLRLIAADLVEIPFIKGFEIECRNEESIHQHDAFARLKYSK

SEQ ID NO: 10199 - protein, 289 aa, Macrococcus lamae
  misc_feature (1)..(289): tr|A0A4R6BVG1|A0A4R6BVG1_9STAP GTP cyclohydrolase FolE2 OS=Macrococcus lamae OX=198484 GN=folE2 PE=3 SV=1
MDNNLATREGRWKHFGSVDPIKGTKPTEKELMTDLQNSKKDFLFEIDHVGIKNLTYPVRIGDYQTAGTFSLSTHLAQDEKGINMSRILESVEAHYDKGLPLDFDTLKTVLITLQTTMKQRSASVDVSAVWFFDRFSPVTNLKAVGHADVTLSQTVEDETVTEQTVTIQAAVTTLCPCSKEISEYSAHNQRGIVTVKAMLTEAVPDDFKEQLLDAMEANASSMLYPILKRTDEKAVTERAYENPRFVEDLLRLIAADLVELPFVTGFEIECRNEESIHQHDAFARLHYTK

SEQ ID NO: 10200 - protein, 292 aa, Macrococcus sp.
  misc_feature (1)..(292): tr|A0A4Q1AYI7|A0A4Q1AYI7_9STAP GTP cyclohydrolase FolE2 OS=Macrococcus sp. DPC7161 OX=2507060 GN=folE2 PE=3 SV =1
MENYNLNTREGRWKHFGSVDPIKGTKPTEKEKMTDLQSSKKDFLFEIDHVGIKNLTYPVRLDGYQTAGTFSLSTHLAKDEKGINMSRILESVEAHYDNGLALDFNTLKDVLVTLQTVMYQKDASVDAQAKWFFDRFSPVTNLRAIGHADATFSLSVEGEKVKHKSLTLTAMVTTLCPCSKEISEYSAHNQRGIVTVKAVFDNESELPENFKERILEAMEVNASSMLYPILKRTDEKSVTERAYENPRFVEDLLRLIAADLVELDFVKGFEIECRNEESIHQHDAFARLRYNL

SEQ ID NO: 10201 - protein, 265 aa, Magnetococcus marinus
  misc_feature (1)..(265): sp|A0L8I1|GCH4_MAGMM GTP cyclohydrolase FolE2 OS=Magnet ococcus marinus (strain ATCC BAA-1437 / JCM 17883 / MC- 1) OX=156889 GN=folE2 PE=3 SV=2
MNNCQLPLSDVQSRQDHRRLDIDKVGVKNIRYPIVVKDRSVGSQSTTARINMYVNLPHQFKGTHMSRFLEVLAENQRAISIENLPKLLKEVKQRLDAEEAHIELDFPYFITKKAPVSGVEALMDYQVHFSGVMRGNAYQLTLTVEVPVTSLCPCSKEISAYGAHNQRSHVKVSVQFSQFVWIEEVVDLVERNASCELFTILKRPDEKFVTEKAYDNPKFVEDMVRDLADELTHDPRISWFAVESENFESIHNHSAYAFIEGGQRS

SEQ ID NO: 10202 - protein, 269 aa, Magnetococcus massalia
  misc_feature (1)..(269): tr|A0A1S7LH87|A0A1S7LH87_MAGMO GTP cyclohydrolase FolE2 OS=Magnetococcus massalia (strain MO-1) OX=451514 GN=f olE PE=3 SV=1
MDNQDTPCASPLCDVQSQQDHRRLPIDKVGIKDIRYPIVVKDRSTGKQHTNATVNMYVNLPHQFKGTHMSRFLEVLAEHDRAISVESLQEMLKAMQQRLDAEEAHIELVFPYFVLKAAPVSGASALMDYQVRFTGVMQGDAYNMTLQVEVPVTSLCPCSKEISQYGAHNQRSIVKVTLQTNAFVWIEEVVDMVEGKASCELYTILKRPDEKYVTEKAYENPRFVEDMVRDLAETLRDDPRVTWFTVESENFESIHNHSAYAFIEGGQRR

SEQ ID NO: 10203 - protein, 277 aa, Magnetofaba australis
  misc_feature (1)..(277): tr|A0A1Y2K5J5|A0A1Y2K5J5_9PROT GTP cyclohydrolase FolE2 OS=Magnetofaba australis IT-1 OX=1434232 GN=folE2 PE=3 SV=1
MDEKVSNLMPDCCDASADALPDMQASRDTRRLPIDKVGVKGIRHPIVVKDRNRGAQNTVADINMTVNLPHHFKGTHMSRFLEVLADHDDAISVENLPDLLTKVQERLSAHEAHIEMTFPYFMRKEAPVSKQAGLMDYQARFVASKKGDEFLMTLGVDVAVTSLCPCSKEISQYGAHNQRSLVSLNIQSNAFVWIEELIELVEANASCELYAILKRPDEKYVTERAYENPRFVEDMVRDLAEKLDADARITWFSVASENFESIHNHSAYAFIEGGEAR

SEQ ID NO: 10204 - protein, 213 aa, Magnetospira sp.
  misc_feature (1)..(213): tr|W6KFF6|W6KFF6_MAGSQ GTP cyclohydrolase 1 OS=Magnetos pira sp. (strain QH-2) OX=1288970 GN=folE PE=3 SV=1
MNVSTGKNLPREIHGVDLPKPSRDEAEQAVRTLLRWAGDDPTREGLLDTPKRVVRAYEEFFAGYEQDPVEILERTFEETDGYDEMVLLKDIRIESHCEHHMVPIIGRAHVAYMPHKRVVGISKLARVVEVYAKRLQIQEKMTAQIANAINGVLQPQGVAVVIEAAHQCMTTRGVNKPGVTMVTSTMLGIFRENPTTRREFLSMIGNPSSGGCA

SEQ ID NO: 10205 - protein, 219 aa, Magnetospirillum caucaseum
  misc_feature (1)..(219): tr|M2ZSS6|M2ZSS6_9PROT GTP cyclohydrolase 1 OS=Magnetos pirillum caucaseum OX=1244869 GN=folE PE=3 SV=1
MSKDASSLTLPKELLPAAQPRLDKPSREEAEEAVRTLLRWAGDDPDREGLVGTPDRVVRAYEEFFSGYDQDPTEILHRTFEETDGYDEMVLLRDIRLESHCEHHVVPIIGKAHVAYLPNRRVVGISKLARVVEIYSRRLQIQEKLTAQIANTINDVLQPKGVAVVIEAAHQCMTTRGIHKPGVTMVTSRMLGAFRDDAATRREFMALIHNQHSGGLSNV

SEQ ID NO: 10206 - protein, 203 aa, Magnetospirillum gryphiswaldense
  misc_feature (1)..(203): tr|V6F6Q5|V6F6Q5_MAGGM GTP cyclohydrolase 1 OS=Magnetos pirillum gryphiswaldense (strain DSM 6361 / JCM 21280 / NBRC 15271 / MSR-1) OX=431944 GN=folE PE=3 SV=1
MNATPGLIVPAPCQISGRPSRAEAESAVRTLIQWAGDDPDREGLVATPDRVVRSYEEFFAGYDQDPVEMLQRTFEETDGYDEMVILRDITLESHCEHHMVPIVGKAHVAYLPDRRVVGISKLARVVEVFSKRLQIQEKLTAQIANTINDVLQPKGVAVIIEAAHQCMTTRGVHKPGVTMVTSRMLGVFRENAATRKEFMSLIR

SEQ ID NO: 10207 - protein, 220 aa, Magnetospirillum gryphiswaldense
  misc_feature (1)..(220): tr|A4TWP0|A4TWP0_9PROT GTP cyclohydrolase 1 OS=Magnetos pirillum gryphiswaldense OX=55518 GN=folE PE=3 SV=1
MSQEPDVNSHSPLSSRHTEAQSSHRPSREEAEAAVRTLIQWAGDDPDREGLVGTPDRVVRSYEEFFAGYDLDPVEMLKRTFEETDGYDEMVILRDIRLESHCEHHMVPIIGKAHVAYLPDRRVVGISKLARVVEVFSKRLQIQEKLTAQIANTINEVLQPKGVAVIIEAAHQCMTTRGIHKPGVTMVTSRMLGVFRDHPPTRKEFMSLVQGQHGSGLSNA

SEQ ID NO: 10208 - protein, 212 aa, Magnetospirillum kuznetsovii
  misc_feature (1)..(212): tr|A0A364P3W9|A0A364P3W9_9PROT GTP cyclohydrolase 1 OS= Magnetospirillum kuznetsovii OX=2053833 GN=folE PE=3 SV =1
MTLPKELVPDELSARVRPSRSEAEAAVRTLLRWAGDDPDREGLIGTPDRVVRAYEEFFAGYDQDPTEILHRTFEETDGYDEMVLLRDIRLESHCEHHVVPIIGKAHVAYLPDRRVVGISKLARVVEIYSRRLQIQEKLTAQIANTINDVLQPKGVAVVIEAAHQCMTTRGIHKPGVTMVTSRMLGDFRDNPATRREFMALIHNQHSGGLSNV

SEQ ID NO: 10209 - protein, 290 aa, Magnetospirillum magneticum
  misc_feature (1)..(290): tr|Q2W0Y5|Q2W0Y5_MAGSA GTP cyclohydrolase 1 OS=Magnetos pirillum magneticum (strain AMB-1 / ATCC 700264) OX=342 108 GN=folE PE=3 SV=1
MAENDAVDLPPEAPAKKPRRKPAPPKEAGGIPIVYRGPEGFVGLNKNDRTGSWEAMCKPEGTTRHVTITLAAKSEEDAKSEAIFALKHDSQHRIHRRPTREDAMEAVKTLIAYSGDNPYREGLRGTPDRVIRAYDEFFAGYHSTAAEVLKTTFAETGSYDEMVTLTDIEFDSHCEHHMVPFTGVVHIAYIPDKTVVGISKLARLVEIYARRLQIQEKMTTQIADKLHMALKPKGVAVVIAGQHMCMTTRGVKKKRVKMITSTMTGVFREDPKVRSEFMNLIGNPKGGMEK

SEQ ID NO: 10210 - protein, 231 aa, Magnetospirillum magneticum
  misc_feature (1)..(231): tr|Q2VZE8|Q2VZE8_MAGSA GTP cyclohydrolase 1 OS=Magnetos pirillum magneticum (strain AMB-1 / ATCC 700264) OX=342 108 GN=folE PE=3 SV=1
MPDRDHRERKAAMSKDATSLTLPRELLPATGSRLDKPSREEAEEAVRTLLRWAGDDPDREGLVGTPDRVVRAYEEFFSGYDQDPTEILHRTFEETDGYDEMVLLRDIRLESHCEHHVVPIIGKAHVAYLPNRRVVGISKLARVVEIYSRRLQIQEKLTAQIANTINDVLQPKGVAVVIEAAHQCMTTRGIHKPGVTMVTSRMLGAFREDPATRREFMALIHNQHSGGLSNV

SEQ ID NO: 10211 - protein, 231 aa, Magnetospirillum magnetotacticum
  misc_feature (1)..(231): tr|A0A0C2YCJ5|A0A0C2YCJ5_MAGMG GTP cyclohydrolase 1 OS= Magnetospirillum magnetotacticum MS-1 OX=272627 GN=folE PE=3 SV=1
MPDRDQSERNAAVSNDSASLTLPKELLPAQAHRLAKPSREEAEEAVRTLLRWAGDDPDREGLVGTPDRVVRAYEEFFSGYDLDPTEILHRTFEETDGYDEMVLLRDIRLESHCEHHVVPIIGKAHVAYLPNRRVVGISKLARVVEIYARRLQIQEKLTAQIANTINDVLQPKGVAVVIEAAHQCMTTRGIHKPGVTMVTSRMLGAFRDDPATRREFMALIHNQHSGGLSNV

SEQ ID NO: 10212 - protein, 210 aa, Magnetospirillum marisnigri
  misc_feature (1)..(210): tr|A0A178MP42|A0A178MP42_9PROT GTP cyclohydrolase 1 OS= Magnetospirillum marisnigri OX=1285242 GN=folE PE=3 SV= 1
MPRELLPQERSHPSRPSRAEAEAAVRTLLRWAGDDPDREGLVGTPDRVVRAYEEFFQGYDQDPTEILHRTFEETDGYDEMVLLRDIRLESHCEHHVVPIIGKAHVAYLPNRRVVGISKLARVVEIYSRRLQIQEKLTAQIANTINDVLQPKGVAVVIEAAHQCMTTRGIHKPGVTMVTSRMLGEFRDNPATRREFMALIHNQHGGGLSNV

SEQ ID NO: 10213 - protein, 187 aa, Magnetospirillum marisnigri
  misc_feature (1)..(187): tr|A0A178MHV8|A0A178MHV8_9PROT GTP cyclohydrolase 1 OS= Magnetospirillum marisnigri OX=1285242 GN=folE PE=3 SV= 1
MEAIKTLIAYTGDNPYREGLRGTPDRVIRAYDEFFAGYHSTAAEVLKTTFAETGSYDEMVTLTDIEFDSHCEHHMVPFTGVVHIAYIPDKTVVGISKLARLVEIYARRLQIQEKMTTQIADKLHMVLKPKGVAVVIAGQHMCMTTRGVKKKRVKMITSTMTGVFREDPKVRSEFMNLIGNPKSGMEK

SEQ ID NO: 10214 - protein, 212 aa, Magnetospirillum moscoviense
  misc_feature (1)..(212): tr|A0A178N0W8|A0A178N0W8_9PROT GTP cyclohydrolase 1 OS= Magnetospirillum moscoviense OX=1437059 GN=folE PE=3 SV =1
MTTATLPAELRPHLKDRPAREEAEAAVRTLLRWAGDDPDREGLVGTPERVVRAYEEFFEGYEQDPVEILQRTFEETDGYDEMVVLRDIRLESHCEHHMVPIIGKAHVAYLPGRRVVGISKLARIVEVFSKRLQIQEKLTSQIANAINEVLQPKGVAVVIEAAHQCMTTRGVRKPGVTMVTSRMLGEFRDNPATRREFMSLIQGQHGDGLSNV

SEQ ID NO: 10215 - protein, 231 aa, Magnetospirillum sp.
  misc_feature (1)..(231): tr|A0A0U5MBX6|A0A0U5MBX6_9PROT GTP cyclohydrolase 1 OS= Magnetospirillum sp. XM-1 OX=1663591 GN=folE PE=3 SV=1
MPDRDQRERNAAVSSDAPSLSLPKELLPATGSRQDKPTREEAEEAVRTLLRWAGDDPDREGLVGTPDRVVRAYEEFFSGYDQDPTEILHRTFEETDGYDEMVLLRDIRLESHCEHHVVPIIGKAHVAYLPNRRVVGISKLARVVEIYSRRLQIQEKLTAQIANTINDVLQPKGVAVVIEAAHQCMTTRGIHKPGVTMVTSRMLGAFRDNPATRREFMALIHNQHSGGLSNV

SEQ ID NO: 10216 - protein, 220 aa, Magnetospirillum sp.
  misc_feature (1)..(220): tr|A0A1M3LKF0|A0A1M3LKF0_9PROT GTP cyclohydrolase 1 OS= Magnetospirillum sp. 64-120 OX=1895778 GN=folE PE=3 SV= 1
MTKESDVKSQNPPLPKDSDTLSTGKPSREQAEEAVRTLIRWAGDDPDREGLVGTPDRVVRSYEEFFAGYDLDPGEMLARTFEETDGYDEMVILRDIRLESHCEHHMVPIIGKCHVAYLPDRRVVGISKLARVVEVFAKRLQIQEKLTAQIANTINEVLQPKGVAVIIEAAHQCMTTRGIHKPGVTMVTSRMLGVFRDNPATRKEFMSLVQGQHGSGLSNA

SEQ ID NO: 10217 - protein, 216 aa, Magnetovibrio blakemorei
  misc_feature (1)..(216): tr|A0A1E5QBF8|A0A1E5QBF8_9PROT GTP cyclohydrolase 1 OS= Magnetovibrio blakemorei OX=28181 GN=folE PE=3 SV=1
MRTTPLANHKPLTIVTDGASRPDRTEAEQAVRTLIQWAGDNPDREGLLDTPARVVRAFEEYFQGYNADPQEILERTFEEVEGYDEMVLLKDIRFESHCEHHMAPIIGKAHVAYLPKSRVVGISKLARVVEIYAQRLQIQEKMTAQIANAINDVLQPDGVAVVIEASHQCMTCRGVHKPGVSMITSKMLGAFRENDRTRREFLSMVSNPSGSAFEMV

SEQ ID NO: 10218 - protein, 212 aa, Magnetovibrio sp.
  misc_feature (1)..(212): tr|A0A2D8YYE4|A0A2D8YYE4_9PROT GTP cyclohydrolase 1 OS= Magnetovibrio sp. OX=2024836 GN=folE PE=3 SV=1
MRTVTAKKHLSVANVAANAAKTQSGKPSRAEAEQAVRTLIRWAGDDPTREGLIDTPKRVASAYEEFFAGYDADPVEILQRTFEETDGYDEIVVLKDIRLESHCEHHMVPIIGVAHVAYLPHRRVVGISKLARVVEAYAKRLQIQEKMTAQVANAIHDVLEPKGVAVVIEAAHQCMTTRGVSKPGVTMVTSRMLGAFRDDPTTRREFLAMIGH

SEQ ID NO: 10219 - protein, 214 aa, Magnetovibrio sp.
  misc_feature (1)..(214): tr|A0A2E3KYZ6|A0A2E3KYZ6_9PROT GTP cyclohydrolase 1 OS= Magnetovibrio sp. OX=2024836 GN=folE PE=3 SV=1
  misc_feature (56)..(56): Xaa can be any naturally occurring amino acid
  misc_feature (84)..(84): Xaa can be any naturally occurring amino acid
  misc_feature (86)..(87): Xaa can be any naturally occurring amino acid
  misc_feature (99)..(99): Xaa can be any naturally occurring amino acid
  misc_feature (104)..(104): Xaa can be any naturally occurring amino acid
MTSEKSFSVITENQDETNKPSRLEAEAAVRTLIRWAGDDPDREGLVDTPDRVVRSXEEFFAGYAADPKAILERTFEEVDGYDEXVXXRDIRLESHCEHXMVPIXGKAHVAYMPHRRVVGISKLARLVEAYSKRLQIQEKLTSQVANAIDEILQPLGTAVIVEAAHQCMTTRGVHKAGVTMVTSRMLGAFRENGETRREFLAMIGNPSSGETRFG

SEQ ID NO: 10220 - protein, 186 aa, Mahella australiensis
  misc_feature (1)..(186): tr|F3ZVJ4|F3ZVJ4_MAHA5 GTP cyclohydrolase 1 OS=Mahella australiensis (strain DSM 15567 / CIP 107919 / 50-1 BON ) OX=697281 GN=folE PE=3 SV=1
MVDQQKIEQAMRMMIEAIGEDPEREGLKDTPKRVARMYAELFSGIEENPRKYLEVWFNEDHEEMVLVKDIPFYSMCEHHFLPFVGKAHVAYIPTKGKVTGLSKLARVVESVARRPQLQERLTSQIADILMECLDPQGVVVVIEAEHMCMSMRGVKKPGTTTVTSAVRGIFRRDAKSRAEAFALIKG

SEQ ID NO: 10221 - protein, 188 aa, Maledivibacter halophilus
  misc_feature (1)..(188): tr|A0A1T5IL07|A0A1T5IL07_9CLOT GTP cyclohydrolase 1 OS= Maledivibacter halophilus OX=36842 GN=folE PE=3 SV=1
MDKQKIERAVRDIIEAIGEDPDREGLKDTPRRIAKMYEEIFSGLKEDPGKHLEIYFQDEKHEEMVLVKDIPFYSTCEHHFAPFFGKAHVGYLPKGGKLTGLSKLARVVETVARRPQLQERLTATIAETMMEKLEPHGVIVVVEAEHMCMTMRGIKKPGSKTVTSAVRGLFNKDAKARAEAMSLINFGR

SEQ ID NO: 10222 - protein, 366 aa, Maliponia aquimaris
  misc_feature (1)..(366): tr|A0A238KM45|A0A238KM45_9RHOB GTP cyclohydrolase FolE2 OS=Maliponia aquimaris OX=1673631 GN=folE2 PE=3 SV=1
MNIHTPEIDRKPSAEEAADALALLRRWTSKAHDAEIEALDPVLARLTPEAAKDSYPVLSRVYPEGFAVDGSYKATLPDLQNGPSSLIRGANRAIQHVGISNFRLPIQYHTRDNGDLRLETSVTGTVSLDADKKGINMSRIMRSFYVHADKTFSFGVIEAALDDYKSDLESFDARINMRFSFPMKVQSLRSGLSGYQYYDIALELVEVDGVRRKIMHLDYVYSSTCPCSLELSEHARRERGQLATPHSQRSVARISVEVKDGACLWFEDLVDMCRRAVPTETQVMVKREDEQAFAELNAANPIFVEDAARLFAEQLQADARVGDFRVIASHQESLHSHDAVSVLTEGALFAAESLDPKLFSTLFHVG

SEQ ID NO: 10223 - protein, 260 aa, Malonomonas rubra
  misc_feature (1)..(260): tr|A0A1M6JS87|A0A1M6JS87_MALRU GTP cyclohydrolase FolE2 OS=Malonomonas rubra DSM 5091 OX=1122189 GN=folE2 PE=3 SV=1
MAKMPDMQQSRDTRNIAIDKVGVKDIRYPIVVQDKHKEKQHTVARVNMYVDLPEEFKGTHMSRFIEVLNLYHGSISIENIGTILAEMKQRLEATRAHLELDFPYFIEKTAPVSGARSLLEYQCRMVGTLGKKFDFVLEASIPVTSLCPCSKEISERGAHNQRSIVTVQIRYKEHVWLEDLIAWVESCASCQVYSLLKREDEKAVTEQAYDNPMFVEDMVRAVTEKLRSVPQIAWFKVQCENFESIHNHSAYAMVEEQNSR

SEQ ID NO: 10224 - protein, 366 aa, Mameliella alba
  misc_feature (1)..(366): tr|A0A0B3RTB9|A0A0B3RTB9_9RHOB GTP cyclohydrolase FolE2 OS=Mameliella alba OX=561184 GN=folE2 PE=3 SV=1
MNVHTPEIDRKPSQEEAAEALELLRRWASKAQDAEIEALDPLVARLAPDSAPDSYPALSRAYPDNFSVDSDYKAGLPDLQNGPSSLIRGANRAIQHVGISNFRLPIQYHTRDNGDLHLETSVTGTVSLEADKKGINMSRIMRSFYAHADKTFSFEVIEAALDDYKSDLESFDARINMRFSFPMKVDSLRSGLSGYQYYDIALELVEQDGVRRKVMHLDYVYSSTCPCSLELSEHARRTRGQLATPHSQRSVARISVEVKEGECLWFEDVVDMCRRAVPTETQVMVKREDEQAFAELNAANPIFVEDAARLFAEQLQADARVGDYRVVASHQESLHSHDAVSVLTEGDLFAAESLDPKLFSTLFHVG

SEQ ID NO: 10225 - protein, 366 aa, Mameliella sp.; identical to SEQ ID NO: 4653
  misc_feature (1)..(366): tr|A0A2E9I2K5|A0A2E9I2K5_9RHOB GTP cyclohydrolase FolE2 OS=Mameliella sp. OX=1924940 GN=folE2 PE=3 SV=1

SEQ ID NO: 10226 - protein, 222 aa, Mangrovibacter phragmitis
  misc_feature (1)..(222): tr|A0A1B7L9G9|A0A1B7L9G9_9ENTR GTP cyclohydrolase 1 OS= Mangrovibacter phragmitis OX=1691903 GN=folE PE=3 SV=1
MPSLSKEAAQVHDALVARGLETPLRQPAEQLDNETRKARIAEHMAGIMQLMNLDLSDDSLMETPHRIAKMYVDEIFSGLDYANFPKITVIENKMKVDEMVTVRDITLTSTCEHHFVTIDGKATVAYIPKDAVIGLSKINRIVQFFAQRPQVQERLTQQILVALQTLLGTSNVAVSIDAVHYCVKARGIRDATSATTTTSLGGLFKSSQNTRQEFLRAVRHHN

SEQ ID NO: 10227 - protein, 222 aa, Mangrovibacter plantisponsor
  misc_feature (1)..(222): tr|A0A317Q5Y0|A0A317Q5Y0_9ENTR GTP cyclohydrolase 1 OS= Mangrovibacter plantisponsor OX=451513 GN=folE PE=3 SV= 1
MPSLSKEAAQVHDALVARGLETPLRQPAEQLDNETRKARIAEHMTGIMQLMNLDLSDDSLMETPHRIAKMYVDEIFSGLDYANFPKITVIENKMKVDEMVTVRDITLTSTCEHHFVTIDGKATVAYIPKDAVIGLSKINRIVQFFAQRPQVQERLTQQILVALQTLLGTNNVAVSIDAVHYCVKARGIRDATSATTTTSLGGLFKSSQNTRQEFLRAVRHHN

SEQ ID NO: 10228 - protein, 222 aa, Mangrovibacter sp.
  misc_feature (1)..(222): tr|A0A071LNX4|A0A071LNX4_9ENTR GTP cyclohydrolase 1 OS= Mangrovibacter sp. MFB070 OX=1224318 GN=folE PE=3 SV=1
MPSFSKEAAQVHDALVARGLETPLRQPAEQLDNETRKARIAEHMTGIMQLMNLDLSDDSLMETPHRIAKMYVDEIFSGLDYANFPKITVIENKMKVDEMVTVRDITLTSTCEHHFVTIDGKATVAYIPKDAVIGLSKINRIVQFFAQRPQVQERLTQQILVALQTLLGTNNVAVSIDAVHYCVKARGIRDATSATTTTSLGGLFKSSQNTRQEFLRAVRHHN

SEQ ID NO: 10229 - protein, 242 aa, Mangrovibacterium diazotrophicum
  misc_feature (1)..(242): tr|A0A419VZ59|A0A419VZ59_9BACT GTP cyclohydrolase 1 OS= Mangrovibacterium diazotrophicum OX=1261403 GN=folE PE= 3 SV=1
MKVNGFVKTSPAKQNGHQNIPLVKNGSAIELIGDNHIGTSIDTPMRADAFEKSDEEKMAIIEDRFRDIMETLGLDLTDDSLSGTPRRVAKMYVQEIFNGLNPQNKPKISVFENKFNYGEMLVERNINLNSTCEHHFLPIMGKAHVAYIANGEVIGLSKINRIVDYFARRPQVQERLTVQIANELKTLLNTEDVAVVIDAKHMCVSSRGIEDESSSTVTAEYCGAFKNTERRDEFLKYVSLGK

SEQ ID NO: 10230 - protein, 205 aa, Mangrovibacterium diazotrophicum
  misc_feature (1)..(205): tr|A0A419VWL9|A0A419VWL9_9BACT GTP cyclohydrolase 1 OS= Mangrovibacterium diazotrophicum OX=1261403 GN=folE PE= 3 SV=1
MEDSYNGEFSGYKRIDRFNESVTEQISEHYTGIIKLLGEDVEREGLQKTPLRVAKAMQFLLQGYEQDPEAMIRKAMFKEDYKQMVIVKDIEIYSMCEHHMLPFIGKAHVGYIPNGYITGLSKIARVVDAFARRLQVQERLTSQIKDCIQQTLNPLGVAVVIEAQHLCMQMRGVQKQHSVTTTSDFTGAFERVATREEFIRLISSK

SEQ ID NO: 10231 - protein, 205 aa, Mangrovibacterium marinum
  misc_feature (1)..(205): tr|A0A2T5C4G4|A0A2T5C4G4_9BACT GTP cyclohydrolase 1 OS= Mangrovibacterium marinum OX=1639118 GN=folE PE=3 SV=1
MEDSFNGDLSGYQRIDRFDEKTTAELGEHYSRILKLVGEDVNREGLQKTPLRVAKAMQFLLQGYDQNPEEMLRGAMFREDYSQMVIVKDIEIYSMCEHHMLPFIGKAHVAYIPDGYITGLSKIARVVDAFARRLQVQERLTSQIKDCIQKTLNPLGVAVVIEAQHLCMQMRGVQKQHSVTTTSDFTGAFERVATRDEFIRLISSK

SEQ ID NO: 10232 - protein, 242 aa, Mangrovibacterium marinum
  misc_feature (1)..(242): tr|A0A2T5BYZ7|A0A2T5BYZ7_9BACT GTP cyclohydrolase 1 OS= Mangrovibacterium marinum OX=1639118 GN=folE PE=3 SV=1
MKVNGFIKSGSVSRNGQNTIPRVNNSSSVDLIGDHHVGTSVDTPMRPDAFEKTDQEKMAVIEDHFREIMETLGLDLTDDSLSGTPHRVAKMYVQEIFNGLNPVNKPKISVFGNKFNYGEMLVERNINLNSTCEHHFLPIVGKAHVAYIANGQVIGLSKINRVVDYFARRPQVQERLTVQIANELKQILQTEDVAVVIDAKHLCVSSRGIEDESSSTVTAEYSGVFKEKERKDEFLKYVSFGK

SEQ ID NO: 10233 - protein, 225 aa, Mangrovimonas sp.
  misc_feature (1)..(225): tr|A0A1V1ZDZ5|A0A1V1ZDZ5_9FLAO GTP cyclohydrolase 1 OS= Mangrovimonas sp. DI 80 OX=1779330 GN=folE PE=3 SV=1
MKIENDIEDFEALGNDHIGTSANTPMREDAFKLSNDEKIDIIKDDVRHIMETLGLDLTDDSLKGTPMRVAKMFVKEIFGGLNPDKKPNASTFDNKYKYGEMLVEKNITVYSTCEHHLLPIVGKAHVAYISNGTVVGLSKMNRIVDYFAKRPQVQERLTIQIVKELQEVLNTEDVACVIDAKHLCVNSRGIRDVDCSTVTSEFGGKFKEKETRREFLDYIKLDTQF

SEQ ID NO: 10234 - protein, 225 aa, Mangrovimonas sp.
  misc_feature (1)..(225): tr|A0A3R9MF37|A0A3R9MF37_9FLAO GTP cyclohydrolase 1 OS= Mangrovimonas sp. HN-E26 OX=2494697 GN=folE PE=3 SV=1
MKLDKNIEEFDALGDDHIGTSFDTPLRKDAFNLSNEEKIDIIKDDVRHIMETLGLDLTDDSLNGTPMRVAKMFVKELFGGLNPENKPKASTFDNKYKYGEMLVEKNITVYSTCEHHLLPIVGKAHVAYISSGNVVGLSKMNRIVDYFAKRPQVQERLTIQIVRELQKVLNTEDVACVIDAKHLCVNSRGIRDIESSTVTSEFGGKFKDIATRKEFLDYIKLDTAF

SEQ ID NO: 10235 - protein, 225 aa, Mangrovimonas yunxiaonensis
  misc_feature (1)..(225): tr|A0A084TIW9|A0A084TIW9_9FLAO GTP cyclohydrolase 1 OS= Mangrovimonas yunxiaonensis OX=1197477 GN=folE PE=3 SV= 1
MKFDSKIEEFESLGDAHIGTSSDTPLRKDAFTLSNEEKIDIIKDDVRHIMETLGLDLSDDSLKGTPMRVAKMYVKEIFGGLNPNTKPKASTFDNKYKYGEMLVEKNITVYSTCEHHLLPIVGKAHVAYISNGTVVGLSKMNRIVDHFAKRPQVQERLTIQIVRELQKVLNTEDVACVIDAKHLCVNSRGIRDVDSSTVTSEFGGKFKEKETRREFLDYIKLDTSF

SEQ ID NO: 10236 - protein, 198 aa, Mangrovimonas yunxiaonensis
  misc_feature (1)..(198): tr|A0A084THX9|A0A084THX9_9FLAO GTP cyclohydrolase 1 OS= Mangrovimonas yunxiaonensis OX=1197477 GN=folE PE=3 SV= 1
MPYKHFEEYNMQVTDDVKARYKSIIEDLGEDINRDGLQKTPERASKAMQFLTQGYHQDAAEILKSAMFKESYNEMVIVKDIELYSLCEHHMLPFFGKAHIAYIPNGKIVGLSKIPRIVDVFARRLQVQERLTEQILDCINETLQPQGVAVVIEASHMCMMMRGVQKQNSVTTTSGFRGQFEKSETRNEFLKLISEKLS

SEQ ID NO: 10237 - protein, 229 aa, Mannheimia haemolytica
  misc_feature (1)..(229): tr|A0A378NFL9|A0A378NFL9_MANHA GTP cyclohydrolase 1 OS= Mannheimia haemolytica OX=75985 GN=folE PE=3 SV=1
MTTISPELTITENTLSPEAQKVRQALLAKGIETPTVAHTKDKASRRAEIQQHMQAVLELLGLDLNDDSLEETPHRLAKMYVDEIFSGLDYATFPKITNIENRMKVSEMVLVDDITLTSTCEHHFVTIDGKVAVAYYPKKWVIGLSKINRVVQFFAQRPQVQERFTEQILTAFQTILETDDVAVYVKATHFCVKCRGVKDTNSYTVTSAFGGVFLEDRETRKEFLGLLNK

SEQ ID NO: 10238 - protein, 229 aa, Mannheimia haemolytica
  misc_feature (1)..(229): tr|A0A248ZY79|A0A248ZY79_MANHA GTP cyclohydrolase 1 OS= Mannheimia haemolytica OX=75985 GN=folE PE=3 SV=1
MTTISPELTITENTLSPEAQKVRQALLAKGIETPTVTHTKDKASRRAEIQQHMQAVLELLGLDLSDDSLEETPHRLAKMYVDEIFSGLDYATFPKITNIENRMKVSEMVLVDDITLTSTCEHHFVTIDGKVAVAYYPKKWVIGLSKINRVVQFFAQRPQVQERFTEQILTAFQTILETDDVAVYVKATHFCVKCRGIKDTNSYTVTSAFGGVFLEDRETRKEFLGLLNK

SEQ ID NO: 10239 - protein, 234 aa, Mannheimia sp.
  misc_feature (1)..(234): tr|W0Q6Q1|W0Q6Q1_9PAST GTP cyclohydrolase 1 OS=Mannheim ia sp. USDA-ARS-USMARC-1261 OX=1432056 GN=folE PE=3 SV= 1
MRGKPMTTISPELNSAENQLSPEAQKVRQALLAKGIETPTVAHQKDKDSRRAEIQQHMQAVLELLGLDLTDDSLEETPHRLAKMYVDEIFSGLDYATFPKITNIENRMKVSEMVLVDDITLTSTCEHHFVTIDGKVAVAYYPKKWVIGLSKINRVVQFFAQRPQVQERFTEQILTAFQTILETDDVAVYVKATHFCVKCRGVKDTNSYTVTSAFGGVFLEDRETRKEFLGLLNK

SEQ ID NO: 10240 - protein, 218 aa, Mannheimia succiniciproducens
  misc_feature (1)..(218): sp|Q65TR0|GCH1_MANSM GTP cyclohydrolase 1 OS=Mannheimia succiniciproducens (strain MBEL55E) OX=221988 GN=folE PE=3 SV=1
MSRISAEAEKVRHALIEKGIETPMIALTKSKNERRIGIENRMREVMQLIGLDLTDDSLEETPVRLAKMFIDEIFSGLDYTNFPKITNIENRMKVSEMVLVNDVTLTSTCEHHFVTIDGLVSVAYYPKKWVIGLSKINRVVQFFAQRPQVQERLTEQILLAFQTILETEDVAVYMKATHFCVKCRGIKDTNSYTVTSAFGGVFLEDRETRKEFLSLINK

SEQ ID NO: 10241 - protein, 229 aa, Mannheimia varigena
  misc_feature (1)..(229): tr|W0QCJ6|W0QCJ6_9PAST GTP cyclohydrolase 1 OS=Mannheim ia varigena USDA-ARS-USMARC-1296 OX=1433287 GN=folE PE= 3 SV=1
MTTISPELKNAENQLSPEAQKVRQALLAKGIETPTVAHQKDKDSRRAEIQQHMQAVLELLGLDLTDDSLEETPHRLAKMYVDEIFSGLDYATFPKITNIENRMKVSEMVLVDDITLTSTCEHHFVTIDGKVAVAYYPKKWVIGLSKINRVVQFFAQRPQVQERFTEQILTAFQTILETDDVAVYVKATHFCVKCRGVKDTNSYTVTSAFGGVFLEDRETRKEFLGLLNK

SEQ ID NO: 10242 - protein, 232 aa, Maribacter aquivivus
  misc_feature (1)..(232): tr|A0A1M6U654|A0A1M6U654_9FLAO GTP cyclohydrolase 1 OS= Maribacter aquivivus OX=228958 GN=folE PE=3 SV=1
MKHQEIMLNTLTKENNLNGFSEEEIGDDHIYTGLETPMKTDAFKISDEEKKDKIADLFSQIMDVMGLNLEDDSLKGTPNRVAKMYIDEIFSGLNPANKPKVALFDNKYQYNQMLVEKNITFYSNCEHHFVPIIGKAHIAYISSGKVIGLSKLNRIVQYYAKRPQVQERLTNQIAAELRQILETEDVAVIIDAKHLCVSSRGIKDDTSATVTSFYGGIFNTSSKIAELQNYLN

SEQ ID NO: 10243 - protein, 226 aa, Maribacter aquivivus
  misc_feature (1)..(226): tr|A0A1M6MJE4|A0A1M6MJE4_9FLAO GTP cyclohydrolase 1 OS= Maribacter aquivivus OX=228958 GN=folE PE=3 SV=1
MKIEDTLENQFDELGNDHISTSEDTPLRSDAFDLDDAEKIERIRENVREIMLTLGLDLTDDSLKGTPNRVAKMYVNEIFGGLSPAKKPKASTFDNKYKYGEMLVEKNITLYSTCEHHFLPIVGRAHVAYISNGTVVGLSKMNRIVDYYAKRPQVQERLNIQIVRELQKALGTEDVACVIDAKHLCVNSRGIRDIDSSTVTAEYGGKFKEELVRREFLNYLNLDTHF

SEQ ID NO: 10244 - protein, 199 aa, Maribacter arcticus
  misc_feature (1)..(199): tr|A0A1T5D457|A0A1T5D457_9FLAO GTP cyclohydrolase 1 OS= Maribacter arcticus OX=561365 GN=folE PE=3 SV=1
MSPYRNLEEYNLEITDEVRSMYSSIINEIGEDISREGLVKTPERAAKAMLFLTQGYQQDAVEILKGAMFKESYDDMVIIKDIELYSLCEHHMLPFFGKAHIAYIPNGHIVGLSKIPRVVDVFARRLQVQERLTHDILECINNTLQPKGVAVVIEASHMCMMMRGVQKQNSVTTTSGFRGQFEKIETRNEFLKLISSKLS

SEQ ID NO: 10245 - protein, 226 aa, Maribacter arcticus
  misc_feature (1)..(226): tr|A0A1T4ZRX2|A0A1T4ZRX2_9FLAO GTP cyclohydrolase 1 OS= Maribacter arcticus OX=561365 GN=folE PE=3 SV=1
MKIEDTLENQFDELGNDHISTSEDTPLRKDAFVLDDATKIERIRENVRDIMLTLGLDLNDDSLKGTPNRVAKMYVNEIFGGLHPNKKPKASTFDNKYKYGEMLVEKNITLYSTCEHHFLPIVGRAHVAYISNGTVVGLSKMNRVVDYYAKRPQVQERLNIQIVRELQKVLGTEDVACVIDAKHLCVNSRGIRDIDSSTVTAEYGGKFKEELVRREFLNYLNLDTHF

SEQ ID NO: 10246 - protein, 233 aa, Maribacter caenipelagi
  misc_feature (1)..(233): tr|A0A4V3E1P7|A0A4V3E1P7_9FLAO GTP cyclohydrolase 1 OS= Maribacter caenipelagi OX=1447781 GN=folE PE=3 SV=1
MKHQEIMLNTLIKTNKLNGFSEEEIGDDHIYTGLETPMKSNAFKISDEEKKDKIAHLFSEIMDVMGLDLEDDSLKGTPNRVAKMYIDEIFSGLNPANKPKVALFDNKYQYNQMLVEKNITFYSNCEHHFVPIIGKAHIAYISSGKVIGLSKLNRIVQYYAKRPQVQERLTNQIAAELSQILETDDIAVIIDAKHLCVSSRGIKDDTSATVTSFYGGVFNTSNKITELQNYLNH

SEQ ID NO: 10247 - protein, 199 aa, Maribacter caenipelagi
  misc_feature (1)..(199): tr|A0A4R7DH64|A0A4R7DH64_9FLAO GTP cyclohydrolase 1 OS= Maribacter caenipelagi OX=1447781 GN=folE PE=3 SV=1
MSPYKNLEEYNLEITDEVKSRYSSIIDEIGEDVEREGLVKTPERAAKAMLFLTQGYQQDAVEILKGAMFKEDYDDMVIIKDIELYSLCEHHMLPFFGKAHIAYIPNGHIVGLSKIPRVVDVFARRLQVQERLTHDILECINNTLKPKGVAVVIEASHMCMMMRGVQKQNSVTTTSGFRGQFEKIETRNEFLKLISAKLS

SEQ ID NO: 10248 - protein, 199 aa, Maribacter cobaltidurans
  misc_feature (1)..(199): tr|A0A223VAG6|A0A223VAG6_9FLAO GTP cyclohydrolase 1 OS= Maribacter cobaltidurans OX=1178778 GN=folE PE=3 SV=1
MSPYRNLEEYNLEITDEIKEKFSSVIDEIGEDKNREGLLKTPERAAKAMLFLTQGYKQDAEEILRGAMFKEDYDDMVIIKDIELYSLCEHHMLPFFGKAHIAYIPNGHIVGLSKIPRIVDVFARRLQVQERLTHDILECLNNTLKPKGVAVVIEASHMCMMMRGVQKQNSVTTTSGFRGQFEKIETRNEFLKLISSDLS

SEQ ID NO: 10249 - protein, 226 aa, Maribacter cobaltidurans
  misc_feature (1)..(226): tr|A0A223V1K9|A0A223V1K9_9FLAO GTP cyclohydrolase 1 OS= Maribacter cobaltidurans OX=1178778 GN=folE PE=3 SV=1
MKTEGTLEEHFEQLGDDHISSSEETPLRKDAFILSDEEKIERIKGSVREILLTLGMDLTDDSLKGTPNRVAKMFVKEIFGGLHPDRKPNSSTFENKYKYGEMLVEKNITLYSTCEHHLLPIVGRAHVAYISKGSVVGLSKMNRIVDYYAKRPQVQERLNIQIVRELQKVLGTEDVACVIDAKHLCVNSRGIRDIESSTVTAEYGGKFKEEAVRNEFLEYINMDTQF

SEQ ID NO: 10250 - protein, 199 aa, Maribacter dokdonensis
  misc_feature (1)..(199): tr|A0A1H4RNJ9|A0A1H4RNJ9_9FLAO GTP cyclohydrolase 1 OS= Maribacter dokdonensis OX=320912 GN=folE PE=3 SV=1
MSPYRNLEEYNLEITDEVKSRYSSIIDEIGEDVAREGLVKTPERAAKAMLFLTQGYKQDAVEILKGAMFKEDYDDMVIIKDIELYSLCEHHMLPFFGKAHIAYIPNGHIVGLSKIPRVVDVFARRLQVQERLTHDILECINNTLKPKGVAVVIEASHMCMMMRGVQKQNSVTTTSGFRGQFEKIETRNEFLKLISAKLS

SEQ ID NO: 10251 - protein, 226 aa, Maribacter dokdonensis
  misc_feature (1)..(226): tr|A0A1H4P047|A0A1H4P047_9FLAO GTP cyclohydrolase 1 OS= Maribacter dokdonensis OX=320912 GN=folE PE=3 SV=1
MKIEDTLENQFDEIGNDHISTSEDTPLRSDAFDLDDAEKIERIRNNVREIMHTLGLDLNDDSLKGTPNRVAKMYVNEIFGGLNPSRRPKASTFDNKYKYGEMLVEKNITLYSTCEHHLLPIVGRAHVAYISNGTVVGLSKMNRIVDYYAKRPQVQERLNIQIVRELQKALGTEDVACVIDAKHLCVNSRGIRDIDSSTVTAEYGGKFKEELVRREFLNYLNLDTHF

SEQ ID NO: 10252 - protein, 226 aa, Maribacter flavus
  misc_feature (1)..(226): tr|A0A5B2TW35|A0A5B2TW35_9FLAO GTP cyclohydrolase 1 OS= Maribacter flavus OX=1658664 GN=folE PE=3 SV=1
MKTEGTLEEHFEQLGDDHISSSEETPLRKDAFLLSDEEKIERIKGSVREILLTLGMDLEDDSLKGTPNRVAKMFVKEIFGGLHPDRKPNSSTFDNKYKYGEMLVEKNITLYSTCEHHLLPIVGRAHVAYISNGSVVGLSKMNRIVDYYAKRPQVQERLNIQIVRELQKVLGTEDVACVIDAKHLCVNSRGIRDIESSTVTAEYGGKFKQEAVRNEFLEYINMDTQF

SEQ ID NO: 10253 - protein, 199 aa, Maribacter flavus
  misc_feature (1)..(199): tr|A0A5B2TT59|A0A5B2TT59_9FLAO GTP cyclohydrolase 1 OS= Maribacter flavus OX=1658664 GN=folE PE=3 SV=1
MAPYRNLEEYNMEITDGIKEKFASVIDEIGEDKSREGLLKTPERAAKAMLFLTQGYKQDAEEILKGAMFKEDYDDMVIIKDIELYSLCEHHMLPFFGKAHIAYIPNGHIVGLSKIPRIVDVFARRLQVQERLTHDILECINNTLKPKGVAVVIEASHMCMMMRGVQKQNSVTTTSGFRGQFEKIETRNEFLKLISSDLS

SEQ ID NO: 10254 - protein, 226 aa, Maribacter orientalis
  misc_feature (1)..(226): tr|A0A1H7NIG9|A0A1H7NIG9_9FLAO GTP cyclohydrolase 1 OS= Maribacter orientalis OX=228957 GN=folE PE=3 SV=1
MKIEDTLENQFDELGNDHISTSEDTPLRKDAFVLDDATKIERIRENVRDIMLTLGLDLNDDSLKGTPNRVAKMYVNEIFGGLHPSRKPKASTFDNKYKYGEMLVEKNITLYSTCEHHFLPIVGRAHVAYISNGTVVGLSKMNRIVDYYAKRPQVQERLNIQIVRELQEVLGTEDVACVIDAKHLCVNSRGIRDIDSSTVTAEYGGKFKEELVRREFLNYLNLDTHF

SEQ ID NO: 10255 - protein, 223 aa, Maribacter orientalis
  misc_feature (1)..(223): tr|A0A1H7UGW1|A0A1H7UGW1_9FLAO GTP cyclohydrolase 1 OS= Maribacter orientalis OX=228957 GN=folE PE=3 SV=1
MLLIKENINFVEDNYEYIKHKIKSMSPYRNLEEYNLEITDEVKSRYSSIIAEIGEDVGREGLVKTPERAAKAMLFLTQGYQQDAVEILKGAMFKESYDEMVIIKDIELYSLCEHHMLPFFGKAHIAYIPNGHIVGLSKIPRVVDVFARRLQVQERLTHDILECINNTLKPKGVAVVIEASHMCMMMRGVQKQNSVTTTSGFRGQFEKIETRNEFLKLISSKLS

SEQ ID NO: 10256 - protein, 199 aa, Maribacter polysiphoniae
  misc_feature (1)..(199): tr|A0A316DV56|A0A316DV56_9FLAO GTP cyclohydrolase 1 OS= Maribacter polysiphoniae OX=429344 GN=folE PE=3 SV=1
MTPYRSFEEYDLEITKDVQERYAKIIEEIGEDVSREGLMKTPERAAKAMLFLTQGYEQDAAQILKSAMFNESYNEMVIVKDIELYSLCEHHMLPFFGKAHIAYIPDGQIVGLSKLPRIVDVFARRLQVQERLTEQILDCINDTLKPQGVAVVIEASHMCMMMRGVQKQNSVTTTSGFRGSFVKEETRNEFLKLISSSLS

SEQ ID NO: 10257 - protein, 226 aa, Maribacter polysiphoniae
  misc_feature (1)..(226): tr|A0A316E3B4|A0A316E3B4_9FLAO GTP cyclohydrolase 1 OS= Maribacter polysiphoniae OX=429344 GN=folE PE=3 SV=1
MKMDSTLEEQYEEIGNDHVSSAEDTPLRDDAFVLSDNEKIERIKTNVREIMLTLGLDLDDDSLMGTPNRVAKMFVKEIFSGLDPKKMPNSSTFDNKYKYGEMLVEKNITVYSTCEHHLLPIVGRAHVAYISNGTVVGLSKMNRIVDYYAKRPQVQERLTIQVVRELQRVLNTEDVACVIDAKHLCVNSRGIRDIESSTVTAEYGGKFKNEALRSEFLEYLNLETKF

SEQ ID NO: 10258 - protein, 199 aa, Maribacter sp.
  misc_feature (1)..(199): tr|A0A3R8Q2T7|A0A3R8Q2T7_9FLAO GTP cyclohydrolase 1 OS= Maribacter sp. PoM-212 OX=2498892 GN=folE PE=3 SV=1
MAPYRNLEEYNMEITDGIKEKFASVIDEIGEDKSREGLLKTPERAAKAMLFLTQGYKQDAEEILRGAMFKEDYDDMVIIKDIELYSLCEHHMLPFFGKAHVAYIPNGHIVGLSKIPRIVDVFARRLQVQERLTHDILECINNTLQPKGVAVVIEASHMCMMMRGVQKQNSVTTTSGFRGQFEKIETRNEFLKLISSDLS

SEQ ID NO: 10259 - protein, 199 aa, Maribacter sp.
  misc_feature (1)..(199): tr|A0A559NL79|A0A559NL79_9FLAO GTP cyclohydrolase 1 OS= Maribacter sp. MAR_2009_72 OX=1250050 GN=folE PE=3 SV=1
MSSYRNLEEYNLEITDEVRSRYSSIIEEIGENVEREGLIKTPERAAKAMLFLTQGYKQDAVEILKGAMFKESYDDMVIIKDIELYSLCEHHMLPFFGKAHIAYIPNGHIVGLSKIPRVVDVFARRLQVQERLTHDILECINTTLKPKGVAVVIEASHMCMMMRGVQKQNSVTTTSGFRGQFEKIETRNEFLKLISAKLS

SEQ ID NO: 10260 - protein, 226 aa, Maribacter spongiicola
  misc_feature (1)..(226): tr|A0A4R7K7E6|A0A4R7K7E6_9FLAO GTP cyclohydrolase 1 OS= Maribacter spongiicola OX=1206753 GN=folE PE=3 SV=1
MKIEDTLENQFDELGNDHISTSEDTPLRSDAFDLDDAEKIERIRENVREIMLTLGLDLTDDSLKGTPNRVAKMYVNEIFGGLNPARKPKASTFDNKYKYGEMLVEKNITLYSTCEHHLLPIVGRAHVAYISNGTVVGLSKMNRIVDYYAKRPQVQERLNIQIVRELQKALGTEDVACVIDAKHLCVNSRGIRDIDSSTVTAEYGGKFKEELVRREFLNYLNLDTHF

SEQ ID NO: 10261 - protein, 199 aa, Maribacter spongiicola
  misc_feature (1)..(199): tr|A0A4R7K2L3|A0A4R7K2L3_9FLAO GTP cyclohydrolase 1 OS= Maribacter spongiicola OX=1206753 GN=folE PE=3 SV=1
MSPYRNLEEYNLEITDEVKSRYSSIIEEIGEDVKREGLVKTPERAAKAMLFLTQGYQQDPVEILEGAMFKEDYDDMVIIKDIELYSLCEHHMLPFFGKAHIAYIPNGQIVGLSKIPRVVDVFARRLQVQERLTHDILECINNTLKPKGVAVVIEASHMCMMMRGVQKQNSVTTTSGFRGQFEKIETRNEFLKLISAKLS

SEQ ID NO: 10262 - protein, 226 aa, Maribacter stanieri
  misc_feature (1)..(226): tr|A0A1I6IGG1|A0A1I6IGG1_9FLAO GTP cyclohydrolase 1 OS= Maribacter stanieri OX=440514 GN=folE PE=3 SV=1
MKIEDTLENQFEELGNDHISTSEDTPLRSDAFDLDDAEKIERIRENVREIMLTLGLDLTDDSLKGTPNRVAKMYVNEIFGGLNPAKKPKASTFDNKYKYGEMLVEKNITLYSTCEHHLLPIVGRAHVAYISKGTVVGLSKMNRIVDYYAKRPQVQERLNIQIVRELQKALGTEDVACVIDAKHLCVNSRGIRDIDSSTVTAEYGGKFKEELVRREFLNYLNLDTHF

SEQ ID NO: 10263 - protein, 202 aa, Maribacter stanieri
  misc_feature (1)..(202): tr|A0A1I6JZV9|A0A1I6JZV9_9FLAO GTP cyclohydrolase 1 OS= Maribacter stanieri OX=440514 GN=folE PE=3 SV=1
MHFMSPYKNLEEYNLEITDEVKSRYSSIIDEIGEDVEREGLVKTPERAAKAMLFLTQGYQQDAVEILKGAMFKESYDDMVIIKDIELYSLCEHHMLPFFGKAHIAYIPNGHIVGLSKIPRVVDVFARRLQVQERLTHDILECINNTLKPKGVAVVIEASHMCMMMRGVQKQNSVTTTSGFRGQFEKIETRNEFLKLISAKLS

SEQ ID NO: 10264 - protein, 199 aa, Maribacter ulvicola
  misc_feature (1)..(199): tr|A0A1N6YN12|A0A1N6YN12_9FLAO GTP cyclohydrolase 1 OS= Maribacter ulvicola OX=228959 GN=folE PE=3 SV=1
MSPYKNLEEYNLEITDEVKSRYSSIIDEIGEDVAREGLVKTPERAAKAMLFLTQGYQQDAVEILQGAMFKEDYDDMVIIKDIELYSLCEHHMLPFFGKAHIAYIPDGQIVGLSKIPRVVDVFARRLQVQERLTHDILECINNTLKPKGVAVVIEASHMCMMMRGVQKQNSVTTTSGFRGQFEKIETRNEFLKLISAKLS

SEQ ID NO: 10265 - protein, 226 aa, Maribacter ulvicola
  misc_feature (1)..(226): tr|A0A1N6RZN3|A0A1N6RZN3_9FLAO GTP cyclohydrolase 1 OS= Maribacter ulvicola OX=228959 GN=folE PE=3 SV=1
MKIEDTLENQFDELGNDHISTSEDTPLRSDAFDLDDAEKIERIRENVREIMLTLGLDLTDDSLKGTPNRVAKMYVNEIFGGLNPSKKPKASTFDNKYKYGEMLVEKNITLYSTCEHHLLPIVGRAHVAYISNGTVVGLSKMNRIVDYYAKRPQVQERLNIQIVRELQKALGTEDVACVIDAKHLCVNSRGIRDIESSTVTAEYGGKFKEELVRREFLNYLNLDTHF

SEQ ID NO: 10266 - protein, 226 aa, Maribacter vaceletii
  misc_feature (1)..(226): tr|A0A495E678|A0A495E678_9FLAO GTP cyclohydrolase 1 OS= Maribacter vaceletii OX=1206816 GN=folE PE=3 SV=1
MKIDTTLEEQFDNMGDDHISSAEDTPMREDAFVLNDKEKIEKIKASVTDILHTLGLDLNDDSLKGTPNRVAKMFVNEIFGGLHPDRKPKASTFDNKYKYGEMLVEKNITLYSTCEHHLLPIVGRAHIAYISSGSVVGLSKMNRIVDYYAKRPQVQERLTIQVVKELQKVLGTEDVACIIDAKHLCVNSRGISDIESSTVTAEYGGKFKEEAVRREFLNFIQLETKF

SEQ ID NO: 10267 - protein, 199 aa, Maribacter vaceletii
  misc_feature (1)..(199): tr|A0A495E7G0|A0A495E7G0_9FLAO GTP cyclohydrolase 1 OS= Maribacter vaceletii OX=1206816 GN=folE PE=3 SV=1
MSSYKNLEEYDQEVTKEVQEKYTSILNGIGEDVSREGLVKTPERAAKAMQFLTQGYDLDPVKILKGAMFKEDYDDMVIIKDIELYSLCEHHMLPFFGKAHIAYIPNGHIVGLSKIPRIVDVFARRLQVQERLTHDILECINNTLKPQGVAVVIEASHMCMMMRGVQKQNSVTTTSGFRGQFEKQETRNEFLKLISSHLS

SEQ ID NO: 10268 - protein, 366 aa, Maribius pelagius
  misc_feature (1)..(366): tr|A0A1H8LFJ0|A0A1H8LFJ0_9RHOB GTP cyclohydrolase FolE2 OS=Maribius pelagius OX=387096 GN=folE2 PE=3 SV=1
MNIHLHDHDGDMSRQEAQRLMARLRAWARSADPDDLATLDPAIRSLAGGLGDDYPALDDVYDDTFRADAAYRATMPDLQNGPASLIEGAPRQIQHVGISNFRLPIRFRTRDNGDLTLETSVTGTVSLEAEKKGINMSRIMRTFYRRAEETFSFAVIEAALDDYKADLESFDARIQMRFSFPMKVESLRSGLTGYQYYDFALELVEKAGVRRKIVHLDYVYSSTCPCSLELSEHARRERGQLATPHSQRSVARVSVVLDEGHGTLWFEDLIDLCRAAVPTETQVMVKREDEQAFAELNAANPIFVEDAARLFALQLQDEPRVGDFRVVASHQESLHSHDAVSVLTEGPTFDHDSLDPRLFATLFHVG

SEQ ID NO: 10269 - protein, 366 aa, Maribius salinus
  misc_feature (1)..(366): tr|A0A1M6LGH0|A0A1M6LGH0_9RHOB GTP cyclohydrolase FolE2 OS=Maribius salinus OX=313368 GN=folE2 PE=3 SV=1
MNIHLHDHDGDMSRQEAQRLMARLRAWARSADPDDLATLDPAIRSLAGGLGDDYPALDDVYDDTFRADAAYRATMPDLQNGPASLIEGAPRQIQHVGISNFRLPIRFRTRDNGDLTLETSVTGTVSLEAEKKGINMSRIMRTFYRRAEETFSFAVIEAALDDYKADLESFDARIQMRFSFPMKVESLRSGLTGYQYYDFALELVEKAGVRRKIVHLDYVYSSTCPCSLELSEHARRERGQLATPHSQRSVARVSVVLDEGDDTLWFEDLIDLCRAAVPTETQVMVKREDEQAFAELNAANPIFVEDAARLFALQLQDEPRVGDFRVVASHQESLHSHDAVSVLTEGPTFDHDSLDPRLFATLFHVG

SEQ ID NO: 10270 - protein, 205 aa, Maricaulis maris
  misc_feature (1)..(205): sp|Q0AM02|GCH1_MARMM GTP cyclohydrolase 1 OS=Maricaulis maris (strain MCS10) OX=394221 GN=folE PE=3 SV=1
MDAVTPDAARIAAAINTKPSREEAEAAVRTLISWAGDDPTREGLLDTPKRVVKAYEEWFSGYDADPLKALGKTFEDVQGYDDMVMLTNIDVESHCEHHLAPIMGVAHVAYLPSKAVVGISKIARVVEIFSKRMQTQETMTAQIADALTEAMEPRGVAVLVDAKHQCMTTRGVHHPNVSTITTTFTGEFRNDRDLKDRFMRLLERA

SEQ ID NO: 10271 - protein, 205 aa, Maricaulis maris
  misc_feature (1)..(205): tr|A0A495CYD1|A0A495CYD1_9RHOB GTP cyclohydrolase 1 OS= Maricaulis maris OX=74318 GN=folE PE=3 SV=1
MDAVTPDAARLAAAIKSKPSREEAEAAVRTLISWAGDDPDREGLLDTPKRVVKAYEEWFSGYGADPLKALGKTFEDVQGYDDMVMLTNIDVESHCEHHLAPIMGVAHVAYLPSKAVVGISKIARVVEIFSKRMQTQETMTAQIADALTEAMEPRGVAVLVDAKHQCMTTRGVHHPNVSTITTTFTGEFRNDRDLKDRFMRLLERA

SEQ ID NO: 10272 - protein, 205 aa, Maricaulis salignorans
  misc_feature (1)..(205): tr|A0A1G9URG1|A0A1G9URG1_9RHOB GTP cyclohydrolase 1 OS= Maricaulis salignorans OX=144026 GN=folE PE=3 SV=1
MDAVTTDSTRLTEAKPARPSRHEAEEAVRTLIAWAGDDPAREGLLDTPKRVAKAYEEWFSGYGADPAAALGKTFEDVQGYDDMVMLTNIDVESHCEHHLAPIMGVAHVAYLPSAAVVGISKIARVVEIFCKRMQTQETMTAQIADALMDAMNPRGVAILIDAKHQCMTTRGVHHPNVSTITSTFTGEFKTDANLRDRFMRLAEKA

SEQ ID NO: 10273 - protein, 209 aa, Maricaulis sp.
  misc_feature (1)..(209): tr|A0A2D8BVR1|A0A2D8BVR1_9RHOB GTP cyclohydrolase 1 OS= Maricaulis sp. OX=1486257 GN=folE PE=3 SV=1
MDAHNRDALRVVSNKNRPTREQAEEAVRTLIAWAGDDPTREGLLDTPKRVAKAWEEWFSGYQADPAEELSRVFEEVGGYDDLVLLTNIDVESHCEHHLAPILGVAHVAYLPKSKVVGISKIARVVEIFSKRMQTQETMTAQIANALMDAMDARGVAVLVDAKHQCMTTRGVHHPNVSTVTTTFTGEFKTNDELRGRFLRHIDRAQVVQR

SEQ ID NO: 10274 - protein, 205 aa, Maricaulis sp.; identical to SEQ ID NO: 10271
  misc_feature (1)..(205): tr|A0A1Q8FJ27|A0A1Q8FJ27_9RHOB GTP cyclohydrolase 1 OS= Maricaulis sp. W15 OX=1772333 GN=folE PE=3 SV=1

SEQ ID NO: 10275 - protein, 282 aa, Marichromatium gracile
  misc_feature (1)..(282): tr|A0A4R4A6G9|A0A4R4A6G9_MARGR GTP cyclohydrolase FolE2 OS=Marichromatium gracile OX=1048 GN=folE2 PE=3 SV=1
MEHVLESNRCNATADIADVQGSADTRRIAIDKVGIKDIRHPVRVRDRSGNEQHTVATFNMYVYLPHDFKGTHMSRFVQVLNNHEEEIGVASFKDMLAEMSTRLESEAGHIEMRFPFFMRKQAPVSGVQSLLDYEVTLIGEIRHGEPALQVKVVIPVTSLCPCSKKISAYGAHNQRSHVTLQVRMRDFIWIEELIEMVESEASSELFGLLKRPDEKYVTEHAYDNPKFVEDMVRDVAKRLNEDDRILYYVVEAENFESIHNHSAYALIERDKEAEARTAEASL

SEQ ID NO: 10276 - protein, 212 aa, Marichromatium gracile
  misc_feature (1)..(212): tr|A0A4R4A6X0|A0A4R4A6X0_MARGR GTP cyclohydrolase 1 OS= Marichromatium gracile OX=1048 GN=folE PE=3 SV=1
MAEQARAPKIVTHSHYATSFEAESEAEVYDPRKEGLVREMLDALGEDAEREGLKRTPLRVAKALDFLTSGYQMSAEEIIKKALFEEDAKEMVIVRDIEFYSMCEHHMLPFFGHAHVGYLPNGKVVGLSKIARVVDVFARRLQVQERLTNQVADALMEHLGAHGVAVVMEASHTCMMMRGVQKQRSTTVSSAMRGAFESDPRTRAEFMSFVRG

SEQ ID NO: 10277 - protein, 282 aa, Marichromatium purpuratum
  misc_feature (1)..(282): tr|W0E155|W0E155_MARPU GTP cyclohydrolase FolE2 OS=Mari chromatium purpuratum 984 OX=765910 GN=folE2 PE=3 SV=1
MEHVLESNRCNATADIADVQGSADTRRIAIDKVGIKDIRHPVRVRDRSGSEQHTVATFNMYVYLPHDFKGTHMSRFVQVLNNHEREISIASFKEMLIEMSTRLESEAGHIEMRFPFFMSKRAPVSGVESLLDYEVTLIGEIRDGEPALQVKVVIPVTSLCPCSKKISAYGAHNQRSHVTLQVRMRDFIWIEELIEMVEAEASSELFGLLKRPDEKYVTEHAYDNPKFVEDLVRDVAKRLNEDDRILYYVVEAENFESIHNHSAYALIERDKEAEARTAEASL

SEQ ID NO: 10278 - protein, 212 aa, Marichromatium purpuratum
  misc_feature (1)..(212): tr|W0DXR3|W0DXR3_MARPU GTP cyclohydrolase 1 OS=Marichro matium purpuratum 984 OX=765910 GN=folE PE=3 SV=1
MAEQARAPKIVTHSHYATSFEAESEAEVYDPRKEGLVREMLDALGEDAEREGLKRTPLRVAKALDFLTSGYQMSAEEIIKKALFEEDAKEMVIVRDIEFYSMCEHHMLPFFGHAHVGYLPNGKVVGLSKIARVVDVFARRLQVQERLTNQVADALMEHLGAHGVAVVMEASHTCMMMRGVQKQRSTTVSSAMRGTFESDPSTRAEFMSFVRG

SEQ ID NO: 10279 - protein, 206 aa, Marihabitans asiaticum
  misc_feature (1)..(206): tr|A0A560WDG8|A0A560WDG8_9MICO GTP cyclohydrolase 1 OS= Marihabitans asiaticum OX=415218 GN=folE PE=3 SV=1
MSHDLTAEAAAWDTPPDRAMDLPRIEAAVREILIAVGEDPDREGLLDTPARVARSYAETFAGLHQDPAGLLATTFDIDHDELVIVRDIALYSTCEHHLVPFHGVAHVGYVPGRSGKVTGLSKLARLVDVYARRPQVQERLTTQIADALVEHLDVAGVIVVVEAEHLCMSMRGVRKPGARTLTSAVRGQLRDPATRAEAMALLTEAR

SEQ ID NO: 10280 - protein, 205 aa, Marinactinospora thermotolerans
  misc_feature (1)..(205): tr|A0A1T4SSH5|A0A1T4SSH5_9ACTN GTP cyclohydrolase 1 OS= Marinactinospora thermotolerans DSM 45154 OX=1122192 GN =folE PE=3 SV=1
MTDSAEDDLTLGHPISTEVDQPRIEKAVREILLAIGEDPDRDGLRDTPARVARAYAEQFAGLGQGPEDVLTTVFEAGHEEMVLVKDIELYSTCEHHLVPFYGVAHVGYIPNAKGQITGLSKLARLVDVYARRPQVQERLTTQVADAVMTHLEPRGVIVVVEAEHLCMTMRGVRKPGAKTVTSAVRGDFRNRDRTRAEAMSLILRD

SEQ ID NO: 10281 - protein, 198 aa, Unknown
  misc_feature (1)..(198): tr|A0A0C1RBE3|A0A0C1RBE3_9ACTN GTP cyclohydrolase 1 OS= marine actinobacterium MedAcidi-G1 OX=1550399 GN=folE P E=3 SV=1
MSLDSLEKKLFDSTRAENAVRELLYAIGEDPDRDGLLETPKRVARMYEEVTSGIRCEPAEELNKCFDVDHNEMIMVRDISLYSLCEHHLVPFIGQAHIAYIPRTNGSIVGLSKLARLVDGYAKRLQVQERLTSQIADALESKLNPIGALVVIEAEHLCMSMRGIKKPGSSTVTSAVRGIFRDDVSARSEAMRFLDHSR

SEQ ID NO: 10282 - protein, 194 aa, Unknown
  misc_feature (1)..(194): tr|A4AFQ1|A4AFQ1_9ACTN GTP cyclohydrolase 1 OS=marine a ctinobacterium PHSC20C1 OX=312284 GN=folE PE=3 SV=1
MSIDVARIEAAVAEILDAIGEDPARAGLTATPRRVAEAYAEFFAGNGMDALDHLADSIEFTANADQTGELVVLRDIEFRSMCEHHLLPFLGVAHVAYVPDERIIGLGNLARVVETISARAQLQERLTEEIADAIDTGLSPRGVLVIIDAAHGCVSARGSRQTSSSTVTLASRGVLSQPVERAEVLALIGRADNA

SEQ ID NO: 10283 - protein, 219 aa, Unknown
  misc_feature (1)..(219): tr|A0A1Q3GN98|A0A1Q3GN98_9BACT GTP cyclohydrolase 1 OS= marine bacterium AO1-C OX=1905359 GN=folE PE=3 SV=1
MENGKYEEMGDEHVATSYETPMRDDAFELSDDTKIKLIEERFREIMDILGLDLTDDSLNGTPHRVAKMYVKEIFSGLNPENKPKPTMFENLYKYNEMLVEKDITFYSNCEHHFVPIYGKAHVAYISSGKVIGLSKINRIVQYYARRPQVQERLTMQIGKELEKMLETENVAVILDADHMCVSSRGVQDTSSSTITSYYGGKFQEENTRNEFLKYVDMRK

SEQ ID NO: 10284 - protein, 227 aa, Unknown
  misc_feature (1)..(227): tr|A0A1Q3GZH6|A0A1Q3GZH6_9BACT GTP cyclohydrolase 1 OS= marine bacterium AO1-C OX=1905359 GN=folE PE=3 SV=1
MIQEKLNGLDADEIGDLHVATSYDTPLREDAFLLDDATKMKLIEEYFGKIMHTLGLDLNDDSLKGTPHRVAKMYVKEIFSGLNPANKPKVKVFDNKYQYGEMLIEKNITLYSSCEHHFLPIIGKAHVGYIANDKVIGLSKINRIVDYFARRPQVQERLSRQIFEEMKKDLGTEDVAVVIESKHLCVSSRGVQDTDSSTITAEYGGKFKDNEVRKEFLAYINQDYLKE

SEQ ID NO: 10285 - protein, 235 aa, Unknown
  misc_feature (1)..(235): tr|A0Z6H9|A0Z6H9_9GAMM GTP cyclohydrolase 1 OS=marine g amma proteobacterium HTCC2080 OX=247639 GN=folE PE=3 SV =1
MLTSTHQKPQALELADNTVNLRPSISREATLVREALVARGLETPLIDNGLNREQKLAIVKEAFTDITQALGLDLTDDSLCDTPDRISRMYIDEIFSGLDYGNFPKISVIDNKMQVDEMVMIDDIDLTSTCEHHFVTIDGQARVAYLPRNKIIGLSKINRIVRFFAQRPQVQERLTQQILVALQTLLETDNVAVSMEAVHYCVKSRGVMDTSSRTRTTSLGGMFKENPAARSEFLR

SEQ ID NO: 10286 - protein, 201 aa, Unknown
  misc_feature (1)..(201): tr|A0YDA3|A0YDA3_9GAMM GTP cyclohydrolase 1 OS=marine g amma proteobacterium HTCC2143 OX=247633 GN=folE PE=3 SV =1
MGQPITTSKEDNVPDDNIETMESAYATIIDGIGEDLSRDGLLDTPKRAAKAMKFLTHGYNQTVEEIVNGALFESDASEMVLVSDIELYSMCEHHVLPFIGKCHVAYIPGGKVLGLSKVARIVDMYARRLQIQESLTTQIARSVMDITGAAGVGVIIEAKHMCMMMRGVQKQNSVMRTSSLLGCFRDNDKTRAEFLSLVNVR

SEQ ID NO: 10287 - protein, 367 aa, Marinibacterium profundimaris
  misc_feature (1)..(367): tr|A0A225NK54|A0A225NK54_9RHOB GTP cyclohydrolase FolE2 OS=Marinibacterium profundimaris OX=1679460 GN=folE2 P E=3 SV=1
MTIHAPTLQRKPDQDEAAEALAVLRSWARGASDAEISQLDPAIAKLIPGGGAVSYPSLSRQYPDDFAVDANYKASLPDLQNGPSSLIRGAKQEIQHVGISNFRLPIRFHTRDNGDVTLETSVTGSVSLEADKKGINMSRIMRSFYAHAEKTFSFEVIEAALDDYKSDLESFDARIMMRFSFPMKVDSLRSGLAGYQYYDIALELVERAGTRRKIMHLDYVYSSTCPCSLELSEHARSMRGQLATPHSQRSVARISVELERDAGCLWFEDLVEACRRAVPTETQVMVKREDEQAFAELNAANPIFVEDAARLFCESLEADARIGDFRIIASHQESLHSHDAVSVLTRGTTFDSESLDPQLFATLHHRG

SEQ ID NO: 10288 - protein, 190 aa, Mariniblastus fucicola
  misc_feature (1)..(190): tr|A0A5B9PAP3|A0A5B9PAP3_9PLAN GTP cyclohydrolase 1 OS= Mariniblastus fucicola OX=980251 GN=folE PE=3 SV=1
MKKDVDHEAIKQAVRTILLSVGEDPDRPGLVETPRRVAGMYAEMFSGLDVDPGRHLEVTFPEEYDEMVLVRDISFTSMCEHHLLPFTGVAHVAYVPHGKVTGLSKLARVVEEVSRRPQVQERMTQTVADLIDEKLSTRGVAVVCSAEHSCMSIRGIRKPGSRTVTSALRGIFKTDQATRAEFMSLINGSQ

SEQ ID NO: 10289 - protein, 263 aa, Mariniblastus fucicola
  misc_feature (1)..(263): tr|A0A5B9PH15|A0A5B9PH15_9PLAN GTP cyclohydrolase 1 typ e 2 OS=Mariniblastus fucicola OX=980251 GN=MFFC18_39780 PE=4 SV=1
MNTIASICDFLDQFAPTSLAEDWDNVGLILGDPNREAARVMTCLTVTPESATEAIEKKADLIVSHHPLPFSPTKRITTDQTATRLIWELAGAGVSIHSPHTGFDSANEGINQMLCDRLSIAATRPIVPNRNDPEMPGAGRIGKLPASTSLREFALTVKELFALPRIQVVGDLDASIQRVASACGSGGSFLSGAASRGAECLVTGEATFHSVLEARARKVGLILMGHYFSERFAIEVLSDKLSEAFPEATVWASEQECDPIESL

SEQ ID NO: 10290 - protein, 209 aa, Marinicauda algicola
  misc_feature (1)..(209): tr|A0A4S2H4G4|A0A4S2H4G4_9RHOB GTP cyclohydrolase 1 OS= Marinicauda algicola OX=2029849 GN=folE PE=3 SV=1
MDALTDKKTLDAATASTIARPSRQEAEEAVRTLLRWAGDDPRREGLIDTPKRVVKAYEEWFAGYSKDAGAELGKVFEDVQGYDDMVMLTNMDVESHCEHHMAPILGTACVAYLPDRAVVGISKIAKVVEIFSKRLQTQETMTAQIADAIEEAMKPRGVAVFVDAKHQCMTTRGVHHPNVSTITTTFTGEFKANPELRERFMRLCEKNYR

SEQ ID NO: 10291 - protein, 209 aa, Marinicauda pacifica
  misc_feature (1)..(209): tr|A0A4S2HAQ7|A0A4S2HAQ7_9RHOB GTP cyclohydrolase 1 OS= Marinicauda pacifica OX=1133559 GN=folE PE=3 SV=1
MDALTDKTVLDAASASGVERPSRDEAEEAVRTLLRWAGDDPRREGLLDTPKRVVKAYEEWFAGYTKDAAAELGKVFEDVQGYDDMVMLTNMDVESHCEHHMAPILGTACVAYLPDRAVVGISKIAKVVEIFSKRLQTQETMTAQIADVIESAMKPRGVAVFVDAKHQCMTTRGVHHPNVSTVTTTFTGEFKANPELRERFMRLCERNAR

SEQ ID NO: 10292 - protein, 208 aa, Marinicauda sp.
  misc_feature (1)..(208): tr|A0A2U2BQR2|A0A2U2BQR2_9RHOB GTP cyclohydrolase 1 OS= Marinicauda sp. WD6-1 OX=2135793 GN=folE PE=3 SV=1
MDAITDKTMLETAEEVPARPSREEAEEAVRTLIRWAGDDPRREGLLDTPGRVVKAYQEWFAGYEKDAADELGRVFEDVQGYDDMVMLTDIDVESHCEHHMAPIIGTACVAYLPDRAVVGISKIAKVVEIFSKRLQTQETMTAQIADAIEEAMKPRGVAVFVDAKHQCMTTRGVHHPNVSTITTTFTGEFKANPELRERFMRLTEKSRR

SEQ ID NO: 10293 - protein, 197 aa, Marinicaulis flavus
  misc_feature (1)..(197): tr|A0A2S7JZC7|A0A2S7JZC7_9PROT GTP cyclohydrolase 1 OS= Marinicaulis flavus OX=2058213 GN=folE PE=3 SV=1
MSGQFGERTEEQRERALEAVRELIRWIGDNPAREGLKDTPRRVVDAYLEYFQGYDQQPEDYLTRTFEQVGGYDEIVLLKEIPFHSHCEHHMAPIIGKAHVAYLPTDKVVGISKLARVVQAYARRLQVQERLTAEIADCIQKVLEPQGVAVVIEASHACMTARGVNTPGVSMTTSRMMGVFREDQKAREEVIKLIGIK

SEQ ID NO: 10294 - protein, 274 aa, Marinicaulis flavus
  misc_feature (1)..(274): tr|A0A2S7KB94|A0A2S7KB94_9PROT GTP cyclohydrolase FolE2 OS=Marinicaulis flavus OX=2058213 GN=folE2 PE=3 SV=1
MPANEFDVSALPDIQNRRDSRNVAIDHVGVKGVRYPVVIMSTQGAIPTIGEFSMSVGLKSEVKGTHMSRFIEMLESHSSPLTQENFVNLARATADRLDAPFCEIELKFPFFQNKSAPVSGAQSLLDYDVVWRTVVSGASGAKFTLKAIVPATSLCPCSKEISKYGAHNQRSLISIEATLLEMVSLEELVNVAQNAASCEVYGLLKRPDEKFVTERAYDNPKFVEDMVRDVAVALSADSRILDYAVEVENFESIHNHTAYARIVGRPDTKIQKAA

SEQ ID NO: 10295 - protein, 306 aa, Marinicella litoralis
  misc_feature (1)..(306): tr|A0A4R6Y0J5|A0A4R6Y0J5_9GAMM GTP cyclohydrolase FolE2 OS=Marinicella litoralis OX=644220 GN=folE2 PE=3 SV=1
MLDSTNQSCTLPDIASEEKAKIGGQLQWVGMSDIEMPLLMSADVSVPASVARVRAEVSLDDEASKGIHMSRLYLACDQAFSHETIDYLVLHQLTQNFLQTHKKLSQNALIEVEGEALLRRKALVSDHSGWRSYPIKLSVVQCKKSGLSKYLSFQVTYSSTCPCSAALARQLIQENFKQQFDQNNISKQDVIDWLGSEQGINATPHSQRSSAVIKVKLQNEQQEIPLETLINLVENSLQTAVQAAVKRADEQAFALRNGQNLMFCEDAARRIKQVLSKSALVKQFHLRVTHHESLHPHDATAEAYSE

SEQ ID NO: 10296 - protein, 208 aa, Marinifilaceae bacterium
  misc_feature (1)..(208): tr|A0A434AET7|A0A434AET7_9BACT GTP cyclohydrolase 1 OS= Marinifilaceae bacterium T3-2 S1-C OX=2487017 GN=folE P E=3 SV=1
MEFSLNGYDNKGFTKIEKYNQETTEELMYHYKKVLELLGEDAEREGLLKTPLRVAKAMQFLTQGYHSKPEDILRSAMFQEDYKQMVIVKDIEVYSMCEHHMLPFVGRAHVAYIPNGHITGLSKIARVVDAFARRLQVQERLTTQIKDCIQDTLNPLGVAVVIEAQHMCMSMRGVQKQNAITTTSDFTGAFQKVATREEFIRLISAKTI

SEQ ID NO: 10297 - protein, 208 aa, Marinifilum breve
  misc_feature (1)..(208): tr|A0A2V3ZV59|A0A2V3ZV59_9BACT GTP cyclohydrolase 1 OS= Marinifilum breve OX=2184082 GN=folE PE=3 SV=1
MEFSINGQEDKGFTKIEKYNQETTEELMYHYKKVLELLGEDAEREGLVKTPLRVAKAMQFLTQGYHIKPEDILRSAMFKEDYKQMVIVKDIEVYSMCEHHMLPFVGRAHVAYIPNGYITGLSKIARVVDAFARRLQVQERLTTQIKDCINDTLNPLGVAVVIEAQHMCMSMRGVQKQNSITTTSDFTGAFEKVATREEFIRLISAKTI

SEQ ID NO: 10298 - protein, 208 aa, Marinifilum flexuosum
  misc_feature (1)..(208): tr|A0A419X816|A0A419X816_9BACT GTP cyclohydrolase 1 OS= Marinifilum flexuosum OX=1117708 GN=folE PE=3 SV=1
MEFSINGQEDKGFTKIEKYNQETTEELMYHYKKVLELLGEDAEREGLEKTPLRVAKAMQFLTQGYHIKPEDILRSAMFKEDYKQMVIVKDIEVYSMCEHHMLPFVGRAHVAYIPNGYITGLSKIARVVDAFARRLQVQERLTTQIKDCINDTLSPLGVAVVIEAQHMCMSMRGVQKQNSITTTSDFTGAFENLATREEFIRLISAKTI

SEQ ID NO: 10299 - protein, 256 aa, Marinifilum sp.
  misc_feature (1)..(256): tr|A0A4T2AEU7|A0A4T2AEU7_9BACT GTP cyclohydrolase FolE2 OS=Marinifilum sp. JC120 OX=2302941 GN=folE2 PE=3 SV=1
MEDVQNSPAKVAMPIDRVGVRDLTLPLVVRDRESGSQSTMAKVALSVDLPAHFKGTHMSRFVEALEDWTEELDYQSFYNLLSDILRRLEAERAHAELSFPYCLQKKSPVSGRKGIMSYECTVEGEMVGENLEFTLGVKVPVMTVCPCSKAISDEGAHSQRAVVHIRTKSKGFVWIEDLVEIAEASGSCEVFSLLKREDEKHVTEKSFSNPTFVEDVVRNAAMGLEKHPKILWYKVDVESFESIHNHCAFASIAKPE

SEQ ID NO: 10300 - protein, 195 aa, Mariniflexile fucanivorans
  misc_feature (1)..(195): tr|A0A4R1RNX7|A0A4R1RNX7_9FLAO GTP cyclohydrolase 1 OS= Mariniflexile fucanivorans OX=264023 GN=folE PE=3 SV=1
MPYKHFEEYNIQVTDDVKDRYKHIIEDLGENTQRDGLLKTPERAAKAMQFLTQGYNQDPVEILKSAMFKESYNEMVIVKDIELYSLCEHHILPFFGKAHIAYIPNGQIVGLSKLPRIVDVFARRLQVQERLTEQILDCINDTLNPQGVAVVIEASHMCMMMRGVQKQNSTTTTSGFRGQFEKIETRNEFLKLIGK

SEQ ID NO: 10301 - protein, 231 aa, Mariniflexile fucanivorans
  misc_feature (1)..(231): tr|A0A4R1RPG3|A0A4R1RPG3_9FLAO GTP cyclohydrolase 1 OS= Mariniflexile fucanivorans OX=264023 GN=folE PE=3 SV=1
MIKEAVVNKKNGHNLNVFSFEDIGDDHIYTGLETPMKKDAFKRSDTEKKQRIALLFEEIMDVMGLDLTDDSLKGTPERVAKMYIDEIFSGLNQANKPKIALFDNKYQYNQMLVEKNISFYSNCEHHFVPIYGKAHVAYISSGKVIGLSKLNRIVQYYSKRPQVQERLTNQIAEDLKNILETEDVAVIIDAKHLCVSSRGIKDESSATVTSYYGGQFNNASKIAELQNYLKD

SEQ ID NO: 10302 - protein, 225 aa, Mariniflexile sp.
  misc_feature (1)..(225): tr|A0A385BJX5|A0A385BJX5_9FLAO GTP cyclohydrolase 1 OS= Mariniflexile sp. TRM1-10 OX=2027857 GN=folE PE=3 SV=1
MKIKNNIEEFDSLGDDHIGTSSDTPLRSDAFKLTNEEKIDIIKDDVRHIMETLGLDLTDDSLNGTPNRVAKMFVKEIFGGLDPKKKPSASTFDNKYKYGEMLVEKNITVYSTCEHHLLPIVGKAHIAYISSGSVVGLSKMNRIVDYYAKRPQVQERLTIQIVKELQEVLKTQDVACVIDAKHLCVNSRGIRDVDSSTVTSEFGGKFKEETTRREFLDYIKLDTKF

SEQ ID NO: 10303 - protein, 224 aa, Mariniflexile sp.
  misc_feature (1)..(224): tr|A0A385BJV6|A0A385BJV6_9FLAO GTP cyclohydrolase 1 OS= Mariniflexile sp. TRM1-10 OX=2027857 GN=folE PE=3 SV=1
MTKLNGNTRLVEESLKNSNQHVSIKNPLRDDAFDVDDTLKTELIAEKFKDIIEILGFDLTNDSIKDTPNRVAKMYVNEIFKGLNPINKPKVAVFKNEYGYHTPLVELNIPFTSFCEHHFVPIQGKVNIAYIPKDYVIGLSKIHRLVDFYARRPQVQERLTMQIVQELSTTLDTKDVGVVLKANHSCISCRGVEDFGSLTLTSVFLGQIENDYNLMSVLLGSNSV

SEQ ID NO: 10304 - protein, 207 aa, Marinilabilia salmonicolor
  misc_feature (1)..(207): tr|A0A2T0XDN3|A0A2T0XDN3_9BACT GTP cyclohydrolase 1 OS= Marinilabilia salmonicolor OX=989 GN=folE PE=3 SV=1
MEHTLHGDNGYAKIESYDDKTTEALSDHYTEVLKLLGEDETREGLEKTPLRVAKAMQFLTQGYNMDPEDILKSAMFREDYQQMVVVKDIELYSMCEHHMLPFFGKAHVAYIPRHHITGLSKIARVVEAFARRLQVQERLTTQIKECIHNTLNPLGVAVVIEAQHMCMQMRGVQKQHSVTTTSDFTGAFLKNQATREEFFNIIGSSLH

SEQ ID NO: 10305 - protein, 207 aa, Marinilabilia sp.
  misc_feature (1)..(207): tr|A0A2U2BA74|A0A2U2BA74_9BACT GTP cyclohydrolase 1 OS= Marinilabilia sp. WTE OX=2162893 GN=folE PE=3 SV=1
MKHTLHGDNGYAKIESYDDKTTDELSTHYREVLKILGEDETREGLEKTPLRVAKAMQFLTQGYNMDPEDIVKSAMFREDYQQMVVVKDIELYSMCEHHMLPFFGKAHVAYIPRHHITGLSKIARVVEAYARRLQVQERLTTQIKECLHKTLNPLGVAVVIEAQHMCMQMRGVQKQHSVTTTSDFTGAFLKNMATREEFFNIIGSSLH

SEQ ID NO: 10306 - protein, 207 aa, Marinilabiliaceae bacterium
  misc_feature (1)..(207): tr|A0A4Q8RM15|A0A4Q8RM15_9BACT GTP cyclohydrolase 1 OS= Marinilabiliaceae bacterium JC017 OX=2234116 GN=folE PE =3 SV=1
MEFTLNGKKGYAKIESFDDKTTEDLSQSYFRVLELLGEDPTREGLEKTPLRVAKAMQFLTQGYNMNPEEIIRSAMFKEDYQQMVVVKDIELYSMCEHHILPFFGKAHVAYIPRHHITGLSKIARVVEAFARRLQVQERLTTQIKNCIQDTLNPLGVAVVIEAQHMCMQMRGVQKQHSVTTTSDFTGAFMKNIATREEFFNIIGTKLH

SEQ ID NO: 10307 - protein, 207 aa, Marinilabiliaceae bacterium
  misc_feature (1)..(207): tr|A0A359FUH2|A0A359FUH2_9BACT GTP cyclohydrolase 1 OS= Marinilabiliaceae bacterium OX=2053574 GN=folE PE=3 SV= 1
MDFSLNGGRGYSKIESYDDQMTTELAKIYKRSLELLGEDISREGLEKTPLRVAKAMQFLTQGYNMKPDEIIRSAMFREDYQQMVVVKDIELYSMCEHHLLPFFGKAHVAYIPRHHITGLSKIARVVEAFARRLQVQERLTTQIKNCIQETLNPLGVAVLIEAQHTCMQMRGVQKQHSVTTTSDFTGAFLKSIATREEFFNIIGSRLH

SEQ ID NO: 10308 - protein, 211 aa, Marinilabiliales bacterium
  misc_feature (1)..(211): tr|A0A2N5Z3G6|A0A2N5Z3G6_9BACT GTP cyclohydrolase 1 OS= Marinilabiliales bacterium OX=2053303 GN=folE PE=3 SV=1
MKYLNSNLETSESDGFTKIEKYSEKTTRELADSYRKVLVGLGEDPEREGLVKTPERVAKAMQFLTHGYNLNPEDILKSAMFKEEYKQMVIVKDIEIYSMCEHHMLPFIGKAHVAYIPNGYITGLSKIARVVEAYSRRLQVQERLTTQIRDCIQNTIKPLGVAVVIEARHLCMMMRGVQKQNSVTTTSAFTGAFMKDVTRQEFNHLIATQLH

SEQ ID NO: 10309 - protein, 213 aa, Marinilabiliales bacterium
  misc_feature (1)..(213): tr|A0A356H8W1|A0A356H8W1_9BACT GTP cyclohydrolase 1 OS= Marinilabiliales bacterium OX=2053303 GN=folE PE=3 SV=1
MKTITNGLIDPDDDFGYLRIDHYNEERTKKLTLLYEQVLDALGENVDREGLARTPVRVAKALQFLTHGYSAKPEEILKSAMFKEDYSQMVLVKDIEVYSMCEHHMLPFFGKAHVAYIPDGYITGLSKVARVVEVFARRLQVQERLTNQIKDCIQDTLKPKGVAVVIEAAHMCMQMRGIEKQESVTTTSAFTGVFLNNPSTREEFIHLIGTKLH

SEQ ID NO: 10310 - protein, 192 aa, Marinimicrobia bacterium
  misc_feature (1)..(192): tr|A0A101I983|A0A101I983_9BACT GTP cyclohydrolase 1 OS= Marinimicrobia bacterium 46_43 OX=1635280 GN=folE PE=3 SV=1
MSNPRIKKLETITLDLLKEIGEDPQRDGLIKTPYRVAKSWEFLSKGYEMNLKDIINDAIYDEESRGMVVVRDIDFFSMCEHHMLPFFGVVHVGYIPNGKVLGLSKIPRIVEMYSRRLQIQERMTRQIAETLWKTVHPIGVGVVIEGQHMCMQMRGVEKKNSYTTTSTVLGEFHDDPETRAEFLTMISKKTFG

SEQ ID NO: 10311 - protein, 192 aa, Marinimicrobia bacterium; identical to SEQ ID NO: 10310
  misc_feature (1)..(192): tr|A0A117LL79|A0A117LL79_9BACT GTP cyclohydrolase 1 OS= Marinimicrobia bacterium 46_47 OX=1635279 GN=folE PE=3 SV=1

SEQ ID NO: 10312 - protein, 179 aa, Marinimicrobium koreense
  misc_feature (1)..(179): tr|A0A3N1NYA8|A0A3N1NYA8_9GAMM GTP cyclohydrolase 1 OS= Marinimicrobium koreense OX=306545 GN=folE PE=3 SV=1
MKEHFARIIEGIGEDLTRPGLVDTPKRAAKAFQFLTKGYEQDLEEVVNGALFPSDSSEMIMVKDIELYSLCEHHLLPFIGKAHVAYIPTGHVLGLSKVARIVDMFARRLQIQEQLTVQIAESIQNITGASGVGVIIEAQHMCMMMRGVEKQNSVMKTSAMLGTFRSNQATRTEFLSLLR

SEQ ID NO: 10313 - protein, 179 aa, Marinimicrobium sp.; identical to SEQ ID NO: 10312
  misc_feature (1)..(179): tr|A0A2D8WKW3|A0A2D8WKW3_9GAMM GTP cyclohydrolase 1 OS= Marinimicrobium sp. OX=2024837 GN=folE PE=3 SV=1

SEQ ID NO: 10314 - protein, 193 aa, Marininema halotolerans
  misc_feature (1)..(193): tr|A0A1I6TYJ7|A0A1I6TYJ7_9BACL GTP cyclohydrolase 1 OS= Marininema halotolerans OX=1155944 GN=folE PE=3 SV=1
MNVDHNKIQQAVRMILEAVGEDPDREGLLDTPARVARMYAEVFSGIDKDPKEHFGTIFSEDHEELVLVKDISFFSMCEHHLVPFYGRAHVGYIPKSGRVTGLSKLARAVDDIARRPQLQERITYTLANSIMETLEPHGVIVVVEAEHMCMTMRGVKKPGAMTVTSAVRGVFEKDPAVRAEAFSLIGIGGKLKG

SEQ ID NO: 10315 - protein, 192 aa, Marininema mesophilum
  misc_feature (1)..(192): tr|A0A1H2UT30|A0A1H2UT30_9BACL GTP cyclohydrolase 1 OS= Marininema mesophilum OX=1048340 GN=folE PE=3 SV=1
MNVDHEKIQQAVRMILEAVGEDPDREGLLDTPARVARMYAEVFSGLGEDPKKHFGTIFSEDHEELVLVKDISFFSMCEHHLVPFYGRAHVGYIPKSGRVTGLSKLARAVDDIARRPQLQERISYTLANSIMETLEPHGVIVVVEAEHMCMTMRGVKKPGAMTVTSAVRGVFEKDPAVRAEAFSLIGIGGKRG

SEQ ID NO: 10316 - protein, 228 aa, Mariniphaga anaerophila
  misc_feature (1)..(228): tr|A0A1M5A3R5|A0A1M5A3R5_9BACT GTP cyclohydrolase 1 OS= Mariniphaga anaerophila OX=1484053 GN=folE PE=3 SV=1
MNLFSFLKKNQSLYEINEITKMCNSGINHSNVYERIEVFDEEVTEELSQNYKNILQVLGEDVSREGLNKTPERVAKAMQFLLQGYKTDPVEILRSAMFKEDYRQMVIVKDIEIYSMCEHHLLPFFGKAHVAYIPNGTITGLSKIARVVDVFARRLQVQERLTSQIKDCIQDTLKPLGVAVVIEAQHLCMQMRGIQKQHSITTTSDFTGAFQKDATRDEFIKLISTKFS

SEQ ID NO: 10317 - protein, 240 aa, Mariniphaga anaerophila
  misc_feature (1)..(240): tr|A0A1M4T9P4|A0A1M4T9P4_9BACT GTP cyclohydrolase 1 OS= Mariniphaga anaerophila OX=1484053 GN=folE PE=3 SV=1
MKEDLLFKPVNGKVKSNGNGHSREEANGYEILGDHHIGTSAETPIRSDAFDKSDDEKIALIEDKFRDIMETIGLDLTDDSLRGTPHRVAKMFVKEIFYGLNPANKPKISVFDNKFKYNEMLLERDISLNSFCEHHFLPIVGKAHVAYVSSGEVIGLSKINRIVDYFARRPQVQERLTVQIANELKKVLKTEDVAVVIDAKHMCVSCRGIGDESSTTVTAEYSGKFKDKAVREEFLRYINL

SEQ ID NO: 10318 - protein, 242 aa, Mariniphaga sediminis
  misc_feature (1)..(242): tr|A0A399D329|A0A399D329_9BACT GTP cyclohydrolase 1 OS= Mariniphaga sediminis OX=1628158 GN=folE PE=3 SV=1
MKDDLILRSVNGNGKTKLNGNGHTKEEVNGFEIHGDNHVGTSAETPIRPDAFEKSEEEKIAVIEDKFRDIMETIGLDLTDDSLRGTPHRVAKMFVQEIFYGLNPANKPKISVFDNKFKYNEMLVEKSINLNSFCEHHFLPIYGKAHVAYISSGEVIGLSKINRIVDYFARRPQVQERLTVQIANELKKVLKTDDVAVLIDAKHMCVSCRGVGDESSTTVTSEYGGRFKDKAVREEFLKYIGL

SEQ ID NO: 10319 - protein, 207 aa, Mariniphaga sediminis
  misc_feature (1)..(207): tr|A0A399CUN6|A0A399CUN6_9BACT GTP cyclohydrolase 1 OS= Mariniphaga sediminis OX=1628158 GN=folE PE=3 SV=1
MSTTEINNSNVYERIEVYDEALTNKLSKNYRDILELIGEDISREGLDKTPERVAKAMQFLLQGYKNDPVEVLQSAMFKEDYRQMVIVKDIEIYSLCEHHLLPFFGKAHVAYIPNGTITGLSKIARVVDIFSRRLQVQERLTSQIKECIQETLKPLGVAVVIEAQHLCMQMRGIQKQHSITTTSDFTGAFQKNATRDEFIKLISTKFS

SEQ ID NO: 10320 - protein, 221 aa, Mariniradius saccharolyticus
  misc_feature (1)..(221): tr|M7X8C6|M7X8C6_9BACT GTP cyclohydrolase 1 OS=Marinira dius saccharolyticus AK6 OX=1239962 GN=folE PE=3 SV=1
MGIDFSHSIDEIGDEHVGTSIDTPLREDAFEMDDDLKIELIEKHFKEIMYVLGLDLTDDSLKGTPKRVAKMYVKEIFSGLNPKNKPDAKLFENKYKYNEMLVEKDITFFSNCEHHFVPIYGKAHVAYISNGNVIGLSKINRIVQYYSKRPQVQERLTMQIGNELKEALGTEDVAVVLDAHHMCVSTRGVQDVNSSTVTSFYSGKFERDENARAEFMKYISL

SEQ ID NO: 10321 - protein, 259 aa, Marinirhabdus gelatinilytica
  misc_feature (1)..(259): tr|A0A370QLX7|A0A370QLX7_9FLAO GTP cyclohydrolase 1 OS= Marinirhabdus gelatinilytica OX=1703343 GN=folE PE=3 SV =1
MELNTFVQIFIPLVEIRIFAHCILKYATTLHMDLEKQISDTDNIGNDHIGTSTHTPLRNDAFDLSDIEKIASIKKDVHNIMQTLGLDLTDDSLKGTPNRVAKMFVQELFGGLHPDRKPKASTFENKYKYGEMLVEKNITLYSTCEHHLLPIVGKAHIAYISNGTVVGLSKMNRIVDYYAKRPQVQERLTMQIVKELQSVLNTEDVACVIDAKHLCVNSRGIRDIDSSTVTSEYGGKFKDAETRRDFLDYIQLNTDFEGV

SEQ ID NO: 10322 - protein, 199 aa, Marinirhabdus gelatinilytica
  misc_feature (1)..(199): tr|A0A370QAJ0|A0A370QAJ0_9FLAO GTP cyclohydrolase 1 OS= Marinirhabdus gelatinilytica OX=1703343 GN=folE PE=3 SV =1
MGSYKNTEEYAIETTTKLAENFSEILKGIGENVEREGIVKTPERAAKAMQFLTSGHCQDPAGILKSAMFAEDYNDMVVVKDIELYSLCEHHILPFFGKAHIAYIPDGHIVGLSKLPRVVDVFARRLQVQERLTHDILECINNTLKPKGVAVVIEASHMCMMMRGVQKQNSVTTTSGFRGQFEKIETRNEFLKLITSDLS

SEQ ID NO: 10323 - protein, 186 aa, Marinisporobacter balticus
  misc_feature (1)..(186): tr|A0A4R2KTJ7|A0A4R2KTJ7_9CLOT GTP cyclohydrolase 1 OS= Marinisporobacter balticus OX=2018667 GN=folE PE=3 SV=1
MDKPRIEKAVREILEAIGEDPDREGLKNTPKRIAKMYEEIFSGLHEDPKKHLEIFFEEEKHEELVLVKDIPFYSMCEHHLVPFFGKAHVGYLPRNGKLTGLSKLARVVETVARRPQLQERLTACVAEALVEQLAPYGVIVVVEAEHMCMTMRGVKKSGSKTITSAVRGLFQKDAKARAEAMALIKF

SEQ ID NO: 10324 - protein, 201 aa, Marinitenerispora sediminis
  misc_feature (1)..(201): tr|A0A368TA12|A0A368TA12_9ACTN GTP cyclohydrolase 1 OS= Marinitenerispora sediminis OX=1931232 GN=folE PE=3 SV= 1
MTGGFPGAEPAAGTVDHLRIEKAVREILIAIGEDPDRDGLRDTPARVARAYAEQFAGLNQRPEDVLTTVFDAGHDEIVLVKDIELYSTCEHHLVPFYGVAHVGYIPNSDGRITGLSKLARLVDVFARRPQVQERLTTQVADAVMDLLEPRGVIVVIEAEHLCMTMRGVRKPGAKTVTSAVRGDFRNRDRTRAEAMSLILGR

SEQ ID NO: 10325 - protein, 203 aa, Marinithermus hydrothermalis
  misc_feature (1)..(203): tr|F2NL77|F2NL77_MARHT GTP cyclohydrolase 1 OS=Marinith ermus hydrothermalis (strain DSM 14884 / JCM 11576 / T1 ) OX=869210 GN=folE PE=3 SV=1
MERKRIELEDTGLSFETEMDLERLRVLAREWIELIGEDPEREGLERTPERVAKAWAYLTRGYRQTLEEVVNGAVFAAEGSEMVVVKGIEFYSLCEHHLLPFYGKVHVGYIPNGKILGLSKFARITEMYARRLQVQERLALQIAQAIEAVLKPQGVGVVVEGVHLCMMMRGVEKQHSATTTSAMLGVFRENAKTREEFLSLVRT

SEQ ID NO: 10326 - protein, 262 aa, Marinitoga hydrogenitolerans
  misc_feature (1)..(262): tr|A0A1M4VHC9|A0A1M4VHC9_9BACT GTP cyclohydrolase FolE2 OS=Marinitoga hydrogenitolerans DSM 16785 OX=1122195 G N=folE2 PE=3 SV=1
MKQKIILYTTGVNELKDVQSELDSRGIYIHGVGISDLEYPIIFNGNHTIGSFTMLVDLDENVRGTHMSRFVEVLNKYYDNLSEKKLLDMSEELKNVLEAKKAYIKVSFPYFSLKKAPITKLESYTKCDVTYEVIDDEIKLYLAIPIITLCPCSKAISNYGAHNQRALVEIGLKLNDEIKLEEIAKYVEKSSSGMVFSLLKREDEKYVTEHMYDNPHFVEDVVRDLSVFLENDNRIGGYKIKVISYESIHNHNAFSEREGKAW

SEQ ID NO: 10327 - protein, 209 aa, Marinobacter adhaerens
  misc_feature (1)..(209): tr|E4PIB7|E4PIB7_MARAH GTP cyclohydrolase 1 OS=Marinoba cter adhaerens (strain DSM 23420 / HP15) OX=225937 GN=f olE PE=3 SV=1
MFYSEMKTLGSLRSSELKKREKVMSLENLTKQYEEILMGLDPNPSRNGLVGTPQRAAKAMQFLCRGYDQSLDEVVNGALFESDNDEMVLVKDIELYSLCEHHMLPFVGKAHVAYIPSGKVIGLSKVARIVDMFARRLQIQENLTREIAEALQSVTQADGVAVVIEARHMCMMMRGVEKQNSKMYSSVMLGAFRESVNTRQEFLQLVSRG

SEQ ID NO: 10328 - protein, 189 aa, Marinobacter adhaerens
  misc_feature (1)..(189): tr|A0A353LDJ0|A0A353LDJ0_9ALTE GTP cyclohydrolase 1 OS= Marinobacter adhaerens OX=1033846 GN=folE PE=3 SV=1
MSKLLDDLSGHFRAIIDGLGEDPDREGLQDTPMRAAKAMQFLTCGYQQDLGDLVNNAVFESAMDEMVVVQDIELYSMCEHHMLPFIGKCHIAYLPAGKVLGLSKFARIVDMYARRLQIQENLTRQIAEAVESVTGAKGVAVVIEAQHMCMMMRGVEKQNSRMKTSMMLGQFRKSQATRTEFLTLISNNR

SEQ ID NO: 10329 - protein, 188 aa, Marinobacter algicola
  misc_feature (1)..(188): tr|A6F1S2|A6F1S2_9ALTE GTP cyclohydrolase 1 OS=Marinoba cter algicola DG893 OX=443152 GN=folE PE=3 SV=1
MTNKLDDLASHFQQIIAGLGENPDREGLQDTPIRAAKAMQFLTQGYRQSLDTLVNNAVFESAMDEMVVVQDIELYSMCEHHMLPFIGKCHIAYLPSGKVLGLSKFARIVDMYARRLQIQENLTREIAEAIETVTGAKGVAVVIEAQHMCMMMRGVEKQNSRMKTSMMLGQFRKSQATRTEFLTLIRDR

SEQ ID NO: 10330 - protein, 189 aa, Marinobacter antarcticus
  misc_feature (1)..(189): tr|A0A1M6Q8L7|A0A1M6Q8L7_9ALTE GTP cyclohydrolase 1 OS= Marinobacter antarcticus OX=564117 GN=folE PE=3 SV=1
MTKLLDDLAGHYRAIINGLGEDTNREGLQDTPMRAAKAMQFLTHGYQQDLDDLVNNAVFESAMDEMVVVQDIELYSMCEHHILPFIGKCHIAYMPQGRVLGLSKFARIVDMYARRLQIQENLTREIAEAVESVTNAKGVAVVIEAQHMCMMMRGVEKQNSKMKTSMMLGQFRTSQATRAEFLNLISNNR

SEQ ID NO: 10331 - protein, 188 aa, Marinobacter confluentis
  misc_feature (1)..(188): tr|A0A4Z1BPJ3|A0A4Z1BPJ3_9ALTE GTP cyclohydrolase 1 OS= Marinobacter confluentis OX=1697557 GN=folE PE=3 SV=1
MTNKLDDLASHYQQIIAGIGEDPHREGLQDTPVRAAKAMQFLTHGYQQNLETLVNGAVFESTMDEMVVIKDIELYSMCEHHLLPFIGKCHIAYLPQGKVLGLSKFARIVDMYARRYQIQENLTRQIAEAIESVTGAKGVAVVIEAKHMCMMMRGVEKQNSSMKTSMMLGQFRKSQATRTEFLTLIRDH

SEQ ID NO: 10332 - protein, 189 aa, Marinobacter daqiaonensis
  misc_feature (1)..(189): tr|A0A1I6I9C8|A0A1I6I9C8_9ALTE GTP cyclohydrolase 1 OS= Marinobacter daqiaonensis OX=650891 GN=folE PE=3 SV=1
MTDPLDNLSDHYRAIIEGLGENPDREGLQDTPKRAAKAMQFLTRGYNQTLGELVNRAVFESSMDEMVLVKDIELYSLCEHHLLPFIGKCHIAYIPNGRVLGLSKFARIVDMYARRLQIQENLTRDIAEAVEQVTGAAGVAVVIEARHMCMMMRGVEKQNSVMKTSMMLGAFRRSQATRTEFLQLIASRD

SEQ ID NO: 10333 - protein, 304 aa, Marinobacter excellens
  misc_feature (1)..(304): tr|A0A0P8CU55|A0A0P8CU55_9ALTE GTP cyclohydrolase FolE2 OS=Marinobacter excellens HL-55 OX=1305731 GN=folE-2 P E=3 SV=1
MNQDLPDVASNETSAIRAPLEWVGMSRIDIPVQLDEPGCPGTVHAVADLQVNLPALTVKGIHMSRLYRMLDELNRLEAVAPGDLRQLLQQMVASHKDCYTDGARVVLDFSLLARRPALRTPGLAGWKSYPIRLEATLADTWFALKASVQVEYSSTCPCSAALARQLVADGFREHFPDRSGLTSEEVAAWLQQNATLATPHSQRSEATVSVNISDSSESFRLMALIDQIEAVLATPVQTAVKRADEQAFAWLNGQNLMYVEDAARRIQSALSGLYDNLRTHVRHLESLHSHDAVASASGDFQGVI

SEQ ID NO: 10334 - protein, 189 aa, Marinobacter excellens
  misc_feature (1)..(189): tr|A0A0N8KK24|A0A0N8KK24_9ALTE GTP cyclohydrolase 1 OS= Marinobacter excellens HL-55 OX=1305731 GN=folE PE=3 SV =1
MTLPLDDLAGHYRAIIEGLGENADREGLQDTPMRAAKAMQFLTRGYQQDLGELVNNAVFESAMDEMVVVQDIELYSMCEHHMLPFIGKCHIAYLPQGKVLGLSKFARIVDMYARRLQIQENLTRQIAEAVESVTDANGVAVVIEAQHMCMMMRGVEKQNSRMKTSMMLGQFRKSQATRSEFLNLIGNNR

SEQ ID NO: 10335 - protein, 189 aa, Marinobacter flavimaris; identical to SEQ ID NO: 10328
  misc_feature (1)..(189): tr|A0A3D8H0Z1|A0A3D8H0Z1_9ALTE GTP cyclohydrolase 1 OS= Marinobacter flavimaris OX=262076 GN=folE PE=3 SV=1

SEQ ID NO: 10336 - protein, 189 aa, Marinobacter fuscus
  misc_feature (1)..(189): tr|A0A2T1KNX3|A0A2T1KNX3_9ALTE GTP cyclohydrolase 1 OS= Marinobacter fuscus OX=2109942 GN=folE PE=3 SV=1
MYAPLDDLTDHYRSIITGLGENAQREGLQDTPKRAAKAMQFLTHGYQQNLEELVNNAVFESAMDEMVVVQDIELYSLCEHHMLPFIGKCHIAYLPQGKVLGLSKFARIVDMYARRLQIQENLTRQIAEAVESVTQAAGVAVVIEAQHMCMMMRGVEKQNSRMKTSMMLGQFRKSQATRTEFLTLISNNR

SEQ ID NO: 10337 - protein, 189 aa, Marinobacter gudaonensis
  misc_feature (1)..(189): tr|A0A1I6H160|A0A1I6H160_9ALTE GTP cyclohydrolase 1 OS= Marinobacter gudaonensis OX=375760 GN=folE PE=3 SV=1
MTKLLDDLSGHYRAIISGLGEDPDREGLQDTPMRAAKAMQFLTRGYQQDLGDLVNNAVFESAMDEMVVVQDIELYSMCEHHMLPFIGKCHIAYLPQGRVLGLSKFARIVDMYARRLQIQENLTRQIAEAIESVTNAKGVAVVIEAQHMCMMMRGVEKQNSRMKTSMMLGQFRKSQATRTEFLNLIGGHR

SEQ ID NO: 10338 - protein, 189 aa, Marinobacter guineae
  misc_feature (1)..(189): tr|A0A2G1VEK4|A0A2G1VEK4_9ALTE GTP cyclohydrolase 1 OS= Marinobacter guineae OX=432303 GN=folE PE=3 SV=1
MTKLLDDLSGHYRAIIDGLGEDTNREGLQDTPMRAAKAMQFLTRGYQQDLGDLVNNAVFESAMDEMVVVQDIELYSMCEHHILPFIGKCHIAYLPQGKVLGLSKFARIVDMYARRLQIQENLTRQIAEAIESVTDAKGVAVVIEAQHMCMMMRGVEKQNSRMKTSMMLGQFRKSQATRTEFLTLIGTNR

SEQ ID NO: 10339 - protein, 189 aa, Marinobacter halophilus
  misc_feature (1)..(189): tr|A0A2T1KIQ4|A0A2T1KIQ4_9ALTE GTP cyclohydrolase 1 OS= Marinobacter halophilus OX=1323740 GN=folE PE=3 SV=1
MTLPLDDLAGHYRAIIEGLGENADREGLQDTPMRAAKAMQFLTRGYQQNLDELVNNAVFESAMDEMVVIQDIELYSMCEHHMLPFIGKCHIAYLPQGKVLGLSKFARIVDMYARRLQIQENLTRQIAEAVENVTGAKGVAVVIEAQHMCMMMRGVEKQNSRMKTSMMLGQFRKSQATRSEFLNLIGNHR

SEQ ID NO: 10340 - protein, 189 aa, Marinobacter hydrocarbonoclasticus
  misc_feature (1)..(189): tr|A0A1M2UU76|A0A1M2UU76_MARHY GTP cyclohydrolase 1 OS= Marinobacter hydrocarbonoclasticus OX=2743 GN=folE PE=3 SV=1
MTLPLDDLAGHYRAIIEGLGENADREGLQDTPMRAAKAMQFLTRGYQQDLADLVNNAVFESAMDEMVVVQDIELYSMCEHHMLPFIGKCHIAYLPQGRVLGLSKFARIVDMYARRLQIQENLTRQIAEAVESVTNAKGVAVVIEAQHMCMMMRGVEKQNSRMKTSMMLGQFRKSQATRTEFLTLIGNNR

SEQ ID NO: 10341 - protein, 189 aa, Marinobacter hydrocarbonoclasticus
  misc_feature (1)..(189): tr|A0A455W9G5|A0A455W9G5_MARHY GTP cyclohydrolase 1 OS= Marinobacter hydrocarbonoclasticus OX=2743 GN=folE1 PE= 3 SV=1
MTIPLDDLAGHYRAIIEGLGENADREGLQDTPMRAAKAMQFLTRGYQQDLADLVNNAVFESAMDEMVVVQDIELYSMCEHHMLPFIGKCHIAYLPQGRVLGLSKFARIVDMYARRLQIQENLTRQIAEAVESVTNAKGVAVVIEAQHMCMMMRGVEKQNSRMKTSMMLGQFRKSQATRTEFLTLIGNNR

SEQ ID NO: 10342 - protein, 189 aa, Marinobacter lipolyticus
  misc_feature (1)..(189): tr|R8B004|R8B004_9ALTE GTP cyclohydrolase 1 OS=Marinoba cter lipolyticus SM19 OX=1318628 GN=folE PE=3 SV=1
MSNSLEDLAGHYRDIINGLGEDTSREGLMDTPKRAAKAMQFLTNGYQQDLGELVNNAVFESSMDEMVMIQDIELYSMCEHHMLPFIGKCHIAYMPQGKVLGLSKFARIVDMYARRLQIQENLTREIAEAIESVTGAKGVAVVIEAQHMCMMMRGVEKQNSRMKTSVMLGQFRKSQATRTEFLQLLSHRD

SEQ ID NO: 10343 - protein, 247 aa, Marinobacter litoralis
  misc_feature (1)..(247): tr|A0A3M2RFA9|A0A3M2RFA9_9ALTE Putative GTP cyclohydrol ase 1 type 2 OS=Marinobacter litoralis OX=187981 GN=DOQ 08_01293 PE=4 SV=1
MATRNQILTKINEWLQPENFQDYAPNGLQVEGKEEVQTIISGVTASQALIDAAVKQNADMILVHHGYFWKGEDQTIRGMKKRRIKQLLENDINLVAYHLPLDDHPDYGNNRQLAKVLGIQNPRPVGGLVWQGELAEPMTPETLGRHIETALNRQPLHVGEGADLIKTVAWCTGGAQGFITKALELGVDAYISGEISEPTTHTARESGIHYYAAGHHATERYGAKALGEALAKEFGVKHQFIDCDNPV

SEQ ID NO: 10344 - protein, 103 aa, Marinobacter litoralis
  misc_feature (1)..(103): tr|A0A3M2REP6|A0A3M2REP6_9ALTE Putative GTP cyclohydrol ase 1 type 2 OS=Marinobacter litoralis OX=187981 GN=DOQ 08_01105 PE=4 SV=1
MFKLCYFVPESHLDITKQALFDAGAGKIGDYDSCAWQCKGQGQFRPLEGSDPFLGQKGELEVVNEFKVELVCSEEKVQGAIEALKQAHPYEEPAYEVFRLEAF

SEQ ID NO: 10345 - protein, 304 aa, Marinobacter lutaoensis
  misc_feature (1)..(304): tr|A0A1V2DXV8|A0A1V2DXV8_9ALTE GTP cyclohydrolase FolE2 OS=Marinobacter lutaoensis OX=135739 GN=folE2 PE=3 SV= 1
MNAVLPDVSRTDKAPRLSPLDWVGMQGIDLPVTIAEPGYRRELHARADVQVDLPLPHVKGIHMSRLYQLLDTLAGEPLSPRVLHRLLRAMIDSHQDCNSQNARLRLELALLVRRPALVSAGLSGWKSYPLTLDASLHGDAFRARLGVAVGYSSTCPCSAALSRQLVEQGFLDAFAGQERLDPEAVAHWLRRHATLATPHSQRSEARVAVDLASDGDTLGLLALIDRIEAALGTPVQTAVKRADEQAFAALNGQNLMFVEDAARRIRDALGDDFANPAVHVRHMESLHPHDAAAWVAPRPEDTAG

SEQ ID NO: 10346 - protein, 189 aa, Marinobacter lutaoensis
  misc_feature (1)..(189): tr|A0A1V2DPA2|A0A1V2DPA2_9ALTE GTP cyclohydrolase 1 OS= Marinobacter lutaoensis OX=135739 GN=folE PE=3 SV=1
MSKLLDDLAGHYRAIIEGLGEDSHREGLRDTPMRAAKAMQFLTRGYQQDLDELVNNAVFESSMDEMVVVQDIELYSMCEHHMLPFIGKCHIAYMPQGKVLGLSKFARIVDMYARRLQIQENLTREIAEAIERVTKAKGVAVVIEAQHMCMMMRGVEKQNSRMKTSVMLGQFRTSQATRTEFLNLIGHNR

SEQ ID NO: 10347 - protein, 189 aa, Marinobacter manganoxydans; identical to SEQ ID NO: 10328
  misc_feature (1)..(189): tr|G6YSU2|G6YSU2_9ALTE GTP cyclohydrolase 1 OS=Marinoba cter manganoxydans MnI7-9 OX=1094979 GN=folE PE=3 SV=1

SEQ ID NO: 10348 - protein, 188 aa, Marinobacter mobilis
  misc_feature (1)..(188): tr|A0A1H2WY61|A0A1H2WY61_9ALTE GTP cyclohydrolase 1 OS= Marinobacter mobilis OX=488533 GN=folE PE=3 SV=1
MADTLNTLTGHYRHIIQHLGENPQREGLLDTPERAAKAMQFLTRGYQQSLEELVNGAVFESAMDEMVVVQDIELYSLCEHHLLPFIGKCHIAYIPQGKVLGLSKFARIVDMYARRLQIQENLTREIAEAIEQVTDASGVAVVIEAQHMCMMMRGVEKQNSLMKTSMMLGSFRNSQATRTEFLTLIQKR

SEQ ID NO: 10349 - protein, 213 aa, Marinobacter mobilis
  misc_feature (1)..(213): tr|A0A1H2YBX5|A0A1H2YBX5_9ALTE GTP cyclohydrolase 1 OS= Marinobacter mobilis OX=488533 GN=folE PE=3 SV=1
MLSPEALAVQAALIERGLETPLKENVLDRDQKVERIRDLMAQVVATLGLDLNDDSLADTPARIARMYVDEVFSGLDYRHFPKISQIENKMGVDDMIRIRDIEVLSTCEHHFVTIDGKARVAYIPGDRVIGLSKINRIVRFFAQRPQVQERLTHQILVALQTLLGVEDVAVQIDATHYCVKARGVMDGGSATETVALGGAFSSDQNRRREFLAG

SEQ ID NO: 10350 - protein, 237 aa, Marinobacter nanhaiticus
  misc_feature (1)..(237): tr|N6VXI7|N6VXI7_9ALTE GTP cyclohydrolase 1 OS=Marinoba cter nanhaiticus D15-8W OX=626887 GN=folE PE=3 SV=1
MSQRSQASKLQATSLLQEADPITVPCLTREALAVRTALVEKGLETPMVDNGLTRDQKVERIEGLMTRVAETLGLDLADDSLTETPNRIARMYVDEVFSGLDYTQFPKITQIENKMGVEEMIKVRDISVISTCEHHFVTIDGRARVAYMPKDKVIGLSKINRIVRFFARRPQVQERLTHQILVALQTLLEVEDVAVHIDATHYCVKARGVQDADSQTETIALGGRFKTNTEYRREFMG

SEQ ID NO: 10351 - protein, 188 aa, Marinobacter nanhaiticus
  misc_feature (1)..(188): tr|N6WV14|N6WV14_9ALTE GTP cyclohydrolase 1 OS=Marinoba cter nanhaiticus D15-8W OX=626887 GN=folE PE=3 SV=1
MTDKTDTIAQSFKTIMQALGEDTRREGLLDTPRRAAKAMQFLTQGYAQDLESVVNNATFESDMDEMVVVQDIELYSLCEHHLLPFIGKCHIAYIPQGRVLGLSKLARIVDMYARRFQIQENLTRQIAEAVENVTGAEGVGVVIEAQHMCMMMRGVEKQNSLMKTSVMLGSFRKSQATRNEFLTLISRR

SEQ ID NO: 10352 - protein, 189 aa, Marinobacter nitratireducens
  misc_feature (1)..(189): tr|A0A072N743|A0A072N743_9ALTE GTP cyclohydrolase 1 OS= Marinobacter nitratireducens OX=1137280 GN=folE PE=3 SV =1
MTKPLDDLAGHFEAIIDGLGEDTRREGLQDTPRRAAKAMQFLTQGYQQDLNDLVNNAVFESSMDEMVVVQDIELYSMCEHHMLPFIGKCHIAYLPQGRVLGLSKFARIVDMYARRLQIQENLTRQIAEAVESVTNAKGVAVVIEAQHMCMMMRGVEKQNSRMKTSMMLGQFRKSQATRTEFLNLIGGNR

SEQ ID NO: 10353 - protein, 189 aa, Marinobacter pelagius
  misc_feature (1)..(189): tr|A0A366GYP2|A0A366GYP2_9ALTE GTP cyclohydrolase 1 OS= Marinobacter pelagius OX=379482 GN=folE PE=3 SV=1
MTKLLDDLAGHYRAIIDGLGEDSNREGLQDTPMRAAKAMQFLTRGYQQDLGDLVNNAVFESAMDEMVVVQDIELYSMCEHHMLPFIGKCHIAYLPQGKVLGLSKFARIVDMYARRLQIQENLTRQIAEAIESVTNAKGVAVVIEAQHMCMMMRGVEKQNSRMKTSMMLGQFRKSQATRTEFLNLIGNNR

SEQ ID NO: 10354 - protein, 189 aa, Marinobacter pelagius
  misc_feature (1)..(189): tr|A0A1I4R8I3|A0A1I4R8I3_9ALTE GTP cyclohydrolase 1 OS= Marinobacter pelagius OX=379482 GN=folE PE=3 SV=1
MTKLLDDLAGHYRAIIDGLGEDSNREGLQDTPMRAAKAMQFLTRGYQQDLGDLVNNAVFESAMDEMVVVQDIELYSMCEHHILPFIGKCHIAYLPQGKVLGLSKFARIVDMYARRLQIQENLTRQIAEAIESVTNAKGVAVVIEAQHMCMMMRGVEKQNSRMKTSMMLGQFRKSQATRTEFLNLIGNNR

SEQ ID NO: 10355 - protein, 189 aa, Marinobacter persicus
  misc_feature (1)..(189): tr|A0A1I3XQU8|A0A1I3XQU8_9ALTE GTP cyclohydrolase 1 OS= Marinobacter persicus OX=930118 GN=folE PE=3 SV=1
MSLPLEELADHYRAIIDGLGENSNREGLQDTPMRAAKAMQFLTQGYQQDLGTLVNNAVFESAMDEMVVVQDIELYSMCEHHVLPFIGKCHIAYLPQGKVLGLSKFARIVDMYARRLQIQENLTRQIAEAIEQVTGAKGVAVVIEAQHMCMMMRGVEKQNSRMKTSMMLGQFRKSQATRTEFLNLISNNR

SEQ ID NO: 10356 - protein, 189 aa, Marinobacter persicus
  misc_feature (1)..(189): tr|A0A2S6G8D3|A0A2S6G8D3_9ALTE GTP cyclohydrolase 1 OS= Marinobacter persicus OX=930118 GN=folE PE=3 SV=1
MSLPVEDLAEHFRAIIDGLGEDPDREGLQDTPTRAAKAMKFLTQGYEQDLAELVNNAVFESAMDEMVVIQDIELYSMCEHHMLPFIGKCHIAYLPQGRVLGLSKFARVVDMYARRLQIQENLTREIAEAIENVTGAKGVAVVIEAQHMCMMMRGVEKQNSRMKTSMMLGQFRKSQATRTEFLNLISNNR

SEQ ID NO: 10357 - protein, 186 aa, Marinobacter psychrophilus
  misc_feature (1)..(186): tr|A0A0H4I5W5|A0A0H4I5W5_9ALTE GTP cyclohydrolase 1 OS= Marinobacter psychrophilus OX=330734 GN=folE PE=3 SV=1
MTDDLAGHYRAIINGLGENCDREGLQNTPQRAAKAMQFLTRGYQQNLNELVNNAVFESAMDEMVVIQDIELYSMCEHHVLPFIGKCHIAYLPQGKVLGLSKFARIVDMYARRLQIQENLTRQIAEAVESVTNAKGVAVVIEAQHMCMMMRGVEKQNSKMKTSMMLGQFRKSQATRLEFFNLISTNR

SEQ ID NO: 10358 - protein, 188 aa, Marinobacter salarius
  misc_feature (1)..(188): tr|A0A1W6K4Y0|A0A1W6K4Y0_9ALTE GTP cyclohydrolase 1 OS= Marinobacter salarius OX=1420917 GN=folE PE=3 SV=1
MTNKLDDLASHFQQIIAGLGENPDREGLQDTPIRAAKAMQFLTQGYKQSLDTLVNNAVFESAMDEMVVVQDIELYSMCEHHMLPFIGKCHIAYLPNGKVLGLSKFARIVDMYARRLQIQENLTREIAEAIEAVTGAKGVAVVIEAQHMCMMMRGVEKQNSRMKTSMMLGQFRRSQATRTEFLTLIRDR

SEQ ID NO: 10359 - protein, 189 aa, Marinobacter salarius
  misc_feature (1)..(189): tr|W5YPP3|W5YPP3_9ALTE GTP cyclohydrolase 1 OS=Marinoba cter salarius OX=1420917 GN=folE PE=3 SV=1
MTNKLDDLASHFQQIIAGLGENPDREGLQDTPIRAAKAMQFLTQGYKQSLDTLVNNAVFESAMDEMVVVQDIELYSMCEHHMLPFIGKCHIAYLPQGKVLGLSKFARIVDMYARRLQIQENLTREIAEAVESVTDANGVAVVIEAQHMCMMMRGVEKQNSRMKTSVMLGAFRKSQATRAEFLQLLNQRN

SEQ ID NO: 10360 - protein, 189 aa, Marinobacter salinus
  misc_feature (1)..(189): tr|A0A1D9GPL6|A0A1D9GPL6_9ALTE GTP cyclohydrolase 1 OS= Marinobacter salinus OX=1874317 GN=folE PE=3 SV=1
MTKLLDDLAGHYTAIINGLGEDTSREGLQDTPMRAAKAMQFLTQGYQQSLGDLVNNAVFESAMDEMVVVQDIELYSMCEHHMLPFIGKCHIAYLPQGKVLGLSKFARIVDMYARRLQIQENLTRQIAEAVESVTNAKGVAVVIEAQHMCMMMRGVEKQNSRMKTSMMLGQFRKSQATRTEFLNLIGNNR

SEQ ID NO: 10361 - protein, 189 aa, Marinobacter santoriniensis
  misc_feature (1)..(189): tr|M7D1Z7|M7D1Z7_9ALTE GTP cyclohydrolase 1 OS=Marinoba cter santoriniensis NKSG1 OX=1288826 GN=folE PE=3 SV=1
MTKLLDDLAGHYRAIIDGLGEDPDREGLQDTPLRAAKAMQFLTHGYQQDLNDLVNGAVFESAMDEMVVVQDIELYSMCEHHMLPFIGKCHIAYLPQGRVLGLSKFARIVDMYARRLQIQENLTRQIAEAIESVTNAKGVAVVIEAQHMCMMMRGVEKQNSRMKTSMMLGQFRKSQATRTEFLNLISTYR

SEQ ID NO: 10362 - protein, 189 aa, Marinobacter segnicrescens
  misc_feature (1)..(189): tr|A0A1I0ENS5|A0A1I0ENS5_9ALTE GTP cyclohydrolase 1 OS= Marinobacter segnicrescens OX=430453 GN=folE PE=3 SV=1
MTDVLDSLSANYRAILEGLGEDPDREGLRDTPTRAAKAMQFLTHGYNQNLDDLVNGAVFESAMDEMVVVKDIELYSLCEHHVLPFIGKCHIAYIPDGKVLGLSKFARIVDMYARRLQIQENLTREIAEAVEQVTQAAGVAVVIEARHMCMMMRGVEKQNSVMKTSMMLGGFRKNQATRTEFLQLVSGRD

SEQ ID NO: 10363 - protein, 189 aa, Marinobacter shengliensis; identical to SEQ ID NO: 10340
  misc_feature (1)..(189): tr|A0A2T1KJL0|A0A2T1KJL0_9ALTE GTP cyclohydrolase 1 OS= Marinobacter shengliensis OX=1389223 GN=folE PE=3 SV=1

SEQ ID NO: 10364 - protein, 189 aa, Marinobacter similis
  misc_feature (1)..(189): tr|W5YL63|W5YL63_9ALTE GTP cyclohydrolase 1 OS=Marinoba cter similis OX=1420916 GN=folE PE=3 SV=1
MTKLLDDLAGHYSSIINGLGEDTDREGLQDTPMRAAKAMQFLTQGYQQSLSDLVNNAVFESAMDEMVVVQDIELYSMCEHHMLPFIGKCHIAYLPQGRVLGLSKFARIVDMYARRLQIQENLTRQIAEAIEEVTNAKGVAVVIEAQHMCMMMRGVEKQNSRMKTSMMLGQFRKSQATRTEFLNLIGNNR

SEQ ID NO: 10365 - protein, 188 aa, Marinobacter sp.
  misc_feature (1)..(188): tr|A0A1E7PVL8|A0A1E7PVL8_9ALTE GTP cyclohydrolase 1 OS= Marinobacter sp. X15-166B OX=1897620 GN=folE PE=3 SV=1
MSDSPSKISKHYREIIRGLGEDPDREGLRDTPMRAAKAIRFLTRGYQQTLAELINDAVFASTMDEMVVVQDIELYSLCEHHLLPFIGKCHIAYIPQGKVLGLSKFARIVDMYARRLQIQENLTWEIATAIEQVTRASGVAVVIEAQHMCMMMRGVEKQNSLMKTSMMLGSFRDSQATRAEFLNLINKR

SEQ ID NO: 10366 - protein, 189 aa, Marinobacter sp.; identical to SEQ ID NO: 10359
  misc_feature (1)..(189): tr|A0A434AP81|A0A434AP81_9ALTE GTP cyclohydrolase 1 OS= Marinobacter sp. NP-6 OX=2488666 GN=folE PE=3 SV=1

SEQ ID NO: 10367 - protein, 189 aa, Marinobacter subterrani
  misc_feature (1)..(189): tr|A0A0J7JF73|A0A0J7JF73_9ALTE GTP cyclohydrolase 1 OS= Marinobacter subterrani OX=1658765 GN=folE PE=3 SV=1
MTKLLDDLAGHYRAIIDGLGEDPDREGLQDTPLRAAKAMQFLTRGYQQDLGDLVNNAVFESAMDEMVVVQDIELYSMCEHHMLPFIGKCHIAYLPQGRVLGLSKFARIVDMYARRLQIQENLTRQIAEAIESVTNAKGVAVVIEAQHMCMMMRGVEKQNSRMKTSMMLGQFRKSQATRTEFLNLISSNR

SEQ ID NO: 10368 - protein, 189 aa, Marinobacter vinifirmus
  misc_feature (1)..(189): tr|A0A259W0W4|A0A259W0W4_9ALTE GTP cyclohydrolase 1 OS= Marinobacter vinifirmus OX=355591 GN=folE PE=3 SV=1
MTLPLDDLAGHYYSILDGLGENPEREGLKDTPMRAAKAMQFLTRGYQQDLQDLVNNAVFESAMDEMVVVQDIELYSMCEHHMLPFIGKCHIAYLPQGKVLGLSKFARIVDMYARRLQIQENLTRQIAEAVESVTGAKGVAVVIEAQHMCMMMRGVEKQNSRMKTSMMLGQFRKSQATRTEFLNLISSNH

SEQ ID NO: 10369 - protein, 188 aa, Marinobacter zhejiangensis
  misc_feature (1)..(188): tr|A0A1I4LFD1|A0A1I4LFD1_9ALTE GTP cyclohydrolase 1 OS= Marinobacter zhejiangensis OX=488535 GN=folE PE=3 SV=1
MADKLNAIAGHYRQIIQHLGEDAEREGLLDTPTRAGKAMQFLTKGYQESLEQLVNGAVFESSMDEMVVIQDIELYSLCEHHLLPFIGKCHIAYMPQGKVLGLSKFARIVDMYARRLQIQENLTREIAEAIERVTNARGVAVVVEAQHMCMMMRGVEKQNSLMKTSMMLGSFRTSQATRTEFLTLIQKR

SEQ ID NO: 10370 - protein, 213 aa, Marinobacter zhejiangensis
  misc_feature (1)..(213): tr|A0A1I4M3C1|A0A1I4M3C1_9ALTE GTP cyclohydrolase 1 OS= Marinobacter zhejiangensis OX=488535 GN=folE PE=3 SV=1
MLSPEALAVQAALIERGLETPLKENVLDRDQKVERITDLMAQVVATLGLDLNDDSLADTPSRIARMYVDEIFSGLDYRQFPKITQIENKMGVDDMIRVRDIEVLSTCEHHFITIDGTARVAYIPRDRVIGLSKINRIVRFFAQRPQVQERLTHQVLVALQTLLDVDDVAVQIRATHYCVKARGVMDSGSSTETVALGGVFRSDQCRRQEFLAG

SEQ ID NO: 10371 - protein, 212 aa, Marinobacterium aestuarii
  misc_feature (1)..(212): tr|A0A1A9EV45|A0A1A9EV45_9GAMM GTP cyclohydrolase 1 OS= Marinobacterium aestuarii OX=1821621 GN=folE PE=3 SV=1
MISNEAKIVREVLIARGLETPLLENGMSSEQKYERIKSLMTEVVGTLGLDLSDDSLAETPHRIAKMYVNEIFAGLDYARFPKMALIENKMQVEEMVKVRDISVVSTCEHHFVTIDGVAKVAYIPDQTIIGLSKINRIVRFFAQRPQVQERLTQQILVALQTLLETDNVAVSISAVHYCVKSRGVMDANSQTETTALGGIFKSNARTRAEFLG

SEQ ID NO: 10372 - protein, 307 aa, Marinobacterium aestuarii
  misc_feature (1)..(307): tr|A0A1A9F6E9|A0A1A9F6E9_9GAMM GTP cyclohydrolase FolE2 OS=Marinobacterium aestuarii OX=1821621 GN=folE2 PE=3 SV=1
MTTSPRASIGGTLDGVGMSGLALPVTLAESDRSHVAVQATASLYVNLRDPQAKGIHMSRLYLLLEAFAEREALRPAILCQFLQQALQSHRDISDTASLSLSFQYLSRRPALSSNHQGWKAYPVVLSARRAQGHTTIELGVSVPYSSTCPCSASLSRQLIADAFRDAFSSRSNPPIDAVARWLQEEGGSWATPHSQRSYADVRVRLAESAAFPIEKLIGTLEEALQTPVQTAVKREDEQAFARLNGQNLMFCEDAARRLKAALNATPWLDDFQIRVEHQESLHAHNAVAMVAKGLAGGYTADAPGLWR

SEQ ID NO: 10373 - protein, 296 aa, Marinobacterium georgiense
  misc_feature (1)..(296): tr|A0A1H4EX44|A0A1H4EX44_9GAMM GTP cyclohydrolase FolE2 OS=Marinobacterium georgiense DSM 11526 OX=1122198 GN= folE2 PE=3 SV=1
MNAVLPDVSLTDDAPFMTPLQWVGMQDIDLPITLKEPGYRRSLHACADAQVDLPAAHIKGIHMSRLYRLLDGLGEDALTPERIQQVLQAMIDSHRDCNSSSARIGLSFDLLVRRAALVSEALAGWKSYPVRLNAQLVQGRFSLRAEVVVEYSSTCPCSAALARQLVERRFLDDFPGDQPLNREEMASWLRRNATLATPHSQRSEARVSVGLEATDPSLALLALIDTIEAAVATPVQTAVKRADEQAFAALNGANLMFVEDAARRIQDALQSHFRAPRTQVKHLESLHPHDAVAWAE

SEQ ID NO: 10374 - protein, 179 aa, Marinobacterium georgiense
  misc_feature (1)..(179): tr|A0A1H3ZMR0|A0A1H3ZMR0_9GAMM GTP cyclohydrolase 1 OS= Marinobacterium georgiense DSM 11526 OX=1122198 GN=folE PE=3 SV=1
MEAEYASIIEQLGEDIGRDGLRDTPARAAKAMRFLTRGYNQSLDEVVNGALFSSDNSEMVLVRDIELYSMCEHHLLPFIGKAHVAYIPQGKVVGLSKIARIVDMYARRLQIQENMTKEIAEAIQQVTDAAGVGVVIEAQHMCMMMRGVEKQNAMMKTSMMLGSFRENPATRTEFLSLIR

SEQ ID NO: 10375 - protein, 311 aa, Marinobacterium halophilum
  misc_feature (1)..(311): tr|A0A2P8F219|A0A2P8F219_9GAMM GTP cyclohydrolase FolE2 OS=Marinobacterium halophilum OX=267374 GN=folE2 PE=3 SV=1
MTITLLPDVAHHTEADQHCTLDWVGMSGIDLPLMLAGQPDTTLPAKVDMHVDIATPRHRGIHMSRLYLALQDTLAHAPLDRNRLEQLLQSSLDSHAGISQHACIKLQFQLPLLRPALKSQFSGWKTYPVTLEAQLGRQGLQTELTVEIPYSSTCPCSAALSRQLLQQAFIDTFSMDATLSTKQVSQWLYEHGSLATPHSQRSTAKLHVRLEPKGWINPPIHSLIDTAEAALQTAVQTAVKREDEQAFAALNGRNQMFCEDAARRLKHALLGDAAWADFWIRVEHHESLHAHDATAVCIKGVPGGYTPLLSR

SEQ ID NO: 10376 - protein, 179 aa, Marinobacterium halophilum
  misc_feature (1)..(179): tr|A0A2P8EZI5|A0A2P8EZI5_9GAMM GTP cyclohydrolase 1 OS= Marinobacterium halophilum OX=267374 GN=folE PE=3 SV=1
METAYAQIIEQLGEDLNREGLKDTPARAAKAMRFLTRGYNQDLEEVVNDALFPSDNSEMVVVQNIELYSLCEHHLLPFIGKAHVAYIPQGKVLGLSKLARIVDMYGRRLQIQENMTKEVAEAIQRVTGAAGVGVVIEAQHMCMMMRGVEKQNASMKTSMMLGSFRENPATRAEFLALLK

SEQ ID NO: 10377 - protein, 317 aa, Marinobacterium lutimaris
  misc_feature (1)..(317): tr|A0A1H5Z0W3|A0A1H5Z0W3_9GAMM GTP cyclohydrolase FolE2 OS=Marinobacterium lutimaris OX=568106 GN=folE2 PE=3 S V=1
MNSLSITPNHLPDIASSAKAGISSRLDWVGMSGMALPFQIMEAERGSLPLQGKADIHVDIARPEVKGIHMSRLYLLLEQLAESTPLSPAVLSSFLWQQLETHRDISHAAGLSVQFPYLSRRPALKSDNNGWKEYPAAIHARLQDDLLIELELAIPYSSTCPCSASLSRQLLVEALDSDFADRARLTLEEMRHWLLENGSLATPHSQRSWAKLKLALKEDAGAFEIESLIAAVESALGTPVQTAVKREDEQAFARLNGSNLMFCEDAARRISKALSQRDDVKDFWIRVEHQESLHAHDAVAVVTAGVPGGYQPFLRQG

SEQ ID NO: 10378 - protein, 179 aa, Marinobacterium lutimaris
  misc_feature (1)..(179): tr|A0A1H5UNV6|A0A1H5UNV6_9GAMM GTP cyclohydrolase 1 OS= Marinobacterium lutimaris OX=568106 GN=folE PE=3 SV=1
MENAYAKIIERLGEDLEREGLKDTPKRAAKAMQFLTRGYQQSLEEVVNGALFPSDNSEMVLVKNIELYSMCEHHLLPFIGKAHVAYIPNGQVVGLSKIARIVDMFARRLQIQENMTKQIAEAIQEVTGAQGVGVVIEAKHMCMMMRGVEKQNGEMKTSMMLGTFRSNPATRNEFLSLVN

SEQ ID NO: 10379 - protein, 179 aa, Marinobacterium mangrovicola; identical to SEQ ID NO: 10378
  misc_feature (1)..(179): tr|A0A4V2PEK2|A0A4V2PEK2_9GAMM GTP cyclohydrolase 1 OS= Marinobacterium mangrovicola OX=1476959 GN=folE PE=3 SV =1

SEQ ID NO: 10380 - protein, 317 aa, Marinobacterium mangrovicola
  misc_feature (1)..(317): tr|A0A4R1GV89|A0A4R1GV89_9GAMM GTP cyclohydrolase FolE2 OS=Marinobacterium mangrovicola OX=1476959 GN=folE2 PE =3 SV=1
MNSLSITPNHLPDIASSAKAGISSRLDWVGMSGMALPLQIMEAERGSLPLQGKADIHVDIARPEVKGIHMSRLYLLLEQLAESTPLSPAVLSSFLWQQLETHRDISHAAGLSVQFPYLSRRPALKSENSGWKEYPAAIHARLQDDLLIELELAIPYSSTCPCSASLSRQLLVEALDSDFADRARMTLEEVREWLLTNGSLATPHSQRSWAKLKLALKEDAPAFEIESLIAAVEGALGTPVQTAVKREDEQAFARLNGSNLMFCEDAARRISQALSQRDEVKDFWIRVEHQESLHAHDAVAVVTAGVPGGYQPSLRQG

SEQ ID NO: 10381 - protein, 317 aa, Marinobacterium sp.
  misc_feature (1)..(317): tr|A0A081G499|A0A081G499_9GAMM GTP cyclohydrolase FolE2 OS=Marinobacterium sp. AK27 OX=1232683 GN=folE2 PE=3 S V=1
MNKPIMPCTALPDIASSATASISSRLDWVGMSGLALPFRLSESRRGSVMCQGNADIHVDIARPEVKGIHMSRLYLLLESLVDDTTLSPEILCLFLDTQLNSHRDISGAAGLAIHFSYLSRRPALKSAHQGWKAYPASIHATRVNNEPCIELELAIPYSSTCPCSASLSRQLLADEFEGDFSERLHLEKGDIRRWLLEKGSLATPHSQRSWAKLRVQITDEASAFPIESIIESIEQALGTPVQTAVKREDEQAFARLNGDNLMFCEDAARRIKQALEARSDLLDFWVRVEHQESLHAHDAVAVVTAGIPGGYQPLLSR

SEQ ID NO: 10382 - protein, 179 aa, Marinobacterium sp.
  misc_feature (1)..(179): tr|A0A081FZ55|A0A081FZ55_9GAMM GTP cyclohydrolase 1 OS= Marinobacterium sp. AK27 OX=1232683 GN=folE PE=3 SV=1
MEKSYAQIIESLGEDLQREGLKDTPKRAAKAMKFLTRGYEQSLEEVVNGALFPSDNSEMVLVKNIELYSMCEHHLLPFIGKAHVAYIPNGQVVGLSKIARIVDMYARRLQIQENMTKEIAEAIQQVTGALGVGVVIEAQHMCMMMRGVEKQNAEMKTSMMLGTFRSNPATRAEFLSLVN

SEQ ID NO: 10383 - protein, 314 aa, Marinobacterium stanieri
  misc_feature (1)..(314): tr|A0A1N6SAN4|A0A1N6SAN4_9GAMM GTP cyclohydrolase FolE2 OS=Marinobacterium stanieri OX=49186 GN=folE2 PE=3 SV= 1
MPLTSQHMPDIANDSTPERLRPLSWVGMSGIDLPCTLLLPGALPQQVLCKASLHVDIAKEDQRGIHMSRLYLELQHAFKERLLCVESLNKLLDACLGHHAGISQNASLELAFDLPLKRSALLSANSGWHAYPVRIHAQLSPEGTRLELSAAVKYSSTCPCSSALSRQLLEQAFQSTFAGQTTVDPEAVGQWLQENGSLATPHSQRSTAQVRVLLADNSQSLPLETLIDQIEGAVQTAVQTAVKREDEQAFAELNGRNQMFCEDAARRTAHALDQESQWQDFWVRIEHHESLHAHDATAVAVKGIPNGYSPLLQR

SEQ ID NO: 10384 - protein, 179 aa, Marinobacterium stanieri
  misc_feature (1)..(179): tr|A0A1N6PVH7|A0A1N6PVH7_9GAMM GTP cyclohydrolase 1 OS= Marinobacterium stanieri OX=49186 GN=folE PE=3 SV=1
METAYSQIIEQLGEDLEREGLKDTPARAAKAMKFLTRGYTQTLDEVVNDALFPSDNSEMVLVRNIELYSLCEHHLLPFIGKAHVAYIPQGKVVGLSKLARIVDMYARRLQIQENMTKEIAEAIQSVTGAAGVGVVIEAQHMCMMMRGVEKQNASMTTSMMLGSFRSSEATRNEFLSLIK

SEQ ID NO: 10385 - protein, 190 aa, Marinococcus halophilus
  misc_feature (1)..(190): tr|A0A510Y7X0|A0A510Y7X0_MARHA GTP cyclohydrolase 1 OS= Marinococcus halophilus OX=1371 GN=folE PE=3 SV=1
MNSFDHEKIKQGVQLLLEGIGEDPRREGLLETPDRVARFYKEIFSGLNKPSHTYLETSFTDDHEELVLVKDISFFSVCEHHLVPFFGQAHVAYIPKEGEVTGLSKLARTVEAVAQKPQLQERMTYTIANNIMSVLQPHGVMVILEAEHLCMAMRGVKKPGAVTVTSAVRGHFAQELAARQEVLELIRHHK

SEQ ID NO: 10386 - protein, 188 aa, Marinococcus halophilus
  misc_feature (1)..(188): tr|A0A510Y3K4|A0A510Y3K4_MARHA GTP cyclohydrolase 1 OS= Marinococcus halophilus OX=1371 GN=folE PE=3 SV=1
MANFDHEKIKEGVKLILEGVGEDAGREGLLDTPDRVARLYQEVFAGLHESADEHLKTVFGEDHEELVLVKDIPFFSMCEHHLVPFFGKAHVAYIPKGGMVTGLSKLARTVETIAKRPQLQERITYTIANEIVSTLEPHGVMVVLEAEHMCMTMRGVKKPGSMTVTSAVRGTFEKDQAARSEVLSLIKH

SEQ ID NO: 10387 - protein, 188 aa, Marinococcus luteus
  misc_feature (1)..(188): tr|A0A1H2REV3|A0A1H2REV3_9BACI GTP cyclohydrolase 1 OS= Marinococcus luteus OX=1122204 GN=folE PE=3 SV=1
MANFDHEKIKEGVRLILEGVGEDAGREGLLDTPDRVARLYQEVFAGLHESANEHLKTVFGEDHEELVLVKDIPFFSMCEHHLVPFFGKAHVAYIPKGGMVTGLSKLARTVETIAKRPQLQERITYTVANEIVSTLEPHGVMVVLEAEHMCMTMRGVKKPGSMTVTSAVRGTFEGDQAARSEVLSLIKH

SEQ ID NO: 10388 - protein, 227 aa, Marinomonas alcarazii
  misc_feature (1)..(227): tr|A0A318V5H3|A0A318V5H3_9GAMM GTP cyclohydrolase 1 OS= Marinomonas alcarazii OX=491949 GN=folE PE=3 SV=1
MEANLAKQTNLNRLELSSEATKVRDALIKSGLETPMIDNGLTSEEKYQRIKSAFEDVVSTLGLDLTDDSLAETPHRIAKMYVKEIFSGLDYAQFPKITVIENKMKVDEMVKVSDISFTSTCEHHFVTIDGLAKVAYLPKNKIIGLSKINRIVRFFAQRPQVQERLTQQILVTLQALLETDNVAVSINAVHYCVKARGVMDASSSTQTTALGGLFKRSDKTRGEFLAR

SEQ ID NO: 10389 - protein, 244 aa, Marinomonas aquimarina
  misc_feature (1)..(244): tr|A0A1A8T4W9|A0A1A8T4W9_9GAMM Putative GTP cyclohydrol ase 1 type 2 OS=Marinomonas aquimarina OX=295068 GN=MAQ 5080_00788 PE=4 SV=1
MTALYQPRLFKDYAPNGLQVEGKQEINKVVTGVTASMALIEAAIEKQADAIIVHHGYFWKGEVPEIVGMKYRRLSSLIKNDINLFGYHLPMDAHLLAGNNANLARALGVESLRPLESEKPLEESIGVVGKLQEPLAPAAFKAIIEQVVGRVVLFEAVSGAPISEVALCTGGAQGYIGKALAANADVFITGEVSEQTIHTAREEGIHFCAAGHHATECFGPRALAEHIRDNWGIDCEFIDIPNPA

SEQ ID NO: 10390 - protein, 102 aa, Marinomonas aquimarina
  misc_feature (1)..(102): tr|A0A1A8TLW2|A0A1A8TLW2_9GAMM Putative GTP cyclohydrol ase 1 type 2 OS=Marinomonas aquimarina OX=295068 GN=MAQ 5080_02766 PE=4 SV=1
MYSLVFYVPETHLESVKEAVFAAGAGRIGEYEACCWQVKGHGQFRPSAAANPFIGEAGKLEQVEEYRVEMVLLSELKEAVVSALKHSHPYEEVAYHLIQVEC

SEQ ID NO: 10391 - protein, 227 aa, Marinomonas aquiplantarum
  misc_feature (1)..(227): tr|A0A366D1P2|A0A366D1P2_9GAMM GTP cyclohydrolase 1 OS= Marinomonas aquiplantarum OX=491951 GN=folE PE=3 SV=1
MKANIAENSTVNHAFLSDEAKQVRDALIKSGLETPMIDNGLTTEEKYQRIKTAFEDVVSTLGLDLTDDSLAETPHRIAKMYVKEIFSGLDYTQFPKITVIENKMKVDEMVKVSDISFTSTCEHHFVTIDGMAKVAYLPKNKIIGLSKINRIVRFFAQRPQVQERLTQQILVTLQALLETDNVAVSISAVHYCVKARGVMDASSSTQTTALGGLFKRSDKTRGEFLAQ

SEQ ID NO: 10392 - protein, 228 aa, Marinomonas balearica
  misc_feature (1)..(228): tr|A0A4V3CGY6|A0A4V3CGY6_9GAMM GTP cyclohydrolase 1 OS= Marinomonas balearica OX=491947 GN=folE PE=3 SV=1
MTTAIAENTSSLGLTELSEEAVKVRDALVKHGLETPMIDNGLSSEEKYQRIKSAFEDVVYTLGLDMSDDSLAETPHRIAKMYVREIFSGLDYAKFPKITVIDNKMSVDEMVKVNNISFTSTCEHHFVTIDGFAKVAYLPKNKIIGLSKINRIVRFFGQRPQVQERLTQQILVTLQTLLETDNVAVSIEATHYCVKARGVMDASSSTQTTALGGLFKRSDKTRSEFLSN

SEQ ID NO: 10393 - protein, 227 aa, Marinomonas communis
  misc_feature (1)..(227): tr|A0A4R6XIT5|A0A4R6XIT5_9GAMM GTP cyclohydrolase 1 OS= Marinomonas communis OX=28254 GN=folE PE=3 SV=1
MTTAMAETSNVSPFALSAEASKVRDALIKHGLETPMIDNGLTTEEKYQRIKSAFEDVVYTLGLDLTDDSLCETPHRIAKMYVKEIFSGLDYSQFPKITVIENKMKVDEMVKVSDISFTSTCEHHFVTIDGLAKVAYLPKNKIIGLSKINRIVRFFGQRPQVQERLTQQVLVTLQTLLETDNVAVSIDATHYCVKARGVMDASSSTQTTALGGLFKRSDKTRSEFLAK

SEQ ID NO: 10394 - protein, 227 aa, Marinomonas foliarum
  misc_feature (1)..(227): tr|A0A369AH76|A0A369AH76_9GAMM GTP cyclohydrolase 1 OS= Marinomonas foliarum OX=491950 GN=folE PE=3 SV=1
MEANLAEQTNFNRLELSSEATKVRDALIKSGLETPMIDNGLTSEEKYQRIKSAFEDVVTTLGLDLTDDSLAETPHRIAKMYVKEIFSGLDYGLFPKITVIENKMKVDEMVKVSDISFTSTCEHHFVTIDGLAKVAYLPKNKIIGLSKINRIVRFFAQRPQVQERLTQQILVTLQALLETDNVAVSINAVHYCVKARGVMDASSSTQTTALGGLFKRSDKTRGEFLAR

SEQ ID NO: 10395 - protein, 237 aa, Marinomonas fungiae
  misc_feature (1)..(237): tr|A0A0K6IH24|A0A0K6IH24_9GAMM GTP cyclohydrolase 1 OS= Marinomonas fungiae OX=1137284 GN=folE PE=3 SV=1
MNELARQGIDMTTAMAETSKVSNIALSDEATRVRDALMKHGLETPMIDNGLSTEEKYQRIKAAFEDVVYTLGLDLTDDSLSETPHRIAKMYVKEIFSGLDYGQFPKITVIENKMKVDEMVKVSNISFTSTCEHHFVTIDGLAKVAYLPKNKIIGLSKINRIVRFFGQRPQVQERQTQQVLVALQTLLETDNVAVSINATHYCVKARGVMDASSSTQTTALGGLFKRSDKTRSEFLAS

SEQ ID NO: 10396 - protein, 301 aa, Marinomonas gallaica
  misc_feature (1)..(301): tr|A0A1C3JRA4|A0A1C3JRA4_9GAMM GTP cyclohydrolase FolE2 OS=Marinomonas gallaica OX=1806667 GN=folE2 PE=4 SV=1
MNIASQLPDVAHDCASNIPIDRVGMSGVALPIELKVGGQTVACAATASIFANVQNDQKGLHMSRMYRTLLDLSSTPLTASTLEQCARTALAQQQEVHATELSLHVSTLVQLKRPALHSAGWGWNAYPVELALTYSDAQGMRLTQAMTVTYSSSCPASAALSRQALSSAFVDHAEAQSEPLSTAQVAQWLEQNGTLAIPHSQRSDAMITIDINSAELPVFEVIELSENALETAVQTYVKREDEQQFALRNGANPMFVEDASRRLMGALKSAQYSGHVSVTHRESLHGHDAVAHSSFTKGELV

SEQ ID NO: 10397 - protein, 102 aa, Marinomonas gallaica
  misc_feature (1)..(102): tr|A0A1C3JPT4|A0A1C3JPT4_9GAMM Putative GTP cyclohydrol ase 1 type 2 OS=Marinomonas gallaica OX=1806667 GN=MGA5 115_01274 PE=4 SV=1
MYSLIFYVPETHLEQVKEAVFAAGAGHLGNYDFVCWQVKGEGQFQPSLHATPFIGEAGKLEELEEYRVEMMLLDDCREAVVSALKLSHPYEEVAYHLIAIEC

SEQ ID NO: 10398 - protein, 213 aa, Marinomonas hwangdonensis
  misc_feature (1)..(213): tr|A0A3M8QAP5|A0A3M8QAP5_9GAMM GTP cyclohydrolase 1 OS= Marinomonas hwangdonensis OX=1053647 GN=folE PE=3 SV=1
MLSETASKVRDALLKSGLETPMIDNGLTSEEKYQRIKSAFEDVVSTLGLDLTDDSLAETPHRIAKMYVKEIFSGLDYTQFPKISVIENKMKVDEMVKVSDISFTSTCEHHFVTIDGMAKVAYLPKDKIIGLSKINRIVRFFAQRPQVQERLTQQILLTLQTLLETDNVAVSISAVHYCVKSRGVMDASSSTQTTALGGLFKRSDKTRGEFLAR

SEQ ID NO: 10399 - protein, 299 aa, Marinomonas mediterranea
  misc_feature (1)..(299): tr|F2K4Z4|F2K4Z4_MARM1 GTP cyclohydrolase I OS=Marinomo nas mediterranea (strain ATCC 700492 / JCM 21426 / NBRC 103028 / MMB-1) OX=717774 GN=Marme_3421 PE=4 SV=1
MNNLTPLPDVASKIVSDISLDQVGMANIALPLRINVENGTQTCAANAAIFANVQNGQKGLHMSRMYESLLELSETSLSAATLASCAKHALLQQTEVEATNLSIELKTQLQIKRPALNSNGDGWNRYPVEINANYSHQDGFTLSLGIQVTYSSSCPASAALSRQALSQTFDQTFRDSQSLNHGEITSWLEKNGTLAIPHSQRSIANITVGITDGPLPISELINTCEEALGTPVQTFVKRDDEQEFALRNGANPMFVEDASRRLIQALETQGYSGKLYVSHQESLHGHDAVAQAFFSSEER

SEQ ID NO: 10400 - protein, 228 aa, Marinomonas mediterranea
  misc_feature (1)..(228): tr|F2JVP4|F2JVP4_MARM1 GTP cyclohydrolase 1 OS=Marinomo nas mediterranea (strain ATCC 700492 / JCM 21426 / NBRC 103028 / MMB-1) OX=717774 GN=folE PE=3 SV=1
MSTAIAEEKSSLELIGLSEEAVKVRDALVKHGLETPMIENGLSTEEKYQRIKSAFEDVVYTLGLDMNDDSLAETPHRIAKMYVREIFSGLDYAKFPKITVIDNKMNVDEMVKVNNISFTSTCEHHFVTIDGFAKVAYLPKKKIIGLSKINRIVRFFGQRPQVQERLTQQILVTLQTLLETDNVAVSIEATHYCVKARGVMDASSSTQTTALGGLFKRSDKTRGEFLSN

SEQ ID NO: 10401 - protein, 227 aa, Marinomonas polaris
  misc_feature (1)..(227): tr|A0A1M5I8L4|A0A1M5I8L4_9GAMM GTP cyclohydrolase 1 OS= Marinomonas polaris DSM 16579 OX=1122206 GN=folE PE=3 S V=1
MKANTAEQTNLNRLVLSNEAIKVRDALINSGLETPMIDNGLTSEEKYQRIKSAFEDVVTTLGLDLTDDSLAETPHRIAKMYVKEIFSGLDYAQFPKITVIENKMQVDEMVKVSDISFTSTCEHHFVTIDGLAKVAYLPKTKIIGLSKINRIVRFFAQRPQVQERLTQQILVTLQALLETDNVAVSISAVHYCVKARGVMDASSSTQTTALGGLFKRSDKTRGEFLAR

SEQ ID NO: 10402 - protein, 227 aa, Marinomonas pollencensis
  misc_feature (1)..(227): tr|A0A3E0DTS9|A0A3E0DTS9_9GAMM GTP cyclohydrolase 1 OS= Marinomonas pollencensis OX=491954 GN=folE PE=3 SV=1
MSIAVAEKTNVGSLVLSEEAIRVREALINHGLETPMIDNGLTTEEKYQRIKQSFEDVVSTLGLDLTDDSLAETPHRIAKMYVKEIFSGLDYSQFPKITVIDNKMKVDEMVKVSNISFTSTCEHHFVTIDGFAKVAYLPKNKIIGLSKINRIVRFFAQRPQVQERLTQQILVTLQVLLETDNVAVSIDATHYCVKARGVMDASSSTQTTALGGLFKRSDKTRGEFLAS

SEQ ID NO: 10403 - protein, 304 aa, Marinomonas pollencensis
  misc_feature (1)..(304): tr|A0A3E0DRK5|A0A3E0DRK5_9GAMM GTP cyclohydrolase FolE2 OS=Marinomonas pollencensis OX=491954 GN=folE2 PE=3 SV =1
MNTVLPDVSISDFSANERPLEWVGMQEIDLPVTITEAHYERQLHAKADVQVNLPAAHIKGIHMSRLYRLLGDLTEGESLSPARIEALLKDMIETHQDCQTDSARLRLTFDLLVKRPALITESIAGWKSYPVHIDAKLINGNCLIQASVGVEYSSTCPCSAALSRQLVEQGFLADFPEDAPLSREEIAQWLTKNATLATPHSQRSEAEVRVDLVNHSADFGLLELINQIEKALQTPLQTAVKRADEQAFASLNGQNLMFVEDAVRRIQAQLQEVFIKPKAHVRHLESLHPHDAVAWSNPSSISVS

SEQ ID NO: 10404 - protein, 227 aa, Marinomonas posidonica
  misc_feature (1)..(227): tr|F6CTE8|F6CTE8_MARPP GTP cyclohydrolase 1 OS=Marinomo nas posidonica (strain CECT 7376 / NCIMB 14433 / IVIA-P o-181) OX=491952 GN=folE PE=3 SV=1
MKANIAENSTVNHAFLSDEAKQVRDALIKSGLETPMIDNGLTTEEKYQRIKTAFEDVVSTLGLDLTDDSLAETPHRIAKMYVKEIFSGLDYTQFPKITVIENKMNVDEMVKVSDISFTSTCEHHFVTIDGMAKVAYLPKNKIIGLSKINRIVRFFAQRPQVQERLTQQILVTLQALLETDNVAVSISAVHYCVKARGVMDASSSTQTTALGGLFKRSDKTRGEFLAQ

SEQ ID NO: 10405 - protein, 227 aa, Marinomonas primoryensis
  misc_feature (1)..(227): tr|A0A2Z4PWE0|A0A2Z4PWE0_9GAMM GTP cyclohydrolase 1 OS= Marinomonas primoryensis OX=178399 GN=folE PE=3 SV=1
MNANIAVQTNLNRLVLSDEAIKVRDTLIKSGLETPMIDNGLTSEEKYQRIKNSFEEIVTTLGLDLTDDSLAETPHRIAKMYVKEIFSGLDYAQFPKITVIENKMKVDEMVKVSDISFTSTCEHHFVTIDGLAKVAYLPKTKIIGLSKINRIVRFFAQRPQVQERLTQQILVTLQALLETDNVAVSISAVHYCVKARGVMDASSSTQTTALGGLFKRSDKTRGEFLAR

SEQ ID NO: 10406 - protein, 227 aa, Marinomonas profundimaris
  misc_feature (1)..(227): tr|W1RTD6|W1RTD6_9GAMM GTP cyclohydrolase 1 OS=Marinomo nas profundimaris OX=1208321 GN=folE PE=3 SV=1
MKANAAELNSVNRFEMSEEAIKVRQALIDSGLETPMIDNGLTSEEKYQRIKSAFTEVVSTLGLDLTDDSLAETPHRIAKMYVKEIFSGLDYGQFPKITVIENKMKVDEMVKVSDISFTSTCEHHFVTIDGLAKVAYLPKTKIIGLSKINRIVRFFAQRPQVQERLTQQILVTLQALLETDNVAVSISAVHYCVKARGVMDASSSTQTTALGGLFKRSDKTRSEFLAR

SEQ ID NO: 10407 - protein, 324 aa, Marinomonas rhizomae
  misc_feature (1)..(324): tr|A0A366IZR6|A0A366IZR6_9GAMM GTP cyclohydrolase FolE2 OS=Marinomonas rhizomae OX=491948 GN=folE2 PE=3 SV=1
MTNLLPDVSISETVVNESPLEWVGMKGIDLPITVSETNCEAHYYRELHAHADVQVNLPAGHVKGIHMSRLYRLLDTLSDGDALSPYRLESLLKAMIETHQDCYTDSARLRLKFDLLTRRPALMTEGASGWKSYPVCLDVYLSDKSFQINAQVIVQYSSTCPCSAALSRQLIEQRFLSDFVNQPALAPDTVAAWLRDNASLATPHSQRSEASVQVDVPTNQQEFGLLSLIDQIEVALGTPLQTAVKRADEQAFAALNGQNLMFVEDAARRIQAALNGKFSSPKVHVRHLESLHPHDAVAWSNAPEQQTTADLTHPSSSILMKMSS

SEQ ID NO: 10408 - protein, 227 aa, Marinomonas rhizomae
  misc_feature (1)..(227): tr|A0A366J8L3|A0A366J8L3_9GAMM GTP cyclohydrolase 1 OS= Marinomonas rhizomae OX=491948 GN=folE PE=3 SV=1
MKANTAEQTNLNRLVLSDEAIKVRDALINSGLETPMIDNGLTSDEKYQRIKSAFEDVVTTLGLDLTDDSLAETPHRIAKMYVKEIFSGLDYAQFPKITVIENKMQVDEMVKVSDISFTSTCEHHFVTIDGLAKVAYLPKNKIIGLSKINRIVRFFAQRPQVQERLTQQILVTLQALLETDNVAVSISAVHYCVKARGVMDASSSTQTTALGGLFKRSDKTRGEFLAR

SEQ ID NO: 10409 - protein, 228 aa, Marinomonas sp.
  misc_feature (1)..(228): tr|A0A501WPR1|A0A501WPR1_9GAMM GTP cyclohydrolase 1 OS= Marinomonas sp. HB171799 OX=2589817 GN=folE PE=3 SV=1
MTTVIAENTTTRITPNLSEEAAKVRAALLKHGLETPMVDNELTTEEKYQRIKASFEDIVFTLGLDLGDDSLAETPHRIAKMYVKEIFSGLDYSQFPKISVIDNKMKVDEMVKVNDISFTSTCEHHFVTIDGFAKVAYLPKNKIIGLSKINRIVRFFGQRPQVQERLTQQILITLQTLLETDNVAVSISATHYCVKARGVMDASSSTQTTALGGLFKRSDKTRGEFLAN

SEQ ID NO: 10410 - protein, 316 aa, Marinomonas sp.
  misc_feature (1)..(316): tr|A3YH71|A3YH71_9GAMM GTP cyclohydrolase FolE2 OS=Mari nomonas sp. MED121 OX=314277 GN=folE2 PE=3 SV=1
MIDQLPDVAHTQVNSQQPKINWVGMDDIYLPIGLEEAGKQLASQACASIAVDLPGGENAAKGIHMSRLYFLLNELAQQPLKPETLKHCLEQVLASHSDLDSNVVRIELAFDLLWQRPALVSGSPAGWRAYPMVLSAQLNKDSGFSLSLQAEFQYSSTCPCSAALVRETLSNQFSQNFAGQASIPTQEVAQWLKQNGTLATPHSQRSLALITLPLNESASTFNLVALIEEVETIIATPVQTSVKRADELAFAELNGSNLIFVEDISRKLGKALREKYQAVEIQVRHLESLHAHNAFAQVLPELSQSGLRPQFKQGPK

SEQ ID NO: 10411 - protein, 102 aa, Marinomonas spartinae
  misc_feature (1)..(102): tr|A0A1A8TQD1|A0A1A8TQD1_9GAMM Putative GTP cyclohydrol ase 1 type 2 OS=Marinomonas spartinae OX=1792290 GN=MSP 8886_03746 PE=4 SV=1
MYSLIFYVPETDLDKVKQALFSVGAGALGNYDHYCWQIKGEGQFRPLEGADPHSGKVNEISHICEYRVEMLLQEDVKQSAINALLSSHPYEEVAYHIIPIQR

SEQ ID NO: 10412 - protein, 228 aa, Marinomonas spartinae
  misc_feature (1)..(228): tr|A0A1A8T7Y7|A0A1A8T7Y7_9GAMM GTP cyclohydrolase 1 OS= Marinomonas spartinae OX=1792290 GN=folE PE=3 SV=1
MKSVVAEQAKVSDLGLSEEAHKVRDALIKSGLETPMIDNGLTSEEKYQRIKYAFEDIVGTLGLDLTDDSLAETPHRIAKMYVREIFSGLDYSNFPKITVIENKMKVDEMVKVRNISFTSTCEHHFVTIDGMATVAYLPKNKIIGLSKINRIVRFFGQRPQVQERLTQQILVTLQALLETDNVAVSIDAVHYCVKARGVMDASSSTQTTALGGLFKSSDKTRGEFLSSQ

SEQ ID NO: 10413 - protein, 226 aa, Marinomonas ushuaiensis
  misc_feature (1)..(226): tr|X7E4B4|X7E4B4_9GAMM GTP cyclohydrolase 1 OS=Marinomo nas ushuaiensis DSM 15871 OX=1122207 GN=folE PE=3 SV=1
MNNTAEQTNVSRLELSDEAMRVRDALISKGLETPMIDTGLTTEEKYQRIKSAFEDVVTTLGLDLTDDSLTETPHRIAKMYVKEIFSGLDYAHFPKITVIENKMKVDEMVKVSDISFTSTCEHHFVTIDGLAKVAYLPKTKIIGLSKINRIVRFFAQRPQVQERLTQQVLVTLQVLLETDNVAVSMDAVHYCVKSRGVMDASSSTQTTALGGLFKRSDKTRSEFLAR

SEQ ID NO: 10414 - protein, 233 aa, Marinoscillum furvescens
  misc_feature (1)..(233): tr|A0A3D9L5R3|A0A3D9L5R3_9BACT GTP cyclohydrolase 1 OS= Marinoscillum furvescens DSM 4134 OX=1122208 GN=folE PE =3 SV=1
MKQKETLLNTQHELNNMEDDFAEDHVGSSDSTPLRADAFEMDDELKMELISKHFKEIMQILGLDLTDDSLQGTPHRVAKMYVQEVFSGLNPANKPKVRLFENKYKYDQMLVEKDITFYSHCEHHFVPIYGKAHVAYFSSGKVIGLSKINRVVQYYAKRPQVQERLTMQIANELKEVLQTEDVAVVLDATHMCVSSRGVNDTNSMTGTAFFDGKFKDQSVKTEFLNYINSKTDL

SEQ ID NO: 10415 - protein, 220 aa, Marinoscillum sp.; identical to SEQ ID NO: 8117
  misc_feature (1)..(220): tr|A0A2D7TEZ9|A0A2D7TEZ9_9BACT GTP cyclohydrolase 1 OS= Marinoscillum sp. OX=2024838 GN=folE PE=3 SV=1

SEQ ID NO: 10416 - protein, 201 aa, Marinospirillum alkaliphilum
  misc_feature (1)..(201): tr|A0A1K1YYH6|A0A1K1YYH6_9GAMM GTP cyclohydrolase 1 OS= Marinospirillum alkaliphilum DSM 21637 OX=1122209 GN=fo lE PE=3 SV=1
MNALMQMQQNTTDDQPELPLDALESHYKSILSLLGEDPAREGLKDTPKRAAKAMAFLTQGYHQDLTGLVNGAVFSSDTDELVIVKDIELYSMCEHHLLPFIGKCHIGYLPQGKVLGLSKFARIVDMFARRFQIQEQLTRQIAEAVQEVTGAAGVGVIVEARHMCMMMRGVEKQNSSMRTSVMLGQLRESQNTRQEFLKLLD

SEQ ID NO: 10417 - protein, 201 aa, Marinospirillum celere
  misc_feature (1)..(201): tr|A0A1I1E3B0|A0A1I1E3B0_9GAMM GTP cyclohydrolase 1 OS= Marinospirillum celere OX=1122252 GN=folE PE=3 SV=1
MNALTQPNTMNQNPDSDMIHQKLTPLYREILSDLGEDPDREGLVDTPKRAAKAMEFLTKGYRQTLEELVNGAVFSSETDELVIVKDIELYSLCEHHLLPFIGKCHIGYLPQGKVLGLSKFARIVDMFSRRLQIQEQLTKQIAEAVQEVTGAAGVGVIIEARHLCMQMRGVEKQNSSMRTSVMLGQLRASQNTRQEFLKLLD

SEQ ID NO: 10418 - protein, 367 aa, Marinosulfonomonas sp.
  misc_feature (1)..(367): tr|A0A0P8Z0Q9|A0A0P8Z0Q9_9RHOB GTP cyclohydrolase FolE2 OS=Marinosulfonomonas sp. PRT-SC04 OX=1527300 GN=folE2 PE=3 SV=1
MNIQPTNDSAETDRKKAEMALATLRDWAKSVTAIEVAQLDPAIARLLPENEVSNYPALARAYPEEFTVDEAYKASLPDLQNGPESLIKGAKRHIQHVGISNFRLPIQFHSRDGGDLRLETSVTGTVSLEAGKKGINMSRIMRTFYTHAEKTFSFAVIEAALNDYKVDLDSFDARIQMRFSFPVKMMSLRSKLEGYQYYDIALELVEIAGKVKKIIHLDYVYSSTCPCSLELAEHARQMRGQLATPHSQRSVVRISAQTIPGENCLWFEDLIDICRAAVPTETQVMVKREDEQAFAELNAANPIFVEDAARLFYEGLKKDDRIGDFRIIASHQESLHSHDAVSILTEGETFVSDSLDPRLFNTLFHVG

SEQ ID NO: 10419 - protein, 371 aa, Marinosulfonomonas sp.
  misc_feature (1)..(371): tr|A0A2G2BHT7|A0A2G2BHT7_9RHOB GTP cyclohydrolase FolE2 OS=Marinosulfonomonas sp. OX=2030815 GN=folE2 PE=3 SV= 1
MNIQPPKDSTDEERNKAQAALAVLRDWATSVTAIEVAQLDPAIARLLPENEVSNYPALARAYPEEFTVDEAYKVSLPDLQNGPESLIKGAKRHIQHVGISNFRLPIRFHSRDGGDLRLETSVTGTVSLEAGKKGINMSRIMRTFYGHAEKTFSFDVIEAALNDYKADLDSFDARIQMRFSFPVKMPSLRSGLEGYQYYDIALELVETKGKVQKFIHLDYVYSSTCPCSLELSEHARQMRGQLATPHSQRSVARISAQMICDKPGRENCLWYEDLIDICREAVPTETQVMVKREDEQAFAELNAANPIFVEDAARLFYEGLQLDPRIGDFRIIASHQESLHSHDAVSILTEGETFVSDSLDPKLFNTLFHVG

SEQ ID NO: 10420 - protein, 349 aa, Marinovum algicola
  misc_feature (1)..(349): tr|A0A0H4KTC2|A0A0H4KTC2_9RHOB GTP cyclohydrolase FolE2 OS=Marinovum algicola DG 898 OX=988812 GN=folE2 PE=3 S V=1
MNLPTPGLNRVPSRQEAEAAVDLLRRYTDATGATALGYPDMASIYPAEFEVDSTYKSSLPDLQNGPASLIRGANEPIQHVGISNFRLPISFHTRGGGDLTLETAVTGTVSLGADKKGINMSRIMRSFYRHSEKTFSFEVMEAALDDYKTDLESFDARIEMRFSFPVRLDSLRSGLSGYQYYDIALELIESQGQRRKILHLDYVYSSTCPCSLELSEHARRERGQLATPHSQRSVARISVEVVGETCLWFEDLIDLCRAAVPTETQVMVKREDEQAFAELNAANPIFVEDAARLFCARLQAEPRVGDFRVAASHQESLHSHDAISVLTSGPTFETASIDPRFFATLIHAG

SEQ ID NO: 10421 - protein, 215 aa, Marinovum sp.
  misc_feature (1)..(215): tr|A0A2E7WIM5|A0A2E7WIM5_9RHOB GTP cyclohydrolase 1 OS= Marinovum sp. OX=2024839 GN=folE PE=3 SV=1
MMTPYDTGETKDASEINDASLDRSLTEKPSRQEAEAAIDVLLRWIGENPTREGLAGTPGRVVRAWSEFCSGYDEDPAKMLARTFEEVEGYNDMVMLRNIRMESHCEHHLVPILGVAHIAYMPNRRVVGISKLARVLDGFAHRLQTQETLTAQVADCIQKILQPKGVAVLIDAQHQCMTTRGVRKPDVSMITTRFTGVFKKDEALCRRFLDQTKLG

SEQ ID NO: 10422 - protein, 363 aa, Marinovum sp.
  misc_feature (1)..(363): tr|A0A2E7WHP1|A0A2E7WHP1_9RHOB GTP cyclohydrolase FolE2 OS=Marinovum sp. OX=2024839 GN=folE2 PE=3 SV=1
MNIHTREADNISLQDKADAALDVLRVWSQSASQDELAAMAKRLAPLAAPAGYPDLSQDYPEEFVADPDYKSGLPDLQNGPSSLIRGAQRAIQHVGISNFRLPIQFHTRDDGDVRLETSVTGTVSLEAGKKGINMSRIMRSFYGHAERTFSFDVVEAALDDYKADLESFDARIHMRFSFPAKVDSLRSGLSGYQYYDIALELIEQHGQRRRIMHLDYVYSSTCPCSLELSEHARQTRHQLATPHSQRSVARISVELVEQNCLWFEDLIDMCRRAVPTETQVMVKREDEQAFAELNAANPIFVEDAARLFCEQLHQDGRIGDFRVIASHQESLHSHDAVSILTEGQTFAADSLDPRLFQSLFHTG

SEQ ID NO: 10423 - protein, 200 aa, Mariprofundus aestuarium
  misc_feature (1)..(200): tr|A0A2K8L508|A0A2K8L508_9PROT GTP cyclohydrolase 1 OS= Mariprofundus aestuarium OX=1921086 GN=folE PE=3 SV=1
MSDDFDLNDPNNVEGMKHVRGLLDYIGEDVNREGLQETPARVLAAMHEHFSGYKEDPRDHLEKTFEEVEGYDEVVLVSDIDVHSHCEHHMVPFVGKAHVAYIPRGRVVGLSKLARVVDGYAKRLQVQEKLTMQIANAIEEVLDPKGVAVIIQCQHFCMCHRGIHKPNSWTTTSKLTGAFMNNPSSRLELFQLIGMNKTTG

SEQ ID NO: 10424 - protein, 200 aa, Mariprofundus ferrinatatus
  misc_feature (1)..(200): tr|A0A2K8L1P0|A0A2K8L1P0_9PROT GTP cyclohydrolase 1 OS= Mariprofundus ferrinatatus OX=1921087 GN=folE PE=3 SV=1
MSEDFDLNDPINIEGMKHVRGLLEYIGEDVGREGLKETPARVLAAMHEHFSGYKEDPRDHLEKTFEEVEGYDEVVLVSDIDVHSHCEHHMVPFVGKAHVAYIPRGRVVGLSKLARVVEGYAKRLQVQEKLTMQIANAIEEVLDPKGVAVIIQCQHFCMCHRGVHKPNSWTTTSKLTGAFMNNPSSRLELFQLIGMNKSSD

SEQ ID NO: 10425 - protein, 200 aa, Mariprofundus ferrooxydans
  misc_feature (1)..(200): tr|Q0EX82|Q0EX82_9PROT GTP cyclohydrolase 1 OS=Mariprof undus ferrooxydans PV-1 OX=314345 GN=folE PE=3 SV=1
MTEDFDLNDEKNIAAMKHVRGLLEYMGEDVHREGLLETPARVLAAMGEHFSGYREDPKEHLQKTFEEVEGYDEVVLVSDIDVHSHCEHHMVPFVGKAHVAYIPHGRVVGLSKLARVVDGYAKRLQVQEKLTMQIANAINEVLEPEGVAVIIQCQHFCMCHRGVQKSNSWTTTSKLTGTFLNNPSSRLELFQLIGMDKSLR

SEQ ID NO: 10426 - protein, 222 aa, Mariprofundus micogutta
  misc_feature (1)..(222): tr|A0A1L8CQ95|A0A1L8CQ95_9PROT GTP cyclohydrolase 1 OS= Mariprofundus micogutta OX=1921010 GN=folE PE=3 SV=1
MGVALLKFALWCMPETEKEERAVTDDLDLNDPKNIQGMQHVRGLLEYIGEDVGREGLQETPARVLSAMHEHFSGYREDPREHLEKTFEEVEGYDEVVLVSDIDVHSHCEHHMVPFVGKAHVAYIPRGRVVGLSKLARVVEGYAKRLQVQEKLTMQIANAIEEVLDPKGVAVIVQCQHFCMCHRGVHKPNSWTTTSKLTGAFMNNPSSRLELFQLIGMEKSAK

SEQ ID NO: 10427 - protein, 197 aa, Mariprofundus sp.
  misc_feature (1)..(197): tr|A0A498E2X6|A0A498E2X6_9PROT GTP cyclohydrolase 1 OS= Mariprofundus sp. EBB-1 OX=2650971 GN=folE PE=3 SV=1
MTDDFDIEDKKNIEAMGFVRGMLEYIGEDVNREGLLETPARVLAAMGEHFSGYKEDPREHLLKTFEEVEGYDEVVLVSDIEVHSHCEHHMVPFIGKAHVAYIPRDRVVGLSKLARVVNGFAKRLQVQEKLTMQIANAIEEVLDPKGVAVIIQCQHFCMCHRGVHKPDSWTTTSKLTGSFLKNPSSRLELFQLIGMKK

SEQ ID NO: 10428 - protein, 227 aa, Marisediminitalea aggregata
  misc_feature (1)..(227): tr|A0A1M5DZE5|A0A1M5DZE5_9ALTE GTP cyclohydrolase 1 OS= Marisediminitalea aggregata OX=634436 GN=folE PE=3 SV=1
MLAKEAVIVRDAVKLGISKEALMVHEALVARGLETPMLETGLSDEAKRQRIEGAMREIMETLGLDLSDDSLSETPLRIAKMYVDEIFSGLDYRKFPKITQIENKMQLGQPVHVSDVSLTSTCEHHFVTIDGTASVAYIPKDTVIGLSKINRLVGFFAQRPQVQERLTQQVLVALQTLTGTEDVAVAINATHYCVKARGIRDSLSYTKTSALGGKFLADVELRREFFS

SEQ ID NO: 10429 - protein, 188 aa, Marispirochaeta aestuarii
  misc_feature (1)..(188): tr|A0A1Y1RYL1|A0A1Y1RYL1_9SPIO GTP cyclohydrolase 1 OS= Marispirochaeta aestuarii OX=1963862 GN=folE PE=3 SV=1
MNRERVAGLIRELLIELGEDPEREGLQRTPERAAKAWEYLSSGYSRNIDEVINGAVFESEANNMIIVRDIEVYSLCEHHMLPFYGKVHIGYIARDKVLGVSKLARIADVFARRLQIQERLTRQIAREIMDSTNAEGVGVVMEAKHLCMMMRGVEKQNSVMTTSSVLGSFHNDEATRLEFLQLISKKLD

SEQ ID NO: 10430 - protein, 208 aa, Maritalea mobilis
  misc_feature (1)..(208): tr|A0A4R6VRE3|A0A4R6VRE3_9RHIZ GTP cyclohydrolase 1 OS= Maritalea mobilis OX=483324 GN=folE PE=3 SV=1
MDATVKPIKNDIREAKPVVRPTREEAEQAVRTLLAWAGEDVTREGLLETPKRVAKAYEEFFEGYNLDAKEVLNKTFRDVGGYDDMVLVKDIPFFSHCEHHMVPFVGKAHIAYLPTDSVVGLSKLGRVTDVFAKRFQTQENLTQQIIDAINDNLNPRGAAVMLEAEHMCMSLRGVKKHGATTLTQRFTGVFAEEPKEQDRFFHLLALQK

SEQ ID NO: 10431 - protein, 208 aa, Maritalea myrionectae
  misc_feature (1)..(208): tr|A0A2R4MDQ4|A0A2R4MDQ4_9RHIZ GTP cyclohydrolase 1 OS= Maritalea myrionectae OX=454601 GN=folE PE=3 SV=1
MDATIKSIRKDLPTTKSVVRPTRDEAEQAVRTLLAWAGEDVTREGLLETPKRVAKAYEEFFEGYTLDAEEVLNKTFRDVGGYDDMVLVKDIPFFSHCEHHMVPFVGKAHIAYLPTDAVVGLSKLGRVTDVFAKRFQTQENLTQQIIDAINDNLNPRGAAVMLEAEHMCMSLRGVKKHGATTLTQRFTGVFAEEPKEQDRFFHLLAMQK

SEQ ID NO: 10432 - protein, 367 aa, Maritimibacter alkaliphilus
  misc_feature (1)..(367): tr|A3VAA1|A3VAA1_9RHOB GTP cyclohydrolase FolE2 OS=Mari timibacter alkaliphilus HTCC2654 OX=314271 GN=folE2 PE= 3 SV=1
MNHIPSKVLAAPELDDAKAALETLRDWARGATPEEVAALDPAISRLLPGGEVSNYPALSRTYDPDFEADADYKATLPDLQNGPASLIQGERQDIQHVGISNFRLPLRYRTRDNGDLQLETSVTGTVSLEAEKKGINMSRIMRSFYAHAEKTFSFEVIEAALDDYKTDLESLDARIEMSFSFPMKVKSLRSGLEGYQYYNIALELVETKGVRRHFMHLDYVYSSTCPCSLELSEHARQTRGQLATPHSQRSVARVSVEVAPGQCCLWFEDLIELCRAAVPTETQVMVKREDEQAFAELNAANPIFVEDAARLFTEQLKADDRIGDFRVVASHQESLHSHDAVSILTEGETFRAQSLDPRLFSTLIHQG

SEQ ID NO: 10433 - protein, 367 aa, Maritimibacter sp.
  misc_feature (1)..(367): tr|A0A1X7NSI7|A0A1X7NSI7_9RHOB GTP cyclohydrolase FolE2 OS=Maritimibacter sp. HL-12 OX=1162418 GN=folE2 PE=3 S V=1
MNHVTPKLRPAPGADDARQALETLRDWARGAEPSEVARLDPAIARLLPERVVSDYPDLNRNYPHDFVPDAAYKAGMPDLQNGPASLIQGEKQLIQHVGISNFRLPIRYHTRDNGDLTLETSVTGTVSLEAEKKGINMSRIMRSFYAHAEKTFSFEVIEAALDDYKTDLDSLDARIEMSFSFPMKMQSLRSGLEGYQYYQIALELVEQDGVRRKFVHLDYVYSSTCPCSLELAEHARQVRGQLATPHSQRSVARISVEVKCEKSCLWFEDLIDMARDAVPTETQVMVKREDEQAFAELNAANPIFVEDAARLFTEQLKRDERIGDFRVVASHQESLHSHDAVSILTEGETFRSQSLDPKLFSTLIHAG

SEQ ID NO: 10434 - protein, 367 aa, Maritimibacter sp.
  misc_feature (1)..(367): tr|A0A2D8PAT5|A0A2D8PAT5_9RHOB GTP cyclohydrolase FolE2 OS=Maritimibacter sp. OX=2003363 GN=folE2 PE=3 SV=1
MNHVTPKVLAAPDTEDAKDALRVLRDWARGATPEEVAALDPVISRLLPGGEVSNYPALSREYDADFVVDELYKASLPDLQNGPASLIQGERQDIQHVGISNFRLPLRYRTRDNGDLQLETSVTGTVSLEAEKKGINMSRIMRSFYVHADETFSFEVIERALDDYKTDLDSLDARIEMSFSFPMRVKSLRSGLEGYQYYNIALELVEAQGVRRKFMHLDYVYSSTCPCSLELSEHARQSRGQLATPHSQRSVARVSVELAPGQCCLWFEDLIDLCRAAVPTETQVMVKREDEQAFAELNAANPIFVEDAARLFTEQLKADDRIGDFRVVASHQESLHSHDAVSILTEGETFRAQSLDPRLFSTLIHQG

SEQ ID NO: 10435 - protein, 232 aa, Marivirga lumbricoides
  misc_feature (1)..(232): tr|A0A2T4DUL7|A0A2T4DUL7_9BACT GTP cyclohydrolase 1 OS= Marivirga lumbricoides OX=1046115 GN=folE PE=3 SV=1
MLNTPQNKEDLENFQSFDDMGDDHAGSSAETPLRADAFEMDDELKMELIAKHFKVIMHILGMDLTDDSLKGTPARVAKMYVKEVFSGLNPTNKPKPKLFENKYKYDQMLVEKDVTFYSHCEHHFVPIYGKAHVAYFSSGKVIGLSKINRIVQYFSKRPQVQERLTMQIAEELKRVLETESVAVVMDASHMCVSSRGVGDTNSRTGTSYFGGKFNDESTRREFLDYINSPSPK

SEQ ID NO: 10436 - protein, 231 aa, Marivirga sericea
  misc_feature (1)..(231): tr|A0A1X7I9C0|A0A1X7I9C0_9BACT GTP cyclohydrolase 1 OS= Marivirga sericea OX=1028 GN=folE PE=3 SV=1
MLNTPHKNKDLDNMNDFDELGDDHVASNFETPLRADAFEMDDDLKMEMIAKHFKEIMHILGMDLSDDSLKGTPNRVAKMYVKEVFSGLNPKNKPQPKLFENKYKYSQMLVEKDITFYSHCEHHFVPIYGKAHVAYISSGKVIGLSKINRIVQYFSKRPQVQERLTVQIAEELRKVMETEDVAVVMDANHMCVSSRGVGDTNSRTGTSYFGGKFNDEATRREFLDYINSPSS

SEQ ID NO: 10437 - protein, 233 aa, Marivirga tractuosa
  misc_feature (1)..(233): tr|E4TRD8|E4TRD8_MARTH GTP cyclohydrolase 1 OS=Marivirg a tractuosa (strain ATCC 23168 / DSM 4126 / NBRC 15989 / NCIMB 1408 / VKM B-1430 / H-43) OX=643867 GN=folE PE= 3 SV=1
MSNTPQNKNRDLENINELEEFGDDHVASNFETPLRADAFEMDDDLKMEMIAKHFKEIMHILGMDLSDDSLKGTPNRVAKMYVKEVFSGLNPKNKPQPKLFENKYKYSQMLVEKDITFYSHCEHHFVPIYGKAHVAYISSGKVIGLSKINRIVQYYSKRPQVQERLTVQIAEELKEVMQTEDVAVVMDANHMCVSSRGVGDTNSRTGTSYFGGKFNDEATRREFLDYINSPNNS

SEQ ID NO: 10438 - protein, 365 aa, Marivita cryptomonadis
  misc_feature (1)..(365): tr|A0A1X4NXS0|A0A1X4NXS0_9RHOB GTP cyclohydrolase FolE2 OS=Marivita cryptomonadis OX=505252 GN=folE2 PE=3 SV=1
MNIHTPEIDRKPSREEAEAALALLKQWAGKSHDAEIDLVDPVLRRLVEGKTDTYPVLSREYPKGFSVDAAYKDTLPDLQNGPSALIRGANRGIQHVGISNFRLPISYHTRDNGDLTLETSVTGTVSLDADKKGINMSRIMRSFYVHAEKTFSFNVIEAALDDYKSDLESFDARINMRLSFPMKVNSLRSGLSGYQYYDIALELVEIDGVRRKIMHLDYVYSSTCPCSLELSEHARRERGQLATPHSQRSVARISVEVKDGKCLWFEDLIDMCRRAVPTETQVMVKREDEQAFAELNAANPIFVEDAARLFAEQLQADARIGDYRVLASHQESLHSHDAVSVLTEGDLFAAQSLDPKLFSTLFHVG

SEQ ID NO: 10439 - protein, 365 aa, Marivita geojedonensis
  misc_feature (1)..(365): tr|A0A1X4N9Y0|A0A1X4N9Y0_9RHOB GTP cyclohydrolase FolE2 OS=Marivita geojedonensis OX=1123756 GN=folE2 PE=3 SV= 1
MNIHTPEIDRKPSREEAEAALALLRQWAGKSHDGEIDLVDPVLRRLVDGEADSYPVLARDYPDGFSVDGAYKASLPDLQNGPSALIRGANRGIQHVGISNFRLPISYHTRDNGDLTLETSVTGTVSLDADKKGINMSRIMRSFYEHADKTFSFDVIKAALDDYKTDLESFDARINMRLSFPMKVNSLRSGLSGFQYYDIALELVDMGGVRRSIMHLDYVYSSTCPCSLELSEHARRERGQLATPHSQRSVARISVEVKDGKCLWFEDLIDMCRRAVPTETQVMVKREDEQAFAELNAANPIFVEDAARLFAEQLQADPRIGDYRVLASHQESLHSHDAVSVLTEGDLFAAESLDPKLFSTLFHVG

SEQ ID NO: 10440 - protein, 366 aa, Marivita hallyeonensis
  misc_feature (1)..(366): tr|A0A1M5PAI5|A0A1M5PAI5_9RHOB GTP cyclohydrolase FolE2 OS=Marivita hallyeonensis OX=996342 GN=folE2 PE=3 SV=1
MNIHTPEFDRKPSLDEAEQALAVLRQWANKAHDAEIDLVDPVLRKLVDGVKDDGYPVLSRDYPDGFAVDAAYKATLPDLQNGPSALIRGANRGIQHVGISNFRLPISYHTRDNGDLTLETSVTGTVSLDADKKGINMSRIMRSFYVHAEKTFSFNVIEAALDDYKSDLESFDARINMRLSFPMKMDSLRSGLSGYQYYDIALELVEIDGVRRQIMHLDYVYSSTCPCSLELSEHARRERGQLATPHSQRSVARISVEVKDGKCLWFEDLIDMCRKAVPTETQVMVKREDEQAFAELNAANPIFVEDAARLFAEQLQKDPRVGDYRVLASHQESLHSHDAVSVLTEGTLFAAESLDPKLFSTLFHVG

SEQ ID NO: 10441 - protein, 365 aa, Marivita sp.
  misc_feature (1)..(365): tr|A0A316KQL7|A0A316KQL7_9RHOB GTP cyclohydrolase FolE2 OS=Marivita sp. XM-24bin2 OX=2133951 GN=folE2 PE=3 SV= 1
MNIHTPEIDRKPSREEAEAALALLRQWAGKAHDGEIDQLDPVLRRLLDGAQDGYPVLSRDYPDDFVVDAAYKDTLPDLQNGPAALIRGANRGIQHVGISNFRLPISYHTRDNGDLTLETSVTGTVSLDADKKGINMSRIMRSFYVHAEKTFSFNVIEAALDDYKSDLESFDARINMRLSFPMKMDSLRSGLSGYQYYDIALELVEIDGVRRKIMHLDYVYSSTCPCSLELSEHARRERGQLATPHSQRSVARVSVELKDGKCLWFEDLIDMCRRAVPTETQVMVKREDEQAFAELNAANPIFVEDAARLFAEQLQADPRIGDYRVLASHQESLHSHDAVSVLTEGELFSAESLDPKLFSTLFHVG

SEQ ID NO: 10442 - protein, 366 aa, Marivivens niveibacter
  misc_feature (1)..(366): tr|A0A251X3W7|A0A251X3W7_9RHOB GTP cyclohydrolase FolE2 OS=Marivivens niveibacter OX=1930667 GN=folE2 PE=3 SV= 1
MNIHNQDMEREPTREEAEAALALLRRWAKDVTAEEVATLDPLVSRLIPGQEVSNYPALARAYPEDFEVDDAYKASMPDLQNGPSSLIRGAKQQIQHVGISNFRLPIRFHTRDNGDVTLETSVTGTVSLEAEKKGINMSRIMRSFYKHASDTFSFEVMETALDAYKADLESFDARIQMRFRFPMKVASLRSGLEGYQYYDIALELVEKAGVRKKIIHLDYVYSSTCPCSLELSEHARQFRGQLATPHSQRSVSRLSAVIEDGEMLWFEDLIDMARDAVPTETQVMVKREDEQAFAELNAANPIFVEDAARLFCEQLQNDPRVGDFRVIASHQESLHSHDAVSVLTEGDTFDSESLDPRMFSTLIHVG

SEQ ID NO: 10443 - protein, 199 aa, Marixanthomonas ophiurae
  misc_feature (1)..(199): tr|A0A3E1Q890|A0A3E1Q890_9FLAO GTP cyclohydrolase 1 OS= Marixanthomonas ophiurae OX=387659 GN=folE PE=3 SV=1
MASYKYFEEYNESVTDDLKTNFSDILSSLGEDVNREGIVKTPERAAKAMQFLTSGNCQDPAEILKSAMFAEDYHDMVIIKDIELYSLCEHHMLPFFGKAHIAYIPNGHIVGLSKIPRIVDVFARRLQVQERLTHDILECINDTLKPQGVAVVIEAAHLCMMMRGVQKQNSVTTTSGFRGQFEKIETRDEFLKLISNDLS

SEQ ID NO: 10444 - protein, 225 aa, Marixanthomonas ophiurae
  misc_feature (1)..(225): tr|A0A3E1QCP3|A0A3E1QCP3_9FLAO GTP cyclohydrolase 1 OS= Marixanthomonas ophiurae OX=387659 GN=folE PE=3 SV=1
MDLEKQLKDIEAMGDDHVASSTDTPLRPDAFELSDIEKIERIKKDVHNIMNTLGLDLTDDSLKGTPNRVAKMFVQEIFGGLHPDRKPKASTFDNKYKYGEMLVEKNITLYSTCEHHLLPIVGKAHIAYISNGTVVGLSKMNRIVDYYAKRPQVQERLTMQVVKELQKVLNTDDVACVIDAKHLCVNSRGIRDIDSSTVTSEFGGKFKNAETRRDFLDYINLDTEF

SEQ ID NO: 10445 - protein, 225 aa, Marixanthomonas sp.
  misc_feature (1)..(225): tr|A0A2U0I795|A0A2U0I795_9FLAO GTP cyclohydrolase 1 OS= Marixanthomonas sp. HN-E44 OX=2174845 GN=folE PE=3 SV=1
MDLEKQLQEIEAMGDDHVGSATGTPLRPDAFELSDIEKIERIKKDVHNIMDTLGLDLTDDSLKGTPNRVAKMFVQEIFGGLHPDRKPKASTFDNKYKYGEMLVEKNITLYSTCEHHLLPIVGKAHIAYISNGTVVGLSKMNRIVDYYAKRPQVQERLTMQVVKELQKVLNTDDVACVIDAKHLCVNSRGIRDIDSSTVTSEFGGKFKNAETRRDFLDYINLDTEF

SEQ ID NO: 10446 - protein, 199 aa, Marixanthomonas sp.
  misc_feature (1)..(199): tr|A0A2U0I3F9|A0A2U0I3F9_9FLAO GTP cyclohydrolase 1 OS= Marixanthomonas sp. HN-E44 OX=2174845 GN=folE PE=3 SV=1
MASYTFFEEYNENVTNDLKTHFSEILTQLGEDVDREGIAKTPERAAKAMQFLTSGNCQDPAEILKSAMFAEDYHDMVIIKDIELYSLCEHHMLPFFGKAHIAYIPDGHIVGLSKIPRVVDIFARRLQVQERLTHDILECINNTLKPQGVAVVIEAAHLCMMMRGVQKQNSVTTTSGFRGQFEKIETRDEFLKLISNDLS

SEQ ID NO: 10447 - protein, 202 aa, Marmoricola aurantiacus
  misc_feature (1)..(202): tr|A0A3N2CPI8|A0A3N2CPI8_9ACTN GTP cyclohydrolase 1 OS= Marmoricola aurantiacus OX=86796 GN=folE PE=3 SV=1
MGIDPVGAGQGAVAPFDHERAAAAVRELLIAVGEDPDREGLQDTPARVARAYAELTVGLHQQPEDVLTTTFDIGHDEMVLVRDIELWSMCEHHLVPFTGVAHVGYIPNANGKITGLSKLARLVDVYAKRPQVQERLTTQVADALVRILEPRGVIVVIEAEHLCMTMRGVRKAGARTLTSAVRGQMHQPATRAEAMSLILAAR

SEQ ID NO: 10448 - protein, 210 aa, Marmoricola ginsengisoli
  misc_feature (1)..(210): tr|A0A3N0CEV2|A0A3N0CEV2_9ACTN GTP cyclohydrolase 1 OS= Marmoricola ginsengisoli OX=661483 GN=folE PE=3 SV=1
MSSAAHEVTRLASRSRVTHPAPGRDLDNAEAAAAEFLRSLGIDPDDPATPDLADTPRRLALAYDELLDVPEFDFTTFANTEAYDELVVVGDIAFQSICEHHLLPFVGVAHVGYLPADRIVGLSKLARTVDHFARRPQTQERLTMQIADLLEEQLRPRGVGVVLRAEHTCMTLRGARSPGTATTTSSMRGHLREHPAARAEFLALTRPIAL

SEQ ID NO: 10449 - protein, 199 aa, Marmoricola ginsengisoli
  misc_feature (1)..(199): tr|A0A3N0CJ90|A0A3N0CJ90_9ACTN GTP cyclohydrolase 1 OS= Marmoricola ginsengisoli OX=661483 GN=folE PE=3 SV=1
MSAGSLAPINEFDHDRAAAAIKELLYAIGEDPEREGLLDTPDRVARAYKELTAGLRQTAEGVLTTTFDLGHDEMVLVRDIELWSMCEHHLVPFTGVAHVGYIPAESGKITGLSKLARLVDVYAKRPQVQERLTTQIADALVEILDARGVIVVIEAEHLCMTMRGVKKAGARTITSAVRGIMHNAATRSEAMALINAAHR

SEQ ID NO: 10450 - protein, 204 aa, Marmoricola pocheonensis
  misc_feature (1)..(204): tr|A0A3N0GXA0|A0A3N0GXA0_9ACTN GTP cyclohydrolase 1 OS= Marmoricola pocheonensis OX=661485 GN=folE PE=3 SV=1
MTDSIRPDGRGPGDIPEFDHARAEAAVRELLIAIGEDPTREGLHDTPARVARAYAELTAGLRMEAKDVLTTTFDIGHDEMVLVRDIELWSMCEHHLVPFTGVAHVGYIPAESGKITGLSKLARLVDLYAKRPQVQERLTTQIADSMVELLEARGVIVVIEAEHLCMTMRGVRKAGARTITSAVRGIMHNAATRSEAMALINASR

SEQ ID NO: 10451 - protein, 202 aa, Marmoricola scoriae
  misc_feature (1)..(202): tr|A0A1H1U162|A0A1H1U162_9ACTN GTP cyclohydrolase 1 OS= Marmoricola scoriae OX=642780 GN=folE PE=3 SV=1
MGVDRIGEGQRAIAPFDHDRAAAAVRELLLAIGEDPDREGLQDTPARVARAYAELTLGLHQEPEDVLTTTFDLGHDEMVLVRDIELWSMCEHHLVPFTGKAHVGYIPSDDGKITGLSKLARVVDVFAKRPQVQERLTTQVADALVRILTPRGVIVVIEAEHLCMTMRGVRKAGARTMTSAVRGMMHQPATRAEAMSLILASR

SEQ ID NO: 10452 - protein, 203 aa, Marmoricola solisilvae
  misc_feature (1)..(203): tr|A0A3N0E0C9|A0A3N0E0C9_9ACTN GTP cyclohydrolase 1 OS= Marmoricola solisilvae OX=1542737 GN=folE PE=3 SV=1
MNIGPVSTDGKPAGPFDHDRAAAAVRELLIAIGEDPDREGLRDTPARVARAYEELTGGLRKTAEDVLTTTFDLGHDEMVLVRDIELWSMCEHHLVPFTGVAHVGYIPAESGKITGLSKLARLVDVYAKRPQVQERLTTQIADSLMEILDARGVIVVIEAEHLCMTMRGVRKAGARTITSAVRGIMHNAATRSEAMALINAAHR

SEQ ID NO: 10453 - protein, 202 aa, Marmoricola sp.
  misc_feature (1)..(202): tr|A0A0Q6FGH9|A0A0Q6FGH9_9ACTN GTP cyclohydrolase 1 OS= Marmoricola sp. Leaf446 OX=1736379 GN=folE PE=3 SV=1
MGIDPVGAGQGAIAPFDHERAAAAVRELLIAVGEDPDREGLQDTPARVARAYAELTVGLHQQPEDVLTTTFDIGHDEMVLVRDIELWSMCEHHLVPFTGVAHVGYIPNANGKITGLSKLARLVDVYAKRPQVQERLTTQVADALVRILEPRGVIVVIEAEHLCMTMRGVRKAGARTLTSAVRGQMHQPATRAEAMSLILAAR

SEQ ID NO: 10454 - protein, 203 aa, Marmoricola sp.
  misc_feature (1)..(203): tr|A0A3L8P5U6|A0A3L8P5U6_9ACTN GTP cyclohydrolase 1 OS= Marmoricola sp. 4Q3S-7 OX=2478913 GN=folE PE=3 SV=1
MSSIGPVSDPGVTAQPFDAPRAEAAVRELLAAIGEDPDREGLRDTPARVARAYAELTAGLRQRAEDVLTTTFDLGHDEMVLVRDIELWSMCEHHLVPFTGVAHVGYIPSETGKITGLSKLARLVDVYAKRPQVQERLTTQVADALVEILAARGVVVVVEAEHLCMTMRGVKKAGARTITSAVRGQMRDPATRAEAMALIHSSR

SEQ ID NO: 10455 - protein, 196 aa, Martelella endophytica
  misc_feature (1)..(196): tr|A0A0D5LMX2|A0A0D5LMX2_9RHIZ GTP cyclohydrolase 1 OS= Martelella endophytica OX=1486262 GN=folE PE=3 SV=1
MRDANRKAQQRQTIMKAVNDILVALGEDPSREGLRDTPLRVAKMYQEVFSGREEDPRTHLQTVFAEEGHGDVVIVKDIPFHTMCEHHLLPFFGKAHIAYLPDGGRLTGLSKLARVVDTLARRPQLQERLTGQIADAINDALAPRGVMVLVEAEHMCMAMRGIKAHGSRTVTLVTRGIYDNDRDQRAEILGLLERQS

SEQ ID NO: 10456 - protein, 203 aa, Martelella mediterranea
  misc_feature (1)..(203): tr|A0A1U9YX82|A0A1U9YX82_9RHIZ GTP cyclohydrolase 1 OS= Martelella mediterranea DSM 17316 OX=1122214 GN=folE PE =3 SV=1
MNTIPTDIDALEAERLQREAIMKAVHDILVALGEDPTREGLSDTPLRVAKMYQEVFSGRDEDPRAHLQTVFQEDGHDDIVIVRDILFHTMCEHHLLPFFGKAHIAYLPEGGRLTGLSKLARVVDTVSRRPQLQERLTDEIADAINDALAPQGVMVMVEAEHMCMAMRGIKAHGSKTITLVTRGLFDTDRDRRAETLSLLKGLA

SEQ ID NO: 10457 - protein, 203 aa, Martelella mediterranea
  misc_feature (1)..(203): tr|A0A4R3NV90|A0A4R3NV90_9RHIZ GTP cyclohydrolase 1 OS= Martelella mediterranea OX=293089 GN=folE PE=3 SV=1
MGDFSTGVNSHEDEDLLKQRETIMRAVSDILVALGEDPAREGLRDTPKRVARMYQDVFSGLHEDPREHLQTVFQEDGHSEVVVVRDIIFHTMCEHHLLPFFGKVHVAYLPDGGRLTGLSKLARVVSAVSRRPQLQERLTAQIADAIEDRLKPKGIMVMVEAEHMCMAMRGIKAHGAKTVTLVTRGLYETDAEQRAEVLSLLKG

SEQ ID NO: 10458 - protein, 191 aa, Martelella sp.
  misc_feature (1)..(191): tr|A0A127CQ63|A0A127CQ63_9RHIZ GTP cyclohydrolase 1 OS= Martelella sp. AD-3 OX=686597 GN=folE PE=3 SV=1
MDDQRRETIMKAVSEILAALGEDPAREGLRDTPSRVAKMYMDVFSGLHEDASEHLKTVFTEDGHNEIVIVREIAFHTMCEHHLLPFFGRAHIAYLPDGGRLTGLSKLARVVETLARRPQLQERLTDQIADAIETVLRPKGVMVLAEARHMCMEMRGIKAHGANTVTLVSRGVFKTDPAQRAETLALLRGPV

SEQ ID NO: 10459 - protein, 203 aa, Martelella sp.
  misc_feature (1)..(203): tr|A0A2E1B7H3|A0A2E1B7H3_9RHIZ GTP cyclohydrolase 1 OS= Martelella sp. OX=1969699 GN=folE PE=3 SV=1
MNTIPTDIDALEAERLQREAIMKAVHDILVALGEDPTREGLSDTPLRVAKMYREVFSGRDEDPRAHLQTVFQEDGHDDIVIVRDILFHTMCEHHLLPFFGKAHIAYLPEGGRLTGLSKLARVVDTVSRRPQLQERLTDEIAHAINDALAPQGVMVMVEAEHMCMAMRGIKAHGSKTITLVTRGLFDTDRDRRAETLSLLKGLA

SEQ ID NO: 10460 - protein, 186 aa, Marvinbryantia formatexigens
  misc_feature (1)..(186): tr|C6LLD1|C6LLD1_9FIRM GTP cyclohydrolase 1 OS=Marvinbr yantia formatexigens DSM 14469 OX=478749 GN=folE PE=3 S V=1
MAMDQEKIKEGVRLILEGIGEDTGREGLIETPDRIARMYTEIAGGMYEDAGKHLEKRFHVDNNDMVMEKDITFYSMCEHHMLPFWGKAHVAYVPDGCVVGLSKIARTVNVFARRLQLQEQLTAQVADAFMEHLAPQGVMVMVEAEHMCMTMRGVKKPGTKTVTVVTRGVFENNEALQNQFYRMLGR

SEQ ID NO: 10461 - protein, 187 aa, Massilia albidiflava
  misc_feature (1)..(187): tr|A0A411X764|A0A411X764_9BURK GTP cyclohydrolase 1 OS= Massilia albidiflava OX=321983 GN=folE PE=3 SV=1
MSKDSFSDHDWRRFLTSLGENPDRPGLAETPHRVAKAWKHWTSGYDQDPVELLKAFEDGAEEYNELIVVRNIPVYSHCEHHLAPFFGKATVGYLPNGKIVGLSKLTRLVDCFAKRLQVQERMTVQIANTLMEVLEPKAVGVVVKCRHMCMESRGIRTPGEETITSAMLGELQPNLALRTEFLALARD

SEQ ID NO: 10462 - protein, 187 aa, Massilia armeniaca; identical to SEQ ID NO: 7810
  misc_feature (1)..(187): tr|A0A2R4C3V8|A0A2R4C3V8_9BURK GTP cyclohydrolase 1 OS= Massilia armeniaca OX=2072590 GN=folE PE=3 SV=1

SEQ ID NO: 10463 - protein, 188 aa, Massilia aurea
  misc_feature (1)..(188): tr|A0A422QQN2|A0A422QQN2_9BURK GTP cyclohydrolase 1 OS= Massilia aurea OX=373040 GN=folE PE=3 SV=1
MSDKEAFTEHDWRRLLTSLGENPERPGLVETPARVAKAWKHWTSGYNQDPVEVLKAFEDGAEEYNELIVVRGIPVYSHCEHHLAPFFGKATVGYLPNGKIVGLSKLTRLVDIFSKRLQVQERMTMQIANALMEVLEPKAVGVVVKCRHMCMESRGIRAIGEETITSTLLGELQPNLALRTEFLALARD

SEQ ID NO: 10464 - protein, 188 aa, Massilia eurypsychrophila
  misc_feature (1)..(188): tr|A0A2G8TKY1|A0A2G8TKY1_9BURK GTP cyclohydrolase 1 OS= Massilia eurypsychrophila OX=1485217 GN=folE PE=3 SV=1
MSHHDAFSENDWRRLLSSFGEDPDRPGLAETPARVSKAWKHWTSGYAQDPVSLLKAFEDGAEQYNELIVVRGIPVYSHCEHHLAPFFGKATIGYLPNGKIVGLSKLTRLVDCFAKRLQVQERMTIQIANALMEVLEPKAVGVVIKCRHLCMESRGIRTPGEETITSAMLGELQPNLGLRTEFLALARD

SEQ ID NO: 10465 - protein, 187 aa, Massilia flava
  misc_feature (1)..(187): tr|A0A562PCH5|A0A562PCH5_9BURK GTP cyclohydrolase 1 OS= Massilia flava OX=871742 GN=folE PE=3 SV=1
MSKDSFSDQDWRRFLTSLGEDPDRPGLAETPHRVAKAWKHWTSGYEQDPVEILKAFEDGAEQYNELIVVRNIPVYSHCEHHLAPFFGKATVGYVPNGKIVGLSKLTRLVDCFAKRLQVQERMTVQIANTLMEVLEPKAVGVVVKCRHMCMESRGIRSPGEETITSAMLGELQPNLALRTEFLALARD

SEQ ID NO: 10466 - protein, 187 aa, Massilia lurida
  misc_feature (1)..(187): tr|A0A562QV26|A0A562QV26_9BURK GTP cyclohydrolase 1 OS= Massilia lurida OX=1036180 GN=folE PE=3 SV=1
MSKDSFSEQDWKRFLTSLGEDPDRPGLAETPHRVTKAWKHWTSGYDQDPVALLKAFEDGAEQYNELIVVRNIPVYSHCEHHLAPFFGKATIGYLPKGKIVGLSKLTRLVDCFAKRLQVQERMTVQIANTLMEVLEPKAVGVVVKCRHLCMESRGIRTPGEETITSAMLGELQPNLALRTEFLALARD

SEQ ID NO: 10467 - protein, 187 aa, Massilia lutea
  misc_feature (1)..(187): tr|A0A4P6KY70|A0A4P6KY70_9BURK GTP cyclohydrolase 1 OS= Massilia lutea OX=321985 GN=folE PE=3 SV=1
MSKDAFSDHDWRRFLTSLGEDPDRPGLAETPHRVAKAWKHWTSGYDQDPVELLKAFEDGAEEYNELIVVRNIPVYSHCEHHLAPFFGKATVGYVPNGKIVGLSKLTRLVDCFSKRLQVQERMTVQIANTLMEVLEPKAVGVVVKCRHMCMESRGIRTPGEETITSAMLGELQPNLALRTEFLALARD

SEQ ID NO: 10468 - protein, 189 aa, Massilia namucuonensis
  misc_feature (1)..(189): tr|A0A1I7LV75|A0A1I7LV75_9BURK GTP cyclohydrolase 1 OS= Massilia namucuonensis OX=1035707 GN=folE PE=3 SV=1
MSKEEAFSEHDWRRLLSSLGEDPNRPGLLETPHRVSKAWKHWTSGYEQDPVELLKVFEDGAEQYNELIVVKGIPVYSHCEHHLAPFFGTATVGYVPNGKIVGLSKLTRLVDCFAKRLQVQERLTQQVANALMDALDPKAVGVVVKCRHLCMESRGIRTPGEETITSAMLGELQPNLALRTEFLALARGS

SEQ ID NO: 10469 - protein, 188 aa, Massilia oculi
  misc_feature (1)..(188): tr|A0A2S2DJM5|A0A2S2DJM5_9BURK GTP cyclohydrolase 1 OS= Massilia oculi OX=945844 GN=folE PE=3 SV=1
MSDKEAFTEHDWRRLLTSLGENPERPGLVETPARVAKAWKHWTSGYDQDPVEVLKAFEDGAEEYNELIVVRGIPVYSHCEHHLAPFFGKATVGYLPNGKIVGLSKLTRLVDIFSKRLQVQERMTMQIANALMEVLEPKAVGVVVKCRHMCMESRGIRAIGEETITSTLLGELQPNLALRTEFLALARD

SEQ ID NO: 10470 - protein, 188 aa, Massilia phosphatilytica
  misc_feature (1)..(188): tr|A0A2S8GYB3|A0A2S8GYB3_9BURK GTP cyclohydrolase 1 OS= Massilia phosphatilytica OX=2026176 GN=folE PE=3 SV=1
MSDKEVFTENDWRRLLVSLGEDPNRSGLHETPARVAKAWKHWTSGYDQDPVEILKAFEDGAEEYNELIVVRGIPVYSHCEHHLAPFFGKATVGYLPNGKIVGLSKLTRLVDVFSKRLQVQERLTVQIANTLMEVLEPKAVGVVIKCRHMCMESRGIRTPGEETITSTLLGELQPNLALRTEFLSLARD

SEQ ID NO: 10471 - protein, 187 aa, Massilia plicata
  misc_feature (1)..(187): tr|A0A4P7BJA4|A0A4P7BJA4_9BURK GTP cyclohydrolase 1 OS= Massilia plicata OX=321984 GN=folE PE=3 SV=1
MSKEAFSEHDWRRLLTTLGEDPDRPGLAETPHRVAKAWKHWTSGYDQDPVALLKAFEDGAEEYNELIVVRNIPVYSHCEHHLAPFFGKATVGYLPNGKIVGLSKLTRLVDCFAKRLQVQERLTVQIANTLMEVLEPKAVGVVIKCRHMCMESRGIRTPGEETITSSMLGELQPNLGLRTEFLALARD

SEQ ID NO: 10472 - protein, 187 aa, Massilia psychrophila
  misc_feature (1)..(187): tr|A0A2G8T3I5|A0A2G8T3I5_9BURK GTP cyclohydrolase 1 OS= Massilia psychrophila OX=1603353 GN=folE PE=3 SV=1
MSQDAFSEKDWRRLIASFGEDPDRPGLVETPARVAKAWKHWTSGYQQDPVSLLKAFEDGAEQYNELIVVRGIPVYSHCEHHLAPFFGKATIGYLPNGKIVGLSKLTRLVDCFSKRLQVQERMTIQIANALMEVLEPKAVGVVIKCRHLCMESRGIRTPGEETITSAMLGELQPNLGLRTEFLALARD

SEQ ID NO: 10473 - protein, 188 aa, Massilia sp.
  misc_feature (1)..(188): tr|A0A0Q5HKA0|A0A0Q5HKA0_9BURK GTP cyclohydrolase 1 OS= Massilia sp. Leaf139 OX=1736272 GN=folE PE=3 SV=1
MSHNDEFTEHDWRRLLASLGEDPNRPGLHETPARVSKAWKHWTSGYGQDPVSVLKAFEDGAEQYNELIVVRGIPVYSHCEHHLAPFFGKATVGYLPNGKIVGLSKLTRLVDIFSKRLQVQERMTMQIANALMEVLEPKAVGVVVKCRHMCMESRGIRTQGEETITSCMLGELQPNLALRTEFLALARD

SEQ ID NO: 10474 - protein, 187 aa, Massilia sp.; identical to SEQ ID NO: 7810
  misc_feature (1)..(187): tr|A0A344JK88|A0A344JK88_9BURK GTP cyclohydrolase 1 OS= Massilia sp. YMA4 OX=1593482 GN=folE PE=3 SV=1

SEQ ID NO: 10475 - protein, 188 aa, Massilia timonae; identical to SEQ ID NO: 10463
  misc_feature (1)..(188): tr|A0A1S2NGW2|A0A1S2NGW2_9BURK GTP cyclohydrolase 1 OS= Massilia timonae OX=47229 GN=folE PE=3 SV=1

SEQ ID NO: 10476 - protein, 188 aa, Massilia timonae; identical to SEQ ID NO: 10463
  misc_feature (1)..(188): tr|K9DHY8|K9DHY8_9BURK GTP cyclohydrolase 1 OS=Massilia timonae CCUG 45783 OX=883126 GN=folE PE=3 SV=1

SEQ ID NO: 10477 - protein, 187 aa, Massilia umbonata; identical to SEQ ID NO: 10461
  misc_feature (1)..(187): tr|A0A4P8HUV6|A0A4P8HUV6_9BURK GTP cyclohydrolase 1 OS= Massilia umbonata OX=864828 GN=folE PE=3 SV=1

SEQ ID NO: 10478 - protein, 188 aa, Massilia yuzhufengensis
  misc_feature (1)..(188): tr|A0A1I1LH87|A0A1I1LH87_9BURK GTP cyclohydrolase 1 OS= Massilia yuzhufengensis OX=1164594 GN=folE PE=3 SV=1
MSDKEAFTEHDWRRLLTSLGENPDRPGLHETPARVAKAWKHWTSGYDQDPVEVLKAFEDGAEEYNELIVVRGIPVYSHCEHHLAPFFGKATVGYLPNGKIVGLSKLTRLVDIFSKRLQVQERMTIQIANALMEVLEPKAVGVVVKCRHMCMESRGIRAIGEETVTSAMLGELQPNLALRTEFLALTRD

SEQ ID NO: 10479 - protein, 235 aa, Mastigocladus laminosus
  misc_feature (1)..(235): tr|A0A4D9CKG5|A0A4D9CKG5_MASLA GTP cyclohydrolase 1 OS= Mastigocladus laminosus UU774 OX=1594576 GN=folE PE=3 S V=1
MTIVSSNGSNRFQSPLVPDFTEAITTRPDRNTHDGRQPDLHPPQEEQMDEMVEAVRTLLLGVGEDPEREGLLKTPKRVAEAMRFLTSGYNQSLEEIVNGAIFDEGHSEMVLVRDINVFSLCEHHMLPFMGKAHVAYIPNQKVVGLSKLARIVEMYSRRLQVQERLTRQIAEAVQTILEPQGVAVVIEATHMCMVMRGVQKPGSWTVTSAMVGVFEEEHKTREEFFNLIRHQVAIF

SEQ ID NO: 10480 - protein, 235 aa, Mastigocladus laminosus; identical to SEQ ID NO: 8093
  misc_feature (1)..(235): tr|A0A370CKD5|A0A370CKD5_MASLA GTP cyclohydrolase 1 OS= Mastigocladus laminosus WC112 OX=1521402 GN=folE PE=3 S V=1

SEQ ID NO: 10481 - protein, 231 aa, Mastigocoleus testarum
  misc_feature (1)..(231): tr|A0A0V7ZET0|A0A0V7ZET0_9CYAN GTP cyclohydrolase 1 OS= Mastigocoleus testarum BC008 OX=371196 GN=folE PE=3 SV= 1
MTIVRSNGSNGSNISQSPLIPDLADVIKSKKEQNIPKPESPEQMERMTDAVRTLLEGVGEDPEREGLLKTPQRVAKAMQFLTSGYKQSLEDIINGAIFDEGHDEMVLVRDINLFSLCEHHMLPFMGKAHVAYIPNQKVVGLSKLARIVEMYSRRLQVQERLTRQVAEAVQEILEPKGVAVVIEATHMCMVMRGVQKPGSWTVTSAMVGVFEQEQKTREEFFNLIRHQAAFF

SEQ ID NO: 10482 - protein, 216 aa, Mastigocoleus testarum
  misc_feature (1)..(216): tr|A0A0V7ZG19|A0A0V7ZG19_9CYAN GTP cyclohydrolase 1 OS= Mastigocoleus testarum BC008 OX=371196 GN=folE PE=3 SV= 1
MTLSFRPELNSVEQVVSSLSTQNRPTVTDEEMMQAVRTLLLGLGEDPDREGLKDTPKRVMKALQFLTKGYHESLDELLNGAVFTEDANEMVLVRDIDIFSSCEHHILPILGRAHVAYIPNGKVIGLSKIARICEMYARRLQVQERLTLQIADALQGLLKPQGVAVVVEASHMCMVMRGVQKPGSWTVTSAMRGVFAEDAKTREEFMNLIRHKANFH

SEQ ID NO: 10483 - protein, 195 aa, Mediterranea sp.
  misc_feature (1)..(195): tr|A0A1Y4HH56|A0A1Y4HH56_9BACT GTP cyclohydrolase 1 OS= Mediterranea sp. An20 OX=1965586 GN=folE PE=3 SV=1
MLGKEVITSPYLDELKEHYHRILTLLGEDPSREGLLKTPERVAKAMLTLTGGYAMDPHEVLRSAKFKEDYNQMVIVKDIDFFSLCEHHMLPFYGKAHVAYIPNGYITGLSKIARVVDIFSHRLQVQERMTLQIKECIQETLNPLGVMVVVEAKHMCMQMRGVEKQNAITTTSDFSGGFNQAKTREEFMNLIKNGR

SEQ ID NO: 10484 - protein, 183 aa, Mediterraneibacter butyricigenes
  misc_feature (1)..(183): tr|A0A391PEI6|A0A391PEI6_9FIRM GTP cyclohydrolase 1 OS= Mediterraneibacter butyricigenes OX=2316025 GN=folE PE= 3 SV=1
MDQEKIKQGVRLILEGVGEDLNREGLVETPDRVARMYEELLAGLTMDGSEHLQKTFSVENNEMVLEKDITFYSLCEHHLLPFYGKVHIAYVPDGKVAGLSKLARTVEIFARRLQLQEQMTGQIADALMDYLKPKGVMVMVEAEHMCMTMRGIKKPGSKTVTVVKRGIFQEEKERSELFFQMLR

SEQ ID NO: 10485 - protein, 184 aa, Mediterraneibacter sp.
  misc_feature (1)..(184): tr|A0A4Q8U5D8|A0A4Q8U5D8_9FIRM GTP cyclohydrolase 1 OS= Mediterraneibacter sp. gm002 OX=2527876 GN=folE PE=3 SV =1
MIDHEKVKEGVRLLLEGIGEDVTREGLVETPDRIARMYEEIYGGIEEDASEHLKKRFHVDNDAMVLEKDITFYSTCEHHLLPFYGKAHIAYIPNGEVVGLSKLARTVEVFARRLQLQEQLTGQIADALEKELNPKGVMVMIEAEHMCMTMRGIKKPGSQTVTIVKRGIFENNKELEDTFFRMLR

SEQ ID NO: 10486 - protein, 262 aa, Megamonas funiformis
  misc_feature (1)..(262): tr|H3K6H8|H3K6H8_9FIRM GTP cyclohydrolase FolE2 OS=Mega monas funiformis YIT 11815 OX=742816 GN=folE2 PE=3 SV=1
MQDVQNRVDKRGIAIQRVGISDVYLPLQIKQEQHSQPVMARLKFTVDLPMEYKGTHMSRFQEILTKWHTNPIGQAEIGNILDEAITKLSSNSAHLSMSFKYFIEKTAPVSGKKSLLDLDCKVSAVKTASKNSMPFTLAIKIPVTSLCPCSKEISAYGAHNQRSIISVKINYDGKKTAINIKDIVSLIEAQASCPLYPLLKREDEKYVTEKAYENPKFVEDILRDCVLALRTLDDIHYFSVECENFESIHNHNAYASHVEYLK

SEQ ID NO: 10487 - protein, 261 aa, Megamonas hypermegale
  misc_feature (1)..(261): tr|A0A239TM23|A0A239TM23_9FIRM GTP cyclohydrolase FolE2 OS=Megamonas hypermegale OX=158847 GN=folE2 PE=3 SV=1
MQDVQNRTDKRGIAIQRVGISDVYLPLQIKQDKHSQPVLAKIKFTVDLPMEYKGTHMSRFQEILTKWQTVPIGQGEIRNILNEAIEKLGSCSAHLSISFKYFIEKIAPVSGKKSLLDLDCKFSAAKTANGKMPFVMAIKVPVTSLCPCSKEISDYGAHNQRSIISVKINYDGNKTALEIQDIVSLIEAQASCPLYPLLKREDEKYVTEKAYENPKFVEDILRDCVLALRTLSGINYFSVECENFESIHNHNAYASHIEYLK

SEQ ID NO: 10488 - protein, 262 aa, Megamonas hypermegale; identical to SEQ ID NO: 10486
  misc_feature (1)..(262): tr|A0A378NR83|A0A378NR83_9FIRM GTP cyclohydrolase FolE2 OS=Megamonas hypermegale OX=158847 GN=folE2 PE=3 SV=1

SEQ ID NO: 10489 - protein, 262 aa, Megamonas rupellensis; identical to SEQ ID NO: 10486
  misc_feature (1)..(262): tr|A0A411ZTJ9|A0A411ZTJ9_9FIRM GTP cyclohydrolase FolE2 OS=Megamonas rupellensis OX=491921 GN=folE2 PE=3 SV=1

SEQ ID NO: 10490 - protein, 262 aa, Megamonas sp.; identical to SEQ ID NO: 10486
  misc_feature (1)..(262): tr|A0A1H8D7N5|A0A1H8D7N5_9FIRM GTP cyclohydrolase FolE2 OS=Megamonas sp. Calf98-2 OX=1855330 GN=folE2 PE=3 SV= 1

SEQ ID NO: 10491 - protein, 200 aa, Megasphaera cerevisiae
  misc_feature (1)..(200): tr|A0A0J6WRV4|A0A0J6WRV4_9FIRM GTP cyclohydrolase 1 OS= Megasphaera cerevisiae DSM 20462 OX=1122219 GN=folE PE= 3 SV=1
MTDTLKSIEPVNQKAIDAMAQFLEALGLDLKKLNMEKTPYRVAAAFGQFFSGLQENPDGEWTDPIITHTDGLVAVRNIRFQSMCEHHLLPFFGTVHIAYYPKNGKISGFGHFVNVVDILSRRPQLQERITEEICQSIVHGIAPQGVLVIVKATHLCLTMRSRLAVDTNIVTAASNGCLCRGSEPYNQAWKMLMEETLYGK

SEQ ID NO: 10492 - protein, 191 aa, Megasphaera elsdenii
  misc_feature (1)..(191): tr|G0VPI6|G0VPI6_MEGEL GTP cyclohydrolase 1 OS=Megaspha era elsdenii DSM 20460 OX=1064535 GN=folE PE=3 SV=1
MEENEKAVAAMRQFLEALGLDLQALGMEKTPHRVAQAFGEFFSGLRENPDDEWQAPIATQSDGLVVVRNIRFHSMCEHHLLPFFGSVHVAYYPKNGTIAGFGHFVRAVDILARRPQLQERMTDDLCQSICRGLDPEGVLIIVKATHLCLTMRDRMAIDSNIVTTASSGCLKEGTAAYDQAWKLLMEEKKDG

SEQ ID NO: 10493 - protein, 191 aa, Megasphaera elsdenii
  misc_feature (1)..(191): tr|R7MWR7|R7MWR7_9FIRM GTP cyclohydrolase 1 OS=Megaspha era elsdenii CAG:570 OX=1263087 GN=folE PE=3 SV=1
MEENEKAVAAMRQFLEALGLDLQALGMEKTPHRVAQAFGEFFSGLRENPDDEWQAPIATQSDGLVVVRNIRFHSMCEHHLLPFFGSVHVAYYPKNGTIAGFGHFVRAVDILARRPQLQERMTDDLCQSICRGLDPEGVLIIVKATHLCLTMRDRMAIDSNIVTTASSGCLKEGTAAYDQAWKLLMEEEKDG

SEQ ID NO: 10494 - protein, 200 aa, Megasphaera genomosp.
  misc_feature (1)..(200): tr|A0A2J8BCB5|A0A2J8BCB5_9FIRM GTP cyclohydrolase 1 OS= Megasphaera genomosp. type_2 OX=699193 GN=CAL30_00105 P E=3 SV=1
MIEIRQPQIQREKAVQAMQTFLETLGLDLKVLQMEKTPNRVTDAFINFFSGLWKNPDDEWAQPIQTEVDGLVAIRNIRFQSMCEHHLLPFFGTVHIAYYPHKGKVAGFGHFVSAVETLTKRPQLQERLTQELSLSLCRGLQPEGVLVVVEATHLCMTMMHGLAGDTNIITTATAGIIQSGSDMYHQAWNLLMEGTSDDGR

SEQ ID NO: 10495 - protein, 199 aa, Megasphaera genomosp.
  misc_feature (1)..(199): tr|D3LX40|D3LX40_9FIRM GTP cyclohydrolase 1 OS=Megaspha era genomosp. type_1 str. 28L OX=699218 GN=folE PE=3 SV =1
MAYELQTQEQQEQAVQSMRTFLQALGLDLQALGMEKTPQRVTAAFTQFFSGLREDPDKEWGHPIQTGTDGLVAVRNIRFHSLCEHHLLPFFGTVHIAYYPQHGKVAGFGHFIRAVTILAERPQLQERLTEEICRSVYRGLQPAGVLVIVKAKQLCMTMLQAAAGDTDIVTAATAGNIVNGNAAYEQAWKLLMEDTTNAL

SEQ ID NO: 10496 - protein, 195 aa, Megasphaera hexanoica
  misc_feature (1)..(195): tr|A0A344MN46|A0A344MN46_9FIRM GTP cyclohydrolase 1 OS= Megasphaera hexanoica OX=1675036 GN=folE PE=3 SV=1
MTEQTEVNEKAVQAAGDFLQALGLDLKQLGMEKTPYRVAMAFSHFFSGLKENPENCWGELIPTQSDGLVAVRNIRFYSMCEHHLLPFFGIVHIAYYPAEGKIAGFGHFAEVVDVLARRPQLQERFTYEICKAVQDGLGARGALVIVRGTHLCLSMRNHLGGDSDIITQAGLGCLADGTDAGHQAWKLLMEGDAQE

SEQ ID NO: 10497 - protein, 189 aa, Megasphaera hexanoica
  misc_feature (1)..(189): tr|A0A344MIY5|A0A344MIY5_9FIRM GTP cyclohydrolase 1 OS= Megasphaera hexanoica OX=1675036 GN=folE PE=3 SV=1
MIDTKAIEEHVRGILIALGENPDREGLVETPKRVAKMYQEVFDGMNYTNHELAQMLDKTFAEDTTSAGSNQVVVMKDIDLFSYCEHHMALMYDMKATVAYIPKGKVIGLSKIARICDMAGRRLQLQERLGRDIADILGEITGSTDIAVLLEGRHSCVSARGIKKTDAKTRTVELRGRFKEEPALQLYLR

SEQ ID NO: 10498 - protein, 198 aa, Megasphaera micronuciformis
  misc_feature (1)..(198): tr|E2ZC16|E2ZC16_9FIRM GTP cyclohydrolase 1 OS=Megaspha era micronuciformis F0359 OX=706434 GN=folE PE=3 SV=1
MKVVTEERQVDVQAATDGIRQFLNAWGIDLEKTGMADTPMRVVEAYGEFFSGLNRTDEDLWKNPIQTDTTGIVALRNLEYYSLCEHHLLPFFGTVSIAYLPKNGKIAGFGRFADAVAVYARRPQLQERMTEELCRSIEKGLDTAGVLVMVRGRHLCLSMRNPLAGKSEIMTVAARGALEAGSSLYERALKLLEEHGDE

SEQ ID NO: 10499 - protein, 189 aa, Megasphaera micronuciformis
  misc_feature (1)..(189): tr|E2ZCX6|E2ZCX6_9FIRM GTP cyclohydrolase 1 OS=Megaspha era micronuciformis F0359 OX=706434 GN=folE PE=3 SV=1
MIDKKAIEEHIRGILVALGEDPEREGLKETPKRVADMYEEVFASIGESNDDIAVRLAKTFEDEEQTEDKDRVVVMKDIDMFSFCEHHMALMYDMKATVAYIPKGRVIGLSKIARICDAVGKRLQLQERIGRDIADIMAKATGSDDVAVILTASHACVTTRGIKNRSTRTKTVELRGRFKTDATLQVYLQ

SEQ ID NO: 10500 - protein, 194 aa, Megasphaera paucivorans
  misc_feature (1)..(194): tr|A0A1G9PYC5|A0A1G9PYC5_9FIRM GTP cyclohydrolase 1 OS= Megasphaera paucivorans OX=349095 GN=folE PE=3 SV=1
MIEHKINPKAIAAMTAFLEALGVDLKKLGMEKTPYRVAEAYTAFFSGLQESPDTQWGELIKTSSNGLVAVRNLRFYSICEHHLLPFFGTVQIAYYPHNGQIAGFGHFADVVSVLTRRPQLQERLTSQICDSINAGVHAEGVLVIVQATHLCLTMRNSTALDSDIITAVSSGRLKEGTEQYMEAWKLLTRKDSDE

SEQ ID NO: 10501 - protein, 191 aa, Megasphaera sp.
  misc_feature (1)..(191): tr|S7HRA0|S7HRA0_9FIRM GTP cyclohydrolase 1 OS=Megaspha era sp. NM10 OX=1273103 GN=folE PE=3 SV=1
MEENERAVAAMRQFLEALGLDLQALGMEKTPHRVAQAFADFFSGLKENPDDEWQDPIATQTDGLVVVRNIRFHSMCEHHLLPFFGSVHVAYYPKKGTIAGFGHFVRAVDILARRPQLQERMTDELCQSIRRGLDPEGVLIVVQATHLCLTMRDRLAIDSNIVTTASSGCLKEGTAAYDQAWKLLMEEEKDG

SEQ ID NO: 10502 - protein, 187 aa, Megasphaera sp.
  misc_feature (1)..(187): tr|A0A3C1CNT8|A0A3C1CNT8_9FIRM GTP cyclohydrolase 1 OS= Megasphaera sp. OX=2023260 GN=DCP59_02885 PE=3 SV=1
METENRRKAEQAVRDLLSALNIQIKQGMEETPARVIRMLEEVWAGEQYTNQDLAKMYGKTFPCTNADMVIVKDIEAFSYCEHHLALIYNMKISVAYLPEGKVIGLSKIARIVDMCCKRLQLQERIGQDITDVLSRIVGPHVCVRIEANHSCMTARGIKKPGSKTVTVAKHGAFNDPDVFSEFLEMLR

SEQ ID NO: 10503 - protein, 185 aa, Megasphaera stantonii
  misc_feature (1)..(185): tr|A0A346AZY3|A0A346AZY3_9FIRM GTP cyclohydrolase 1 OS= Megasphaera stantonii OX=2144175 GN=DKB62_07545 PE=3 SV =1
MDREKLKQAAALILEAVGQDGRDETKETPERFAKMMEERLAYAGVSNEEIAKEFDKVFPCDDGNMVVVKDIDVFSFCEHHIALMYDMKIAIGYIPKGCVIGLSKLARIADAVCRRLQLQERIGADIYDVLRRIVKTDDIIVCIQGEHSCMTARGIKKPGSQTRTLYAGGVFDDPLRRNEFFNLIR

SEQ ID NO: 10504 - protein, 210 aa, Megasphaera stantonii
  misc_feature (1)..(210): tr|A0A346AWZ1|A0A346AWZ1_9FIRM GTP cyclohydrolase 1 OS= Megasphaera stantonii OX=2144175 GN=folE PE=3 SV=1
MTTMTSSYPVNPEAVQAMKQFLEALGLDLTALGMEKTPYRVAEAFSQFFSGLRENPDDEWAAPILSQTNGLVAVRNIRFQSMCEHHLLPFFGTAHIAYYPQDGRIAGFGHFARAVGVLARRPQLQERLTEDLCQSLCRGLQPKGVLVVVKATHLCLMMREGMAADADIVTAATSGCLQAGTKEYDQAWKLLMGDAGAGTILMKEEESWTP

SEQ ID NO: 10505 - protein, 248 aa, Mehylophilales bacterium
  misc_feature (1)..(248): tr|A0A258LJ46|A0A258LJ46_9PROT GTP cyclohydrolase I (Fr agment) OS=Mehylophilales bacterium 35-46-6 OX=1970535 GN=B7Y72_03340 PE=3 SV=1
HLAIDKVGIKSIRHPVVVKDKSGGEQHTVAVFNMYVHLPQHFKGTHMSRFVEILNKNERAISVESFESILREMVSRLEAESGHVEMTFPYFVNKAAPISGVKSLLDYEVTFIGEINQGKYDITVKVLVPVTSLCPCSKKISDYGAHNQRSHVTVTALINNFIWIEDIIDLVEKQASCELYGLLKRPDEKYVTERAYDNPKFVEDMVRDVAAQLNAEKRIDAYTVESENFESIHNHSAYALIEKDKRKH

SEQ ID NO: 10506 - protein, 343 aa, Meiothermus cateniformans
  misc_feature (1)..(343): tr|A0A399DZR1|A0A399DZR1_9DEIN GTP cyclohydrolase FolE2 OS=Meiothermus cateniformans OX=482825 GN=folE2 PE=3 S V=1
MLSYENKQILDTPPLKIEKNGGKKAYLFRNTDGAEPVITRHYDHQFRPDAAYKASLPDMTETVDSIEGANVAIQQVGISGFRLPLKFATPAGEALTLEARVTGTVSLQANLKGINMSRIIRTFYAHKDEVFSLDTLARVVQDYRRDLESMSARVKVAFSYPMLVPALRSGLEGYQYYSGSYEAVLEENGTLRRFVELDFVYSSACPCSAELAEHARDVRGVYAIPHSQRSKARIKVEVAPDTSLHLEDLIHHARAALKTETQVMVKREDEQAFAELNGAYVKFVEDAARLLYEQLIADRRIHDFQVACSHLESLHSHDAVSVIAKGLPGGFRADFNDFSTLLC

SEQ ID NO: 10507 - protein, 206 aa, Meiothermus granaticius
  misc_feature (1)..(206): tr|A0A399F4I9|A0A399F4I9_9DEIN GTP cyclohydrolase 1 OS= Meiothermus granaticius NBRC 107808 OX=1227551 GN=folE PE=3 SV=1
MKRMIEVEDTGIVFPSGADIERMSELAQEWLGLIGEDPGREGLLKTPERMAKAWAFLTKGYHETLEEVTNGAVFEAEGSNMVVVKSIEYYSMCEHHLLPFFGTVHIGYIPDKKILGLSKFGRITDMFARRLQVQERLSIQIAQAIWEVLEPHGVGVVVEGQHLCMMMRGVEKQHSSTISSAMLGSFRDDPRTREEFLALVRQGKVL

SEQ ID NO: 10508 - protein, 343 aa, Meiothermus hypogaeus
  misc_feature (1)..(343): tr|A0A511R4D4|A0A511R4D4_9DEIN GTP cyclohydrolase FolE2 OS=Meiothermus hypogaeus NBRC 106114 OX=1227553 GN=fol E2 PE=3 SV=1
MLSYDNKQILDLPLPKLDKNGGKKAYLFRNTDGAEPIISRYYDHHFQPDDAYKASLPDMTETVDSVEGANVAIQQVGISGFKLPLKFATPRGEALTLEARVTGTVSLQADLKGINMSRIIRTFYSRKEEVFSLDTLAQVVQDYRRDLDSLSARVKVAFSYPMLVSALRSGLEGYQYYSGSYEALVEENGTIRRFVELDFVYSSACPCSAELAEHARDNRGAYAIPHSQRSKARIKVEVAPDTSLHLEDLIQHAREALKTETQVMVKREDEQAFAELNGAYVKFVEDAARLVYEQLIADPRILDFQVACSHQESLHSHDAVSVIARGVPGGFRADFNDFSTLLC

SEQ ID NO: 10509 - protein, 342 aa, Meiothermus luteus
  misc_feature (1)..(342): tr|A0A399EZE9|A0A399EZE9_9DEIN GTP cyclohydrolase FolE2 OS=Meiothermus luteus OX=2026184 GN=folE2 PE=3 SV=1
MLRYDDKQTLEPLPPSGQNGGRKAYLFRNTDGAEPVIPRVYDAHFRPDEAYRASLPDMTETVDAVEGANVPIPQVGIAGFRLPLRFAVPSGEPLLLEARVTGTVSLEADLKGINMSRIIRTFYARKEAIFDLDTLAQVVRDYQRELGSLSARVRVAFSYPMLVPSLRSGLEGYQYYDGRYEAAVEGSGPVRRYVELDFVYSSACPCSAELAEHARDVRGAYAIPHSQRSVAHLRVEVAEGARLHLEDLVHHAREALKTEVQVMVKREDEQAFAELNGVYVKFVEDAVRLLYARLVADPRIHDFQVACAHLESLHAHDAVAVIAKGVPGGFRPDFTDFSSLVR

SEQ ID NO: 10510 - protein, 203 aa, Meiothermus roseus
  misc_feature (1)..(203): tr|A0A399EDR1|A0A399EDR1_9DEIN GTP cyclohydrolase 1 OS= Meiothermus roseus OX=1644118 GN=folE PE=3 SV=1
MGRMIEVEDTGLSFSSDVDIDRMSLLAREWLELIGEDPTREGLLRTPERMAKAWAFLTKGYRENLEEIVGGAIFEAEGSEMVVIKGIEYYSMCEHHLLPFFGKVHVGYIPRKKILGLSKFGRITDMFARRLQVQERLAVQIAQSIWDILEPVGVGVVVEGQHLCMMMRGVEKQHSSTTSSAMLGNFREDAKTRDEFLSLVRSW

SEQ ID NO: 10511 - protein, 343 aa, Meiothermus ruber
  misc_feature (1)..(343): tr|A0A0S7ATI8|A0A0S7ATI8_MEIRU GTP cyclohydrolase FolE2 OS=Meiothermus ruber H328 OX=1297799 GN=folE2 PE=3 SV= 1
MLSFDNKQILDTPPLKIEKNGGKKAYLFRNTDGAEPVIARHYDHQFRPDAAYKASLPDMTETVDSVEGANVAIQQVGISGFRLPLKFATPAGEALTLEARVTGTVSLQANLKGINMSRIIRTFYAHKDEVFSLDTLAQVVHDYRRDLESMSARVKVAFNYPLLVSALRSGLEGYQYYSGSYEAVLEENGTLRRFVELDFVYSSACPCSAELAEHARDVRGVYAIPHSQRSKARIKVEVAPDTSLHLEDLIHHARAALKTETQVMVKREDEQAFAELNGAYVKFVEDAARLLYEQLIADRRIHDFQVACSHLESLHSHDAVSVIAKGVPGGFRADFNDFSTLLC

SEQ ID NO: 10512 - protein, 343 aa, Meiothermus ruber; identical to SEQ ID NO: 10511
  misc_feature (1)..(343): tr|M9XAK0|M9XAK0_MEIRD GTP cyclohydrolase FolE2 OS=Meio thermus ruber (strain ATCC 35948 / DSM 1279 / VKM B-125 8 / 21) OX=504728 GN=folE2 PE=3 SV=1

SEQ ID NO: 10513 - protein, 201 aa, Meiothermus silvanus
  misc_feature (1)..(201): tr|A0A4Q4KT63|A0A4Q4KT63_9DEIN GTP cyclohydrolase 1 OS= Meiothermus silvanus OX=52022 GN=folE PE=3 SV=1
MKRMIEVDDTGLVFPCETDVERLATLSREWLEVIGEDPEREGLRKTPERVAKAWAFLTRGYCQSLEEVVNGAVFQGEGSEMVVVKGIEFYSMCEHHLLPFFGKVHIGYIPNGKILGLSKFGRITDMFARRLQVQERLAAQIADAIVEVLEPQGVGVVIEGVHLCMMMRGVEKQHSSTTTSAVRGVFRDNAKTREEFLSLIR

SEQ ID NO: 10514 - protein, 201 aa, Meiothermus silvanus
  misc_feature (1)..(201): tr|D7BDF2|D7BDF2_MEISD GTP cyclohydrolase 1 OS=Meiother mus silvanus (strain ATCC 700542 / DSM 9946 / VI-R2) OX =526227 GN=folE PE=3 SV=1
MKRMIEVEDTGLVFPCETDVDRLASLGREWLEIIGENPEREGLRKTPERMAKAWAFLTRGYCQNLEEIINGAIFQGEGSEMVVVKGIEFYSMCEHHLLPFFGKVHIGYIPNGKILGLSKFGRITDMFARRLQVQERLAAQIADAIVEVLEPQGVGVVIEGVHLCMMMRGVEKQHSSTTTSAVRGVFRDDPRTREEFMSLIH

SEQ ID NO: 10515 - protein, 201 aa, Meiothermus sp.; identical to SEQ ID NO: 10513
  misc_feature (1)..(201): tr|A0A323U2D8|A0A323U2D8_9DEIN GTP cyclohydrolase 1 OS= Meiothermus sp. Pnk-1 OX=873128 GN=folE PE=3 SV=1

SEQ ID NO: 10516 - protein, 343 aa, Meiothermus sp.
  misc_feature (1)..(343): tr|A0A370JZZ3|A0A370JZZ3_9DEIN GTP cyclohydrolase FolE2 OS=Meiothermus sp. QL-1 OX=2058095 GN=folE2 PE=3 SV=1
MPLLRENEILEPLPLKPSKTPTRKAYLFRNTEGAEPTIVRRYDAHFRPDAAYRASLPDMTETVDAVEGANVPIPQVGIAGFRMPLKFLTLEGEALTLEARITGTVSLEADLKGINMSRILRTFYARKDEAFGLETLAQVVRDYQRELGSLTARVKVAFNYPMRLPSLRSGLEGYQYYSASYEAAVEGDGPVRRYIELDFVYSSACPCSAELAEHARDVRGAYAIPHSQRSVARIRVEVAAEAGLHLEHLVQHARQALKTEVQVVVKREDEQAFAELNGAYVKFVEDAVRLLYQTLAADPRIHDFLVACAHLESLHAHDAVAVIAKGIPGGFRPEFSEFASLVR

SEQ ID NO: 10517 - protein, 201 aa, Meiothermus terrae
  misc_feature (1)..(201): tr|A0A399EYB1|A0A399EYB1_9DEIN GTP cyclohydrolase 1 OS= Meiothermus terrae OX=1408545 GN=folE PE=3 SV=1
MGRMIEVEDTGLSFTSDIDIDRMSALALEWLELIGEDPRREGLIKTPDRMARAWAFLTKGYRESLEEIVGGAVFEAEGSEMVVIKGIEYYSMCEHHLLPFFGKVHIGYIPRKKILGLSKFGRITDMFARRLQVQERLSVQIAQAIWDLLEPVGVGVVVEGQHMCMMMRGVEKQHSSTTSSAMLGNFREDAKTRDEFLSLLR

SEQ ID NO: 10518 - protein, 308 aa, Melghiribacillus thermohalophilus
  misc_feature (1)..(308): tr|A0A4V2V0R4|A0A4V2V0R4_9BACI GTP cyclohydrolase FolE2 OS=Melghiribacillus thermohalophilus OX=1324956 GN=fol E2 PE=3 SV=1
MDKVHQKGLPAKEERHRLFGSVPPGPRTKPVEKEKMADLQNTRNNFLFDLDTVGIVNVKHPVTVTSRMNPYTQTTVGTFTMSSSIPKDSKGTNMSRFTEQMQQYHEKGLTLELDTLKTFTKELAERLKQNDAEVKVSFPWFYERKGPQSGLAGMNHANAGMKVAYDQEKGYFCEVSLEATITTLCPCSKEISEYSAHNQRGKVTMTAVLSDDFDEREIDWKEQLLIAAETNASAKIHPVLKRPDEKTVTEQAYENPRFVEDMVRLVAADLYEMPFVEKFEVSCQNEESIHLHDAYASISFDKTKDTVN

SEQ ID NO: 10519 - protein, 189 aa, Melghirimyces algeriensis
  misc_feature (1)..(189): tr|A0A521B5R3|A0A521B5R3_9BACL GTP cyclohydrolase 1 OS= Melghirimyces algeriensis OX=910412 GN=folE PE=3 SV=1
MSVNHEQIQEAVRMILQAVGEDPDREGLKDTPARVARMYEEVFSGMYEDPEEYFSTMFSEDHEELVLVKDIPFFSMCEHHLVPFFGKAHVGYIPKSGRVTGLSKLARAVEAVSRRPQLQERITYTVADSIEKTLEPHGVIVVVEAEHMCMTMRGVKKPGSKTVTSAVRGVFENDPAARAEAFSLIGIGR

SEQ ID NO: 10520 - protein, 190 aa, Melghirimyces profundicolus
  misc_feature (1)..(190): tr|A0A2T6BUZ1|A0A2T6BUZ1_9BACL GTP cyclohydrolase 1 OS= Melghirimyces profundicolus OX=1242148 GN=folE PE=3 SV= 1
MEVNHEKIQKAVRMILEAVGEDPDREGLRDTPARVARMYEEVFSGMNEKPEEYFSTLFSEDHEEMVLVKDIPFFSMCEHHLVPFYGKAHVGYIPKRGRVTGLSKLARAVDAIARRPQLQERITYTVADSIEKTLQPHGVIVVVEAEHMCMTMRGVKKPGSQTVTSAVRGVFAKDPAARAEAFSLIGTGKK

SEQ ID NO: 10521 - protein, 189 aa, Melghirimyces thermohalophilus
  misc_feature (1)..(189): tr|A0A1G6LRJ9|A0A1G6LRJ9_9BACL GTP cyclohydrolase 1 OS= Melghirimyces thermohalophilus OX=1236220 GN=folE PE=3 SV=1
MEVNHEKIEQAVRMILEAVGEDPDREGLKETPSRVARMYEEVFSGMREDPEQYFSTVFSEDHEELVLVKDIPFYSLCEHHLVPFYGKAHVGYIPKSGRVTGLSKLARAVEAVARRPQLQERITYTVADSIEKTLQPHGVIVVVEAEHMCMTMRGVKKPGSQTVTSAVRGTFAADPAARAEAFSLIGIGK

SEQ ID NO: 10522 - protein, 188 aa, Melioribacter roseus
  misc_feature (1)..(188): tr|I6YXA0|I6YXA0_MELRP GTP cyclohydrolase 1 OS=Meliorib acter roseus (strain JCM 17771 / P3M-2) OX=1191523 GN=f olE PE=3 SV=1
MDRKAVENAVLTILNEIGEDPSREGLKRTPHRVAKAYEYLTQGYNKKIEDILNGAIFEEKYDEMVIVKDIDFYSMCEHHMLPFYGKVHIAYIPNGKIVGLSKLPRIVDAYARRLQVQERMTQQIADTIEEYLSPAGVAVVIEAYHMCMMMRGVEKQNSITTTSAMHGVFSEDTRTRSEFLNLIAQKRI

SEQ ID NO: 10523 - protein, 187 aa, Melioribacter sp.; identical to SEQ ID NO: 9215
  misc_feature (1)..(187): tr|A0A1G1BBT8|A0A1G1BBT8_9BACT GTP cyclohydrolase 1 OS= Melioribacter sp. GWF2_38_21 OX=1801612 GN=folE PE=3 SV =1

SEQ ID NO: 10524 - protein, 187 aa, Melissococcus sp.
  misc_feature (1)..(187): tr|A0A374J9U9|A0A374J9U9_9ENTE GTP cyclohydrolase 1 OS= Melissococcus sp. OM08-11BH OX=2293110 GN=folE PE=3 SV= 1
MEQDKQWQIEEAVKTILTAIGEDVDRDGLKETPKRVAKMYAEVFSSVREKEFTNYKVFPSLNEDDMVLVKDIEFYSMCEHHLLPFFGKAHVAYIPSDHKVLGLSKVARMVEFCAKRPNVQEDLTIQIANLINEKVRTKGVAVSIEAEHMCMAMRGVKARGSVTKTFHYQGVFKEDKDVKDDFLRALD

SEQ ID NO: 10525 - protein, 208 aa, Melittangium boletus
  misc_feature (1)..(208): tr|A0A250ID19|A0A250ID19_9DELT GTP cyclohydrolase 1 OS= Melittangium boletus DSM 14713 OX=1294270 GN=folE PE=3 SV=1
MSSLRLQPVSSETTTDDAAEPVSADDLRFEKNIEEILGLVGEDTSREGLLETPRRVRKAWREWTEGYAMEPNRVLKSFVDGASDRDEMVLVRDIPVYSHCEHHLAPFFGVAHVCYIPTGRIVGLSKLPRLVDIFSRRLQVQERLTQQIAQALDDCLSPQGVGVIVQCRHLCMESRGIRSRKAETTTAAYRGLLKTDLSMRAEFMERTR

SEQ ID NO: 10526 - protein, 231 aa, Meridianimaribacter sp.
  misc_feature (1)..(231): tr|A0A4Q9RM89|A0A4Q9RM89_9FLAO GTP cyclohydrolase 1 OS= Meridianimaribacter sp. CL38 OX=2213021 GN=folE PE=3 SV =1
MNKEKLVTPTNGHKLNGFSIEDIGDDHLFTSLETPMKKDAFKISDEEKKERISILFEEIMDVLGLDLTDDSLKGTPKRVAKMYVEEIFSGLNPANKPKIALFDNKYQYNQMLVEKDITFYSNCEHHFVPIIGKAHVAYISSGKVIGLSKLNRIVQYYAKRPQVQERLTNQIGEDLKQILNTEDVAVIIDAKHLCVSSRGIKDDTSATVTTYYGGQFNTAEKITELHNYINN

SEQ ID NO: 10527 - protein, 198 aa, Meridianimaribacter sp.
  misc_feature (1)..(198): tr|A0A4Q9RSI4|A0A4Q9RSI4_9FLAO GTP cyclohydrolase 1 OS= Meridianimaribacter sp. CL38 OX=2213021 GN=folE PE=3 SV =1
MPYNKFEEYNINITDDTKNRFKDIIKDIGEDVEREGLLKTPERASKAMKFLTQGYHQDAAEILKSAMFKESYNEMVIVKDIELYSLCEHHMLPFFGKAHIAYIPNGQIVGLSKIPRIVDVFARRLQVQERLTEQILDCINDTLKPQGVAVVIEASHMCMMMRGVQKQNSVTTTSGFRGQFEKIETRNEFLKLISEKLS

SEQ ID NO: 10528 - protein, 236 aa, Merismopedia glauca
  misc_feature (1)..(236): tr|A0A2T1BWU0|A0A2T1BWU0_9CYAN GTP cyclohydrolase 1 OS= Merismopedia glauca CCAP 1448/3 OX=1296344 GN=folE PE=3 SV=1
MTFSSSNSSDLSEQITNNQNSSHGTNARPDRNTINGRTAEVHPPQTSLDSEMTDAVTTILLGVGEDPEREGLLKTPKRVVEAMKFLTSGYNQSLDEIINGAIFDEGHNEMVLVRDINFFSLCEHHMLPFMGKAHVAYIPNQKVVGLSKLARIVEMYSRRLQVQERLTRQVAEALQSALEPRGVAVVMEASHMCMVMRGVQKPGSWTVTSAMMGVFQDEQKTREEFLNLIRHQPSFF

SEQ ID NO: 10529 - protein, 212 aa, Merismopedia glauca
  misc_feature (1)..(212): tr|A0A2T1C366|A0A2T1C366_9CYAN GTP cyclohydrolase 1 OS= Merismopedia glauca CCAP 1448/3 OX=1296344 GN=folE PE=3 SV=1
MSLSILPDDIFNHSLATETQSPVSDREMEQAVQTLLLGLGEDPYREGLRDTPKRVVKALKFLTSGYQESLDELLNGAVFHEDANEMVLVRDIDLFSSCEHHILPILGRAHVAYIPNGKVIGLSKIARICEMYARRLQVQERLTAQIADAIQGLLKPQGVAVVVEATHMCMVMRGVQKPGSWTVTSSMQGVFADDARTRQEFMDLIRHSPSFH

SEQ ID NO: 10530 - protein, 261 aa, Mesoaciditoga sp.
  misc_feature (1)..(261): tr|A0A2N7PSM6|A0A2N7PSM6_9BACT GTP cyclohydrolase FolE2 OS=Mesoaciditoga sp. OX=2060323 GN=folE2 PE=3 SV=1
MELPDVQSEKDARNIYIDKVGVSDIIYPIVVLDKTNSYQNTVGKINMYVDLPKDFRGTHMSRFVEVLNAHMGKMTIQNMEKILDDMKSKLNAEVSHLEVEFDYFVMRQAPVSKISSYTPYRAKFISKKDKTFDFILEVIVPVHTLCPCSKEISDRGAHNQRAKADISVRMNKIVWIEDLIDVAENSASAPLFTLLKREDEKYVTESAYDNPKFVEDIVRDISLKLEKDERITWYNIRVTSYESIHPHNAYACHDQWKEFVK

SEQ ID NO: 10531 - protein, 221 aa, Mesocricetibacter intestinalis
  misc_feature (1)..(221): tr|A0A4R6VKB1|A0A4R6VKB1_9PAST GTP cyclohydrolase 1 OS= Mesocricetibacter intestinalis OX=1521930 GN=folE PE=3 SV=1
MYIMEKISPEAEKVREALVAKGIETPMLPSAQNKDQRRAAIEAHMREVMKLIGLDLSDDSLEETPNRLAKMFVDEIFSGLDYANFPKITNIENRMKVSEMVLVNDVTLTSTCEHHFVTIDGVVSVAYYPKKWVIGLSKINRVVAFFAQRPQVQERLTEQILLAFQTILETEDVAVYMKATHFCVKCRGIKDSNSYTVTSAFGGVFLNDRETRKEFLSLLGK

SEQ ID NO: 10532 - protein, 229 aa, Mesoflavibacter aestuarii
  misc_feature (1)..(229): tr|A0A2T1N902|A0A2T1N902_9FLAO GTP cyclohydrolase 1 OS= Mesoflavibacter aestuarii OX=1266046 GN=folE PE=3 SV=1
MKNNQTLVNDHNLKDFNIDDIGDDHLYTGLETPLKANAFKISDEEKKQKIAILFEEIMDVMGLDLTDDSLKGTPQRVAKMYIDEIFSGLNPKNKPKIALFDNKYKYNQMLVEKNITFYSNCEHHFVPIIGKAHIAYISSGKVIGLSKLNRIVQYYAKRPQVQERLTNQIAEDLKAILQTEDVAVIIDAKHLCVSSRGVKDDTSSTVTAYYSGAFKQTSKIVELQNYLND

SEQ ID NO: 10533 - protein, 220 aa, Mesoflavibacter aestuarii
  misc_feature (1)..(220): tr|A0A2T1NG78|A0A2T1NG78_9FLAO GTP cyclohydrolase 1 OS= Mesoflavibacter aestuarii OX=1266046 GN=folE PE=3 SV=1
MSLDNDDYGDSHVGSASDTPLRADAFEISDSEKIESIKKDVTNILNTLGLDLTDDSLKGTPNRVAKMFVNEIFGGLNPKKKPSASVFENKYKYGEMLVEKNITVYSTCEHHLLPIVGRAHVAYISNGTVVGLSKMNRIVDFYAKRPQVQERLNIQIVKELQKVLGTEDVACVIDAKHLCVNSRGIRDIESSTVTSEFGGKFKDKETKREFLDYIKLDTTF

SEQ ID NO: 10534 - protein, 228 aa, Mesoflavibacter sabulilitoris
  misc_feature (1)..(228): tr|A0A2T1NMF0|A0A2T1NMF0_9FLAO GTP cyclohydrolase 1 OS= Mesoflavibacter sabulilitoris OX=1520893 GN=folE PE=3 S V=1
MKIDNSVENIDNNDPIGENHIGTSHDTPLRPDAFAISDKEKIESIKKDVTNIMNTLGLDLTDDSLKGTPNRVAKMFVNEIFGGLNPDKKPNASTFDNKYQYGEMLVEKNITVYSTCEHHLLPIVGRAHVAYISNGSVVGLSKMNRIVDYYSKRPQVQERLTIQIVKELQDVLGTEDVACVIDAKHLCVNSRGIRDIESSTVTSEFGGAFKNKETKREFLDYIKLETKF

SEQ ID NO: 10535 - protein, 231 aa, Mesoflavibacter sabulilitoris
  misc_feature (1)..(231): tr|A0A2T1NHH2|A0A2T1NHH2_9FLAO GTP cyclohydrolase 1 OS= Mesoflavibacter sabulilitoris OX=1520893 GN=folE PE=3 S V=1
MNKEKLVTPTNGHKLNGFSIEDIGDDHLFTSLETPMKKDAFKISDEEKKERISILFEEIMDVLGLDLTDDSLKGTPKRVAKMYVEEIFSGLNPANKPKIALFDNKYQYNQMLVEKDITFYSNCEHHFVPIIGKAHVAYISSGKVIGLSKLNRIVQYYAKRPQVQERLTNQIGEDLKQILNTEDVAVIIDAKHLCVSSRGVKDDTSATVTTFYSGQFTNPQKISELQNYLKQ

SEQ ID NO: 10536 - protein, 198 aa, Mesoflavibacter sp.
  misc_feature (1)..(198): tr|A0A2T1NJB4|A0A2T1NJB4_9FLAO GTP cyclohydrolase 1 OS= Mesoflavibacter sp. HG96 OX=2109944 GN=folE PE=3 SV=1
MPYKKFEEYNMQVTDDVKERYKSIIEELGENTERDGLLKTPERAAKAMQFLTQGYQQDAAEILKGAMFKEDYNDMVIVKDIELYSLCEHHILPFFGKAHIAYIPNGHIVGLSKLPRIVDVFARRLQVQERLTHQILDCINDTLKPEGVAVVIEASHMCMMMRGVQKQNSVTTTSGFRGAFQNIETRTEFLNLINANLS

SEQ ID NO: 10537 - protein, 231 aa, Mesoflavibacter sp.
  misc_feature (1)..(231): tr|A0A2T1NJZ2|A0A2T1NJZ2_9FLAO GTP cyclohydrolase 1 OS= Mesoflavibacter sp. HG96 OX=2109944 GN=folE PE=3 SV=1
MKKEKLKMTTNGHNLNGFTVEDIGDDHLFTSLETPMKKDAFKISDEEKKERISILFEEIMDVLGLDLTDDSLQGTPKRVAKMYVDEIFSGLNPANKPKIALFDNKYQYNQMLVEKDITFYSNCEHHFVPIIGKAHVAYISSGKVIGLSKLNRIVQYYAKRPQVQERLTNQIGEDLKQILNTEDVAVIIDAKHLCVSSRGVKDDTSATVTTFYSGQFNNPQKITELQNYLKQ

SEQ ID NO: 10538 - protein, 225 aa, Mesonia algae
  misc_feature (1)..(225): tr|A0A2W7HX95|A0A2W7HX95_9FLAO GTP cyclohydrolase 1 OS= Mesonia algae OX=213248 GN=folE PE=3 SV=1
MKIDNILDNIEEFGDNHIASSTENPIRKDAFDISDEEKIGLIEKDVNRILETLGMDLTDDSLKGTPKRVAKMFVQEIFGGLNPKRKPKASVFENKYKYGEMLVEKNITVYSTCEHHLLPIVGRAHVAYISNGTVVGLSKMNRIVDFFAKRPQVQERMTMQIVNELQEVLGTKDVACVIDAKHLCVNSRGIRDIESSTVTSEFGGKFKEPATKREFLDYINMDTDF

SEQ ID NO: 10539 - protein, 220 aa, Mesonia phycicola
  misc_feature (1)..(220): tr|A0A1M6C4S7|A0A1M6C4S7_9FLAO GTP cyclohydrolase 1 OS= Mesonia phycicola OX=579105 GN=folE PE=3 SV=1
MDKKQIESIGDNHISFNTKTPLLKTAFDKSDDEKVKNIEFHFSKIMTELGLDLSDDSLSGTPYRFAKMYVKELFYGLNPKNKPKLSVFENKYGYRKMLVEQNITIDSSCEHHFLPITGYAHIAYIPKNKVIGLSKINRLVDYYAHRPQVQERLSMQILLDLQDILETEDVIVMICAKHLCVSSRGIKDKNSSTTTIEYGGVFEKEDIRNNFFKIIDNANL

SEQ ID NO: 10540 - protein, 225 aa, Mesonia phycicola
  misc_feature (1)..(225): tr|A0A1M6G6L4|A0A1M6G6L4_9FLAO GTP cyclohydrolase 1 OS= Mesonia phycicola OX=579105 GN=folE PE=3 SV=1
MKIDKILNDIDEMGDNHIASSTENPVREDAFEMSDLEKIASIQKDFKSILETLGMDLTDDSLKGTPLRVAKMFVNETFGGLNPDKKPKASVFDNKYKYGEMLVEKNITVYSTCEHHFLPIVGRAHVAYISNGTVVGLSKMNRIVDYYAKRPQVQERLTMQIVKELQEVLGTEDVACVIDAKHLCVNSRGIRDIESSTVTSEFGGKFKEKSVKRELLDYIKLETQF

SEQ ID NO: 10541 - protein, 225 aa, Mesonia sp.
  misc_feature (1)..(225): tr|A0A5C8LI31|A0A5C8LI31_9FLAO GTP cyclohydrolase 1 OS= Mesonia sp. HuA40 OX=2602761 GN=folE PE=3 SV=1
MKIDNISENIDEIGDNHVSSSAKNPLRKDAFEKTDEEKIALIQQDVQNILTTLGLDLEDDSLKGTPLRVAKMFVNESFAGLHPKRKPKASVFQNNYKYGEMLVEKNITVYSTCEHHLLPIVGRAHVAYISNGTVVGLSKMNRIVDYYAKRPQVQERLTMQIVAELQNALGTEDVACVIDAKHLCVNSRGIRDIESSTVTSEFGGKFKDKSIKREFLDYINMDTEF

SEQ ID NO: 10542 - protein, 225 aa, Mesonia sp.
  misc_feature (1)..(225): tr|A0A2W1JVU7|A0A2W1JVU7_9FLAO GTP cyclohydrolase 1 OS= Mesonia sp. K7 OX=2218606 GN=folE PE=3 SV=1
MKIDKLFEEIEEQGDNHISSSTENPIRKDAFEKSDEEKIDLIEQDVKNMLETLGMDLTDDSLKGTPKRVAKMFVKELFDGLHPDKKPKASTFENKYKYGEMLVEKNITVYSTCEHHLLPIVGRAHVAYISNGTVVGLSKMNRIVDYYAKRPQVQERMTMQIVRELQEVLGTQDVACVIDAKHLCVNSRGIRDIESSTVTSEFGGKFKEAATKREFLDYINMDTEF

SEQ ID NO: 10543 - protein, 211 aa, Mesorhizobium albiziae
  misc_feature (1)..(211): tr|A0A1I4E8V1|A0A1I4E8V1_9RHIZ GTP cyclohydrolase 1 OS= Mesorhizobium albiziae OX=335020 GN=folE PE=3 SV=1
MDAVIKNFPRAEDGQALDIKRPTQAEVEAAVRTLLLWTGDNPDREGLKDTPRRVAKAYRELFGGYGQDPATELGRTFEEVAGYDDMVLVKDIKFHSHCEHHMVPIIGRAHVGYLPDGRVVGLSKIARVVDIFAHRLQTQEAMTAQIAGVIQDVLNPRGVAVMIEAEHMCMAMRGIRKQGSTTLTSTFTGSFKDNPEEQIRFVTMVRDGNRG

SEQ ID NO: 10544 - protein, 197 aa, Mesorhizobium albiziae
  misc_feature (1)..(197): tr|A0A5D4GSR6|A0A5D4GSR6_9RHIZ GTP cyclohydrolase 1 OS= Mesorhizobium albiziae OX=335020 GN=folE PE=3 SV=1
MEKPVTDRPSQAEVEAAVRTLLRWTGDSPDREGLVDTPKRVAKAYREMFSGYDQCPADELGRTFEEVEGYDDMVLVRDITFHSHCEHHMVPIIGKAHVAYLPDGKVVGLSKIARTVDIFAHRLQTQEAMTAQIAGVIQDVLNPRGVAVMLEAEHMCMAMRGIRKQGSTTLTTTFTGTFKDHPEEQARFMMMVRGFPA

SEQ ID NO: 10545 - protein, 212 aa, Mesorhizobium alhagi
  misc_feature (1)..(212): tr|H0HWG1|H0HWG1_9RHIZ GTP cyclohydrolase 1 OS=Mesorhiz obium alhagi CCNWXJ12-2 OX=1107882 GN=folE PE=3 SV=1
MDAVIKKIMPRSEYMEKPVTHRPSQAEAEAAVLTLLRWTGDDPDREGLKDTPKRVAKAFLEMFNGYDMCPAEELGRTFEEVAGYDDMVIVKDIHFHSHCEHHMVPIIGRAHVGYLPDRKVVGLSKIARVVDIFAHRLQTQEAMTAQIAAVIQEVLNPRGVAVMIDAEHMCMAMRGIRKQGSTTLTSTFTGAFKDSPEEQVRFITMVRNGLSA

SEQ ID NO: 10546 - protein, 211 aa, Mesorhizobium amorphae
  misc_feature (1)..(211): tr|G6Y857|G6Y857_9RHIZ GTP cyclohydrolase 1 OS=Mesorhiz obium amorphae CCNWGS0123 OX=1082933 GN=folE PE=3 SV=1
MDAVIKKLMPSSTYMEKPVTDRPSEAEVEAAVRTLLRWTGDNPEREGLIDTPKRVTKAFLEMFNGYDMCPAEELGRTFEEVAGYDDLVIVRDINFHSHCEHHMVPIIGKAHVGYLPDGKVVGLSKIARVVDIFAHRLQTQEAMTAQIASVIQDVLNPRGVAVMIEAEHMCMAMRGIRKQGSTTLTSTFTGVFKDTPEEQVRFVTMVRGGGV

SEQ ID NO: 10547 - protein, 211 aa, Mesorhizobium amorphae
  misc_feature (1)..(211): tr|A0A2W4Z6U9|A0A2W4Z6U9_9RHIZ GTP cyclohydrolase 1 OS= Mesorhizobium amorphae OX=71433 GN=folE PE=3 SV=1
MDLAIKPKLSAVDTNDASPKRPSQAEAEAAVRTLILWAGENPDREGLRDTPTRVAKAYREMFNGYVQDPVAELARTFEEVAGYDDMVIVRDIGFHSHCEHHMVPIVGRAHVGYLPAGRVVGLSKIARVVDIFAHRLQTQESMTAQIASVMQDVLKPRGVAVMIEAEHMCMAMRGIRKTGSTTLTSTFTGAFRDSPQEQLRFVGMVRDGAKP

SEQ ID NO: 10548 - protein, 212 aa, Mesorhizobium australicum
  misc_feature (1)..(212): tr|A0A1X7P4S8|A0A1X7P4S8_9RHIZ GTP cyclohydrolase 1 OS= Mesorhizobium australicum OX=536018 GN=folE PE=3 SV=1
MDAAIKKFLPDAGNDSRPSDRPTEAEVEAAVRVLLRWTGDNPDREGLVDTPRRVMKAYREMFNGYDLSPAEELGRTFEEVAGYDDLVIVRDIQFHSHCEHHMVPIVGRAHVGYLPDGKVVGLSKIARVVDIFAHRLQTQEAMTAQVAGVIQDVLNPRGVAVIIEAEHMCMAMRGIRKQGSTTMTSTFTGSFKDSPEEQVRFVTMVRGTAGAR

SEQ ID NO: 10549 - protein, 211 aa, Mesorhizobium australicum
  misc_feature (1)..(211): tr|L0KL54|L0KL54_MESAW GTP cyclohydrolase 1 OS=Mesorhiz obium australicum (strain HAMBI 3006 / LMG 24608 / WSM2 073) OX=754035 GN=folE PE=3 SV=1
MDAVIKKLMPQSAYMEKPVTDRPSEAEVEAAVRTLLRWTGDNPDREGLIDTPKRVTKAYREMFGGYDMCPAEELGRTFEEVAGYDDLVIVKDIQFHSHCEHHMVPIIGKAHVGYLPDGKVVGLSKIARVVDIFAHRLQTQEALTAQIAGVIQDVLNPRGVAVMIEAEHMCMAMRGIRKQGSTTLTSTFTGVFKDTPEEQVRFVTMVRGGRA

SEQ ID NO: 10550 - protein, 211 aa, Mesorhizobium ciceri
  misc_feature (1)..(211): tr|A0A143N8V3|A0A143N8V3_9RHIZ GTP cyclohydrolase 1 OS= Mesorhizobium ciceri OX=39645 GN=folE PE=3 SV=1
MDAVIKKLMPQSAYMEKPVTDRPSEAEVEAAVRTLLRWTGDNPDREGLVDTPKRVAKAFREMFGGYDMCPADELGRTFEEVAGYDDLVIVKDITFHSHCEHHMVPIIGKAHVGYLPDGKVVGLSKIARVVDIFAHRLQTQEALTAQIAGVIQDVLNPRGVAVMIEAEHMCMAMRGIRKQGSTTLTSTFTGVFKDTPEEQVRFVTMVRGGGV

SEQ ID NO: 10551 - protein, 211 aa, Mesorhizobium ciceri; identical to SEQ ID NO: 10550
  misc_feature (1)..(211): tr|E8TD71|E8TD71_MESCW GTP cyclohydrolase 1 OS=Mesorhiz obium ciceri biovar biserrulae (strain HAMBI 2942 / LMG 23838 / WSM1271) OX=765698 GN=folE PE=3 SV=1

SEQ ID NO: 10552 - protein, 211 aa, Mesorhizobium delmotii
  misc_feature (1)..(211): tr|A0A2P9ASK2|A0A2P9ASK2_9RHIZ GTP cyclohydrolase 1 OS= Mesorhizobium delmotii OX=1631247 GN=folE PE=3 SV=1
MDAVIKKFMPPSAYMEKPVTDRPTEAEAEAAVRTLLRWTGDNPDREGLVDTPKRVVKAYREMFGGYDKCPAEELGRTFEEVAGYDDLVLVKDITFHSHCEHHMVPIIGKAHVGYLPDGKVVGLSKIARVVDIFAQRLQTQEAMTAQIAGVIQDVLNPRGVAVMLEAEHMCMAMRGIRKEGSTTLTSTFTGVFKDTPEEQVRFVTMVRGGRG

SEQ ID NO: 10553 - protein, 212 aa, Mesorhizobium ephedrae
  misc_feature (1)..(212): tr|A0A2P7SSX1|A0A2P7SSX1_9RHIZ GTP cyclohydrolase 1 OS= Mesorhizobium ephedrae OX=2116701 GN=folE PE=3 SV=1
MDAVVKKIMPRSDYMDKPATNRPSQAEVEAAVLTLLRWTGDDPEREGLRDTPKRVAKAFLEMFNGYDMCPAEELGRTFEEVAGYDDLVIVRDIKFHSHCEHHMVPIIGRAHVGYLPDGKVVGLSKIARVVDIFAHRLQTQEALTAQIAGVIQEVLNPRGVAVMVEAEHMCMAMRGIRKQGSSTLTSTFTGVFKDNPEEQIRFLTMVRAGQGG

SEQ ID NO: 10554 - protein, 211 aa, Mesorhizobium erdmanii
  misc_feature (1)..(211): tr|A0A4Q1UV83|A0A4Q1UV83_9RHIZ GTP cyclohydrolase 1 OS= Mesorhizobium erdmanii OX=1777866 GN=folE PE=3 SV=1
MDAVIKKLMPQSAYMEKPVTDRPSEAEVEAAVRTLLRWTGDNPDREGLIDTPKRVAKAFREMFGGYDMCPAEELGRTFEEVAGYDDLVIVKDIHFHSHCEHHMVPIIGKAHVGYLPDGKVVGLSKIARVVDIFAHRLQTQEALTAQIAGVIQDVLNPRGVAVMIEAEHMCMAMRGIRKQGSTTLTSTFTGVFKDTPEEQVRFVTMVRGGGA

SEQ ID NO: 10555 - protein, 210 aa, Mesorhizobium hawassense
  misc_feature (1)..(210): tr|A0A330HDC0|A0A330HDC0_9RHIZ GTP cyclohydrolase 1 OS= Mesorhizobium hawassense OX=1209954 GN=folE PE=3 SV=1
MDAVIKKIMPPSEYMEKPVTDRPTEAEVEAAVRTLLRWTGDNPEREGLIDTPKRVTKAFREMFNGYDMCPADELGRTFEEVAGYDDLVIVRNIKFHSHCEHHMVPIIGKAHVGYLPDGKVVGLSKIARVVDIFAHRLQTQEAMTAQIAGVIQDVLNPRGVAVMLEAEHMCMAMRGIRKQDSTTLTSTFTGVFKDTPEEQVRFVTMVRAGG

SEQ ID NO: 10556 - protein, 210 aa, Mesorhizobium helmanticense
  misc_feature (1)..(210): tr|A0A2T4J0U7|A0A2T4J0U7_9RHIZ GTP cyclohydrolase 1 OS= Mesorhizobium helmanticense OX=1776423 GN=folE PE=3 SV= 1
MDAVIKKLMPQSAYMEKPVTDRPSEAEVEAAVHTLLRWTGDNPDREGLIDTPKRVTKAFREMFNGYDMCPADELGRTFEEVAGYDDLVIVKDITFHSHCEHHMVPIIGKAHVGYLPDGKVVGLSKIARVVDIFAHRLQTQEAMTAQIAGVIQDVLNPRGVAVMLEAEHMCMAMRGIRKQGSTTLTSTFTGIFKDTPEEQVRFVTMVRGGA

SEQ ID NO: 10557 - protein, 211 aa, Mesorhizobium huakuii
  misc_feature (1)..(211): tr|A0A068D7V5|A0A068D7V5_9RHIZ GTP cyclohydrolase 1 OS= Mesorhizobium huakuii 7653R OX=763057 GN=folE PE=3 SV=1
MDAVIKKLMPQAAYMEKPVTDRPSEAEVEAAVRTLLRWTGDNPDREGLIDTPKRVAKAYREMFGGYDMCPAEELGRTFEEVAGYDDLVIVKDIQFHSHCEHHMVPIIGKAHVGYLPDGKVVGLSKIARVVDIFAHRLQTQEALTAQIAGVIQDVLNPRGVAVMIEAEHMCMAMRGIRKQGSTTLTSTFTGVFKDTPEEQVRFVTMVRGGGA

SEQ ID NO: 10558 - protein, 197 aa, Mesorhizobium japonicum
  misc_feature (1)..(197): sp|Q98LQ6|GCH1_RHILO GTP cyclohydrolase 1 OS=Mesorhizob ium japonicum (strain LMG 29417 / CECT 9101 / MAFF 3030 99) OX=266835 GN=folE PE=3 SV=1
MEKPVTDRPSEAEVEAAVRTLLRWTGDNPDREGLIDTPKRVAKAFREMFGGYDMCPAEELGRTFEEVAGYDDLVIVKDIHFHSHCEHHMVPIIGKAHVGYLPDGKVVGLSKIARVVDIFAHRLQTQEALTAQIAGVIQDVLNPRGVAVMIEAEHMCMAMRGIRKQGSTTLTSTFTGVFKDTPEEQVRFVTMVRGGGA

SEQ ID NO: 10559 - protein, 211 aa, Mesorhizobium japonicum; identical to SEQ ID NO: 10554
  misc_feature (1)..(211): tr|A0A3M9X5L2|A0A3M9X5L2_9RHIZ GTP cyclohydrolase 1 OS= Mesorhizobium japonicum OX=2066070 GN=folE PE=3 SV=1

SEQ ID NO: 10560 - protein, 211 aa, Mesorhizobium jarvisii; identical to SEQ ID NO: 10557
  misc_feature (1)..(211): tr|A0A3A5KUP6|A0A3A5KUP6_9RHIZ GTP cyclohydrolase 1 OS= Mesorhizobium jarvisii OX=1777867 GN=folE PE=3 SV=1

SEQ ID NO: 10561 - protein, 211 aa, Mesorhizobium kowhaii
  misc_feature (1)..(211): tr|A0A2W7CQ71|A0A2W7CQ71_9RHIZ GTP cyclohydrolase 1 OS= Mesorhizobium kowhaii OX=1300272 GN=folE PE=3 SV=1
MDAVIKKLMPQSAYMEKPVTDRPSEAEVEAAVRTLLRWTGDNPDREGLVDTPMRVAKAFREMFGGYDMCPAEELGRTFEEVAGYDDLVIVKDIQFHSHCEHHMVPIIGKAHVGYLPDGKVVGLSKIARVVDIFAHRLQTQEALTAQIAGVIQDVLNPRGVAVMIEAEHMCMAMRGIRKQGSTTLTSTFTGVFKDTPEEQVRFVTMVRGGGA

SEQ ID NO: 10562 - protein, 211 aa, Mesorhizobium mediterraneum
  misc_feature (1)..(211): tr|A0A271L012|A0A271L012_9RHIZ GTP cyclohydrolase 1 OS= Mesorhizobium mediterraneum OX=43617 GN=folE PE=3 SV=1
MDAVIKKFMPPSAYLEKPVTDRPSEAEAEAAVRTLLRWTGDNPDREGLVDTPKRVVKAYREMFGGYDKCPAEELGRTFEEVAGYDDLVLVKDITFHSHCEHHMVPIIGKAHVGYLPDGKVVGLSKIARVVDIFAQRLQTQEAMTAQIAGVIQDVLNPRGVAVMLEAEHMCMAMRGIRKEGSTTLTSTFTGVFKDTPEEQVRFVTMVRGGRG

SEQ ID NO: 10563 - protein, 210 aa, Mesorhizobium metallidurans
  misc_feature (1)..(210): tr|M5ETI0|M5ETI0_9RHIZ GTP cyclohydrolase 1 OS=Mesorhiz obium metallidurans STM 2683 OX=1297569 GN=folE PE=3 SV =1
MDAVIKKLMPQSAYMEKPVTDRPSEAEVEAAVRTLLRWTGDNPDREGLIDTPKRVTKAFREMFNGYDMCPAEELGRTFEEVAGYDDLVIVKDITFHSHCEHHMVPIIGKAHVGYLPDGKVVGLSKIARVVDIFAHRLQTQEAMTAQIAGVIQDVLNPRGVAVMLEAEHMCMAMRGIRKQDSTTLTSTFTGIFKDTPEEQVRFVTMVRGGA

SEQ ID NO: 10564 - protein, 211 aa, Mesorhizobium muleiense
  misc_feature (1)..(211): tr|A0A1G9BXK6|A0A1G9BXK6_9RHIZ GTP cyclohydrolase 1 OS= Mesorhizobium muleiense OX=1004279 GN=folE PE=3 SV=1
MDAVIKKFMPSSAYMEKPVTDRPTEAEAEAAVRTLLRWTGDNPDREGLVDTPKRVVKAYREMFGGYDKCPAEELGRTFEEVAGYDDLVLVKDITFHSHCEHHMVPIIGKAHVGYLPDGKVVGLSKIARVVDIFAQRLQTQEAMTAQIAGVIQDVLNPRGVAVMLEAEHMCMAMRGIRKEGSTTLTSTFTGVFKDTPEEQVRFVTMVRGGRG

SEQ ID NO: 10565 - protein, 212 aa, Mesorhizobium oceanicum
  misc_feature (1)..(212): tr|A0A1L3SSN4|A0A1L3SSN4_9RHIZ GTP cyclohydrolase 1 OS= Mesorhizobium oceanicum OX=1670800 GN=folE PE=3 SV=1
MDAIVKKFEDIAVAATQPEVERPSQAEVEAAVRTLLLWIGENPQREGLLETPERVAKAYTEMFSGYGRDPADELGRTFEEVAGFDDLVIEKDITFHSHCEHHMVPIIGKAHIGYLPDGKVVGLSKLARVVDIFAQRLQTQEAMTAQIAGAIQDVLNPLGVAVIIEAEHMCMAMRGIRKQGATTITSTFTGAFRDSPEEQVRFMTLLRAGGRG

SEQ ID NO: 10566 - protein, 211 aa, Mesorhizobium opportunistum
  misc_feature (1)..(211): tr|F7Y4S4|F7Y4S4_MESOW GTP cyclohydrolase 1 OS=Mesorhiz obium opportunistum (strain LMG 24607 / HAMBI 3007 / WS M2075) OX=536019 GN=folE PE=3 SV=1
MDAVIKKLMPQSAYMEKPVTDRPSEAEVEAAVRTLLRWTGDNPDREGLVDTPKRVAKAYREMFGGYDMCPAEELGRTFEEVAGYDDLVIVKDIQFHSHCEHHMVPIIGKAHVGYLPDGKVVGLSKIARVVDIFAHRLQTQEALTAQIAGVIQDVLNPRGVAVMIEAEHMCMAMRGIRKQGSTTLTSTFTGVFKDTPEEQVRFVTMVRGGGI

SEQ ID NO: 10567 - protein, 205 aa, Mesorhizobium plurifarium
  misc_feature (1)..(205): tr|A0A2T3ENG1|A0A2T3ENG1_MESPL GTP cyclohydrolase 1 OS= Mesorhizobium plurifarium OX=69974 GN=folE PE=3 SV=1
MDAIVKNFPVLDDASGRPTQKEAEEAVRVLLRWAGEDPAREGLKDTPARVAKAYREIFGGYDLVAEDVLGRTFEEVSGYDDIVLEKDIPFYSHCEHHMVPIIGKAHVAYLPNGRVLGLSKIARVVDIYARRLQTQEAMTAQIAKAIDETLMPRGVAVMVEAEHLCMAMRGIKKQGATTLTTTFTGAFKSEPAEQARFMTMLRGFK

SEQ ID NO: 10568 - protein, 210 aa, Mesorhizobium plurifarium
  misc_feature (1)..(210): tr|A0A090G7G7|A0A090G7G7_MESPL GTP cyclohydrolase 1 OS= Mesorhizobium plurifarium OX=69974 GN=folE PE=3 SV=1
MDAVIKKIMPPSQYLDKPVTDRPSEAEVEAAVRTLLRWTGDNPDREGLVDTPKRVTKAFREMFNGYDMCPADELGRTFEEVAGYDDLVIVKDIKFHSHCEHHMVPIIGKAHVGYLPDGKVVGLSKIARVVDIFAHRLQTQEAMTAQIAGVIQDVLNPRGVAVMLEAEHMCMAMRGIRKQGSTTLTSTFTGVFKDTPEEQVRFVTMVRAGG

SEQ ID NO: 10569 - protein, 211 aa, Mesorhizobium prunaredense; identical to SEQ ID NO: 10552
  misc_feature (1)..(211): tr|A0A1R3VN00|A0A1R3VN00_9RHIZ GTP cyclohydrolase 1 OS= Mesorhizobium prunaredense OX=1631249 GN=folE PE=3 SV=1

SEQ ID NO: 10570 - protein, 211 aa, Mesorhizobium qingshengii
  misc_feature (1)..(211): tr|A0A1G5VAP0|A0A1G5VAP0_9RHIZ GTP cyclohydrolase 1 OS= Mesorhizobium qingshengii OX=1165689 GN=folE PE=3 SV=1
MDAVIKKLMPQSAYMEKPVTDRPSEAEVEAAVRTLLRWTGDNPDREGLVDTPKRVAKAYREMFGGYDMCPAEELGRTFEEVAGYDDLVIVKDISFHSHCEHHMVPIIGKAHVGYLPDGKVVGLSKIARVVDIFAHRLQTQEALTAQIAGVIQDVLNPRGVAVMIEAEHMCMAMRGIRKQGSTTLTSTFTGVFKDTPDEQVRFVTMVRGGGV

SEQ ID NO: 10571 - protein, 210 aa, Mesorhizobium sanjuanii
  misc_feature (1)..(210): tr|A0A2A6FJI5|A0A2A6FJI5_9RHIZ GTP cyclohydrolase 1 OS= Mesorhizobium sanjuanii OX=2037900 GN=folE PE=3 SV=1
MDAVIKKLMPQSAYMEKPVTDRPSEAEVEAAVRTLLRWTGDNPDREGLIDTPKRVTKAFREMFNGYDMCPAEELGRTFEEVAGYDDLVIVKDITFHSHCEHHMVPIIGKAHVGYLPDGKVVGLSKIARVVDIFAHRLQTQEAMTAQIAGVIQDVLNPRGVAVMLEAEHMCMAMRGIRKQGSTTLTSTFTGVFKDTPEEQVRFVTMVRGGA

SEQ ID NO: 10572 - protein, 221 aa, Mesorhizobium soli
  misc_feature (1)..(221): tr|A0A2P7S2C0|A0A2P7S2C0_9RHIZ GTP cyclohydrolase 1 OS= Mesorhizobium soli OX=1295366 GN=folE PE=3 SV=1
MDLHSHLLDETEESVPATARRNSVGSRKPPLGPIRPTRIDAEAAVRTLICWAGDDPARPGLLDTPARVVRAYEEWFGGYDQDPVALLERTFDEIGDYDQTVELHDLPFHSFCEHHMAAIRGKAHIAYMPVNRVVGISKLARVVEACARRLQIQERLTDDIARAIEDALQPGGVAVVLVAEHSCMNSRGVHAHGTHMVTKRMLGVFETDVDLRREFLASIDL

SEQ ID NO: 10573 - protein, 211 aa, Mesorhizobium soli
  misc_feature (1)..(211): tr|A0A2P7SBT0|A0A2P7SBT0_9RHIZ GTP cyclohydrolase 1 OS= Mesorhizobium soli OX=1295366 GN=folE PE=3 SV=1
MDAVIKKLMPKSEYLEKPVTDRPDQAEVEAAVRTLLRWTGDNPDREGLVDTPKRVAKAFLEMFNGYDMCPAEELGRTFEEVAGYDDLVLVRDIEFHSHCEHHMVPIIGRAHVGYLPDGRVVGLSKIARVVDIFAHRLQTQEAMTAQIANVIQDVLNPRGVAVMIEAEHMCMAMRGIRKQGSTTLTSTFTGVFKDSPEEQLRFMTMVRHGSK

SEQ ID NO: 10574 - protein, 211 aa, Mesorhizobium sp.; identical to SEQ ID NO: 10550
  misc_feature (1)..(211): tr|A0A3S2E5F7|A0A3S2E5F7_9RHIZ GTP cyclohydrolase 1 OS= Mesorhizobium sp. M7A.F.Ca.CA.001.06.1.1 OX=2496682 GN= folE PE=3 SV=1

SEQ ID NO: 10575 - protein, 211 aa, Mesorhizobium sp.; identical to SEQ ID NO: 10550
  misc_feature (1)..(211): tr|A0A3S2HJQ7|A0A3S2HJQ7_9RHIZ GTP cyclohydrolase 1 OS= Mesorhizobium sp. M7A.F.Ca.CA.002.03.2.1 OX=2496680 GN= folE PE=3 SV=1

SEQ ID NO: 10576 - protein, 208 aa, Mesorhizobium tamadayense
  misc_feature (1)..(208): tr|A0A3P3FUL2|A0A3P3FUL2_9RHIZ GTP cyclohydrolase 1 OS= Mesorhizobium tamadayense OX=425306 GN=folE PE=3 SV=1
MDAVIKKFMPPSSYMEKPVTDRPSEAEVEAAVRTLLRWTGDNPDREGLVDTPKRVTKAFREMFNGYDMCPAEELGRTFEEVAGYDDLVIVRDITFHSHCEHHMVPIIGKAHVGYLPDGKVVGLSKIARVVDIFAHRLQTQEAMTAQIAGVIQDVLNPRGVAVMIEAEHMCMAMRGIRKQGSTTLTSTFTGVFKDTPEEQVRFVTMVRS

SEQ ID NO: 10577 - protein, 211 aa, Mesorhizobium temperatum
  misc_feature (1)..(211): tr|A0A271LP22|A0A271LP22_9RHIZ GTP cyclohydrolase 1 OS= Mesorhizobium temperatum OX=241416 GN=folE PE=3 SV=1
MDAVIKKFMPPSAYMEKPVTDRPTEAEAEAAVRTLLRWTGDNPNREGLVDTPKRVVKAYREMFGGYDKCPAEELGRTFEEVAGYDDLVLVKDITFHSHCEHHMVPIIGKAHVGYLPDGKVVGLSKIARVVDIFAQRLQTQEAMTAQIAGVIQDVLNPRGVAVMLEAEHMCMAMRGIRKEGSTTLTSTFTGVFKDTPEEQVRFVTMVRGGRG

SEQ ID NO: 10578 - protein, 211 aa, Mesorhizobium tianshanense
  misc_feature (1)..(211): tr|A0A562PDS6|A0A562PDS6_9RHIZ GTP cyclohydrolase 1 OS= Mesorhizobium tianshanense OX=39844 GN=folE PE=3 SV=1
MDAVIKKFMPPSAYLEKPVTNRPSEAEAEAAVRTLLRWAGDNPDREGLVDTPKRVVKAYREMFGGYDKCPAEELGRTFEEVAGYDDLVLVKDISFHSHCEHHMVPIIGKAHVGYLPDGKVVGLSKIARVVDIFAQRLQTQEAMTAQIAGVIQDVLNPRGVAVMLEAEHMCMAMRGIRKEGSTTLTSTFTGVFKDTPEEQVRFVTMVRGGRG

SEQ ID NO: 10579 - protein, 211 aa, Mesorhizobium waimense
  misc_feature (1)..(211): tr|A0A3A5K7K0|A0A3A5K7K0_9RHIZ GTP cyclohydrolase 1 OS= Mesorhizobium waimense OX=1300307 GN=folE PE=3 SV=1
MDAVIKKLMPSSAYMEKPVTDRPSEAEVEAAVRTLLRWTGDNPEREGLIDTPKRVTKAFLEMFNGYDMCPAEELGRTFEEVAGYDDLVIVRDINFHSHCEHHMVPIIGKAHVGYLPDGKVVGLSKIARVVDIFAHRLQTQEAMTAQIASVIQDVLNPRGVAVMMEAEHMCMAMRGIRKQGSTTLTSTFTGVFKDTPEEQVRFVTMVRGGGV

SEQ ID NO: 10580 - protein, 211 aa, Mesorhizobium wenxiniae
  misc_feature (1)..(211): tr|A0A271KC44|A0A271KC44_9RHIZ GTP cyclohydrolase 1 OS= Mesorhizobium wenxiniae OX=2014805 GN=folE PE=3 SV=1
MDAVIKKFMPPSAYMEKPVTDRPTEAEAEAAVRTLLRWTGDNPDREGLVDTPKRVVKAYREMFGGYDKCPAEELGRTFEEVAGYDDLVLVKDITFHSHCEHHMVPIIGKAHVGYLPDGKVVGLSKIARVVDIFAQRLQTQEAMTAQIAGVIQDVLNPRGVAVMVEAEHMCMAMRGIRKEGSTTLTSTFTGVFKDTPEEQVRFVTMVRGGRG

SEQ ID NO: 10581 - protein, 270 aa, Mesosutterella multiformis
  misc_feature (1)..(270): tr|A0A388SC47|A0A388SC47_9BURK GTP cyclohydrolase FolE2 OS=Mesosutterella multiformis OX=2259133 GN=folE2 PE=3 SV=1
MNADNSLNCALPDVQSSADGRHIPIQRVGVKSVRVPVVVASVDGPLHTVATVNMYVSLPAGQKGTHMSRFFRLLDETREPLCKPVLEDLMARMLKTLDAVSGQIEFDFPFFVRKSAPISKQSSLMSYEAGFTVTCENGETTVRERVLTPVTSLCPCSKEISRYGAHNQRSHITIDALCSEALPFEELIRYSEKNGSCELWSLLKREDEKFVTEYAYDHAKFVEDIIRDVATDLNKDARIVSYELQVENFESIHNHSAYALITHDRRTSAV

SEQ ID NO: 10582 - protein, 254 aa, Mesotoga infera
  misc_feature (1)..(254): tr|A0A117M5M5|A0A117M5M5_9BACT GTP cyclohydrolase FolE2 OS=Mesotoga infera OX=1236046 GN=folE2 PE=3 SV=1
MRDVQNDKDKRNIKINMVGIKSIEYPIVVLDRKFGTQQTVGKFDLFVDLPKDFRGTHMSRFVEVLERHHRKITPRNMESILDDMRESLKADVAHIKVEFPYFIRKNAPVSGSESFSSFGCSFNTMKDGAFDFILGVKVPVMTVCPCSKEISDRGAHNQRAEVFVSVRMNSLVWIEEIIEFVEKSSSAPIFSLLKREDEKYITEHSYDNPRFVEDLSREVVLFLQEDDRIDWYRVEVISQESIHNHEAYACIEKE

SEQ ID NO: 10583 - protein, 255 aa, Mesotoga infera
  misc_feature (1)..(255): tr|A0A3D3TNZ5|A0A3D3TNZ5_9BACT GTP cyclohydrolase FolE2 OS=Mesotoga infera OX=1236046 GN=folE2 PE=3 SV=1
MLRDVQNDKDKRNIKINMVGIKSIEYPIVVLDRKFGTQQTVGKFDLFVDLPKDFRGTHMSRFVEVLERHHRKITPRNMESILDDMRESLKADVAHIKVEFPYFIRKNAPVSGSESFSSFGCSFNTMKDGAFDFILGVKVPVMTVCPCSKEISDRGAHNQRAEVFVSVRMNSLVWIEEIIEFVEKSSSAPIFSLLKREDEKYITEHSYDNPRFVEDLSREVVLFLQEDDRIDWYRVEVISQESIHNHEAYACIEKE

SEQ ID NO: 10584 - protein, 256 aa, Mesotoga prima
  misc_feature (1)..(256): tr|I2F270|I2F270_9BACT GTP cyclohydrolase FolE2 OS=Meso toga prima MesG1.Ag.4.2 OX=660470 GN=folE2 PE=3 SV=1
MILRDVQNEKDKRNIKINMVGIKSIEYPIVVLDRKFGTQNTVGKFDLFVDLPKDFRGTHMSRFVEVLERHHKKITPRSMESILNDMRDSLKADVAHIKVEFPYFIRKKAPISGSESFSSFKCSFIAMKDGTFDFVLGVKVPVMTVCPCSKEISDRGAHNQRAEVFVSVRMNSLVWIEEIIEYVEKSASAPIFSLLKREDEKFITEHSFDNPRFVEDLSREVVLLLQDDSRINWYRVEAISQESIHNHEAYACIEKE

SEQ ID NO: 10585 - protein, 254 aa, Mesotoga sp.
  misc_feature (1)..(254): tr|A0A421CLF4|A0A421CLF4_9BACT GTP cyclohydrolase FolE2 OS=Mesotoga sp. H07pep.5.4 OX=1463664 GN=folE2 PE=3 SV =1
MRDVQNEKDKRNIKINMVGIKSIEYPIVVLDRKFGTQNTVGKFDLFVDLPKDFRGTHMSRFVEVLERHHKKITPRSMESILNDMRDSLKADVAHIKVEFPYFIRKKAPISGSESFSSFKCSFIAMKDGTFDFVLGVKVPVMTVCPCSKEISDRGAHNQRAEVFVSVRMNSLVWIEEIIEYVEKSASAPIFSLLKREDEKFITEHSFDNPRFVEDLSREVVLLLQDDSRINWYRVEAISQESIHNHEAYACIEKE

SEQ ID NO: 10586 - protein, 256 aa, Mesotoga sp.
  misc_feature (1)..(256): tr|A0A2T7N4G2|A0A2T7N4G2_9BACT GTP cyclohydrolase FolE2 OS=Mesotoga sp. Brook.08.105.5.1 OX=1421002 GN=folE2 P E=3 SV=1
MILRDVQNERDKRNIRINMVGIKSIEYPIVVLDREFGTQHTVGNFDLFVDLPTDFRGTHMSRFVEVLERHHKKITPKNMESILNDIRDSLRADVAHIKVQFPYFIRKKAPISGSESFSSFGCSFSTTKDGEFDFVLGVKVPVMTVCPCSKEISDRGAHNQRAEVFVSVRMNSLVWIEEIIEYVEKSASAPIFSLLKREDEKYITEHSFDNPRFVEDLSREVVLFLQEDDRIDWYRIEVISQESIHNHEAYACIEKE

SEQ ID NO: 10587 - protein, 221 aa, Metakosakonia sp.; identical to SEQ ID NO: 8737
  misc_feature (1)..(221): tr|A0A348DAY6|A0A348DAY6_9ENTR GTP cyclohydrolase 1 OS= Metakosakonia sp. MRY16-398 OX=2487150 GN=folE PE=3 SV= 1

SEQ ID NO: 10588 - protein, 201 aa, Metallibacterium scheffleri
  misc_feature (1)..(201): tr|A0A4S3KVH1|A0A4S3KVH1_9GAMM GTP cyclohydrolase 1 OS= Metallibacterium scheffleri OX=993689 GN=folE PE=3 SV=1
MHGNDEHNGVSRASAEEAVRTLLRWAGEDPAREGLIETPKRVVKAYGDWFSGYAEDPETYLARTFEEVAGYDELIVLRDIAFESHCEHHMAPIIGRAHVGYLPNGRVVGISKLARVVDAYARRFQVQEKLTAQIADCIERVLEPRGVAVVVDAQHQCMTTRGVHKRGVSMITSTMRGAFRDNPSTRLEFLRFIDIDGSKRT

SEQ ID NO: 10589 - protein, 209 aa, Metallibacterium scheffleri
  misc_feature (1)..(209): tr|A0A4S3KQV9|A0A4S3KQV9_9GAMM GTP cyclohydrolase 1 OS= Metallibacterium scheffleri OX=993689 GN=folE PE=3 SV=1
MLESDLVMSSAVSVAPAGIPEVRRPSRAEAEAAVRTLIRWAGDEPSREGLRATPARVVRAYEEWFSGYRQDPASLLKRTFEEVGGYDDLVMLRDIPLQSTCEHHMAAIRGVVHIAYLPNRRVVGISKLARLVEACGRRLQIQERLTAEIADTLAHVLQPHGVAVIIQASHDCMSSRGVRLHGVAMLTRRLLGQFAQEPQRREILSLLAG

SEQ ID NO: 10590 - protein, 183 aa, Unknown
  misc_feature (1)..(183): tr|A0A1X7MM81|A0A1X7MM81_9GAMM GTP cyclohydrolase 1 OS= methanotrophic bacterial endosymbiont of Bathymodiolus sp. OX=280772 GN=folE PE=3 SV=1
MMEEYFSKIIEAVGEDVTREGLVDTPARAAKAFKFLNNGYEKTLEEVLNGAIFEADTEDMVIVKDIELYSLCEHHLLPFVGKCHIAYLPDDHVLGLSKLARIVDMYARRLQIQERLTKQIADAVETAVHAKGVAVVIEAKHMCMMMRGVEKQNSVMTTSVMTGIFRKEISTRAEFLSLISRGN

SEQ ID NO: 10591 - protein, 180 aa, Unknown
  misc_feature (1)..(180): tr|A0A1D3RL66|A0A1D3RL66_9BACT GTP cyclohydrolase 1 OS= methanotrophic endosymbiont of Bathymodiolus azoricus ( Menez Gwen) OX=343232 GN=folE PE=3 SV=1
MEEHFSKIIEAIGEDVTREGLVDTPKRAAKAFEFLNNGYNKTLEEVLNGAIFEADTEDMVIIKDIELYSLCEHHLLPFVGKCHIAYLPQGKVLGLSKLARIVDMYARRLQIQEKLTKQIADAVDTAVGAKGVAVVIEAKHMCMMMRGVEKQNSVMTTSVMTGIFRKEMSTRAEFLSLINR

SEQ ID NO: 10592 - protein, 271 aa, Methylacidimicrobium cyclopophantes
  misc_feature (1)..(271): tr|A0A5E6MLN3|A0A5E6MLN3_9BACT GTP cyclohydrolase FolE2 OS=Methylacidimicrobium cyclopophantes OX=1041766 GN=f olE2 PE=3 SV=1
MNNQQTQGTLLADCQNQRDHRRIRIDRVGVKGLRHPIEVRDRSFATQSTVATMSLLVDLPHHFKGTHMSRFVEVLNAHGRLIHVKNLFSIVHALQKRLDAEVAHLVMEFPYFLEKEAPATGAVGLVDYQVRFEAAACGAQTDFVMTVVVPVTTLCPCSKAISDRGAHNQRGYVTAAIRSGEPVWIEEVIEVVEGSASSPIYSLLKRPDEKFVTEHAYDHPVFVEDLVRNVAVRLNERPEILWYRVEAENMESIHNHAAYALVEKHPGANGS

SEQ ID NO: 10593 - protein, 271 aa, Methylacidimicrobium tartarophylax
  misc_feature (1)..(271): tr|A0A5E6MCU3|A0A5E6MCU3_9BACT GTP cyclohydrolase FolE2 OS=Methylacidimicrobium tartarophylax OX=1041768 GN=fo lE2 PE=3 SV=1
MKNQDHGTLLADCQSEQDHRRIRIDRVGVKGLRHPIEVRDRSFATQSTVATVSLLVDLPHHFKGTHMSRFVEVLNAHGRLIHVKNLFSIVHALQKRLDAEVAHLIMEFPYFLEKRAPATGAEGLVDYQVRFEAAAYRTETDFVMTAVVPVTTLCPCSKAISDRGAHNQRGYVTASIRSSEPIWIEELIEIVESSASSPIYSLLKRPDEKFVTEQAFDHPVFVEDLVRNVAVRLNAHCDVLWYRVEAENMESIHNHAAYALVEKHSGDNGGG

SEQ ID NO: 10594 - protein, 266 aa, Methylacidiphilum fumariolicum
  misc_feature (1)..(266): tr|A0A5F0I2C4|A0A5F0I2C4_9BACT GTP cyclohydrolase FolE2 OS=Methylacidiphilum fumariolicum OX=591154 GN=folE2 P E=3 SV=1
MKNSLSASLADCQSQQDHRKIKIHRVGVKGLRYPIEVRDKNFESQHTVATVSLLVDLPHHFKGTHMSRFVEVLNAHGRMVHVCNVFSIVHELQKKLHAETAHVIMEFPYFIEKNAPVTGSKGLVDYQVRFEAAAYLDETDFVMWVTVPVTTLCPCSKAISDRGAHNQRGYVSVAIRFVQTIWIEDIIELVEASASSPIYSLLKRPDEKYVTELAFDNPVFVEDLVRNVALRLNANQDILWYRVEAENMESIHNHAAYACVEKELET

SEQ ID NO: 10595 - protein, 273 aa, Methylacidiphilum fumariolicum
  misc_feature (1)..(273): tr|I0K1J1|I0K1J1_METFB GTP cyclohydrolase FolE2 OS=Meth ylacidiphilum fumariolicum (strain SolV) OX=1156937 GN= folE PE=3 SV=1
MPNVSTLMKNSLSASLADCQSQQDHRKIKIHRVGVKGLRYPIEVRDKNFESQHTVATVSLLVDLPHHFKGTHMSRFVEVLNAHGRMVHVCNVFSIVHELQKKLHAETAHVIMEFPYFIEKNAPVTGSKGLVDYQVRFEAAAYLDETDFVMWVTVPVTTLCPCSKAISDRGAHNQRGYVSVAIRFVQTIWIEDIIELVEASASSPIYSLLKRPDEKYVTELAFDNPVFVEDLVRNVALRLNANQDILWYRVEAENMESIHNHAAYACVEKELET

SEQ ID NO: 10596 - protein, 266 aa, Methylacidiphilum infernorum
  misc_feature (1)..(266): tr|B3DWY5|B3DWY5_METI4 GTP cyclohydrolase FolE2 OS=Meth ylacidiphilum infernorum (isolate V4) OX=481448 GN=folE 2 PE=3 SV=1
MKNISVTALADCQSQKDHRKIKINRVGVKGLKYPIEVRDKNFESQHTVATVSLLVDLPHHFKGTHMSRFVEVLNAHGRMIHVSNVFAIVHELQRKLHAETAHVILEFPYFIEKKAPVTESKGLVDYWVRFEAAAYLDETDFVMWVTVPVTTLCPCSKAISDRGAHNQRGYVSVALRFIHTIWIEDVIEMVEASASSPIYSLLKRPDEKYVTEQAFDNPVFVEDLVRNVALRLNANPDIFWYRVEAENMESIHNHAAYACVEKGSES

SEQ ID NO: 10597 - protein, 266 aa, Methylacidiphilum kamchatkense
  misc_feature (1)..(266): tr|A0A0C1RKM3|A0A0C1RKM3_9BACT GTP cyclohydrolase FolE2 OS=Methylacidiphilum kamchatkense Kam1 OX=1202785 GN=f olE2 PE=3 SV=1
MKNSLSASLADCQSQQDHRKIKIHRVGVKGLRYPIEVRDKNFESQHTVATVSLLVDLPHHFKGTHMSRFVEVLNAHGRMVHVCNVFSIVHELQKKLHAETAHVIMEFPYFIEKIAPVTGSKGLVDYQVRFEAAAYLDETDFVMWVTVPVTTLCPCSKAISDRGAHNQRGYVSVAIRFVQTIWIEDVIEMVEASASSPIYSLLKRPDEKYVTELAFDNPVFVEDLVRNVALRLNANQDILWYRVEAENMESIHNHAAYACVEKELET

SEQ ID NO: 10598 - protein, 266 aa, Methylacidiphilum sp.
  misc_feature (1)..(266): tr|A0A4Y8PG84|A0A4Y8PG84_9BACT GTP cyclohydrolase FolE2 OS=Methylacidiphilum sp. Yel OX=1847730 GN=folE2 PE=3 SV=1
MKNSLSASLADCQSQRDHRKIKIHRVGVKGLRYPIEVRDKNFESQHTVATVSLLVDLPHHFKGTHMSRFVEVLNAHGRMVHVCNVFSIVHELQKKLHAETAHVIMEFPYFIEKIAPVTGSKGLVDYQVRFEAAAYLDETDFVMWVTVPVTTLCPCSKAISDRGAHNQRGYVSVAIRFVQTIWIEDVIEMVEASASSPIYSLLKRPDEKYVTELAFDNPVFVEDLVRNVALRLNANQDILWYRVEAENMESIHNHAAYACVEKELET

SEQ ID NO: 10599 - protein, 266 aa, Methylacidiphilum sp.
  misc_feature (1)..(266): tr|A0A4Y8PDL4|A0A4Y8PDL4_9BACT GTP cyclohydrolase FolE2 OS=Methylacidiphilum sp. Phi OX=1847729 GN=folE2 PE=3 SV=1
MKNTTTISLADCQSQKDHRKIKINRVGVKGLKYPIEVRDKNFESQHTVATVSLMVDLPHHFKGTHMSRFVEVLNSHGRMVHVSNVFSIVHELQKKLHAETAHIILEFPYFIEKKAPVTGSKGLVDYWVRFEAAAYLNETDFVMWVTVPVTTLCPCSKAISERGAHNQRGYVSVALRFNHTIWIEDVIEMVESSASSPIYSLLKRPDEKYVTEQAFDNPVFVEDLVRNVALRFNANQDIFWYRIEAENMESIHNHAAYACVEKGELP

SEQ ID NO: 10600 - protein, 294 aa, Methylarcula marina
  misc_feature (1)..(294): tr|A0A422QTL8|A0A422QTL8_9RHOB GTP cyclohydrolase FolE2 OS=Methylarcula marina OX=72022 GN=folE2 PE=3 SV=1
MYKAGLPDLQNGPASLIVGARAPIQHVGISNFRLPIRYQTRDGGEIMLETSVTGTVSLEADRKGINMSRIMRSFYGHADHLFSVKVLEAALDDYKADLEAFDARIQMRFSYPIQVDSLRSGLSGWQYYDIAQEVIEHKGERLRVMHFDYVYSSTCPCSLELSEHARETRSRLATPHSQRSIARISLVMNGPEKIWFEDIVELCRRAVPTETQVMVKREDEQAFAELNAANPIFVEDAVRAFAKELQAEPRIGDFRIIASHQESLHSHDAVSLLVDGPTFAQSSLDPMTFAGLRA

SEQ ID NO: 10601 - protein, 297 aa, Methylibium petroleiphilum
  misc_feature (1)..(297): sp|A2SJ45|GCH4_METPP GTP cyclohydrolase FolE2 OS=Methyl ibium petroleiphilum (strain ATCC BAA-1232 / LMG 22953 / PM1) OX=420662 GN=folE2 PE=3 SV=2
MTHASALGLTQHIPDTQSERDERHLAIQRVGVKEVRYPLTVRIGEQLSPTVASWSLDVALPAEQKGTHMSRFVAWLDALSASGKPLDATALRDELAVMLDKLHAVEGRIEARFPFFIRKHAPVSGVSSLLDYQGAWIAEHRAGSGTTVWCEVVVPVKSLCPCSKEISDYGAHNQRSHVTIRAELMEPPGDRRRPPPPGGGESTRERPVVDSAVELGFEALVRFAEASASSEIWGLLKRPDEKWITERAYENPKFVEDLVRDVALRLNADARIGRYRVEVENFESIHNHSAFAVIERE

SEQ ID NO: 10602 - protein, 243 aa, Methylibium petroleiphilum
  misc_feature (1)..(243): tr|A2SEP6|A2SEP6_METPP GTP cyclohydrolase OS=Methylibiu m petroleiphilum (strain ATCC BAA-1232 / LMG 22953 / PM 1) OX=420662 GN=Mpe_A1074 PE=4 SV=1
MNAPHTLPSLRAVPDDEGVPVSVKIRERIKSQRERFHANDNIAEFIEPGELEQLLDEVAGKMRGVLDSLVIDTESDHNTQDTARRVAKMYLNEVFKGRYVHEPAVTEFPNVEHLNELMIIGPITVRSACSHHFCPIMGRVWIGVMPNEHSNLIGLSKYARLTEWIMSRPQIQEEAVTQVADLLQDKMSPDGLAIVMEADHFCMQWRGVRDLDSKMINSVMRGVFLKDANLRREFLSLVNNKKG

SEQ ID NO: 10603 - protein, 297 aa, Methylibium sp.
  misc_feature (1)..(297): tr|A0A0Q7D1D9|A0A0Q7D1D9_9BURK GTP cyclohydrolase FolE2 OS=Methylibium sp. Root1272 OX=1736441 GN=folE2 PE=3 S V=1
MTHVSALGLTQHIPDTQSERDERHLAIQRVGVKDVRYPLTVRIGEQLSPTVANWSLDVALPAEQKGTHMSRFVAWLDALSASGKPLDEAALRDELAVMLDKLHAVEGRIEARFPFFIRKHAPVSGVSSLLDYQGAWIAERRAGVGTTVWCEVVVPVKSLCPCSKEISDYGAHNQRSHVTIRAELMEPPGDRRRPPPPGGGESTRERPVVDSAVELGFDALVRFAEESASSEIWGLLKRPDEKWITERAYENPKFVEDLVRDVALRLDADSRIGRYRVEVENFESIHNHSAFAVIERE

SEQ ID NO: 10604 - protein, 194 aa, Methylibium sp.
  misc_feature (1)..(194): tr|W7WAP3|W7WAP3_9BURK GTP cyclohydrolase 1 OS=Methylib ium sp. T29-B OX=1437443 GN=folE_2 PE=4 SV=1
MNAPHTLPSLRAVPDDEGVPVSVKIRERIKSQRERFHANDNIAEFIEPGELEQLLDEVAGKMRGVLDSLVIDTESDHNTQDTARRVAKMYLNEVFKGRYVHEPAVTEFPNVEHLNELMIIGPITVRSACSHHFCPIMGRVWIGVMPNEHSNLIGLSKYARLTEWIMSRPQIQEEAVTQVADLLQDKMSPTAWRS

SEQ ID NO: 10605 - protein, 266 aa, Methylobacillus flagellatus
  misc_feature (1)..(266): sp|Q1GZD6|GCH4_METFK GTP cyclohydrolase FolE2 OS=Methyl obacillus flagellatus (strain KT / ATCC 51484 / DSM 687 5) OX=265072 GN=folE2 PE=3 SV=1
MNQPSIPPIEDVQNTPDTRQLAIDKVGIKSIRHPVKVKDKTGGVQHTVATFNMYVYLPHNFKGTHMSRFVEILNNNEREISVESFESILRAMVERLDAESGHVEMTFPYFVNKTAPVSGVQSLSDYEVTFIGEINKGKYDITVKVVVPVTSLCPCSKKISDYGAHNQRSHVTVTALINDFIWVEDIIRMVEDQASCEVYGLLKRPDEKYVTERAYDNPKFVEDIVRDVAAQLNIETRIVSYTVESENFESIHNHSAYALIEKDKRK

SEQ ID NO: 10606 - protein, 266 aa, Methylobacillus rhizosphaerae
  misc_feature (1)..(266): tr|A0A238Y2W1|A0A238Y2W1_9PROT GTP cyclohydrolase FolE2 OS=Methylobacillus rhizosphaerae OX=551994 GN=folE2 PE =3 SV=1
MNQPSIPPIEDVQNTPDTRQLAIDKVGIKSIRHPVKVKDKTGGVQHTVANFNMYVFLPHNFKGTHMSRFVEILNNNEREISVESFESILRAMVKRLDAESGHVEMTFPYFVNKTAPVSGVQSLSDYEVTFIGEVNQGKYDITVKVVVPVTSLCPCSKKISDYGAHNQRSHVTVTALINDFIWVEDIIRLVEDQASCEVFGLLKRPDEKYVTERAYDNPKFVEDIVRDVAAQLNKEPKIVTYTVESENFESIHNHSAYALIEKDKRK

SEQ ID NO: 10607 - protein, 267 aa, Methylobacillus sp.
  misc_feature (1)..(267): tr|A0A1A9NNJ3|A0A1A9NNJ3_9PROT GTP cyclohydrolase FolE2 OS=Methylobacillus sp. MM3 OX=1848039 GN=folE2 PE=3 SV =1
MNHPATLPIEDVQNTPDVRHLAIDKVGIKSIRHPVKVQDKTGGVQHTVAVFNMYVHLPHNFKGTHMSRFVEILNMNEREISIENFETILREMVKRLEAESGHIEMTFPYFVNKAAPVSGVQSLLDYEVTFIGEIKDGKYDITVKVLVPVTSLCPCSKKISDYGAHNQRSHVTVTALINDFIWVEDLIGLVEEQASCQLYGLLKRPDEKFVTERAYDNPKFVEDMVRDVAAQLNAEPRIDAYVVESENFESIHNHSAYALIERNKRQN

SEQ ID NO: 10608 - protein, 269 aa, Methylobacillus sp.
  misc_feature (1)..(269): tr|A0A1A9NPX4|A0A1A9NPX4_9PROT GTP cyclohydrolase FolE2 OS=Methylobacillus sp. MM3 OX=1848039 GN=folE2 PE=3 SV =1
MNLPIDFPVTAVEDVQNTPDLRRLAIDQVGIKGIRHPIRIPDQTGAEQHTIATINMYVYLPEHFKGTHMSRFIEILNLNERALSIGNFRTILEEMAERLETNSGHIEMQFPFFVNKSAPVSGVQSLMDYEVSLIGDIRDGECAITLKLLVPVTSLCPCSKKISQYGAHNQRSHVTITARINESITLEDLIRVVEEEASSELYGLLKRPDEKFVTEYAYDNPKFVEDMVRDVAAKLSADPRIDRYSVECENFESIHNHSAYAVIHGGNQS

SEQ ID NO: 10609 - protein, 180 aa, Methylobacter sp.
  misc_feature (1)..(180): tr|A0A522WW33|A0A522WW33_9GAMM GTP cyclohydrolase 1 OS= Methylobacter sp. OX=2051955 GN=folE PE=3 SV=1
MEQHFAKIIEAVGEDLNREGLLDTPKRAAKAFKFLNNGYDKTLEEVLNGAIFNADTEDMVIVKDIELYSLCEHHLLPFIGKCHVGYLPQGKVMGLSKVARVIDMYARRLQIQEKLTKQIADAIELATGARGVAVVIEAKHLCMMMRGVEKQNSVMTTSVMTGIFRKEISTRSEFLNLINR

SEQ ID NO: 10610 - protein, 181 aa, Methylobacter sp.
  misc_feature (1)..(181): tr|A0A2P5L3P9|A0A2P5L3P9_9GAMM GTP cyclohydrolase 1 OS= Methylobacter sp. OX=2051955 GN=folE PE=3 SV=1
MESFFSKIIQDIGEDINREGLIDTPKRAAEAFRFLTNGYDKSLDVVLNDAIFTADTEDMVIVKNIELYSLCEHHLLPFIGQCHVGYLPRGKVLGLSKVARVIDMYARRLQIQEKLTKQIADAIETATGARGVAVVIEAKHLCMMMRGVEKQNSVMTTSVMTGVFRKEISTRSEFLNLINRS

SEQ ID NO: 10611 - protein, 180 aa, Methylobacter tundripaludum
  misc_feature (1)..(180): tr|G3J0T1|G3J0T1_METTV GTP cyclohydrolase 1 OS=Methylob acter tundripaludum (strain ATCC BAA-1195 / DSM 17260 / SV96) OX=697282 GN=folE PE=3 SV=1
MEQHFASIIEAVGEDLTREGLIDTPKRAAKAFKFLNNGYEKTLEEVLNGAIFTADTEDMVIVKDIELYSLCEHHLLPFIGKCHVGYLPKGKVMGLSKVARVIDMYARRLQIQEVLTKQIADAIELATGARGVAVVIEAKHLCMMMRGVEKQNSVMTTSVMTGIFRKEISTRSEFLNLINR

SEQ ID NO: 10612 - protein, 180 aa, Methylobacter tundripaludum
  misc_feature (1)..(180): tr|A0A2S6HE31|A0A2S6HE31_9GAMM GTP cyclohydrolase 1 OS= Methylobacter tundripaludum OX=173365 GN=folE PE=3 SV=1
MEEHFASIIEAVGEDLNREGLIDTPKRAAKAFKFLNNGYEKTLEEVLNGAIFTADTEDMVIVKDIELYSLCEHHLLPFIGKCHVGYLPKGKVMGLSKVARVIDMYARRLQIQEVLTKQIADAIELATGARGVAVVIEAKHLCMMMRGVEKQNSVMTTSVMTGIFRKEISTRSEFLNLINR

SEQ ID NO: 10613 - protein, 219 aa, Methylobacterium aquaticum
  misc_feature (1)..(219): tr|A0A0J6SNU4|A0A0J6SNU4_9RHIZ GTP cyclohydrolase 1 OS= Methylobacterium aquaticum OX=270351 GN=folE PE=3 SV=1
MDAVLKSLSVRAPEAADKRSDAPRPVRLAERPTRQEAEAAVRTLLRWAGDDPDREGLLETPQRVVKAYEQIFGGYRQDADAILDRVFEEVEGYSDIVLVRDIPFHSHCEHHMVPFMGHAHIAYYPRRGVVGLSKLARVVDTFARRLQTQETMTAQIAEVIDSVLHPRGVAVMVEAEHLCMAMRGVQKSGVSTITTQFTGVFKQDPTEQVRFLTLVRDRR

SEQ ID NO: 10614 - protein, 219 aa, Methylobacterium aquaticum
  misc_feature (1)..(219): tr|A0A0C6FM75|A0A0C6FM75_9RHIZ GTP cyclohydrolase 1 OS= Methylobacterium aquaticum OX=270351 GN=folE PE=3 SV=1
MDAVLKSLSVRAPEAADKRSDAPRPERVTERPTRQEAEAAVRTLLRWAGDDPEREGLIETPQRVVKAYEQIFGGYRQDADAILDRVFEEVEGYSDIVLVRDIPFHSHCEHHMVPFMGHAHIAYYPRRGVVGLSKLARVVDTFARRLQTQETMTAQIADVIDSVLHPRGVAVMVEAEHLCMAMRGVQKSGVSTITTQFTGVFKQDPTEQVRFLTLVRDRR

SEQ ID NO: 10615 - protein, 278 aa, Methylobacterium brachiatum
  misc_feature (1)..(278): tr|A0A3G2V8P7|A0A3G2V8P7_9RHIZ GTP cyclohydrolase 1 OS= Methylobacterium brachiatum OX=269660 GN=folE PE=3 SV=1
MYAKPDSTTMKSRVARAGDAMDAALKSLSYRGEGNGLDRGGLDGRDLGQSLTGMRNDNRPVDDGRPAPVEIAPEPASATRVPEGIETGRPSRAEAEAAVRTLLRWAGDDPNREGLRDTPARVTKAFGQLFGGYEMDAEALLARVFEEVEGYSDIVLVRDIPFYSHCEHHMVPFMGLAHIAYYPTRGVVGLSKLARVVDTFARRLQTQETMTAQIADVIESILKPRGVAVMVEAEHLCMAMRGVQKAGVSTITSQFRGVFKDDASEQVRFLTLVRGGTK

SEQ ID NO: 10616 - protein, 258 aa, Methylobacterium brachiatum
  misc_feature (1)..(258): tr|A0A1I3I0C1|A0A1I3I0C1_9RHIZ GTP cyclohydrolase 1 OS= Methylobacterium brachiatum OX=269660 GN=folE PE=3 SV=1
MDAALKSLSYRGEGNGLDRGGLDGRDLGQSLTGMRNDNRPVDDGRPAPVEIAPEPASATRVPDGIETGRPSRAEAEAAVRTLLRWAGDDPNREGLRDTPARVTKAFGQLFGGYEMDAEALLARVFEEVEGYSDIVLVRDIPFYSHCEHHMVPFMGLAHIAYYPTRGVVGLSKLARVVDTFARRLQTQETMTAQIADVIESILKPRGVAVMVEAEHLCMAMRGVQKAGVSTITSQFRGVFKDDASEQVRFLTLVRGGTK

SEQ ID NO: 10617 - protein, 219 aa, Methylobacterium currus
  misc_feature (1)..(219): tr|A0A2R4WVP0|A0A2R4WVP0_9RHIZ GTP cyclohydrolase 1 OS= Methylobacterium currus OX=2051553 GN=folE PE=3 SV=1
MDAVLKSLSVRAPEAADKRSDAPRPERVTERPTRQEAEAAVRTLLRWAGDDPEREGLLETPQRVVKAYEQIFGGYRQDADAILDRVFEEVEGYSDIVLVRDIAFHSHCEHHMVPFMGRAHIAYYPRRGVVGLSKLARVVDAFARRLQTQETMTAQIADTIDSVLHPRGVAVMVEAEHLCMAMRGVQKSGVSTITTQFTGVFKQDPNEQVRFLTLVRDRR

SEQ ID NO: 10618 - protein, 262 aa, Methylobacterium dankookense
  misc_feature (1)..(262): tr|A0A564FSL7|A0A564FSL7_9RHIZ GTP cyclohydrolase 1 OS= Methylobacterium dankookense OX=560405 GN=folE PE=3 SV= 1
MYAKPDSTTMKSRVARAGDAMDAALKSLSYRTADDAQGLTLMRNDNARRPEPVEVAPEPASATRVPEGIALGRPSREEAEAAVRTLLRWAGDDPNREGLIDTPARVVKAYGQLFGGYEVDAEALLERVFEEVEGYSDIVLVRDIPFYSHCEHHMVPFMGLAHIAYYPTRGVVGLSKLARVVDTFARRLQTQETMTAQIADVIESILKPRGVAVLVEAEHLCMAMRGVQKAGVSTITSQFRGVFKDDPSEQVRFLTLVRGGKG

SEQ ID NO: 10619 - protein, 219 aa, Methylobacterium frigidaeris
  misc_feature (1)..(219): tr|A0A2G8MA41|A0A2G8MA41_9RHIZ GTP cyclohydrolase 1 OS= Methylobacterium frigidaeris OX=2038277 GN=folE PE=3 SV =1
MDAVLKSLSVRAPEAADKRSDAPRPERVTERPTRQEAEAAVRTLLRWAGDDPEREGLLETPQRVVKAYEQIFGGYRQDADAILDRVFEEVEGYSDIVLVRDIAFHSHCEHHMVPFMGKAHIAYYPRRGVVGLSKLARVVDAFARRLQTQETMTAQIAETIDSVLHPRGVAVMVEAEHLCMAMRGVQKSGVSTITTQFTGVFKQDPTEQVRFLTLVRDRR

SEQ ID NO: 10620 - protein, 261 aa, Methylobacterium gnaphalii
  misc_feature (1)..(261): tr|A0A512JHS4|A0A512JHS4_9RHIZ GTP cyclohydrolase 1 OS= Methylobacterium gnaphalii OX=1010610 GN=folE PE=3 SV=1
MYAKPDSTTMKTRVARAGDAMDAALKSLSYGMSDESRRSDAAALMRNDNDAQADIAPIPESAQRVPNEIALGRPSRQEAEAAVRTLLRWAGDDPTREGLIDTPARVTKAYEQLFSGYKLDADSLLERVFEEVEGYSDVVLVRDIPFYSHCEHHMVPFMGLAHVAYYPSKGVVGLSKLARVVDVFAKRLQTQETMTAQIADTIESILKPRGCAVMIEAEHLCMAMRGVQKAGVSTITTQFRGVYKDDASEQVRFLTLVRNKP

SEQ ID NO: 10621 - protein, 280 aa, Methylobacterium gossipiicola
  misc_feature (1)..(280): tr|A0A1I2VYN8|A0A1I2VYN8_9RHIZ GTP cyclohydrolase 1 OS= Methylobacterium gossipiicola OX=582675 GN=folE PE=3 SV =1
MYAKPDSNTMTTRIARAEDAMDAALKSLSYRLTETEDSRMAQKIPEAARPAAVPAPLNGLRNDNAPAPAPTAEIAPLPASAKRVPDAIATGRPSREEAEAAVRTLLRWAGDDPNREGLRDTPARVAKAYGQLFGGYEQDADALLERVFEEVEGYSDIVLVRDIPFYSHCEHHMVPFMGLAHIAYYPTKGVVGLSKLARVVDTFARRLQTQETMTAQIADVIESILKPRGIAVMVEAEHLCMAMRGVQKAGVSTITTQFRGAFRNDPNEQVRFLTLVRNKS

SEQ ID NO: 10622 - protein, 262 aa, Methylobacterium haplocladii
  misc_feature (1)..(262): tr|A0A512IUE7|A0A512IUE7_9RHIZ GTP cyclohydrolase 1 OS= Methylobacterium haplocladii OX=1176176 GN=folE PE=3 SV =1
MYAKPDSTTMKTRVARAGDAMDAALKSLSYGMSDENRRADAVALMRNDNDARADIAPLPESAQRVPNEVALGRPSRQEAEAAVRTLLRWAGDDPTREGLIDTPARVAKAYEQLFAGYKMDADTLLERVFEEVEGYSDVVLVRDIPFYSHCEHHMVPFMGLAHVAYYPSKGVVGLSKLARVVDAFAKRLQTQETMTAQVADTIEAILKPRGCAVMIEAEHLCMAMRGVQKAGVSTITTQFRGVYKDDASEQVRFLTLVRGGKN

SEQ ID NO: 10623 - protein, 219 aa, Methylobacterium indicum
  misc_feature (1)..(219): tr|A0A0J6R7H0|A0A0J6R7H0_9RHIZ GTP cyclohydrolase 1 OS= Methylobacterium indicum OX=1775910 GN=folE PE=3 SV=1
MDAVLKSLSVRAPEAADKRSDAPRPAPVTERPTRQEAEAAVRTLLRWAGDDPDREGLIETPKRVVKAYEQIFGGYRQDADAILDRVFEEVEGYSDIVLVRDIPFHSHCEHHMVPFMGHAHIAYYPRRGVVGLSKLARVVDTFARRLQTQETMTAQIADVIDSVLHPRGVAVMVEAEHLCMAMRGVQKSGVSTITTQFTGVFKQDPTEQVRFLTLVRDRR

SEQ ID NO: 10624 - protein, 263 aa, Methylobacterium mesophilicum
  misc_feature (1)..(263): tr|M7YNM9|M7YNM9_9RHIZ GTP cyclohydrolase 1 OS=Methylob acterium mesophilicum SR1.6/6 OX=908290 GN=folE PE=3 SV =1
MKSRIARAGDAMDAALKSLSYQGDGQGFDRNGIDGQGLNGMRNDNRPADDGRAVDIAPEPASATRVPDGIETGRPSRAEAEAAVRTLLRWAGDDPAREGLLDTPARVAKAYEQLFGGYAVDAEKLLERVFEEVEGYSDIVLVRDIPFHSHCEHHMVPFMGLAHIAYYPTRGVVGLSKLARVVDTFARRLQTQETMTAQIADVIESILKPRGVAVMVEAEHLCMAMRGVQKAGVSTITSQFRGVFKDNANEQVRFLTLVRGGAK

SEQ ID NO: 10625 - protein, 202 aa, Methylobacterium nodulans
  misc_feature (1)..(202): tr|B8IWN6|B8IWN6_METNO GTP cyclohydrolase 1 OS=Methylob acterium nodulans (strain LMG 21967 / CNCM I-2342 / ORS 2060) OX=460265 GN=folE PE=3 SV=1
MGNIDTTAKIAAGAILQRREAMAASVRSLLVCVGEDVDREGLRDTPARVARMYEEVFSGLNEDPVLHLKTQFCDDGHEEIVVVRDIEFYSMCEHHLVPFFGKAHVAYVPQGGRLTGLSKIARCVQTIARRPQLQERLTSQIVAALEEALTPLGAMALVEAEHLCMAMRGVRSSHSFTRTLVASGCLKTDPEQRAEAFQMLKG

SEQ ID NO: 10626 - protein, 219 aa, Methylobacterium nodulans
  misc_feature (1)..(219): tr|B8IKC8|B8IKC8_METNO GTP cyclohydrolase 1 OS=Methylob acterium nodulans (strain LMG 21967 / CNCM I-2342 / ORS 2060) OX=460265 GN=folE PE=3 SV=1
MDAVLKSLSVRLPDAADRRSDVARPERITERPTRQEAEAAVRTLIRWAGDDPEREGLRETPQRVARAYEQIFGGYRQDPTNILDRVFEEVEGYGDIVLVRDIPFHSHCEHHMVPFIGKAHIAYYPRRGVVGLSKLARVVDAFARRLQTQETMTAQIAETIDSVLNPRGVAVMVEAEHLCMAMRGVQKAGVSTLTTQFTGVFKQDPHEQVRFLTLVRDQR

SEQ ID NO: 10627 - protein, 272 aa, Methylobacterium organophilum
  misc_feature (1)..(272): tr|A0A2U1EAT7|A0A2U1EAT7_METOR GTP cyclohydrolase 1 OS= Methylobacterium organophilum OX=410 GN=folE PE=3 SV=1
MYAKPDSTPMKSRIARAGDAMDAALKSLSYQGDGQGFDRNGIEGQGLNGMRNDNRPADDGRPVEVAPEPASATRVPDGIETGRPSRAEAEAAVRTLLRWAGDDPTREGLLDTPARVTKAYEQLFGGYAVDAEKLLERVFEEVEGYSDIVLVRDIPFHSHCEHHMVPFMGLAHIAYYPTRGVVGLSKLARVVDTFARRLQTQETMTAQIADVIESILKPRGVAVMVEAEHLCMAMRGVQKAGVSTITSQFRGVFKDNANEQVRFLTLVRGGAK

SEQ ID NO: 10628 - protein, 252 aa, Methylobacterium oryzae
  misc_feature (1)..(252): tr|A0A089NYN5|A0A089NYN5_9RHIZ GTP cyclohydrolase 1 OS= Methylobacterium oryzae CBMB20 OX=693986 GN=folE PE=3 S V=1
MDAALKSLSYQGDGQGFGRNGSDGQGLNGMRNDNRPVDDGRPIEVAPEPASATRVPDGIETGRPSRAEAEAAVRTLLRWAGDDPTREGLLDTPARVTKAYEQLFGGYGVDAEKLLERVFEEVEGYSDIVLVRDIPFHSHCEHHMVPFMGLAHIAYYPTRGVVGLSKLARVVDTFARRLQTQETMTAQIADVIESILKPRGVAVMVEAEHLCMAMRGVQKAGVSTITSQFRGVFKDNANEQVRFLTLVRGGAK

SEQ ID NO: 10629 - protein, 279 aa, Methylobacterium oxalidis
  misc_feature (1)..(279): tr|A0A512JC68|A0A512JC68_9RHIZ GTP cyclohydrolase 1 OS= Methylobacterium oxalidis OX=944322 GN=folE PE=3 SV=1
MIPGPGRFDAMYAKPDSTPMTARVARAGDAMDAALKSLSYPTADGSLPVTVRDLNGMRNDNAPALTPVRPVEVAPQPPSAQRVPNEIALGRPSREEAEAAVRTLLRWAGDDPTREGLVDTPARVVKAYDQLFGGYRQDADALLERVFEEVEGYSDVVLVRDIPFYSHCEHHMVPFMGLAHIAYYPTKGVVGLSKLARVVDTFARRLQTQETMTAQIADVIESILKPRGVAVMVEAEHLCMAMRGVQKAGVSTITTQFKGVFKTDPNEQVRFLTLVRNKG

SEQ ID NO: 10630 - protein, 272 aa, Methylobacterium phyllostachyos
  misc_feature (1)..(272): tr|A0A1H0E4E1|A0A1H0E4E1_9RHIZ GTP cyclohydrolase 1 OS= Methylobacterium phyllostachyos OX=582672 GN=folE PE=3 SV=1
MYAKPDSTPMKSRIARAGDAMDAALKSLSYPSSGQGFPPNGIDGQGLDGMRNDNRPVDEARPVEVAPEPASATRVPDGIETGRPSRAEAEAAVRTLLRWAGDDPTREGLLDTPARVTKAYEQLFGGYGVDAEKLLERVFEEVEGYSDIVLVRDIPFHSHCEHHMVPFMGLAHIAYYPTRGVVGLSKLARVVDTFARRLQTQETMTAQIADVIESILKPRGVAVMVEAEHLCMAMRGVQKAGVSTITSQFRGVFKDNANEQVRFLTLVRGGAK

SEQ ID NO: 10631 - protein, 219 aa, Methylobacterium platani
  misc_feature (1)..(219): tr|A0A179SEY8|A0A179SEY8_9RHIZ GTP cyclohydrolase 1 OS= Methylobacterium platani OX=427683 GN=folE PE=3 SV=1
MDAVLKSLSVRAPEAADKRSDAPRPERVTERPTRQEAEAAVRTLLRWAGDDPEREGLLETPQRVVKAYEQIFGGYRQDADAILDRVFEEVEGYSDIVLVRDIPFHSHCEHHMVPFMGHAHIAYYPRRGVVGLSKLARVVDAFARRLQTQETMTAQIADTIDSVLHPRGVAVMVEAEHLCMAMRGVQKSGVSTITTQFTGVFKQDPTEQVRFLTLVRDRR

SEQ ID NO: 10632 - protein, 258 aa, Methylobacterium pseudosasicola
  misc_feature (1)..(258): tr|A0A1I4HGB3|A0A1I4HGB3_9RHIZ GTP cyclohydrolase 1 OS= Methylobacterium pseudosasicola OX=582667 GN=folE PE=3 SV=1
MDAALKSLSYRGEGNGLDRGGLDGRDLGQSLTGMRNDNRPVDDGRPAAVEVAPEPASATRVPEGIETGRPSRAEAEAAVRTLLRWAGDDPAREGLRDTPARVTKAYEQLFGGYDMDAEALLARVFEEVEGYSDIVLVRDIPFYSHCEHHMVPFMGLAHIAYYPTRGVVGLSKLARVVDTFARRLQTQETMTAQITDVIESILKPRGVAVMVEAEHLCMAMRGVQKAGVSTITSQFRGVFKDDANEQVRFLTLVRGGTK

SEQ ID NO: 10633 - protein, 272 aa, Methylobacterium radiotolerans; identical to SEQ ID NO: 10627
  misc_feature (1)..(272): tr|A0A3S4AGC7|A0A3S4AGC7_9RHIZ GTP cyclohydrolase 1 OS= Methylobacterium radiotolerans OX=31998 GN=folE PE=3 SV =1

SEQ ID NO: 10634 - protein, 272 aa, Methylobacterium radiotolerans
  misc_feature (1)..(272): tr|B1M608|B1M608_METRJ GTP cyclohydrolase 1 OS=Methylob acterium radiotolerans (strain ATCC 27329 / DSM 1819 / JCM 2831 / NBRC 15690 / NCIMB 10815 / 0-1) OX=426355 GN =folE PE=3 SV=1
MYAKPDSTPMKSRIARAGDAMDAALKSLSYQGDGQGFDRNGIDGQGLNGMRNDNRPADDGRPVEVAPEPTSATRVPDGIETGRPSRAEAEAAVRTLLRWAGDDPTREGLLDTPARVTKAYEQLFGGYAVDAEKLLERVFEEVEGYSDIVLVRDIPFHSHCEHHMVPFMGLAHIAYYPTRGVVGLSKLARVVDTFARRLQTQETMTAQIADVIESILKPRGVAVMVEAEHLCMAMRGVQKAGVSTITSQFRGVFKDNANEQVRFLTLVRGGAK

SEQ ID NO: 10635 - protein, 219 aa, Methylobacterium sp.
  misc_feature (1)..(219): sp|B0U881|GCH1_METS4 GTP cyclohydrolase 1 OS=Methylobac terium sp. (strain 4-46) OX=426117 GN=folE PE=3 SV=1
MDAVLKSLSVRLPDAADKRSDTGRPERVTERPTRQEAEAAVRTLIRWAGDDPEREGLRETPQRVARAYEQIFGGYRQEPTHILDRVFEEVEGYGDIVLVRDIPFHSHCEHHMVPFIGRAHIAYYPRRGVVGLSKLARVVDAFARRLQTQETMTAQIADTIDAVLNPRGVAVMVEAEHLCMAMRGVQKAGVSTLTTQFTGVFKQDPHEQVRFLTLVRDQR

SEQ ID NO: 10636 - protein, 219 aa, Methylobacterium sp.
  misc_feature (1)..(219): tr|A0A4Z0NQB4|A0A4Z0NQB4_9RHIZ GTP cyclohydrolase 1 OS= Methylobacterium sp. 6HR-1 OX=1141884 GN=folE PE=3 SV=1
MDAVLKSLSVRAPEAADKRSDAPRPERITERPTRQEAEAAVRTLLRWAGDDPEREGLRETPQRVAKAYEQIFGGYRQDPDAILDRVFEEVEGYSDIVLVRDIAFHSHCEHHMVPFMGKAHIAYYPRRGVVGLSKLARVVDAFARRLQTQETMTAQIADTIDSVLHPRGVAVMVEAEHLCMAMRGVQKSGVSTITTQFTGVFKQDPTEQVRFLTLVRDRR

SEQ ID NO: 10637 - protein, 219 aa, Methylobacterium tarhaniae
  misc_feature (1)..(219): tr|A0A0J6TG76|A0A0J6TG76_9RHIZ GTP cyclohydrolase 1 OS= Methylobacterium tarhaniae OX=1187852 GN=folE PE=3 SV=1
MDAVLKSLSVRAPEAADKRSDAPRPERVTERPTRQEAEAAVRTLLRWAGDDPEREGLLETPQRVVKAYEQIFGGYRQDADAILDRVFEEVEGYSDIVLVRDIAFHSHCEHHMVPFMGKAHIAYYPRRGVVGLSKLARVVDAFARRLQTQETMTAQIADTIDSVLHPRGVAVMLEAEHLCMAMRGVQKSGVSTITTQFTGVFKQDPTEQVRFLTLVRDRR

SEQ ID NO: 10638 - protein, 219 aa, Methylobacterium variabile
  misc_feature (1)..(219): tr|A0A0J6T2M4|A0A0J6T2M4_9RHIZ GTP cyclohydrolase 1 OS= Methylobacterium variabile OX=298794 GN=folE PE=3 SV=1
MDAVLKSLSVRAPEAADKRSDAPRPERVTERPTRQEAEAAVRTLLRWAGDDPEREGLRETPQRVVKAYEQIFGGYRQDADAILDRVFEEVEGYSDIVLVRDIAFHSHCEHHMVPFMGKAHIAYYPRRGVVGLSKLARVVDAFARRLQTQETMTAQIAETIDSVLHPRGVAVMVEAEHLCMAMRGVQKSGVSTITTQFTGVFKQDPTEQVRFLTLVRDRR

SEQ ID NO: 10639 - protein, 210 aa, Methylobrevis pamukkalensis
  misc_feature (1)..(210): tr|A0A1E3H0Y2|A0A1E3H0Y2_9RHIZ GTP cyclohydrolase 1 OS= Methylobrevis pamukkalensis OX=1439726 GN=folE PE=3 SV= 1
MDVLINPAARDGEDRKATVKATRPTREEAEAAVRVLIAWAGDDPDREGLLDTPKRVAKAYGELFGGYDQNAPKMLERVFEEVGGYDDMILVRDIPFFSHCEHHMVPFIGKAHIGYYPNEGVVGLSKLARVVDAYARRLQTQENLTAQIVGAIDETLRPRGVAVMIEAEHQCMTMRGVQKHGVSTLTTQFTGVFRDDPTEQVRFMTLVRSR

SEQ ID NO: 10640 - protein, 185 aa, Methylocaldum marinum
  misc_feature (1)..(185): tr|A0A286P4E5|A0A286P4E5_9GAMM GTP cyclohydrolase 1 OS= Methylocaldum marinum OX=1432792 GN=folE PE=3 SV=1
MQNELEHLFSNIIQALGEDVNREGLVDTPKRAAAAFRFLNSGYNQRLERVLNNAIFEADTEDMVIVKDIELYSLCEHHLLPFIGKCHVAYLPKGKVIGLSKIARIVEMYARRLQIQERLTKQIADAIQTAVNPVGVAVVIEAKHLCMMMRGVEKQNSVMTTSSMLGLFRKQISTRSEFLNLINRK

SEQ ID NO: 10641 - protein, 185 aa, Methylocaldum sp.
  misc_feature (1)..(185): tr|A0A4R7ACG5|A0A4R7ACG5_9GAMM GTP cyclohydrolase 1 OS= Methylocaldum sp. 0917 OX=2485163 GN=folE PE=3 SV=1
MQNVMEHLFSQIIQSLGEDITREGLVDTPKRAAAAFRFLNSGYNQRLERVLNNAVFEADTEDMVIVKDIELYSLCEHHLLPFIGKCHVAYLPKGKVIGLSKIARIVEMYARRLQIQERLTKQIADAIQTAIDPAGVAVVIEAKHLCMMMRGVEKQNSVMTTSSMLGLFRKQISTRSEFLDLINRK

SEQ ID NO: 10642 - protein, 190 aa, Methylocapsa palsarum
  misc_feature (1)..(190): tr|A0A1I3YRR9|A0A1I3YRR9_9RHIZ GTP cyclohydrolase 1 OS= Methylocapsa palsarum OX=1612308 GN=folE PE=3 SV=1
MAKPTQAEAEAAVKVLIEWAGDDPGREGLLDTPARVARSYRELFAGYSAEPRDYLTRTFEEVAGYDELVVLRDIRVVSFCEHHMLPVIGRAHVGYLPRKRVVGISKLARVVHGFARRLQIQEKLTAEIAESIQDILEPQGVGVVIEAEHSCMTLRGVNTPGSTLTTSRLLGVIRDDPRTREEFLRLTRGA

SEQ ID NO: 10643 - protein, 212 aa, Methylocapsa palsarum
  misc_feature (1)..(212): tr|A0A1I4C397|A0A1I4C397_9RHIZ GTP cyclohydrolase 1 OS= Methylocapsa palsarum OX=1612308 GN=folE PE=3 SV=1
MDDVVKSLFERPQPQLDQSPPPRPSREEAEAAVEVLLRWTGDNTSREGLRDTPKRVVKAFEEFFSGYHEDAASVLERMFEEVHGYDDIVLVRDIPFTSHCEHHVVPFFGVAHIAYYPSEQGVVGLSKLARLVDVFAKRLQTQEALTAQIIGAIDLHLRPRGCAVMLEAEHMCMSMRGVRKQGAETITSQFTGVFRDDPAEQVRFLSMLRRGK

SEQ ID NO: 10644 - protein, 216 aa, Methyloceanibacter caenitepidi
  misc_feature (1)..(216): tr|A0A0A8K753|A0A0A8K753_9RHIZ GTP cyclohydrolase 1 OS= Methyloceanibacter caenitepidi OX=1384459 GN=folE PE=3 SV=1
MATKTDTRPGRKLYAGIEIGKGPQITRPSREEAERAVRTLIAYAGDDPEREGLRDTPKRVVGAYDEFFAGYKDDPIEVLSRTFDDVGGYDDIVMLRDIELNSHCEHHMVPFIGKAHIAYFPTDRVVGLSKLARVVEVFGRRLQTQETMTAQIAETIDRVLKPKGVAVMIEAVHQCMSMRGVRKPGVATITTQFTGVFKEDPAQQARFMQLAVDRGR

SEQ ID NO: 10645 - protein, 206 aa, Methyloceanibacter marginalis
  misc_feature (1)..(206): tr|A0A1E3WA50|A0A1E3WA50_9RHIZ GTP cyclohydrolase 1 OS= Methyloceanibacter marginalis OX=1774971 GN=folE PE=3 S V=1
MNSNVHALNRGTISKRVAAGRPERADVEAAFRTIIRWAGDDPERPGLIETPARVVRAFEEYFAGYGQDPTLILEKTFEEIEGYDEMIVLRGIRFESHCEHHLAPITGKAWVAYVPSGRVVGISKLARLVDAYAKRLQIQEKMTAQIANTIDEVLKPQGVGVILKATHHCMTTRGVHRPDTDLVTSRMLGCFRDNPLTRQEFLGMID

SEQ ID NO: 10646 - protein, 217 aa, Methyloceanibacter marginalis
  misc_feature (1)..(217): tr|A0A1E3WC71|A0A1E3WC71_9RHIZ GTP cyclohydrolase 1 OS= Methyloceanibacter marginalis OX=1774971 GN=folE PE=3 S V=1
MDATAKDRPARQLYAGIEIGRGPQITRPSREKAEEAVRTLIAYAGDDPQREGLRDTPRRVTSAYDEFFAGYSEDPFEVLSRTFDEVAGYDDIVMLRDIELHSHCEHHMIPFIGKAHIAYFPTDRVVGLSKLARVVEVFARRLQTQETMTAQIAETIDRVLKPKGVAVMIEAVHQCMSIRGVRKPDVATITTQFTGIFKEDPAQQARFMQLATERGRS

SEQ ID NO: 10647 - protein, 217 aa, Methyloceanibacter methanicus
  misc_feature (1)..(217): tr|A0A1E3VYF2|A0A1E3VYF2_9RHIZ GTP cyclohydrolase 1 OS= Methyloceanibacter methanicus OX=1774968 GN=folE PE=3 S V=1
MATKTDDRKGRKLYAGIEIGKGPQIARPSREEAERAVRTLIAYAGDDPEREGLRDTPKRVVGAYDEFFAGYKDDPIEVLSRTFDDVGGYDDIVMLRDIELNSHCEHHMVPFIGKAHIAYFPTDRVVGLSKLARVVEVFGRRLQTQETMTAQIAETIDRVLKPKGVAVMIEAVHQCMSMRGVRKPGVATITTQFTGVFKEDPAQQARFMQLALDRGRS

SEQ ID NO: 10648 - protein, 217 aa, Methyloceanibacter sp.
  misc_feature (1)..(217): tr|A0A353INX2|A0A353INX2_9RHIZ GTP cyclohydrolase 1 OS= Methyloceanibacter sp. OX=1965321 GN=folE PE=3 SV=1
MATKTDDRQGRKLYAGIEIGKGPQITRPSREEAERAVRTLIAYAGDDPAREGLRDTPKRVVGAYEEFFAGYNDDPIEVLSRTFDDVGGYDDIVMLRDIELNSHCEHHMVPFIGKSHIAYFPTDRVVGLSKLARVVEVFGRRLQTQETMTAQIAETIDRVLKPKGVAVMIEAVHQCMSMRGVRKPGVATITTQFTGVFKEDPAQQARFMQLALDRGRS

SEQ ID NO: 10649 - protein, 200 aa, Methyloceanibacter stevinii
  misc_feature (1)..(200): tr|A0A1E3VP87|A0A1E3VP87_9RHIZ GTP cyclohydrolase 1 OS= Methyloceanibacter stevinii OX=1774970 GN=folE PE=3 SV= 1
MEIGKGPQITRPSREEAERAVRTLIAYAGDDPEREGLRDTPKRVVGAYDEFFAGYKDDPIEVLSRTFDDVGGYDDIVMLRDIELNSHCEHHMVPFIGKAHIAYFPTDRVVGLSKLARVVEVFGRRLQTQETMTAQIAETIDRVLKPKGVAVMIEAVHQCMSMRGVRKPGVATITTQFTGVFKEDPTQQARFMQLAIDRGR

SEQ ID NO: 10650 - protein, 217 aa, Methyloceanibacter superfactus
  misc_feature (1)..(217): tr|A0A1E3VMR9|A0A1E3VMR9_9RHIZ GTP cyclohydrolase 1 OS= Methyloceanibacter superfactus OX=1774969 GN=folE PE=3 SV=1
MDATTKNPRPARLYAGMEIGRGPQITRPSREKAEEAVRTLIAYAGDDPEREGLRDTPRRVTSAYDEFFAGYRDDPIEVLSRTFDEVAGYDDIVMLRDIELNSHCEHHMIPFIGKAHIAYFPTDRVVGLSKLARVVEVFARRLQTQETMTAQIAETIDTVLKPKGVAVMIEAVHQCMSIRGVRKPNVATITTQFTGIFKEDPSQQARFMMLATERGRS

SEQ ID NO: 10651 - protein, 190 aa, Methylocella silvestris
  misc_feature (1)..(190): tr|B8EJC9|B8EJC9_METSB GTP cyclohydrolase 1 OS=Methyloc ella silvestris (strain DSM 15510 / CIP 108128 / LMG 27 833 / NCIMB 13906 / BL2) OX=395965 GN=folE PE=3 SV=1
MAKPTEADAEAAVRVLIEWAGDDPDREGLLDTPRRVARSYRELFSGYVADPRAYLERTFEEVGGYDELVVLRDIRVVSFCEHHMLPVLGRAHVGYLPTNKVVGISKLARVVHGFARRLQIQEKLTAEIADAIQDILEPQGVGVVIEAEHSCMSLRGVNTIGATLITSRLLGVIRDDPRTREEFLRLTRGT

SEQ ID NO: 10652 - protein, 213 aa, Methylocella silvestris
  misc_feature (1)..(213): tr|A0A2J7TJC2|A0A2J7TJC2_METSI GTP cyclohydrolase 1 OS= Methylocella silvestris OX=199596 GN=folE PE=3 SV=1
MDAVVKSLVERSEPQRDISAREARPTREEAEAAVRVLLRWAGDDPNREGLIDTPARVVKAYGELFSGYGEDATEVLSRVFEEVHGYDDLILVRDIEFSSHCEHHMVPFVGVAHIAYYPSEEGVVGLSKLARLVDVFARRLQTQEALTAQIVGAIDLHLRPRGCAVMIEAEHMCMSMRGVRKHGAQTITTQFTGVFRDDPAEQVRFLTLLRRGK

SEQ ID NO: 10653 - protein, 213 aa, Methylocella tundrae
  misc_feature (1)..(213): tr|A0A4U8YUC2|A0A4U8YUC2_METTU GTP cyclohydrolase 1 OS= Methylocella tundrae OX=227605 GN=folE PE=3 SV=1
MDAVVKSLVERSQPQRDNSAREPLPTREEAEAAVRVLLRWAGDDPTREGLVDTPARVVKAYEELFSGYREDPTSVLARVFEEVHGYDDIILVRDIPFSSHCEHHVVPFVGVAHIAYYPSEEGVVGLSKLARLVDVFARRLQTQEALTAQIIGAIDVHLRPRGCAIMIEAEHMCMSMRGVRKQGAQTITTQFTGVFRDDPAEQARFLTMLRHGK

SEQ ID NO: 10654 - protein, 189 aa, Methylocella tundrae
  misc_feature (1)..(189): tr|A0A4U8Z667|A0A4U8Z667_METTU GTP cyclohydrolase 1 OS= Methylocella tundrae OX=227605 GN=folE PE=3 SV=1
MAKPTQADAEAAVRVLIEWAGDDPDREGLLDTPGRVARSYRELFAGYATDPRTYLERTFEEVGGYDELVVMRDIPVVSFCEHHMLPVIGRAHVGYLPSNRVVGISKLARVVHGFARRLQIQEKLTAEIADAIQDILEPKGVGVVIEAEHSCMTLRGVNTLGTTLTTSRLRGIIRDDPRTREEFLRLTRA

SEQ ID NO: 10655 - protein, 185 aa, Methylococcaceae bacterium
  misc_feature (1)..(185): tr|A0A257MVE4|A0A257MVE4_9GAMM GTP cyclohydrolase 1 OS= Methylococcaceae bacterium NSM2-1 OX=1917482 GN=folE PE =3 SV=1
MKLKTMEEHFAGIIEGVGENLEREGLVDTPKRAAKAFKFLNNGYEKTLDEVLNGAIFTADTEDMVIVKDIELYSLCEHHLLPFIGKCHVGYLPQGKVLGLSKVARIIDMYARRLQIQEKLTKQIADAIELSIGARGVAVVIEAKHLCMMMRGVEKQNSVMTTSVMTGIFRKEISTRSEFLNLINR

SEQ ID NO: 10656 - protein, 185 aa, Methylococcaceae bacterium
  misc_feature (1)..(185): tr|A0A1Z9UIC2|A0A1Z9UIC2_9GAMM GTP cyclohydrolase 1 OS= Methylococcaceae bacterium TMED282 OX=1986758 GN=folE P E=3 SV=1
  misc_feature (149)..(149): Xaa can be any naturally occurring amino acid
MRDLFLSLLKSIGEDPERDGLLKTPDRAAKALSFLTKGSKESLEEIVNDALFESDSREMVIVKDIEIYSMCEHHMLPFFGRCHIGYIPDGKVLGLSKLARISDMFSRRLQIQEQLTHEIATAVFETVKPLGVGVVIEARHLCMMMRGVXKQNSSTVSSAMLGTFLTSDRTRSEFLQLIGPRSTSV

SEQ ID NO: 10657 - protein, 180 aa, Methylococcales bacterium
  misc_feature (1)..(180): tr|A0A3A2J371|A0A3A2J371_9GAMM GTP cyclohydrolase 1 OS= Methylococcales bacterium OX=2304002 GN=folE PE=3 SV=1
MEEHFASIISAVGEDLTREGLIDTPKRAAKAFKFLNNGYDKTLEEVLNGAIFSADTEDMVIVKDIELYSLCEHHLLPFIGKCHVGYLPQGKVLGLSKVARIIDMYARRLQIQEKLTKQIADAIEVSIGARGVAVVIEAKHLCMMMRGVEKQNSVMTTSVMTGVFRKEISTRSEFLTLINR

SEQ ID NO: 10658 - protein, 180 aa, Methylococcales bacterium
  misc_feature (1)..(180): tr|A0A418RTR3|A0A418RTR3_9GAMM GTP cyclohydrolase 1 OS= Methylococcales bacterium OX=2304002 GN=folE PE=3 SV=1
MEEHFAKIIEAVGEDLNREGLIDTPVRAAKAFKFLNNGYDKTLEEVLNGAIFTADTEDMVIVKEIELYSLCEHHLLPFIGKCHVGYLPQGKVLGLSKVARIIDMYARRLQIQEKLTKQIADAIELSIGARGVAVVIEAKHLCMMMRGVEKQNSVMTTSVMTGIFRKELSTRSEFLNLINR

SEQ ID NO: 10659 - protein, 185 aa, Methylococcus capsulatus
  misc_feature (1)..(185): sp|Q607T5|GCH1_METCA GTP cyclohydrolase 1 OS=Methylococ cus capsulatus (strain ATCC 33009 / NCIMB 11132 / Bath) OX=243233 GN=folE PE=3 SV=1
MHSVMETLFSQLIQEIGEDVSREGLVDTPKRAASAFRFLNSGYHQSLDHVLNNAVFEADSEDMVIVKDIELYSLCEHHLLPFIGKCHVGYLPQGKVIGLSKIARIVEMYARRLQIQERLTKQIADAIQTAVNPRGVAVVVEAKHLCMMMRGVEKQNSVMTTSSMLGLFRKQSSTRAEFLDLIGRK

SEQ ID NO: 10660 - protein, 268 aa, Methylococcus capsulatus
  misc_feature (1)..(268): sp|Q605G6|GCH4_METCA GTP cyclohydrolase FolE2 OS=Methyl ococcus capsulatus (strain ATCC 33009 / NCIMB 11132 / B ath) OX=243233 GN=folE2 PE=3 SV=1
MEEEGLAIDDVQGRADLRRIDIDRVGIKGIRHPVRVRDRSLGEQHTVARFDMAVSLPHHFKGTHMSRFVEIINGHDREIDIASFEAMLAEMMQRLNAEAGRIEMRFPYFLEKRAPVTGVRSLMDYEVALIGEVSVATTTTWLGVTVPVTSLCPCSKAISERGAHNQRSHVTTAVRMRDFVWIEELIEWVEAEASSPIYGLLKRPDEKYVTEYAYDHPRFVEDLVRGVAARLDTEPRIAAYAVEVENFESIHNHSAYALIERDKRTADA

SEQ ID NO: 10661 - protein, 180 aa, Methylococcus sp.
  misc_feature (1)..(180): tr|A0A432RLL0|A0A432RLL0_9GAMM GTP cyclohydrolase 1 OS= Methylococcus sp. OX=39769 GN=folE PE=3 SV=1
MEKHFESILEEIGEDIGREGLVDTPKRAAEAFRFLNRGYNLSLEMVLNGAIFQADTEDMVIVKDIELYSLCEHHLLPFIGKCHVGYLPDGKVLGLSKVARIVDMYGRRLQIQEKLTKQIADAIQEAVGAKGVAVVIEAKHLCMMMRGVQKQNSVMTTSVMLGIFREHFSSRSEFLNLISR

SEQ ID NO: 10662 - protein, 180 aa, Methylocucumis oryzae
  misc_feature (1)..(180): tr|A0A0F3IKK6|A0A0F3IKK6_9GAMM GTP cyclohydrolase 1 OS= Methylocucumis oryzae OX=1632867 GN=folE PE=3 SV=1
MEEHFAKIIEAVGENLNREGLIDTPKRAAKAFKFLNNGYEKTLEDVLNGAIFTADTEDMVIIKDIELFSLCEHHLLPFIGKCHVGYLPQGKVLGLSKVARIVDMYARRLQIQEKLTKQIADAIETAINARGVAVVIEAKHLCMMMRGVEKQNSVMTTSVMTGIFRKHISTRSEFLNLINR

SEQ ID NO: 10663 - protein, 209 aa, Methylocystaceae bacterium
  misc_feature (1)..(209): tr|A0A5C9D4B3|A0A5C9D4B3_9RHIZ GTP cyclohydrolase 1 OS= Methylocystaceae bacterium OX=2052174 GN=folE PE=3 SV=1
MDDVVKTCPFSSLETVKTVERPSRDEAEAAVRTLLRWAGDDPDREGLLDTPRRVVKAYEEFFSGYRESADEVLSKVFEEVEGYDDLVLVRDIPFTSHCEHHVVPFVGKTHIAYYPAGGVVGLSKLARLVEIFARRLQTQEAMTAQIAAAIDEALAPRGVAVMVEAEHMCMSMRGVMKQGSSTVTMQFSGVFRDDPAEQARFYTLLRGAR

SEQ ID NO: 10664 - protein, 228 aa, Methylocystaceae bacterium
  misc_feature (1)..(228): tr|A0A4P5SP33|A0A4P5SP33_9RHIZ GTP cyclohydrolase 1 OS= Methylocystaceae bacterium OX=2052174 GN=folE PE=3 SV=1
MEELVKTQLEYSDGEGEMSRSASFSNRLSPQAFAEKAQTRPSREEAEAAVRTLLRWAGDNPDREGLQDTPKRVVKAYEEYFQGYRQNGEELLGRVFSEVENYSDIVLVRDINFCSHCEHHVAPFLGKAHIAYYPTYGVVGLSKLARLVDVFAHRLQTQETMTAQIAQALVTHLKPRGVAVMLEAEHMCMSMRGIRKHGSLTVTVQFSGLFEDNAEQQARFYTLLRGAR

SEQ ID NO: 10665 - protein, 211 aa, Methylocystis bryophila
  misc_feature (1)..(211): tr|A0A1W6MTZ2|A0A1W6MTZ2_9RHIZ GTP cyclohydrolase 1 OS= Methylocystis bryophila OX=655015 GN=folE PE=3 SV=1
MDDVVKTLIDKPLGALKREIEKPTREEAEAAVRVLLRWAGDDPDREGLRETPRRVVKAYEEVFSGYNQDPREVLERIFAEVEGYDDLVMVRDIPFFSHCEHHVTPFIGKAHIAYYPTGGVVGLSKLARLVDVFAKRLQTQEAMTALIANTLEQELNPRGVAVLVEAQHLCMSMRGVLKQGSETVTVQFSGAFRDNPAEQAHFYTLLRGAKG

SEQ ID NO: 10666 - protein, 210 aa, Methylocystis heyeri
  misc_feature (1)..(210): tr|A0A4S4MIJ9|A0A4S4MIJ9_9RHIZ GTP cyclohydrolase 1 OS= Methylocystis heyeri OX=391905 GN=folE PE=3 SV=1
MDDVVKSLISRPERVVTSANGKPSREEAEEAVRVLLRWAGDNPEREGLLETPARVVKAYEELFSGYRQDPREVLERVFAEVEGYDDLVLVRDIPFFSHCEHHMVPFVGKAHIAYYPTDGVVGLSKLARLVDVFAKRLQTQEAMTAQIASTIETELNPRGVAVLVEAEHMCMSMRGVLKQGASTVTVQFSGSFRDNPSEQAHFYTLLRGGR

SEQ ID NO: 10667 - protein, 190 aa, Methylocystis hirsuta
  misc_feature (1)..(190): tr|A0A3M9XPM7|A0A3M9XPM7_9RHIZ GTP cyclohydrolase 1 OS= Methylocystis hirsuta OX=369798 GN=folE PE=3 SV=1
MAKPTQADAEAAVRVLIEWAGDDPHREGLIDTPERVARSYRELFAGYEVDPRDYLKRTFDEVGGYDELVVLKDIRVVSFCEHHMLPVTGRAHVGYLPNNRVVGISKLARVVHGFARRLQIQEKLTAEIAEAIQDILEPQGVGVVIEAEHSCMTLRGVNTTGSLLTTSRLLGVIRDDPRTREEFLGMVHGK

SEQ ID NO: 10668 - protein, 209 aa, Methylocystis hirsuta
  misc_feature (1)..(209): tr|A0A3M9XRH9|A0A3M9XRH9_9RHIZ GTP cyclohydrolase 1 OS= Methylocystis hirsuta OX=369798 GN=folE PE=3 SV=1
MDDVVKTFSLPSLEPPPPIERPTREEAEAAVRTLLRWTGDDPDREGLRDTPRRVVKAYEEFFSGYRESADEVLSKVFEEVEGYDDLVLVRDIPFTSHCEHHVVPFVGKTHIAYYPAGGVVGLSKLARLVEIFARRLQTQEAMTAQIAAAIDEALAPRGVAVMVEAEHMCMSMRGVMKQGSSTVTMQFSGVFRDDPAEQARFYTLLRGAR

SEQ ID NO: 10669 - protein, 209 aa, Methylocystis rosea
  misc_feature (1)..(209): tr|A0A3G8M390|A0A3G8M390_9RHIZ GTP cyclohydrolase 1 OS= Methylocystis rosea OX=173366 GN=folE PE=3 SV=1
MDDVVKTCPFSSLETVKTVERPSRDEAEAAVRTLLRWAGDDPDREGLQDTPRRVVKAYEEFFSGYRESADEVLSKVFEEVEGYDDLVLVRDIPFTSHCEHHVVPFVGKTHIAYYPAGGVVGLSKLARLVEIFARRLQTQEAMTAQIAAAIDEALAPRGVAVMVEAEHMCMSMRGVMKQGSSTVTMQFSGVFRDDPAEQARFYTLLRGAR

SEQ ID NO: 10670 - protein, 190 aa, Methylocystis rosea
  misc_feature (1)..(190): tr|A0A3G8MA27|A0A3G8MA27_9RHIZ GTP cyclohydrolase 1 OS= Methylocystis rosea OX=173366 GN=folE PE=3 SV=1
MAKPTQADAEAAVRVLIEWAGDDPSREGLIDTPERVARSYRELFAGYEVDPRDYLKRTFDEVGGYDELVVLKDIRVVSFCEHHMLPVTGRAHVGYLPSNRVVGISKLARVVHGFARRLQIQEKLTAEIAEAIQDILEPQGVGVVIEAEHSCMTLRGVNTTGSLLTTSRLLGVIRDDPRTREEFLGMVHGK

SEQ ID NO: 10671 - protein, 190 aa, Methylocystis sp.
  misc_feature (1)..(190): tr|A0A2P5NP03|A0A2P5NP03_9RHIZ GTP cyclohydrolase 1 OS= Methylocystis sp. OX=1911079 GN=folE PE=3 SV=1
MGKPSQADAEAAVRVLIEWAGDDPEREGLLDTPARVARSYRELFSGYEIDPRDYLKRTFEEVGGYDELVVLKNIRVVSFCEHHMLPVLGRAHVGYLPTNRVVGISKLARVVHGFARRLQIQEKLTAEIAEAIQDILQPQGVGVVIEAEHNCMTLRGVNTPGSSLTTSKLLGVMRDDARTRDEFLGMVRGA

SEQ ID NO: 10672 - protein, 140 aa, Methylocystis sp.
  misc_feature (1)..(140): tr|I4EAF9|I4EAF9_METSZ GTP cyclohydrolase 1 OS=Methyloc ystis sp. (strain SC2) OX=187303 GN=folE2 PE=3 SV=1
MIERQANKTEHLVSAHADRFRDGPGRLMGLDDNSRGVRRSKRTQAEAEAAVRVLIEWAGDNPDREGLIDTPERVARSYRELFAGYAAGPREYLKRTFEEVGGYDELVVLKDIRVVTFCEHHMLPVIGRAHVGYLPTNRVL

SEQ ID NO: 10673 - protein, 180 aa, Methyloglobulus morosus
  misc_feature (1)..(180): tr|V5BZA4|V5BZA4_9GAMM GTP cyclohydrolase 1 OS=Methylog lobulus morosus KoM1 OX=1116472 GN=folE PE=3 SV=1
MEEQFSKIIAAIGEDLSREGLVDTPKRAAKAFKFLNNGYEKTLEEVLNDAIFTADSEDMVIVKDIELYSLCEHHLLPFIGKCHVGYLPKGKVLGLSKVARVIDMYARRLQIQERLTKQIADAIMQATGARGVAVVIEAKHLCMMMRGVEKQNSVMTTSAMLGAFRKEISTRSEFLNLINR

SEQ ID NO: 10674 - protein, 210 aa, Methyloligella halotolerans
  misc_feature (1)..(210): tr|A0A1E2S186|A0A1E2S186_9RHIZ GTP cyclohydrolase 1 OS= Methyloligella halotolerans OX=1177755 GN=folE PE=3 SV= 1
MDAFVEKPKRSDDQQTEIVRPSRHEAEDAVRTLLAYAGDDPRREGLLDTPKRVVDSYDEFFSGYHESAHEVLSRTFDEVGGYDDIVMLRDIEVNSHCEHHMIPFIGKAHVAYFPTDRVVGISKLARVVDVFAHRLQTQETMTAQIAETIDDVLKPKGVAVMIEAVHQCMSLRGVKKPDVATITTQFTGIFKEDPAQQARFMTLVSSDRGR

SEQ ID NO: 10675 - protein, 185 aa, Methylomagnum ishizawai
  misc_feature (1)..(185): tr|A0A1Y6CZJ3|A0A1Y6CZJ3_9GAMM GTP cyclohydrolase 1 OS= Methylomagnum ishizawai OX=1760988 GN=folE PE=3 SV=1
MQNAAMENLFSQIIQELGEDVTREGLVDTPKRAAAAFRYLNSGYHMDLDKVLNNAIFEADTEDMVIVKDIELYSLCEHHLLPFIGKCHVAYLPRGKVVGLSKIARIVEMYARRLQIQERLTKQIATALQTAVDPKGVAVVIEAKHLCMMMRGVEKQNSVMTTSSMLGLFRKEISTRSEFLNLISR

SEQ ID NO: 10676 - protein, 180 aa, Methylomicrobium album
  misc_feature (1)..(180): tr|H8GQV4|H8GQV4_METAL GTP cyclohydrolase 1 OS=Methylom icrobium album BG8 OX=686340 GN=folE PE=3 SV=1
MEEYFSKIIAAVGEDLTREGLIDTPKRAAKAFKFLNNGYQKNLDEVLNNAVFTADTEDMVIVKDIELYSLCEHHLLPFIGKCHVGYLPRGKVLGLSKIARIVDMYARRLQIQEKLTKQIADAIEYAVDAKGVAVVIEAKHLCMMMRGVEKQNSVMTTSVMTGIFRKEMNTRSEFLNLINR

SEQ ID NO: 10677 - protein, 261 aa, Methylomicrobium album
  misc_feature (1)..(261): tr|H8GK09|H8GK09_METAL GTP cyclohydrolase FolE2 OS=Meth ylomicrobium album BG8 OX=686340 GN=folE2 PE=3 SV=1
MKTCTIEDIQGRTDTRRIAIDKVGIKDILHPVRVRDKSGGEQHTVARFDMYVNLPHDFKGTHMSRFVEILNSHDREISIASFSTMLQEMLARLEAESGYIDMRFPYFIEKAAPVSGVRSLLDYQVSFIGEIDAQGCRTKVKIVVPVTSLCPCSKEISERGAHNQRSHVTVTAGTREFIWLEELIALVESEASSPVYGLLKRPDEKYVTEYAYDHPKFVEDMVRDVAARLDADPRIGAYTVESENFESIHNHSAYALIERVK

SEQ ID NO: 10678 - protein, 270 aa, Methylomicrobium alcaliphilum
  misc_feature (1)..(270): tr|G4T2P1|G4T2P1_META2 GTP cyclohydrolase FolE2 OS=Meth ylomicrobium alcaliphilum (strain DSM 19304 / NCIMB 141 24 / VKM B-2133 / 20Z) OX=1091494 GN=folE2 PE=3 SV=1
MNNQSNIPTSENAIVDVQGIADSRRIAIDKVGIKAIRHPIRVKDRSVGEQHTIGLFDMYVNLPHDFKGTHMSRFVEILNQHDREISVESFGLMLEEMVQRLDAQSGYIEMQFPFFIDKAAPVSGVRSLLDYQVSLIGEIAGGEVQTRIKVVVPVTSLCPCSKTISDRGAHNQRSHVTLTVLINDFIWIEELIDLAEQEASCQIYGLLKRPDEKYVTEYAYDNPKFVEDMVRDVAARLEAEPRISAYIVESENFESIHNHSAYALIERDKR

SEQ ID NO: 10679 - protein, 180 aa, Methylomicrobium alcaliphilum
  misc_feature (1)..(180): tr|G4T3K2|G4T3K2_META2 GTP cyclohydrolase 1 OS=Methylom icrobium alcaliphilum (strain DSM 19304 / NCIMB 14124 / VKM B-2133 / 20Z) OX=1091494 GN=folE PE=3 SV=1
MEEYFSKIIEAVGEDVTREGLIDTPKRASDAFKFLNNGYEKSLDDVLNNAIFEADTEDMVIVKDIELYSLCEHHLLPFIGKCHVGYLPQGKVLGLSKVARIIDMYARRLQIQEKLTKQIADAIEKSINARGVAVVIEAKHLCMMMRGVEKQNSVMTTSVMTGIFREEISTRSEFLNLINR

SEQ ID NO: 10680 - protein, 180 aa, Methylomicrobium buryatense
  misc_feature (1)..(180): tr|A0A4P9UPX1|A0A4P9UPX1_9GAMM GTP cyclohydrolase 1 OS= Methylomicrobium buryatense OX=95641 GN=folE PE=3 SV=1
MEEYFSKIIEAVGEDVTREGLVDTPKRASDAFKFLNNGYEKNLDDVLNGAIFQADTEDMVIVKDIELYSLCEHHLLPFIGKCHVGYLPQGKVLGLSKVARIIDMYARRLQIQEKLTKQIADAIEKSINARGVAVVIEAKHLCMMMRGVEKQNSVMTTSVMTGIFREEISTRSEFLNLINR

SEQ ID NO: 10681 - protein, 270 aa, Methylomicrobium buryatense
  misc_feature (1)..(270): tr|A0A4P9UQL3|A0A4P9UQL3_9GAMM GTP cyclohydrolase FolE2 OS=Methylomicrobium buryatense OX=95641 GN=folE2 PE=3 SV=1
MNNQSSIPSLENSIVDVQGIADSRRIAIDKVGIKAIRHPIRVKDRSVGEQHTIGLFDMYVNLPHDFKGTHMSRFVEILNQHDREISVESFGLMLEEMVQRLDAQSGYIEMQFPFFIDKAAPVSGVRSLLDYQVSLIGEIAGSEVQTRIKVVVPVTSLCPCSKTISDRGAHNQRSHVTLTVLINDFIWIEELIDLAEQEASCQIYGLLKRPDEKYVTEYAYDNPKFVEDMVRDVAARLEAEPRISAYIVESENFESIHNHSAYALIERDKR

SEQ ID NO: 10682 - protein, 270 aa, Methylomicrobium kenyense
  misc_feature (1)..(270): tr|A0A543V878|A0A543V878_9GAMM GTP cyclohydrolase FolE2 OS=Methylomicrobium kenyense OX=269709 GN=folE2 PE=3 S V=1
MNNHSNTPTSENAIVDVQGIADSRRIAIDKVGIKAIRHPIRVKDRSVGEQHTIGLFDMYVNLPHDFKGTHMSRFVEILNQHDREISVESFGLMLEEMVQRLDAQSGYIEMQFPFFIDKAAPVSGVRSLLDYQVSLIGEIAGGEVQTRIKVVVPVTSLCPCSKTISDRGAHNQRSHVTLNVLINDFIWIEELIDLVEQEASCQVYGLLKRPDEKYVTEYAYDNPKFVEDMVRDVAARLEAESRLSAYIVESENFESIHNHSAYALIERDKR

SEQ ID NO: 10683 - protein, 180 aa, Methylomicrobium kenyense
  misc_feature (1)..(180): tr|A0A543V5J2|A0A543V5J2_9GAMM GTP cyclohydrolase 1 OS= Methylomicrobium kenyense OX=269709 GN=folE PE=3 SV=1
MEEYFSKIIEAVGEDVTREGLVDTPKRASDAFKFLNNGYEKSLDDVLNDAIFEADTEDMVIVKDIELYSLCEHHLLPFIGKCHVGYLPQGKVLGLSKVARIIDMYARRLQIQEKLTKQIADAIEKSINARGVAVVIEAKHLCMMMRGVEKQNSVMTTSVMTGIFRDEISTRSEFLNLINR

SEQ ID NO: 10684 - protein, 181 aa, Methylomonas denitrificans
  misc_feature (1)..(181): tr|A0A126T7S6|A0A126T7S6_9GAMM GTP cyclohydrolase 1 OS= Methylomonas denitrificans OX=1538553 GN=folE PE=3 SV=1
MEEYFSKIIQAIGEDVNREGLRDTPKRAAKAFKFLNNGYEKTLEEVLNGAIFQADTEDMVIVKDIELYSLCEHHLLPFIGKCHIGYLPQGKVLGLSKLARIVDMYGRRLQIQEQLTRQIATAVETAIDARGVAVVIEAKHLCMMMRGVEKQNSVMTTSVMLGIFREEISTRSEFLNLINRK

SEQ ID NO: 10685 - protein, 266 aa, Methylomonas koyamae
  misc_feature (1)..(266): tr|A0A177NNM4|A0A177NNM4_9GAMM GTP cyclohydrolase FolE2 OS=Methylomonas koyamae OX=702114 GN=folE2 PE=3 SV=1
MTPIEDIQARADNRRIAIDKVGIKDILHPVRVQDKSVGEQRTVARFAMYVNLPHDFKGTHMSRFVEILNSHDREISIASFPAMLREMLDRLEAESGYIDMRFPYFIEKAAPVSGVRSLLDYQVGFIGEIDAAGCRTKVQVVVPVTSLCPCSKEISERGAHNQRSHVTVTVAIDSFIWVEDLIALVETEASSPIYGLLKRPDEKYVTEYAYDHPKFVEDMVRDVAARLDAEARISAYTVESENFESIHNHSAYALIERDKATTGCRD

SEQ ID NO: 10686 - protein, 181 aa, Methylomonas koyamae
  misc_feature (1)..(181): tr|A0A177P1Y2|A0A177P1Y2_9GAMM GTP cyclohydrolase 1 OS= Methylomonas koyamae OX=702114 GN=folE PE=3 SV=1
MEEYFSKIIEAIGEDVNREGLRDTPKRAAKAFKFLNNGYEKNLDDVLNGAIFQADTEDMVIVKDIELYSLCEHHLLPFIGKCHIGYLPQGKVLGLSKLARIVDMYARRLQIQEQLTRQIADAVATAIDARGVAVVIEAKHLCMMMRGVEKQNSVMTTSVMSGIFRQEISTRSEFLNLINRK

SEQ ID NO: 10687 - protein, 280 aa, Methylomonas lenta
  misc_feature (1)..(280): tr|A0A177NDB9|A0A177NDB9_9GAMM GTP cyclohydrolase FolE2 OS=Methylomonas lenta OX=980561 GN=folE2 PE=3 SV=1
MGNRQRLRPVQRGGRVNACIIEDIQGRADSRRIAIDKVGIKDILHPVRVKDKSCGEQHTVARFDMYVNLPHDFKGTHMSRFVEILNSHDREISIASFPVMLQEMLSRLEAESGYIEMRFPYFVDKAAPVSGVRSLLDYQVSFIGEIDNTGCRIKVKIVVPVTSLCPCSKEISERGAHNQRSHVTITVSASEFIWIEELITLVEAEASSPIYGLLKRPDEKYVTEYAYDHPKFVEDMVRDVAAMLDAEIRITAYMVESENFESIHNHSAYARIERIKPQPA

SEQ ID NO: 10688 - protein, 181 aa, Methylomonas lenta
  misc_feature (1)..(181): tr|A0A177N848|A0A177N848_9GAMM GTP cyclohydrolase 1 OS= Methylomonas lenta OX=980561 GN=folE PE=3 SV=1
MEEYFSKIIQAIGEDVNREGLRDTPKRAAKAFKFLNNGYEKSLDEVLNGAIFQADTEDMVIVKDIELYSLCEHHLLPFIGKCHIGYLPQGKVLGLSKLARIVDMYGRRLQIQEQLTRQIATAVQTAVNARGVAVVIEAKHLCMMMRGVEKQNSVMTTSVMTGIFREEISTRSEFLNLINRR

SEQ ID NO: 10689 - protein, 180 aa, Methylomonas methanica
  misc_feature (1)..(180): tr|A0A177M3V9|A0A177M3V9_METMH GTP cyclohydrolase 1 OS= Methylomonas methanica OX=421 GN=folE PE=3 SV=1
MEEYFSKIIQAIGEDVNREGLRDTPKRAAKAFKFLNNGYEKTLEEVLNGAIFQADTEDMVIVKDIELYSLCEHHLLPFIGKCHIGYLPKGKVLGLSKLARIVDMYGRRLQIQEQLTRQIAKAVETAIDARGVAVVIEAKHLCMMMRGVEKQNSVMTTSVMLGIFREEISTRSEFLNLINR

SEQ ID NO: 10690 - protein, 181 aa, Methylomonas methanica
  misc_feature (1)..(181): tr|F9ZVN3|F9ZVN3_METMM GTP cyclohydrolase 1 OS=Methylom onas methanica (strain MC09) OX=857087 GN=folE PE=3 SV= 1
MEEYFSKIIQAIGEDVNREGLRDTPKRAAKAFRFLNNGYEKSLDEVLNGAIFQADTEDMVIVKDIELYSLCEHHLLPFIGKCHIGYLPQGKVLGLSKLARIVDMYGRRLQIQEQLTRQIATAVQTAINARGVAVVIEAKHLCMMMRGVEKQNSVMTTSVMTGIFREEISTRSEFLNLINRK

SEQ ID NO: 10691 - protein, 181 aa, Methylomonas sp.
  misc_feature (1)..(181): tr|A0A1S1Y8X2|A0A1S1Y8X2_9GAMM GTP cyclohydrolase 1 OS= Methylomonas sp. LWB OX=1905845 GN=folE PE=3 SV=1
MEEYFSKIIQAIGEDVNREGLRDTPKRAAEAFKFLNKGYQQTLEDVLNDAIFQADTEDMVIVKDIELYSLCEHHLLPFIGKCHIGYLPQGRVLGLSKLARIVDMYGRRLQIQEQLTRQIATAVETAIGARGVAVVVEAKHLCMMMRGVEKQNSVMTTSVMTGIFRQEISTRSEFLNLINRK

SEQ ID NO: 10692 - protein, 181 aa, Methylomonas sp.
  misc_feature (1)..(181): tr|A0A2P5MX52|A0A2P5MX52_METSP GTP cyclohydrolase 1 OS= Methylomonas sp. OX=418 GN=folE PE=3 SV=1
MEEYFSKIIEAIGEDVNREGLRDTPKRAAKAFRFLNNGYEKSLDEVLNGAIFTADTEDMVIVKDIELYSLCEHHLLPFIGKCHIGYLPKGKVLGLSKLARIVDMYGRRLQIQEQLTRQIAKAVETAIDARGVAVVIEAKHLCMMMRGVEKQNSVMTTSVMLGIFREEISTRSEFLNLINRK

SEQ ID NO: 10693 - protein, 272 aa, Methylomusa anaerophila
  misc_feature (1)..(272): tr|A0A348AQF3|A0A348AQF3_9FIRM GTP cyclohydrolase FolE2 OS=Methylomusa anaerophila OX=1930071 GN=folE2 PE=3 SV =1
MKLKSQETKNNIKDVQNSCDERGIAIQKVGVSDVHLPFLIQTKNGSFQSVLAKIKLTVNLPQEFKGTHMSRFIEVLSDWSQKPVSAKEMEYILIDTIDRLHAQSAAIDINFKYFIEKTAPVSGFTSMLDYDCAFSGSLTRGQHLNFVLGLKVPFTSLCPCSKEISCYGAHNQRGIMRVKIKHQPGSFIWIEDLAELMEAEGSCQVYPLLKREDEKYVTEKAYENPKFVEDVLRDLVLSLRKVEGAQWFEVECENYESIHNHSAYAAHVETLK

SEQ ID NO: 10694 - protein, 270 aa, Methylophaga aminisulfidivorans
  misc_feature (1)..(270): tr|F5SUN8|F5SUN8_9GAMM GTP cyclohydrolase FolE2 OS=Meth ylophaga aminisulfidivorans MP OX=1026882 GN=folE2 PE=3 SV=1
MSTTPASTEIKDEIEDVQNIADQRKIAIDKVGIKDIKHPVKVSDRTTGEQHTIANFNMYVNLPHQFKGTHMSRFVEILNQHEREITVKSFREMLGQMTERLDAESGYIEMNFPYFVNKEAPVSKVKSLMDYDVTFIGEITGTKTMMTVKVVVPVTSLCPCSKNISDYGAHNQRSHVTLTVRVDSFVWIEDLIDLVEKEASCEIFGLLKRPDEKFVTERAYDNPKFVEDMVRDIAARLNDDSRITAYTVESENFESIHNHSAYALITKGFD

SEQ ID NO: 10695 - protein, 262 aa, Methylophaga aminisulfidivorans
  misc_feature (1)..(262): tr|F5T367|F5T367_9GAMM GTP cyclohydrolase FolE2 OS=Meth ylophaga aminisulfidivorans MP OX=1026882 GN=folE2 PE=3 SV=1
MNLPLTHRLEDVQNTPDKRQLIIDKVGIKSLRYPVLFQSTTETPIRVVAEFNMYVHLAADVKGTHMSRFIELLERPDAIFSLSNMPAFMTDMLELLGAKQGHVSLRFPYFISKTAPVSGVKSFMDYDITLTADYTDKLELTVKAEIPVTSLCPCSKKISDYGAHNQRSLVSVEARISEEMTLDALIQLIEEQASSQLYGLLKRPDEKYVTEFAYDNPKFVEDLVRDIAVALAQQDTVSGFRVECENFESIHNHSAYAVIDQL

SEQ ID NO: 10696 - protein, 268 aa, Methylophaga frappieri
  misc_feature (1)..(268): tr|I1YG08|I1YG08_METFJ GTP cyclohydrolase FolE2 OS=Meth ylophaga frappieri (strain ATCC BAA-2434 / DSM 25690 / JAM7) OX=754477 GN=folE2 PE=3 SV=1
MTEQHKPTTATEIEDVQNIKDKRHIAIDKVGIKDIRHPVVVSDRTTGEQHTVANFNMYVNLPHEFKGTHMSRFVEILNQHEREITVQSFHTMLGEMTERLDAQSGYIEMSFPYFVNKEAPVSKVRSLMDYQVSFVGEIIQGKTSMTVKVVVPVTSLCPCSKNISDYGAHNQRSHVTLTVKTDSFIWIEDLIDLVEDEASCQIYGLLKRPDEKYVTEHAYDNPKFVEDMVRDVAARLNADKRIQAYTVESENFESIHNHSAYALITNGF

SEQ ID NO: 10697 - protein, 269 aa, Methylophaga lonarensis
  misc_feature (1)..(269): tr|M7P2V4|M7P2V4_9GAMM GTP cyclohydrolase FolE2 OS=Meth ylophaga lonarensis MPL OX=1286106 GN=folE2 PE=3 SV=1
MTEQTKPVAAGEIEDVQNIKDKRHIAIDKVGIKDIRHPVVVSDRTTGEQHTIANFNMYVNLPHEFKGTHMSRFVEILNQHEREITVKSFHEMLGEMTERLDAESGYIEMSFPYFVNKEAPISKVRSLMDYQVSFIGEINHQKTSMTVKVIVPVTSLCPCSKNISDYGAHNQRSHVTLTVKTDSFIWIEDLIDLVEEEASCQIYGLLKRPDEKYVTEHAYDNPKFVEDMVRDVAARLNADDRIKAYIVESENFESIHNHSAYALISKGFD

SEQ ID NO: 10698 - protein, 267 aa, Methylophaga lonarensis
  misc_feature (1)..(267): tr|M7P1X5|M7P1X5_9GAMM GTP cyclohydrolase FolE2 OS=Meth ylophaga lonarensis MPL OX=1286106 GN=folE2 PE=3 SV=1
MNLPLHIQLEDVQNTPDQRCLPIDRVGIKSLRYPVLFQASATESPIRVVADFNMYVQLAHDVKGTHMSRFVELLETPDLVISPDTLSDFMQQMLALLEAQSGQLEMQFAYFMRKSAPISGVSSMMDYQVSLIANVDPEFSLTAKIAIPVTSLCPCSKKIAEYGAHNQRSLVTISVELIEQMSLPELITLVESQASSQLYGLLKRPDEKYVTEYAYDNPKFVEDLVRDVAASLNQCAAVDRYVVECENFESIHNHSAYAMLQGGRGRS

SEQ ID NO: 10699 - protein, 105 aa, Methylophaga muralis
  misc_feature (1)..(105): tr|A0A1E3GUS5|A0A1E3GUS5_9GAMM Putative GTP cyclohydrol ase 1 type 2 OS=Methylophaga muralis OX=291169 GN=A9E74 _00629 PE=4 SV=1
MYKLVFFVPESHKELVKEAIFNAGAGQFDGYEFCSWETLGTGQFRPLSGSQPFIGESGKIEQVNEYRVETICTNDTIKAAVSALKLAHPYEEPAYQYWLVNQEDF

SEQ ID NO: 10700 - protein, 252 aa, Methylophaga muralis
  misc_feature (1)..(252): tr|A0A1E3GQL3|A0A1E3GQL3_9GAMM Putative GTP cyclohydrol ase 1 type 2 OS=Methylophaga muralis OX=291169 GN=A9E74 _02031 PE=4 SV=1
MITRTELLAYLDDLLETSRFQDYCPNGLQVEGKQQIKTLVTGVTASQALLDAAVANNADAILVHHGYFWRGESSPVTGLKYQRLKTLLTHDINLIAYHLPLDAHTEFGNNVQLAKILDIEIDGRISATGDPAIALCGCLKTPQSLAEFSSYIDQQLGRKPTVIAGHDRAITTLGWCTGAAQGYIQQAAELGLDAFISGEVSEQTTHLARELGIHYIAAGHHATERYGVKALGEHIAEQFGLHHAFIDIDNPV

SEQ ID NO: 10701 - protein, 269 aa, Methylophaga nitratireducenticrescens
  misc_feature (1)..(269): tr|I1XHY9|I1XHY9_METNJ GTP cyclohydrolase FolE2 OS=Meth ylophaga nitratireducenticrescens OX=754476 GN=folE2 PE =3 SV=1
MTDQNKPIAAAEIEDVQNIKDKRHIAIDKVGIKDIRHPVVVSDRTTGEQHTVANFNMYVNLPHQFKGTHMSRFVEILNQHEREITVKSFHTMLGEMTERLDAESGYIEMDFPYFVNKEAPISKVRSLMDYQVSFIGEIVNKKTSMTVKVIVPVTSLCPCSKNISDYGAHNQRSHVTLTVKTDSFIWIEDLIDLVEDEASCQIYGLLKRPDEKYVTEHAYDNPKFVEDMVRDVAARLNADDRIKAYTVESENFESIHNHSAYALITKGFD

SEQ ID NO: 10702 - protein, 270 aa, Methylophaga sp.
  misc_feature (1)..(270): tr|A0A2E2DBL6|A0A2E2DBL6_9GAMM GTP cyclohydrolase FolE2 OS=Methylophaga sp. OX=2024840 GN=folE2 PE=3 SV=1
MSTTPASTEIKDEIEDVQNIADQRKIAIDKVGIKDIKHPVKVSDRTTGEQHTIANFNMYVNLPHQFKGTHMSRFVEILNQHEREITVKSFREMLGQMTERLDAESGYIEMNFPYFVNKEAPISKVKSLMDYDVTFIGEITGATTMMTVKVVVPVTSLCPCSKNISDYGAHNQRSHVTLTVRVESFVWIEDLIDLVEKEASCEIFGLLKRPDEKYVTERAYDNPKFVEDMVRDIAARLNQDSRITAYTVESENFESIHNHSAYALISKGFD

SEQ ID NO: 10703 - protein, 269 aa, Methylophaga sp.
  misc_feature (1)..(269): tr|A0A2E7XX90|A0A2E7XX90_9GAMM GTP cyclohydrolase FolE2 OS=Methylophaga sp. OX=2024840 GN=folE2 PE=3 SV=1
MTDQNKPIAAAEIEDVQNIKDKRHIAIDKVGIKDIRHPVVVSDRTTGEQHTVANFNMYVNLPHQFKGTHMSRFVEILNQHEREITVKSFHTMLGEMTERLDAESGYIEMSFPYFVNKEAPISKVRSLMDYQVSFIGEIVAKKTSMTVKVIVPVTSLCPCSKNISDYGAHNQRSHVTLTVKTDSFIWIEDLIDLVEDEASCQIYGLLKRPDEKYVTEHAYDNPKFVEDMVRDVAARLNADSRIKAYTVESENFESIHNHSAYALITQGFD

SEQ ID NO: 10704 - protein, 270 aa, Methylophaga sulfidovorans
  misc_feature (1)..(270): tr|A0A1I3V3Q9|A0A1I3V3Q9_9GAMM GTP cyclohydrolase FolE2 OS=Methylophaga sulfidovorans OX=45496 GN=folE2 PE=3 S V=1
MSTTPASTEIKDEIEDVQNIADQRKIAIDKVGIKDIKHPVKVSDRTTGEQHTIANFNMYVNLPHQFKGTHMSRFVEILNQHEREITVKSFREMLGQMTERLDAESGYIEMNFPYFVNKEAPVSKVKSLMDYDVTFIGEITGTQTMMTVKVVVPVTSLCPCSKNISDYGAHNQRSHVTLTVRVDSFVWIEDLIDLVEKEASCEIFGLLKRPDEKFVTERAYDNPKFVEDMVRDIAARLNDDSRITAYTVESENFESIHNHSAYALITKGFD

SEQ ID NO: 10705 - protein, 262 aa, Methylophaga sulfidovorans
  misc_feature (1)..(262): tr|A0A1I3TT25|A0A1I3TT25_9GAMM GTP cyclohydrolase FolE2 OS=Methylophaga sulfidovorans OX=45496 GN=folE2 PE=3 S V=1
MNLPLTHRLEDVQNTPDKRQLIIDKVGIKSLRYPVLFQSTTETPIRVVAEFNMYVHLAADVKGTHMSRFIELLERPDAIFSLSRMPTFMADMLELLGAKQGHVSLRFPYFISKAAPVSGVKSVMGYDITLTADYTEQLELTVKAEIPVTSLCPCSKKISDYGAHNQRSLVTVEARINENMTLDALIQLIEQQASSQLYGLLKRPDEKYVTEFAYDNPKFVEDLVRDIAVALSQQETVSGFRVECENFESIHNHSAYAVIDQL

SEQ ID NO: 10706 - protein, 269 aa, Methylophaga thiooxydans
  misc_feature (1)..(269): tr|A0A0A0BF51|A0A0A0BF51_9GAMM GTP cyclohydrolase FolE2 OS=Methylophaga thiooxydans OX=392484 GN=folE2 PE=3 SV =1
MSTTPASTKNDEIEDVQNIADKRQIAIDKVGIKDIKHPVKVSDRTKGEQHTIANFNMYVNLPHHFKGTHMSRFVEILNQHENEITVKSFRKMLGEMTERLDAESGYVEMNFPYFVNKEAPISKVRSLMDYDVSFIGEITGKDTAMTVKVVVPVTSLCPCSKNISDYGAHNQRSHVTLTVRVDSFIWIEDLIDLVEKQASCEIYGLLKRPDEKYVTERAYDNPKFVEDMVRDIAAKLNEDDRINAYTVESENFESIHNHSAYALISKGFD

SEQ ID NO: 10707 - protein, 262 aa, Methylophaga thiooxydans
  misc_feature (1)..(262): tr|A0A0A0BIG8|A0A0A0BIG8_9GAMM GTP cyclohydrolase FolE2 OS=Methylophaga thiooxydans OX=392484 GN=folE2 PE=3 SV =1
MNLPLNTTLEDVQNTPDKRQLAIDHVGIKSLRYPVFFESDDAGPIRVVANFNMYVRLPHHVKGTHMSRFVELLEKPGQVFSVITMKTFMQTMLTVLEADSGYVEMRFPFFLSKTAPVSGVASMMDYDVTLKAEMGEQFKLTVKAEIPVTSLCPCSKKISEYGAHNQRSLVTVEVEVDETLTLDQLIAMVEKQASSELYGLLKRPDEKYVTEYAYDNPKFVEDLVRDIAGTLDKSEAIDGFRVECENFESIHNHSAYAMIDRM

SEQ ID NO: 10708 - protein, 267 aa, Methylophilaceae bacterium
  misc_feature (1)..(267): tr|Y0KF23|Y0KF23_9PROT GTP cyclohydrolase FolE2 OS=Meth ylophilaceae bacterium 11 OX=1101195 GN=folE2 PE=3 SV=1
MNLPTLQGIEDVQNTPDVRHLDINKVGIKSIRHPVIVKDRSGGEQATVAVFDMYVHLPHNFKGTHMSRFVEILNMNEHAISIESFETILREMVKRLEAESGYVEMHFPYFINKSAPISGVKSLLDYDVTFIGEIKNGEFSITVKVLVPVTSLCPCSKKISDYGAHNQRSHVTVTALLNDFMWLEDMIELVEKQASCELYGLLKRPDEKFVTERAYDNPKFVEDMVRDVAAQLNAEKRIDAYVVESENFESIHNHSAYALIEKDKRIK

SEQ ID NO: 10709 - protein, 263 aa, Methylophilaceae bacterium
  misc_feature (1)..(263): tr|A0A356CSE0|A0A356CSE0_9PROT GTP cyclohydrolase FolE2 OS=Methylophilaceae bacterium OX=2030816 GN=folE2 PE=3 SV=1
MTTHDHTCPIEDVQSSPDLRSLDIDKVGIKSIRHPVLVKDKTGGAQHTVATFNMYVYLPHNFKGTHMSRFVEILNMNDREISVESFENILREMIKRLEAKSCDVEMTFPYFINKTAPVSGVKSLLDYEVSFMGKIVDGVFKNTIKVVVPVTSLCPCSKKISDYGAHNQRSHVTVTAEINKFIWIEELIELIEKQASSELYGLLKRPDEKFVTEKAYDNPKFVEDMVRDVAAQLKLEKRINHFVVESENFESIHNHSAYALIEG

SEQ ID NO: 10710 - protein, 262 aa, Methylophilales bacterium
  misc_feature (1)..(262): tr|A0A0H4IY92|A0A0H4IY92_9PROT GTP cyclohydrolase FolE2 OS=Methylophilales bacterium MBRS-H7 OX=1623450 GN=fol E2 PE=3 SV=1
MNKIIDKIEDVQNTPDKRHLDIDKVGIKSIRHPISVKDKTGGDQSTVAMFDMYVHLPHNFKGTHMSRFVEILNENEKTISVKNFEKILRDMLERLESKAGDVEMTFPYFINKRAPVSGVESLLDYEVTFIGSIKDNQYINQIKVIIPVTSLCPCSKKISDYGAHNQRSHVTVTVETNDFVWIEDIIELVEKNASSELYGLLKRPDEKYVTEKAYDNPKFVEDMVRDIATDLNQNNKITSYTVESENFESIHNHSAYAMIQSS

SEQ ID NO: 10711 - protein, 268 aa, Methylophilales bacterium
  misc_feature (1)..(268): tr|A0A258SWK3|A0A258SWK3_9PROT GTP cyclohydrolase FolE2 OS=Methylophilales bacterium 16-45-9 OX=1970537 GN=fol E2 PE=3 SV=1
MTQTKPQSPIEDVQNTVDTRHLAIDKVGIKSIRHPVVVKDKSGGEQHTVAVFNMYVHLPQHFKGTHMSRFVEILNKNERAISVESFESILREMVSRLEAESGHVEMTFPYFVNKAAPISGVKSLLDYEVTFIGEINQGKYDITVKVLVPVTSLCPCSKKISDYGAHNQRSHVTVTALINNFIWIEDIIDLVEKQASCELYGLLKRPDEKYVTERAYDNPKFVEDMVRDVAAQLNAEKRIDAYTVESENFESIHNHSAYALIEKDKRKH

SEQ ID NO: 10712 - protein, 268 aa, Methylophilus medardicus
  misc_feature (1)..(268): tr|A0A5B8CQC8|A0A5B8CQC8_9PROT GTP cyclohydrolase FolE2 OS=Methylophilus medardicus OX=2588534 GN=folE2 PE=3 S V=1
MNQPVIPTTIEDVQNTPDVRRLDINKVGIKSIRHPVIVKDKSGGEQHTVALFDMYVHLPHNFKGTHMSRFVEILNMNEHAISIDSFETILRQMVERLEAESGYVEMRFPYFINKAAPVSGVKSLLDYEVTFIGEIKNGKFEITVQVMVPVTSLCPCSKKISDYGAHNQRSHVTVTALLNEFMWLEDLITLIEDQASCQLYGLLKRPDEKYVTERAYDNPKFVEDMVRDVAAQLNDEKRIVKYVVESENFESIHNHSAYALIERDKRVN

SEQ ID NO: 10713 - protein, 268 aa, Methylophilus methylotrophus
  misc_feature (1)..(268): tr|A0A5C7WI51|A0A5C7WI51_METME GTP cyclohydrolase FolE2 OS=Methylophilus methylotrophus OX=17 GN=folE2 PE=3 SV =1
MNQPVIPTMIEDVQNTPDVRQLDINKVGIKSIRHPVIVKDKTGGEQHTVAVFDMYVHLPHNFKGTHMSRFVEILNMNEHAISIDSFETILRQMVERLEAESGYIEMRFPYFINKAAPVSGVKSLLDYEVTFIGEIKNGQFEITVKVMVPVTSLCPCSKKISDYGAHNQRSHVTVTALLNEFMWLEDLITLIEEEASCQLYGLLKRPDEKYVTERAYDNPKFVEDMVRDVAAQLNAEKRIVKYVVESENFESIHNHSAYALIERDKRVN

SEQ ID NO: 10714 - protein, 268 aa, Methylophilus rhizosphaerae
  misc_feature (1)..(268): tr|A0A1G9F0N3|A0A1G9F0N3_9PROT GTP cyclohydrolase FolE2 OS=Methylophilus rhizosphaerae OX=492660 GN=folE2 PE=3 SV=1
MNQPVIPAVIEDVQNTPDVRQLDINKVGIKSIRHPVIVKDKTGGEQHTVAVFDMFVHLPHNFKGTHMSRFVEILNMNENAISIDSFETILRQMVERLEAESGYIEMHFPYFINKAAPVSGVKSLLDYEVTFIGEIKNGQFEITVQVMVPVTSLCPCSKKISDYGAHNQRSHVTVTALLNEFMWLEDLITLIEDQASCQLYGLLKRPDEKFVTERAYDNPKFVEDMVRDVAAQLNNEKRIVKYVVESENFESIHNHSAYALIERDKRIS

SEQ ID NO: 10715 - protein, 268 aa, Methylophilus sp.
  misc_feature (1)..(268): tr|A0A2S5N615|A0A2S5N615_9PROT GTP cyclohydrolase FolE2 OS=Methylophilus sp. OX=29541 GN=folE2 PE=3 SV=1
MNQPVIPTMIEDVQNTPDVRQLDINKVGIKSIRHPVIVKDKTGGEQHTVAVFDMYVHLPHNFKGTHMSRFVEILNMNEHAISIDSFETILRQMVERLEAESGYIEMRFPYFINKAAPVSGVKSLLDYEVTFIGEIKNGQFEITVKVMVPVTSLCPCSKKISDYGAHNQRSHVTVTALLNEFMWLEDLITLIEEQASCQLYGLLKRPDEKYVTERAYDNPKFVEDMVRDVAAQLNAEKRIVKYVVESENFESIHNHSAYALIERDKRVN

SEQ ID NO: 10716 - protein, 268 aa, Methylophilus sp.
  misc_feature (1)..(268): tr|A0A0Q6BEN2|A0A0Q6BEN2_9PROT GTP cyclohydrolase FolE2 OS=Methylophilus sp. Leaf416 OX=1736373 GN=folE2 PE=3 SV=1
MNQPVIPAVIEDVQNTPDVRRLDINKVGIKSIRHPVIVKDKTGGEQHTVAVFDMYVHLPHNFKGTHMSRFVEILNMNESAISIDSFETILRQMVERLEAESGYVEMRFPYFINKAAPISGVKSLLDYEVTFIGEIKNGQFEITVQVMVPVTSLCPCSKQISNYGAHNQRSHVTVTALLNEFIWLEDLISLVEDQASCQLYGLLKRPDEKFVTERAYDNPKFVEDMVRDVAAQLNEEKRIVKYVVESENFESIHNHSAYALIERDKRIN

SEQ ID NO: 10717 - protein, 216 aa, Methylopila sp.
  misc_feature (1)..(216): tr|A0A2H6BFP4|A0A2H6BFP4_9RHIZ GTP cyclohydrolase 1 OS= Methylopila sp. Yamaguchi OX=1437817 GN=folE PE=3 SV=1
MDAVVQHPFARVPIPAPKGHQTTRKPTREEAEAAVRTLIAWAGDDPAREGLIDTPKRVVKAYAELFGGYAEKAADSLERVFEEVQGYDDMVVLRDIPYFSHCEHHMVPFYGKAHVAYYPSNGVVGLSKIARVIDTFARRLQTQEALTAQITEAIDEHLKPRGVAVMIEGEHMCMAMRGIQKQGVSTVTTQFTGVFRDDPAEQVRFITLVRAAHAPR

SEQ ID NO: 10718 - protein, 180 aa, Methyloprofundus sedimenti
  misc_feature (1)..(180): tr|A0A1V8M7G3|A0A1V8M7G3_9GAMM GTP cyclohydrolase 1 OS= Methyloprofundus sedimenti OX=1420851 GN=folE PE=3 SV=1
MEEYYSKIIEAIGEDVTREGLVDTPKRAAKAFRFLNNGYEKTLEEVLNGAIFEADTEDMVIVKDIELYSLCEHHLLPFVGKCHIAYLPQGHVLGLSKLARIVDMYARRLQIQERLTKQIADAVETAVQAKGVAVVVEAKHMCMMMRGVEKQNSVMTTSVMTGIFRDEMSTRAEFLSLINR

SEQ ID NO: 10719 - protein, 269 aa, Methylorubrum extorquens
  misc_feature (1)..(269): tr|C5AQF4|C5AQF4_METEA GTP cyclohydrolase 1 OS=Methylor ubrum extorquens (strain ATCC 14718 / DSM 1338 / JCM 28 05 / NCIMB 9133 / AM1) OX=272630 GN=folE PE=3 SV=1
MYAKPDSTTLKARLAKAGDAMDAALKSLSYGMSDDERRMSAVGLQGMRGANDPGRPDITPDIAPLPESAQRVPNEVALGRPSRQEAEAAVRTLLRWAGDDPTREGLIETPARVVKAYEQIFGGYRADADALLERVFEEVEGYSDAVLVRDIPFYSHCEHHMVPFMGLAHIAYYPTKGVVGLSKLARVVDAFARRLQTQETMTAQIADTIESILQPRGCAVMIEAEHLCMAMRGVQKAGVSTITTQFRGVYKNDASEQVRFLTFVRNQKG

SEQ ID NO: 10720 - protein, 269 aa, Methylorubrum extorquens; identical to SEQ ID NO: 10719
  misc_feature (1)..(269): tr|Q84FV8|Q84FV8_METEX GTP cyclohydrolase 1 OS=Methylor ubrum extorquens OX=408 GN=folE PE=3 SV=1

SEQ ID NO: 10721 - protein, 269 aa, Methylorubrum populi
  misc_feature (1)..(269): tr|A0A177J8R1|A0A177J8R1_9RHIZ GTP cyclohydrolase 1 OS= Methylorubrum populi OX=223967 GN=folE PE=3 SV=1
MYAKPDSTTMKARVAKAGDAMDAALKSLSYGMSDDERRMSAVGLQGMRGANDPGRPESAPDIAPLPDSAQRVPNEVALGRPSRQEAEAAVRTLLRWAGDDPTREGLLDTPARVVKAYEQIFGGYRADADALLERVFEEVEGYSDAVLVRDIPFYSHCEHHMVPFMGLAHIAYYPTKGVVGLSKLARVVDAFARRLQTQETMTAQIADTIESILQPRGCAVMVEAEHLCMAMRGVQKAGVSTITTQFRGVYRTDPSEQVRFLTFVRNQKG

SEQ ID NO: 10722 - protein, 273 aa, Methylorubrum populi
  misc_feature (1)..(273): tr|A0A160PD73|A0A160PD73_9RHIZ GTP cyclohydrolase 1 OS= Methylorubrum populi OX=223967 GN=folE PE=3 SV=1
MYAKPDSTTMKARVAKAGDAMDAALKSLSYGMSDDERRMSAVGLQGMRGANDPGRPDTASDMAPDIAPLPESAQRVPNEVALGRPSRQEAEAAVRTLLRWAGDDPTREGLIETPARVVKAYEQIFGGYRMDADALLERVFEEVEGYSDAVLVRDIPFYSHCEHHMVPFMGLAHIAYYPTKGVVGLSKLARVVDAFARRLQTQETMTAQIADTIESILQPRGCAVMVEAEHLCMAMRGVQKAGVSTITTQFRGVYKSDPNEQVRFLTFVRNPKG

SEQ ID NO: 10723 - protein, 269 aa, Methylorubrum salsuginis
  misc_feature (1)..(269): tr|A0A1I4BLL1|A0A1I4BLL1_9RHIZ GTP cyclohydrolase 1 OS= Methylorubrum salsuginis OX=414703 GN=folE PE=3 SV=1
MYAKPDSTTMKARVAKAGDAMDAALKSLSYGMSNDERRTSAVGLDGMRGANDAGRPEGSANIAPLPESAQRVPNEVALGRPSRQEAEAAVRTLLRWAGDDPTREGLIDTPARVVKAYEQIFGGYKADADALLERVFEEVEGYSDVVLVRDIPFYSHCEHHMVPFMGLAHIAYYPIKGVVGLSKLARVVDAFARRLQTQETMTAQIADTIESILQPRGCAVMIEAEHLCMAMRGVQKAGVSTITTQFRGVYKDDPSEQVRFLTLVRGGKA

SEQ ID NO: 10724 - protein, 269 aa, Methylorubrum sp.
  misc_feature (1)..(269): tr|A0A4Z0EGF4|A0A4Z0EGF4_9RHIZ GTP cyclohydrolase 1 OS= Methylorubrum sp. Q1 OX=2562453 GN=folE PE=3 SV=1
MYAKPDSTTLKARVAKAGDAMDAALKSLSYGMSDDERRMSAVGLQEMRGANDPGRPDFTPDIAPLPESAQRVPNEVALGRPSRQEAEAAVRTLLRWAGDDPTREGLIETPARVVKAYEQLFGGYRADADALLERVFEEVEGYSDAVLVRDIPFYSHCEHHMVPFMGLAHIAYYPTKGVVGLSKLARVVDAFARRLQTQETMTAQIADTIESILQPRGCAVMIEAEHLCMAMRGVQKAGVSTITTQFRGVYKNDPSEQVRFLTFVRNQKG

SEQ ID NO: 10725 - protein, 269 aa, Methylorubrum zatmanii; identical to SEQ ID NO: 10719
  misc_feature (1)..(269): tr|A0A1W6RM29|A0A1W6RM29_9RHIZ GTP cyclohydrolase 1 OS= Methylorubrum zatmanii OX=29429 GN=folE PE=3 SV=1

SEQ ID NO: 10726 - protein, 209 aa, Methylosinus sp.
  misc_feature (1)..(209): tr|A0A177PID4|A0A177PID4_9RHIZ GTP cyclohydrolase 1 OS= Methylosinus sp. R-45379 OX=980563 GN=folE PE=3 SV=1
MDAVVKSLLDRNETAETPVERPTREEAEAAVRVLLRWAGDNPEREGLKETPRRVVKAYEEFFRGYQEDAGEELARVFEEVEGYDDLVLVRDIPFFSHCEHHVVPFVGKAHIAYYPTGGVVGLSKLARLVDVYARRLQTQEAMTAQIATAINQHLTPRGVAVLVEAEHMCMSMRGVMKQGSSTVTVQFSGVFRDDPAEQVHFYTLLRGAR

SEQ ID NO: 10727 - protein, 209 aa, Methylosinus sp.; identical to SEQ ID NO: 10726
  misc_feature (1)..(209): tr|A0A4R8HU29|A0A4R8HU29_9RHIZ GTP cyclohydrolase 1 OS= Methylosinus sp. sav-2 OX=2485168 GN=folE PE=3 SV=1

SEQ ID NO: 10728 - protein, 209 aa, Methylosinus sporium
  misc_feature (1)..(209): tr|A0A2U1SLJ3|A0A2U1SLJ3_METSR GTP cyclohydrolase 1 OS= Methylosinus sporium OX=428 GN=folE PE=3 SV=1
MDAVVKSLLDRKETAETPVQRPTREEAEAAVRVLLRWAGDNPDREGLKETPRRVVKAYEEFFRGYQEDAGEELARVFEEVEGYDDLVLVRDIPFFSHCEHHVVPFVGKAHIAYYPTGGVVGLSKLARLVDVYARRLQTQEAMTAQIATAINQHLTPRGVAVLVEAEHMCMSMRGVMKQGSSTVTVQFSGVFRDDPAEQVHFYTLLRGGR

SEQ ID NO: 10729 - protein, 209 aa, Methylosinus sporium
  misc_feature (1)..(209): tr|A0A549T981|A0A549T981_METSR GTP cyclohydrolase 1 OS= Methylosinus sporium OX=428 GN=folE PE=3 SV=1
MDAVVKSLLDRKETADTPVERPTREEAEAAVRVLLRWAGDNPDREGLKETPRRVVKAYEEFFRGYQEDAGEELARVFEEVEGYDDLVLVRDIPFFSHCEHHVVPFVGKAHIAYYPTGGVVGLSKLARLVDVYARRLQTQEAMTAQIATAINQHLTPRGVAVLVEAEHMCMSMRGVMKQGSSTVTVQFSGVFRDDPAEQVHFYTLLRGGR

SEQ ID NO: 10730 - protein, 209 aa, Methylosinus trichosporium
  misc_feature (1)..(209): tr|A0A2D2D4H1|A0A2D2D4H1_METTR GTP cyclohydrolase 1 OS= Methylosinus trichosporium OB3b OX=595536 GN=folE PE=3 SV=1
MDAVVKPLLSRPETAEKPVERPSREEAEAAVRVLLRWAGDNPDREGLKETPRRVVKAYEEFFRGYQEDAGESLARIFEEVEGYDDLVLVRDIPFVSHCEHHIVPFVGKAHIAYYPTGGVVGLSKLARLVDTYAKRLQTQEAMTAQIATAIDQHLAPRGVAVLVEAEHMCMSMRGVLKQGSSTVTVQFSGVFRDEPAEQVHFYTLLRGGR

SEQ ID NO: 10731 - protein, 267 aa, Methylotenera mobilis
  misc_feature (1)..(267): tr|C6WUB4|C6WUB4_METML GTP cyclohydrolase FolE2 OS=Meth ylotenera mobilis (strain JLW8 / ATCC BAA-1282 / DSM 17 540) OX=583345 GN=folE2 PE=3 SV=1
MDQTTHKNPIEDVQNTVDTRHLAIDKVGIKAIRHPVIVKDKTGGEQHTVAMFNMYVHLPQQFKGTHMSRFVEILNMNEHAISVESFETILREMVKRLEAESGHIEMTFPYFVNKAAPISGVKSLLDYEVTFIGEIHQDNFEITVKVLVPVTSLCPCSKKISNYGAHNQRSHVTVTALINDFIWIEDIIDLVEKQASCELYGLLKRPDEKFVTERAYDNPKFVEDMVRDVAAQLNAEKRIVAYTVESENFESIHNHSAYALIEKDKRV

SEQ ID NO: 10732 - protein, 268 aa, Methylotenera sp.
  misc_feature (1)..(268): tr|A0A2P5LCC6|A0A2P5LCC6_9PROT GTP cyclohydrolase FolE2 OS=Methylotenera sp. OX=2051956 GN=folE2 PE=3 SV=1
MDQTTHKTPIEDVQNTVDTRHLAIDKVGIKAIRHPVVVKDKTGGDQHTVAMFNMYVHLPQQFKGTHMSRFVEILNMNEHAISVESFETILREMVKRLEAESGHIEMTFPYFVNKAAPISGVKSLLDYEVTFIGEIHHGKFEITVKVLVPVTSLCPCSKKISSYGAHNQRSHVTVTALINDFIWIEDIIDLVEKQASCELYGLLKRPDEKYVTERAYDNPKFVEDMVRDVAAQLNAEKRIIAYTVESENFESIHNHSAYALIEKDKRQN

SEQ ID NO: 10733 - protein, 267 aa, Methylotenera sp.
  misc_feature (1)..(267): tr|A0A2S5L283|A0A2S5L283_9PROT GTP cyclohydrolase FolE2 OS=Methylotenera sp. OX=2051956 GN=folE2 PE=3 SV=1
MDQTKLNTPIEDVQNTVDTRHLAIDKVGIKSIRHPVIVKDKTGGEQHTVAMFNMYVHLPQQFKGTHMSRFVEILNMNEHAISVESFETILREMVKRLEAESGHIEMTFPYFVNKAAPISGVKSLLDYEVTFIGEIHQGNFEITVKVLVPVTSLCPCSKKISDYGAHNQRSHVTVTALINDFIWIEDIIDLVEKQASCELYGLLKRPDEKFVTERAYDNPKFVEDMVRDVAAQLNAEKRIVAYTVESENFESIHNHSAYALIEKDKRI

SEQ ID NO: 10734 - protein, 291 aa, Methylotenera versatilis
  misc_feature (1)..(291): tr|D7DIA5|D7DIA5_METV0 GTP cyclohydrolase FolE2 OS=Meth ylotenera versatilis (strain 301) OX=666681 GN=folE2 PE =3 SV=1
MNLPIDFSLQDVQNLADTRQLAIDKVGIRGIRHPVIVKDKAGSAQHTVAMFNMYVHLPKHFKGTHMSRFVEILNENEREISVESFKSILQEMAIRLEAKSGHIEMTFPYFINKSAPVSGVKSLLDYEVTLIGEIKNGKHDVKVKVLIPVTSLCPCSKKISAYGAHNQRSHVTITIALKEFMWLEDMIKMVEAQASSELYGLLKRPDEKYVTELAYDNPKFVEDMVRDIATVFKNDARVKSYVIECENFESIHNHSAYACISSEQAVSMEGKPAKPHETMSVSPCVSSESGY

SEQ ID NO: 10735 - protein, 267 aa, Methylotenera versatilis
  misc_feature (1)..(267): tr|D7DN60|D7DN60_METV0 GTP cyclohydrolase FolE2 OS=Meth ylotenera versatilis (strain 301) OX=666681 GN=folE2 PE =3 SV=1
MNQPIPSPIEDVQNTVDTRHIAIDKVGIKAIRHPVVVKDKSGGEQHTVAMFNMYVHLPQQFKGTHMSRFVEILNMNEHAISVESFETILREMVKRLEAESGHVEMTFPYFVNKAAPISGVKSLLDYEVTFIGEINQGKFDITVKVLVPVTSLCPCSKKISDYGAHNQRSHVTVTALINNFIWIEDIIDLVEKQASCELYGLLKRPDEKYVTERAYDNPKFVEDMVRDVAAQLSKESRIVAYTVESENFESIHNHSAYALIEHDKRKH

SEQ ID NO: 10736 - protein, 182 aa, Methylothermaceae bacteria
  misc_feature (1)..(182): tr|A0A148N4Q2|A0A148N4Q2_9GAMM GTP cyclohydrolase 1 OS= Methylothermaceae bacteria B42 OX=1798802 GN=folE PE=3 SV=1
MEKLFADLIETIGEDISREGLVDTPKRAAAAFRYLNSGYHQSLENVLNDAIFEADTEDMVIVRNIELYSLCEHHLLPFIGKCHVGYLPRGKVIGLSKVARIVEMYARRLQIQEKLTKQIADAIQSAIHPRGVAVVIEAKHLCMMMRGVEKQNSVMTTSSMLGVFRDQFSTRSEFLNLINRPL

SEQ ID NO: 10737 - protein, 201 aa, Methyloversatilis sp.
  misc_feature (1)..(201): tr|A0A1B3LIQ0|A0A1B3LIQ0_9PROT GTP cyclohydrolase 1 OS= Methyloversatilis sp. RAC08 OX=1842540 GN=folE PE=3 SV= 1
MNHSDTTRPSREEAEAAVRTLIQWAGDDPTREGLLDTPSRVVKSYEEFFAGYSIDPREVLSRTFEEVEGYDEVIALTGIRFESHCEHHMVPIIGKAHIAYLPDRRVVGISKLARLVEVFGKRLQIQEKMTVQIADALYEVLQPRGVAVVIEAAHECMTTRGVHKPGVAMVTSRMLGAFRDDASTRREFFNLIGRTAGGCEN

SEQ ID NO: 10738 - protein, 270 aa, Methyloversatilis universalis
  misc_feature (1)..(270): tr|F5RDX7|F5RDX7_METUF GTP cyclohydrolase FolE2 OS=Meth yloversatilis universalis (strain ATCC BAA-1314 / JCM 1 3912 / FAM5) OX=1000565 GN=folE2 PE=3 SV=1
MNARDPHATPLSMPDVQNSPDRRELPIEKVGIRGIRHPISVRGRDGWVQGTVAECGLFVSLPAHLKGTHMSRFVELLHELNTPLSPASFAPLMRTMLVRLEADSGEISMRFPYFRRKTAPVSGTESLLDYEVSYTARTDADGQHSFTLRVQIPVTSLCPCSKKISQYGAHNQRSHVTIEADIEGDLAIDDLIDIAEQEASCDLYGLLKRPDEKFVTERAYENPKFVEDMVRDIAARLNAEQRVRAYVLEVENFESIHNHSAWAQIRADKR

SEQ ID NO: 10739 - protein, 203 aa, Methyloversatilis universalis
  misc_feature (1)..(203): tr|F5RDN6|F5RDN6_METUF GTP cyclohydrolase 1 OS=Methylov ersatilis universalis (strain ATCC BAA-1314 / JCM 13912 / FAM5) OX=1000565 GN=folE PE=3 SV=1
MKSTDTARPTREEAEAAVRTLIRWTGDDPTREGLIDTPKRVVKAYEEFFAGYAEDPRDVLSRTFEEVEGYDEVIALTGIRFESHCEHHMVPIIGTAHVAYLPDRRVVGISKLARLVEVFAKRLQIQEKMTVQVADALYEVLQPRGVAVVIEAAHECMTTRGVHKPGVAMVTSRMLGAFREDARTRREFFDLIGRSGGSGSCGV

SEQ ID NO: 10740 - protein, 211 aa, Methylovirgula ligni
  misc_feature (1)..(211): tr|A0A3D9YUD1|A0A3D9YUD1_9RHIZ GTP cyclohydrolase 1 OS= Methylovirgula ligni OX=569860 GN=folE PE=3 SV=1
MDDVVKSLFERQPPKIITPAPDRPTREEAEAAVRTLLLWAGDDPEREGLRDTPTRVVKAYEELFSGYKNDANDVLSRVFEEVQGYDDLILVRDIPFFSHCEHHMVPFIGKAHIAYYVGEEGVVGLSKLARLVDIYARRLQTQEALTAQIIGAIDKHLRPRGAAVMLEAEHLCMSMRGVQKQGASTITNQFTGVFRDDPAEQVRFLTLVRGR

SEQ ID NO: 10741 - protein, 268 aa, Methylovorus glucosetrophus
  misc_feature (1)..(268): tr|C6X9M3|C6X9M3_METGS GTP cyclohydrolase FolE2 OS=Meth ylovorus glucosetrophus (strain SIP3-4) OX=582744 GN=fo lE2 PE=3 SV=1
MNQPVTPAIEDVQNTPDTRHLAIDKVGIKSIRHPVKVKDKTGGVQHTVAMFDMYVHLPHNFKGTHMSRFVEILNMNEREISVESFETILRAMVERLEAESGYVEMTFPYFINKAAPISGVQSLLDYEVTFIGEINKGKFDITVKVMVPVTSLCPCSKKISNYGAHNQRSHVTITALINDFIWVEDLIRIVETQASSELFGLLKRPDEKYVTEHAYDNPKFVEDMVRDVAAQLNVEKRIVKYVVESENFESIHNHSAYALIERDKRIQA

SEQ ID NO: 10742 - protein, 268 aa, Methylovorus sp.
  misc_feature (1)..(268): tr|A0A1A9T037|A0A1A9T037_9PROT GTP cyclohydrolase FolE2 OS=Methylovorus sp. MM2 OX=1848038 GN=folE2 PE=3 SV=1
MNQPIIPTIEDVQNTPDVRHLAIDKVGIKSIRHPVKVKDKTGGEQHTVAMFDMYVHLPHNFKGTHMSRFVEILNMNERAISIESFEGMLREMVKRLEAESGYIQMTFPYFINKAAPVSGVQSLLDYEVTFIGEIKNGKIDTTVKVLVPVTSLCPCSKKISNYGAHNQRSHVTITALINDFIWVEDLIRVVETQASSELFGLLKRPDEKYVTEHAYDNPKFVEDMVRDVAAQLNAEKRIDKYIVESENFESIHNHSAYALIENDKRKAA

SEQ ID NO: 10743 - protein, 180 aa, Methylovulum psychrotolerans
  misc_feature (1)..(180): tr|A0A1Z4BZQ5|A0A1Z4BZQ5_9GAMM GTP cyclohydrolase 1 OS= Methylovulum psychrotolerans OX=1704499 GN=folE PE=3 SV =1
MEEHFAKIIEAVGEDLSREGLIDTPKRAAKAFKFLNNGYEKTLEEVLNGAIFSADTEDMVIVKDIELYSLCEHHLLPFIGKCHVGYLPQGKVMGLSKVARIVDMYARRLQIQEKLTKQIADAIEQATGARGVAVVIEAKHLCMMMRGVEKQNSVMTTSVMTGIFRQHISTRTEFLNLINR

SEQ ID NO: 10744 - protein, 175 aa, Methylovulum sp.
  misc_feature (1)..(175): tr|A0A522DWT9|A0A522DWT9_9GAMM GTP cyclohydrolase 1 (Fr agment) OS=Methylovulum sp. OX=1916980 GN=folE PE=3 SV= 1
AKIIEAIGENLNREGLIDTPKRAAKAFKFLNNGYEKTLEDVLNGAIFTADTEDMVIVKDIELYSLCEHHLLPFIGKCHVGYLPQGKVLGLSKVARIVDMYARRLQIQEKLTKQIADAIETATNARGVAVVIEAKHLCMMMRGVEKQNSVMTTSVMTGIFRQHISTRSEFLNLINR

SEQ ID NO: 10745 - protein, 217 aa, Micavibrio sp.
  misc_feature (1)..(217): tr|A0A1Z8KX31|A0A1Z8KX31_9PROT GTP cyclohydrolase 1 OS= Micavibrio sp. TMED2 OX=1986633 GN=folE PE=3 SV=1
MNQPLTDKPVAHLGDKTHAELGKASKPSRAEAEEAVRTLLLWAGENPDREGLVDTPSRVVKAYQELFQGYEQDPISVLETTFDEAGGYDEVIALTNIEFTSHCEHHMLPVIGRAHIAYLPNKQIIGLSKLARLVDIYANRLQIQERMTAQIADTLQEVLKPRGVAVVIEAHHQCMSMRGIKKSGGMMKTSRLLGAFRDMPETRREFMALIDKAGACG

SEQ ID NO: 10746 - protein, 205 aa, Micavibrio sp.
  misc_feature (1)..(205): tr|A0A2D6K099|A0A2D6K099_9PROT GTP cyclohydrolase 1 OS= Micavibrio sp. OX=2024841 GN=folE PE=3 SV=1
MTSKIVDMNKNLNNEARPDREEAEQAVRTLLRYIGENPDREGLVDTPARVIRAYDEFFQGYNQDAAKELSKTFEDIEGFDDIVLVKDIEFTSHCEHHMVPINGIAHVAYWPDEAVVGISKLARIVDILSSRLVSQENMTNAIANVIEETLAPKGVAVYVDADHQCMSIRGVKKRSSSTVTTAFKGKLKDDAAAQMRFLTMIQKNY

SEQ ID NO: 10747 - protein, 199 aa, Microbacteriaceae bacterium
  misc_feature (1)..(199): tr|A0A3C1DYQ8|A0A3C1DYQ8_9MICO GTP cyclohydrolase 1 OS= Microbacteriaceae bacterium OX=1873462 GN=folE PE=3 SV= 1
MTRSTPEPVDAGRIEKAVLEILAAIGEDPGRPGLRSTPQRVAQAYAEFFAGLGVDPQEHLADSEEFSAASGDQGELVLLRDIEFRSICEHHLLPFSGVAHVAYVPRSRIIGLGRIPRVVETLAARPQLQERLTEEIADALQTGLDPRGVLVVLTATHGCVSDRGVRQAKSSTVTMASRGMLKEPLERAEIMAMIGAQRE

SEQ ID NO: 10748 - protein, 192 aa, Microbacteriaceae bacterium
  misc_feature (1)..(192): tr|A0A2T5X7Q1|A0A2T5X7Q1_9MICO GTP cyclohydrolase 1 OS= Microbacteriaceae bacterium MWH-Ta3 OX=207608 GN=folE P E=3 SV=1
MTVQHERIAAAVRDILDAIGEDVSRPGLADTPARVADAFAELYSGVGIDPVAMLIEPGSCADVDSHDTVIVRGIRFRSMCEHHLLPFHGIAHVAYVPESTVVGLGRIARLVDIVSSRPQVQERLGQEIAEALIRGVHARGTLVVLEATHECVAARGSRQESARAVTVSSSGELAIPAARDATLVLMGAPGGD

SEQ ID NO: 10749 - protein, 195 aa, Microbacterium aerolatum
  misc_feature (1)..(195): tr|A0A511ABD7|A0A511ABD7_9MICO GTP cyclohydrolase 1 OS= Microbacterium aerolatum OX=153731 GN=folE PE=3 SV=1
MAVDRERVERLTRELLEAIGEDPDRPGLKQTPARVAELYEEFFSGVGQDAAAPLARTISVSRGPAPETLPSGAVLLRDIRFRSVCEHHLLPFAGHAHIAYLPGEQVVGLGALVRVVETIAARPQVQERLGEQIADTIAEHLDTRGVLVVLDAVHGCVTMRGGRQTDASTLTIAARGEYTDAAARAEIVVLIGAGA

SEQ ID NO: 10750 - protein, 193 aa, Microbacterium agarici
  misc_feature (1)..(193): tr|A0A2A9DUK1|A0A2A9DUK1_9MICO GTP cyclohydrolase 1 OS= Microbacterium agarici OX=630514 GN=folE PE=3 SV=1
MSGVDRERIEAATRELLVAIGESVDRAGLENTPQRVAEAYAEFFHGVGEDPLELLGEGIPLDEGDSGEIVMVRDIALRSMCEHHLLPFLGTAHVAYAPHERVVGLGRIPRVVDVLAARPQVQERLGEQIADAISTGLDAAGVLVIIDAAHSCVTARGTQQARSTTVTLASRGTFSDPIQRAEVVALISRGDAS

SEQ ID NO: 10751 - protein, 196 aa, Microbacterium aurum
  misc_feature (1)..(196): tr|A0A1P8UBG2|A0A1P8UBG2_9MICO GTP cyclohydrolase 1 OS= Microbacterium aurum OX=36805 GN=folE PE=3 SV=1
MAVDRDRVAAAVRDILAAIGEDPDRPGLKATPQRVADAYAEFFAGVGEDAAAPLAHTISVSRGPAPDTLPSGAVLLRDIRFRSVCEHHLLPFAGRAHIAYLPGEQVVGLGALPKVVDTLASRPQVQERLGEQVADTIAGALDARGVLVVLSAHHECVTMRGGRQPDAATVTIAARGDLAEPAARAEIMMLLTGAGS

SEQ ID NO: 10752 - protein, 216 aa, Microbacterium azadirachtae
  misc_feature (1)..(216): tr|A0A0F0LGC8|A0A0F0LGC8_9MICO GTP cyclohydrolase 1 OS= Microbacterium azadirachtae OX=582680 GN=folE PE=3 SV=1
MAVDRDRVASLTRELLLAIGEDPERPGLKQTPARMADLYAEFFAGLGEDPGAPLAHTISVSHGPAPDTLPSGAVLLRGIRFRSVCEHHLLPFAGHAHIAYLPGEQVVGLGALVKVVEILASRPQVQERLGEQVADAIASHLDAQGVLVVMDAVHGCVTMRGGRQTEASTLTIAARGVYTDPVARAELIALIGAGARSVADPVAQPAEGHDASGTTA

SEQ ID NO: 10753 - protein, 197 aa, Microbacterium azadirachtae
  misc_feature (1)..(197): tr|A0A0F0LP36|A0A0F0LP36_9MICO GTP cyclohydrolase 1 OS= Microbacterium azadirachtae OX=582680 GN=folE PE=3 SV=1
MTVDRERVAALTRELLLAIGEDPERPGLKQTPARMADLYAEFFAGVGEDPAAPLAHTISVSHGPAPDTLPSGAVLLRGIRFRSVCEHHLLPFAGHAHIAYLPGEQVVGLGALVKVVEILASRPQVQERLGEQVADAIAAHLDAQGVLVVMDAVHGCVTMRGGRQTEASTLTIAARGVYTDPVARAELIALIGAGTGA

SEQ ID NO: 10754 - protein, 195 aa, Microbacterium chocolatum
  misc_feature (1)..(195): tr|A0A0M8MQ73|A0A0M8MQ73_9MICO GTP cyclohydrolase 1 OS= Microbacterium chocolatum OX=84292 GN=folE PE=3 SV=1
MAVDRERVSALVRDLLEAIGEDPDRPGLKHTPQRVADAYAEFFGGVGEDPAAPLAHTISVSRGPAPETLPSGAVMLRDILFRSVCEHHLLPFRGHAHIAYLPGEQVVGLGALPKVVDILAARPQVQERLGEQIADVIAAKLDARGVLVVLDAAHECLTMRGERQPDASTVTIAARGALAEPAARAEVVLLLGARP

SEQ ID NO: 10755 - protein, 195 aa, Microbacterium chocolatum
  misc_feature (1)..(195): tr|A0A3D9T930|A0A3D9T930_9MICO GTP cyclohydrolase 1 OS= Microbacterium chocolatum OX=84292 GN=folE PE=3 SV=1
MAVDRERVAVLVRELLEAIGEDPDRPGLRQTPTRVADSWAEFFGGVNQDAGAPLQHTISVSRGPAPDTLPSGAVMLRDIAFRSMCEHHLLPFRGRAHVAYLPGEEVVGLGALPRVIDILAARPQVQERLGEQVADTIASALDARGVLVVLDAVHECVTMRGGRQLDASTVTIAARGVYGDPVARAELVALIGARA

SEQ ID NO: 10756 - protein, 196 aa, Microbacterium enclense
  misc_feature (1)..(196): tr|A0A3S3LCE1|A0A3S3LCE1_9MICO GTP cyclohydrolase 1 OS= Microbacterium enclense OX=993073 GN=folE PE=3 SV=1
MAVDRERVAALVRELLEAIGEDPDRPGLRQTPARVADSWSEFFGGVGQDAGAPLEHTISVSRGPAPDTLPSGAVMLRDIAFRSMCEHHLLPFRGRAHVAYLPGEEVVGLGALPRVIDILAARPQVQERLGEQVADAIAGALDARGVLVVLDATHECVTMRGGRQPEASTVTIAARGVYTDPVARAELVTLIGRGHS

SEQ ID NO: 10757 - protein, 195 aa, Microbacterium enclense
  misc_feature (1)..(195): tr|A0A1G6GP97|A0A1G6GP97_9MICO GTP cyclohydrolase 1 OS= Microbacterium enclense OX=993073 GN=folE PE=3 SV=1
MAVDRERIAALVRELLEAIGEDPDRPGLRQTPTRVADSWAEFFGGVGQDAGAPLEHTISVSRGPAPDTLPSGAVMVRDIAFRSMCEHHLLPFRGRAHVAYLPGEEVVGLGALPRVIDILAARPQVQERLGEQIADAIASALDARGVLVVLDATHECVTMRGGRQPDASTVTIAARGVYTEPTARAELVALIGARA

SEQ ID NO: 10758 - protein, 217 aa, Microbacterium esteraromaticum
  misc_feature (1)..(217): tr|A0A1R4KER0|A0A1R4KER0_9MICO GTP cyclohydrolase 1 OS= Microbacterium esteraromaticum OX=57043 GN=folE PE=3 SV =1
MTMTIVPESDEVVLSPTAPKRTRIEAAPRPVDLDAAERAGRLFLQALGIDADAPETPDLARTPRRFAEAYAELLTPEPFDFTTFSNAEGYDELVLIRDIPVRSLCEHHLLLFTGVAHVAYLPDERVVGLSKIPRMVDHYACRPQTQERLTVQIADALAARLQPRGIGVVIEAAHSCMTLRGARATGANTTTSALRGTLRDDARSRAEFFALAADRTR

SEQ ID NO: 10759 - protein, 217 aa, Microbacterium esteraromaticum
  misc_feature (1)..(217): tr|A0A2V4P5H3|A0A2V4P5H3_9MICO GTP cyclohydrolase 1 OS= Microbacterium esteraromaticum OX=57043 GN=folE PE=3 SV =1
MTMTAVDDQRDLALARQAPRRVRIEAAPRPVDLAAAEHAAHLFLAALGIDPDAVDAPDLARTPRRLAEAYAELLSPQPFDFTTFANTEGYDELVLVRDIPVRSMCEHHLLPFTGVAHVAYLPGDRVVGLSKIPRMVDHYARRPQTQERLTVQIADALAARLQPRGIGVVIEAAHSCMTLRGARAAGSVTTTSALRGMLREDARSRAEFFALASDRAH

SEQ ID NO: 10760 - protein, 201 aa, Microbacterium foliorum
  misc_feature (1)..(201): tr|A0A1S7CWV4|A0A1S7CWV4_9MICO GTP cyclohydrolase 1 OS= Microbacterium foliorum OX=104336 GN=folE PE=3 SV=1
MSVDRARVERLTRELLEAIGEDPDRPGLKQTPTRLGDLYAEFFSGVGEDPAAPLAHTISVARGPAPDTLPSGAVLLRDIRFRSVCEHHLLPFVGRAHIAYLPGEQVVGLGALVRVVEILAGRPQVQERLGEQIADTIAEHLDTRGVLVVLDASHGCVTMRGGRQPEASTLTIAARGEYTEPIARAELIALIGASGSGMAHG

SEQ ID NO: 10761 - protein, 200 aa, Microbacterium foliorum
  misc_feature (1)..(200): tr|A0A0F0KFP7|A0A0F0KFP7_9MICO GTP cyclohydrolase 1 OS= Microbacterium foliorum OX=104336 GN=folE PE=3 SV=1
MAVDRARVERLTRELLEAIGEDPHRPGLKQTPARMGELYAEFFAGVGEDAAAPLAHTISVARGPAPDTLPSGAVLLRDIRFRSVCEHHLLPFAGRAHIAYLPGEQVVGLGALVRVVETLAARPQVQERLGEQIADTIAENLDTRGVLVVLDASHGCVTMRGGRQPEASTLTIAARGEYTDAVARTELIALIGASTGSAHA

SEQ ID NO: 10762 - protein, 195 aa, Microbacterium ginsengisoli
  misc_feature (1)..(195): tr|A0A0F0LV36|A0A0F0LV36_9MICO GTP cyclohydrolase 1 OS= Microbacterium ginsengisoli OX=400772 GN=folE PE=3 SV=1
MAVDRARVAALVRELLEAIGENPDRPGLRQTPERVADAYGEFFAGVDADPAAALYRTISISRGPAPDTLPSGAVMLRDIDFRSVCEHHLLPFRGRAHLAYLPGEKVVGLGALPRVVEVLSARPQVQERLGEQIADTIADGLDARGVLVVLDAVHGCVTSRGERQPDASTVTIAARGELAEPAARAELIALIGANR

SEQ ID NO: 10763 - protein, 201 aa, Microbacterium ginsengiterrae
  misc_feature (1)..(201): tr|A0A3R7H0E2|A0A3R7H0E2_9MICO GTP cyclohydrolase 1 OS= Microbacterium ginsengiterrae OX=546115 GN=folE PE=3 SV =1
MTVDIERVAALTRELLEAIGEDPERPGLKQTPQRVAELYAEFFAGVGQDAAEPLARTISVSRGPAPETLASGAVILRDIRFRSVCEHHLLPFAGRAHLAYLPGEQVVGLGALVKVVETLAARPQVQERLGEQIADTIDARLDTRGVLVVLDAVHGCVTMRGGRQPEASTLTVAARGAYVEPIARAEIIALIGSATTGDDLS

SEQ ID NO: 10764 - protein, 195 aa, Microbacterium hatanonis
  misc_feature (1)..(195): tr|A0A5C8HWN6|A0A5C8HWN6_9MICO GTP cyclohydrolase 1 OS= Microbacterium hatanonis OX=404366 GN=folE PE=3 SV=1
MTITTPVRVDRDRAVSAVRELLLAVGEDADRLGLLRTPERVADLFLDLFSGLGVDPASALGAPVALTENEQPGELVGLTGIPFRSVCEHHLLPFEGTVDIYYAPVRHIAGLSRIATLVELAARRPQLQERLGQQIADALMAVLRPHGVAVRIEAAHGCVAHLEPSAASARAITVATVGTIPDATWRLAASTHPAS

SEQ ID NO: 10765 - protein, 216 aa, Microbacterium hatanonis
  misc_feature (1)..(216): tr|A0A5C8HVQ3|A0A5C8HVQ3_9MICO GTP cyclohydrolase 1 OS= Microbacterium hatanonis OX=404366 GN=folE PE=3 SV=1
MTVDRERVRSLVRELLEAIGEDPERPGLRQTPERVADAYAEFFAGVGEDAAAPLAHTISISRGPAPETVPSGAVMLRGVDFRSICEHHLLPFRGVAHLAYLPGEQVVGLGALSKVVEVLAARPQVQERLGEQIADTIAASLDARGVLVVLDASHECVTMRGAQQKNATTVTIAARGELADPAARAELIALISLRQGQGPVAQAQGSAVQAQGSVTT

SEQ ID NO: 10766 - protein, 196 aa, Microbacterium hominis
  misc_feature (1)..(196): tr|A0A0B4D5K7|A0A0B4D5K7_9MICO GTP cyclohydrolase 1 OS= Microbacterium hominis OX=162426 GN=folE PE=3 SV=1
MAVDRDRVAAAVRDILVAIGEDPDRPGLKATPQRVADAYAEFFSGVGQDAAEPLAHTISVSRGPAPDTLPSGAVLLRDIRFRSVCEHHLLPFAGRAHIAYLPDEQVVGLGALPKVVEVLAARPQVQERLGEQIADTIAAALDARGVLVVLAARHECVTMRGGRQPDAATITIAARGELAEASARAEIMMLVTGTPA

SEQ ID NO: 10767 - protein, 196 aa, Microbacterium hominis
  misc_feature (1)..(196): tr|A0A134DEP8|A0A134DEP8_9MICO GTP cyclohydrolase 1 OS= Microbacterium hominis OX=162426 GN=folE PE=3 SV=1
MAVDRDRVAAAVRDILVAIGEDPDRPGLKATPQRVAEAYADFFAGVGEDAGAPLAHTISVSRGPAPDTLPSGAVLLRDIRFRSVCEHHLLPFAGRAHIAYLPGEQVVGLGALPRVVEVLAARPQVQERLGEQIADTIAAALDARGVLVVLGAHHECVTMRGGRQPDAATVTIAARGALADPAARAEIMMLVTGTPT

SEQ ID NO: 10768 - protein, 191 aa, Microbacterium humi
  misc_feature (1)..(191): tr|A0A1H4ISI3|A0A1H4ISI3_9MICO GTP cyclohydrolase 1 OS= Microbacterium humi OX=640635 GN=folE PE=3 SV=1
MTLSTAVPATLPDLDAAAEHARGFLTALGVDCDAPGLQRSPLRMAKAYLEMLSSDPFSMTTFPNDEDYAELVIVRSIPVRSLCEHHLLPFTGVAHVGYLPGERILGLSKFARVVEEFTHRPQTQERLTRQIVDRLDAALDARGVGAVIEAEHSCMTLRGVRAPGATTRTSAFTGALAEPAGRADFLAALAD

SEQ ID NO: 10769 - protein, 193 aa, Microbacterium humi
  misc_feature (1)..(193): tr|A0A1H4MP89|A0A1H4MP89_9MICO GTP cyclohydrolase 1 OS= Microbacterium humi OX=640635 GN=folE PE=3 SV=1
MARVDRERIEAATRELIAAIGESVDRPGLEQTPQRVADAYAEFFSGVGEDPLQHLGEGMPLDPSEAGEAVLVRGIAFRSMCEHHLLPFLGTADVAYVPDEKVVGLGRIPRVVGVLAARPQVQERLGEQIAETIETGLGAKGVLVVLDAQHACVTARGTRQAGSTTVTVASRGILRNPLERAELFALLGKGPQS

SEQ ID NO: 10770 - protein, 201 aa, Microbacterium hydrocarbonoxydans
  misc_feature (1)..(201): tr|A0A1H4QJT9|A0A1H4QJT9_9MICO GTP cyclohydrolase 1 OS= Microbacterium hydrocarbonoxydans OX=273678 GN=folE PE= 3 SV=1
MAVDRARVERLTRELLEAIGEDPDRPGLKQTPARMGDLYAEFFSGVGEDAGAPLAHTISVTRGPAPDTLASGAVLLRDIRFRSVCEHHLLPFAGRAHIAYLPGEQVVGLGALVRVVEILATRPQVQERLGEQIADTIAEHLDTRGVLVVLDASHGCVTMRGGRQPEASTLTIAARGEYTEPIARAELIALIGASGAGAAHG

SEQ ID NO: 10771 - protein, 211 aa, Microbacterium hydrocarbonoxydans
  misc_feature (1)..(211): tr|A0A0M2HRP3|A0A0M2HRP3_9MICO GTP cyclohydrolase 1 OS= Microbacterium hydrocarbonoxydans OX=273678 GN=folE PE= 3 SV=1
MTVAVDRERVERLTHELLEAIGEDPDRPGLKQTPARMAELYSEFFSGVGADAAAPLARTISVTRGPAPDTLPSGAVLLRDILFRSVCEHHLLPFAGHAHIAYLPGEQVVGLGALVKVVEILAARPQVQERLGEQIADTIAEHLDTRGVLVVLDASHGCVTMRGGRQPEASTLTIAARGEYADAAARAELIALIGASAGSATRFSDSGGALS

SEQ ID NO: 10772 - protein, 196 aa, Microbacterium ketosireducens
  misc_feature (1)..(196): tr|A0A0M2HDH4|A0A0M2HDH4_9MICO GTP cyclohydrolase 1 OS= Microbacterium ketosireducens OX=92835 GN=folE PE=3 SV= 1
MAVNRERVAELVRELLEAIGEDPDRPGLRQTPTRVADAYAEFFAGVGEDAAAPLAQTISVSRGPAPETLPSGAVMLRDIRFRSVCEHHLLPFRGLAHIAYLPGEQVVGLGALPKVVDVLAARPQVQERLGEQIADAIAGALDTRGVLVVLDAAHECLTMRGGRQPDATTVTVAARGELAEPAARAEIIALLTGVRP

SEQ ID NO: 10773 - protein, 196 aa, Microbacterium kyungheense
  misc_feature (1)..(196): tr|A0A543F0Z3|A0A543F0Z3_9MICO GTP cyclohydrolase 1 OS= Microbacterium kyungheense OX=1263636 GN=folE PE=3 SV=1
MSTTAQVAALHALPDEEEPDRERAIAAVADLLVALGHDPDAGDLAETPRRVADAFLELLTPEPFEMTTFANEEGYDEPVVVRGIPFVSLCRHHLLPFRGTATVGYLPGDRLVGLSKLARVVGHHARALQVQESLTMQIARTLDDALAPRGVGVVIEAEHLCMSVRGVRADSAVTTTTCFRGELAGDTALQTRFRDA

SEQ ID NO: 10774 - protein, 211 aa, Microbacterium lacticum
  misc_feature (1)..(211): tr|A0A4Y3UNB3|A0A4Y3UNB3_9MICO GTP cyclohydrolase 1 OS= Microbacterium lacticum OX=33885 GN=folE PE=3 SV=1
MAVDRERVAAAVREILAAIGEDPGRPGLKATPQRVADAYAEFFAGVGEDAAAPLAHTISVSRGPAPDTLPSGAVVLRDIRFRSVCEHHLLPFAGRAHIAYLPGEQVVGLGALPKVVDVLSARPQVQERLGEQIADTIAGALDARGVLVVLSAHHECVTMRGGRQPDAATVTIAARGELAEPAARAEIMLLISVGDGAESAADDSRDGGTGG

SEQ ID NO: 10775 - protein, 196 aa, Microbacterium laevaniformans
  misc_feature (1)..(196): tr|A0A150HF78|A0A150HF78_9MICO GTP cyclohydrolase 1 OS= Microbacterium laevaniformans OX=36807 GN=folE PE=3 SV= 1
MAVDRDRVAAAVRDILVAIGEDPDRPGLKATPQRVADAYADFFSGVGQDAAEPLAHTISVSRGPAPDTLPSGAVLLRDIRFRSVCEHHLLPFAGRAHIAYLPGEQVVGLGALPKVVDVLAARPQVQERLGEQIADTIAAALDARGVLVVLAAHHECVTMRGGRQPDAATITIAARGELAEPSARAEIMMLVTGTPA

SEQ ID NO: 10776 - protein, 194 aa, Microbacterium lemovicicum
  misc_feature (1)..(194): tr|A0A3Q9IYS8|A0A3Q9IYS8_9MICO GTP cyclohydrolase 1 OS= Microbacterium lemovicicum OX=1072463 GN=folE PE=3 SV=1
MAVDRERVVALVRELLVAIGEDPDRPGLRQTPTRVADAYSEFFSGVGEDAAAPLAHTISIARGPFPDTLPSGAVMLRGIRFRSVCEHHLLPFGGHAHIAYLPGEQVVGLGSLPKVVDILASRPQVQERLGEQIADTLAASLDARGVLVVLDAVHECVTMRGGRQSDSSTVTIAARGELAEPAARGEIIALLGRS

SEQ ID NO: 10777 - protein, 202 aa, Microbacterium liquefaciens
  misc_feature (1)..(202): tr|A0A4Y4BD17|A0A4Y4BD17_MICLQ GTP cyclohydrolase 1 OS= Microbacterium liquefaciens OX=33918 GN=folE PE=3 SV=1
MTVDRQRVERLTRELLEAIGEDPDRPGLKQTPSRMAELYSEFFSGVGEDPAEPLARTISVSRGPAPDTLPSGAVLLRDIRFRSVCEHHLLPFAGHAHIAYLPGEQVVGLGALVRVVEILAARPQVQERLGEQIADTIAEHLDTRGVLVVLDASHGCVTMRGGRQTEASTLTIAARGEYTDAVARAELITLIGASVPLGATAR

SEQ ID NO: 10778 - protein, 198 aa, Microbacterium mangrovi
  misc_feature (1)..(198): tr|A0A0B2AAK9|A0A0B2AAK9_9MICO GTP cyclohydrolase 1 OS= Microbacterium mangrovi OX=1348253 GN=folE PE=3 SV=1
MTSTATLHAVEDDPVDRARAMSAVADLLIALGYDVADEHLADTPRRVVDALIDMTTSHPFVMTTFPNDERYDQPVVVRGIRFTSLCEHHLLPFRGEVDVAYLPGTRLVGLSKLARVVERHARRLQVQERMTVQIADDLEEALDPRGVAVVVRAEHLCMSIRGVRTPGAETRTAAVRGAFQNDPELRFALRTETSGRMP

SEQ ID NO: 10779 - protein, 195 aa, Microbacterium mangrovi
  misc_feature (1)..(195): tr|A0A0B2A4P4|A0A0B2A4P4_9MICO GTP cyclohydrolase 1 OS= Microbacterium mangrovi OX=1348253 GN=folE PE=3 SV=1
MAVDRDRIRVLVRELLIAIGEDPDRPGLRQTPTRVADAYGEFFAGVGEDAAEPLSRTISVTHGPAPDTLPSGAVMLRDIRFRSVCEHHLLPFAGHAHIAYLPGEQVVGLGALPRVVEILANRPQVQERLGEQIADTIAGALDTRGVLVVLDATHECVTMRGGRQVDASTVTIAARGELAEPFARAELIALMGSSR

SEQ ID NO: 10780 - protein, 207 aa, Microbacterium mitrae
  misc_feature (1)..(207): tr|A0A5C8HNB6|A0A5C8HNB6_9MICO GTP cyclohydrolase 1 OS= Microbacterium mitrae OX=664640 GN=folE PE=3 SV=1
MCLHSPTNRRSDMAVDRARIAELVRELIVAIGEDPDRPGLHGTPERVALTWQEFFSGVGEDESEPLSHTISVSHGPAPETVPSGAVILRDVHFRSMCEHHLLPFLGRAHIAYLPGDDVVGLGALPKVVEILAARPQVQERLGEQIAETIAVKLNARGSLVILDAQHQCVTARGGKQVDASTVTIAARGELAEPAARAEIIALIGRGA

SEQ ID NO: 10781 - protein, 196 aa, Microbacterium oleivorans
  misc_feature (1)..(196): tr|A0A4R5YM01|A0A4R5YM01_9MICO GTP cyclohydrolase 1 OS= Microbacterium oleivorans OX=273677 GN=folE PE=3 SV=1
MAVDRERVSELVRELLVAIGEDPERPGLKLTPQRVADAYAEFFAGVGEDAAEPLAHTISVSRGPAPDTLPSGAVMLRDIRFRSVCEHHLLPFAGHAHVAYLPGEQVVGLGALPKVIDILAARPQVQERLGEQIADAIAGSIDTRGVLVVLDAVHECVTMRGGRQPSASTVTVAARGRFTEPAERAEAIALLTGGRT

SEQ ID NO: 10782 - protein, 196 aa, Microbacterium oleivorans
  misc_feature (1)..(196): tr|A0A031FUY5|A0A031FUY5_9MICO GTP cyclohydrolase 1 OS= Microbacterium oleivorans OX=273677 GN=folE PE=3 SV=1
MAVDRKRVSELVRELLEAIGEDPERPGLKLTPQRVADAYAEFFSGVGEDAAAPLAHTISVTRGPAPDTLPSGAVMLRDIRFRSVCEHHLLPFAGYAHVAYLPGEQVVGLGALPKVIDILAARPQVQERLGEQIADTIAGSIDTRGVLVVLDAVHECVTMRGGRQPSASTVTIAARGVFTEPADRAEAIALLTGGRT

SEQ ID NO: 10783 - protein, 201 aa, Microbacterium oxydans
  misc_feature (1)..(201): tr|A0A3S9WH58|A0A3S9WH58_9MICO GTP cyclohydrolase 1 OS= Microbacterium oxydans OX=82380 GN=folE PE=3 SV=1
MTVDRERVERLTRELLAAIGEDPDRPGLKQTPTRMAELYTEFFSGVGEDAAEPLARTISVSRGPAPDTLPSGAVLLRDIRFRSVCEHHLLPFAGHAHIAYLPGEQVVGLGALVRVVEILAARPQVQERLGEQIADTISEHLDTRGVLVVLDAAHGCVTMRGGRQTEASTLTIAARGEYNDPVSRAELITLIGAGGFGAAHG

SEQ ID NO: 10784 - protein, 238 aa, Microbacterium oxydans
  misc_feature (1)..(238): tr|A0A0F0LBC1|A0A0F0LBC1_9MICO GTP cyclohydrolase 1 OS= Microbacterium oxydans OX=82380 GN=folE PE=3 SV=1
MAVDRARVERLTRELLEAIGEDPDRPGLKQTPTRMGELYSEFFSGVGADAAEPLARTISVTRGPAPDTLPSGAVLLRDIRFRSVCEHHLLPFAGRAHLAYLPGEQVVGLGALVKVVEILASRPQVQERLGEQIADTIAGHLDTRGVLVVLDASHGCVTMRGGRQPEASTLTIAARGEYTDPVARAELITLIGASTGSATQGGGAATQGAGASTGSATQWVGSATQGVGSAAQGAGAQG

SEQ ID NO: 10785 - protein, 194 aa, Microbacterium paludicola
  misc_feature (1)..(194): tr|A0A4Y9FVH0|A0A4Y9FVH0_9MICO GTP cyclohydrolase 1 OS= Microbacterium paludicola OX=300019 GN=folE PE=3 SV=1
MPVDRERVAALTRELLVAIGEDPDRPGLRQTPERVADAYTEFFAGVGGDPAEPLSHTISVAHGPAPDTLPSGAVMLRDVRFRSICEHHLLPFAGHAHIAYLPGEQVVGLGALPKVVEVLAARPQVQERLGEQIADTIASSLDARGVLVVLEASHQCVTMRGARQSDSSTVTIAARGELAEPAARAEIIALLGRS

SEQ ID NO: 10786 - protein, 203 aa, Microbacterium paraoxydans
  misc_feature (1)..(203): tr|A0A1H1UQJ3|A0A1H1UQJ3_9MICO GTP cyclohydrolase 1 OS= Microbacterium paraoxydans OX=199592 GN=folE PE=3 SV=1
MTVDKGRVERLTRELLEAIGEDPDRPGIKQTPSRMAELYAEFFAGVGEDPAEPLAHTISVTRGPAPDTLPSGAVLLRDIRFRSVCEHHLLPFAGHAHIAYLPGEQVVGLGALVRVVEILAARPQVQERLGEQIADTIAENLDARGVLVVLDASHGCVTMRGGRQTEASTLTIAARGVYTDPVARAELVTLIGMTVPGAGTSRA

SEQ ID NO: 10787 - protein, 200 aa, Microbacterium pygmaeum
  misc_feature (1)..(200): tr|A0A1G7U577|A0A1G7U577_9MICO GTP cyclohydrolase 1 OS= Microbacterium pygmaeum OX=370764 GN=folE PE=3 SV=1
MPVDRDRVAALVRELLAAIGEDPERPGLKLTPQRVADAYAEFFSGVGTDAAAPLAHTISVSRGPAPDTLPSGAVMLRDIRFRSVCEHHLLPFRGHAHIAYLPGEQVVGLGALPKVVDILAARPQVQERLGEQIADTIAGSLDTRGVLVVLEASHECVTMRGDQQSEASTVTIAARGELAEPAARAELIALLGASRTLGNG

SEQ ID NO: 10788 - protein, 196 aa, Microbacterium saccharophilum
  misc_feature (1)..(196): tr|A0A5C8I9A5|A0A5C8I9A5_9MICO GTP cyclohydrolase 1 OS= Microbacterium saccharophilum OX=1213358 GN=folE PE=3 S V=1
MAVDRDRVAALVRELLEAIGEDPDRPGLKLTPQRVADAYAEFFAGVGEDAAAPLAHTISVTRGPAPDTLPSGAVMLRDVRFRSVCEHHLLPFAGHAHIAYLPGEQVVGLGALPRVVDVLSARPQVQERLGEQIADVIAASLDTRGVLVILDAVHECVTMRGGRQPDASTVTIAARGELAEPAARAEVIALLAGGAA

SEQ ID NO: 10789 - protein, 207 aa, Microbacterium saperdae
  misc_feature (1)..(207): tr|A0A543BC76|A0A543BC76_9MICO GTP cyclohydrolase 1 OS= Microbacterium saperdae OX=69368 GN=folE PE=3 SV=1
MTVAVDRGRVERLTRELLEAIGEDPDRPGLKQTPSRMAELYSEFFSGVGEDAAEPLARTISVTRGPAPDTLPSGAVLLRDIRFRSVCEHHLLPFAGRAHLAYLPGEQVVGLGALVRVVEILASRPQVQERLGEQIADTIAEHLDTRGVLVVLDASHGCVTMRGGRQPEASTLTIAARGDYTDPIARAELIALIGASTAAAAHARQPE

SEQ ID NO: 10790 - protein, 195 aa, Microbacterium sediminis
  misc_feature (1)..(195): tr|A0A1B9NHN3|A0A1B9NHN3_9MICO GTP cyclohydrolase 1 OS= Microbacterium sediminis OX=904291 GN=folE PE=3 SV=1
MTVDRERVAELTRELLLAIGEDPDRPGLRQTPDRVADMLAEFFSGVGEDPAAPLAHPISVAQGPAPETLPTGAVIVRDIRFRSICEHHLLPSTGRAHVAYLPGERVVGLGALPRVVEILANRPQVQERLGEQIADTLFHSLDARGVVVVLDAVHQCVTMRGGRQPDSSTVTVAARGELADPAARAEIIALIGGAS

SEQ ID NO: 10791 - protein, 207 aa, Microbacterium sorbitolivorans
  misc_feature (1)..(207): tr|A0A367Y6A9|A0A367Y6A9_9MICO GTP cyclohydrolase 1 OS= Microbacterium sorbitolivorans OX=1867410 GN=folE PE=3 SV=1
MPQSQRADIALLDPEPVHVDGTATHDLARAELAATDFLEALGVSLDSEHLRATPGRMARAWAEMLTPRPFELTTFPNEEGYDELVTVRDVPVQSICEHHLLPFTGRATVGYLPGERIVGLSKLARIVEHFARRPQTQERLTRQVADWLQENLSPLAVGVVITAEHSCMSLRGAHVAGSNTVTSSLLGRLRTDPHSRREFLALSGVTA

SEQ ID NO: 10792 - protein, 208 aa, Microbacterium sorbitolivorans
  misc_feature (1)..(208): tr|A0A367XTJ7|A0A367XTJ7_9MICO GTP cyclohydrolase 1 OS= Microbacterium sorbitolivorans OX=1867410 GN=folE PE=3 SV=1
MAVDTTRIAELTRELLVAIGEDPDRAGLRETPERVAGAMAELFAGIGQDPEEPLRRTIDVSRGPAPETVPTGAVLVRDITFRSVCEHHLLPFQGRAHIAYLPADAVVGLGSLARVLDICSARPQVQERLGEQVADAIEHALDARGVFVMLDAEHQCLRTRGEKRPDASTVTVAARGDLATQAARAEMAAYIIIGEQNKATTGVKGRDA

SEQ ID NO: 10793 - protein, 204 aa, Microbacterium sp.
  misc_feature (1)..(204): tr|A0A542FSU5|A0A542FSU5_9MICO GTP cyclohydrolase 1 OS= Microbacterium sp. SLBN-146 OX=637392 GN=folE PE=3 SV=1
MAVDRERVAALVRELLEAIGEDPARPGLRMTPERVADAYSEFFSGVGVDAAAPLAHTISVSRGPAPDTLPSGAVVLRGIRFRSVCEHHLLPFRGRAHIAYLPGEQVVGLGALPKVVDVLASRPQVQERLGEQVADTIASSLDARGVLVVLEATHECVTMRGDQQSDSSTVTIAARGELAEPAARAEIIALLVAARPAFDTGDGR

SEQ ID NO: 10794 - protein, 217 aa, Microbacterium sp.
  misc_feature (1)..(217): tr|A0A0U4GS70|A0A0U4GS70_9MICO GTP cyclohydrolase 1 OS= Microbacterium sp. XT11 OX=367477 GN=folE PE=3 SV=1
MSLAYAEEPAAPLDERAVVDRLRISAGHRTIDVAAAEHAARAFLRALGVEVDVLDASDLARTPHRLAAAYAELLTPEPFDFTTFANAEGYDELVLVRDIPVRSVCEHHLLPFTGVAHLAYLPADRVVGLSKLPRLVDHHARRPQTQERLTVQVADALDRHLRPRGVGVVIEAAHSCMTLRGARAGTATTTTSAVRGALRDEARSRAEFFALAGGRAH

SEQ ID NO: 10795 - protein, 199 aa, Microbacterium telephonicum
  misc_feature (1)..(199): tr|A0A498CA73|A0A498CA73_9MICO GTP cyclohydrolase 1 OS= Microbacterium telephonicum OX=1714841 GN=folE PE=3 SV= 1
MAIDRDRVAAAVRELLEAIGEDPDRPGLKTTPTRVADLYAEFFAGVGQDAAAPLAHTISVTRGPAPETLPSGAVMLRDIRFRSVCEHHLLPFAGRAHIAYLPGEEVVGLGALPRVVDVLAARPQVQERLGEQIADMIAGSLDTRGVLVVLDAAHQCVTMRGGRQPDTSTVTIAARGALAEPAGRAEIIALLTSAHGGAA

SEQ ID NO: 10796 - protein, 195 aa, Microbacterium testaceum
  misc_feature (1)..(195): tr|A0A147EZK0|A0A147EZK0_MICTE GTP cyclohydrolase 1 OS= Microbacterium testaceum OX=2033 GN=folE PE=3 SV=1
MAVDRERVAALVREMLEAIGEDPDRPGLRQTPTRVAESWSEFFGGVGQDAAAPLQHTISVTRGPAPDTLPSGAVMLRDIAFRSMCEHHLLPFRGRAHVAYLPGEEVVGLGALPRVIDILAARPQVQERLGEQVADTVASALDARGVLVVLDAVHECVTMRGGRQLDASTVTIAARGVYTDAAARSELVALIGARA

SEQ ID NO: 10797 - protein, 195 aa, Microbacterium testaceum
  misc_feature (1)..(195): tr|A0A4Y3QJA3|A0A4Y3QJA3_MICTE GTP cyclohydrolase 1 OS= Microbacterium testaceum OX=2033 GN=folE PE=3 SV=1
MAVDRERVAVLVRELLEAIGEDPDRPGLRQTPTRVADSWAEFFGGVNQDAGAPLQHTISVSRGPAPDTLPSGAVMLRDIAFRSMCEHHLLPFRGRAHVAYLPGEEVVGLGALPRVIDILAARPQVQERLGEQVADAIASALDARGVLVVLDAVHECVTMRGGRQLDASTVTIAARGVYGDPAARAELVALIGARA

SEQ ID NO: 10798 - protein, 199 aa, Microbacterium trichothecenolyticum
  misc_feature (1)..(199): tr|A0A0M2HEN0|A0A0M2HEN0_9MICO GTP cyclohydrolase 1 OS= Microbacterium trichothecenolyticum OX=69370 GN=folE_2 PE=3 SV=1
MSTPAHATALHALPDEAPIDRDAAMLAVGDLLAALGFDPDEGDLVETPRRVADAFIEMITPEPFEMTTFANEDAYDEPVVVRGIPFVSLCRHHLLPFRGTATVGYVPGDRLVGLSKLARVVAHHSRGLQVQEALTVQIARTLDNALEPRGVGVVVEAEHLCMSARGVRTDAALTTTTAFRGVLAADPAMQARFVGTRPV

SEQ ID NO: 10799 - protein, 196 aa, Microbacterium trichothecenolyticum
  misc_feature (1)..(196): tr|A0A0M2HLH1|A0A0M2HLH1_9MICO GTP cyclohydrolase 1 OS= Microbacterium trichothecenolyticum OX=69370 GN=folE_1 PE=3 SV=1
MAVDRERVAVLVRELLEAIGEDPERPGLKQTPERVADAYTEFFAGVGTDAAAPLAHTISVSRGPAPDTLPSGAVILRDIIFRSVCEHHLLPFRGHAHLAYLPGEQVVGLGALPKVVDILSSRPQVQERLGEQIADVIAGSLDARGVLVVLDASHECVTMRGGRQPDASTVTIAARGELAEPAARAELIALIGAGRG

SEQ ID NO: 10800 - protein, 193 aa, Microbispora bryophytorum
  misc_feature (1)..(193): tr|A0A544X859|A0A544X859_9ACTN GTP cyclohydrolase 1 OS= Microbispora bryophytorum OX=1460882 GN=folE PE=3 SV=1
MGPPPGFDHDRIQKAVREILFAIGEDPDRDGLRDTPSRVARAFAEQFAGLGQRPEDALTTMFDADHDEMVLVKDIEVMSTCEHHLLPFHGVAHIGYTPNDKGRITGLSKLARLVDVYARRPQVQERMTSQIADGLMQVLEPRGVIVVIEAEHMCMTMRGVRKPGAKTITSAVRGDFRSSEATRAEAMSLILRG

SEQ ID NO: 10801 - protein, 196 aa, Microbispora bryophytorum
  misc_feature (1)..(196): tr|A0A544XPG3|A0A544XPG3_9ACTN GTP cyclohydrolase 1 OS= Microbispora bryophytorum OX=1460882 GN=folE PE=3 SV=1
MRSLRVIAEPRDGVDLAAAERAAGQFLEALGISTDSESLRETPARMAKAYAELFTPRPFDLTTFPNEEGYDELVLARAIPVRSVCEHHLLPFAGVAHVGYLPGDRILGLSKLARVVEHFARRPQVQERLTKQVADWLADRLRPAGVGVVIEAEHTCMTLRGVRAVGSTTVTSTLLGILRKDARSRQEFFALTGTRT

SEQ ID NO: 10802 - protein, 194 aa, Microbispora hainanensis
  misc_feature (1)..(194): tr|A0A544YNJ7|A0A544YNJ7_9ACTN GTP cyclohydrolase 1 OS= Microbispora hainanensis OX=568844 GN=folE PE=3 SV=1
MVGPPPGFDHDRIEKAVREILFAIGEDPDRDGLRDTPARVARAFAEQFAGLGQRPEDALTTMFDADHDEMVLVKDIEVMSTCEHHLLPFHGVAHIGYTPNEKGRITGLSKLARLVDVYARRPQVQERMTSQIADGLMQVLEPRGVIVVIEAEHMCMTMRGVRKPGAKTITSAVRGDFRSSEATRAEAMSLILRG

SEQ ID NO: 10803 - protein, 199 aa, Microbispora hainanensis
  misc_feature (1)..(199): tr|A0A544Y819|A0A544Y819_9ACTN GTP cyclohydrolase 1 OS= Microbispora hainanensis OX=568844 GN=folE PE=3 SV=1
MRSGTALRVIDEQRDGVDLAAAERAAGEFLEALGISTDSESLRDTPARMARAYAELFTPRPFDLTTFPNEEGYDELVLARSIPVRSVCEHHLLPFAGVAHVGYLPGDRILGLSKLARVVEHFARRPQVQERLTKQVADWLAERLRPRGVGVVIEAEHTCMTLRGVRAVGSTTVTSTLLGILREDARSRQEFFALTGTRP

SEQ ID NO: 10804 - protein, 199 aa, Microbispora rosea
  misc_feature (1)..(199): tr|A0A1N6WP14|A0A1N6WP14_9ACTN GTP cyclohydrolase 1 OS= Microbispora rosea OX=58117 GN=folE PE=3 SV=1
MRPGTTLRMIDEPRDGVDLAAAERAAREFLEALGVSADSESLRETPARMARAYAELFTPRPFDLTTFPNEEGYDELVLARSIPVRSVCEHHLLPFAGVAHVGYLPGDRILGLSKLARVVEHFARRPQVQERLTKQVADWLADRLRPAGVGVVIEAEHTCMTLRGVRAVGSTTVTSTLLGILREDARSRQEFFALTGTRP

SEQ ID NO: 10805 - protein, 264 aa, Microbispora rosea
  misc_feature (1)..(264): tr|A0A1N7HHY4|A0A1N7HHY4_9ACTN GTP cyclohydrolase FolE2 OS=Microbispora rosea OX=58117 GN=folE2 PE=3 SV=1
MLEDVQASPDTRGISLDEVGIEGLRYPVLVADGQGAKRETVATASMSVSLGPEVKGAHLSRFIEVLHNAREQLTPHSAAGLADDLRQHMGSPSARVHLTFPYFLEREAPVTRARAYVEYSCAVAAVSRGNGTAVTLSVEVPVTSVCPCSKAISDRGAHNQRGHITIDIKPADHPTDLWFDELISLAEGAASSPVYALLKRPDERHVTMAGYDNPVFVEDMVRNVCLALDVADRVASYRVRAVNDESIHNHAAYAAVSWTSPRGA

SEQ ID NO: 10806 - protein, 198 aa, Microbispora sp.
  misc_feature (1)..(198): tr|A0A544XPL0|A0A544XPL0_9ACTN GTP cyclohydrolase 1 OS= Microbispora sp. SCL1-1 OX=2592812 GN=folE PE=3 SV=1
MAEPMAGPPSGFDHDRIEKAVREILFAIGEDPDRDGLRDTPARVARAFAEQFAGLGQRPEDALTTMFDADHDEMVLVKDIEVMSTCEHHLLPFHGVAHIGYTPNEKGRITGLSKLARLVDVYARRPQVQERMTSQIADGLMQVLEPRGVIVVIEAEHMCMTMRGVRKPGAKTITSAVRGDFRSSEATRAEAMSLILRG

SEQ ID NO: 10807 - protein, 201 aa, Microbispora sp.
  misc_feature (1)..(201): tr|A0A5J5JVX4|A0A5J5JVX4_9ACTN GTP cyclohydrolase I Fol E OS=Microbispora sp. Gxj-6 OX=2614688 GN=folE PE=4 SV= 1
MTVAEPHAAGTPSGFDHGRIEKAVREILLAIGENPDRDGLRDTPARVARAYAEQFAGLGQRPEDALTTMFDADHDEMVLVKDIEVMSTCEHHLLPFQGVAHIGYTPNEKGRITGLSKLARLVDVYARRPQVQERMTSQIADGLMQVLEPRGVIVVIEAEHMCMTMRGVRKPGAKTITSAVRGDFRTSEATRAEAMSLILRG

SEQ ID NO: 10808 - protein, 201 aa, Microbispora tritici
  misc_feature (1)..(201): tr|A0A5D0NNL9|A0A5D0NNL9_9ACTN GTP cyclohydrolase 1 OS= Microbispora tritici OX=2604471 GN=folE PE=3 SV=1
MTVAEPHAAEPPSGFDHGRIEKAVREILIAIGENPDRDGLRDTPARVARAYAEQFAGLGQRPEDALTTMFDADHDEMVLVKDIEVMSTCEHHLLPFHGVAHIGYTPNEKGRITGLSKLARLVDVYARRPQVQERMTSQIADGLMQVLEPRGVIVVIEAEHMCMTMRGVRKPGAKTITSAVRGDFRTSEATRAEAMSLILRG

SEQ ID NO: 10809 - protein, 214 aa, Microbispora triticiradicis
  misc_feature (1)..(214): tr|A0A372PD54|A0A372PD54_9ACTN GTP cyclohydrolase 1 OS= Microbispora triticiradicis OX=2200763 GN=folE PE=3 SV= 1
MTNAVYGSTPGQSAAVPAQPGPAAPRPVDTKRVTELIGQLLVALGEDPEREGLVDTPARVASWWSSFLTPEPCAMVTSFTETRLSAQLVVVGGMSVWSLCEHHLLPMNLEVAIGYLPDGEVIGLSKFGRIAQRYAGRLQVQERFTRQVAEEIAGVVASKDVAVAVRGTHLCMSMRGVRMEAARTTTLQVGGLFKHDPVLSQQFLTIASGQRGAV

SEQ ID NO: 10810 - protein, 201 aa, Microbispora triticiradicis; identical to SEQ ID NO: 10808
  misc_feature (1)..(201): tr|A0A372P887|A0A372P887_9ACTN GTP cyclohydrolase 1 OS= Microbispora triticiradicis OX=2200763 GN=folE PE=3 SV= 1

SEQ ID NO: 10811 - protein, 179 aa, Microbulbifer agarilyticus
  misc_feature (1)..(179): tr|A0A1Q2M654|A0A1Q2M654_9GAMM GTP cyclohydrolase 1 OS= Microbulbifer agarilyticus OX=260552 GN=folE PE=3 SV=1
MKEHYAHIIEAIGEDLQRPGLLDTPKRAAKAMQYLTRGYQQTVEEVVNDALFPSDCSEMVLVKDIELYSMCEHHLLPFIGKAHVAYIPDGKVLGLSKVARIVDMFARRLQIQEQLTVQIAETVRQVTGAAGVGVIVEAKHMCMMMRGVEKQNSVMKTSAMLGSFRSEQATRNEFLSLIR

SEQ ID NO: 10812 - protein, 105 aa, Microbulbifer aggregans
  misc_feature (1)..(105): tr|A0A1C9W8H1|A0A1C9W8H1_9GAMM GTP cyclohydrolase 1 typ e 2 OS=Microbulbifer aggregans OX=1769779 GN=AUP74_0201 0 PE=4 SV=1
MYKLCVYIPESHLEEVKQALFGTGAGRIGDYDSCCFQVPGTGQFRPLEGSQPFIGQTGEVERVSEYRVEMVCADHLVDAALAAMREAHPYEEPAFDLWKLDDRCN

SEQ ID NO: 10813 - protein, 179 aa, Microbulbifer aggregans
  misc_feature (1)..(179): tr|A0A1C9WBT4|A0A1C9WBT4_9GAMM GTP cyclohydrolase 1 OS= Microbulbifer aggregans OX=1769779 GN=folE PE=3 SV=1
MKEHYARIIEAIGEDLQRPGLKDTPERAAKAMAYLTRGYEQTVEEVVNEALFPSDCSEMVLVKDIELYSLCEHHMLPFIGKAHVAYIPDGKVLGLSKIARIVDMFARRLQIQEQLTVQVAETIQRVTGAAGVGVIIEAKHMCMMMRGVEKQNSVMKTSAMLGSFRSQQATRTEFLSLIR

SEQ ID NO: 10814 - protein, 179 aa, Microbulbifer donghaiensis
  misc_feature (1)..(179): tr|A0A1M4XAS9|A0A1M4XAS9_9GAMM GTP cyclohydrolase 1 OS= Microbulbifer donghaiensis OX=494016 GN=folE PE=3 SV=1
MNEHYARIIEAIGENPQRPGLKDTPKRAAKAMQYLTRGYQQTVEEIVNDALFPSDCSEMVLVKDIELYSLCEHHLLPFIGKAHVAYIPDGKVVGLSKVARIVDMFARRLQIQEQLTVEIAETLQRVTNAAGVGVIIEAKHMCMMMRGVEKQNSVMKTSAMLGTFRSNQATRNEFLSLIR

SEQ ID NO: 10815 - protein, 180 aa, Microbulbifer marinus
  misc_feature (1)..(180): tr|A0A1H3WTP3|A0A1H3WTP3_9GAMM GTP cyclohydrolase 1 OS= Microbulbifer marinus OX=658218 GN=folE PE=3 SV=1
MNEHYARIIEAIGEDPQRPGLKDTPKRAAKAMQYLTRGYQQTVEEIVNDALFPSDCSEMVLVKDIELYSLCEHHLLPFIGKAHVAYIPDGKVVGLSKVARIVDMFARRLQIQEQLTVEIAETLQRVTNAAGVGVIIEAKHMCMMMRGVEKQNSVMKTSAMLGTFRSNQATRNEFLSLISQ

SEQ ID NO: 10816 - protein, 301 aa, Microbulbifer sp.
  misc_feature (1)..(301): tr|A0A0X3U9L6|A0A0X3U9L6_9GAMM GTP cyclohydrolase FolE2 OS=Microbulbifer sp. ZGT114 OX=1685377 GN=folE2 PE=3 S V=1
MQYSGSLPDIAKTQIETGTYPLQWVGMEGIAAPINIATAKDQQQVVAAKANVYVSLDDAAEKGIHMSRLHAILNELSTTACDKDGLGKVLKKMVNSQAGISQGARIELAFDLLLPKPSLLSNETGYQTYPIEICGQLQSGQYDYELKLSVPYSSTCPCSAALSRQLLANAIDSAFATSSIDKQTLLTWVQAHSIATPHSQRSYAYLNLSLGDNPLPFLPPLIFGIEEAIGTPVQTMVKRSDEQEFARLNADNLMFCEDAARRIKAMLEQSTWIKDYWFKVEHQESLHAHDAVVIDRKFPAR

SEQ ID NO: 10817 - protein, 197 aa, Microbulbifer sp.
  misc_feature (1)..(197): tr|A0A510J0R4|A0A510J0R4_9GAMM GTP cyclohydrolase 1 OS= Microbulbifer sp. GL-2 OX=2591606 GN=folE2_2 PE=3 SV=1
MEVGFIRSLLEGVGVNDMKEHYARIIEEIGEDPQRPGLKSTPRRAAKAMKYLTSGYDQTVEDVVNNAIFPFDSSEMVLVKDIELYSLCEHHLLPFIGYSHVAYIPNGKILGISKLARIVDMFARRLQIQERLTTQIAETLQGIIGATGVGVVIEAKHTCMMMRGPQKQNSMMRTLAMLGTFRSNQATRNEFFSLLRQ

SEQ ID NO: 10818 - protein, 300 aa, Microbulbifer thermotolerans
  misc_feature (1)..(300): tr|A0A143HPU5|A0A143HPU5_9GAMM GTP cyclohydrolase FolE2 OS=Microbulbifer thermotolerans OX=252514 GN=folE2 PE= 3 SV=1
MHVLTTLPDIAKSQTESGNYPLQWVGMEGIAVPLSISIGNNQHQTVAAKANAYVSLDNAAEKGIHMSRLHTVLNHLSSTNCDKNALDTALERMIESQEGLSQSAKIELNFDLVLTKSSLLSQEAGFQSYPVKIIGERISGNSRYEIGLTVPYSSTCPCSAALSRQLLATAIDREFSASNIDKQSLLMWLQEKSIATPHSQRSYAYLNLKLGDNSWLPLSSFISQIEEAIGTPVQTMVKRTDEQEFARLNADNLMFCEDAARKIKTLLEQSTWITDYWFKVEHRESLHAHNAVVIDQKSPN

SEQ ID NO: 10819 - protein, 179 aa, Microbulbifer thermotolerans
  misc_feature (1)..(179): tr|A0A143HKX6|A0A143HKX6_9GAMM GTP cyclohydrolase 1 OS= Microbulbifer thermotolerans OX=252514 GN=folE PE=3 SV= 1
MNEHYARIIEAIGEDPQRHGLRDTPERAAKAMEYLTRGYRQSVEEVVNGALFPSDCSEMVLVKDIELYSLCEHHLLPFIGKAHVAYIPDGKVLGLSKVARIVDMYARRLQIQEQLTVQIAETLRQVTGAAGVGVIIEAKHMCMMMRGVEKQNSVMKTSAMLGAFRSNQATRNEFLSLIR

SEQ ID NO: 10820 - protein, 179 aa, Microbulbifer yueqingensis
  misc_feature (1)..(179): tr|A0A1G8V7Q6|A0A1G8V7Q6_9GAMM GTP cyclohydrolase 1 OS= Microbulbifer yueqingensis OX=658219 GN=folE PE=3 SV=1
MNEHYAQIIEAIGEDPQRPGLRDTPKRAAKAMQYLTQGYQQSLDEIVNDAIFPSDCSEMVLVKDIELYSLCEHHLLPFIGKAHVAYIPNGKVLGLSKVARIVDMFARRLQIQEQLTVEIAETLQDVTGAAGVGVIIEAKHMCMMMRGVEKQNSVMKTSAMLGSFRSQQATRTEFLSLIR

SEQ ID NO: 10821 - protein, 194 aa, Microcella alkaliphila
  misc_feature (1)..(194): tr|A0A4Q7TJM1|A0A4Q7TJM1_9MICO GTP cyclohydrolase 1 OS= Microcella alkaliphila OX=279828 GN=folE PE=3 SV=1
MSPIDTARIEAAVAEIIAAIGDDPARPGLATTPKRVAASYADFFAGVGVDPVPMLEDSAEMATDPGERGELVVVRDIALRSMCEHHLLPFTGIAHVAYVPDERIIGLGRIPALIEIVSARPQLQERLGEDVAAALDAAVRPHGVLVVVDARHGCVAARGVRYADSSTVTVAARGTLAAPDQQAAVMALIGRGAA

SEQ ID NO: 10822 - protein, 194 aa, Microcella alkaliphila
  misc_feature (1)..(194): tr|A0A0U5BPM3|A0A0U5BPM3_9MICO GTP cyclohydrolase 1 OS= Microcella alkaliphila OX=279828 GN=folE PE=3 SV=1
MSPIDTARIEAAVAEIIAAIGDDPARPGLATTPQRVAASYADFFAGVGVDPVPMLEDSAEMATDPGERGELVVLRDIALRSMCEHHLLPFTGIAHVAYVPDERIIGLGRIPALIEIVSARPQLQERLGEDVAAALDAAVRPHGVLVVVDARHGCVAARGVRYADSSTVTVAARGTLAAPDQQAAVMALIGRGAA

SEQ ID NO: 10823 - protein, 194 aa, Microcella putealis
  misc_feature (1)..(194): tr|A0A4Q7LKW9|A0A4Q7LKW9_9MICO GTP cyclohydrolase 1 OS= Microcella putealis OX=337005 GN=folE PE=3 SV=1
MSPIDTARIEAAVAEIIAAIGDDPARPGLATTPQRVASAYADFFAGVGVDPVPMLEDGAEMATEPGERGELVVLRDIALRSMCEHHLLPFTGVAHVAYVPNERIIGLGRIPALVEVVSARPQLQERLGEDVAAALDAAVRPHGVLVVVDARHGCVAARGVRYADSSTVTVAARGTLAEPEQQAAVMALIGRGAA

SEQ ID NO: 10824 - protein, 194 aa, Microcella sp.
  misc_feature (1)..(194): tr|A0A2I0BN03|A0A2I0BN03_9MICO GTP cyclohydrolase 1 OS= Microcella sp. HL-107 OX=2035245 GN=folE PE=3 SV=1
MPPIDSRRIEAAVAELLAAIGDDTTRPGLSTTPQRVAESYAEFFAGVGVDPAPLLHDDVELQTDPGERGEIVLLRDIALRSMCEHHLLPFTGVAHVAYLPAERLTGLGSITRVVETVASRPQLQERLGEQIAATLDEGLAPHGVLVVLDARHGCVAARGTRQVDSTTVTVASRGALADPVRRAEVMALIGRGSA

SEQ ID NO: 10825 - protein, 206 aa, Micrococcaceae bacterium
  misc_feature (1)..(206): tr|A0A2A9K1E6|A0A2A9K1E6_9MICC GTP cyclohydrolase 1 OS= Micrococcaceae bacterium JKS001869 OX=1938872 GN=folE P E=3 SV=1
MTAHTPDDAVPGTFDPDSTAVDRPRIEAAVREILLAIGEDPDREGLTDTPARVAKAYAEFFAGLHQSPDQVLGTTFDIAHEELVLVKDIPFYSTCEHHLVPFHGAAHIGYIPSAEGRVTGLSKLARLVELYARRPQVQERLTTQVVEALMEHLAPRGAIVVVEAEHMCMSMRGVRKPGAKTVTSAVRGQLRDPSTRSEAMSLIMHG

SEQ ID NO: 10826 - protein, 192 aa, Micrococcaceae bacterium; identical to SEQ ID NO: 8648
  misc_feature (1)..(192): tr|A0A358IMR1|A0A358IMR1_9MICC GTP cyclohydrolase 1 OS= Micrococcaceae bacterium OX=1904863 GN=folE PE=3 SV=1

SEQ ID NO: 10827 - protein, 201 aa, Micrococcales bacterium
  misc_feature (1)..(201): tr|A0A1Q4A1J4|A0A1Q4A1J4_9MICO GTP cyclohydrolase 1 OS= Micrococcales bacterium 72-143 OX=1895790 GN=folE PE=3 SV=1
MPIDSERIEAAVVELLRAIGEDPHRPGLAQTPARIAASYAELFAGLDEDPLVHLAESAAFAGEDSAGELVLVRDIAFRSTCEHHLLPFSGVAHVAYAPGERLVGLGKLARVVETLSSRPQLQERLGDQIADALERGLAPRGVLVVLDSRQECVTARGPRQAHSTTVTVASRGTLAEPAAQAGVLALVGAGAGTPASGAEAP

SEQ ID NO: 10828 - protein, 207 aa, Micrococcales bacterium
  misc_feature (1)..(207): tr|A0A2G6JUV0|A0A2G6JUV0_9MICO GTP cyclohydrolase 1 OS= Micrococcales bacterium OX=2026762 GN=folE PE=3 SV=1
MPEKRSAPARRDGGSLSGSAVDQPRIVAAVREILTAIGEDPDREGLRETPERVARAYAEMFGGMGQTAEDALTTSFDLGHDELILVKDIEVYSVCEHHLVPFHGVAHVGYLPGKDGRITGLSKLARLVDVYARRPQVQERLTSQVADSLDELLHPRGVIVVVDCEHLCMSMRGARKPGSRTVTSAMRGVLRRSAATRAEALSLIHGH

SEQ ID NO: 10829 - protein, 206 aa, Micrococcus aloeverae
  misc_feature (1)..(206): tr|A0A5F0I5R7|A0A5F0I5R7_9MICC GTP cyclohydrolase 1 OS= Micrococcus aloeverae OX=1391911 GN=folE PE=3 SV=1
MTAHTPDDAVPGTFDPDSTAVDRPRIEAAVREILLAIGEDPDREGLADTPARVAKAYAEFFAGLHQSPDQVLGTTFDIAHEELVLVKDIPFYSTCEHHLVPFHGTAHIGYIPSAEGRVTGLSKLARLVELYARRPQVQERLTTQVVEALMEHLAPRGAIVVVEAEHMCMSMRGVRKPGAKTVTSAVRGQLRDPSTRSEAMSLIMHG

SEQ ID NO: 10830 - protein, 206 aa, Micrococcus aloeverae
  misc_feature (1)..(206): tr|A0A5F0UM19|A0A5F0UM19_9MICC GTP cyclohydrolase 1 OS= Micrococcus aloeverae OX=1391911 GN=folE PE=3 SV=1
MTAHTPDDAVPGTFDPDSTAVDRPRIEAAVREILLAIGEDPDREGLADTPARVAKAYAEFFAGLHQSPDQVLGTTFDIAHEELVLVKDIPFYSTCEHHLVPFHGAAHIGYIPSAEGRVTGLSKLARLVELYARRPQVQERLTTQVVEALMEHLAPRGAIVVVEAEHMCMSMRGVRKPGAKTVTSAVRGQLRDPSTRSEAMSLIMHG

SEQ ID NO: 10831 - protein, 197 aa, Micrococcus endophyticus
  misc_feature (1)..(197): tr|A0A4Y8ZDX5|A0A4Y8ZDX5_9MICC GTP cyclohydrolase 1 OS= Micrococcus endophyticus OX=455343 GN=folE PE=3 SV=1
MPGTFDPDSTAIDRPRIEAAVREILLAIGEDPDREGLQDTPKRVAKAYAEFFAGLHQGPEQVLGTTFDIAHEELVLVKDIPFYSTCEHHLVPFHGTAHIGYIPSAEGRVTGLSKLARLVELYARRPQVQERLTTQVVEALMEHLAPRGAIVVVEAEHMCMSMRGVRKPGAKTVTSAVRGQLRDPSTRSEAMSLIMQG

SEQ ID NO: 10832 - protein, 212 aa, Micrococcus flavus
  misc_feature (1)..(212): tr|A0A4Y8WYL0|A0A4Y8WYL0_9MICC GTP cyclohydrolase 1 OS= Micrococcus flavus OX=384602 GN=folE PE=3 SV=1
MTEHLQDDDAPQPRGVPGTFDPVTDTVDRPRIEAAVREMLAAIGEDPDREGLRDTPQRVAKAYAEFFAGLHQEPAQVLGTTFDIAHEELVLVKDIPFYSMCEHHLVPFHGQAHIGYIPSTEGRVTGLSKLARLVELYARRPQVQERLTTQVVEALMEHLAAKGAIVVVQAEHMCMAMRGVRKPGAKTVTSAVRGQLRDPSTRAEAMSLIMHS

SEQ ID NO: 10833 - protein, 206 aa, Micrococcus luteus; identical to SEQ ID NO: 10830
  misc_feature (1)..(206): tr|C5C888|C5C888_MICLC GTP cyclohydrolase 1 OS=Micrococ cus luteus (strain ATCC 4698 / DSM 20030 / JCM 1464 / N BRC 3333 / NCIMB 9278 / NCTC 2665 / VKM Ac-2230) OX=465 515 GN=folE PE=3 SV=1

SEQ ID NO: 10834 - protein, 206 aa, Micrococcus luteus; identical to SEQ ID NO: 10829
  misc_feature (1)..(206): tr|A0A031I1F4|A0A031I1F4_MICLU GTP cyclohydrolase 1 OS= Micrococcus luteus OX=1270 GN=folE PE=3 SV=1

SEQ ID NO: 10835 - protein, 200 aa, Micrococcus lylae
  misc_feature (1)..(200): tr|A0A4Y8WZE8|A0A4Y8WZE8_9MICC GTP cyclohydrolase 1 OS= Micrococcus lylae OX=1273 GN=folE PE=3 SV=1
MTGVPGTFDPQQTTVDRPRIERAVREILEAIGEDPDREGLQDTPKRVAKAYAEFFAGLHQSADQVLGTTFDIAHDELVLVKDIPFYSTCEHHLVPFHGTAHIGYIPSAQGRVTGLSKLARLVELYARRPQVQERLTTQIVEALVEHLHPRGAIVVIQAEHMCMSMRGVRKPGAKTVTSAVRGQLRDPSTRAEAMSLILNG

SEQ ID NO: 10836 - protein, 292 aa, Micrococcus lylae; identical to SEQ ID NO: 10193
  misc_feature (1)..(292): tr|A0A378P1H3|A0A378P1H3_9MICC GTP cyclohydrolase FolE2 OS=Micrococcus lylae OX=1273 GN=folE2 PE=3 SV=1

SEQ ID NO: 10837 - protein, 206 aa, Micrococcus sp.; identical to SEQ ID NO: 10829
  misc_feature (1)..(206): tr|A0A366DDC8|A0A366DDC8_9MICC GTP cyclohydrolase 1 OS= Micrococcus sp. KT16 OX=2184005 GN=folE PE=3 SV=1

SEQ ID NO: 10838 - protein, 206 aa, Micrococcus sp.; identical to SEQ ID NO: 10829
  misc_feature (1)..(206): tr|A0A151D5Q8|A0A151D5Q8_9MICC GTP cyclohydrolase 1 OS= Micrococcus sp. CH7 OX=1770210 GN=folE PE=3 SV=1

SEQ ID NO: 10839 - protein, 204 aa, Micrococcus terreus
  misc_feature (1)..(204): tr|A0A1I7MQU7|A0A1I7MQU7_9MICC GTP cyclohydrolase 1 OS= Micrococcus terreus OX=574650 GN=folE PE=3 SV=1
MSAETPEQAESAQSTPNPVDLPRIEAAVREILEAVGEDPDREGLRDTPARVARAYAEFFSGLHRDPSEVLGTTFDLSHEELVLVKDIPFYSTCEHHLVPFHGRAHIGYIPSKQGHVTGLSKLARLVEIYARRPQVQERLTTEIVEALMSHLHPQGAIVVIQAEHMCMSMRGVRKPGAQTVTSAVRGQLRDATTRAEAMSLILNG

SEQ ID NO: 10840 - protein, 206 aa, Micrococcus yunnanensis; identical to SEQ ID NO: 10830
  misc_feature (1)..(206): tr|A0A4Y8PIB0|A0A4Y8PIB0_9MICC GTP cyclohydrolase 1 OS= Micrococcus yunnanensis OX=566027 GN=folE PE=3 SV=1

SEQ ID NO: 10841 - protein, 206 aa, Micrococcus yunnanensis; identical to SEQ ID NO: 10829
  misc_feature (1)..(206): tr|A0A4Y9H986|A0A4Y9H986_9MICC GTP cyclohydrolase 1 OS= Micrococcus yunnanensis OX=566027 GN=folE PE=3 SV=1

SEQ ID NO: 10842 - protein, 244 aa, Microcoleaceae bacterium
  misc_feature (1)..(244): tr|A0A355CDL9|A0A355CDL9_9CYAN GTP cyclohydrolase 1 OS= Microcoleaceae bacterium UBA10368 OX=2055793 GN=folE PE =3 SV=1
MTIASSNGSTGSKSLSTDSMKLSETADKNLPNITTRPDRNSSNGQESNVSIPSEVGQEEMMEAVRTMLLGIGENPEREGLLKTPKRVAEAMRFLTSGYSQSLEELLNGAIFDEGHNEMVLVRDISVFSMCEHHMLPFMGRIHVAYIPNQKVVGLSKLARIVEMYSRRLQVQERLTRQVAEAVQTILEPRGVAVVMEASHMCMTMRGVQKPGAWTVTSAMLGVFQEEQKTREEFLSLIRHQPAFF

SEQ ID NO: 10843 - protein, 216 aa, Microcoleaceae bacterium
  misc_feature (1)..(216): tr|A0A355CH30|A0A355CH30_9CYAN GTP cyclohydrolase 1 OS= Microcoleaceae bacterium UBA10368 OX=2055793 GN=folE PE =3 SV=1
MTLSTRPELTSPNGVVSSIPTQSQPPVSDEEMRQAVRTLLLGLGEDPDREGLRDTPKRVVKALQFLTGGYRQSLDELLNGAVFTENANEMVLVRDIDIFSSCEHHILPIIGKAHVAYIPNGKVIGLSKIARICEMYGRRLQVQERLTAQIADALQGLLKPQGVAVVIEATHMCMVMRGVQKPGSWTATSAMRGVFAEDARTRQEFMSLIAHKSSFH

SEQ ID NO: 10844 - protein, 212 aa, Microcoleus sp.
  misc_feature (1)..(212): tr|K9WG65|K9WG65_9CYAN GTP cyclohydrolase 1 OS=Microcol eus sp. PCC 7113 OX=1173027 GN=folE PE=3 SV=1
MTLSISPDDIRKQTISTQAKSPVSEEEMRQAVRTLLLGMGEDPDREGLRDTPKRVVKALKFLTSGYHQSLDELLNGAVFHEDANEMVLVRDIDLFSSCEHHILPILGRAHVAYIPNGKVIGLSKIARICEMYARRLQVQERLTAQIADAIQGLLKPQGVAVVVEATHMCMVMRGVQKPGSWTVTSSMQGVFADDAKTRQEFMDLIRHRPSFH

SEQ ID NO: 10845 - protein, 238 aa, Microcoleus sp.
  misc_feature (1)..(238): tr|K9WKC5|K9WKC5_9CYAN GTP cyclohydrolase 1 OS=Microcol eus sp. PCC 7113 OX=1173027 GN=folE PE=3 SV=1
MTIASSNAFNSSNSASSSNSSNPIPQVETRPDRNTHNGREPNLKPPSEELNEDMMKAVRTMLLGVGEDPEREGLLKTPKRVAEAMRFLTSGYNQSLEELVNGAIFDEGHNEMVLVRDINFFSLCEHHMLPFMGKAHVAYIPNQKVVGLSKLARVVEMYARRLQVQERLTRQIAEAVQTILEPQGVAVVMEGTHMCMAMRGVQKPGSWTATSAMVGVFQDDQKTREEFLNLIRHQPSFF

SEQ ID NO: 10846 - protein, 244 aa, Microcoleus vaginatus
  misc_feature (1)..(244): tr|F5UGX5|F5UGX5_9CYAN GTP cyclohydrolase 1 OS=Microcol eus vaginatus FGP-2 OX=756067 GN=folE PE=3 SV=1
MTIASSTDSNGSNPLSTDSMKLLQTAENNIPRIPTRPDRNSSHGQESNVPVPSEVGQEEMMAAVRTILLGVGEDPEREGLLKTPKRVAEAMRFLTSGYSQSLEELLNGAIFDEGHNEMVLVRDISVFSMCEHHMLPFMGRVHIAYIPNQKVVGLSKLARIAEMYSRRLQVQERLTRQIAEAVETILEPQGVAVVMEASHMCMTMRGVQKPGAWTVTSAMLGVFQDEQKTREEFLNLIRHQPAFF

SEQ ID NO: 10847 - protein, 218 aa, Microcystis aeruginosa
  misc_feature (1)..(218): tr|A0A552DSU6|A0A552DSU6_MICAE GTP cyclohydrolase 1 OS= Microcystis aeruginosa Ma_SC_T_19800800_S464 OX=2486257 GN=folE PE=3 SV=1
MTLAKSKAIFHNDDYNHFPEVITEPKSPVSEAEMMQAVRTLLLGLGEDPDREGLRDTPKRVVKALKFLTSGYQQSLDELLNGAVFHENANEMVLIRDIDIFSSCEHHILPIIGRAHVAYIPNGKVIGLSKIARICEMYARRLQVQERLTAQIADALQGLLQPQGVAVVIEATHMCMVMRGVEKPGSWTSTSAMRGIFADSAKTRQEFMSLIRHSPDFH

SEQ ID NO: 10848 - protein, 232 aa, Microcystis aeruginosa
  misc_feature (1)..(232): tr|A0A5J5LV92|A0A5J5LV92_MICAE GTP cyclohydrolase I Fol E OS=Microcystis aeruginosa EAWAG127a OX=2529855 GN=fol E PE=4 SV=1
MTIASSNGLNGNLTDAIQARVTTRPDRNTHNGKTAQIHPTCDENKEQMMDAVRNILISVGEDPEREGLLKTPKRVAEAMQFLTQGYQQSLETLVNGAIFDEGHNEMVLVRDIDFFSLCEHHMLPFMGRAHVAYIPNQKVVGLSKLARIVEMYSRRLQVQERLTRQIAEAIQEILDPQGVAVVMEATHMCMVMRGVQKPGSWTVTSAMLGVFQDEQKTREEYLNLIRHKPNFF

SEQ ID NO: 10849 - protein, 232 aa, Microcystis flosaquae
  misc_feature (1)..(232): tr|A0A552KMH6|A0A552KMH6_9CHRO GTP cyclohydrolase 1 OS= Microcystis flos-aquae Mf_QC_C_20070823_S10D OX=2486236 GN=folE PE=3 SV=1
MTIASSNGLNGNLTDAIQARVTSRPDRNTHNGKTAQIHPTSDENKEQMMDAVRNILISVGEDPEREGLLKTPKRVAEAMQFLTQGYQQSLETLVNGAIFDEGHNEMVLVRDIDFFSLCEHHMLPFMGRAHVAYIPNQKVVGLSKLARIVEMYSRRLQVQERLTRQIAEAIQEILDPQGVAVVMEATHMCMVMRGVQKPGSWTVTSAMLGVFQDEQKTREEYLNLIRHKPNFF

SEQ ID NO: 10850 - protein, 218 aa, Microcystis flosaquae
  misc_feature (1)..(218): tr|A0A552M4T4|A0A552M4T4_9CHRO GTP cyclohydrolase 1 OS= Microcystis flos-aquae Mf_WU_F_19750830_S460 OX=2486237 GN=folE PE=3 SV=1
MTLAKSKAIFDNDDYNHFPEVITEPKSPVSEAEMMQAVRTLLLGLGEDPDREGLRDTPKRVVKALKFLTSGYQQSLDELLNGAVFHENANEMVLIRDIDIFSSCEHHILPIIGRAHVAYIPNGKVIGLSKIARICEMYARRLQVQERLTAQIADALQGLLQPQGVAVVIEATHMCMVMRGVEKPGSWTSTSAVRGIFADSAKTRQEFMSLIRHSPDFH

SEQ ID NO: 10851 - protein, 232 aa, Microcystis novacekii
  misc_feature (1)..(232): tr|A0A552JCL2|A0A552JCL2_9CHRO GTP cyclohydrolase 1 OS= Microcystis novacekii Mn_MB_F_20050700_S1D OX=2486266 G N=folE PE=3 SV=1
MTIASSNGLNGNLTDAIQARVTTRPDRNTHNGKTAQIHPTSDENKEQMMDAVRNILISVGEDPEREGLLKTPKRVAEAMQFLTQGYQQSLETLVNGAIFDEGHNEMVLVRDIDFFSLCEHHMLPFMGRAHVAYIPNQKVVGLSKLARIVEMYSRRLQVQERLTRQIAEAIQEILEPQGVAVVMEATHMCMVMRGVQKPGSWTVTSAMLGVFQDEQKTREEYLNLIRHKPNFF

SEQ ID NO: 10852 - protein, 232 aa, Microcystis panniformis
  misc_feature (1)..(232): tr|A0A0K1S4W6|A0A0K1S4W6_9CHRO GTP cyclohydrolase 1 OS= Microcystis panniformis FACHB-1757 OX=1638788 GN=folE P E=3 SV=1
MTIASSNGLNGNLTDAIQARVTTRPDRNTHNGKTAQIHPTSDENKEQMMDAVRNILISVGEDPEREGLLKTPKRVAEAMQFLTQGYQQSLETLVNGAIFDEGHNEMVLVRDIDFFSLCEHHMLPFMGRAHVAYIPNQKVVGLSKLARIVEMYSRRLQVQERLTRQIAEAIQEILDPQGVAVVMEATHMCMVMRGVQKPGSWTVTSAMLGVFQDEQKTREEYLNLIRHKPNFF

SEQ ID NO: 10853 - protein, 218 aa, Microcystis panniformis
  misc_feature (1)..(218): tr|A0A552PP76|A0A552PP76_9CHRO GTP cyclohydrolase 1 OS= Microcystis panniformis Mp_MB_F_20051200_S9 OX=2486223 GN=folE PE=3 SV=1
MTLAKSKAIFDNDDYNHFPEVITEPQSPVSEAEMMQAVRTLLLGLGEDPDREGLRDTPKRVVKALKFLTSGYQQSLDELLNGAVFHEDANEMVLIRDIDIFSSCEHHILPIIGRAHVAYIPNGKVIGLSKIARICEMYARRLQVQERLTAQIADALQGLLQPQGVAVVIEATHMCMVMRGVEKSGSWTSTSAVRGIFADSAKTRQEFMSLIRHSPDFH

SEQ ID NO: 10854 - protein, 232 aa, Microcystis sp.; identical to SEQ ID NO: 10852
  misc_feature (1)..(232): tr|A0A552AG55|A0A552AG55_9CHRO GTP cyclohydrolase 1 OS= Microcystis sp. M_OC_Ca_00000000_C217Col OX=2486213 GN= folE PE=3 SV=1

SEQ ID NO: 10855 - protein, 218 aa, Microcystis sp.
  misc_feature (1)..(218): tr|A0A552CIK3|A0A552CIK3_9CHRO GTP cyclohydrolase 1 OS= Microcystis sp. Msp_OC_L_20101000_S702 OX=2486218 GN=fo lE PE=3 SV=1
MTLAKSKAIFDNDDYNHFPEVITEPKSPVSEAEMMQAVRTLLLGLGEDPDREGLRDTPKRVVKALKFLTSGYQQSLDELLNGAVFHEDANEMVLIRDIDIFSSCEHHILPIIGRAHVAYIPNGKVIGLSKIARICEMYARRLQVQERLTAQIADALQGLLQPQGVAVVIEATHMCMVMRGVEKPGSWTSTSAVRGIFADSAKTRQEFMSLIRHSPDFH

SEQ ID NO: 10856 - protein, 218 aa, Microcystis viridis
  misc_feature (1)..(218): tr|A0A3G9JRA9|A0A3G9JRA9_MICVR GTP cyclohydrolase 1 OS= Microcystis viridis NIES-102 OX=213615 GN=folE_2 PE=3 S V=1
MTLAKSKAIFDNDDYNHFPEVITEPKSPVSEAEMMQAVRTLLLGLGEDPDREGLRDTPKRVVKALKFLTSGYQQSLDELLNGAVFHENANEMVLIRDIDIFSSCEHHILPIIGRAHVAYIPNGKVIGLSKIARICEMYARRLQVQERLTAQIADALQGLLQPQGVAVVIEATHMCMVMRGVEKSGSWTSTSAVRGIFADSAKTRQEFMSLIRHSPDFH

SEQ ID NO: 10857 - protein, 232 aa, Microcystis viridis
  misc_feature (1)..(232): tr|A0A552H7Q4|A0A552H7Q4_MICVR GTP cyclohydrolase 1 OS= Microcystis viridis Mv_BB_P_19951000_S68D OX=2486270 GN =folE PE=3 SV=1
MTIASSNGLNGNLTDAIQARVTTRPDRNTHNGKTAQIHPTSDENKEQMMDAVRNILISVGEDPEREGLLKTPKRVAEAMQFLTQGYQQSLETLVNGAIFDEGHSEMVLVRDIDFFSLCEHHMLPFMGRAHVAYIPNQKVVGLSKLARIVEMYSRRLQVQERLTRQIAEAIQEILDPQGVAVVMEATHMCMVMRGVQKPGSWTVTSAMLGVFQDEQKTREEYLNLIRHKPNFF

SEQ ID NO: 10858 - protein, 218 aa, Microcystis wesenbergii
  misc_feature (1)..(218): tr|A0A3E0LQ06|A0A3E0LQ06_9CHRO GTP cyclohydrolase 1 OS= Microcystis wesenbergii TW10 OX=2060474 GN=folE PE=3 SV =1
MTLAKSKAIFDNDDYNHFPEVITEPKSPVSEFEMMQAIRTLLLGLGEDPDREGLRDTPKRVVKALKFLTSGYQQSLDELLNGAVFHEDANEMVLIRDIDIFSSCEHHILPIIGRAHVAYIPNGKVIGLSKIARICEMYARRLQVQERLTAQIADALQGLLQPQGVAVVIEATHMCMVMRGVEKPGSWTSTSAVRGIFADSAKTRQEFMSLIRHSPDFH

SEQ ID NO: 10859 - protein, 218 aa, Microcystis wesenbergii
  misc_feature (1)..(218): tr|A0A552JIJ3|A0A552JIJ3_9CHRO GTP cyclohydrolase 1 OS= Microcystis wesenbergii Mw_QC_S_20081001_S30D OX=248624 5 GN=folE PE=3 SV=1
MTLAKSKAIFDNDDYNHFPEVITEPKSPVSETEMMQAVRTLLLGLGEDPDREGLRDTPKRVVKALKFLTSGYQQSLDELLNGAVFNEEANEMVLIRDIDIFSSCEHHILPIIGRAHVAYIPNGKVIGLSKIARICEMYARRLQVQERLTAQLADALQGLLQPQGVAVVIEATHMCMVMRGVEKPGSWTSTTAVRGIFADSAKTRQEFMSLIRHSPDFH

SEQ ID NO: 10860 - protein, 195 aa, Microlunatus phosphovorus
  misc_feature (1)..(195): tr|F5XFC2|F5XFC2_MICPN GTP cyclohydrolase 1 OS=Microlun atus phosphovorus (strain ATCC 700054 / DSM 10555 / JCM 9379 / NBRC 101784 / NCIMB 13414 / VKM Ac-1990 / NM-1) OX=1032480 GN=folE PE=3 SV=1
MAAGTARSYDHPRVVAAVREILAGIGEDPDRDGLRDTPERVARAYAEMFAGLSQEPEDVLTTTFDLGHDEFVLVKDMEVWSCCEHHLVPFTGVAHVGYIPSADGRITGLSKLARLVDVYAKRPQVQERLTTQVADALQRILQPRGVIVVLECEHLCMTMRGVRKPGSRTVTSAVRGQLRNAATRAEALSLIMAQR

SEQ ID NO: 10861 - protein, 213 aa, Microlunatus phosphovorus
  misc_feature (1)..(213): tr|F5XIE0|F5XIE0_MICPN GTP cyclohydrolase 1 OS=Microlun atus phosphovorus (strain ATCC 700054 / DSM 10555 / JCM 9379 / NBRC 101784 / NCIMB 13414 / VKM Ac-1990 / NM-1) OX=1032480 GN=folE PE=3 SV=1
MSRNGRSPGRAPGLLERNGFRPVVTNNRPAVDLAAAEQAAGLLLNALGLDLADENLAETPRRMAHALIEMTNGPNFELTTFPNDEGYDELVLVQNIAMQSVCEHHMLPFVGVAHVGYLPGSRILGLSKFARMVELHARRPQTQERLTKRIADHLQAELDPKGVGVVIEAEHTCMSLRGARNPRARTTTSAMFGRLRDEPRSRAEFLALTRSQR

SEQ ID NO: 10862 - protein, 218 aa, Microlunatus soli
  misc_feature (1)..(218): tr|A0A1H1SB44|A0A1H1SB44_9ACTN GTP cyclohydrolase 1 OS= Microlunatus soli OX=630515 GN=folE PE=3 SV=1
MTSITEPTDEDVLGMTPHPLGNGTSSSARGIDETKIINAVSQLLDGLGLDTTSPGLRDTPSRYARMCREIFGGLHQDPRDVLGVAFPEGYTEPVIVRDISFTSICEHHLVPFLGHAHIGYHPGPAGEVVGLSKLARLVDVVSRRPTLQERITATVTDTLEAVLAPKGVACVIEAEHFCMTMRGVRKPGSRTVTTAFRGMFATDESARSTMLSMMDIRR

SEQ ID NO: 10863 - protein, 203 aa, Microlunatus soli
  misc_feature (1)..(203): tr|A0A1H1SLC2|A0A1H1SLC2_9ACTN GTP cyclohydrolase 1 OS= Microlunatus soli OX=630515 GN=folE PE=3 SV=1
MQRPGTNGVLLGPGHAAPFDADRIAAGIREVLIGIGEDPDRDGLRDTPQRVARAYAELFAGLHQEPAEALATTFDLPHDELVLVKDIELWSVCEHHLLPFTGVAHVGYIPGENGRITGLSKLARLVDVYAKRPQVQERLTTQIADELVSTLQPRGVIVVLECEHQCMTMRGVRKPGSKTVTSAVRGGMRDPVTRAEAMSLITD

SEQ ID NO: 10864 - protein, 194 aa, Microlunatus sp.
  misc_feature (1)..(194): tr|A0A516Q540|A0A516Q540_9ACTN GTP cyclohydrolase 1 OS= Microlunatus sp. KUDC0627 OX=2596828 GN=folE PE=3 SV=1
MLGPGHSAPFDHDRIARAVRELLIGIGEDPDRDGLRDTPQRVARAYAELFAGLHQQPSEVLATTFDLDHDEMVLVKDIEVWSVCEHHLLPFTGVAHVGYIPDENGRITGLSKLARLVDVYAKRPQVQERLTTQIADELVNTLSPRGVIVVLECEHQCMTMRGVRKPGSKTITSAVRGGMRDPVTRAEAMSLITG

SEQ ID NO: 10865 - protein, 221 aa, Micromonospora arborensis
  misc_feature (1)..(221): tr|A0A318NP96|A0A318NP96_9ACTN GTP cyclohydrolase 1 OS= Micromonospora arborensis OX=2116518 GN=folE PE=3 SV=1
MAVSATEPDGDDELDYVAARLISGKLTGRPVEDAVDLGRIEKAVREILIAVGEDPDRDGLQQTPARVARAYAELFAGLRVDPAQVLSTTFEANHEELVIVRDIDVMSLCEHHLLPFRGSAHIGYIPGPDGRITGLSKLARLVEVFARRPQVQERLTSQVADLLMSKLAPRGVVVVLECEHMCMAMRGIQKSGAKTITSAVRGILQTDSKSRSEAMALIIPR

SEQ ID NO: 10866 - protein, 221 aa, Micromonospora arida
  misc_feature (1)..(221): tr|A0A3N9WTC4|A0A3N9WTC4_9ACTN GTP cyclohydrolase 1 OS= Micromonospora arida OX=2203715 GN=folE PE=3 SV=1
MAVSATEPDGDDELDYVAARLISGKLTGRPVEDAVDLGRIEKAVREILIAVGEDPDRDGLQQTPARVARAYAELFAGLRVDPAQVLSTTFEANHEELVIVRDIDVMSLCEHHLLPFRGSAHIGYIPGPDGRITGLSKLARLVEVFARRPQVQERLTSQVADLLMSKLAPRGVVVVLECEHMCMAMRGIQKSGAKTITSAVRGILQSDSKSRAEAMALIIPR

SEQ ID NO: 10867 - protein, 205 aa, Micromonospora aurantiaca
  misc_feature (1)..(205): tr|D9T0L8|D9T0L8_MICAI GTP cyclohydrolase 1 OS=Micromon ospora aurantiaca (strain ATCC 27029 / DSM 43813 / BCRC 12538 / CBS 129.76 / JCM 10878 / NBRC 16125 / NRRL B-1 6091 / INA 9442) OX=644283 GN=folE PE=3 SV=1
MAARLISGKLTGGPVEDSVDLARIEKAVREILIAVGEDPDRDGLQQTPARVARAYAELFAGLRVDPAQVLRTTFEANHEELVLVRDIDVMSLCEHHLLPFRGSAHIGYIPGPDGRITGLSKLARLVEVFARRPQVQERLTSQIADLLMSSLAPRGVIVVLECEHMCMAMRGIQKSGAKTITSAVRGGLQNDAKSRAEAMALIMAR

SEQ ID NO: 10868 - protein, 205 aa, Micromonospora aurantiaca; identical to SEQ ID NO: 10867
  misc_feature (1)..(205): tr|A0A1C6TF54|A0A1C6TF54_9ACTN GTP cyclohydrolase 1 OS= Micromonospora aurantiaca OX=47850 GN=folE PE=3 SV=1

SEQ ID NO: 10869 - protein, 190 aa, Micromonospora auratinigra
  misc_feature (1)..(190): tr|A0A1A8ZYM8|A0A1A8ZYM8_9ACTN GTP cyclohydrolase 1 OS= Micromonospora auratinigra OX=261654 GN=folE PE=3 SV=1
MEETVDLARIEKAVREILIAVGEDPDRDGLQQTPARVARAYAELFAGLRVDPGQVLSTTFEANHEELVLVRDIDVTSLCEHHLLPFRGSAHIGYIPGPDGRITGLSKLARLVEVFARRPQVQERLTSQIADLLMSRLAPRGVVVVLECEHMCMAMRGIQKSGAKTITSAVRGTFQRDAKSRAEAMSLIIR

SEQ ID NO: 10870 - protein, 197 aa, Micromonospora avicenniae
  misc_feature (1)..(197): tr|A0A1N7FQ82|A0A1N7FQ82_9ACTN GTP cyclohydrolase 1 OS= Micromonospora avicenniae OX=1198245 GN=folE PE=3 SV=1
MTIAPAPRRVNQQPARDLVAAEQAAAQFLAALGIDLDSESLRATPRRMASAYAELLTARPFELTTFPNDEGYDELVLARSIPIRSVCEHHLLPFVGVAHVGYLPGDRILGLSKLARVVELFAHRPQVQERLTKQVADWLALELAPKGVGVVIEAEHMCMTLRGVHAAGATTVTSTLLGTLRDDARSRAEFFSLTGAQ

SEQ ID NO: 10871 - protein, 209 aa, Micromonospora avicenniae
  misc_feature (1)..(209): tr|A0A1N6R3K9|A0A1N6R3K9_9ACTN GTP cyclohydrolase 1 OS= Micromonospora avicenniae OX=1198245 GN=folE PE=3 SV=1
MLDYIAARLINGKLTGGPVEDSVDLPRIEKAVREILIAVGENPDRDGLRQTPARVARAYAELFAGLRVDPAQVLSTTFEANHQELVIVRDIDVMSLCEHHLLPFRGSAHIGYIPGPDGRITGLSKLARLVEVYARRPQVQERLTSQIADLLMNKLAPRGVIVVLECEHMCMAMRGIQKSGAQTITSAVRGTLQNDAKSRAEAMALILPR

SEQ ID NO: 10872 - protein, 196 aa, Micromonospora carbonacea
  misc_feature (1)..(196): tr|A0A1C4TYT7|A0A1C4TYT7_9ACTN GTP cyclohydrolase 1 OS= Micromonospora carbonacea OX=47853 GN=folE PE=3 SV=1
MTGRPVEESVDLARIEKAVREILIAVGEDPDRDGLVKTPARVARAYAELFAGLRVDPAQVLSTTFEANHEELVLVRDIDVMSLCEHHLLPFRGSAHIGYIPGPDGRITGLSKLARLVEVYARRPQVQERLTSQIADLLMSSLAPRGVVVVLECEHMCMAMRGIQKAGAKTITSAVRGVLQHDAKSRAEAMSLIIPR

SEQ ID NO: 10873 - protein, 214 aa, Micromonospora chaiyaphumensis
  misc_feature (1)..(214): tr|A0A1C4TWF6|A0A1C4TWF6_9ACTN GTP cyclohydrolase 1 OS= Micromonospora chaiyaphumensis OX=307119 GN=folE PE=3 S V=1
MIAITNDRWLKSLGVRVSVSALRVQHQRPRRDPAAAERAAAEFLTALGVDLSADGLADTPGRMARAYAELLTPREFQLTTFDNDEGYDELVLARAIPIRSVCEHHLLPFVGVAHVGYLPGERILGLSKLARVVELFAHGPQVQERLTKQIADWLTGQLRPRGVGVVIEAEHLCMTLRGVQAVGSSTITSTLLGTLRDDHRSRAEFFTLTGVGPR

SEQ ID NO: 10874 - protein, 191 aa, Micromonospora chaiyaphumensis
  misc_feature (1)..(191): tr|A0A1C4YEP2|A0A1C4YEP2_9ACTN GTP cyclohydrolase 1 OS= Micromonospora chaiyaphumensis OX=307119 GN=folE PE=3 S V=1
MEESVDLARIEKAVREILVAVGEDPDRDGLQQTPARVARAYAELFAGLRVDPAQVLSTTFEANHEELVLVRDIDVMSLCEHHLLPFRGSAHIGYIPGPDGRITGLSKLARLVEVFARRPQVQERLTSQIADLLMTKLAPRGVVVVLECEHMCMAMRGIQKSGAKTITSAVRGTLQNDAKSRAEAMALIIPR

SEQ ID NO: 10875 - protein, 206 aa, Micromonospora chersina
  misc_feature (1)..(206): tr|A0A1C6U7E3|A0A1C6U7E3_9ACTN GTP cyclohydrolase 1 OS= Micromonospora chersina OX=47854 GN=folE PE=3 SV=1
MKISWGVRVTVSALRVQHQRPRRDPAAAERAAAEFLAALGVDLSADGLADTPGRMARAYAELLTPREFQLTTFANDEGYDELVLARAIPIRSLCEHHLLPFVGVAHVGYLPGERILGLSKLARVVELFAHGPQVQERLTKQIADWLTGQLRPRGVGVVIEAEHLCMTLRGVQAVGSSTITSTLLGTLRDDHRSRAEFFTLAGVGPR

SEQ ID NO: 10876 - protein, 191 aa, Micromonospora chersina
  misc_feature (1)..(191): tr|A0A1C6VKX8|A0A1C6VKX8_9ACTN GTP cyclohydrolase 1 OS= Micromonospora chersina OX=47854 GN=folE PE=3 SV=1
MEESVDLARIEKAVREILVAVGEDPDRDGLQQTPARVARAYAELFAGLRVDPAQVLSTTFEANHEELVLVRDIDVMSLCEHHLLPFRGSAHIGYIPGPDGRITGLSKLARLVEVFARRPQVQERLTSQIADLLMTKLAPRGVVVVLECEHMCMAMRGIQKSGAKTITSAVRGTLQHDAKSRAEAMALIIPR

SEQ ID NO: 10877 - protein, 266 aa, Micromonospora chokoriensis
  misc_feature (1)..(266): tr|A0A1C4UQ04|A0A1C4UQ04_9ACTN GTP cyclohydrolase FolE2 OS=Micromonospora chokoriensis OX=356851 GN=folE2 PE=3 SV=1
MLPDVQALPDRRGVSLDEVGIEGLRYPLLIADGQGAKRETVATIDMSVSLDAEVKGAHLSRFVEVLHTWRDEVASDSALRLVEDLRTRMGSSSARVRLTFAYFLERQAPVTGARSFSEYQCALTASVSTANPVLTLQARVPVTSVCPCSKAISDRGAHNQRGYVTIEVHPVGPGELWFDDLIDVAEASASSPVYALLKRPDERHVTMAGYDNPVFVEDMTRHVALALRDDPRVNRFRVRVVNDESIHNHAAYARLEWTDSATGGDA

SEQ ID NO: 10878 - protein, 205 aa, Micromonospora chokoriensis
  misc_feature (1)..(205): tr|A0A1C4VKV7|A0A1C4VKV7_9ACTN GTP cyclohydrolase 1 OS= Micromonospora chokoriensis OX=356851 GN=folE PE=3 SV=1
MAARLISGKLTGRPVEDAVDLGRIEKAVREILIAVGEDPDRDGLQQTPARVARAYAELFAGLRVDPAQVLSTTFEANHEELVIVRDIDVMSLCEHHLLPFRGSAHIGYIPGPDGRITGLSKLARLVEVFARRPQVQERLTSQVADLLMSKLEPRGVVVVLECEHMCMAMRGIQKSGAKTITSAVRGILQSDSKSRAEAMALIIPR

SEQ ID NO: 10879 - protein, 205 aa, Micromonospora citrea
  misc_feature (1)..(205): tr|A0A1C6V7I8|A0A1C6V7I8_9ACTN GTP cyclohydrolase 1 OS= Micromonospora citrea OX=47855 GN=folE PE=3 SV=1
MAARLISGKLTGGPVEETVDLGRIEKAVREILVAVGEDPDRDGLQQTPARVARAYAELFAGLRVDPAQVLSTTFEANHQELVLVRDIDVMSLCEHHLLPFRGSAHIGYIPGPDGRITGLSKLARLVEVFARRPQVQERLTSQIADLLMERLAPRGVVVVLECEHMCMAMRGIQKSGAQTITSAVRGTLQNDAKSRAEAMALIIPR

SEQ ID NO: 10880 - protein, 205 aa, Micromonospora coriariae
  misc_feature (1)..(205): tr|A0A1C4VYN1|A0A1C4VYN1_9ACTN GTP cyclohydrolase 1 OS= Micromonospora coriariae OX=285665 GN=folE PE=3 SV=1
MAARLISGKLTGRPVEDAIDLGRIEKAVREILIAVGEDPDRDGLQQTPARVARAYAELFAGLRVDPAQVLSTTFEANHEELVIVRDIDVMSLCEHHLLPFRGSAHIGYIPGPDGRITGLSKLARLVEVFARRPQVQERLTSQVADLLMSKLSPRGVVVVLECEHMCMAMRGIQKSGAKTITSAVRGILQTDSKSRAEAMALIMPR

SEQ ID NO: 10881 - protein, 198 aa, Micromonospora coriariae
  misc_feature (1)..(198): tr|A0A1C4Y930|A0A1C4Y930_9ACTN GTP cyclohydrolase 1 OS= Micromonospora coriariae OX=285665 GN=folE PE=3 SV=1
MSVTALRVQHERPRRDPAAAERAAAEFLTALGVDLSANGLADTPGRMARAYAELLTPREFQPTTFDNDEGYDELVLARAIPIRSVCEHHLLPFVGVAHVGYLPGERILGLSKLARVVELFAHGPQVQERLTKQIADWLISQLRPRGVGVVIEAEHLCMTLRGVQAVGSSTITSTLLGTLRDDHRSRAEFFTLAGVGPR

SEQ ID NO: 10882 - protein, 221 aa, Micromonospora costi
  misc_feature (1)..(221): tr|A0A3B0A1T7|A0A3B0A1T7_9ACTN GTP cyclohydrolase 1 OS= Micromonospora costi OX=1530042 GN=folE PE=3 SV=1
MAASATEPDGDDGLDYIAARLINGKLTGGPVEETVDLARIEKAVREILIAVGENPDRDGLQQTPARVARAYAELFAGLRVDPAQVLSTTFEANHQELVLVRDIDVMSLCEHHLLPFRGSAHIGYIPGPDGRITGLSKLARLVEVYARRPQVQERLTSQIADLLMAKLAPRGVIVVLECEHMCMAMRGIQKSGAQTITSAVRGTLQNDAKSRAEAMALILPR

SEQ ID NO: 10883 - protein, 233 aa, Micromonospora coxensis
  misc_feature (1)..(233): tr|A0A1C5IJP2|A0A1C5IJP2_9ACTN GTP cyclohydrolase 1 OS= Micromonospora coxensis OX=356852 GN=folE PE=3 SV=1
MNTDAAASPDPSGLAASSTEPGDEALDYVAARLISGKLTGRPVEDTMDLARIEKAVREILIAVGEDPDRDGLQQTPARVARAYAELFAGLRVDPAQVLSTTFEANHEELVLVRDIDVMSLCEHHLLPFRGSAHIGYIPGPDGRITGLSKLARLVEVFARRPQVQERLTSQIADLLMSKLQPRGVVVVLECEHMCMAMRGIQKSGAKTITSAVRGTLQHDPKSRAEAMALIIPR

SEQ ID NO: 10884 - protein, 205 aa, Micromonospora cremea
  misc_feature (1)..(205): tr|A0A1N5ZTP4|A0A1N5ZTP4_9ACTN GTP cyclohydrolase 1 OS= Micromonospora cremea OX=709881 GN=folE PE=3 SV=1
MAARLISGKLTGRPVEDAIDLGRIEKAVREILIAVGEDPDRDGLQQTPARVARAYAELFAGLRVDPAQVLSTTFEANHEELVIVRDIDVMSLCEHHLLPFRGSAHIGYIPGPDGRITGLSKLARLVEVFARRPQVQERLTSQVADLLMSKLAPRGVVVVLDCEHMCMAMRGIQKSGARTITSAVRGTLQHDPKSRAEAMALIIPR

SEQ ID NO: 10885 - protein, 197 aa, Micromonospora cremea
  misc_feature (1)..(197): tr|A0A1N5WQY2|A0A1N5WQY2_9ACTN GTP cyclohydrolase 1 OS= Micromonospora cremea OX=709881 GN=folE PE=3 SV=1
MTIAPAPRRVDQRPARDLVTAEQAAAQFLAALGIDLDSESLRATPRRMARAYAELLTARPFDLTTFPNDEGYDELVLARSIPIRSVCEHHLLPFVGVAHVGYLPGERILGLSKLARVVELFAHRPQVQERLTKQVADWLALELAPKGVGVVIEAEHMCMTLRGVRAAGATTVTSTLLGTLRDDARCRAEFFSLTGAH

SEQ ID NO: 10886 - protein, 219 aa, Micromonospora deserti
  misc_feature (1)..(219): tr|A0A2W2CH45|A0A2W2CH45_9ACTN GTP cyclohydrolase 1 OS= Micromonospora deserti OX=2070366 GN=folE PE=3 SV=1
MAVSATEPDDGLDYVAARLISGKLTGRPIEDTMDLARIEKAVREILIAVGEDPDRDGLQQTPARVARAYAELFAGLRVDPGQVLSTTFEANHEELVLVRDIDVMSLCEHHLLPFRGSAHIGYIPGPDGRITGLSKLARLVEVFARRPQVQERLTSQIADLLMSKLKPRGAVVVLECEHMCMAMRGIQKSGAKTITSAVRGTLQRDAKSRAEAMALIIPR

SEQ ID NO: 10887 - protein, 221 aa, Micromonospora eburnea
  misc_feature (1)..(221): tr|A0A1C6VMR1|A0A1C6VMR1_9ACTN GTP cyclohydrolase 1 OS= Micromonospora eburnea OX=227316 GN=folE PE=3 SV=1
MAASSTEPDGDEALDYVAARLISGKLTGRPVEETMDLARIEKAVREILIAVGEDPDRDGLQQTPARVARAYAELFAGLRVDPAQVLTTTFEANHEELVLVRDIDVMSLCEHHLLPFRGSAHIGYIPGPDGRITGLSKLARLVEVFARRPQVQERLTAQIADLLMNKLAPRGVVVVLECEHMCMAMRGIQKAGAKTITSAVRGTLQHDAKSRAEAMALIIPR

SEQ ID NO: 10888 - protein, 234 aa, Micromonospora echinaurantiaca
  misc_feature (1)..(234): tr|A0A1C5K691|A0A1C5K691_9ACTN GTP cyclohydrolase 1 OS= Micromonospora echinaurantiaca OX=47857 GN=folE PE=3 SV =1
MSTDPAASPHDRGLAASATEPDGDDALDYVAARLISGKLTGRPVEDTMDLGRIEKAVREILIAVGEDPDRDGLQQTPSRVARAYAELFAGLRVDPAQVLSTTFEANHEELVLVRDIDVMSLCEHHLLPFRGSAHIGYIPGPDGRITGLSKLARLVEVFARRPQVQERLTSQIADLLMSKLEPRGVVVVLECEHMCMAMRGIQKSGAQTITSAVRGTLQNDAKSRAEAMALIIPR

SEQ ID NO: 10889 - protein, 218 aa, Micromonospora echinaurantiaca
  misc_feature (1)..(218): tr|A0A1C5I9T1|A0A1C5I9T1_9ACTN GTP cyclohydrolase 1 OS= Micromonospora echinaurantiaca OX=47857 GN=folE PE=3 SV =1
MDLMDPASTTDGASVAEDEAGPGPLRVLRRRPGRDLAAAERAAADFLAALGVDIDADGLADTPGRMARAYAELLTPREFRLTTFDNDEGYDELVVARSIPIRSVCEHHFLPFLGVAHVGYLPGGRILGLSKLARVVELFAHGPQVQERLTRQIADWLAAQLRPKGVGVVVEAEHLCMSLRGVRAVGATTVTSTLLGTLRDDPRSRAEFFALTGVGARP

SEQ ID NO: 10890 - protein, 235 aa, Micromonospora echinofusca
  misc_feature (1)..(235): tr|A0A1C5GIN9|A0A1C5GIN9_9ACTN GTP cyclohydrolase 1 OS= Micromonospora echinofusca OX=47858 GN=folE PE=3 SV=1
MSTDPTASSREHRELAVSATEPDGDDTLDYVAARLISGKLTGRPIEETMDLGRIEKAVREILIAVGEDPDRDGLQQTPARVARAYAELFAGLRVDPAQVLSTTFEANHEELVLVRDIDVMSLCEHHLLPFRGSAHIGYIPGPDGRITGLSKLARLVEVFARRPQVQERLTSQIADLLMDRLAPRGVVVVLECEHMCMAMRGIQKSGAKTITSAVRGTLQRDAKSRAEAMALIIPR

SEQ ID NO: 10891 - protein, 191 aa, Micromonospora echinospora
  misc_feature (1)..(191): tr|A0A562DYG1|A0A562DYG1_MICEC GTP cyclohydrolase 1 OS= Micromonospora echinospora OX=1877 GN=folE PE=3 SV=1
MENAVDLGRIERAVREILIAVGEDPDRDGLLQTPARVARAYAELFAGLRVDPKQVLTTTFEANHEELVLVRDIDVMSLCEHHLLPFRGSAHIGYIPGPDGRITGLSKLARLVEVFARRPQVQERLTSQIADLLMERLNPRGVIVVLECEHMCMAMRGIQKSGAKTITSAVRGTLQRDAKSRAEAMALIIPR

SEQ ID NO: 10892 - protein, 235 aa, Micromonospora echinospora
  misc_feature (1)..(235): tr|A0A1C4WS16|A0A1C4WS16_MICEC GTP cyclohydrolase 1 OS= Micromonospora echinospora OX=1877 GN=folE PE=3 SV=1
MNTREPAASQDTPALAASSTEPDGDEALDYLAARLINGKLTGRPVENAVDLGRIERAVREILIAVGEDPDRDGLLQTPARVARAYAELFAGLRVDPKQVLTTTFEANHEELVLVRDIDVMSLCEHHLLPFRGSAHIGYIPGPDGRITGLSKLARLVEVFARRPQVQERLTSQIADLLMERLNPRGVIVVLECEHMCMAMRGIQKSGAKTITSAVRGTLQRDAKSRAEAMALIIPR

SEQ ID NO: 10893 - protein, 205 aa, Micromonospora endolithica
  misc_feature (1)..(205): tr|A0A3A9Z3X9|A0A3A9Z3X9_9ACTN GTP cyclohydrolase 1 OS= Micromonospora endolithica OX=230091 GN=folE PE=3 SV=1
MAARLISGKLSGRPVEETMDLGRIEKAVREILIAVGEDPDRDGLQQTPARVARAYAELFAGLRVDPAQVLTTTFEANHEELVLVRDIDVMSLCEHHLLPFRGSAHIGYIPGPDGRITGLSKLARLVEVFARRPQVQERLTSQIADLLMERLAPRGVIVVLQCEHMCMAMRGIQKSGAQTITSAVRGTLQHDAKSRAEAMTLIMAR

SEQ ID NO: 10894 - protein, 205 aa, Micromonospora fluostatini
  misc_feature (1)..(205): tr|A0A4R4MQQ9|A0A4R4MQQ9_9ACTN GTP cyclohydrolase 1 OS= Micromonospora fluostatini OX=1629071 GN=folE PE=3 SV=1
MAARLINGKLTGRPVEEAIDLTRIEKAVREILIAVGENPDRDGLVQTPARVARAYAELFAGLRVDPAKVLTTTFEANHEELVLVRDIDVMSLCEHHLLPFRGSAHIGYIPGPDGRITGLSKLARLVEVFARRPQVQERLTSQIADLLMESLAPRGVVVVLQCEHMCMAMRGIQKSGAQTITSAVRGSLQHDAKSRAEAMALIIPR

SEQ ID NO: 10895 - protein, 221 aa, Micromonospora globbae
  misc_feature (1)..(221): tr|A0A420EYZ3|A0A420EYZ3_9ACTN GTP cyclohydrolase 1 OS= Micromonospora globbae OX=1894969 GN=folE PE=3 SV=1
MAASATEPDGDDGLDYIAARLINGKLTGGPVEETVDLARIEKAVREILIAVGENPDRDGLQQTPARVARAYAELFAGLRVDPAQVLSTTFEANHEELVLVRDIDVMSLCEHHLLPFRGSAHIGYIPGPDGRITGLSKLARLVEVYARRPQVQERLTSQIADLLMEKLAPRGVIVVLECEHMCMAMRGIQKSGAQTITSAVRGTLQRDPKSRAEAMALILPR

SEQ ID NO: 10896 - protein, 198 aa, Micromonospora globbae
  misc_feature (1)..(198): tr|A0A420F0L4|A0A420F0L4_9ACTN GTP cyclohydrolase 1 OS= Micromonospora globbae OX=1894969 GN=folE PE=3 SV=1
MSVTALRVQHQRPRRDLAAAERAAAQFLAALGVDTSADGLADTPGRMARAYAELLTPREFQLTTFDNDEGYDELVLARAIPIRSVCEHHLLPFVGVAHVGYLPGERILGLSKLARVVELFAHGPQVQERLTKQIADWLTHHLRPRGVGVVVEAEHLCMTLRGVRAVGSSTITSTLLGTLRDDHRSRAEFFTLAGVGPR

SEQ ID NO: 10897 - protein, 195 aa, Micromonospora globispora
  misc_feature (1)..(195): tr|A0A3N9VBR6|A0A3N9VBR6_9ACTN GTP cyclohydrolase 1 OS= Micromonospora globispora OX=1450148 GN=folE PE=3 SV=1
MAPAPRRVNQQPAPDLVAAEQAAARFLAALDIDLDSESLRDTPRRMARAYAELLTARPFDLTTFPNDEGYDELVLARSIPIRSVCEHHLLPFVGVAHVGYLPGERILGLSKLARVVELFAHRPQVQERLTKQVADWLALELAPKGVGVVIEAEHLCMTLRGVRATGATTVTSTLLGTLRDDARSRAEFFSLTGAH

SEQ ID NO: 10898 - protein, 220 aa, Micromonospora globispora
  misc_feature (1)..(220): tr|A0A317K6L6|A0A317K6L6_9ACTN GTP cyclohydrolase 1 OS= Micromonospora globispora OX=1450148 GN=folE PE=3 SV=1
MAVSATEPDEDGLDYVAARLISGKLTGRPVEDAIDLGRIEKAVREILIAVGEDPDRDGLQQTPARVARAYAELFAGLRVDPAQVLSTTFEANHEELVLVRDIDVMSLCEHHLLPFRGSAHIGYIPGPDGRITGLSKLARLVEVFARRPQVQERLTSQIADLLMSKLAPRGVVVVLECEHMCMAMRGIQKSGAKTITSAVRGTLQHDAKSRAEAMSLIIPR

SEQ ID NO: 10899 - protein, 185 aa, Micromonospora haikouensis
  misc_feature (1)..(185): tr|A0A1C4VF25|A0A1C4VF25_9ACTN GTP cyclohydrolase 1 OS= Micromonospora haikouensis OX=686309 GN=folE PE=3 SV=1
MARIEKAVREILIAVGEDPDRDGLVKTPARVARAYAELFAGLRVDPAQVLSTTFEANHEELVLVRDIDVMSLCEHHLLPFRGSAHIGYIPGPDGRITGLSKLARLVEVFARRPQVQERLTSQIADLLMSSLAPRGVVVVLECEHMCMAMRGIQKSGAKTITSAVRGVLQHDAKSRAEAMALIIPR

SEQ ID NO: 10900 - protein, 266 aa, Micromonospora haikouensis
  misc_feature (1)..(266): tr|A0A1C4YJK3|A0A1C4YJK3_9ACTN GTP cyclohydrolase FolE2 OS=Micromonospora haikouensis OX=686309 GN=folE2 PE=3 SV=1
MLPDVQALPDQRGVALDEVGIEGLRYPLLIADGQGAKREAVATIDMSVTLDAEVKGAHLSRFVEVLHAWRDEVAPDSALRLVEDLRMRMGSSSARVHLTFAYFLERQAPVTGARSFSEYQCALTASVSGANPVLTLQARVPVTSVCPCSKAISDRGAHNQRGYVTIEAHPVDPGELWFDDLIDVAEASASSPVYALLKRPDERHVTMAGYDNPVFVEDMTRHVALAMRDDPRVNRFRVRVVNDESIHNHAAYAQLEWTDSATGGDA

SEQ ID NO: 10901 - protein, 209 aa, Micromonospora halophytica
  misc_feature (1)..(209): tr|A0A1C5IDV2|A0A1C5IDV2_9ACTN GTP cyclohydrolase 1 OS= Micromonospora halophytica OX=47864 GN=folE PE=3 SV=1
MLDYVAARLISGRLTGRPIEDTMDLARIEKAVREILIAVGEDPDRDGLQQTPARVARAYAELFAGLRVDPAQVLSTTFEANHEELVLVRDIDVMSLCEHHLLPFRGSAHIGYIPGPDGRITGLSKLARLVEVFARRPQVQERLTSQIADLLMSKLQPRGVVVVLECEHMCMAMRGIQKSGAKTITSAVRGTLQHDAKSRAEAMALIIPR

SEQ ID NO: 10902 - protein, 205 aa, Micromonospora humi
  misc_feature (1)..(205): tr|A0A1C5K0G2|A0A1C5K0G2_9ACTN GTP cyclohydrolase 1 OS= Micromonospora humi OX=745366 GN=folE PE=3 SV=1
MAARLISGKLTGGPVEESVDLPRIEKAVREILIAVGEDPDRDGLQQTPARVARAYAELFAGLRVDPTQVLRTTFEANHEELVLVRDIDVMSLCEHHLLPFRGSAHIGYIPGPDGRITGLSKLARLVEVFARRPQVQERLTSQIADLLMSSLAPRGVIVVLECEHMCMAMRGIQKSGAKTITSAVRGGLQNDAKSRAEAMALIMHR

SEQ ID NO: 10903 - protein, 219 aa, Micromonospora inaquosa
  misc_feature (1)..(219): tr|A0A3N9WXX3|A0A3N9WXX3_9ACTN GTP cyclohydrolase 1 OS= Micromonospora inaquosa OX=2203716 GN=folE PE=3 SV=1
MAVSATEPDDDLDYVAARLISGKLTGRPVEDTVDLGRIEKAVREILIAVGEDPDRDGLQQTPARVARAYAELFAGLRVDPAQVLSTTFEANHEELVIVRDIDVMSLCEHHLLPFRGSAHIGYIPGPDGRITGLSKLARLVEVFARRPQVQERLTTQVADLLMSKLAPRGVVVVLECEHMCMAMRGIQKSGAKTITSAVRGILQTDSKSRAEAMALIIPR

SEQ ID NO: 10904 - protein, 212 aa, Micromonospora inaquosa
  misc_feature (1)..(212): tr|A0A3N9WP26|A0A3N9WP26_9ACTN GTP cyclohydrolase 1 OS= Micromonospora inaquosa OX=2203716 GN=folE PE=3 SV=1
MTTTAALRVGQRRPDKDLVAAELAAATFLTALGVDLTAGGLAETPARMARAYAELLSPREFAFTTFANDEGYDELVVTRDIPIRSVCEHHLLPFVGVAHVGYLPGDRIVGLSKLARVVQLFAHGPQLQERLTRQIAVWLDTHLRPGAVGVVIEAEHLCVTMRGAHAAGARSITSAFLGRLRDDARAREEFLTMAGVGSPLIARRTATPRHPR

SEQ ID NO: 10905 - protein, 233 aa, Micromonospora inositola
  misc_feature (1)..(233): tr|A0A1C5I2W8|A0A1C5I2W8_9ACTN GTP cyclohydrolase 1 OS= Micromonospora inositola OX=47865 GN=folE PE=3 SV=1
MNTDAAASPDKGLAASSTEPDGDEALDYVAARLISGKLTGRPVEETMDLARIEKAVREILIAVGEDPDRDGLQQTPARVARAYAELFAGLRVDPAQVLSTTFEANHEELVLVRDIDMMSLCEHHLLPFRGSAHIGYIPGPDGRITGLSKLARLVEVFARRPQVQERLTSQIADLLMSKLEPRGVIVVLECEHMCMAMRGIQKSGAKTITSAVRGVLQRDAKSRAEAMSLIIPR

SEQ ID NO: 10906 - protein, 219 aa, Micromonospora inositola
  misc_feature (1)..(219): tr|A0A1C5JII3|A0A1C5JII3_9ACTN GTP cyclohydrolase 1 OS= Micromonospora inositola OX=47865 GN=folE PE=3 SV=1
MDYEQRSLVKMEDRRGTVGAADVTIAPAPRRVDQQPARDLVAAEQAAARFLAALGIDLDSDSLRDTPRRMARAYDELLTARPFNLTTFHNDEGYDELVLARSIPIRSVCEHHLLPFIGVAHVGYLPGDRILGLSKLARVVELFAHRPQVQERLTKQVADWLALELAPKGVGVVIEAEHLCMTLRGVRAAGATTVTSTLLGALRDDARSRAEFFSLTGAH

SEQ ID NO: 10907 - protein, 235 aa, Micromonospora inyonensis
  misc_feature (1)..(235): tr|A0A1C6RCF3|A0A1C6RCF3_9ACTN GTP cyclohydrolase 1 OS= Micromonospora inyonensis OX=47866 GN=folE PE=3 SV=1
MNPREQAASQDDPALAASSTEPDGDEALDYLAARLINGKLTGLPVENAVDLGRIEKAVREILIAVGEDPDRDGLLQTPARVARAYAELFAGLRVDPKKVLTTTFEANHEELVLVRDIDVMSLCEHHLLPFRGSAHIGYIPGPDGRITGLSKLARLVEVFARRPQVQERLTSQIADLLMERLAPRGVIVVLECEHMCMAMRGIQKSGAETITSAVRGTLQRDAKSRAEAMALIIRR

SEQ ID NO: 10908 - protein, 197 aa, Micromonospora kangleipakensis
  misc_feature (1)..(197): tr|A0A4Q8BEK5|A0A4Q8BEK5_9ACTN GTP cyclohydrolase 1 OS= Micromonospora kangleipakensis OX=1077942 GN=folE PE=3 SV=1
MTIAPAARRVDQQPARDLVAAEQAAARFLAALGIDLDSESLRDTPGRMARAYAELLTARPFDLTTFPNDEGYDELVLARSIPIRSVCEHHLLPFVGVAHVGYLPGDRILGLSKLARVVELFAHRPQVQERLTKQVADWLALELAPKGVGVVIEAEHLCMTLRGVRAVGATTVTSTLLGTLRDDARSRAEFFSLTGAH

SEQ ID NO: 10909 - protein, 220 aa, Micromonospora krabiensis
  misc_feature (1)..(220): tr|A0A1C3N9D3|A0A1C3N9D3_9ACTN GTP cyclohydrolase 1 OS= Micromonospora krabiensis OX=307121 GN=folE PE=3 SV=1
MAASATEPGDDALDYIAARLINGKLTGGPVEDSVDLPRIEKAVREILIAVGEDPDRDGLRQTPARVARAYAELFAGLRVDPAQVLSTTFEANHQELVLVRDIDVMSLCEHHLLPFRGSAHIGYIPGPDGRITGLSKLARLVEVYARRPQVQERLTSQIADLLMSKLAPRGVIVVLECEHMCMAMRGIQKSGAQTITSAVRGTLQNDAKSRAEAMALILPR

SEQ ID NO: 10910 - protein, 202 aa, Micromonospora lupini
  misc_feature (1)..(202): tr|I0L1T3|I0L1T3_9ACTN GTP cyclohydrolase 1 OS=Micromon ospora lupini str. Lupac 08 OX=1150864 GN=folE PE=3 SV= 1
MTVIETRPSAPVQMARADVAAAVAAAERMLAALGVDTQAEHLRRTAERMVLSYGEVLRPAPFEATDFVNDAKHQGFVIVRDVAFAAICAHHLLPFVGSATVGYLPGARLLGLSKLTRLVEHATRGLQVQENVTQQIADGLQQVVPDNGGMGVIVEAEHLCMTLRGAKARGASTVTSAWRGALARDVSVRSEFLSLAGRGWRP

SEQ ID NO: 10911 - protein, 208 aa, Micromonospora lupini
  misc_feature (1)..(208): tr|I0LDQ1|I0LDQ1_9ACTN GTP cyclohydrolase 1 OS=Micromon ospora lupini str. Lupac 08 OX=1150864 GN=folE PE=3 SV= 1
MDYVAARLISGKLTGRPVEDAVDLGRIEKAVREILIAVGEDPDRDGLQQTPARVARAYAELFAGLRVDPAQVLSTTFEANHEELVIVRDIDVMSLCEHHLLPFRGSAHIGYIPGPDGRITGLSKLARLVEVFARRPQVQERLTSQVADLLMSKLAPRGVVVVLECEHMCMAMRGIQKSGAKTITSAVRGILQSDSKSRAEAMSLIIPR

SEQ ID NO: 10912 - protein, 205 aa, Micromonospora marina
  misc_feature (1)..(205): tr|A0A1C4Z7Q6|A0A1C4Z7Q6_9ACTN GTP cyclohydrolase 1 OS= Micromonospora marina OX=307120 GN=folE PE=3 SV=1
MAARLISGKLTGGPVEDSVDLARIEKAVREILIAVGEDPDRDGLQQTPARVARAYAELFAGLRVDPAQVLRTTFEANHEELVLVRDIDVMSLCEHHLLPFRGSAHIGYIPGPDGRITGLSKLARLVEVFARRPQVQERLTSQIADLLMSSLAPRGVIVVLECEHMCMAMRGIQKSGAKTITSAVRGGLQNDAKSRAEAMTLIMAR

SEQ ID NO: 10913 - protein, 187 aa, Micromonospora matsumotoense
  misc_feature (1)..(187): tr|A0A1C4ZF65|A0A1C4ZF65_9ACTN GTP cyclohydrolase 1 OS= Micromonospora matsumotoense OX=121616 GN=folE PE=3 SV= 1
MDLGRIEKAVREILIAVGEDPDRDGLQQTPARVARAYAELFAGLRVDPAQVLSTTFEANHEELVLVRDIDVMSLCEHHLLPFRGSAHIGYIPGPDGRITGLSKLARLVEVFARRPQVQERLTSQIADLLMSKLQPRGVIVILECEHMCMAMRGIQKSGAKTITSAVRGVLQHDAKSRAEAMSLIIPR

SEQ ID NO: 10914 - protein, 187 aa, Micromonospora mirobrigensis
  misc_feature (1)..(187): tr|A0A1C4ZQ13|A0A1C4ZQ13_9ACTN GTP cyclohydrolase 1 OS= Micromonospora mirobrigensis OX=262898 GN=folE PE=3 SV= 1
MDLARIEKAVREILVAVGEDPDRDGLQQTPARVARAYAELFAGLRVDPAQVLSTTFEANHQELVLVRDIDVMSLCEHHLLPFRGSAHIGYIPGPDGRITGLSKLARLVEVFARRPQVQERLTSQIADLLMTRLAPAGVIVVLECEHMCMAMRGIQKSGAKTITSAVRGIHQEDAKSRAEAMSLILHR

SEQ ID NO: 10915 - protein, 221 aa, Micromonospora musae
  misc_feature (1)..(221): tr|A0A3A9XZQ9|A0A3A9XZQ9_9ACTN GTP cyclohydrolase 1 OS= Micromonospora musae OX=1894970 GN=folE PE=3 SV=1
MAASATEPDGDDMLDYIAARLINGKLTGGPVEESVDLARIEKAVREILIAVGEDPDRDGLRQTPARVARAYAELFAGLRVDPAQVLSTAFEANHQELVIVRDIDVMSLCEHHLLPFRGSAHIGYIPGPDGRITGLSKLARLVEVYARRPQVQERLTTQVADLLMAKLAPRGVIVVLECEHMCMAMRGIQKSGAKTITSAVRGTLQNDAKSRSEAMALILPR

SEQ ID NO: 10916 - protein, 207 aa, Micromonospora narathiwatensis
  misc_feature (1)..(207): tr|A0A1A8ZA75|A0A1A8ZA75_9ACTN GTP cyclohydrolase 1 OS= Micromonospora narathiwatensis OX=299146 GN=folE PE=3 S V=1
MTTTFPDLDDPVHSVLAGVDVLDRKQVEQAVMQLLRTLGVPADSEVGRNTPRRMTDALVQMLTPQSWTFTTFPNDEGNHDLVLTRGIAFTSLCAHHLLPFSGYAHIGFYPGAKLPGLSKIARTVEMFAAQLQVQENLGQQIAGFLEAQLACDGVGVVLEAEHLCMTRRGVRAAGADTLTVATRGRLQRDHGARTEFLQLAVRSGRTA

SEQ ID NO: 10917 - protein, 233 aa, Micromonospora narathiwatensis
  misc_feature (1)..(233): tr|A0A1A9A8S0|A0A1A9A8S0_9ACTN GTP cyclohydrolase 1 OS= Micromonospora narathiwatensis OX=299146 GN=folE PE=3 S V=1
MNTDAAASPDKGLAASSTEPDGDEALDYVAARLISGKLTGRPVEETMDLARIEKAVREILIAVGEDPDRDGLQQTPARVARAYAELFAGLRVDPAQVLSTTFEANHEELVLVRDIDVMSLCEHHLLPFRGSAHIGYIPGPDGRITGLSKLARLVEVFARRPQVQERLTSQIADLLMSKLAPRGVVVVLECEHMCMAMRGIQKAGAKTITSAVRGTLQHDAKSRAEAMALIIPR

SEQ ID NO: 10918 - protein, 208 aa, Micromonospora nigra
  misc_feature (1)..(208): tr|A0A1C6RV01|A0A1C6RV01_9ACTN GTP cyclohydrolase 1 OS= Micromonospora nigra OX=145857 GN=folE PE=3 SV=1
MDYVAARLISGRLTGRPVEDTMDLGRIEKAVREILIAVGEDPDRDGLRQTPARVARAYAELFAGLRVDPAQVLTTTFEANHEELVLVRDIDVMSLCEHHLLPFRGTAHIGYIPGPDGRITGLSKLARLVEVFARRPQVQERLTSQIADLLMDRLAPRGVVVVLDCEHMCMAMRGIQKSGAKTITSAVRGTLKHDAKSRAEAMALIIPR

SEQ ID NO: 10919 - protein, 207 aa, Micromonospora nigra
  misc_feature (1)..(207): tr|A0A1C6R7U5|A0A1C6R7U5_9ACTN GTP cyclohydrolase 1 OS= Micromonospora nigra OX=145857 GN=folE PE=3 SV=1
MTITLPDLDGAVHTVLPGVDVLDRKEVEQAVTQLVRALGVPMDTEVGRITPRRMADALVQMLSSQSWTFTTFPNDEGQHDLVLTRDIPFTSLCAHHLLPFSGHAHVGFYPGEKLPGLSKIARAVEMFAARLQVQETLGQQIAGFLEEQLACDGVGVVLVAEHLCMTRRGVRAAGAETLTVATRGRLQQDQGARSEFFHLAVPSGRTA

SEQ ID NO: 10920 - protein, 205 aa, Micromonospora noduli
  misc_feature (1)..(205): tr|A0A328NCU4|A0A328NCU4_9ACTN GTP cyclohydrolase 1 OS= Micromonospora noduli OX=709876 GN=folE PE=3 SV=1
MAARLISGKLTGRPVEDAVDLGRIEKAVREILIAVGEDPDRDGLQQTPARVARAYAELFAGLRVDPAQVLSTAFEANHEELVIVRDIDVMSLCEHHLLPFRGSAHIGYIPGPDGRITGLSKLARLVEVFARRPQVQERLTSQVADLLMSKLAPRGVVVVLECEHMCMAMRGIQKSGAKTITSAVRGILQTDSKSRAEAMALIIPR

SEQ ID NO: 10921 - protein, 224 aa, Micromonospora olivasterospora
  misc_feature (1)..(224): tr|A0A562I7W7|A0A562I7W7_MICOL GTP cyclohydrolase 1 OS= Micromonospora olivasterospora OX=1880 GN=folE PE=3 SV= 1
MDGALAASSTEPDIDELDYLAARLVNGRLTGRPVEESVDLARIEKAVREILIAVGEDPDRDGLVKTPARVARAYAELFAGLRVDPAQVLSTTFEANHEELVLVRDIDVMSLCEHHLLPFRGSAHIGYIPGPDGRITGLSKLARLVEVFARRPQVQERLTSQIADLLMDRLAPRGVVVVLECEHMCMAMRGIQKAGAKTITSAVRGTLQRDPKSRAEAMALIIPR

SEQ ID NO: 10922 - protein, 199 aa, Micromonospora orduensis
  misc_feature (1)..(199): tr|A0A5C4QQ33|A0A5C4QQ33_9ACTN GTP cyclohydrolase 1 OS= Micromonospora orduensis OX=1420891 GN=folE PE=3 SV=1
MTTTAALRVGQRRPDKDLVAAELAAATFLTALGVDLTAGGLAETPARMARAYAELLSPREFAFTTFANDEGYDELVVTRDIPIRSVCEHHLLPFVGVAHVGYLPGDRIVGLSKLPRVVQLFAHGPQLQERLTRQIAVWLDTHLRPGAVGVVIEAEHLCVTMRGAHAAGARSITSAFLGRLRDDARAREEFLTMAGVGSP

SEQ ID NO: 10923 - protein, 221 aa, Micromonospora orduensis
  misc_feature (1)..(221): tr|A0A5C4QXT3|A0A5C4QXT3_9ACTN GTP cyclohydrolase 1 OS= Micromonospora orduensis OX=1420891 GN=folE PE=3 SV=1
MAVSATEPDGDDGLDYVAARLISGRLTGRPVEDAVDLGRIEKAVREILIAVGEDPDRDGLQQTPARVARAYAELFAGLRVDPAQVLSTTFEANHEELVIVRDIDVMSLCEHHLLPFRGSAHIGYIPGPDGRITGLSKLARLVEVFARRPQVQERLTSQVADLLMSKLAPRGVVVVLECEHMCMAMRGIQKSGAKTITSAVRGILQTDSKSRAEAMALIIPR

SEQ ID NO: 10924 - protein, 222 aa, Micromonospora pallida
  misc_feature (1)..(222): tr|A0A1C6TE94|A0A1C6TE94_9ACTN GTP cyclohydrolase 1 OS= Micromonospora pallida OX=145854 GN=folE PE=3 SV=1
MLAASATEPDGDEALDYLAARLVNGKLTGRPVEDAVDLGRIEKAVREILIAVGEDPDRDGLLQTPARVARAYAELFAGLRVDPKQVLTTTFEANHEELVIVRDIDVMSLCEHHLLPFRGSAHIGYIPGPDGRITGLSKLARLVEVFARRPQVQERLTSQIADLLMERLAPRGVIVVLECEHMCMAMRGIQKSGAKTITSAVRGTLQRDAKSRAEAMALIIPR

SEQ ID NO: 10925 - protein, 187 aa, Micromonospora palomenae
  misc_feature (1)..(187): tr|A0A561WGE3|A0A561WGE3_9ACTN GTP cyclohydrolase 1 OS= Micromonospora palomenae OX=1461247 GN=folE PE=3 SV=1
MDLGRIEKAVREILIAVGEDPDRDGLQQTPARVARAYAELFAGLRVDPAQVLSTTFEANHQELVLVRDIDVMSLCEHHLLPFRGSAHIGYIPGPDGRITGLSKLARLVEVFARRPQVQERLTSQIADLLMSKLAPRGVVVVLECEHMCMAMRGIQKSGAKTITSAVRGTLQHDAKSRAEAMALIIPR

SEQ ID NO: 10926 - protein, 199 aa, Micromonospora palomenae
  misc_feature (1)..(199): tr|A0A561WCG4|A0A561WCG4_9ACTN GTP cyclohydrolase 1 OS= Micromonospora palomenae OX=1461247 GN=folE PE=3 SV=1
MALSPLQVDRRPATKDLVAAEQAAAAFLTALGVNLDANGLAETPGRMARAYAELLTPREFRLTTFDNDEGYDELVVARAIPIRSVCEHHLLPFIGVAHVGYLPGERILGLSKLARVAELFAHGPQVQERLTKQIADWLTAHLRPRGVGVVVEAQHLCMTLRGVRAVGATTITSTLLGALRDDSRSRAEFFTLTGVGAHA

SEQ ID NO: 10927 - protein, 137 aa, Micromonospora pattaloongensis
  misc_feature (1)..(137): tr|A0A1H3HCC6|A0A1H3HCC6_9ACTN GTP cyclohydrolase 1 OS= Micromonospora pattaloongensis OX=405436 GN=SAMN0544436 5_101750 PE=3 SV=1
MLTTTFEANHEELVLVRDIEVMSLCEHHLLPFRGVAHIGYIPGTHGRITGLSKLARLVEVYARRPQVQERLTSQIADLLMERLDPRGVIAVLECEHMCMAMRGIQKAGSKTITSAVRGLFQRDAKSRAEAMTLIIHS

SEQ ID NO: 10928 - protein, 205 aa, Micromonospora peucetia
  misc_feature (1)..(205): tr|A0A1C6V3N3|A0A1C6V3N3_9ACTN GTP cyclohydrolase 1 OS= Micromonospora peucetia OX=47871 GN=folE PE=3 SV=1
MAARLISGRLTGRPVEETVDLGRIEKAVREILIAVGEDPDRDGLQQTPARVARAYAELFAGLRVDPAQVLSTTFEANHEELVLVRDIDVMSLCEHHLLPFRGSAHIGYIPGPDGRITGLSKLARLVEVFARRPQVQERLTSQVADLLMERLAPRGVVVVLECEHMCMAMRGIQKSGAKTITSAVRGTLQRDAKSRAEAMALIIHR

SEQ ID NO: 10929 - protein, 222 aa, Micromonospora pisi
  misc_feature (1)..(222): tr|A0A495JLR4|A0A495JLR4_9ACTN GTP cyclohydrolase 1 OS= Micromonospora pisi OX=589240 GN=folE PE=3 SV=1
MHDASSTEPDNDDTLDYLAARLVDGKLTGSPVEDAVDLLRIEKAVREILIAVGEDPDRDGLVKTPARVARAYAELFAGLRVDPAQVLGTTFEANHSELVLVRDIDVMSLCEHHLLPFRGMAHIGYIPGANGRITGLSKLARLVEVYARRPQVQERLTSQIADLLTEKLQPRGVVVVLECEHMCMAMRGIQKSGAKTITSAVRGSLQEDSRSRAEAMALIMHS

SEQ ID NO: 10930 - protein, 234 aa, Micromonospora purpureochromogenes
  misc_feature (1)..(234): tr|A0A1C4V7B3|A0A1C4V7B3_9ACTN GTP cyclohydrolase 1 OS= Micromonospora purpureochromogenes OX=47872 GN=folE PE= 3 SV=1
MNTDAAASPENSGLAASSTEPDGDEALDYVAARLISGKLTGRPIEDTMDLGRIEKAVREILIAVGEDPDRDGLQQTPARVARAYAELFAGLRVDPAQVLSTTFEANHQELVLVRHIDVMSLCEHHLLPFRGSAHIGYIPGPDGRITGLSKLARLVEVFARRPQVQERLTSQIADLLMNKLAPRGVVVVLECEHMCMAMRGIQKSGAQTITSAVRGTLQHDAKSRAEAMALIIPR

SEQ ID NO: 10931 - protein, 217 aa, Micromonospora purpureochromogenes
  misc_feature (1)..(217): tr|A0A1C5A8V7|A0A1C5A8V7_9ACTN GTP cyclohydrolase 1 OS= Micromonospora purpureochromogenes OX=47872 GN=folE PE= 3 SV=1
MGLMGRASTTHRPSMGVEVALSPLQVDRRPATRDLVAAEQAAAAFLAALGVNLDADGLAETPGRMARAYAELLTPREFRLTTFANDEGYDELVVARSIPIRSVCEHHLLPFIGVAHVGYLPGERILGLSKLARVAELFAHGPQVQERLTKQIADWLTAHLRPRGVGVVVEAQHLCMTLRGVQAVGATTITSTLLGALRDDSRSRAEFFTLTGVGARA

SEQ ID NO: 10932 - protein, 205 aa, Micromonospora radicis
  misc_feature (1)..(205): tr|A0A418MN91|A0A418MN91_9ACTN GTP cyclohydrolase 1 OS= Micromonospora radicis OX=1894971 GN=folE PE=3 SV=1
MAARLINGRLTGRPVEETMDLGRIEKAVREILIAVGEDPDRDGLQQTPARVARAYAELFAGLRVDPATVLTTTFEANHEELVLVRDIDVMSLCEHHLLPFRGSAHIGYIPGPDGRITGLSKLARLVEVFARRPQVQERLTSQVADLLMDRLAPRGVVVVLECEHMCMAMRGIQKSGAKTITSAVRGTLQRDAKSRAEAMALIIPR

SEQ ID NO: 10933 - protein, 221 aa, Micromonospora rhizosphaerae
  misc_feature (1)..(221): tr|A0A1C6RCQ6|A0A1C6RCQ6_9ACTN GTP cyclohydrolase 1 OS= Micromonospora rhizosphaerae OX=568872 GN=folE PE=3 SV= 1
MAVSATEPDGEDGLDHVAARLISGKLTGRPIEETVDLGRIEKAVREILIAVGEDPDRDGLQQTPARVARAYAELFAGLRVDPAQVLSTTFEASHEELVLVRDIDVMSLCEHHLLPFRGSAHIGYIPGPDGRITGLSKLARLVEVFARRPQVQERLTSQIADLLMSKLAPRGVVVVLECEHMCMAMRGIQKTGAKTITSAVRGTLQYDAKSRAEAMALIIPR

SEQ ID NO: 10934 - protein, 197 aa, Micromonospora rhizosphaerae
  misc_feature (1)..(197): tr|A0A1C6SMH7|A0A1C6SMH7_9ACTN GTP cyclohydrolase 1 OS= Micromonospora rhizosphaerae OX=568872 GN=folE PE=3 SV= 1
MTIAPARRHVDQQPAPDLVAAEQAAARFLAALDIDLDSESLRDTPRRMAKAYAELLTARPFDLTTFPNDEGYDELVLARSIPIRSVCEHHLLPFVGVAHVGYLPGDRILGLSKLARVVELFAHRPQVQERLTKQVAEWLALELAPKGVGVVIEAEHLCMTLRGVRATGATTVTSTLLGALRDDARSRAEFFSLTGAH

SEQ ID NO: 10935 - protein, 220 aa, Micromonospora rifamycinica
  misc_feature (1)..(220): tr|A0A109IP47|A0A109IP47_9ACTN GTP cyclohydrolase 1 OS= Micromonospora rifamycinica OX=291594 GN=folE PE=3 SV=1
MAASSTEPGDEALDYVAARLISGKLNGRPIEDTMDLGRIEKAVREILIAVGEDPDRDGLQQTPARVARAYAELFAGLRVDPAQVLSTTFEANHEELVLVRDIDVMSLCEHHLLPFRGSAHIGYIPGPDGRITGLSKLARLVEVFARRPQVQERLTAQIADLLMSKLQPRGVIVILDCEHMCMAMRGIQKSGAKTITSAVRGVLQHDAKSRAEAMSLIIPR

SEQ ID NO: 10936 - protein, 233 aa, Micromonospora rifamycinica
  misc_feature (1)..(233): tr|A0A1C5K223|A0A1C5K223_9ACTN GTP cyclohydrolase 1 OS= Micromonospora rifamycinica OX=291594 GN=folE PE=3 SV=1
MNTDAAASPDQSGLAASSTEPGDEALDYVAARLISGKLNGRPIEDTMDLGRIEKAVREILIAVGEDPDRDGLQQTPARVARAYAELFAGLRVDPAQVLSTTFEANHEELVLVRDIDVMSLCEHHLLPFRGSAHIGYIPGPDGRITGLSKLARLVEVFARRPQVQERLTAQIADLLMSKLQPRGVIVILDCEHMCMAMRGIQKSGAKTITSAVRGVLQHDAKSRAEAMSLIIPR

SEQ ID NO: 10937 - protein, 205 aa, Micromonospora rosaria; identical to SEQ ID NO: 10894
  misc_feature (1)..(205): tr|A0A136PN61|A0A136PN61_9ACTN GTP cyclohydrolase 1 OS= Micromonospora rosaria OX=47874 GN=folE PE=3 SV=1

SEQ ID NO: 10938 - protein, 199 aa, Micromonospora saelicesensis; identical to SEQ ID NO: 10922
  misc_feature (1)..(199): tr|A0A328NVA9|A0A328NVA9_9ACTN GTP cyclohydrolase 1 OS= Micromonospora saelicesensis OX=285676 GN=folE PE=3 SV= 1

SEQ ID NO: 10939 - protein, 205 aa, Micromonospora saelicesensis
  misc_feature (1)..(205): tr|A0A1C4YR68|A0A1C4YR68_9ACTN GTP cyclohydrolase 1 OS= Micromonospora saelicesensis OX=285676 GN=folE PE=3 SV= 1
MAARLISGKLTGRPVEDAVDLGRIEKAVREILIAVGEDPDRDGLQQTPARVARAYAELFAGLRVDPAQVLSTTFEANHEELVIVRDIDVMSLCEHHLLPFRGSAHIGYIPGPDGRITGLSKLARLVEVFARRPQVQERLTSQVADLLMSKLAPRGVVVVLECEHMCMAMRGIQKSGAKTITSAVRGILQSDSKSRAEAMALIIPR

SEQ ID NO: 10940 - protein, 191 aa, Micromonospora sagamiensis
  misc_feature (1)..(191): tr|A0A562W919|A0A562W919_9ACTN GTP cyclohydrolase 1 OS= Micromonospora sagamiensis OX=47875 GN=folE PE=3 SV=1
MENAVDLGRIEKAVREILIAVGEDPDRDGLLQTPARVARAYAELFAGLRVDPKKVLTTTFEANHEELVLVRDIDVMSLCEHHLLPFRGSAHIGYIPGPDGRITGLSKLARLVEVFARRPQVQERLTSQIADLLMERLAPRGVIVVLECEHMCMAMRGIQKSGAETITSAVRGTLQRDAKSRAEAMALIIRR

SEQ ID NO: 10941 - protein, 205 aa, Micromonospora sediminicola
  misc_feature (1)..(205): tr|A0A1A9B463|A0A1A9B463_9ACTN GTP cyclohydrolase 1 OS= Micromonospora sediminicola OX=946078 GN=folE PE=3 SV=1
MAARLISGKLTGGPVEQSVDLARIEKAVREILIAVGEDPDRDGLQQTPARVARAYAELFAGLRVDPAQVLRTTFEANHEELVLVRDIDVMSLCEHHLLPFRGSAHIGYIPGPDGRITGLSKLARLVEVFARRPQVQERLTSQIADLLMSSLAPRGVIVVLECEHMCMAMRGIQKSGAKTITSAVRGGLQNDAKSRAEAMALIMHR

SEQ ID NO: 10942 - protein, 233 aa, Micromonospora siamensis
  misc_feature (1)..(233): tr|A0A1C5GPQ0|A0A1C5GPQ0_9ACTN GTP cyclohydrolase 1 OS= Micromonospora siamensis OX=299152 GN=folE PE=3 SV=1
MNSDNAASPERSGLAASSTEPGDEALDYVAARLISGKLTGRPVEDTMDLARIEKAVREILVAVGEDPDRDGLQQTPARVARAYAELFAGLRVDPAQVLSTTFEANHQELVLVRDIDVMSLCEHHLLPFRGSAHIGYIPGPDGRITGLSKLARLVEVFARRPQVQERLTSQIADLLMTRLAPAGVIVVLECEHMCMAMRGIQKSGAKTITSAVRGIHQEDAKSRAEAMSLILHR

SEQ ID NO: 10943 - protein, 221 aa, Micromonospora sp.; identical to SEQ ID NO: 10915
  misc_feature (1)..(221): tr|A0A5D0SXZ7|A0A5D0SXZ7_9ACTN GTP cyclohydrolase 1 OS= Micromonospora sp. WP24 OX=2604469 GN=folE PE=3 SV=1

SEQ ID NO: 10944 - protein, 191 aa, Micromonospora sp.
  misc_feature (1)..(191): tr|A0A2P8ANJ0|A0A2P8ANJ0_9ACTN GTP cyclohydrolase 1 OS= Micromonospora sp. MH33 OX=1945509 GN=folE_2 PE=3 SV=1
MEESVDLARIEKAVREILVAVGEDPDRDGLQQTPARVARAYAELFAGLRVDPAQVLSTTFEANHQELVLVRDIDVMSLCEHHLLPFRGSAHIGYIPGPDGRITGLSKLARLVEVFARRPQVQERLTSQIADLLMAKLAPRGVVVVLECEHMCMAMRGIQKSGAKTITSAVRGTLQHDAKSRAEAMALIIPR

SEQ ID NO: 10945 - protein, 205 aa, Micromonospora taraxaci
  misc_feature (1)..(205): tr|A0A561VUK0|A0A561VUK0_9ACTN GTP cyclohydrolase 1 OS= Micromonospora taraxaci OX=1316803 GN=folE PE=3 SV=1
MAARLISGKLTGRPVEDAVDLGRIEKAVREILIAVGEDPDRDGLQQTPARVARAYAELFAGLRVDPAQVLSTTFEANHEELVIVRDIDVMSLCEHHLLPFRGSAHIGYIPGPDGRITGLSKLARLVEVFARRPQVQERLTSQVADLLMSKLEPRGVVVVLECEHMCMAMRGIQKSGAKTITSAVRGILQTDSKSRAEAMALIIPR

SEQ ID NO: 10946 - protein, 205 aa, Micromonospora tulbaghiae; identical to SEQ ID NO: 10867
  misc_feature (1)..(205): tr|A0A1C4X8Z7|A0A1C4X8Z7_9ACTN GTP cyclohydrolase 1 OS= Micromonospora tulbaghiae OX=479978 GN=folE PE=3 SV=1

SEQ ID NO: 10947 - protein, 219 aa, Micromonospora ureilytica
  misc_feature (1)..(219): tr|A0A3N9XSZ7|A0A3N9XSZ7_9ACTN GTP cyclohydrolase 1 OS= Micromonospora ureilytica OX=709868 GN=folE PE=3 SV=1
MAVSATEPDGDDELDYVAARLISGRLIGRPVEDAVDLGRIEKAVREILIAVGEDPDRDGLQQTPARVARAYAELFAGLRVDPAQVLSTTFEANHEELVIVRDIDVMSLCEHHLLPFRGSAHIGYIPGPDGRITGLSKLARLVEVFARRPQVQERLTSQVADLLMSKLAPRGVIVVLECEHMCMAMRGIQKSGAKTITSAVRGILQSDSKSRAEAMALMR

SEQ ID NO: 10948 - protein, 205 aa, Micromonospora violae
  misc_feature (1)..(205): tr|A0A4V2FPP5|A0A4V2FPP5_9ACTN GTP cyclohydrolase 1 OS= Micromonospora violae OX=1278207 GN=folE PE=3 SV=1
MAARLISGKLTGRPVEDAVDLGRIEKAVREILIAVGEDPDRDGLQQTPARVARAYAELFAGLRVDPAQVLSTTFEANHEELVIVRDIDVMSLCEHHLLPFRGSAHIGYIPGPDGRITGLSKLARLVEVFARRPQVQERLTSQVADLLMSKLAPRGVVVVLECEHMCMAMRGIQKSGAKTITSAVRGILQTDSKSRAEAMALIIPR

SEQ ID NO: 10949 - protein, 198 aa, Micromonospora viridifaciens
  misc_feature (1)..(198): tr|A0A1C4WYG9|A0A1C4WYG9_MICVI GTP cyclohydrolase 1 OS= Micromonospora viridifaciens OX=1881 GN=folE PE=3 SV=1
MTVTPMRVARQRPTRDLAAAERAAAAFLAALGVDLDRDGLAATPGRMARAYAELLTPREFALTTFDNDEGYDELVVARAIPIRSVCEHHLLPFVGVAHVGYLPGARILGLSKLARVVELFAHGVQVQERLTKQIAEWLTEHLQPKGVGVVVEAEHLCMTLRGVQAVGATTVTSSLLGTLRDDPRSRAEFFALTGLHTG

SEQ ID NO: 10950 - protein, 233 aa, Micromonospora viridifaciens
  misc_feature (1)..(233): tr|A0A1C4UNS1|A0A1C4UNS1_MICVI GTP cyclohydrolase 1 OS= Micromonospora viridifaciens OX=1881 GN=folE PE=3 SV=1
MNTDAAASPDQGLAASSTEPDGDEALDYVAARLISGKLTGRPVEETMDLARIEKAVREILIAVGEDPDRDGLQQTPARVARAYAELFAGLRVDPAQVLSTTFEANHEELVLVRDIDVMSLCEHHLLPFRGSAHIGYIPGPDGRITGLSKLARLVEVFARRPQVQERLTAQIADLLMSKLAPRGVVVVLECEHMCMAMRGIQKSGAKTITSAVRGTLQRDAKSRAEAMALIIPR

SEQ ID NO: 10951 - protein, 220 aa, Micromonospora wenchangensis
  misc_feature (1)..(220): tr|A0A246RQ64|A0A246RQ64_9ACTN GTP cyclohydrolase 1 OS= Micromonospora wenchangensis OX=1185415 GN=folE PE=3 SV =1
MAASSTEPGDETLDYVAARLISGKLNGRPIEDTMDLGRIEKAVREILIAVGEDPDRDGLQQTPARVARAYAELFAGLRVDPSQVLSTTFEANHEELVLVRDIDVMSLCEHHLLPFRGSAHIGYIPGPDGRITGLSKLARLVEVFARRPQVQERLTSQIADLLMSRLQPRGVIVILDCEHMCMAMRGIQKSGAKTITSAVRGVLQHDAKSRAEAMSLIIPR

SEQ ID NO: 10952 - protein, 190 aa, Micromonospora wenchangensis
  misc_feature (1)..(190): tr|A0A246RLU1|A0A246RLU1_9ACTN GTP cyclohydrolase 1 OS= Micromonospora wenchangensis OX=1185415 GN=B5D80_17815 PE=3 SV=1
MTTVERESGAQDPLEHIARQLLIEIGEDPDRDGLKETPARFARWWREFSSFQAGDVGTRFPLRTDGQIIMVSDIKVWSLCEHHLLPFSCSLTIAYRPDGDVLGLSKFARIAHRHAHRLQVQERLVQDIATEITAITGSVDIAVIGHGEHLCMSMRGVRTTAQMTSSVFRGIFQEHGPARQELVASVFPRR

SEQ ID NO: 10953 - protein, 208 aa, Micromonospora yangpuensis
  misc_feature (1)..(208): tr|A0A1C6VEZ6|A0A1C6VEZ6_9ACTN GTP cyclohydrolase 1 OS= Micromonospora yangpuensis OX=683228 GN=folE PE=3 SV=1
MDYIAARLVNGRLTGRPVEEAIDLARIEKAVREILVAVGEDPDRDGLVQTPARVARAYAELFAGLRVDPAQVLTTTFEANHEELVLVRDIDVMSLCEHHLLPFRGSAHIGYIPGPDGRITGLSKLARLVEVYARRPQVQERLTSQIADLLMERLAPRGVVVVLQCEHMCMAMRGIQKSGAQTITSAVRGVLQRDAKSRAEAMALIIPR

SEQ ID NO: 10954 - protein, 205 aa, Micromonospora zamorensis; identical to SEQ ID NO: 10948
  misc_feature (1)..(205): tr|A0A1C5J7Q6|A0A1C5J7Q6_9ACTN GTP cyclohydrolase 1 OS= Micromonospora zamorensis OX=709883 GN=folE PE=3 SV=1

SEQ ID NO: 10955 - protein, 219 aa, Micromonospora zingiberis
  misc_feature (1)..(219): tr|A0A4R0GSU5|A0A4R0GSU5_9ACTN GTP cyclohydrolase 1 OS= Micromonospora zingiberis OX=2053011 GN=folE PE=3 SV=1
MAASATEPDDTLDYIAARLINGRLTGRPVEEVVDLARIEKAVREILVAVGEDPDRDGLQQTPARVARAYAELFAGLRVDPGTVLTTTFEANHEELVLVRDIDVMSLCEHHLLPFRGSAHIGYIPGPDGRITGLSKLARLVEVFARRPQVQERLTSQIADLLMDKLAARGVVVVLECEHMCMAMRGIQKSGAMTITSAVRGSLQRDAKSRAEAMALIHPR

SEQ ID NO: 10956 - protein, 217 aa, Micromonosporaceae bacterium
  misc_feature (1)..(217): tr|A0A3D4WNK5|A0A3D4WNK5_9ACTN GTP cyclohydrolase 1 OS= Micromonosporaceae bacterium OX=1873464 GN=folE PE=3 SV =1
MGESELNDKLDYLAARLVDGSLTGTPVEEAVDLKRIEAAVREILIALGEDPDREGLLKTPARVARAYAELFAGLRVDPKAIVKTTFEADHDEFVLVKDIPLLSLCEHHLLPFRGVAHVGYLPGEDGRITGLSKLARLVEVYARRPQVQERLTSQIADLLEDKLQARGVIVVLECEHMCMEMRGIRKPGSRTITSAVRGLHKTDPKTRSEALSLINAR

SEQ ID NO: 10957 - protein, 198 aa, Micromonosporaceae bacterium
  misc_feature (1)..(198): tr|A0A3D5AS09|A0A3D5AS09_9ACTN GTP cyclohydrolase 1 OS= Micromonosporaceae bacterium OX=1873464 GN=folE PE=3 SV =1
MTIAPLRVVRRKAEQDLAAAERAAADLLAALGVELDSDSLRETPGRMARAYAELLTPRPFRPTTFPNDEGYDELVLARGIPIRSVCEHHMLPFVGVAHVGYLPGERILGLSKLARVVEFVAHGLQVQERLTKQIADWLATELSPRGVGVVIEAEHLCMTLRGVRATGSTTVTSTLLGTIREDPRSRAEFLALTGIHRA

SEQ ID NO: 10958 - protein, 187 aa, Micropruina glycogenica
  misc_feature (1)..(187): tr|A0A2N9JM73|A0A2N9JM73_9ACTN GTP cyclohydrolase 1 OS= Micropruina glycogenica OX=75385 GN=folEA PE=3 SV=1
MPVDQPRVAAAVRELLIAIGENPDREGLQETPYRVARAYAEMFEGLDQTASDVLSTTFDIAHDEMVLVKNIEVWSTCEHHLVPFTGLAHVGYIPAAQGRITGLSKIARLVDVFAKRPQVQERLTTQIADALMEHLEPRGVIVVIDCEHLCMTMRGVHKPGARTVTSAVRGTLRNPAIRAEAMSLIIG

SEQ ID NO: 10959 - protein, 233 aa, Microscilla marina
  misc_feature (1)..(233): tr|A1ZQ86|A1ZQ86_9BACT GTP cyclohydrolase 1 OS=Microsci lla marina ATCC 23134 OX=313606 GN=folE PE=3 SV=1
MNGKHKNGVHNHKNNDKMNMEEMGDEHVASSYETPLREDAFEVSDDTKIKLIEERFREIMEIMGLDLSDDSLNGTPHRVAKMYIKEIFSGLNPANKPAPTLFENVYKYNEMLVEKDITFFSNCEHHFVPIYGKAHVAYISSGKVIGLSKINRIVQYFSRRPQVQERLTIQIGKELEKMLDTGSVAVVMDAAHMCVSSRGIQDTNSTTVTSYYSGKFQEEATRNEFLKYIGMNK

SEQ ID NO: 10960 - protein, 225 aa, Microscilla marina
  misc_feature (1)..(225): tr|A1ZSS2|A1ZSS2_9BACT GTP cyclohydrolase 1 OS=Microsci lla marina ATCC 23134 OX=313606 GN=folE PE=3 SV=1
MIQEKLTKIDADEIGDLHITNSYDTPLREDAFLLDDKTKIRLIEEYFGKIMHTLGLDLNDDSLKGTPYRVAKMYVKEIFKGLDPDNRPDLKVFENKYQYGEMLVEKNISLYSSCEHHFLPIIGKAHVGYIANDKVIGLSKINRIVDYFARRPQVQERLSRQISEELKRVLDTEDVAIVIESKHLCVASRGIQDTESSTVTAEYGGQFKDKDVRQEFLSYVHSKLE

SEQ ID NO: 10961 - protein, 231 aa, Microscillaceae bacterium
  misc_feature (1)..(231): tr|A0A349DS34|A0A349DS34_9BACT GTP cyclohydrolase 1 OS= Microscillaceae bacterium OX=2053581 GN=folE PE=3 SV=1
MIQEKLNGLDADEIGDLHMATSYDTPLREDAFLLDDDTKIKLIEEYFGKIMHTLGLDLNDDSLRGTPGRVAKMYVQEIFKGLNPAHKPKAKVFENKYQYGEMLIEKNITLYSSCEHHFLPIIGKAHVGYIANDKVIGLSKINRIVDYFARRPQVQERLSRQIFEEMKQSLDTEDVAVVIESKHLCVASRGIQDTESSTVTAEYGGKFKDKEVRKEFLAYINQDYLGSKPMF

SEQ ID NO: 10962 - protein, 251 aa, Microscillaceae bacterium
  misc_feature (1)..(251): tr|A0A349DYG7|A0A349DYG7_9BACT GTP cyclohydrolase 1 OS= Microscillaceae bacterium OX=2053581 GN=folE PE=3 SV=1
MKQKETLLNSLRPNGNGKHNGVHNHNKNDQNKLENGKYEEMGDEHVATSYETPMRDDAFELSDDTKIKLIEERFREIMDILGLDLTDDSLNGTPHRVAKMYVKEIFSGLNPDNKPKPTLFENVYKYNEMLVEKDITFYSNCEHHFVPIYGKAHVAYISSGKVIGLSKINRIVQYYARRPQVQERLTMQIGKELEKMLDTENVAVIMDADHMCVSSRGVQDTSSSTITSYYGGKFQEENTRNEFLKYVGMQK

SEQ ID NO: 10963 - protein, 221 aa, Microterricola gilva
  misc_feature (1)..(221): tr|A0A4Q8APQ6|A0A4Q8APQ6_9MICO GTP cyclohydrolase 1 OS= Microterricola gilva OX=393267 GN=folE PE=3 SV=1
MSSQIAQLGDDSAAHSARHRPQRSPVHAVPSGEPDRELAIEAVTDLLRALGRDPESPHLADTPRRVADALVEMLTPREFEATSFANDENYRELVLVRDIPFSSLCEHHLLPFQGVAHIGYLPGERIIGLSKLARVLDYFSHELQVQERLTQQVADWLHAELGARGVGVVLEAEHQCMSARGAKAVGSSTSTSAWHGELLSDREARSEFLAACGRQGGGVTS

SEQ ID NO: 10964 - protein, 212 aa, Microterricola gilva
  misc_feature (1)..(212): tr|A0A4V2GAG2|A0A4V2GAG2_9MICO GTP cyclohydrolase 1 OS= Microterricola gilva OX=393267 GN=folE PE=3 SV=1
MSGVDRARIEAAVSEIILAIGEDPARPGLAKTPARVADAYAEFFSGLSQDPLEHLLDSVPIGEDIDGVPQTSDVVLLRGIDFRSVCEHHLLPFVGVVHIAYLPSDRVVGLGRLPAVVDTLAARPQLQERLTEEIADALNDGLAPRGVLVVLDAVHRCVVARGSRQTNSSTVTIASRGELAEPVARAELMALIGSAAPAGRPREESTSGGHRA

SEQ ID NO: 10965 - protein, 199 aa, Microterricola pindariensis
  misc_feature (1)..(199): tr|A0A2S6JUM0|A0A2S6JUM0_9MICO GTP cyclohydrolase 1 OS= Microterricola pindariensis OX=478010 GN=folE PE=3 SV=1
MSGVDRARIEAAVNEIILAIGEDPARPGLARTPARVADAYAEFFGGLTQDPLEHLRDSVPIGADVDGAPQTSDAVLLRGIDFRSVCEHHLLPFVGVVHIAYLPSDRVVGLGRLPAVVDTLSARPQLQERLTEEIADALQEGLDPRGVLVVLDAVHRCVVARGSRQASSSTVTIASRGELAEPAARAELMALIASGGHGV

SEQ ID NO: 10966 - protein, 199 aa, Microterricola pindariensis
  misc_feature (1)..(199): tr|A0A2S6JU73|A0A2S6JU73_9MICO GTP cyclohydrolase 1 OS= Microterricola pindariensis OX=478010 GN=folE PE=3 SV=1
MVHAVAARPAPDRELAIAAVAQLLQALGRDPDAPHLADTPRRVADALIEMLTPGEFTATTFENEAGYDSLVLVRDIPFTSLCEHHLLPFHGTAHIGYLPGERIIGLSKLARILEYFSHALQVQERLTQQVADWLQEELGARGVGVVLQAEHQCMAARGVRVSGTRTTTSAWHGELRSDRTARAEFLTLSGIGAALEEGN

SEQ ID NO: 10967 - protein, 221 aa, Microterricola sp.
  misc_feature (1)..(221): tr|A0A420BQJ1|A0A420BQJ1_9MICO GTP cyclohydrolase 1 OS= Microterricola sp. OV434 OX=2135467 GN=folE PE=3 SV=1
MSSQIAQLGEDAAAHSARSRPQRSPVHAVPPREPDRALAIEAVADLLRALGRDPESPHLAETPRRVADALLEMLTPREFEATSFPNDEDYRELVLVRDIPFSSLCEHHLLPFQGVAHIGYLPGERIIGLSKLARVLEYFSRELQVQERLTQQVADWLHAELGARGVGVVLEAEHQCMSARGARAVGSTTSTSAWHGELRSDREARSEFLAACGRQSGGTSS

SEQ ID NO: 10968 - protein, 212 aa, Microterricola sp.
  misc_feature (1)..(212): tr|A0A420BXK9|A0A420BXK9_9MICO GTP cyclohydrolase 1 OS= Microterricola sp. OV434 OX=2135467 GN=folE PE=3 SV=1
MSGVDRARIEAAVSEIILAIGEDPARPGLAKTPARVADAYAEFFSGLSEDPLEHLLDSVPIGEDVDGVPQTSDVVLLRGIDFRSVCEHHLLPFVGVVHIAYLPSDRIVGLGRLPAVVDTLAARPQLQERLTEEIADALNDGLTPRGVLVVLDAVHRCVVARGSRQTNSSTVTIASRGELAEPVARAELMALIGSAAPAGRPREGSSTGGHGA

SEQ ID NO: 10969 - protein, 220 aa, Microterricola viridarii
  misc_feature (1)..(220): tr|A0A1H1YKL1|A0A1H1YKL1_9MICO GTP cyclohydrolase 1 OS= Microterricola viridarii OX=412690 GN=folE PE=3 SV=1
MPRQNAALVTAFDDEDSPERGIVHAVAARPAPDREQAIAAVAQLLQALGRDPDAPHLADTPRRVADALIEMLTPSEFTATTFENEAGYDSLVLVCDIPFTSLCEHHLLPFHGTAHIGYLPGERIIGLSKLARILEYFSRALQVQERLTQQVADWLQEELGARGVGVVLQAEHQCMAARGVRVSGTRTTTSAWHGELRSDRAARAEFLTLSGIGAALEEGN

SEQ ID NO: 10970 - protein, 223 aa, Microterricola viridarii
  misc_feature (1)..(223): tr|A0A120I181|A0A120I181_9MICO GTP cyclohydrolase 1 OS= Microterricola viridarii OX=412690 GN=folE PE=3 SV=1
MPRQNAAVVTAFDDKAASPERRPVRAIAARRRPDREKAIAAVGQLLQALGRDPDSPHLADTPRRVADAFIEMLTPREFTATTFENEAGYAELVLVRDIPFTSLCEHPLLPFQGIAHIGYLPGERIIGLSKLARVLEHFSRELQVQERLTQQVADWLNEELGARGVGVVLEAEHQCMAARGARVTGSRTTTSAWHGELRSDRAARAEFLQLSGIGAASEEGTGS

SEQ ID NO: 10971 - protein, 211 aa, Microvirga aerophila
  misc_feature (1)..(211): tr|A0A512BWD1|A0A512BWD1_9RHIZ GTP cyclohydrolase 1 OS= Microvirga aerophila OX=670291 GN=folE PE=3 SV=1
MNDVVKSLSPRLPAAADKTAERPTREEAEAAVRTLIRWAGDDPQREGLHDTPKRVTKAFREFYSGYQDDPKEVLNKIFAEVEGYDDIVLVRDIPFYSHCEHHLVPFYGMTHIAYYPTKGVVGLSKLARLVEVYARRLQTQESMTAQIAAAMEEALEPRGVAVMIEAEHMCMSMRGVQKAGAMTLTTQFTGAFKNDPAEQVRFLTLVRHGKV

SEQ ID NO: 10972 - protein, 210 aa, Microvirga guangxiensis
  misc_feature (1)..(210): tr|A0A1G5LFZ0|A0A1G5LFZ0_9RHIZ GTP cyclohydrolase 1 OS= Microvirga guangxiensis OX=549386 GN=folE PE=3 SV=1
MNDVVKSLSPRLIPAADKSDDRPTREEAEAAVRTLLRWAGDDPQREGLLETPKRVAKAFKEFYSGYEDDPKDVLNKIFAEVEGYDDIVLVRDIPFYSHCEHHMVPFYGMAHIAYYPTKGVVGLSKLARLVEVYARRLQTQETMTAQIAAAIEQFLEPRGVAVMIEAEHMCMSMRGVQKAGAMTITTQFTGAFNDAAEQVRFLTLVRHGKA

SEQ ID NO: 10973 - protein, 211 aa, Microvirga lotononidis
  misc_feature (1)..(211): tr|I4Z2X8|I4Z2X8_9RHIZ GTP cyclohydrolase 1 OS=Microvir ga lotononidis OX=864069 GN=folE PE=3 SV=1
MSDVVKSLSTRLTTAADKPAPSPTREEAEAAVRILLRWAGDDPSREGLQDTPKRVVKAFREFYSGYDEDPSEILDKIFAEVEGYDDIVLVRDIPFYSHCEHHMVPFFGVAHVAYYPTKGVVGLSKLARLVDAYARRLQTQETMTSQIAKAMVAALEPRGVAVMIEAEHMCMSMRGIQKAGALTLTTQFTGIFKEDPAEQVRFLTLVRNGRG

SEQ ID NO: 10974 - protein, 209 aa, Microvirga ossetica
  misc_feature (1)..(209): tr|A0A1B2EK54|A0A1B2EK54_9RHIZ GTP cyclohydrolase 1 OS= Microvirga ossetica OX=1882682 GN=folE PE=3 SV=1
MSEVVKSLPTRLTTAVDMSAAPSREEAEAAVRTLIRWTGDDPTREGLQDTPRRVAKAFKEFYSGYSEDPSEILDKIFREVEGYDNIVLVRDIPFYSHCEHHMVPFYGVAHVAYYPTKGVVGLSKLARLVDAYARRLQTQETMTSQIAKAMVEALDPRGVAVMLEAEHMCMSMRGIQKAGALTLTTQFTGVFKEDPAEQVRFLTLVRNRN

SEQ ID NO: 10975 - protein, 210 aa, Microvirga sp.
  misc_feature (1)..(210): tr|A0A2T7TV28|A0A2T7TV28_9RHIZ GTP cyclohydrolase 1 OS= Microvirga sp. KLBC 81 OX=1862707 GN=folE PE=3 SV=1
MNDVVKSLSPRLIPAADKPTDRPTREEAEAAVRTLIRWAGDDPQREGLQDTPKRVAKAFKEFYSGYQDDPKDVLNKIFAEVEGYDDIVLVRDIPFYSHCEHHMVPFYGMAHIAYYPTKGVVGLSKLARLVEVYARRLQTQETMTAQIASAMEQFLEPRGVAVMIEAEHMCMSMRGVQKAGAMTLTTQFTGAFNDTAEQVRFLTLVRHGKA

SEQ ID NO: 10976 - protein, 211 aa, Microvirga sp.
  misc_feature (1)..(211): tr|A0A086MNG5|A0A086MNG5_9RHIZ GTP cyclohydrolase 1 OS= Microvirga sp. BSC39 OX=1549810 GN=folE PE=3 SV=1
MSDAIKSLSVRLNPVADKPVAAPTREEAEAAVRTLLRWAGDDPTREGLQDTPKRVAKAFRELYSGYDQDPAEILDKVFNEVEGYDDIVLVRDIPFHSHCEHHMVPFFGVAHVAYYPTKGVVGLSKLARLVDAYARRLQTQETMTAQIASAMVKALEPRGVAVMIEAEHMCMSMRGIQKAGALTLTTQFTGVFKEDPAEQVRFLTLVRNGRG

SEQ ID NO: 10977 - protein, 211 aa, Microvirga subterranea
  misc_feature (1)..(211): tr|A0A370HRS4|A0A370HRS4_9RHIZ GTP cyclohydrolase 1 OS= Microvirga subterranea OX=186651 GN=folE PE=3 SV=1
MDDVVKSLSPRLSAAADKLMEKPTREEAEAAVRTLIRWAGDDPQREGLLETPKRVVKAFKEFYSGYKDNPREVLNKIFAEVEGYDDIVLVKDIPFYSHCEHHMVPFYGMAHIAYYPTKGVVGLSKLARLVEVFARRLQTQETMTAQIAAAMEEALEPRGVAVMLEAEHMCMSMRGVQKAGAMTLTTQFTGVFKDDPAEQVRFLTLVRHGKA

SEQ ID NO: 10978 - protein, 210 aa, Microvirga vignae
  misc_feature (1)..(210): tr|A0A0H1RM14|A0A0H1RM14_9RHIZ GTP cyclohydrolase 1 OS= Microvirga vignae OX=1225564 GN=folE PE=3 SV=1
MNDVVKSLSPRLISAADKPADRPTREEAEAAVRTLIRWAGDDPQREGLQDTPKRVAKAFKEFYSGYQDDPKDVLNKIFAEVEGYDDIVLVRDIPFYSHCEHHMVPFYGMAHIAYYPTKGVVGLSKLARLVEVYARRLQTQETMTAQIASAIEQYLEPRGVAVMIEAEHMCMSMRGVQKAGAMTLTTQFTGAFNDAAEQVRFLTLVRHGKA

SEQ ID NO: 10979 - protein, 265 aa, Microvirgula aerodenitrificans
  misc_feature (1)..(265): tr|A0A2S0PDX1|A0A2S0PDX1_9NEIS GTP cyclohydrolase FolE2 OS=Microvirgula aerodenitrificans OX=57480 GN=folE2 PE =3 SV=1
MTSAAIPDVQSTPDTRNIAINKVGIKSIRHPVRVADRAGGVQHTIGVFNMYVHLPHNFKGTHMSRFVEILNMHEREISVENFESIVRDMCERLEAESGYLEMSFPYFIDKTAPVSGVKSLLDYDITYVGELRGGKYSFTMKALVPVTSLCPCSKKISERGAHNQRSHITITATTNAHVWIEELVAIAESQASCELYGLLKRPDEKYVTERAYDNPKFVEDLVRDVAAAVHSDPRIDAYVVESENFESIHNHSAYALIERDKRVQG

SEQ ID NO: 10980 - protein, 265 aa, Microvirgula sp.; identical to SEQ ID NO: 10979
  misc_feature (1)..(265): tr|A0A329B292|A0A329B292_9NEIS GTP cyclohydrolase FolE2 OS=Microvirgula sp. AG722 OX=2183901 GN=folE2 PE=3 SV= 1

SEQ ID NO: 10981 - protein, 179 aa, Midichloria mitochondrii
  misc_feature (1)..(179): tr|F7XTQ8|F7XTQ8_MIDMI GTP cyclohydrolase 1 OS=Midichlo ria mitochondrii (strain IricVA) OX=696127 GN=folE PE=3 SV=1
MNKKVTKNDALEAIKTILKWIGEDPTREGLMETPMRVVESYEEYFSGYKQDPKEILNVSFSEIADYKEVVVLKDIRFESFCEHHMAPIIGVVHIAYLPNKKVVGISKLARLVEVFSKRLQIQERMTAQIAHAIFNELEAKGVGVIVEAEHHCMTTRGVYNTSSKMRTQSFLGELKTVDI

SEQ ID NO: 10982 - protein, 212 aa, Minwuia thermotolerans
  misc_feature (1)..(212): tr|A0A2M9G019|A0A2M9G019_9PROT GTP cyclohydrolase 1 OS= Minwuia thermotolerans OX=2056226 GN=folE PE=3 SV=1
MDVLVNGPREDTRGREYDPATGKSRPSREEAEAAVRTLIEWAGDTPDREGLRDTPGRVVRAYEEFFAGYDEDPEEVLGRTFEEVEGYDDIVMLRDVRLETHCEHHMVPIIGKAHVAYFPAGRVVGISKLARVIDIYAKRLQTQETMTAQIAATLEKVLQPRGVAILIDAAHQCMTTRGVKKPGVSCITTRFTGIFREDRDMERRFLDLCRGV

SEQ ID NO: 10983 - protein, 199 aa, Mitsuokella jalaludinii
  misc_feature (1)..(199): tr|A0A173X920|A0A173X920_9FIRM GTP cyclohydrolase 1 OS= Mitsuokella jalaludinii OX=187979 GN=folE PE=3 SV=1
MREQNEKAVQAMRAFLKALGLDLEQCGMEQTPERVARLYGDLFDGLGKDPASIWGERFASETKGIVAVRHIPFYSVCEHHLLPFFGEVSLAYLPHDGQVAGFSKFVKLVECFAHRPQLQERMTAQLADAIADGLDAEGVLVVVEAEQLCMTMRDGMARGTKTVTSECLGAFRTDAVLCQQAWMVLGGKQDDSTAEIHLS

SEQ ID NO: 10984 - protein, 262 aa, Mitsuokella jalaludinii
  misc_feature (1)..(262): tr|A0A173XY31|A0A173XY31_9FIRM GTP cyclohydrolase FolE2 OS=Mitsuokella jalaludinii OX=187979 GN=folE2 PE=3 SV= 1
MRDVQNQADARGIAIQRVGIKDAQLPFLIKTKDGGFQQVLARILFTVALPMEYKGTHMSRFLEILMPWSKKPLAEPEMEAMLEEALERLDAQSAEVELSFKYFIDKEAPVSGRKSVLDLDCFFRGTKARGDKMAFTLGVDVPFTSLCPCSKEISKYGAHNQRSVCRTAVRFQEGTECIFIEDLAALIEKQGSSPIYPLLKREDEKYVTEAAYENPKFVEDILRDTVLALRSLPGIAWFSIECENYESIHNHNAFAAHEETVV

SEQ ID NO: 10985 - protein, 234 aa, Mitsuokella multacida
  misc_feature (1)..(234): tr|A0A356UMM3|A0A356UMM3_9FIRM GTP cyclohydrolase 1 OS= Mitsuokella multacida OX=52226 GN=folE PE=3 SV=1
MAVVFFCGFFRWKICNDGLIIKNNDESSGNERADDMRETNEKAVQAMRAFLEALGLDLEQCGMERTPERVADLYADLFDGLGRNPSEIWGERFPSETKGIVAVRHIPFYSVCEHHLLPFFGEVSLAYLPHDGEVAGFSKFVKLVECYAHRPQLQERMTAQLAAAIAEGLCADGVLVVVEAEQLCMTMREGMARGTQTVTSECLGAFRTDAALCEQAWMVLGGKKDDSNTEIRIS

SEQ ID NO: 10986 - protein, 262 aa, Mitsuokella multacida
  misc_feature (1)..(262): tr|C9KJ41|C9KJ41_9FIRM GTP cyclohydrolase FolE2 OS=Mits uokella multacida DSM 20544 OX=500635 GN=folE2 PE=3 SV= 1
MRDVQNQADARGIAIQRVGIKDAHLPFLIKTKDGGFQQVLARILFTVALPMEYKGTHMSRFLEILMPWSKKPLAEPEMEAMLEEALERLDAQSAEVELSFKYFIDKEAPVSRRKSVLDLDCFFRGTKVRGEKMAFTLGVDVPFTSLCPCSKEISEYGAHNQRSVCRTAVRFREGQECIFIEDLAALIEKQGSSPIYPLLKREDEKYVTEAAYENPKFVEDILRDTVLALRSLPGIAWFSIECENYESIHNHNAFAAHEETVV

SEQ ID NO: 10987 - protein, 264 aa, Mitsuokella sp.
  misc_feature (1)..(264): tr|A0A412L1Z2|A0A412L1Z2_9FIRM GTP cyclohydrolase FolE2 OS=Mitsuokella sp. AF21-1AC OX=2292235 GN=folE2 PE=3 S V=1
MRDVQNQTDARGIAIQRVGIKDAHLPFLIKTKDGGFQQVLARIRFTVSLPMEYKGTHMSRFLEILMPWSTKPLAEPEMEAMLEEALERLDAQSAEVELAFKYFIDKYAPVSGRRSILDLDCRFKGTKRRGEAMVFELGVDVPFTSLCPCSKEISAYGAHNQRSVCRVEVRFQPGEECIFIEDLAKLVEAQGSSPIYPLLKREDEKYVTEAAYENPKFVEDILRDTVLALRKLPGIAWFSLACENYESIHNHNAFAAHEEYVARP

SEQ ID NO: 10988 - protein, 194 aa, Mitsuokella sp.
  misc_feature (1)..(194): tr|U2TD49|U2TD49_9FIRM GTP cyclohydrolase 1 OS=Mitsuoke lla sp. oral taxon 131 str. W9106 OX=1321781 GN=folE PE =3 SV=1
MDKKRSAREQKAARAAQDFLTALGVDTAVRGMEATPMRVAKLYATLFDGLGTDPNTLWGEVFETCARGLVAVRHIPFCSMCEHHLVPFFGAVSIAYLPGRGRVAGFSKFAEVVTCLSHRPQLQERLTAEIAEAVHTGLGAHGVLVVCEAEQLCMMLRSTHARGTRTVTSEMRGDEPLDSFAAQAWQMLGGAKKA

SEQ ID NO: 10989 - protein, 221 aa, Mixta gaviniae
  misc_feature (1)..(221): tr|A0A1X1DK12|A0A1X1DK12_9GAMM GTP cyclohydrolase 1 OS= Mixta gaviniae OX=665914 GN=folE PE=3 SV=1
MATLSHEAALVHDALVARGLETPLRAPVREMDDETRKRLIAGHMTEIMQLLNLDLEDDSLMETPHRIAKMYVNEIFSGLDYANFPKITLIDNKMKVDEMVTVRDITLTSTCEHHFVIIDGKATVAYIPKDKVIGLSKINRIVQFFAQRPQVQERLTQQVLIALQTLLGTNNVAVSIDAVHYCVKARGIRDANSATTTTSLGGLFKSSQNTRQEFLRAVRHN

SEQ ID NO: 10990 - protein, 221 aa, Mixta sp.
  misc_feature (1)..(221): tr|A0A506VAB1|A0A506VAB1_9GAMM GTP cyclohydrolase 1 OS= Mixta sp. BIT-26 OX=2562439 GN=folE PE=3 SV=1
MVTLSHEAALVHEALLARGLETPLRAPARKMDDETRKRLIAGHMTEIMQLLNLDLDDDSLMETPHRIAKMYVDEIFSGLDYANFPKITLIDNKMKVDEMVTVRDITLTSTCEHHFVIIDGKATVAYIPKDKVIGLSKINRIVQFFAQRPQVQERLTQQVLIALQTLLGTNNVAVSIDAVHYCVKARGIRDANSATTTTSLGGLFKSSQNTRQEFLRAVRHN

SEQ ID NO: 10991 - protein, 221 aa, Mixta theicola
  misc_feature (1)..(221): tr|A0A2K1QAL2|A0A2K1QAL2_9GAMM GTP cyclohydrolase 1 OS= Mixta theicola OX=1458355 GN=folE PE=3 SV=1
MSTLSHEAALVHEALVARGLETPLRAPVREMDDETRKRLIAGHMTEIMQLLNLDLEDDSLMETPHRIAKMYVNEIFSGLDYANFPKITLIENKMKVDEMVTVRDITLTSTCEHHFVIIDGQATVAYIPKDKVIGLSKINRIVQFFAQRPQVQERLTQQILIALQTLLGTNNVAVSIDAVHYCVKARGIRDANSATTTTSLGGLFKSSQNTRQEFLRAVRHN

SEQ ID NO: 10992 - protein, 329 aa, Mizugakiibacter sediminis
  misc_feature (1)..(329): tr|A0A0K8QMB6|A0A0K8QMB6_9GAMM GTP cyclohydrolase FolE2 OS=Mizugakiibacter sediminis OX=1475481 GN=folE2 PE=3 SV=1
MRETTMSTDLNTQRAMPDVAVEARPGVAGRLEWVGMDEVQMPVRLATADGGVVQSAARVAAYVNLARPEARGIHMSRLYLHLDRTLDAEPLTPALLRRMLRGFLDSHADLSDRAMVRIAFEHLVRRPALVSDHRGWKAYPVTITATLQRGRFEVELATAVLYSSTCPASAALARQLIQDGFAQAFPAAQALDREAVLAWLGSEHGIRATPHSQRSAAEVRVRLNPGFDFPLIDLIDRIEDALQTPVQAAVKRVDEQRFALLNGGNLMFCEDAARRLQQALDADERIADFWVRASHYESLHPHDAVAIATKGVEGGYGPADHALAPLGAR

SEQ ID NO: 10993 - protein, 201 aa, Mizugakiibacter sediminis
  misc_feature (1)..(201): tr|A0A0K8QS29|A0A0K8QS29_9GAMM GTP cyclohydrolase 1 OS= Mizugakiibacter sediminis OX=1475481 GN=folE PE=3 SV=1
MAKNKKVAPAAVTREAAEEAVRTLLRWAGEDPAREGLLDTPGRVVDAYRDWFSGYAIDPAEYLGRTFEEVAGYDEMIVLRDIHFESFCEHHMAPIIGRAHVGYLPTDKVVGISKLARVVDAYARRFQVQEKLTAQIAHCIDKVLQPRGVAVVIDAQHQCMTTRGVHKRGVSMITSQMLGAFRDDARTRAEFLRFIDIDNHA

SEQ ID NO: 10994 - protein, 194 aa, Mobilicoccus pelagius
  misc_feature (1)..(194): tr|H5US78|H5US78_9MICO GTP cyclohydrolase 1 OS=Mobilico ccus pelagius NBRC 104925 OX=1089455 GN=folE PE=3 SV=1
MPVQPPVDLERVERAVREILLAVGEDPDREGLRETPARVARSYVELFAGLRADPADILGTTFDIEHEEMVLVRDIELYSTCEHHLVPFHGVAHVGYIPGRNGQVTGLSKIARLVDVYARRPQVQERLTTQIADALVEHLEPRGVIVVLDCEHLCMSMRGVRKPGARTTTSAVRGQLRAPATRAEAMSLILGGGR

SEQ ID NO: 10995 - protein, 184 aa, Mobilisporobacter senegalensis
  misc_feature (1)..(184): tr|A0A3N1XN93|A0A3N1XN93_9FIRM GTP cyclohydrolase 1 OS= Mobilisporobacter senegalensis OX=1329262 GN=folE PE=3 SV=1
MIDEKKIEQAVRLFLEGIGEDADREGLAETPRRISTMCSELFAGLGQDAGEHLARTFQADNNEMVLERDITFYSVCEHHFLPFYGKAHIAYIPDGKVVGISKLARTVEVYARRPQIQEQMTAQIADDIMKNLKPKGVMVMIEAEHMCMTMRGVKKPGTTTVTHVCRGEFENNESLKNTFFHFIR

SEQ ID NO: 10996 - protein, 191 aa, Mobiluncus curtisii
  misc_feature (1)..(191): tr|D6ZIY7|D6ZIY7_MOBCV GTP cyclohydrolase 1 OS=Mobilunc us curtisii (strain ATCC 43063 / DSM 2711 / V125) OX=54 8479 GN=folE PE=3 SV=1
MNASYNPDGVTQAVRDLLVAVGEDPDREGLRDTPERMARSFAEMLQGYREDPKKHLERMFPVEHNDLVLVKDIPFNSMCEHHLLPFVGLAHVGYIPQGKRVTGLSKLARLVDGYAHRLQVQERLTQQIADALWDVLQPQGVIVVLQAEHMCMTIRGVKKPGARTTTSAVRGVMEQSSTTRAEAMSLILSAD

SEQ ID NO: 10997 - protein, 191 aa, Mobiluncus curtisii
  misc_feature (1)..(191): tr|E6M0W0|E6M0W0_9ACTO GTP cyclohydrolase 1 OS=Mobilunc us curtisii ATCC 51333 OX=887326 GN=folE PE=3 SV=1
MNASYNPDGVTQAVRDLLVAVGEDPDREGLRDTPERMARSFAEMLQGYQEDPKKHLERMFPVEHNDLVLVKDIPFNSMCEHHLLPFVGRAHVGYIPQGKRVTGLSKLARLVDGYAHRLQVQERLTQQIADALWDVLQPQGVIVVLQAEHMCMAIRGVKKPGARTTTSAVRGVMEQSSTTRAEAMSLILSAD

SEQ ID NO: 10998 - protein, 191 aa, Mobiluncus holmesii; identical to SEQ ID NO: 10996
  misc_feature (1)..(191): tr|E6M1N2|E6M1N2_9ACTO GTP cyclohydrolase 1 OS=Mobilunc us holmesii ATCC 35242 OX=887899 GN=folE PE=3 SV=1

SEQ ID NO: 10999 - protein, 192 aa, Mobiluncus mulieris
  misc_feature (1)..(192): tr|E1MF84|E1MF84_9ACTO GTP cyclohydrolase 1 OS=Mobilunc us mulieris FB024-16 OX=866770 GN=folE PE=3 SV=1
MTVRKYDAAKVEQAVRDLLAAVGEDPQREGLIETPARLGRSFAELLEGYREDPKEHLRRLFPVDHNDLILVKDIPFNSTCEHHLLPFFGHAHVGYIPKGKRVTGLSKLARLVDGYAHRLQVQERLTEQISQALWEVLDPLGVIVVLQAEHMCMTVRGVKKPGARTTTSAVRGVMQSSQVTRSEAMSLILSRD

SEQ ID NO: 11000 - protein, 192 aa, Mobiluncus mulieris; identical to SEQ ID NO: 10999
  misc_feature (1)..(192): tr|A0A2J9KP38|A0A2J9KP38_9ACTO GTP cyclohydrolase 1 OS= Mobiluncus mulieris OX=2052 GN=folE PE=3 SV=1

SEQ ID NO: 11001 - protein, 195 aa, Modestobacter caceresii
  misc_feature (1)..(195): tr|A0A098YAC8|A0A098YAC8_9ACTN GTP cyclohydrolase 1 OS= Modestobacter caceresii OX=1522368 GN=folE PE=3 SV=1
MADLAEGRVDAARIETAVREILLAIGEDPDRPGLVDTPARVARAYGETFAGLSQDPYDVLATTFDEDHDELVLVKDIPMYSTCEHHLVPFHGRAHVGYIPGADGRVTGLSKLARLVEVYARRPQVQERMTRQVADSLFEVLKPQGVIVVVEAEHLCMAMRGVRKPGATTITSAVRGIFRESPATRSEAMSLILGR

SEQ ID NO: 11002 - protein, 223 aa, Modestobacter marinus
  misc_feature (1)..(223): tr|I4ES17|I4ES17_9ACTN GTP cyclohydrolase 1 OS=Modestob acter marinus OX=477641 GN=folE PE=3 SV=1
MSAAPGGARESAAGQVDGAGLDPRTGDPVADLPEGRFDAGRIEAAVREILAAIGEDPDRPGLQDTPARVARAYAESFAGLAQDPADALATTFDEGHEELVLVKDIAMYSTCEHHLVPFHGVAHVGYIPGYDGRVTGLSKLARLVEVYARRPQVQERMTRQIADSLYDVLKPRGVIVVIEAEHLCMAMRGVRKPGTRTMTSAVRGIFRENAATRSEAMSLILGR

SEQ ID NO: 11003 - protein, 199 aa, Modestobacter multiseptatus
  misc_feature (1)..(199): tr|A0A543C7E5|A0A543C7E5_9ACTN GTP cyclohydrolase 1 OS= Modestobacter multiseptatus OX=88139 GN=folE PE=3 SV=1
MTRADSGKPTGVDQARAAAAVRELLLAVGEDPDRPGLQDTPDRVARAYAETFAGLAMDPAEVLSVTFEEDHDELVLVKDIPMYSTCEHHLVPFHGMAHVGYIPGADGRVTGLSKLARLVDVFARRPQVQERMTRQIADSLYEGLKPQGVIVVVEAEHLCMAMRGVRKPGAITMTSAVRGIFRDNPATRAEAMSLALGRS

SEQ ID NO: 11004 - protein, 219 aa, Modestobacter roseus
  misc_feature (1)..(219): tr|A0A562IYD6|A0A562IYD6_9ACTN GTP cyclohydrolase 1 OS= Modestobacter roseus OX=1181884 GN=folE PE=3 SV=1
MSGRVTGGGHEVDGVGQDQVTGDVVGDLRPGRIDSARAEAAVRELLLAIGEDPDRPGLVDTPARVARAYAEVFAGLDQDPYDVLATTFDEDHDELVLVKDIPMYSTCEHHLVPFHGVAHVGYIPGPDGRVTGLSKLARLVDVYARRPQVQERMTRQVADALFDVLKPQGVIVVVQAEHLCMSMRGIRKPGSSTTTSAVRGVFRDSAATRSEAMSLILQR

SEQ ID NO: 11005 - protein, 199 aa, Modestobacter sp.
  misc_feature (1)..(199): tr|A0A1H3DWH3|A0A1H3DWH3_9ACTN GTP cyclohydrolase 1 OS= Modestobacter sp. DSM 44400 OX=1550230 GN=folE PE=3 SV= 1
MTAGTSGGRFEVDQARAEAAVRELLLAVGEDPDRPGLQDTPARVARAYAETFAGLGQDADEILSTTFDEDHDELVLVKDIPMYSTCEHHLVPFHGMAHVGYIPGADGRVTGLSKLARLVDVYARRPQVQERMTRQIADSLFEGLKPRGVIVVIEAEHLCMAMRGIRKPGSRTMTSAVRGMFRDNPATRAEAMSLILGRS

SEQ ID NO: 11006 - protein, 192 aa, Modestobacter sp.
  misc_feature (1)..(192): tr|A0A1S8C6G6|A0A1S8C6G6_9ACTN GTP cyclohydrolase 1 OS= Modestobacter sp. VKM Ac-2676 OX=1678130 GN=folE PE=3 S V=1
MRPGRIDSARAEAAVRELLLAIGEDPDRPGLVDTPARVARAYAEVFAGLDQDPQEVLATTFDEDHDELVLVKDIPMYSTCEHHLVPFHGVAHVGYIPGADGRVTGLSKLARLVDVYARRPQVQERLTRQVADALYDALKPQGVIVVVQAEHLCMSMRGIRKPGSSTTTSAVRGVFRDSAATRSEAMSLILQR

SEQ ID NO: 11007 - protein, 195 aa, Modestobacter versicolor
  misc_feature (1)..(195): tr|A0A323V6U7|A0A323V6U7_9ACTN GTP cyclohydrolase 1 OS= Modestobacter versicolor OX=429133 GN=folE PE=3 SV=1
MADLPEGRVDTGRIEAAVRELLAAIGEDPDRPGLTDTPARVGRAYAEMFAGLAQDPYEVLATTFDEDHDELVLVKDIPMYSTCEHHLVPFHGVAHVGYIPGTDGRVTGLSKLARLVEVYARRPQVQERLTRQVADALYEVLKPQGVIVVVQAEHLCMAMRGIRKPGATTVTSAVRGIFRDSAATRSEAMSLILGR

SEQ ID NO: 11008 - protein, 219 aa, Moellerella wisconsensis
  misc_feature (1)..(219): tr|A0A0N0I9I2|A0A0N0I9I2_9GAMM GTP cyclohydrolase 1 OS= Moellerella wisconsensis ATCC 35017 OX=1354267 GN=folE PE=3 SV=1
MSSLSKEAELVHAALEARGLETPLRIQSIPREERKSLIEGHMTEIMQLLNLDLTDDSLADTPRRIAKMYVDEIFSGLDYANFPKITLIENKMKVDEMVTVRDITMTSTCEHHFVTIDGKATVAYIPKDKVIGLSKINRIVQFFAQRPQVQERLTQQILTALQTLLGTNNVAVSIDAVHYCVKARGIRDATSSTTTTSLGGLFKSSQNTRQEFLRAVRHL

SEQ ID NO: 11009 - protein, 219 aa, Moellerella wisconsensis; identical to SEQ ID NO: 11008
  misc_feature (1)..(219): tr|A0A485A209|A0A485A209_9GAMM GTP cyclohydrolase 1 OS= Moellerella wisconsensis OX=158849 GN=folE PE=3 SV=1

SEQ ID NO: 11010 - protein, 185 aa, Mogibacterium diversum
  misc_feature (1)..(185): tr|A0A2S0L3A5|A0A2S0L3A5_9FIRM GTP cyclohydrolase 1 OS= Mogibacterium diversum OX=114527 GN=folE PE=3 SV=1
MDREKIMEGVKLILDGIGEDVTREGLLETPERVAKMYEELAGGYTDSASTHLAKRFDVENNDIVLEKDIEFYSLCEHHMLPFYGRVAIAYIPNGEVIGLSKMARTVEVFAKRLQLQERMTAQIADAFMEELNPKGVMVMIEAEHMCMTMRGIKKPGTKTVTVMARGSFENDECLQNTFFRMLEHR

SEQ ID NO: 11011 - protein, 186 aa, Mogibacterium pumilum
  misc_feature (1)..(186): tr|A0A223AU92|A0A223AU92_9FIRM GTP cyclohydrolase 1 OS= Mogibacterium pumilum OX=86332 GN=folE PE=3 SV=1
MMDREKIMEGVKLILEGIGEDVEREGLLETPERVAKMYEELAGGYTDSASTHLAKRFDVENNDIVLEKDIEFYSLCEHHMLPFYGRVAIAYIPDDEVIGLSKMARTVEVFAKRLQLQERMTVQIADAFMEELSPKGVMVLIEAEHMCMTMRGIKKPGTKTVTVMARGSFENDECLQNTFFRMLEHR

SEQ ID NO: 11012 - protein, 185 aa, Mogibacterium sp.
  misc_feature (1)..(185): tr|J4VXZ8|J4VXZ8_9FIRM GTP cyclohydrolase 1 OS=Mogibact erium sp. CM50 OX=936375 GN=folE PE=3 SV=1
MDKDKIIEGVKLILEGIGEDPVREGLIETPERVAKMYEELVCGYNDSAGTHLEKRFAVENNDIVMEKDIEFYSLCEHHILPFYGRAAIAYIPNGEVIGLSKMARTVEVFAKRLQLQERLTAQIADAFMNELKPKGVMVLIEAEHMCMTMRGIKKPGTKTVTSIARGAFDGNEQLQNKFFRMLERR

SEQ ID NO: 11013 - protein, 185 aa, Mogibacterium timidum; identical to SEQ ID NO: 11012
  misc_feature (1)..(185): tr|X8ISX2|X8ISX2_9FIRM GTP cyclohydrolase 1 OS=Mogibact erium timidum ATCC 33093 OX=1401079 GN=folE PE=3 SV=1

SEQ ID NO: 11014 - protein, 225 aa, Moheibacter sediminis
  misc_feature (1)..(225): tr|A0A1W2C9I0|A0A1W2C9I0_9FLAO GTP cyclohydrolase 1 OS= Moheibacter sediminis OX=1434700 GN=folE PE=3 SV=1
MSDNNIHDEIGDEHFSSHHDTPMRSDAFELSPEEKIAKIEEHFTTIMHTLGLDLTDDSLKGTPKRVAKMFVNETFGGLHPDRKPKMSTFENKYKYNQMLVEKDITVYSTCEHHFLPIVGKAHVGYISNGKVIGLSKMNRIVDYFAKRPQVQERLTMQIVKAMQDALGTEDVACVIDAKHLCVNSRGIRDIDSSTVTAELGGIFKTDPTTRREFLHYIGVHTKFNV

SEQ ID NO: 11015 - protein, 207 aa, Monaibacterium marinum
  misc_feature (1)..(207): tr|A0A2C9CVQ7|A0A2C9CVQ7_9RHOB GTP cyclohydrolase 1 OS= Monaibacterium marinum OX=1690039 GN=folE PE=3 SV=1
MNAHDSKIENASPQRPTREEAEEAVRTLLRWAGDDPAREGLLETPKRVTKAYGDWFRGYSEDPTEMLQRTFEEVEGYDEMVVLRDIRFESYCEHHMAPIIGKAHVGYIPNGRVVGISKLARVVDAFAKRLQVQEKMNAQIAQALMTTLEPQGVAVVLEGEHHCMSTRGVHKPGVSMVTSTMFGVFRDDPATRKEFLSVIGNPTNRMG

SEQ ID NO: 11016 - protein, 231 aa, Mongoliibacter ruber
  misc_feature (1)..(231): tr|A0A2T0WEC2|A0A2T0WEC2_9BACT GTP cyclohydrolase 1 OS= Mongoliibacter ruber OX=1750599 GN=folE PE=3 SV=1
MKQKETLLNTMGINYSHDIDEIGDEHIGTSHDTPLREDAFEMDDELKMELIEKHFKEIMHVLGLDLTDDSLKGTPKRVAKMYIKEVFSGLNPKNKPDVKLFENKYKYKEMLVEKDITFFSNCEHHFVPIYGKAHVAYISNGNVIGLSKINRIVQYFAKRPQVQERLTMQIGNELKEILGTDDIAVVIDAHHMCVSSRGIQDVSSSTVTSYYGGKFETDENTRAEFMKYISL

SEQ ID NO: 11017 - protein, 197 aa, Monoglobus pectinilyticus
  misc_feature (1)..(197): tr|A0A2K9P5G2|A0A2K9P5G2_9FIRM GTP cyclohydrolase 1 OS= Monoglobus pectinilyticus OX=1981510 GN=folE PE=3 SV=1
MAENKKIDTKAIEEHIRGILTALGDDPNREGLADTPKRVAKMYAEVFDGMNYTNHEIAQMFNKTFEDDPDSYHNSNDIVVVKNIEVFSFCEHHMALMYDMNVSVAYIPNGRVIGLSKIARIADMVAKRLQLQERIGSDIAEIMQEITGSDDVAVIIEASHSCMTARGIQKPSAKTRTRTMRGKFESDTSLVTQLMGE

SEQ ID NO: 11018 - protein, 240 aa, Moorea bouillonii
  misc_feature (1)..(240): tr|A0A1U7NBM6|A0A1U7NBM6_9CYAN GTP cyclohydrolase 1 OS= Moorea bouillonii PNG OX=568701 GN=folE PE=3 SV=1
MTIASSNGFNRVESVSTAKSINGNEKHQLETRPERNTQNGHQPNLQAPLEELNQEMINAVTTILLGVGEDPQREGLLKTPKRVAEAMRFLTSGYNQSLEAIVNGAIFDEGHNEMVLVRDINFFSLCEHHMLPFMGKAHVAYIPNQKVVGLSKIARVVEMYARRLQVQERLTRQIAEAIQAVLDPKGVAVVMEATHMCMVMRGVQKPGSWTATSAMVGIFQEDQKTREEFLNLIRHQPNFF

SEQ ID NO: 11019 - protein, 218 aa, Moorea bouillonii
  misc_feature (1)..(218): tr|A0A1U7N214|A0A1U7N214_9CYAN GTP cyclohydrolase 1 OS= Moorea bouillonii PNG OX=568701 GN=folE PE=3 SV=1
MTLGKFEPNQIEKINRKLPKLNTTQQPLVSEEEMRQAVRTLLLGLGEDPDREGLKDTPKRVVKALKFLTSGYNQSLDELLNGAVFHENTNEMVLVRDIDLFSSCEHHILPILGHAHVAYIPDGKVIGLSKIARICEMYGRRLQVQERLTAQIADALQGLLKPKGVAVVVEASHMCMVMRGVQKPGSWTATSAVRGVFANDPKTRQEFMSLIHHNPSMH

SEQ ID NO: 11020 - protein, 240 aa, Moorea producens
  misc_feature (1)..(240): tr|A0A1D8TP28|A0A1D8TP28_9CYAN GTP cyclohydrolase 1 OS= Moorea producens PAL-8-15-08-1 OX=1458985 GN=folE PE=3 SV=1
MTIASSNGFNRVESVSTAKSINGNEKHQLETRPERNTQNGHQPNLQPPLEELNQEMINAVTTILLDVGEDPQREGLLKTPKRVAEAMRFLTSGYNQSLEAIVNGAIFDEGHNEMVLVRDINFFSLCEHHMLPFMGKAHVAYIPNQKVVGLSKIARVVEMYARRLQVQERLTRQIAEAIQAVLDPKGVAVVMEATHMCMVMRGVQKPGSWTATSAMVGIFQEDQKTREEFLNLIRHQPNFF

SEQ ID NO: 11021 - protein, 218 aa, Moorea producens
  misc_feature (1)..(218): tr|A0A1D9G0R7|A0A1D9G0R7_9CYAN GTP cyclohydrolase 1 OS= Moorea producens JHB OX=1454205 GN=folE PE=3 SV=1
MTLGKSEPNQIDKINRKLPKLNTTHQPLVSEEEMRQAVRTLLLGLGEDPDREGLKDTPKRVVKALKFLTSGYHQSLDELLNGAVFHENTNEMVLVRDIDLFSSCEHHILPILGHAHVAYIPDGKVIGLSKIARICEMYGRRLQVQERLTAQIADALQGLLKPKGVAVVVEASHMCMVMRGVQKPGSWTATSAVRGVFADDPKTRQEFMSLIHYNRSMH

SEQ ID NO: 11022 - protein, 185 aa, Moorella glycerini
  misc_feature (1)..(185): tr|A0A0C7N4N3|A0A0C7N4N3_9THEO GTP cyclohydrolase 1 OS= Moorella glycerini OX=55779 GN=folE PE=3 SV=1
MDKEKIRQAVRMLIEAVGEDPEREGLRETPRRIADMYAEIFAGIDRDPGEELTVVFDEHHEEMVLVKDIPLYSVCEHHFLPFLGKAHVAYIPRGKITGLSKLARVVDIAARRPQVQERLTSQIADIIMEKLDPYGVVVVIEAEHLCMSMRGVKKPGHLTITSAVRGLFRRDQAARAEAMALIRGK

SEQ ID NO: 11023 - protein, 185 aa, Moorella humiferrea
  misc_feature (1)..(185): tr|A0A2T0AWI6|A0A2T0AWI6_9THEO GTP cyclohydrolase 1 OS= Moorella humiferrea OX=676965 GN=folE PE=3 SV=1
MDKEKIRQAVRMIIEAVGEDPEREGLRETPRRIADMYAEIFAGINRDPGEELTVVFDEHHEEMVLVKDIPLYSVCEHHFLPFVGKAHVAYIPRGKITGLSKLARVVDIASRRPQVQERLTSQIADIIMEKLDPYGVVVVIEAEHLCMSMRGIKKPGHITITSAVRGLFRRDQAARAEAMSLIRGK

SEQ ID NO: 11024 - protein, 185 aa, Moorella mulderi; identical to SEQ ID NO: 11022
  misc_feature (1)..(185): tr|A0A151ATZ2|A0A151ATZ2_9THEO GTP cyclohydrolase 1 OS= Moorella mulderi DSM 14980 OX=1122241 GN=folE PE=3 SV=1

SEQ ID NO: 11025 - protein, 186 aa, Moorella sp.
  misc_feature (1)..(186): tr|A0A101EBX9|A0A101EBX9_9THEO GTP cyclohydrolase 1 OS= Moorella sp. 60_41 OX=1635264 GN=folE PE=3 SV=1
MFDTAKIERAVRMLLEAIGEDPEREGLKDTPRRVARMYQEIFAGLEQDPADAFSVLYTEKHEELVLVKDIPFYSMCEHHLLPFFGKVHLGYIPRRGRVVGLSKLVRGIETFAKRPQLQERMTKQIADAIMEHVGALGVIVVIEAEHMCMTMRGVKKPGSLTITSAVRGVLHDDEALRSEALSLLRG

SEQ ID NO: 11026 - protein, 185 aa, Moorella sp.
  misc_feature (1)..(185): tr|A0A4P6B5C6|A0A4P6B5C6_9THEO GTP cyclohydrolase 1 OS= Moorella sp. E306M OX=2572683 GN=folE PE=3 SV=1
MDKEKIRQAVRMLIEAVGEDPEREGLRETPRRIADMYAEIFAGINRDPGEELTVVFDEHHEEMVLVKDIPLYSICEHHFLPFLGKAHVAYIPRGKITGLSKLARVVDIAARRPQVQERLTSQIADIIMEKLDPYGVVVVIEAEHLCMSMRGVKKPGHLTITSAVRGLFRRDQAARAEAMALIRGK

SEQ ID NO: 11027 - protein, 185 aa, Moorella thermoacetica
  misc_feature (1)..(185): tr|Q2RLE7|Q2RLE7_MOOTA GTP cyclohydrolase 1 OS=Moorella thermoacetica (strain ATCC 39073 / JCM 9320) OX=264732 GN=folE PE=3 SV=1
MDKEKIRQAVRMIIEAVGEDPDREGLRETPRRIADMYEEIFAGINRDPGEELTVVFDEHHEEMVLVKDIPLYSICEHHFLPFLGRAHVAYIPRGKITGLSKLARVVDIAARRPQVQERLTSQIADIIMEKLNPYGVVVVIEAEHLCMSMRGIKKPGSLTITSAVRGLFRRDQAARAEAMSLIQGR

SEQ ID NO: 11028 - protein, 185 aa, Moorella thermoacetica
  misc_feature (1)..(185): tr|A0A1J5NUD7|A0A1J5NUD7_MOOTH GTP cyclohydrolase 1 OS= Moorella thermoacetica OX=1525 GN=folE PE=3 SV=1
MDKEKIRQAVRMIIEAVGEDPDREGLRETPRRIADMYEEIFAGIDRDPGNELTVVFDENHEEIVLVKNIPLYSICEHHFLPFLGRAHVAYIPRGKITGLSKLARVVDTAARRPQVQERLTTQIADIIMEKLNPYGVVVIIEAEHLCMSMRGIKKPGSLTITSAVRGVFRRDQAARSEAMSLIRGR

SEQ ID NO: 11029 - protein, 184 aa, Moraxella atlantae
  misc_feature (1)..(184): tr|A0A1B8QL76|A0A1B8QL76_9GAMM GTP cyclohydrolase 1 OS= Moraxella atlantae OX=34059 GN=folE PE=3 SV=1
MIDPTIYSQLLTAMGEDIQRAGLIDTPTRAAKAMEFLTQGYTQTLDEVTNQALFPTDNNALILVKNIEFYSMCEHHLLPFYGVAHVGYVPNGRVLGLSKMARIVDMFARRLQIQENLTQQIAQAVMDVTGAQGAAVVMDAAHMCMMMRGVMRQQARTRSVALLGTIKTDPQARQEFLAALPSVD

SEQ ID NO: 11030 - protein, 184 aa, Moraxella atlantae
  misc_feature (1)..(184): tr|A0A1B8QCC7|A0A1B8QCC7_9GAMM GTP cyclohydrolase 1 OS= Moraxella atlantae OX=34059 GN=folE PE=3 SV=1
MIDPTIYSQLLTAMGEDIQRAGLIDTPTRAAKAMEFLTQGYTQTLDEVTNQALFPTDNNELILVKNIEFYSMCEHHLLPFYGVAHVGYVPNGRVLGLSKMARIVDMFARRLQIQENLTQQIAQAVMDVTGAQGAAVVMDAAHMCMMMRGVMRQQARTRSVALLGTIKTDPQARQEFLAALPSVD

SEQ ID NO: 11031 - protein, 205 aa, Moraxella bovis
  misc_feature (1)..(205): tr|A0A1T0A6E9|A0A1T0A6E9_MORBO GTP cyclohydrolase 1 OS= Moraxella bovis OX=476 GN=folE PE=3 SV=1
MCQHCNSHATSAFSFDVEATAQNYANIISASGENLSREGLLDTPMRAAKAFRDLTAGYHQDLHTVANDAIFASDNADLVLVQNIEFYSLCEHHILPFFGVAHIGYLPNGKVLGLSKLARIVDMYAKRLQIQENLTKQVAQAIHELTDCRGVAVVMDASHMCMMMRGVGKQQSTTRTTCMLGVYETDNQARNEFLSAIPKRVPAFG

SEQ ID NO: 11032 - protein, 205 aa, Moraxella bovis
  misc_feature (1)..(205): tr|A0A378PSN5|A0A378PSN5_MORBO GTP cyclohydrolase 1 OS= Moraxella bovis OX=476 GN=folE PE=3 SV=1
MCQHCNSHATSAFSFDVEATAQNYANIISASGENLSREGLLDTPMRAAKAFRDLTAGYHQDLHTVANDAIFASDNADLVLVQNIEFYSLCEHHILPFFGVAHIGYLPNGKVLGLSKLARIVDMYAKRLQIQENLTKQVAQAIHELTDCRGVAVVMDASHMCMMMRGVGKQQSTTRTTCMLGVYETDNQVRNEFLSAIPKRVPAFG

SEQ ID NO: 11033 - protein, 201 aa, Moraxella bovoculi
  misc_feature (1)..(201): tr|A0A0U2B9E4|A0A0U2B9E4_9GAMM GTP cyclohydrolase 1 OS= Moraxella bovoculi OX=386891 GN=folE PE=3 SV=1
MSNSDNSNFTPDYDKIASHYASIIEGCGEDLSREGLLDTPMRAAKAFGYLTRGYHQSLEVVANDAIFPSDNPELVLVQNIEFYSLCEHHLLPFYGVAHVGYLPEGKVLGLSKVARIVDMYARRLQIQENLTKQIATAIEELTGCRGVAVVMDASHMCMMMRGVGKQQSTTRTMSMLGEFTTNNTARAEFLDAIPRRTPAFG

SEQ ID NO: 11034 - protein, 201 aa, Moraxella bovoculi
  misc_feature (1)..(201): tr|A0A3F3AKQ3|A0A3F3AKQ3_9GAMM GTP cyclohydrolase 1 OS= Moraxella bovoculi OX=386891 GN=folE PE=3 SV=1
MSNSDNSNFTPDYDKIASHYASIIEGCGEDLSREGLLDTPMRAAKAFGYLTRGYHQSLEVVANDAIFPSDNPELVLVQNIEFYSLCEHHLLPFYGVAHVGYLPEGKVLGLSKVARIVDMYARRLQIQENLTKQIATAIEELTGCRGVAVVMDASHMCMMMRGVGKQQSTTRTMSMLGELTTNNTARAEFLDAIPRRTPAFG

SEQ ID NO: 11035 - protein, 201 aa, Moraxella canis
  misc_feature (1)..(201): tr|A0A1S9ZJ08|A0A1S9ZJ08_9GAMM GTP cyclohydrolase 1 OS= Moraxella canis OX=90239 GN=folE PE=3 SV=1
MSNSDTVNFIHDYETLSKHYAQIISSAGEDLTRDGLIDTPMRAAKAFGYLTRGYHQDLATVANNAVFDSDNPELVLVQNIEFYSLCEHHLLPFYGVAHVGYLPDGKVLGLSKVARIVDMYARRLQIQENLTKQVASAIEELTGCRGVAVIMDASHMCMMMRGVGKQQSTTRTTSMLGEFTSNHDARREFLDAIPRRAPAFG

SEQ ID NO: 11036 - protein, 205 aa, Moraxella caprae; identical to SEQ ID NO: 11031
  misc_feature (1)..(205): tr|A0A378R018|A0A378R018_9GAMM GTP cyclohydrolase 1 OS= Moraxella caprae OX=90240 GN=folE PE=3 SV=1

SEQ ID NO: 11037 - protein, 201 aa, Moraxella catarrhalis
  misc_feature (1)..(201): tr|A0A3A9MR60|A0A3A9MR60_MORCA GTP cyclohydrolase 1 OS= Moraxella catarrhalis OX=480 GN=folE PE=3 SV=1
MSNSDTVNFIHDYEILSKHYAQIISSAGEDLTRDGLIDTPMRAAKAFGYLTRGYHQDLATVANNAVFDSDNPELVLVQNIEFYSLCEHHLLPFYGVAHVGYLPDGKVLGLSKVARIIDMYARRLQIQENLTKQVASAIEELTGCRGVAVIMDACHMCMMMRGVGKQQSTTRTTSMLGEFTTNHDARREFLDAVPRRMPAFG

SEQ ID NO: 11038 - protein, 171 aa, Moraxella catarrhalis
  misc_feature (1)..(171): tr|A0A198UDM5|A0A198UDM5_MORCA GTP cyclohydrolase 1 OS= Moraxella catarrhalis OX=480 GN=folE PE=3 SV=1
MTRDGLIDTPMRAAKAFGYLTRGYHQDLATVANNAVFDSDNPELVLVQNIEFYSLCEHHLLPFYGVAHVGYLPDGKVLGLSKVARIIDMYARRLQIQENLTKQVASAIEELTGCRGVAVIMDACHMCMMMRGVGKQQSTTRTTSMLGEFTTNHDARREFLDAVPRRMPAFG

SEQ ID NO: 11039 - protein, 201 aa, Moraxella caviae
  misc_feature (1)..(201): tr|A0A1S9ZY04|A0A1S9ZY04_9GAMM GTP cyclohydrolase 1 OS= Moraxella caviae OX=34060 GN=folE PE=3 SV=1
MSNSDHTTFTPDYPAIAQHYADIIAGAGEDLSREGLLDTPMRAAKAFGYLTRGYHQQLDVVANDAIFPSDNGELVLVQNIEFYSLCEHHLLPFFGVAHVGYLPEGKVLGLSKVARIVDMYARRLQIQENLTKQVAEAISELTGCRGVAVVMDASHMCMMMRGVGKQQSTTRTMSMLGEFSSNAAVRSEFLSAVPRRTPAFG

SEQ ID NO: 11040 - protein, 217 aa, Moraxella cuniculi
  misc_feature (1)..(217): tr|A0A3S4UKZ3|A0A3S4UKZ3_9GAMM GTP cyclohydrolase 1 OS= Moraxella cuniculi OX=34061 GN=folE PE=3 SV=1
MLSYSFFVILFYFVKAMSNSDTANFIPDYNAVAEHYAQIIAKAGEDLTRDGLLDTPMRAAKAFGYLTRGYHQDLATVANDAIFDSDNPELVLVQNIEFYSLCEHHLLPFYGVAHVGYLPNGKVLGLSKVARIVDMYARRLQIQENLTKQIATAIESLTGCRGVAVVMDASHMCMMMRGVGKQQSTTRTTSMLGEFAQNTQARQEFLEALPRRKPAFG

SEQ ID NO: 11041 - protein, 217 aa, Moraxella cuniculi
  misc_feature (1)..(217): tr|A0A1N7FM19|A0A1N7FM19_9GAMM GTP cyclohydrolase 1 OS= Moraxella cuniculi DSM 21768 OX=1122245 GN=folE PE=3 SV =1
MLSYSFFVILFYFVKAMSNSDTANFIPDYNAVAEHYAQIIAKAGEDLTRDGLLDTPMRAAKAFGYLTRGYHQDLATVANDAIFDSDNPELVLVQNIEFYSLCEHHLLPFYGVAHVGYLPNGKVLGLSKVARIVDMYARRLQIQENLTKQIATAIESLTGCRGVAVIMDASHMCMMMRGVGKQQSTTRTTSMLGEFAQNTQARQEFLEALPRRKPAFG

SEQ ID NO: 11042 - protein, 205 aa, Moraxella equi
  misc_feature (1)..(205): tr|A0A378QR49|A0A378QR49_9GAMM GTP cyclohydrolase 1 OS= Moraxella equi OX=60442 GN=folE PE=3 SV=1
MCQHCNSHATSAFSFDVEATAQNYANIISASGENLSREGLLDTPMRAAKAFKDLTAGYHQDLHTVANDAIFASDNADLVLVQNIEFYSLCEHHILPFFGVAHIGYLPNGKVLGLSKLARIVDMYAKRLQIQENLTKQVAQAIHELTDCRGVAVVMDASHMCMMMRGVGKQQSTTRTTCMLGVYETDNQARNEFLSAIPKRVPAFG

SEQ ID NO: 11043 - protein, 205 aa, Moraxella lacunata
  misc_feature (1)..(205): tr|A0A378QHZ7|A0A378QHZ7_MORLA GTP cyclohydrolase 1 OS= Moraxella lacunata OX=477 GN=folE PE=3 SV=1
MCQHCDSHATPAFSFDVEATAQNYANIILASGENLSREGLLDTPMRAAKAFGDLTAGYHQDLHTVANNAVFASDNADLVLVQNIEFYSLCEHHILPFFGVAHIGYLPNGKVLGLSKLARIVDMYAKRLQIQENLTKQVAQAIHELTDCRGVAVVMDASHMCMMMRGVGKQQSTTRTTCMLGVYETDNQARNEFLSTIPKRAPAFG

SEQ ID NO: 11044 - protein, 205 aa, Moraxella lacunata
  misc_feature (1)..(205): tr|A0A1B8PX01|A0A1B8PX01_MORLA GTP cyclohydrolase 1 OS= Moraxella lacunata OX=477 GN=folE PE=3 SV=1
MCQHCDSHATPAFSFDVEATAQNYANIISASGENLSREGLLDTPMRAAKAFRDLTAGYHQDLHTVANNAIFASDNADLVLVQNIEFYSLCEHHILPFFGVAHIGYLPNGKVLGLSKLARIVDMYAKRLQIQENLTKQVAQAIHELTNCRGVAVVMDASHMCMMMRGVGKQQSTTRTTCMLGVYETDNQARNEFLSTIPKRVPAFG

SEQ ID NO: 11045 - protein, 191 aa, Moraxella lincolnii
  misc_feature (1)..(191): tr|A0A1T0CHW8|A0A1T0CHW8_9GAMM GTP cyclohydrolase 1 OS= Moraxella lincolnii OX=90241 GN=folE PE=3 SV=1
MTHTEHPNAFLYSQLIESTSEDLSRAGLIDTPVRAAKAFDYLTQGYNQTLTEVSNNAIFPTDNDELVLVQNIEFYSMCEHHLLPFYGVAHVGYLPNGKVLGLSKVARIIDMYARRLQIQENLTKQVAEAINELTDCRGVAVVMDASHMCMMMRGVSKQNSTTRTHAMLGDFVTDKAARQEFLAVVPTQQAI

SEQ ID NO: 11046 - protein, 230 aa, Moraxella macacae
  misc_feature (1)..(230): tr|L2F684|L2F684_9GAMM GTP cyclohydrolase 1 OS=Moraxell a macacae 0408225 OX=1230338 GN=folE PE=3 SV=1
MLNINKLQKNTLQKTNNLYNNAILFCLVFRMSNNTQCNQCCDFTFDVDDTAQHYAKIISNAGEDLNRAGLIDTPMRASKAFAFLTQGYHQDLTQITNGAIFPTDNNELILVKNIEFYSMCEHHLLPFYGVAHVAYLPDDKVIGLSKMARIVDMYARRLQIQENLTKQVAQAVMDMTQAKGCAVVMDAVHMCMMMRGVNKQQSSTRSISMLGEFKDNKDARNEFLMAIPKP

SEQ ID NO: 11047 - protein, 171 aa, Moraxella nonliquefaciens
  misc_feature (1)..(171): tr|A0A1B8QSG0|A0A1B8QSG0_MORNO GTP cyclohydrolase 1 OS= Moraxella nonliquefaciens OX=478 GN=folE PE=3 SV=1
MHREGLLDTPMRAAKAFGDLTAGYHQDLHTVANGAIFASDNPDLVLVQNIEFYSLCEHHILPFFGVAHIGYLPDGKVLGLSKLARIVDMYAKRLQIQENLTKQIAQAIHELTDCRGVAVVMDASHMCMMMRGVGKQQSTTRTTCMLGVYETDSQARMEFLSTIPKRVPAFG

SEQ ID NO: 11048 - protein, 171 aa, Moraxella nonliquefaciens
  misc_feature (1)..(171): tr|A0A1B8PJD5|A0A1B8PJD5_MORNO GTP cyclohydrolase 1 OS= Moraxella nonliquefaciens OX=478 GN=folE PE=3 SV=1
MHREGLLDTPMRAAKAFGDLTAGYHQDLHTVANGAIFASDNPDLVLVQNIEFYSLCEHHILPFFGVAHIGYLPDGKVLGLSKLARIVDMYAKRLQIQENLTKQIAQAIHELTDCRGVAVVMDASHMCMMMRGVGKQQSTTRTTCMLGVYETDSQSRMEFLSTIPKRVPAFG

SEQ ID NO: 11049 - protein, 245 aa, Moraxella osloensis
  misc_feature (1)..(245): tr|A0A378Q9K9|A0A378Q9K9_9GAMM GTP cyclohydrolase 1 OS= Moraxella osloensis OX=34062 GN=folE PE=3 SV=1
MHYNSSKLGVNSSKKPKQSKFSDFHGVCDKNRFTNSGKALSYAYFLNLNVIMTMPANFDEIIQQNSDAYRTLIASTGEELTREGLLNTPERAAKAFSFLTQGYHQDLVEITNNAIFPTDNNELVMVKNIEFYSMCEHHMLPFYGVAHVAYLPDGKVIGLSKMARIVDMYARRLQIQENLTRQIAQAVMDMTGAKGAAVVMDAAHMCMMMRGVMKQKSDTRSMSLLGEFRHNTEARQALLMAIPSA

SEQ ID NO: 11050 - protein, 192 aa, Moraxella osloensis
  misc_feature (1)..(192): tr|A0A1B8Q108|A0A1B8Q108_9GAMM GTP cyclohydrolase 1 OS= Moraxella osloensis OX=34062 GN=folE PE=3 SV=1
MPANFDEIIQQNSDAYRTLIASTGEELTREGLLNTPERAAKAFSFLTQGYHQDLVEITNNAIFPTDNNELVMVKNIEFYSMCEHHMLPFYGVAHVAYLPDGKVIGLSKMARIVDMYARRLQIQENLTRQIAQAVMDMTGAKGAAVVMDAAHMCMMMRGVMKQKSDTRSMSLLGEFKHNTEARQALLMAIPSA

SEQ ID NO: 11051 - protein, 201 aa, Moraxella ovis
  misc_feature (1)..(201): tr|A0A378PKH2|A0A378PKH2_9GAMM GTP cyclohydrolase 1 OS= Moraxella ovis OX=29433 GN=folE PE=3 SV=1
MSNSDNSNFTPDYDKIASYYASIIEGCGEDLSREGLLDTPMRAAKAFGYLTRGYHQSLEVVANDAIFPSDNPELVLVQNIEFYSLCEHHLLPFHGVAHVGYLPEGKVLGLSKVARIVDMYARRLQIQENLTKQIATAIEELTGCRGVAVVMDASHMCMMMRGVGKQQSTTRTMSMLGEFTTNNTARAEFLDAIPRRRPAFG

SEQ ID NO: 11052 - protein, 201 aa, Moraxella pluranimalium
  misc_feature (1)..(201): tr|A0A1T0CUX1|A0A1T0CUX1_9GAMM GTP cyclohydrolase 1 OS= Moraxella pluranimalium OX=470453 GN=folE PE=3 SV=1
MSNSDTVNFTPDFEVLSEHYAKIISASGEDLSRDGLLDTPMRAAKAFGYLTRGYHQDLATVANDAVFDSDNPELVLVQNIEFYSLCEHHLLPFYGVAHVGYLPNGKVLGLSKVARIVDMYARRLQIQENLTKQVATAIEELTGCRGVAVVMDASHMCMMMRGVGKQQSTTRTTSMLGEFVSNHDARREFLDAVPRRSPAFG

SEQ ID NO: 11053 - protein, 201 aa, Moraxella porci
  misc_feature (1)..(201): tr|A0A1T0CWV5|A0A1T0CWV5_9GAMM GTP cyclohydrolase 1 OS= Moraxella porci DSM 25326 OX=573983 GN=folE PE=3 SV=1
MSNSDTLNFTPDYDALAAHYADIIAASGEDLSRDGLLDTPMRAAKAFGYLTRGYHQDLVTVANDAVFDSDNPELVLVQNIEFYSLCEHHLLPFYGVAHVGYLPNGKVLGLSKVARIVDMYARRLQIQENLTKQIATAIEELTGCRGVAVVMDASHMCMMMRGVGKQQSTTRTTSMLGEFVSNHDARREFLDAIPRRSPAFG

SEQ ID NO: 11054 - protein, 198 aa, Moraxella sp.
  misc_feature (1)..(198): tr|A0A496NI42|A0A496NI42_MORSP GTP cyclohydrolase 1 OS= Moraxella sp. OX=479 GN=folE PE=3 SV=1
MSNSPVFTPNYDKTAQQYTQIIQDCGEDLTREGLVDTPMRASKAFYYLTRGYHQSLDVVANNAIFPSDNPEMVLIQNIEFYSLCEHHLLPFYGVAHVGYLPDGKVLGLSKVARIVDMYARRLQIQENLTKQIAEAIQELTNCRGVAVVMDASHMCMMMRGVGKQQSTTRTLSTLGDMTTDKQAKTEFLAAIPKRPPAF

SEQ ID NO: 11055 - protein, 201 aa, Moraxella sp.; identical to SEQ ID NO: 11053
  misc_feature (1)..(201): tr|A0A2K0XWQ9|A0A2K0XWQ9_9GAMM GTP cyclohydrolase 1 OS= Moraxella sp. RCAD0137 OX=1775913 GN=folE PE=3 SV=1

SEQ ID NO: 11056 - protein, 227 aa, Moraxellaceae bacterium
  misc_feature (1)..(227): tr|A0A345P510|A0A345P510_9GAMM GTP cyclohydrolase 1 OS= Moraxellaceae bacterium HYN0046 OX=2283318 GN=folE PE=3 SV=1
MTLPLRQPSVHLYAGNQTAEELLAEQELAEQQGAESTQESTLLALQQSYATLISGVGEDLTRPGLVDTPIRAAKALSFLTKGYAQTLEDVTNGAIFPSNNHEMVMVKGIEFFSMCEHHLLPFMGHTHVAYLPEGKVLGLSKMARIVDMYARRLQIQENLTQEIAQAVMDATGARGVAVVMDAQHMCMMMRGVQKQDSSTRSVAMIGQFTTDNQARNEFLRALPASRF

SEQ ID NO: 11057 - protein, 192 aa, Moraxellaceae bacterium
  misc_feature (1)..(192): tr|A0A354HA85|A0A354HA85_9GAMM GTP cyclohydrolase 1 OS= Moraxellaceae bacterium OX=1889775 GN=folE PE=3 SV=1
MPANFDEIIQRNSDAYRTLIASTGEDLTREGLLNTPERAAKAFSFLTQGYHQDLVEITNNAIFPTDNNELVMVKNIEFYSMCEHHMLPFYGIAHVAYLPDGKVIGLSKMARIVDMYARRLQIQENLTRQIAQAVMDMTGAKGAAVVMDAAHMCMMMRGVMKQKSDTRSMSLLGEFKHNTEARQALLMAIPSA

SEQ ID NO: 11058 - protein, 219 aa, Morganella morganii
  misc_feature (1)..(219): tr|M7CYF7|M7CYF7_MORMO GTP cyclohydrolase 1 OS=Morganel la morganii SC01 OX=1239989 GN=folE PE=3 SV=1
MSSLSREAELVHAALIARGLETPLREQTLPPETRKVQIEAHMTEIMKLLNLDLSDDSLADTPKRIAKMYVDEIFSGLDYHNFPKITLIENKMKVDEMVTVRDITLTSTCEHHFVTIDGKATVAYIPKDTVIGLSKINRIVQFFAQRPQVQERLTQQILLALQTLLGTTNVAVSIDAVHYCVKARGIRDATSTTTTTSLGGLFKSSQNTRQEFLRAARHI

SEQ ID NO: 11059 - protein, 219 aa, Morganella morganii; identical to SEQ ID NO: 11058
  misc_feature (1)..(219): tr|J7TRM1|J7TRM1_MORMO GTP cyclohydrolase 1 OS=Morganel la morganii subsp. morganii KT OX=1124991 GN=folE PE=3 SV=1

SEQ ID NO: 11060 - protein, 219 aa, Morganella psychrotolerans
  misc_feature (1)..(219): tr|A0A1B8H5B6|A0A1B8H5B6_9GAMM GTP cyclohydrolase 1 OS= Morganella psychrotolerans OX=368603 GN=folE PE=3 SV=1
MSSLSREAELVHAALIARGLETPLREQTLAPETRKVQIEAHMTEVMKLLNLDLSDDSLSDTPKRIAKMYVDEIFSGLDYHNFPKITLIENKMKVDEMVTVRDITLTSTCEHHFVTIDGKATVAYIPKDTVIGLSKINRIVQFFAQRPQVQERLTQQILLALQTLLGTTNVAVSIDAVHYCVKARGIRDATSTTTTTSLGGLFKSSQNTRQEFLRAARHI

SEQ ID NO: 11061 - protein, 219 aa, Morganella psychrotolerans
  misc_feature (1)..(219): tr|A0A1B8HJ83|A0A1B8HJ83_9GAMM GTP cyclohydrolase 1 OS= Morganella psychrotolerans OX=368603 GN=folE PE=3 SV=1
MSSLSLEAELVHAALIARGLETPLREQTLAPETRKVQIEAHMTEVMKLLNLDLSDDSLSDTPKRIAKMYVDEIFSGLDYHNFPKITLIENKMKVDEMVTVRDITLTSTCEHHFVTIDGKATVAYIPKDTVIGLSKINRIVQFFAQRPQVQERLTQQILLALQTLLGTTNVAVSIDAVHYCVKARGIRDATSTTTTTSLGGLFKSSQNTRQEFLRAARHI

SEQ ID NO: 11062 - protein, 219 aa, Morganella sp.; identical to SEQ ID NO: 11061
  misc_feature (1)..(219): tr|A0A3D3HM32|A0A3D3HM32_9GAMM GTP cyclohydrolase 1 OS= Morganella sp. (in: Bacteria) OX=1912315 GN=folE PE=3 S V=1

SEQ ID NO: 11063 - protein, 216 aa, Moritella marina
  misc_feature (1)..(216): tr|A0A5J6WJ17|A0A5J6WJ17_MORMI GTP cyclohydrolase I Fol E OS=Moritella marina ATCC 15381 OX=1202962 GN=folE PE= 4 SV=1
MTCLSKEALLVRSVLEERGLETPMIGTGLSSAEKKDRIESHFTEILKLLELDLTDDSLAETPHRIAKMYVNEIFSGLDYSSFPKITLIDNKMQVDEMVKVSDITLTSTCEHHFVTIDGKATIAYIPRSKVIGLSKINRIVQFFSRRPQVQERLTQQILVALQTLLDSQDVAVSITATHYCVKARGVMDATSETTTTSLGGIFKSRPETRAEFLHCR

SEQ ID NO: 11064 - protein, 216 aa, Moritella sp.
  misc_feature (1)..(216): tr|A0A2G2C5I3|A0A2G2C5I3_9GAMM GTP cyclohydrolase 1 OS= Moritella sp. OX=78556 GN=folE PE=3 SV=1
MTCLSKEALLVRSVLEERGLETPMIGTGLSSTEKKERIESHFTEILKLLELDLSDDSLAETPHRIAKMYVNEIFSGLDYASFPKITLIDNKMQVDEMVKVSNITLTSTCEHHFITIDGKATIAYIPRSKIIGLSKINRIVQFFSRRPQVQERLTQQILVALQTLLDSQDVAVSITATHYCVKARGVMDATSETTTTSLGGIFKSRPETRAEFLHCR

SEQ ID NO: 11065 - protein, 338 aa, Moritella sp.
  misc_feature (1)..(338): tr|A6FHH2|A6FHH2_9GAMM GTP cyclohydrolase FolE2 OS=Mori tella sp. PE36 OX=58051 GN=folE2 PE=3 SV=1
MQFVIVVTQTHLPISYAKHCNIMTLLQLLDFTWKLMFNPELLPDITSYHSVNEPLALQWVGMEDIAVPFSIALSDGKLLPVAGKADLLVSLDQPDAKGIHMSRLYLHLNEQLANKKLDKTCLSHLLELMVSSQKGISKNAKIKLKFDVILEKSALLSNEMGYQSYPVTLSAQRIHNEVSYVLELSIPYSSTCPCSASLSQQLYGAAINEHFSAATIDKQDLLQWVESKAGSVATPHSQRSYAYLKLILDNQYLLDIQSLIFKFEKLIATPVQTAVKREDEQEFARLNAENLMFCEDAARRIKGELERMKFVTDYWFKVEHQESLHAHNAVVIDQKQRM

SEQ ID NO: 11066 - protein, 216 aa, Moritella viscosa
  misc_feature (1)..(216): tr|A0A090ICG5|A0A090ICG5_9GAMM GTP cyclohydrolase 1 OS= Moritella viscosa OX=80854 GN=folE PE=3 SV=1
MTCLSKEALLVRSVLEERGLETPMIGTGLTSSEKKERIESHFTEILKLLELDLSDDSLVETPHRIAKMYVNEIFSGLDYASFPKITLIDNKMQVDEMVKVSDITLTSTCEHHFVTIDGKATIAYIPRSKVIGLSKINRIVQFFSRRPQVQERLTQQILVALQTLLDSQDVAVSITATHYCVKARGVMDATSETTTTSLGGIFKSRPETRAEFLHCR

SEQ ID NO: 11067 - protein, 216 aa, Moritella yayanosii
  misc_feature (1)..(216): tr|A0A330LRN8|A0A330LRN8_9GAMM GTP cyclohydrolase 1 OS= Moritella yayanosii OX=69539 GN=folE PE=3 SV=1
MTCLSKEALLVRSVLEERGLETPMIGTGLSSTEKKERIESHFTEILTLLELDLSDDSLAETPHRIAKMYVNEIFSGLDYATFPKITLIDNKMQVDEMVKVSNITLTSTCEHHFITIDGKATIAYIPRSKIIGLSKINRIVQFFSRRPQVQERLTQQILVALQTLLDSQDVAVSITATHYCVKARGVMDATSETTTTSLGGIFKSRPETRAEFLHCR

SEQ ID NO: 11068 - protein, 282 aa, Morococcus cerebrosus
  misc_feature (1)..(282): tr|A0A0C1E2A5|A0A0C1E2A5_9NEIS GTP cyclohydrolase FolE2 OS=Morococcus cerebrosus OX=1056807 GN=folE2 PE=3 SV=1
MQNGRHESVSNDTHPNNPTIKDKQRMNAIADVQSSRDLRNLPINQVGIKDLRFPITLNTAEGSQSTVAHLTMTVFLPADQKGTHMSRFVALMEQQTEALDFDRLHKLTAEMVALLNSHSGKISVSFPFFRKKSAPVSGIQSLLDYDVTLTGEIKNGAYSHNLKVMVPVTSLCPCSKEISQYGAHNQRSHVTVSLTANAEVGIEEIIDCVEAQASCQLYGLLKRPDEKYVTEKAYENPKFVEDMVRDVATALIADGRIESFIVESENFESIHNHSAYAYIAYP

SEQ ID NO: 11069 - protein, 219 aa, Motilibacter peucedani
  misc_feature (1)..(219): tr|A0A420XPU3|A0A420XPU3_9ACTN GTP cyclohydrolase 1 OS= Motilibacter peucedani OX=598650 GN=folE PE=3 SV=1
MSTGVDGTGATAAEAVQAAATGPSYDGTPTRPPYDEERAQRAVRELLLALGEDPDRDGIRETPARVARAYRELFAGLWQQPEDVLTTTFDLGHDEMVLVKDITLVSACEHHLLPFYGVAHVGYIPAEDGRITGLSKIARLVEVFARRLQVQERLTTQVADAMTEVLRPRGVIVVIEAEHSCMTTRGVRKPGSKTVTSAVRGQLRDPATRAEAMSLILSR

SEQ ID NO: 11070 - protein, 216 aa, Motilibacter rhizosphaerae
  misc_feature (1)..(216): tr|A0A4Q7NAA0|A0A4Q7NAA0_9ACTN GTP cyclohydrolase 1 OS= Motilibacter rhizosphaerae OX=598652 GN=folE PE=3 SV=1
MAEQAGAVVDEDGPLEQSDVTRSERAGRPAYDEERARAAVRELLLALGEDPDRDGIRDTPARVARAYRELFAGLWMEPEDVLTTTFDLGHDEMVLVKDIPMVSACEHHMLPFYGVAHVGYIPGPEGRITGLSKLARLVEVYARRLQVQERLTTQVADSLERILGPRGVIVVVEAEHTCMSTRGIRKPGAKTVTSAVRGQLRDPATRAEAMSLILGR

SEQ ID NO: 11071 - protein, 223 aa, Motilimonas sp.
  misc_feature (1)..(223): tr|A0A418YG65|A0A418YG65_9GAMM GTP cyclohydrolase 1 OS= Motilimonas sp. PLHSC7-2 OX=2303987 GN=folE PE=3 SV=1
MAQGTEVANPNPAANIVRQALIARGLETPVVENGLDNTQKRQQIEQHFEQIMQVLGLDLSDDSLMDTPRRIGKMYVDEIFSGLDYAQFPKITVIENKMKLDEMVKVADICLTSTCEHHFVTIDGSATVAYIPKTKIIGLSKINRIVGFFARRPQVQERLTQQVLCALQALLETDNVAVSIDAVHYCVKARGVQDESSHTRTTALGGNFKSKPETRQEFLQGLK

SEQ ID NO: 11072 - protein, 184 aa, Motilimonas sp.
  misc_feature (1)..(184): tr|A0A418YE91|A0A418YE91_9GAMM GTP cyclohydrolase 1 OS= Motilimonas sp. PLHSC7-2 OX=2303987 GN=folE PE=3 SV=1
MSETLAQQYLNIIREIGEDEHREGLLDTPMRAAKAMQFLTQGYQQQLDEVINDAVFSSESDDMVLVKGIELYSMCEHHMLPFIGTCHIAYIPNGKVLGLSKFARIVDMYSRRLQIQENLTREVAQAVLTATDALGVGVIIEAKHMCMMMRGVEKQHSNMRTSVMLGSFRENPKTRAEFLDLLRN

SEQ ID NO: 11073 - protein, 305 aa, Motiliproteus coralliicola
  misc_feature (1)..(305): tr|A0A369WN45|A0A369WN45_9GAMM GTP cyclohydrolase FolE2 OS=Motiliproteus coralliicola OX=2283196 GN=folE2 PE=3 SV=1
MLNPKPLPDVASQHSASHSLALQWVGMEQIALPIRLDLADSHSLNLSAKADLYVSLDRPDVKGIHMSRLYLEMNRFLANQSLTHESLAQLLALMVESQQGISQNARITLSFDLLLQRNSLKSQQQGYQSYPAVINAERINDQLKLELELTIPYSSTCPCSASLSRQLYSEAVDRQFSGTSIDKQALLQWIQSEAGSIATPHSQRSYAYLQLQLADGAFPDFTILIDRIEEALGTPVQTAVKRSDEQDFARLNAENLMFCEDAARRVKTCLENQAQISDYWFKVEHQESLHAHNAVVIDQKFTTEN

SEQ ID NO: 11074 - protein, 179 aa, Motiliproteus coralliicola
  misc_feature (1)..(179): tr|A0A369WTS0|A0A369WTS0_9GAMM GTP cyclohydrolase 1 OS= Motiliproteus coralliicola OX=2283196 GN=folE PE=3 SV=1
MKDAFANIIEACGEDLQRDGLQDTPERAAKAFKYLTRGYQQTLDEVVNGALFESDNSEMVLVKDIELYSLCEHHLLPFIGKAHVAYIPSGKVIGLSKIARIVDMYARRLQIQENMTKQIADSIMEVTGAAGVGVVIEAKHMCMMMRGVEKQNGVMKTSMMTGLFRSNQATRSEFLSLIN

SEQ ID NO: 11075 - protein, 179 aa, Motiliproteus sp.
  misc_feature (1)..(179): tr|A0A1R1MFZ5|A0A1R1MFZ5_9GAMM GTP cyclohydrolase 1 OS= Motiliproteus sp. MSK22-1 OX=1897630 GN=folE PE=3 SV=1
MKEAFASIIEAVGEDLERDGLQDTPERAAKAFNYLTRGYQQTLDEVVNNALFDSDNSEMVLVKDIELYSLCEHHMLPFIGKCHVAYIPSGKVLGLSKIARIVDMYARRLQIQENMTKQIADSIMEVTGAAGVGVIIEAQHMCMMMRGVEKQNGVMKTSMMLGLFRNNPSTRAEFLSLVS

SEQ ID NO: 11076 - protein, 212 aa, Mucilaginibacter auburnensis
  misc_feature (1)..(212): tr|A0A2H9VPG8|A0A2H9VPG8_9SPHI GTP cyclohydrolase 1 OS= Mucilaginibacter auburnensis OX=1457233 GN=folE PE=3 SV =1
MSDINNIPDRDDDIYGYEKIDRYNPELIASLSGHYKEILKQLGEHPEREGLLKTPERVAKAMLYLTQGYDLDARQILNSALFKEEYSQMVVVKDIEVYSMCEHHMLPFFGKAHIAYIPNGYVVGLSKIPRVVDVYSRRLQVQERLTNEIRDCIQETLKPIGVGVVIECRHLCMCMRGVQKQNSVTTTSAFTGGFLQEKTRAEFLNLISQKLS

SEQ ID NO: 11077 - protein, 213 aa, Mucilaginibacter frigoritolerans
  misc_feature (1)..(213): tr|A0A562TUG0|A0A562TUG0_9SPHI GTP cyclohydrolase 1 OS= Mucilaginibacter frigoritolerans OX=652788 GN=folE PE=3 SV=1
MINENHVTDPDDDDIEGYTKIDRYNESLISNLSAHYKDVLGLIGENPEREGLLKTPERISKALLYLTQGYELDAKSILTSAMFKEDYSQMVLVKDIEVYSMCEHHMLPFFGKAHVAYIPNGHVVGLSKIPRVVDVFARRLQVQERLTNEIRDCIQDTLNPMGVGVVIECRHLCMSMRGVQKQNSVTTTSAFTGGFLSEKTRTEFLNLISARLS

SEQ ID NO: 11078 - protein, 212 aa, Mucilaginibacter ginsenosidivorans
  misc_feature (1)..(212): tr|A0A5B8USA6|A0A5B8USA6_9SPHI GTP cyclohydrolase 1 OS= Mucilaginibacter ginsenosidivorans OX=398053 GN=folE PE =3 SV=1
MNKTDAYPDRDEGIDGYKKIDRYNTGLIDNLSGLYHNVLEQIGEDPNREGLLKTPERMAKAMLFLTQGYDLNAEEILKSAMFKEEYSQMVVVKDIEVYSMCEHHMLPFFGKAHIAYIPNGHVVGLSKIPRVVDVFARRLQVQERLTNEIRDCIQETLNPLGVGVVIECRHLCMSMRGVQKQNSVTTTSAFTGEFLKEKTRTEFLNLITAKLG

SEQ ID NO: 11079 - protein, 229 aa, Mucilaginibacter ginsenosidivorans
  misc_feature (1)..(229): tr|A0A5B8UU61|A0A5B8UU61_9SPHI GTP cyclohydrolase 1 OS= Mucilaginibacter ginsenosidivorans OX=398053 GN=folE PE =3 SV=1
MKQNETSLNIAGNNYTAEADLGDEHIGTSWDTPLREDAFDMDDEEKILLIAYHFKEIMQVLGLDLTDDSLKGTPMRVGEMYVREIFSGLNPENKPGMALFENKYGYNQMLVEKNIALYSNCEHHFVPIIGKAHVAYISSGKVIGLSKLNRIVRYYAQRPQVQERLTRQIAEELKTILGTEDVAVVIDAVHLCVSSRGVKDTSSSTLTAEYSGAFLDAQKRDEFLKYLNT

SEQ ID NO: 11080 - protein, 212 aa, Mucilaginibacter ginsenosidivorax
  misc_feature (1)..(212): tr|A0A5B8VZK0|A0A5B8VZK0_9SPHI GTP cyclohydrolase 1 OS= Mucilaginibacter ginsenosidivorax OX=862126 GN=folE PE= 3 SV=1
MIDKNHIPDRDDDIDGYTKIDRYNPQLIENLSAHYLDVLKQIGENPQREGLLKTPERIAKAMLFLTHGYDLDAKSILNSAMFKEEYSQMVIVKDIEVYSMCEHHMLPFFGKAHIAYIPNGYVVGLSKIPRVVDAFARRLQVQERLTNEIRDCIQETLNPVGVGIVIECRHLCMSMRGVQKQNSVTTTSAFTGEFLKEKTRTEFLNLISSKLS

SEQ ID NO: 11081 - protein, 213 aa, Mucilaginibacter gossypii
  misc_feature (1)..(213): tr|A0A1G8MHE1|A0A1G8MHE1_9SPHI GTP cyclohydrolase 1 OS= Mucilaginibacter gossypii OX=551996 GN=folE PE=3 SV=1
MSDSQFSQDTDDDDFGGYIKIDRYNQDRIDSLKDNYRDVLKQLGEDAAREGLLKTPERVAKAMLYLTHGYELNAEEILNSAKFKEDYSQMVVVKDIEVYSMCEHHMLPFFGKAHVAYIPNGHVVGLSKIPRVVDVFARRLQVQERLTNEIRDCIQQTLNPVGVGVVIECRHLCMSMRGVQKQNSVTTTSAFTGEFLKEKTRTEFLNLISSKLS

SEQ ID NO: 11082 - protein, 226 aa, Mucilaginibacter gossypii
  misc_feature (1)..(226): tr|A0A5C1IDN0|A0A5C1IDN0_9SPHI GTP cyclohydrolase 1 OS= Mucilaginibacter gossypii OX=551996 GN=folE PE=3 SV=1
MIKDETVNDLTLAQVVTDLEQDHYNAAFDTPLRPDAFELDDDTKMEHIAKHFAAIMETLGMDLEDDSLRDTPKRVAKMYVKEIFSGLNPANKPKPTLFKNPFNYNQMLVERNIAVFSNCEHHFVPIVGKAHVAYISNGQVIGLSKLNRIVQYCSQRPQVQERLTMQIANMLKEALGTEDVAVIIDAHHHCVSSRGIRDAGSTTLTAEYSGQFLNIETKNEFLKYIG

SEQ ID NO: 11083 - protein, 213 aa, Mucilaginibacter gossypiicola
  misc_feature (1)..(213): tr|A0A1H8QLM8|A0A1H8QLM8_9SPHI GTP cyclohydrolase 1 OS= Mucilaginibacter gossypiicola OX=551995 GN=folE PE=3 SV =1
MSDSQFSQDTDDDDFGGYIKIDRYNHDRIDSLKDNYQNVLKQIGEDPEREGLLKTPERVAKAMLYLTHGYELNAEEILNSAKFKEDYSQMVVVKDIEVYSMCEHHMLPFFGKAHVAYIPNGHVVGLSKIPRVVDVFARRLQVQERLTNEIRDCIQQTLNPIGVGVVIECRHLCMSMRGVQKQNSVTTTSAFTGEFLKEKTRTEFLNLISSKLS

SEQ ID NO: 11084 - protein, 227 aa, Mucilaginibacter gossypiicola
  misc_feature (1)..(227): tr|A0A1H8UA55|A0A1H8UA55_9SPHI GTP cyclohydrolase 1 OS= Mucilaginibacter gossypiicola OX=551995 GN=folE PE=3 SV =1
MLKNEILNDLTLARVVTDLEQDHYHAAFDTPLRPDAFELDDDTKMELIAKHFTTIMETLGMDMEDDSLKDTPKRVAKMYVKEIFSGLNPANKPKPTLFKNPFNYNQMLVERNIAVFSNCEHHFVPIVGKAHVAYISNGQVIGLSKLNRIVQYCSQRPQVQERLTMQIANMLKEALGTEDVAVIIDAHHHCVSSRGIRDAGSTTLTAEYSGQFLNIETKNEFLRYIGS

SEQ ID NO: 11085 - protein, 227 aa, Mucilaginibacter gotjawali
  misc_feature (1)..(227): tr|A0A0X8X535|A0A0X8X535_9SPHI GTP cyclohydrolase 1 OS= Mucilaginibacter gotjawali OX=1550579 GN=folE_2 PE=3 SV =1
MINNETLNDRTIEQVVSDLEQEHHSSAFNTPLRPDAFEMDDETKIDHIARHFRSIMEVLGMDLDDDSLKDTPKRVAKMYVKEIFSGLNPANKPQPTLFSNPFKYKQMLVERNIAVFSNCEHHFVPIVGKAHVAYISNGQVIGLSKLNRIVQYCSQRPQVQERLTIQIANMLKEALGTGDVAVIIDAHHHCVSSRGIRDAGSTTVTAEYGGQFLNAETKNEFLKYIGS

SEQ ID NO: 11086 - protein, 213 aa, Mucilaginibacter gotjawali
  misc_feature (1)..(213): tr|A0A120MXU9|A0A120MXU9_9SPHI GTP cyclohydrolase 1 OS= Mucilaginibacter gotjawali OX=1550579 GN=folE_1 PE=3 SV =1
MINENFIKDTDDDDVEGYIKIDRYNPELISSLSTHYHEILKELGENPEREGLLKTPERIAKAMLYLTQGYDLDAKAIMASAVFKEDYSQMVIVKDIEVYSMCEHHMLPFFGKAHVAYIPNGHVVGLSKIPRIVDVFARRLQVQERLTNDIRDCIQDALDPLGVGVVIECRHLCMSMRGVQKQNSVTTTSAFTGEFLKEKTRTEFLNLISAKLG

SEQ ID NO: 11087 - protein, 213 aa, Mucilaginibacter gracilis
  misc_feature (1)..(213): tr|A0A495IWZ7|A0A495IWZ7_9SPHI GTP cyclohydrolase 1 OS= Mucilaginibacter gracilis OX=423350 GN=folE PE=3 SV=1
MSKENYDRYDDEEDVDGYVKIDRYNPELIQNISTHYKDILTQLGEDPNREGLLKTPERVAKALLYLTHGYDLNPKDILESAKFTEEYSQMVVVKDIEVYSMCEHHMLPFFGKAHIAYIPNGQVVGLSKIPRVVDAFARRLQVQERLTNQIRDCIQETLNPIGVGVVMECRHLCMCMRGVQKQNSVTTTSAFTGEFIKEKTRAEFLHLISSKLS

SEQ ID NO: 11088 - protein, 219 aa, Mucilaginibacter gracilis
  misc_feature (1)..(219): tr|A0A495J4P0|A0A495J4P0_9SPHI GTP cyclohydrolase 1 OS= Mucilaginibacter gracilis OX=423350 GN=folE PE=3 SV=1
MLNNNTLDNLTIEQEHYSSSFDTPLRADAFAMDDDTKIELIAKHFKSIMQVLGLDLDDDSLKDTPTRVAKMYVKEIFSGLNPANKPVPTLFKNPFQYKQMLVERNIAVFSNCEHHFVPIVGKAHIAYISNGEVIGLSKLNRIVQYCSQRPQVQERLTMQIANMLKEALGTDDVAVIIDAHHHCVSSRGIRDANSSTLTAEYCGQFLIAETKNEFLKYIG

SEQ ID NO: 11089 - protein, 214 aa, Mucilaginibacter lappiensis
  misc_feature (1)..(214): tr|A0A1N6ZTJ4|A0A1N6ZTJ4_9SPHI GTP cyclohydrolase 1 OS= Mucilaginibacter lappiensis OX=354630 GN=folE PE=3 SV=1
MIDKEHLPHRDDDDDLDGYTKVDRYNPSLIQNLSGHYHDVLKQIGENPEREGLLKTPERMAKAMLYLTHGYDLDAKEIMNSAMFKEEYSQMVIVKDIEVYSMCEHHMLPFFGKAHIAYIPNGYVVGLSKIPRIVDVFARRLQVQERLTNEIRDCIQDTLNPIGVGVVIECRHLCMSMRGVQKQNSVTTTSAFTGEFLKEKTRTEFLNLISAKLG

SEQ ID NO: 11090 - protein, 214 aa, Mucilaginibacter mallensis
  misc_feature (1)..(214): tr|A0A1H2BX87|A0A1H2BX87_9SPHI GTP cyclohydrolase 1 OS= Mucilaginibacter mallensis OX=652787 GN=folE PE=3 SV=1
MTDNHSIPDRDDDDDIEGYVKIDRYNPELITNLSTHYHDVLKQIGENPEREGLLKSPERIAKAMLFLTHGYDLDAQAILNSAKFKEDYSQMVVVKDIEVYSMCEHHMLPFFGKAHIAYIPNGHVVGLSKIPRVVDAFARRLQVQERLTNEIRDCIQDTLQPLGVGVVIECRHLCMSMRGVQKQNSVTTTSAFTGEFLEDRTRTEFLNLIAAKLS

SEQ ID NO: 11091 - protein, 227 aa, Mucilaginibacter oryzae
  misc_feature (1)..(227): tr|A0A316HM10|A0A316HM10_9SPHI GTP cyclohydrolase 1 OS= Mucilaginibacter oryzae OX=468058 GN=folE PE=3 SV=1
MLKNEAENNLTLEQIVPDLDDNHYNYSLNTPLRPDAFEMDDDTKVELISRHFTAIMETLGMDLTDDSLKDTPRRVAKMYVKEIFSGLNPANKPRPTLFKNPFNYNQMLVERNIAVFSNCEHHFVPIVGKAHVGYISNGQVIGLSKLNRIVQYCCQRPQVQERLTIQIASMLKEALGTEDVAVIVDAHHHCVSSRGIRDAGSTTLTAEYSGRFLNAETKTEFLKYIGS

SEQ ID NO: 11092 - protein, 213 aa, Mucilaginibacter oryzae
  misc_feature (1)..(213): tr|A0A316HK79|A0A316HK79_9SPHI GTP cyclohydrolase 1 OS= Mucilaginibacter oryzae OX=468058 GN=folE PE=3 SV=1
MSDSQFSQDTDDDDFGGYIKIDRYNQERIDSLKTDYHNVLTQIGEDPGREGLLKTPERVAKAMLYLTHGYELNAEEILNSAKFKEDYSQMVVVKDIEVYSMCEHHMLPFFGKAHVAYIPNGHVVGLSKIPRVVDVFARRLQVQERLTNQIRDCIQQTLNPIGVGVVIECRHLCMSMRGVQKQNSVTTTSAFTGEFLKEKTRTEFLNLISSKLS

SEQ ID NO: 11093 - protein, 212 aa, Mucilaginibacter paludis
  misc_feature (1)..(212): tr|H1YIP4|H1YIP4_9SPHI GTP cyclohydrolase 1 OS=Mucilagi nibacter paludis DSM 18603 OX=714943 GN=folE PE=3 SV=1
MSNIPYDYDDDEEIDGYVKIDRYNPELIQNISTHYTDILKQLGEDPEREGLVKTPERVAKALLYLTHGYDLNPQEILESAKFKEDYSQMVVVKDIEVYSMCEHHMLPFFGKAHIAYIPNGHVVGLSKIPRVVDAFARRLQVQERLTNQIRDCIHETLQPIGVAVVIECRHLCMCMRGVQKQNSVTTTSAFTGEFIKEKTRAEFLQLISSKLS

SEQ ID NO: 11094 - protein, 227 aa, Mucilaginibacter paludis
  misc_feature (1)..(227): tr|H1YAJ9|H1YAJ9_9SPHI GTP cyclohydrolase 1 OS=Mucilagi nibacter paludis DSM 18603 OX=714943 GN=folE PE=3 SV=1
MINNNTVNEITIEHDVMHLEQDHYSSALDTPMRANAFDMDDDTKIDLIAQHFAGIMEVLGMDLGDDSLKDTPQRVAKMYVKEIFSGLNPANKPKPTLFKNPYQYNQMLVERNIAVFSNCEHHFVPIVGKAHVGYISNGQVIGLSKLNRIVQYCSQRPQVQERLTMQIANMLKEALGTEDVAVVVDAHHHCVSSRGIKDAGSTTLTAEYGGQFLNPETKNEFLKYIGS

SEQ ID NO: 11095 - protein, 215 aa, Mucilaginibacter pedocola
  misc_feature (1)..(215): tr|A0A1S9P6R2|A0A1S9P6R2_9SPHI GTP cyclohydrolase 1 OS= Mucilaginibacter pedocola OX=1792845 GN=folE PE=3 SV=1
MLTEDTITENERSIAFDTPLRTDAFELDDDAKMKLIEHHFAGIMQALGLDLADDSLRDTPRRVAKMYVKEIFSGLDPANKPVPALFKNPFQYGQMLVERNIAVFSNCEHHFVPITGKAHVAYISNGQVIGLSKLNRIVQYCSQSPQLQERLTIQIAMMLKEALETDDVAVIIDAHHHCVSSRGVKDTDSMTLTAEYSGKFLEPETKKEFLSYINL

SEQ ID NO: 11096 - protein, 212 aa, Mucilaginibacter pedocola
  misc_feature (1)..(212): tr|A0A1S9P9L2|A0A1S9P9L2_9SPHI GTP cyclohydrolase 1 OS= Mucilaginibacter pedocola OX=1792845 GN=folE PE=3 SV=1
MDNDNNIPDRDAGINGYQKVDRYNPELIKHLSDNYLDVLKHIGEDPTRDGLLKTPERMAKAMLYLTHGYDLDAKAILDSAMFKEDYSQMVIVKDIEVYSMCEHHMLPFFGKAHVAYIPNGYVVGLSKIPRVVDVFSRRLQVQERLTNEIRDCIQQTLNPIGVGVVIECRHLCMSMRGVQKQNSVTTTSAFTGEFLKEKTRTEFLNLISSRLS

SEQ ID NO: 11097 - protein, 212 aa, Mucilaginibacter phyllosphaerae
  misc_feature (1)..(212): tr|A0A4Y8ADE9|A0A4Y8ADE9_9SPHI GTP cyclohydrolase 1 OS= Mucilaginibacter phyllosphaerae OX=1812349 GN=folE PE=3 SV=1
MINDDNIPDRDAGINGYQKIDRYNPQLIQNLSASYLDVLKQIGEDPGREGLLKTPERIAKAMLYLTHGYDLDAKEILNSAMFKEEYSQMVIVKDIEVYSMCEHHMLPFFGKAHIAYIPNGYVVGLSKIPRIVDVFARRLQVQERLTNEIRDCIQDTLNPIGVGVVIECRHLCMSMRGVQKQNSATTTSAFTGEFLKEKTRTEFLNLISSKLS

SEQ ID NO: 11098 - protein, 212 aa, Mucilaginibacter pineti
  misc_feature (1)..(212): tr|A0A1G7DK63|A0A1G7DK63_9SPHI GTP cyclohydrolase 1 OS= Mucilaginibacter pineti OX=1391627 GN=folE PE=3 SV=1
MSNHNHIPDRDDDIDGYTKIDRYNPELIDNLSAHYLDVLKQIGENPEREGLLKTPERIAKAMLYLTHGYDLNAKEILGSAMFKEDYSQMVIVKDIEVYSMCEHHMLPFFGKAHIAYIPNGYVVGLSKIPRIVDVFARRLQVQERLTNEIRDCIQETLNPIGVGVVIECRHLCMSMRGVQKQNSVTTTSAFTGEFLKEKTRTEFLNLISAKLS

SEQ ID NO: 11099 - protein, 213 aa, Mucilaginibacter polytrichastri
  misc_feature (1)..(213): tr|A0A1Q6A3M3|A0A1Q6A3M3_9SPHI GTP cyclohydrolase 1 OS= Mucilaginibacter polytrichastri OX=1302689 GN=folE PE=3 SV=1
MDHDDDNLPDRDAGIEGYQKIDRYNPQLIESLSGHYHEVLKQIGENPEREGLLKTPERVAKALMYLTHGYDLDAKEILKSAMFKEEYSQMVVVKDIEVYSMCEHHMLPFFGKAHIAYIPNGHVVGLSKIPRIVDVFARRLQVQERLTNEIRDCIQETLNPIGVGVVIECRHLCMSMRGVQKQNSVTTTSAFTGAFLMDKTRTEFLNLISSKLS

SEQ ID NO: 11100 - protein, 217 aa, Mucilaginibacter polytrichastri
  misc_feature (1)..(217): tr|A0A1Q5ZX05|A0A1Q5ZX05_9SPHI GTP cyclohydrolase 1 OS= Mucilaginibacter polytrichastri OX=1302689 GN=folE PE=3 SV=1
MTFEQVVTDLEHEHYNSAFDTPLRPDAFEMDDDTKMKLIAEHFTGIMQVLGMDLDDDSLRDTPKRVAKMYVKEIFSGLNPANKPKPTLFKNPFQYKQMLVERNIAVFSNCEHHFVPIVGKAHVAYISNGQVIGLSKLNRIVQYCSQRPQVQERLTMQIANMLKEVLGTEDVAVIIDAHHHCVSSRGIRDAGSTTLTAEYSGQFLIAETKNEFFKYIG

SEQ ID NO: 11101 - protein, 212 aa, Mucilaginibacter psychrotolerans
  misc_feature (1)..(212): tr|A0A4Y8SN01|A0A4Y8SN01_9SPHI GTP cyclohydrolase 1 OS= Mucilaginibacter psychrotolerans OX=1524096 GN=folE PE= 3 SV=1
MNNDTHIPDRDDDISGYQKIDRYNHGLIEKLSANYLDVLKHIGENPEREGLLKTPERMAKAMLYLTHGYDLNATEILNSAMFKEDYSQMVIVKDIEVYSMCEHHMLPFFGKAHIAYIPNGYVVGLSKIPRVVDAFARRLQVQERLTNEIRDCIQQTLNPIGVGVVIECRHLCMSMRGVQKQNSVTTTSAFTGEFLKEKTRTEFLNLISSKLS

SEQ ID NO: 11102 - protein, 226 aa, Mucilaginibacter psychrotolerans
  misc_feature (1)..(226): tr|A0A4Y8SB08|A0A4Y8SB08_9SPHI GTP cyclohydrolase 1 OS= Mucilaginibacter psychrotolerans OX=1524096 GN=folE PE= 3 SV=1
MIKNNANNALTLEQVVTELEQDHYNSAFDTPLRPDAFELDDDTKIERITKHFTAIMETLGMDLEDDSLKDTPKRVAKMYVKEIFSGLNPANKPKPTLFKNPFNYNQMLVERNIAVFSNCEHHFVPIVGKAHVAYISNGQVIGLSKLNRIVQYCSQRPQVQERLTMQIANMLKEALGTDDVAVVIDAHHHCVSSRGIRDAGSTTLTAEYSGQFLNAETKNEFLKYIS

SEQ ID NO: 11103 - protein, 227 aa, Mucilaginibacter rubeus
  misc_feature (1)..(227): tr|A0A5C1I3P8|A0A5C1I3P8_9SPHI GTP cyclohydrolase 1 OS= Mucilaginibacter rubeus OX=2027860 GN=folE PE=3 SV=1
MIKNEILNDLTLARVVTDLEQDHYNAAFDTPLRPDAFELDDDTKMELIAKHFTAIMETLGMDMEDDSLKDTPKRVAKMYVKEIFSGLNPANKPKPTLFKNPFNYNQMLVERNIAVFSNCEHHFVPIVGKAHVAYISNGQVIGLSKLNRIVQYCSQRPQVQERLTMQIANMLKEALDSENVAVIIDAHHHCVSSRGIRDAGSTTLTAEYSGQFLNMETKNEFLKYIGS

SEQ ID NO: 11104 - protein, 226 aa, Mucilaginibacter rubeus; identical to SEQ ID NO: 11082
  misc_feature (1)..(226): tr|A0A364WI82|A0A364WI82_9SPHI GTP cyclohydrolase 1 OS= Mucilaginibacter rubeus OX=2027860 GN=folE PE=3 SV=1

SEQ ID NO: 11105 - protein, 214 aa, Mucilaginibacter sp.
  misc_feature (1)..(214): tr|A0A556MUN1|A0A556MUN1_9SPHI GTP cyclohydrolase 1 OS= Mucilaginibacter sp. MAH-19 OX=2597670 GN=folE PE=3 SV= 1
MIYDDDDNIPDRNEDINGYEKVDRYNPQLIENLSGHYKEVLKQLGENPEREGLLKTPERIAKAMLYLTHGYDLNPKEILNSALFKEEYSQMVVVKDIEVYSMCEHHMLPFFGKAHIAYIPNGHVVGLSKIPRVVDAYARRLQVQERLTNEIRDCIQDALQPVGVGVVIECRHLCMCMRGVQKQNSVTTTSAFSGGFYHEKTRAEFLHLISSKLS

SEQ ID NO: 11106 - protein, 212 aa, Mucilaginibacter sp.
  misc_feature (1)..(212): tr|A0A1C2GFP8|A0A1C2GFP8_9SPHI GTP cyclohydrolase 1 OS= Mucilaginibacter sp. PPCGB 2223 OX=1886027 GN=folE PE=3 SV=1
MSNHDHHHLAGEELDGYVKIDRYNPDLISSISSHYQEILKHVGEDPQREGLLKTPERVAKALLYLTHGYDLNPTEILNSAMFTEDYSQMVVVKDIEIYSMCEHHMLPFFGKAHIAYIPNGHVVGLSKIPRVVDAFARRLQVQERLTNEIRDCIQGTLKPLGVAVVMECRHLCMSMRGVQKQNSVTTTSAFTGEFLKDKTRAEFLHLISSKLS

SEQ ID NO: 11107 - protein, 212 aa, Mucilaginibacter yixingensis
  misc_feature (1)..(212): tr|A0A2T5JEE2|A0A2T5JEE2_9SPHI GTP cyclohydrolase 1 OS= Mucilaginibacter yixingensis OX=1295612 GN=folE PE=3 SV =1
MNNQGPFNDDDEDIDGYVKIDRYNPELIKSISGHYEHILKALGEDPSREGILKTPERVAKALLYLTHGYDQDAKAVLTSAMFKEDYSQMVVVKDIEVYSMCEHHMLPFFGKAHVAYIPNGHVVGLSKIPRVVDIFARRLQVQERLTNDIRDSIQETLNPIGVGVVIECRHLCMCMRGVQKQNSVTTTSAFTGAFLAEKTRTEFLNLISSRLS

SEQ ID NO: 11108 - protein, 189 aa, Mucinivorans hirudinis
  misc_feature (1)..(189): tr|A0A060R884|A0A060R884_9BACT GTP cyclohydrolase 1 OS= Mucinivorans hirudinis OX=1433126 GN=folE PE=3 SV=1
MDKQEQIAAHYKAILELLGEDSEREGLLKTPERVARAMEFMTKGYAEEPIEILNSARFREEYKQMVLVKDIEIYSLCEHHLLPFYGRAHVAYIPNGYITGLSKIARVVECFARRLQVQERMTVQIRDSIQQALNPLGVAVVVEAAHMCMQIRGVQKQNSATTTSAFTGVFLKEQKTREEFMHLIANRLR

SEQ ID NO: 11109 - protein, 257 aa, Mucispirillum schaedleri
  misc_feature (1)..(257): tr|V2QFS3|V2QFS3_9BACT GTP cyclohydrolase FolE2 OS=Muci spirillum schaedleri ASF457 OX=1379858 GN=folE2 PE=3 SV =1
MLEDIQNSKDTRNIDINQVGIKDIIYPISLKDRNKGIQNTIAKITMSVMLPHQYKGTHMSRFVEILNKYKDNIDIHNVGSILQDMRERLSSDSSFISLSFPYFMEKTAPVSKMTSLMDYNCEFSGSCSEKGLDFVLKVKVPVQSLCPCSKEISEYGAHNQRSIASISVRFNKTVWIEDLIEIAESSASSSIYSLLKREDEKYITEYAYDNPAFVEDIVRNITEKLMNDSRIIWFEVECENMESIHNHNAWARIERWK

SEQ ID NO: 11110 - protein, 191 aa, Mumia flava
  misc_feature (1)..(191): tr|A0A0B2BVQ6|A0A0B2BVQ6_9ACTN GTP cyclohydrolase 1 OS= Mumia flava OX=1348852 GN=folE PE=3 SV=1
MALGEFDAVRAEAAVRELLAAIGDDPERDGLRDTPARVARAYREIFAGMRQDPDEALSRTFAVDHDEMILVKDIELWSMCEHHLVPFTGVAHVGYIPATDGRVVGLSKLARLVDVYARRPQVQERLTTQIADALSNALNPVGVIVQLEAEHLCMTMRGVRKPGAKTITSAVRGQLRDPATRAEAMALIKGQ

SEQ ID NO: 11111 - protein, 196 aa, Mumia sp.
  misc_feature (1)..(196): tr|A0A5C4MG28|A0A5C4MG28_9ACTN GTP cyclohydrolase 1 OS= Mumia sp. 527 OX=2585212 GN=folE PE=3 SV=1
MAHSAGVLPQFDTPRAEAAVRELLAAIGEDPDRDGLRDTPERVARAYKEIFAGMRRDPKEALSRTFQVDHDEMILVKDIELWSMCEHHLVPFTGVAHVGYIPAQDGRVVGLSKLARLVDVYARRPQVQERLTTQIADALTETLNPLGAIVQIEAEHLCMTMRGVRKPGAKTVTSAVRGQLRDPATRAEAMSLITGR

SEQ ID NO: 11112 - protein, 218 aa, Muribacter muris
  misc_feature (1)..(218): tr|A0A0J5P7E1|A0A0J5P7E1_9PAST GTP cyclohydrolase 1 OS= Muribacter muris OX=67855 GN=folE PE=3 SV=1
MSDISPEARSVRDALITKGIETPIINHQKDKDSRRAEIQQHMRAVLELLGLDLRDDSLEETPHRLAKMFVDEIFSGLDYQTFPKITKIKNQMKVSEMVLVDDITLTSTCEHHFVTIDGKVAVAYYPKNWVIGLSKINRVVQFFAQRPQVQERFTEQILTAFQTILETEDVAVYVKATHFCVKCRGVKDTNSQTITSAYGGIFLQDRDTRKEFLTLINK

SEQ ID NO: 11113 - protein, 190 aa, Muribaculaceae bacterium
  misc_feature (1)..(190): tr|A0A4S4G4L3|A0A4S4G4L3_9BACT GTP cyclohydrolase 1 OS= Muribaculaceae bacterium OX=2498093 GN=folE PE=3 SV=1
MTPEETIEELSRHYRAIIELIGEDASREGLVKTPMRAAKALYYATSGYREDAKALMREAVFEHCGSQIVMVKDIEFYSFCEHHILPFFGKVSVGYIPDGEIIGLSKLARVVNVFARRLQVQERLTKEICKAVSESISTKGVMVVCEAEHLCMKMRGVEKQDSSTVTTDYIGAFEKDSSLRHEFYQLLASK

SEQ ID NO: 11114 - protein, 194 aa, Muribaculaceae bacterium
  misc_feature (1)..(194): tr|A0A3N2N7P6|A0A3N2N7P6_9BACT GTP cyclohydrolase 1 OS= Muribaculaceae bacterium Isolate-114 (HZI) OX=2486475 G N=folE PE=3 SV=1
MGRIENHKEDLVNQIAEHYSAILKLVGEDPEREGLRKTPVRAAKAILDITSGYRSEPLTIARQAIFEHAGSQMVIVKDVEFYSMCEHHILPFFGRVSIGYIPKGSMIGLSKLARIVDSFARRLQVQERLTSQICNLLDEAMPTDGVIVCCTGEHLCMKMRGVEKQDSATTTFDYSGRFAEEPTLREEFMRLLNC

SEQ ID NO: 11115 - protein, 197 aa, Muribaculum intestinale
  misc_feature (1)..(197): tr|A0A1B1S8P2|A0A1B1S8P2_9BACT GTP cyclohydrolase 1 OS= Muribaculum intestinale OX=1796646 GN=folE PE=3 SV=1
MNTTQKAMQNQDIVIEELARHYRAIIELIGENPDREGLRKTPLRAAKALYYATQGYRQDASAVMKQAVFEYAGSRMIIVRDIEFYSFCEHHILPFFGKISVGYIPDGNMIGLSKLARVVNVYARRLQVQERLTAEVTKVISNTLGAKGVIVVCRAEHLCMKMRGVEKQDSSTTTIDYDGVFAEDTTLRQEFLSLIQN

SEQ ID NO: 11116 - protein, 190 aa, Muribaculum intestinale
  misc_feature (1)..(190): tr|A0A4S2G3D2|A0A4S2G3D2_9BACT GTP cyclohydrolase 1 OS= Muribaculum intestinale OX=1796646 GN=folE PE=3 SV=1
MQNQDIVIEELARHYRAIIELIGENPDREGLRKTPLRAAKALYYATQGYRQDASAVMKQAVFEYAGSRMIIVRDIEFYSFCEHHILPFFGKISVGYIPDGNMIGLSKLARVVNVYARRLQVQERLTAEVTKVISNTLGAKGVIVVCRAEHLCMKMRGVEKQDSSTTTIDYDGVFAEDTTLRQEFLSLIQN

SEQ ID NO: 11117 - protein, 191 aa, Muribaculum sp.
  misc_feature (1)..(191): tr|A0A4P7W571|A0A4P7W571_9BACT GTP cyclohydrolase 1 OS= Muribaculum sp. H5 OX=2530393 GN=folE PE=3 SV=1
MRELSEETIKEIAGHYEAIIRLLGEDITREGLLKTPMRAAKAMAYVTRGYRQDADEIINEAIFTHEGSKMVLVKDIEFYSLCEHHILPFFGKVSIGYIPNGKTIGLSKLARLVDFYARRLQVQERLTAQICNLIMEKLNAKGVIVVCTGDHLCMKMRGVEKQNSATTTIETSGIFDESPALRDEFFKALAH

SEQ ID NO: 11118 - protein, 190 aa, Muribaculum sp.
  misc_feature (1)..(190): tr|A0A4S2AYF3|A0A4S2AYF3_9BACT GTP cyclohydrolase 1 OS= Muribaculum sp. NM65_B17 OX=2516961 GN=folE PE=3 SV=1
MDKEQVISALAEHYRAIIELIGENPDREGLVKTPVRAAKALYYATQGYRESADEVMRSAIFDYSGSQIIIVKDIEFYSFCEHHILPFFGKVSIGYLPNGNMIGLSKLARVVNIYARRLQVQERFTAEVCREVYDTLSAHGVMVVCNAEHLCMKMRGVEKQDSSTTTMEYMGRFAEDASLRAEFLSLLKSM

SEQ ID NO: 11119 - protein, 226 aa, Muricauda antarctica
  misc_feature (1)..(226): tr|A0A1M6RIZ7|A0A1M6RIZ7_9FLAO GTP cyclohydrolase 1 OS= Muricauda antarctica OX=1055723 GN=folE PE=3 SV=1
MKLEQALEEQYEERGNDHVGSSSDTPMRKDAFVLSDEEKIERIQKNVREIMLTLGLDLDDDSLKGTPKRVAKMYVKEIFGGLHPDRRPTSSTFDNKYKYGEMLVEKNIVVYSTCEHHLLPIVGRAHIAYISNGTVVGLSKMNRIVDYYAKRPQVQERLNIQIVKEMQKVLGTEDVACVIDAKHLCVNSRGIRDIESSTVTAEYGGKFKDEAVRREFLDYINLDTEF

SEQ ID NO: 11120 - protein, 217 aa, Muricauda antarctica
  misc_feature (1)..(217): tr|A0A1M6X6Q9|A0A1M6X6Q9_9FLAO GTP cyclohydrolase 1 OS= Muricauda antarctica OX=1055723 GN=folE PE=3 SV=1
MKDSKRNQTGVGTMAGVNGASCNGETCQHQRNKDRMTEIAHHFGRIMEVLGLDLDDPSLKDTPARVAKMFLNEAFIGLDEAQFPEVSFFDNTYNFDEMVVVNDISLYSYCEHHFVPFFGKVNVAYFPNKKVIGLSKINRIVDFIGRKPQVQEKLTREIAETLSALLDTEHVAVYVEANHLCVASRGIKDHNSHTKTGSYLGKFKNEWTKKEFMSTFQ

SEQ ID NO: 11121 - protein, 256 aa, Muricauda lutaonensis
  misc_feature (1)..(256): tr|A0A0D5YR12|A0A0D5YR12_9FLAO GTP cyclohydrolase 1 OS= Muricauda lutaonensis OX=516051 GN=folE PE=3 SV=1
MLNNNLCCQTIEMRCHSPINVYLCFLCIGNMKVREPLEEQYDNLGDDHLGSSEETPLRKDAFLLDDDEKIERIEKNIREIMLTLGLDLDDDSLNGTPKRVAKMYVKEIFAGLHPKRRPKSSTFDNKYKYGEMLVEKNITVYSTCEHHLLPIVGKAHIAYISNGTVVGLSKMNRIVDYFAKRPQVQERMNIQIVKELQKVLGTEDVACVIDAKHLCVNSRGIRDVDSSTVTAEYGGKFKEEGVRREFLDYINLETEF

SEQ ID NO: 11122 - protein, 199 aa, Muricauda lutaonensis
  misc_feature (1)..(199): tr|A0A0D5YWF3|A0A0D5YWF3_9FLAO GTP cyclohydrolase 1 OS= Muricauda lutaonensis OX=516051 GN=folE PE=3 SV=1
MAPYQNLEEYNIKITNEVKERFSKIIDEIGEDVNREGLVKTPERAAKAMLFLTQGYRQDAAAILKSAMFKESYNEMVIVKDIEIYSLCEHHMLPFFGKAHIAYIPNGHIVGLSKLPRIVDVFARRLQVQERLTEQILDCINDTLKPQGVAVVIEAAHMCMMMRGVQKQNSVTTTSGFRGSFKNEETRNEFLKLISSDLS

SEQ ID NO: 11123 - protein, 226 aa, Muricauda lutimaris
  misc_feature (1)..(226): tr|A0A3A1N4P8|A0A3A1N4P8_9FLAO GTP cyclohydrolase 1 OS= Muricauda lutimaris OX=475082 GN=folE PE=3 SV=1
MKLEQALEEQHEERGNDHVGSSTDTPMREDAFVLSDEEKIERIQKSVREIMLTLGLDLDDDSLKGTPKRVAKMYVQEIFGGLHPDRKPKSSTFDNKYKYGEMLVEKNIVVYSTCEHHLLPIVGRAHIAYISNGTVVGLSKMNRVVDYFAKRPQVQERLNIQIVKELQKVLGTEDVACVIDAKHLCVNSRGIRDIDSSTVTAEYGGKFKDEATRREFLDYINLDTEF

SEQ ID NO: 11124 - protein, 199 aa, Muricauda lutimaris
  misc_feature (1)..(199): tr|A0A3A1N3Z9|A0A3A1N3Z9_9FLAO GTP cyclohydrolase 1 OS= Muricauda lutimaris OX=475082 GN=folE PE=3 SV=1
MAPYRNLEEYNIEITNEVKDHFSKIVDDIGEDVTREGLLKTPERAAKAMLFLTQGYKQDAEEILKGAMFEESYDDMVIIKDIELYSLCEHHMLPFFGKAHVAYIPNGHIVGLSKIPRVVDVFARRLQVQERLTHDILECINRTLKPKGVAVVIEASHMCMMMRGVQKQNSVTTTSGFRGQFEKIETRNEFLKLISADLS

SEQ ID NO: 11125 - protein, 199 aa, Muricauda olearia
  misc_feature (1)..(199): tr|A0A444VKH4|A0A444VKH4_9FLAO GTP cyclohydrolase 1 OS= Muricauda olearia OX=552546 GN=folE PE=3 SV=1
MAPYRNLEEYNIEITNEVKDHFAKIMGDIGEDISRDGLVKTPERAAKAMLFLTQGYKQDATEILKSAMFAESYDDMVIIKDIEVYSLCEHHMLPFFGKAHIAYIPNGHIVGLSKIPRVVDVFARRLQVQERLTHDILECINTTLKPKGVAVVIEAAHMCMMMRGVQKQNSVTTTSGFRGQFEKQETRNEFLKLISSDLS

SEQ ID NO: 11126 - protein, 226 aa, Muricauda olearia
  misc_feature (1)..(226): tr|A0A444VRF8|A0A444VRF8_9FLAO GTP cyclohydrolase 1 OS= Muricauda olearia OX=552546 GN=folE PE=3 SV=1
MKIEQALEEQYEDRGNDHVGSSTETPMREDAFVLSDEEKIERIQKSVREIMLTLGLDLDDDSLAGTPKRVAKMYVKEIFGGLHPKRKPESSTFENKYKYGEMLVEKNIVLYSTCEHHLLPIVGRAHIAYISNGTVVGLSKMNRIVDYYAKRPQVQERLNIQIVKEMQRVLGTEDVACVIDAKHLCVNSRGIRDIESSTVTSEYGGKFKDEAVRREFLDYINLDTDF

SEQ ID NO: 11127 - protein, 221 aa, Muricauda pacifica
  misc_feature (1)..(221): tr|A0A2T0MIR1|A0A2T0MIR1_9FLAO GTP cyclohydrolase 1 OS= Muricauda pacifica OX=1080225 GN=folE PE=3 SV=1
MDKSQIELLGDNHIATSVKTPMRADAFDRSDDEKIENIQSHFYKIMEELGLDLTDESLSGTPYRFAKMYVKELFYGLNPNNKPKISTFPNTYGYQRMLVEQDITIDSSCEHHFLPIVGKAHVAYIPKDKVVGLSKINRLVDYYSHRPQVQERLCLQILTDLQETLETEDVIVMVHAKHLCVSSRGIKDKESFTTTLEYGGKFKDDKLRQEFYGLLENNFKE

SEQ ID NO: 11128 - protein, 234 aa, Muricauda pacifica
  misc_feature (1)..(234): tr|A0A2T0MC20|A0A2T0MC20_9FLAO GTP cyclohydrolase 1 OS= Muricauda pacifica OX=1080225 GN=folE PE=3 SV=1
MKDQDLLLEDYLESTDLLNSYTHDEIGDDHLYTGVKTPMKPDAFELSDDEKKEQIADLFGQIMDVMGLDLTDDSLKGTPMRVAKMYIDEIYSGLNPANKPKVALFDNKYQYNQMLVEKDITFYSNCEHHFVPIIGRAHVAYISSGKVIGLSKLNRIVQYFAKRPQVQERLTNQIALELQAILGTEDVAVIIDAKHLCVSSRGIKDDTSATVTSFYGGKFNTPEKIQELYNYINN

SEQ ID NO: 11129 - protein, 215 aa, Muricauda ruestringensis
  misc_feature (1)..(215): tr|G2PQP5|G2PQP5_MURRD GTP cyclohydrolase 1 OS=Muricaud a ruestringensis (strain DSM 13258 / CIP 107369 / LMG 1 9739 / B1) OX=886377 GN=folE PE=3 SV=1
MKPADQSRTSTVTQVNGTLCNGENGQRLKKNDKIAEIAHHFGRIMEVLGLDLDDPSLKDTPARVAKMFVNEAFVGLDETQFPEVSFFDNTYNFDEMVVVNDISLYSYCEHHFVPFFGKVNVAYFPNKKVIGLSKINRIVDFIGRKPQVQEKLTREIAETLSVLLDTEHVAVYVEANHLCVASRGIKDHNSHTKTGSYLGKFKNEWTKKEFVSTFQ

SEQ ID NO: 11130 - protein, 199 aa, Muricauda ruestringensis
  misc_feature (1)..(199): tr|G2PKN6|G2PKN6_MURRD GTP cyclohydrolase 1 OS=Muricaud a ruestringensis (strain DSM 13258 / CIP 107369 / LMG 1 9739 / B1) OX=886377 GN=folE PE=3 SV=1
MAPYRNLEEYNIEITNEVKEHFSKIVEDIGEDVTREGLLKTPERAAKAMLFLTQGYKQNAEEILKGAMFAEDYDDMVIIKDIELYSLCEHHMLPFFGKAHVAYIPNGHIVGLSKIPRIVDVFARRLQVQERLTHDILECINKTLKPKGVAVVIEAAHMCMMMRGVQKQNSVTTTSGFRGQFEKIETRNEFLKLISSDLS

SEQ ID NO: 11131 - protein, 226 aa, Muricauda sp.
  misc_feature (1)..(226): tr|A0A418NA88|A0A418NA88_9FLAO GTP cyclohydrolase 1 OS= Muricauda sp. NH166 OX=2306997 GN=folE PE=3 SV=1
MKLERALEEQYEERGNDHVGSSTETPMREDAFVLSDEEKIERIQKSVREIMLTLGLDLDDDSLKGTPKRVAKMYVKEIFGGLHPDRRPTSSTFENKYKYGEMLVEKNIVLYSTCEHHLLPIVGRAHIAYISNGTVVGLSKMNRIVDYYAKRPQVQERLNIQIVKEMQKVLGTEDVACVIDAKHLCVNSRGIRDIDSSTVTAEYGGKFKDEAVRREFLDYINLETEF

SEQ ID NO: 11132 - protein, 199 aa, Muricauda sp.
  misc_feature (1)..(199): tr|A0A2E3VMW0|A0A2E3VMW0_9FLAO GTP cyclohydrolase 1 OS= Muricauda sp. OX=192149 GN=folE PE=3 SV=1
MAPYRNLEEYNIEITNEVKDHFSKIMDDIGEDVTREGLIKTPERAAKAMLFLTQGYKQDAEKILKGAMFAEEYDDMVIIKDIELYSLCEHHMLPFFGKAHVAYIPNGHIVGLSKIPRVIDVFARRLQVQERLTHDILECINKTLKPKGVAVVIEASHMCMMMRGVQKQNSVTTTSGFRGQFEKIETRNEFLKLISADLS

SEQ ID NO: 11133 - protein, 226 aa, Muricauda taeanensis; identical to SEQ ID NO: 11119
  misc_feature (1)..(226): tr|A0A3A1NYP0|A0A3A1NYP0_9FLAO GTP cyclohydrolase 1 OS= Muricauda taeanensis OX=1005926 GN=folE PE=3 SV=1

SEQ ID NO: 11134 - protein, 199 aa, Muricauda taeanensis
  misc_feature (1)..(199): tr|A0A3A1NP59|A0A3A1NP59_9FLAO GTP cyclohydrolase 1 OS= Muricauda taeanensis OX=1005926 GN=folE PE=3 SV=1
MAPYRYLEEYSIEITNEVKEHFSKIMDDLGEDVTREGLLKTPERAAKAMLFLTQGYKQDATEILKGAMFAEKYDDMVIIKDIEVYSLCEHHMLPFFGKAHVAYIPNGHIVGLSKIPRVVDVFARRLQVQERLTHDILECINSTLKPKGVAVVIEASHMCMMMRGVQKQNSVTTTSGFRGQFEKIETRNEFLKLISANLS

SEQ ID NO: 11135 - protein, 199 aa, Muricauda zhangzhouensis
  misc_feature (1)..(199): tr|A0A1H2SQR5|A0A1H2SQR5_9FLAO GTP cyclohydrolase 1 OS= Muricauda zhangzhouensis OX=1073328 GN=folE PE=3 SV=1
MAPYRQLEEYNMEITNEVKEHFANIMNDIGEDVEREGLIKTPERAAKAMLYLTQGYKQNAEEILRGAMFAESYDDMVIIKDIELYSLCEHHMLPFFGKAHVAYIPNGHIVGLSKIPRVVDVFARRLQVQERLTHDILECINNTLKPKGVAVVIEAAHMCMMMRGVQKQNSVTTTSGFRGQFEKIETRNEFLKLISADLS

SEQ ID NO: 11136 - protein, 226 aa, Muricauda zhangzhouensis
  misc_feature (1)..(226): tr|A0A1H2QIM9|A0A1H2QIM9_9FLAO GTP cyclohydrolase 1 OS= Muricauda zhangzhouensis OX=1073328 GN=folE PE=3 SV=1
MKLEQALEEQYEERGNDHVGSSTETPMRKDAFVLSDDEKIERIQKSVREIMLTLGLDLDDDSLNGTPKRVAKMFVKEIFGGLHPDRKPNSSTFSNKYKYGEMLVEKNIVLYSTCEHHLLPIVGRAHIAYISNGTVVGLSKMNRVVDYYAKRPQVQERLNIQIVKELQEVLGTEDVACVIDAKHLCVNSRGIRDIESSTVTAEYGGKFKDEAVRREFLDYINLDTEF

SEQ ID NO: 11137 - protein, 184 aa, Muricomes intestini
  misc_feature (1)..(184): tr|A0A4R3K8H4|A0A4R3K8H4_9FIRM GTP cyclohydrolase 1 OS= Muricomes intestini OX=1796634 GN=folE PE=3 SV=1
MIDQGKVKQAVRLLLEGIGEDSGREGLKDTPERIARMYEEIYGGMEESAEEHLKKTFHVDNNEMVVEKNITFYSICEHHLLPFYGKAHIAYIPDGKVVGLSKLARTVEMFARRLQLQEQLTAQIADALMESLNPKGVCVMLEAEHMCMTMRGIKKPGSQTVTVVKRGGFSNNPELINLFFQMIK

SEQ ID NO: 11138 - protein, 226 aa, Muriicola sp.
  misc_feature (1)..(226): tr|A0A411EB40|A0A411EB40_9FLAO GTP cyclohydrolase 1 OS= Muriicola sp. MMS17-SY002 OX=2507538 GN=folE PE=3 SV=1
MKIKSSLEDHFESVGEDHISSAEDTPIRPDAFVLSDEEKIERIEDSVRDIMLTLGLDLDDDSLNGTPRRVAKMYVQEVFSGLHPKRKPKASTFKNKYKYGEMLVEKNITVYSTCEHHMLPIVGKAHIAYISAGTVVGLSKMNRIVDYFAKRPQVQERMNIQIVRELQKVLGTEDVACVIDAKHLCVNSRGIRDVDSSTVTAEYGGRFKDEAVRKEFLEYINLDTTF

SEQ ID NO: 11139 - protein, 199 aa, Muriicola sp.
  misc_feature (1)..(199): tr|A0A411EDB6|A0A411EDB6_9FLAO GTP cyclohydrolase 1 OS= Muriicola sp. MMS17-SY002 OX=2507538 GN=folE PE=3 SV=1
MAPYQNLEEYNLSITNEVKERYEKIIDEIGEDVKREGLAKTPERAAKAMLFLTQGYKQDAVKILKSAMFAEEYDEMVIIKDIEVYSLCEHHMLPFYGKAHIAYIPNGHIVGLSKIPRVVDVFARRLQVQERLTHDILECINKTLQPKGVAVVIEASHMCMMMRGVQKQNSVTTTSGFRGQFEKIETRNEFLKLISSRLS

SEQ ID NO: 11140 - protein, 198 aa, Murinocardiopsis flavida
  misc_feature (1)..(198): tr|A0A2P8D110|A0A2P8D110_9ACTN GTP cyclohydrolase 1 OS= Murinocardiopsis flavida OX=645275 GN=folE PE=3 SV=1
MSGSRAEPGAGVDLARVEKAVREILSAIGEDPDRDGLRETPARVARAYSEQFAGLGQDPRDVLTTVFEAGHEEMVLVKDIELYSTCEHHLVPFYGVAHVGYIPNAKGQITGLSKFARLVDLYARRPQVQERLTTQIADAVMDHLEPRGVIVVIEAEHLCMTMRGVRKPGAKTVTSAVRGDFRDRDRTRAEAMSLILGH

SEQ ID NO: 11141 - protein, 207 aa, Myceligenerans xiligouense
  misc_feature (1)..(207): tr|A0A3N4YG24|A0A3N4YG24_9MICO GTP cyclohydrolase 1 OS= Myceligenerans xiligouense OX=253184 GN=folE PE=3 SV=1
MSSGPISPAATVGRPAADVPPYDAARVEAAVRELLIAVGEDPDREGLQDTPARVARAYAETFSGLRQEPEDVLTTTFDLGHEEMVLVKDIEVYSTCEHHLVPFHGVAHVGYIPNEDGCITGLSKLARLVEVYARRPQVQERMTSQIADSLMKILKPRGVIVVVECEHLCMSMRGVRKPGSRTVTSAVRGQMRDAVTRAEAMSLIIGK

SEQ ID NO: 11142 - protein, 199 aa, Mycetocola lacteus
  misc_feature (1)..(199): tr|A0A3L7AUS7|A0A3L7AUS7_9MICO GTP cyclohydrolase 1 OS= Mycetocola lacteus OX=76637 GN=folE PE=3 SV=1
MAVDRERVMRAVSELIEAIGEDPARPGMQDTPRRVAEAYAEYFSGIGVDARALLNNTVPLDSAADEHETSGPGEIVLLRDIEFRSICEHHLLPFIGVAHVAYLPGEKVVGLGALPRVVDTLASRPQLQERLTDEIADTLFTGLDARGALVVMEAKHGCVSARGPRQVASSTVTMASRGELSDPLRRGEVFALIGGTHER

SEQ ID NO: 11143 - protein, 189 aa, Mycetocola manganoxydans
  misc_feature (1)..(189): tr|A0A3L6ZNQ9|A0A3L6ZNQ9_9MICO GTP cyclohydrolase 1 OS= Mycetocola manganoxydans OX=699879 GN=folE PE=3 SV=1
MDPERIRRAVTELLLAIGENPARAGLARTPQRVAEAYGEFFHGLAEDPLDLLADAIPLGSDGPGEAVVVRDITFRSICEHHLLPFLGVAHIAYLPDAKVVGLGALPKVVDVLASRPQIQERLTEEIADAIHRGLGARGVLVVLDAVHGCVTTRGSRQEQSSTLTVASRGELSEPARRAEIISLLARPGS

SEQ ID NO: 11144 - protein, 192 aa, Mycetocola miduiensis
  misc_feature (1)..(192): tr|A0A1I5B966|A0A1I5B966_9MICO GTP cyclohydrolase 1 OS= Mycetocola miduiensis OX=995034 GN=folE PE=3 SV=1
MDSKRIQRAVTELLLAIGEDPARAGLVRTPERVAEAYEEFFGGLTEDPLALLADAVPVDDNGPGEAVVVRDITFRSICEHHLLPFLGVAHVAYLPRNRIVGLGRIPRVVDTLASRPQLQERLTEEIANTLEHGLDARGVLVVLDAVHGCVSARGSRQEAASTLTLASRGELADPVRRAEIISLLGRGGPVDD

SEQ ID NO: 11145 - protein, 210 aa, Mycetocola reblochoni
  misc_feature (1)..(210): tr|A0A3L6ZM44|A0A3L6ZM44_9MICO GTP cyclohydrolase 1 OS= Mycetocola reblochoni OX=331618 GN=folE PE=3 SV=1
MAVDAERVRAAVAELIAAIGEDPSRPGLEDTPRRVAESYAEFFAGVDQDPAQALANTIAVGEHDGATVVMRDIALRSVCEHHLLPFLGTAHIAYAPAERVVGLGSLPRVVGVLAARPQVQERLTEQIAAAIDEALDPRGVLVVIEAAHGCVTMRGPRQIGSTTVTLAARGSFAAPAEQAAALALIGRPTPATGSGLGPHPLTVPVAETGP

SEQ ID NO: 11146 - protein, 210 aa, Mycetocola reblochoni; identical to SEQ ID NO: 11145
  misc_feature (1)..(210): tr|A0A1R4I7J4|A0A1R4I7J4_9MICO GTP cyclohydrolase 1 OS= Mycetocola reblochoni REB411 OX=1255698 GN=folE PE=3 SV =1

SEQ ID NO: 11147 - protein, 196 aa, Mycetocola sp.
  misc_feature (1)..(196): tr|A0A2U1TG15|A0A2U1TG15_9MICO GTP cyclohydrolase 1 OS= Mycetocola sp. 622 OX=2173166 GN=folE PE=3 SV=1
MAGVDKPRVEAAVIELLAAIGEDAQRPGLERTPARVAEAYSEFFSGIGEDPLEHLRESVPVGDDGNGEVVLLRDIAFRSICEHHLLPFLGKAHVAYLPGERVVGLGRLPLVVDTLASRPQLQERLTEQIADALERGLEARGVLVVLDAVHGCVAARGVRQANSSTVTVASRGALAEPARRAELFALIGHGAADAHA

SEQ ID NO: 11148 - protein, 199 aa, Mycetocola tolaasinivorans
  misc_feature (1)..(199): tr|A0A3L6ZV24|A0A3L6ZV24_9MICO GTP cyclohydrolase 1 OS= Mycetocola tolaasinivorans OX=76635 GN=folE PE=3 SV=1
MAVDRERIMRAVSELIEAIGEDPARPGMLDTPRRVAEAYAEYFSGIGVDARALLSNTVPLDSADGEHETSGPGEIVLLRDIEFRSICEHHLLPFIGVAHVAYLPGETVVGLGALPRVVDTLASRPQLQERLTDEIADTLFTGLAARGALVVMEAKHGCVSARGPRQVASSTVTMASRGELSDPLRRGEVFALIGGTHDR

SEQ ID NO: 11149 - protein, 197 aa, Mycetocola zhadangensis
  misc_feature (1)..(197): tr|A0A3L7J7W5|A0A3L7J7W5_9MICO GTP cyclohydrolase 1 OS= Mycetocola zhadangensis OX=1164595 GN=folE PE=3 SV=1
MAGVDKPRIEAAVVELLAAIGEDSSREGLARTPARVAEAYAEFFAGLDENPLEHLRESVPVGDAGNGEVVLLRDIAFRSICEHHLLPFLGTAHVAYLPSDRVVGLGRLPLVVNTLASRPQLQERLTEQIADALEQGLRARGVLVVLDAVHGCVTARGPRQAASSTVTVASRGELTEPARRAEIFAMIGSSTTDDSRA

SEQ ID NO: 11150 - protein, 282 aa, Mycoavidus cysteinexigens
  misc_feature (1)..(282): tr|A0A2Z6EUS3|A0A2Z6EUS3_9BURK GTP cyclohydrolase FolE2 OS=Mycoavidus cysteinexigens OX=1553431 GN=folE2 PE=3 SV=1
MNGLNSVAVMSDVQGSIDTRQIPIQRVGIKAVRHPLTVRSATGASQPTVGLFDLDVYLPSNQKGTHMSRFIALLGESTADAVTGDAIVLDLAGFQVMLMKMLTKLESTAGRIEVTFPYFMNKTAPISGVKSLLDYEVSFIGEAQGERSRIFMKVLVPVMSLCPCSKEISLYGAHNQRSHLIIKAELQDDQLPVEDLIRIAEESASCELWGLLKRPDEKFVTERAYDNPKFVEDLVRDVASRLNQDDRVVAYVLEAENFESIHNHSAYALVEHDKRQSGLKSV

SEQ ID NO: 11151 - protein, 202 aa, Mycobacteriaceae bacterium
  misc_feature (1)..(202): tr|A0A1A0Q3F2|A0A1A0Q3F2_9MYCO GTP cyclohydrolase 1 OS= Mycobacteriaceae bacterium 1482268.1 OX=1834080 GN=folE PE=3 SV=1
MALPHSDFATTTERLFDQPRAEAAIRELLIAVGEDPDRHGLEATPARVARAYKEMFAGLYTDPDSVLDTTFDEQHDELVLVKQIPLYSTCEHHLVAFHGVAHVGYIPGEDGRVTGLSKIARLVDLYAKRPQVQERLTVQVADAVMRKLEPRGVIVVLECEHLCMSMRGVRKPGALTTTSAVRGQFKTDKASRSEALELILRK

SEQ ID NO: 11152 - protein, 202 aa, Mycobacterium ahvazicum
  misc_feature (1)..(202): tr|A0A2K4YHQ7|A0A2K4YHQ7_9MYCO GTP cyclohydrolase 1 OS= Mycobacterium ahvazicum OX=1964395 GN=folE PE=3 SV=1
MVLPDTRAALDRVRAFDQARAEAAVRELLYAIGEDPDRDGLRDTPARVARAYREIFSGLYTDPSDVLNTMFDEDHDELVIVKEIPLYSTCEHHLVSFHGVAHVGYIPGQDGRVTGLSKIARLVDLYAKRPQVQERLTSQIADALVNRLDPRGVIVVVEAEHLCMAMRGVRKPGAITTTSAVRGQFKTDAASRAEALDLILRK

SEQ ID NO: 11153 - protein, 210 aa, Mycobacterium alsense
  misc_feature (1)..(210): tr|A0A1A2HVS0|A0A1A2HVS0_9MYCO GTP cyclohydrolase 1 OS= Mycobacterium alsense OX=324058 GN=folE PE=3 SV=1
MALPDLGADLGPDTHIASARIRNFDQQRAEAAIRELLYAIGEDPDRNGLQDTPARVARAYREMFAGLYTDPDTVLNTMFDEDHDEMVIVKEIPLYSTCEHHLVSFHGAAHVGYIPGHDGRVTGLSKIARLVDLYAKRPQVQERLTSQIADALVSKLDPRGVIVVVEAEHLCMAMRGVRKPGAVTTTSAVRGLFKTSAASRAEALDLILRK

SEQ ID NO: 11154 - protein, 207 aa, Mycobacterium alsense
  misc_feature (1)..(207): tr|A0A1A3D6G6|A0A1A3D6G6_9MYCO GTP cyclohydrolase 1 OS= Mycobacterium alsense OX=324058 GN=folE PE=3 SV=1
MTTLDHRNHRATPPSLLQLADRPVRDLAAAEQAAGAFLQALGIPLNGESMRATPARMARAYAELFTAEPFEATTFPNDERYDELVVARDIPLRSVCEHHLLPFTGTACVGYLPGERILGLSKLARVVEHFACRPQVQERLTKQVADWLTDHLQPRAVGVVIRAEHTCMTLRGVNATGSTSVTSTLLGTLRTDPGSRHEFFALAGFGR

SEQ ID NO: 11155 - protein, 202 aa, Mycobacterium angelicum
  misc_feature (1)..(202): tr|A0A1W9Z917|A0A1W9Z917_9MYCO GTP cyclohydrolase 1 OS= Mycobacterium angelicum OX=470074 GN=folE PE=3 SV=1
MTQLDSRDAAHQVRVFDQPRAEAAIRELLVAVGEDPDRSGLRDTPARVARAYREIFAGLYTDPATVLSTMFDEDHNELVIVKEIPMYSTCEHHLVSFHGVAHVGYIPNEDGRVTGLSKIARLVDLYAKRPQVQERLTSQIADALVERLDPRGVIVVVEAEHLCMAMRGVRKPGAITTTSAVRGQFKHDAASRAEALDLILRK

SEQ ID NO: 11156 - protein, 204 aa, Mycobacterium aquaticum
  misc_feature (1)..(204): tr|A0A1X0ATB8|A0A1X0ATB8_9MYCO GTP cyclohydrolase 1 OS= Mycobacterium aquaticum OX=1927124 GN=folE PE=3 SV=1
MTKPATRSPSTNNNHRVFDQPRAEAAVRELLIAIGEDPDRQGLVDTPARVARAYKELMAGLYTDPDAVLNTTFDEQHDELVLVKEIPMYSTCEHHLVSFHGVAHVGYIPGEDGRVTGLSKIARLVDLYSKRPQVQERLTAQIADALMRKLSPRGTIVVIEAEHLCMAMRGVRKPGAITTTSAVRGQFKTDKASRAEALELILRK

SEQ ID NO: 11157 - protein, 204 aa, Mycobacterium arosiense
  misc_feature (1)..(204): tr|A0A1W9Z5V1|A0A1W9Z5V1_9MYCO GTP cyclohydrolase 1 OS= Mycobacterium arosiense ATCC BAA-1401 = DSM 45069 OX=12 65311 GN=folE PE=3 SV=1
MALRGLGPNTAMPATGAFDQERAEAAVRELLHAIGEDPDRDGLRETPARVARAYREMFAGLYTDPDSVLNTMFDEDHDELVLVKEIPLYSTCEHHLVAFHGVAHVGYIPGNDGRVTGLSKIARLVDLYSKRPQVQERLTSQIADALVKKLNPRGVIVVVEAEHLCMAMRGVRKPGAVTTTSAVRGLFKTNAASRAEALDLILRK

SEQ ID NO: 11158 - protein, 200 aa, Mycobacterium asiaticum
  misc_feature (1)..(200): tr|A0A1A3NI01|A0A1A3NI01_MYCAS GTP cyclohydrolase 1 OS= Mycobacterium asiaticum OX=1790 GN=folE PE=3 SV=1
MTQLDSRDTFVRPFDQDRAEAAVRELLIALGEDPDRNGLRDTPARVVRAYREIFAGLYTDPASVLDTMFDEDHNELVLIKEIPMYSTCEHHLVSFHGVAHVGYIPGEDGRVTGLSKIARLVDLYAKRPQVQERLTSQIADALVRRLNPRGVMVVIEAEHLCMAMRGVRKPGAITTTSAVRGQFKSDPASRAEALDLILRK

SEQ ID NO: 11159 - protein, 200 aa, Mycobacterium asiaticum
  misc_feature (1)..(200): tr|A0A1A3CVM8|A0A1A3CVM8_MYCAS GTP cyclohydrolase 1 OS= Mycobacterium asiaticum OX=1790 GN=folE PE=3 SV=1
MTQLDARGTRVHVFDQQRAEAAVRELLIALGEDPDREGLRETPARVARAYKEVFAGLYTDPASVLNTMFDEDHNELVIVKEIPLYSTCEHHLVSFHGVAHVGYIPGADGRVTGLSKIARLVDLFAKRPQVQERLTSQIADALVQRLNPLGVIVVIEAEHLCMAMRGVRKPGAVTTTSAVRGQFKTDAASRAEALDLILRK

SEQ ID NO: 11160 - protein, 202 aa, Mycobacterium attenuatum
  misc_feature (1)..(202): tr|A0A498QCT3|A0A498QCT3_9MYCO GTP cyclohydrolase 1 OS= Mycobacterium attenuatum OX=2341086 GN=folE_2 PE=3 SV=1
MTQLDSRPKPSIPGVFDQSRAEAAVRELLYAVGENPEREGLRETPARVARAYREIFAGLYTDPDAVLNAMFDEDHDELVLVKQIPLYSTCEHHLVSFHGVAHVGYIPGTDGRVTGLSKIARLVDLYAKRPQVQERLTSQIADALVKKLEPRGVIVVVEAEHLCMAMRGVRKPGAVTTTSAVRGAFKTNAASRAEALDLILRK

SEQ ID NO: 11161 - protein, 240 aa, Mycobacterium attenuatum
  misc_feature (1)..(240): tr|A0A498Q6Y4|A0A498Q6Y4_9MYCO GTP cyclohydrolase 1 OS= Mycobacterium attenuatum OX=2341086 GN=folE_1 PE=4 SV=1
MTAIPSTPRQARYQIPTLWAMTNDEVVPGDAVYPKDIGDQSADSPPWWDTNADVELQRAVQQLLAALGVDEGEHTADTPARVARAWREMLWGYHEVPEDHLDTDFPAPDDPGLIVMHGISFASTCAHHLLPFSGTATIAYRPHPGQRIVGLSKLARLVHGYAARLQVQERIGHQATAGMMRKLNPSGAMCVITARHDCMRLRGVREPAAEATTESRKGMWLDREIALVHRLHASGRPGAG

SEQ ID NO: 11162 - protein, 204 aa, Mycobacterium avium
  misc_feature (1)..(204): sp|A0QA85|GCH1_MYCA1 GTP cyclohydrolase 1 OS=Mycobacter ium avium (strain 104) OX=243243 GN=folE PE=3 SV=1
MAGNGSAPDTATHQVRQFDQARAEAAVRELLFAIGENPDRHGLAETPARVARAYREMFAGLYTDPDSVLNTMFDEEHDELVLVKEIPLYSTCEHHLVSFHGVAHVGYIPGNDGRVTGLSKIARLVDLYAKRPQVQERLTSQIADALVKKLNPRGVIVVVEAEHLCMAMRGVRKPGAVTTTSAVRGLFKTNAASRAEALDLILRK

SEQ ID NO: 11163 - protein, 137 aa, Mycobacterium avium
  misc_feature (1)..(137): tr|X8B1W8|X8B1W8_MYCAV GTP cyclohydrolase 1 OS=Mycobact erium avium subsp. avium 2285 (R) OX=1299330 GN=folE PE =3 SV=1
MLNTMFDEEHDELVLVKEIPLYSTCEHHLVSFHGVAHVGYIPGNDGRVTGLSKIARLVDLYAKRPQVQERLTSQIADALVKKLNPRGVIVVVEAEHLCMAMRGVRKPGAVTTTSAVRGLFKTNAASRAEALDLILRK

SEQ ID NO: 11164 - protein, 199 aa, Mycobacterium basiliense
  misc_feature (1)..(199): tr|A0A3S4BLL6|A0A3S4BLL6_9MYCO GTP cyclohydrolase 1 OS= Mycobacterium basiliense OX=2094119 GN=folE_1 PE=3 SV=1
MTQLDSATEPRVFDQERVEAAVRELLSAIGEDPNRGGLRDTPARVARAYREIFAGLYTDPDTVLSAMFDEEHDELVLVKEIPLYSTCEHHLVSFHGVAHVGYIPGRDGRVTGLSKIARLVDLYAKRPQVQERLTSQIADALVKRLEPRGVIVVVEAEHLCMAMRGVRKPGAITTTSAVRGQFKTDAASRAEALDLILRK

SEQ ID NO: 11165 - protein, 169 aa, Mycobacterium basiliense
  misc_feature (1)..(169): tr|A0A3S4DWV1|A0A3S4DWV1_9MYCO GTP cyclohydrolase 1 OS= Mycobacterium basiliense OX=2094119 GN=folE_2 PE=4 SV=1
MHHIRALHGTGYPRADASQPPSSITTGAATRALGDAELVVVRPVPFRSLCADHLLPFQGVVHIGHIDSENHLSTPELTRIVAACTRSIQTQQPMTIRIGLWLHHQLVPRGVGVLVKANYACAAAARGDAHLGRPATTMAFCGSMRHSADERQEFVALARRERHKGAAGQ

SEQ ID NO: 11166 - protein, 204 aa, Mycobacterium bohemicum
  misc_feature (1)..(204): tr|A0A1X1QYS7|A0A1X1QYS7_9MYCO GTP cyclohydrolase 1 OS= Mycobacterium bohemicum OX=56425 GN=folE PE=3 SV=1
MALPSWEPDTATPPARVFDQDRAEAAVRELLEAIGEDPNRDGLRETPARVARAYREVFAGLYTDPDAVLNTMFDEQHDELVLVKEIPLYSTCEHHLVSFHGVAHVGYIPGTDGRVTGLSKIARLVDLYAKRPQVQERLTSQIADALVKKLDPRGVIVVIEAEHLCMAMRGVRKPGATTTTSAVRGQFKTSAASRAEALDLILRK

SEQ ID NO: 11167 - protein, 204 aa, Mycobacterium bohemicum; identical to SEQ ID NO: 11166
  misc_feature (1)..(204): tr|A0A0U0W827|A0A0U0W827_9MYCO GTP cyclohydrolase 1 OS= Mycobacterium bohemicum DSM 44277 OX=1236609 GN=folE PE =3 SV=1

SEQ ID NO: 11168 - protein, 204 aa, Mycobacterium bouchedurhonense; identical to SEQ ID NO: 11162
  misc_feature (1)..(204): tr|A0A1X0BJ77|A0A1X0BJ77_9MYCO GTP cyclohydrolase 1 OS= Mycobacterium bouchedurhonense OX=701041 GN=folE PE=3 S V=1

SEQ ID NO: 11169 - protein, 202 aa, Mycobacterium bovis
  misc_feature (1)..(202): sp|P64208|GCH1_MYCBO GTP cyclohydrolase 1 OS=Mycobacter ium bovis (strain ATCC BAA-935 / AF2122/97) OX=233413 G N=folE PE=3 SV=1
MSQLDSRSASARIRVFDQQRAEAAVRELLYAIGEDPDRDGLVATPSRVARSYREMFAGLYTDPDSVLNTMFDEDHDELVLVKEIPMYSTCEHHLVAFHGVAHVGYIPGDDGRVTGLSKIARLVDLYAKRPQVQERLTSQIADALMKKLDPRGVIVVIEAEHLCMAMRGVRKPGSVTTTSAVRGLFKTNAASRAEALDLILRK

SEQ ID NO: 11170 - protein, 202 aa, Mycobacterium bovis; identical to SEQ ID NO: 11169
  misc_feature (1)..(202): tr|A0A4U7MMT5|A0A4U7MMT5_MYCBI GTP cyclohydrolase 1 OS= Mycobacterium bovis OX=1765 GN=folE PE=3 SV=1

SEQ ID NO: 11171 - protein, 202 aa, Mycobacterium branderi
  misc_feature (1)..(202): tr|A0A1X0BBH9|A0A1X0BBH9_9MYCO GTP cyclohydrolase 1 OS= Mycobacterium branderi OX=43348 GN=folE PE=3 SV=1
MAQPNSRVANLRRPVFDQARAEAAIRELLYAIGEDPNRHGLEDTPARVARTYREMFAGLYTDPDTVLDTTFDEQHDELVMIKEIPLYSTCEHHLVSFHGVAHVGYIPGDDGRVTGLSKIARLVDLYAKRPQVQERLTAQIADALMRKLDPRGVIVVIEAEHLCMAMRGVRKPGAVTTTSAVRGLFKTSQASRAEALELILRK

SEQ ID NO: 11172 - protein, 202 aa, Mycobacterium canettii; identical to SEQ ID NO: 11169
  misc_feature (1)..(202): tr|G0TJP2|G0TJP2_MYCCP GTP cyclohydrolase 1 OS=Mycobact erium canettii (strain CIPT 140010059) OX=1048245 GN=fo lE PE=3 SV=1

SEQ ID NO: 11173 - protein, 195 aa, Mycobacterium celatum
  misc_feature (1)..(195): tr|A0A1X1RWZ6|A0A1X1RWZ6_MYCCE GTP cyclohydrolase 1 OS= Mycobacterium celatum OX=28045 GN=folE PE=3 SV=1
MTNLRKPVFDQARAEAAIRELLYAIGEDPDRHGLEDTPARVARTYREMFAGLYTDPDSVLNTTFDEQHDELVLIKDIPLYSTCEHHLVAFHGVAHVGYIPGDDGRVTGLSKIARLVDLYAKRPQVQERLTAQIADALMRKLDPRGVIVVIEAEHLCMSMRGVRKPGAVTTTSAVRGQFKSNQASRAEALELILRK

SEQ ID NO: 11174 - protein, 204 aa, Mycobacterium chimaera
  misc_feature (1)..(204): tr|A0A249BXI4|A0A249BXI4_9MYCO GTP cyclohydrolase 1 OS= Mycobacterium chimaera OX=222805 GN=folE PE=3 SV=1
MALSGLEPDTAMSKMRVFDQDRAEAAVRELLCAIGEDPDRHGLRETPARVARAYREMFAGLYTDPDSVLNTMFDEDHDELVLVKEIPLYSTCEHHLVSFHGVAHVGYIPGNDGRVTGLSKIARLVDLYAKRPQVQERLTSQIADALVKKLNPRGVIVVVEAEHLCMAMRGVRKPGATTTTSAVRGIFKTNAASRAEALDLILRK

SEQ ID NO: 11175 - protein, 200 aa, Mycobacterium chimaera
  misc_feature (1)..(200): tr|A0A220Y5P0|A0A220Y5P0_9MYCO GTP cyclohydrolase 1 OS= Mycobacterium chimaera OX=222805 GN=folE PE=3 SV=1
MALPDTAMSKMRVFDQDRAEAAVRELLCAIGEDPDRHGLRETPARVARAYREMFAGLYTDPDSVLNTMFDEDHDELVLVKEIPLYSTCEHHLVSFHGVAHVGYIPGNDGRVTGLSKIARLVDLYAKRPQVQERLTSQIADALVKKLNPRGVIVVVEAEHLCMAMRGVRKPGATTTTSAVRGIFKTNAASRAEALDLILRK

SEQ ID NO: 11176 - protein, 202 aa, Mycobacterium chubuense
  misc_feature (1)..(202): tr|I4BQ65|I4BQ65_MYCCN GTP cyclohydrolase 1 OS=Mycobact erium chubuense (strain NBB4) OX=710421 GN=folE PE=3 SV =1
MTRSHNHSATITTPEFDQARAEAAVRELLIAVGEDPDRHGLVDTPARVARAYREIFAGLYTDPDDVLNTTFDEQHDELVLVKDIPMYSTCEHHLVSFHGVAHVGYIPGHDGRVTGLSKLARVVDLYAKRPQVQERLTGQIADALMRKLDPRGAIVVIEAEHLCMAMRGIRKPGATTTTSAVRGQFKTDKASRAEALDLILRK

SEQ ID NO: 11177 - protein, 200 aa, Mycobacterium colombiense
  misc_feature (1)..(200): tr|J4TI31|J4TI31_9MYCO GTP cyclohydrolase 1 OS=Mycobact erium colombiense CECT 3035 OX=1041522 GN=folE PE=3 SV= 1
MALPHTAMPTTRAFDQERAEAAVRELLHAIGEDPDRDGLRETPARVARAYREMFAGLYTDPDSVLNTMFDEDHDELVLVKEIPLYSTCEHHLVAFHGVAHVGYIPGNDGRVTGLSKIARLVDLYSKRPQVQERLTSQIADALVKKLNPRGVIVVVEAEHLCMAMRGVRKPGAVTTTSAVRGLFKTNAASRAEALDLILRK

SEQ ID NO: 11178 - protein, 200 aa, Mycobacterium colombiense
  misc_feature (1)..(200): tr|A0A1A2S3F5|A0A1A2S3F5_9MYCO GTP cyclohydrolase 1 OS= Mycobacterium colombiense OX=339268 GN=folE PE=3 SV=1
MALPDTAMPRTRVFDQERAEAAVRELLHAIGEDPDRNGLRETPARVARAYREMFAGLYTDPDSVLNTMFDEDHDELVLVKEIPLYSTCEHHLVAFHGVAHVGYIPGNDGRVTGLSKIARLVDLYSKRPQVQERLTSQIADALVKKLNPRGVIVVVEAEHLCMAMRGVRKPGAVTTTSAVRGLFKTNAASRAEALDLILRK

SEQ ID NO: 11179 - protein, 206 aa, Mycobacterium conspicuum
  misc_feature (1)..(206): tr|A0A1X1SYI4|A0A1X1SYI4_9MYCO GTP cyclohydrolase 1 OS= Mycobacterium conspicuum OX=44010 GN=folE PE=3 SV=1
MALPDLEADSRTPTARVHTFNQERAEAAIRELLFAIGEDPDRDGLRDTPARVARAYREMFAGLYTEPESVLNTMFDEDHDEMVIVKEIPLYSTCEHHLVSFHGVAHVGYIPGKDGRVTGLSKIARLVDLYAKRPQVQERLTSQIADALVSKLDPRGVIVVVEAEHLCMAMRGVRKPGAVTTTSAVRGQFKTSAASRAEALDLILRK

SEQ ID NO: 11180 - protein, 202 aa, Mycobacterium decipiens
  misc_feature (1)..(202): tr|A0A1X2LUH1|A0A1X2LUH1_9MYCO GTP cyclohydrolase 1 OS= Mycobacterium decipiens OX=1430326 GN=folE PE=3 SV=1
MSQLDSRTSSRRVCVFDQERAEAAVRELLYAIGEDPDRDGLVATPTRVARAYREMFAGLYTDPDSVLNTMFDEDHDELVLVKEIPMYSTCEHHLVAFHGVAHVGYIPGDDGRVTGLSKIARLVDLYAKRPQVQERLTSQVADALMQKLDPQGVIVVIEAEHLCMAMRGVRKPGSVTTTSAVRGLFKTNAASRAEALDLILRK

SEQ ID NO: 11181 - protein, 204 aa, Mycobacterium dioxanotrophicus
  misc_feature (1)..(204): tr|A0A1Y0BYA6|A0A1Y0BYA6_9MYCO GTP cyclohydrolase 1 OS= Mycobacterium dioxanotrophicus OX=482462 GN=folE PE=3 S V=1
MTKPATRSPSTNNNHRVFDQPRAEAAVRELLIAIGEDPDRQGLVDTPARVARAYKELMAGLYTDPDAVLNTTFDEQHDELVLVKAIPMYSTCEHHLVSFHGVAHVGYIPGEDGRVTGLSKIARLVDLYSKRPQVQERLTAQIADALMRKLAPRGTIVVIEAEHLCMAMRGVRKPGAITTTSAVRGQFKTDKASRAEALELILRK

SEQ ID NO: 11182 - protein, 202 aa, Mycobacterium eburneum
  misc_feature (1)..(202): tr|A0A4R5Q1F6|A0A4R5Q1F6_9MYCO GTP cyclohydrolase 1 OS= Mycobacterium eburneum OX=2035343 GN=folE PE=3 SV=1
MAQPNSRPIAPAGPTFDQDRAEAAIRELLCAVGEDPDRQGLAETPARVARAYREMFGGLYTDPDAVLETTFDEQHDELVLVKEIPLYSVCEHHLVAFHGVAHVGYIPGDDGRVTGLSKIARVVDLYAKRPQVQERLTGQIADAMTRKLDPRGVIVVIEAEHLCMSMRGVRKPGAVTTTSAVRGLFKTDARSRSEALDLILRK

SEQ ID NO: 11183 - protein, 204 aa, Mycobacterium europaeum
  misc_feature (1)..(204): tr|A0A0U1CZ04|A0A0U1CZ04_9MYCO GTP cyclohydrolase 1 OS= Mycobacterium europaeum OX=761804 GN=folE PE=3 SV=1
MALTGLGPDTATSPTRMFDQARAEAAVRELLLAIGEDPDRHGLRDTPARVARAYQEMFAGLYTDPDSVLNTMFDEEHDELVLVKEIPLYSTCEHHLVSFHGVAHVGYIPGADGRVTGLSKIARLVDLYAKRPQVQERLTSQIADALMNKLNPRGVIVVIEAEHLCMAMRGVRKPGAVTTTSAVRGLFKTNAASRAEALDLILRK

SEQ ID NO: 11184 - protein, 202 aa, Mycobacterium florentinum
  misc_feature (1)..(202): tr|A0A1X1U2R3|A0A1X1U2R3_9MYCO GTP cyclohydrolase 1 OS= Mycobacterium florentinum OX=292462 GN=folE PE=3 SV=1
MVLPDTRTASNGARAFDQARAEAAVRELLYAIGEDPEREGLRDTPARVARAYREIFSGLYTDPSDVLNTMFDEEHDELVIVKEIPLYSTCEHHLVSFHGVAHVGYIPGKDGRVTGLSKIARLVDLYAKRPQVQERLTSQIADALVNRLDPRGVIVVVEAEHLCMAMRGVRKPGAITTTSAVRGQFKTDAASRAEALDLILRK

SEQ ID NO: 11185 - protein, 205 aa, Mycobacterium fragae
  misc_feature (1)..(205): tr|A0A1X1UNS0|A0A1X1UNS0_9MYCO GTP cyclohydrolase 1 OS= Mycobacterium fragae OX=1260918 GN=folE PE=3 SV=1
MASTARPNSRTVTLRTPVFDQARAEAAIRELLYAIGEDPDRHGLEDTPARVARTYREMFAGLYTDPDSVLDTTFDEQHDELVMIKDIPLYSTCEHHLVAFHGVAHVGYIPGHDGRVTGLSKIARLVDLYAKRPQVQERLTAQIADALMRKLDPRGVIVVVEAEHLCMSMRGVRKPGAVTTTSAVRGQFKSDSASRAEALELILRK

SEQ ID NO: 11186 - protein, 202 aa, Mycobacterium gastri
  misc_feature (1)..(202): tr|A0A1X1VTP1|A0A1X1VTP1_MYCGS GTP cyclohydrolase 1 OS= Mycobacterium gastri OX=1777 GN=folE PE=3 SV=1
MTQLDSRPTSSHPRAFDQPRAEAAVRELLCAIGEDPDRDGLRDTPARVARAYREIFAGLYTEPETVLNAMFDEDHDELVLVKQIPMYSTCEHHLVSFHGVAHVGYIPGEDGRVTGLSKIARLVDLYAKRPQVQERLTSQIADAMVKRLEPRGVIVVIEAEHLCMAMRGVRKPGAVTTTSAVRGLFKTNAASRAEALDLILHK

SEQ ID NO: 11187 - protein, 202 aa, Mycobacterium goodii
  misc_feature (1)..(202): tr|A0A0K0X3Z8|A0A0K0X3Z8_MYCGD GTP cyclohydrolase 1 OS= Mycobacterium goodii OX=134601 GN=folE PE=3 SV=1
MTQSLRGHHNNVRRVFDQQRAEAAVRELLIAIGEDPEREGLLDTPARVARAYKELMAGLHTDPDAVLNTTFDEGHDELVLVKQIPMYSTCEHHLVSFHGVAHVGYIPGVDGRVTGLSKIARLVDLYSKRPQVQERLTAQIADALMRKLDPRGVIVVIEAEHLCMAMRGVRKPGAVTTTSAVRGQFKTDKASRAEALELILRK

SEQ ID NO: 11188 - protein, 203 aa, Mycobacterium goodii
  misc_feature (1)..(203): tr|A0A2M9FK32|A0A2M9FK32_MYCGD GTP cyclohydrolase 1 OS= Mycobacterium goodii OX=134601 GN=folE PE=3 SV=1
MTQSLRGHHNNAVRRVFDQPRAEAAVRELLIAIGEDPEREGLVDTPARVARAYKELMAGLHTDPDAVLNTTFDEGHDELVLVKQIPMYSTCEHHLVSFHGVAHVGYIPGVDGRVTGLSKIARLVDLYSKRPQVQERLTAQIADAIMRKLDPRGVIVVVEAEHLCMAMRGVRKPGAVTTTSAVRGQFKTDKASRAEALELILRK

SEQ ID NO: 11189 - protein, 200 aa, Mycobacterium gordonae
  misc_feature (1)..(200): tr|A0A1A6BN74|A0A1A6BN74_MYCGO GTP cyclohydrolase 1 OS= Mycobacterium gordonae OX=1778 GN=folE PE=3 SV=1
MTQLESRETGARPFDQERAEAAVRELLIALGEDPDRHGLRDTPARVVRAYREIFAGLYTEPTSVLNAMFDENHDELVLVKGIPMYSTCEHHLVAFHGVAHVGYIPGVDGRVTGLSKIARLVDLYAKRPQVQERLTSQIADALVNKLDPRGVIVVVEAEHLCMAMRGVRKPGATTTTSAVRGQFKTDAASRAEALDLILRK

SEQ ID NO: 11190 - protein, 200 aa, Mycobacterium gordonae
  misc_feature (1)..(200): tr|A0A0Q2UHM4|A0A0Q2UHM4_MYCGO GTP cyclohydrolase 1 OS= Mycobacterium gordonae OX=1778 GN=folE PE=3 SV=1
MTQLESRETGARPFDQARAEAAVRELLIALGEDPDRHGLRDTPARVVRAYREIFAGLYTEPTSVLNAMFDENHDELVLVKGIPMYSTCEHHLVAFHGVAHVGYIPGVDGRVTGLSKIARLVDLYAKRPQVQERLTSQIADALVQKLDPRGVIVVIEAEHLCMAMRGVRKPGATTTTSAVRGQFKSDAASRAEALDLILRK

SEQ ID NO: 11191 - protein, 203 aa, Mycobacterium grossiae
  misc_feature (1)..(203): tr|A0A1E8Q5R3|A0A1E8Q5R3_9MYCO GTP cyclohydrolase 1 OS= Mycobacterium grossiae OX=1552759 GN=folE PE=3 SV=1
MTRSEIDPILRDDIPEFDQERAEAAVRELLIAVGEDPDRHGLIDTPARVARAYKEIFAGLYTDPDDVLNTTFDEQHDELVLVKDIPMYSTCEHHLVSFHGVAHVGYIPGIDGRVTGLSKLARVVDLYAKRPQVQERLTAQIADALMRKLNPRGVIVVIEAEHLCMAMRGIRKPGASTTTSAVRGQFKTDKASRAEALDLILRT

SEQ ID NO: 11192 - protein, 210 aa, Mycobacterium haemophilum
  misc_feature (1)..(210): tr|A0A0I9YJW9|A0A0I9YJW9_9MYCO GTP cyclohydrolase 1 OS= Mycobacterium haemophilum OX=29311 GN=folE PE=3 SV=1
MALPDLGPDLGPESTAAVPRIRVFDQQRAEAAIRELLYAIGEDPDREGLADTPARVARAYREMFSGLYTDPQTVLNTMFDEEHNELVIVKEIPMYSTCEHHLVSFHGVAHVGYIPGVDGRVTGLSKIARLVDLYAKRPQVQERLTSQIADALVSKLDPRGVIVVIEAEHLCMAMRGVRKPGAITTTSAVRGQFKTDAASRAEALDLILRK

SEQ ID NO: 11193 - protein, 202 aa, Mycobacterium heckeshornense
  misc_feature (1)..(202): tr|A0A2G8BFI2|A0A2G8BFI2_9MYCO GTP cyclohydrolase 1 OS= Mycobacterium heckeshornense OX=110505 GN=folE PE=3 SV= 1
MAQPNPRTRTLRMPVFDQARVEAAVRELLYAIGEDPDRHGLEDTPARVARTYREMFAGLYTDPDTVLNTTFDEQHDELVMVKDIPLYSTCEHHLVAFHGVAHVGYIPGDDGRVTGLSKIARLVDLYARRPQVQERLTGQIADALMRKLDPRGVIVVVEAEHLCMAMRGVRKPGAVTTTSAVRGQFKTDAASRAEALELILRK

SEQ ID NO: 11194 - protein, 206 aa, Mycobacterium heidelbergense
  misc_feature (1)..(206): tr|A0A1X0DQ65|A0A1X0DQ65_9MYCO GTP cyclohydrolase 1 OS= Mycobacterium heidelbergense OX=53376 GN=folE PE=3 SV=1
MALPDLGPDTRRAPGRIRVFDQQRAEAAIRELLHAIGEDPDRDGLQDTPARVARAYREMFAGLYTDPDTVLNTMFDEDHDEMVIVKEIPLYSTCEHHLVSFHGVAHVGYIPGKDGRVTGLSKIARLVDLYAKRPQVQERLTSQIADALVKKLDPRGVIVVVEAEHLCMAMRGVRKPGAVTTTSAVRGQFKTSAASRAEALDLILRK

SEQ ID NO: 11195 - protein, 200 aa, Mycobacterium indicus; identical to SEQ ID NO: 11175
  misc_feature (1)..(200): tr|J9W6D0|J9W6D0_MYCIP GTP cyclohydrolase 1 OS=Mycobact erium indicus pranii (strain DSM 45239 / MTCC 9506) OX= 1232724 GN=folE PE=3 SV=1

SEQ ID NO: 11196 - protein, 202 aa, Mycobacterium innocens
  misc_feature (1)..(202): tr|A0A498QI51|A0A498QI51_9MYCO GTP cyclohydrolase 1 OS= Mycobacterium innocens OX=2341083 GN=folE_2 PE=3 SV=1
MTQLDSRPTSSLPRAFDQPRAEAAVRELLYAIGEDPDRSGLRDTPARVARAYKEIFAGLYTDPETVLNAMFDEDHDELVLVKLIPLYSTCEHHLVSFHGVAHVGYIPGEDGRVTGLSKIARLVDLYAKRPQVQERLTSQIADALVKKLEPRGVIVVVEAEHLCMAMRGVRKPGAITTTSAVRGQFKTNAASRAEALDLILRK

SEQ ID NO: 11197 - protein, 244 aa, Mycobacterium innocens
  misc_feature (1)..(244): tr|A0A498Q2L9|A0A498Q2L9_9MYCO GTP cyclohydrolase 1 OS= Mycobacterium innocens OX=2341083 GN=folE_1 PE=4 SV=1
MTAIPSAPRQARHQMPPFCSSGWAMTNDEVAHGAAAYPADIGYQPTDSPAWWDNNADVAVEGAVRQLLSALGVDEGEHTAETPARVARAWREMLWGYNEVPEGHLDTDFPAPDDPGLIVMHGISFASTCAHHLLPFSGTATIAYRPHPGQRIVGLSKLARLVHGYAARLQVQERIGHQATAGMMRKLNPSGAMCVITARHDCMRLRGVREPAAEATTESRKGMWLDREIALVHRLHAGGRSGAC

SEQ ID NO: 11198 - protein, 201 aa, Mycobacterium interjectum
  misc_feature (1)..(201): tr|A0A1X1WHY2|A0A1X1WHY2_9MYCO GTP cyclohydrolase 1 OS= Mycobacterium interjectum OX=33895 GN=folE PE=3 SV=1
MGPDNRHTTPRIRAFDQQRAEAAIRELLYAIGEDPDRNGLQDTPARVARAYREMFAGLYTDPDSVLNTMFDEDHDEMVIVKEIPLYSTCEHHLVSFHGVAHVGYIPGKDGRVTGLSKIARLVDLYAKRPQIQERLTSQIADALVNKLDPRGVIVVVEAEHLCMAMRGVRKPGAVTTTSAVRGMFKTSPASRAEALDLILRK

SEQ ID NO: 11199 - protein, 202 aa, Mycobacterium intermedium
  misc_feature (1)..(202): tr|A0A1E3SEI7|A0A1E3SEI7_9MYCO GTP cyclohydrolase 1 OS= Mycobacterium intermedium OX=28445 GN=folE PE=3 SV=1
MTQLDSRYTSEGMPVFDQVRAEAAVRDLLAAIGEDPDREGLRETPARVARAYREMFAGLYTDPSAVLTTMFDEQHDELVIVKEIPMYSTCEHHLVSFHGVAHVGYIPGSDGRVTGLSKIARLVDLYAKRPQVQERLTSQIADALMDRLDPRGVIVVVEAEHLCMAMRGVRKPGATTTTSAVRGQFKRDAASRAEALDLILRK

SEQ ID NO: 11200 - protein, 200 aa, Mycobacterium intracellulare; identical to SEQ ID NO: 11175
  misc_feature (1)..(200): tr|X8CLU5|X8CLU5_MYCIT GTP cyclohydrolase 1 OS=Mycobact erium intracellulare 1956 OX=1299331 GN=folE PE=3 SV=1

SEQ ID NO: 11201 - protein, 200 aa, Mycobacterium intracellulare; identical to SEQ ID NO: 11175
  misc_feature (1)..(200): tr|A0A1A2R0C2|A0A1A2R0C2_MYCIT GTP cyclohydrolase 1 OS= Mycobacterium intracellulare OX=1767 GN=folE PE=3 SV=1

SEQ ID NO: 11202 - protein, 247 aa, Mycobacterium kansasii
  misc_feature (1)..(247): tr|X7YQN3|X7YQN3_MYCKA GTP cyclohydrolase 1 domain prot ein OS=Mycobacterium kansasii 662 OX=1299326 GN=I545_60 57 PE=4 SV=1
MGGMTAIPSAPRQARYQMPPFCSSGWAMTNDEVAQGAAAYPADIGYQTTDSPAWWDNNADVAVERAVRQLLSALGVDEGEHTAETPARVARAWREMLWGYNEVPEDHLDTDFPAPDDPGLIIMHGISFASTCAHHLLPFSGTATIAYRPHPGQRIVGLSKLARLVHGYAARLQVQENIGHQATAGIMRKLNPSGAMSVITARHDCMRLRGVREPAAEATTESRKGMWPDREIALVHRLHAGGRPGAC

SEQ ID NO: 11203 - protein, 202 aa, Mycobacterium kansasii; identical to SEQ ID NO: 11196
  misc_feature (1)..(202): tr|A0A164GBN1|A0A164GBN1_MYCKA GTP cyclohydrolase 1 OS= Mycobacterium kansasii OX=1768 GN=folE PE=3 SV=1

SEQ ID NO: 11204 - protein, 202 aa, Mycobacterium kubicae
  misc_feature (1)..(202): tr|A0A1X1XHN9|A0A1X1XHN9_9MYCO GTP cyclohydrolase 1 OS= Mycobacterium kubicae OX=120959 GN=folE PE=3 SV=1
MTQVESRDATTRARVFDQPRAEAAVRELLYAIGEDPDRNGLRDTPARVARAYREIFAGLYTDPESVLNAMFDEDHNEMVIVKDIPMFSTCEHHLVSFHGVAHVGYIPNADGRVTGLSKIARLVDLYAKRPQVQERLTSQIADALMKKLEPRGVIVIIEAEHLCMAMRGVRKPGALTTTSAVRGQLQRDSASRAEALDLILRK

SEQ ID NO: 11205 - protein, 205 aa, Mycobacterium kyorinense
  misc_feature (1)..(205): tr|A0A1A2Z2K8|A0A1A2Z2K8_9MYCO GTP cyclohydrolase 1 OS= Mycobacterium kyorinense OX=487514 GN=folE PE=3 SV=1
MAFTAQPSSRIANLHAPKFDQPRAEAAIRELLCAIGEDPDRHGLEDTPARVARSYQEMFAGLYTDPDSVLDTTFDEQHDELVMIKEIPLYSTCEHHLVAFHGVAHVGYIPGSDGRVTGLSKIARLVDLYAKRPQVQERLTAQIADALMRKLDPRGAIVVIEAEHLCMSMRGVRKPGAITTTSAVRGLFKTNQASRAEALELILRK

SEQ ID NO: 11206 - protein, 202 aa, Mycobacterium kyorinense
  misc_feature (1)..(202): tr|A0A1X1YDG1|A0A1X1YDG1_9MYCO GTP cyclohydrolase 1 OS= Mycobacterium kyorinense OX=487514 GN=folE PE=3 SV=1
MAQPNSRIANMRMPVFDQARAEAAIRELLYAIGEDPDRHGLEDTPARVARTYREMFAGLYTDPDSVLNTTFDEQHDELVMVKEIPLYSTCEHHLVSFHGVAHVGYIPGDDGRVTGLSKIARLVDLYAKRPQVQERLTAQIADALMRKLDPRGVIVVIEAEHLCMAMRGVRKPGAVTTTSAVRGLFKTSQASRAEALELILRK

SEQ ID NO: 11207 - protein, 202 aa, Mycobacterium lacus
  misc_feature (1)..(202): tr|A0A1X1YSY4|A0A1X1YSY4_9MYCO GTP cyclohydrolase 1 OS= Mycobacterium lacus OX=169765 GN=folE PE=3 SV=1
MSQLDSREVVPSVRVFDQPRAEAAIRELLLAIGEDPERGGLRETPARVARAYREIFAGLYTDPDTVLNTMFDEEHDELVLVKAIPLYSTCEHHLVSFHGVAHVGYIPGNDGRVTGLSKIARLVDLYAKRPQVQERLTSQIADALVKKLDPRGVIVVIEAEHLCMAMRGVRKPGAITTTSAVRGQFKTNPASRAEALDLILRK

SEQ ID NO: 11208 - protein, 202 aa, Mycobacterium lehmannii
  misc_feature (1)..(202): tr|A0A101A1B6|A0A101A1B6_9MYCO GTP cyclohydrolase 1 OS= Mycobacterium lehmannii OX=2048550 GN=folE PE=3 SV=1
MAQSQHNSVTFSPANFDQPRAEAAVRELLLAVGEDPDRHGLESTPARVARAYKELFAGLYIDPDSVLDTTFDEQHDELVLVKQIPMYSTCEHHLVSFHGVAHVGYIPGEDGRVTGLSKIARLVDLYAKRPQVQERLTGQIADAMMRKLDPRGVIVVVEAEHLCMAMRGVRKPGAVTTTSAVRGQFKVDAASRAEALDLILRK

SEQ ID NO: 11209 - protein, 202 aa, Mycobacterium lentiflavum
  misc_feature (1)..(202): tr|A0A0E4CQS5|A0A0E4CQS5_9MYCO GTP cyclohydrolase 1 OS= Mycobacterium lentiflavum OX=141349 GN=folE PE=3 SV=1
MVLPDTRAALDRVRAFDQARAEAAVRELLYAIGEDPDRDGLRDTPARVARAYREIFSGLYTDPSDVLNTMFDEEHDELVIVKEIPLYSTCEHHLVSFHGVAHVGYIPGQDGRVTGLSKIARLVDLYAKRPQVQERLTSQIADALVNRLGPRGVIVVVEAEHLCMAMRGVRKPGAITTTSAVRGQFKTDAASRAEALDLILRK

SEQ ID NO: 11210 - protein, 205 aa, Mycobacterium leprae
  misc_feature (1)..(205): sp|B8ZU42|GCH1_MYCLB GTP cyclohydrolase 1 OS=Mycobacter ium leprae (strain Br4923) OX=561304 GN=folE PE=3 SV=1
MALLDLGLESTAVPRIRVFDQQRAEAAIRELLYAIGEDPDREGLADTPARVARACRELFSGLYTDPQTVLNTMFDEEHNELVIVKEIPMYSTCEHHLVSFHGVAHIGYLPGADGRVTGLSKIARLVDLYAKRPQVQERLTSQIADALVSKLDPRGVIIVVEAEHLCMAMRGVRKPGAITTTSAVRGQFKTDAASRAEALGLILRK

SEQ ID NO: 11211 - protein, 205 aa, Mycobacterium leprae; identical to SEQ ID NO: 11210
  misc_feature (1)..(205): tr|A0A197SEV6|A0A197SEV6_MYCLR GTP cyclohydrolase 1 OS= Mycobacterium leprae 3125609 OX=1297123 GN=folE PE=3 SV =1

SEQ ID NO: 11212 - protein, 205 aa, Mycobacterium lepraemurium
  misc_feature (1)..(205): tr|A0A250BN56|A0A250BN56_MYCLP GTP cyclohydrolase 1 OS= Mycobacterium lepraemurium OX=64667 GN=folE PE=3 SV=1
MMAGNGSAPDTATHQVRQFDQARAEAAVRELLFAIGEDPDRHGLAETPARVARAYREMFAGLYTDPDSVLNTMFDEEHDELVLVKEIPLYSTCEHHLVSFHGVAHVGYIPGNDGRVTGLSKIARLVDLYAKRPQVQERLTSQIADALVEKLNPRGVIVVVEAEHLCMAMRGVRKPGAVTTTSAVRGLFKTNAASRAEALDLILRK

SEQ ID NO: 11213 - protein, 205 aa, Mycobacterium lepromatosis
  misc_feature (1)..(205): tr|A0A0F4ES41|A0A0F4ES41_9MYCO GTP cyclohydrolase 1 OS= Mycobacterium lepromatosis OX=480418 GN=folE PE=3 SV=1
MALLDLGLEGTVVPPIRVFDQPRAEAAIRELLYAIGEDPDREGLADTPARVARSYRELFSGLYTDPETVLNTMFDEVHNELVIVKEIPMYSTCEHHLVSFHGVAHVGYIPGTDGRVTGLSKIARLVDLYAKRPQVQERLTGQIADALVRKLDPRGVIIVVEAEHLCMAMRGVRKPGAITTTSAVRGQFKTDAASRAEALNLILRK

SEQ ID NO: 11214 - protein, 242 aa, Mycobacterium liflandii
  misc_feature (1)..(242): tr|L7V468|L7V468_MYCL1 GTP cyclohydrolase I FolE_1 OS=M ycobacterium liflandii (strain 128FXT) OX=459424 GN=fol E_1 PE=4 SV=1
MPSAPHQGRYQMPPLRPSAWQMTNDGVAYGAASYHPNSGYPHSGRRPMNSPAWYDNNPDLAVECAVQQLLDALGVDDGEHTAGTPARVARAWREMLWGYHEVPEDQLATDFPAPDDPGLIVMHGISFSSTCAHHLLPFTGTATIAYRPHPGQRIVGLSKLARLVDGYAARLQVQERIGQQAVDGIMRRLNPSGAMCIITARHDCMRLRGVRDPAAEATTEARKGIWSDHEMALIHRLHGGAR

SEQ ID NO: 11215 - protein, 948 aa, Mycobacterium liflandii
  misc_feature (1)..(948): tr|L7VHC7|L7VHC7_MYCL1 Multifunctional fusion protein O S=Mycobacterium liflandii (strain 128FXT) OX=459424 GN= ftsH PE=3 SV=1
MNRKNVIRTVTAVAVVVVLGWSFFYFSDDTRGYKPVDTSVAMSQINADNVKSAQIDDREQQLRLVLKKSSSDTDGSDKVITKYPTGYAVDLFNALTAKNAKVSTVVNQGSILGELLVYVLPLLLLVGLFVMFSRMQGGARMGFGFGKSRAKQLSKDMPKTTFADVAGVDEAVEELYEIKDFLQNPSRYQALGAKIPKGVLLYGPPGTGKTLLARAVAGEAGVPFFTISGSDFVEMFVGVGASRVRDLFEQAKQNSPCIIFVDEIDAVGRQRGAGLGGGHDEREQTLNQLLVEMDGFGDRAGVILIAATNRPDILDPALLRPGRFDRQIPVTNPDLAGRRAVLRVHSKGKPIADGADLDGLAKRTVGMTGADLANVINEAALLTARENGTVITGPALEEAVDRVIGGPRRKGRIISEHEKKITAYHEGGHTLAAWAMPDIDPVYKVTILARGRTGGHAVAVPEEDKGLRTRSEMIAQLVFAMGGRAAEELVFREPTTGAVSDIEQATKVARAMVTEYGMSARLGAVKYGTEHGDPFLGRSMGTQSDYSHEVAREIDEEVRKLIEAAHTEAWEILTEYRDVLDTLAGQLLEKETLHRPELESIFSDVEKRPRLTMFDDFGGRIPSDKPPIKTPGELAIERGEPWPQPMPEPAFKQAIAQATQAARSASEGTGRGPNGSRGADANPGSHPDYGAPAGWRAPGWPPPSERPQPSGYSPDQPSDTDESSEQQDRDVSRSNPRPTADERRVAMTQLDSRTEATTTRAFDQPRAEAAVRELLLAIGEDPDRGGLRDTPARVARAYREIFAGLYTDPDAVLNTMFDEDHDELVLIKEIPLYSTCEHHLVSFHGVAHVGYIPGRDGRVTGLSKIARLVDLYAKRPQVQERLTSQIADALVKRLGPRGVIVVVEAEHLCMAMRGVRKPGAVTTTSAVRGQFKTDAASRAEALDLILRK

SEQ ID NO: 11216 - protein, 204 aa, Mycobacterium malmoense
  misc_feature (1)..(204): tr|A0A1B9DE82|A0A1B9DE82_MYCMA GTP cyclohydrolase 1 OS= Mycobacterium malmoense OX=1780 GN=folE PE=3 SV=1
MALTGLGPDTASPALRVFDQARAEAAVRELLYAIGEDPDRHGLRETPARVARAYQEMFAGLYTDPDSVLNTMFDEEHDELVLVKEIPLYSTCEHHLVSFHGVAHVGYIPGADGRVTGLSKIARLVDLYAKRPQVQERLTSQIADALMNKLNPRGVIVVIEAEHLCMAMRGVRKPGAVTTTSAVRGLFKTNAASRSEALDLILRK

SEQ ID NO: 11217 - protein, 206 aa, Mycobacterium malmoense
  misc_feature (1)..(206): tr|A0A1S2WEL8|A0A1S2WEL8_MYCMA GTP cyclohydrolase 1 OS= Mycobacterium malmoense OX=1780 GN=folE PE=3 SV=1
MALPDLGPDTRNAPGRIRVFDQQRAEAAIRELLFAIGEDPDRDGLQGTPARVARAYREMFAGLYTDPDTVLNTMFDEEHDELVIVKEIPLYSTCEHHLVSFHGVAHVGYIPGTDGRVTGLSKIARLVDLYAKRPQVQERLTSQVADALVKKLDPRGVIVVVEAEHLCMAMRGVRKPGAVTTTSAVRGLLKTNAASRAEALDLILRK

SEQ ID NO: 11218 - protein, 200 aa, Mycobacterium mantenii
  misc_feature (1)..(200): tr|A0A1X0FCS4|A0A1X0FCS4_9MYCO GTP cyclohydrolase 1 OS= Mycobacterium mantenii OX=560555 GN=folE PE=3 SV=1
MALPDTAMTTTRLFDQDRAEAAVRELLHAIGEDPDRDGLRETPARVARAYREMFAGLYTDPDSVLNTMFDEDHDELVLVKEIPLYSTCEHHLVSFHGVAHVGYIPGNDGRVTGLSKIARLVDLYSKRPQVQERLTSQIADALVKKLNPRGVIVVVEAEHLCMAMRGVRKPGAVTTTSAVRGLFKTNAASRAEALDLILHK

SEQ ID NO: 11219 - protein, 200 aa, Mycobacterium mantenii
  misc_feature (1)..(200): tr|A0A1A2TNG7|A0A1A2TNG7_9MYCO GTP cyclohydrolase 1 OS= Mycobacterium mantenii OX=560555 GN=folE PE=3 SV=1
MALPDTAMTTTRLFDQDRAEAAVRELLHAIGEDPDRDGLRETPARVARAYREMFAGLYTDPDSVLNTMFDEDHDELVLVKEIPLYSTCEHHLVSFHGVAHVGYIPGNDGRVTGLSKIARLVDLYSKRPQVQERLTSQIADALVKKLNPRGVIVVVEAEHLCMAMRGVRKPGAVTTTSAVRGLFKTNAASRAEALDLILRK

SEQ ID NO: 11220 - protein, 202 aa, Mycobacterium marinum
  misc_feature (1)..(202): sp|B2HJ53|GCH1_MYCMM GTP cyclohydrolase 1 OS=Mycobacter ium marinum (strain ATCC BAA-535 / M) OX=216594 GN=folE PE=3 SV=1
MTQLDSRTEATTTRAFDQPRAEAAVRELLLAIGEDPDRGGLRDTPARVARAYREIFAGLYTDPDAVLNTMFDEDHDELVLIKEIPLYSTCEHHLVSFHGVAHVGYIPGRDGRVTGLSKIARLVDLYAKRPQVQERLTSQIADALVKRLGPRGVIVVVEAEHLCMAMRGVRKPGAVTTTSAVRGQFKTDAASRAEALDLILRK

SEQ ID NO: 11221 - protein, 202 aa, Mycobacterium marinum
  misc_feature (1)..(202): tr|A0A2Z5YPB3|A0A2Z5YPB3_MYCMR GTP cyclohydrolase 1 OS= Mycobacterium marinum OX=1781 GN=folE PE=3 SV=1
MTQLDSRTEATTTRAFDQPRAEAAVRELLLAIGEDPDRGGLRDTPARVARAYREIFAGLYTDPDAVLNTMFDEDHDELVLIKQIPLYSTCEHHLVSFHGVAHVGYIPGRDGRVTGLSKIARLVDLYAKRPQVQERLTSQIADALVKRLGPRGVIVVVEAEHLCMAMRGVRKPGAVTTTSAVRGQFKTDAASRAEALDLILRK

SEQ ID NO: 11222 - protein, 200 aa, Mycobacterium marseillense
  misc_feature (1)..(200): tr|A0A1A3JCN8|A0A1A3JCN8_9MYCO GTP cyclohydrolase 1 OS= Mycobacterium marseillense OX=701042 GN=folE PE=3 SV=1
MALPDTAMSQMRVFDQDRAEAAVRELLCAIGEDPDRHGLRETPARVARAYREMFAGLYTDPDSVLNTMFDEDHDELVLVKEIPLYSTCEHHLVSFHGVAHVGYIPGNDGRVTGLSKIARLVDLYAKRPQVQERLTSQIADALVKKLNPRGVIVVVEAEHLCMAMRGVRKPGATTTTSAVRGIFKTNAASRAEALDLILRK

SEQ ID NO: 11223 - protein, 202 aa, Mycobacterium montefiorense
  misc_feature (1)..(202): tr|A0A2R5H5L9|A0A2R5H5L9_9MYCO GTP cyclohydrolase 1 OS= Mycobacterium montefiorense OX=154654 GN=folE PE=3 SV=1
MALPDTRIELDRVRAFDQPRAEAAVRELLYAIGEDPDRDGLRDTPARVARAYREIFSGLYTDPDAVLNTMFDEEHDELVIVKEIPLYSTCEHHLVSFHGVAHVGYIPGEEGRVTGLSKIARLVDLYAKRPQVQERLTSQIADALVNRLAPRGVIVVVEAEHLCMAMRGVRKPGATTTTSAVRGQFKTDAASRAEALDLILRK

SEQ ID NO: 11224 - protein, 204 aa, Mycobacterium nebraskense
  misc_feature (1)..(204): tr|A0A0F5MWP8|A0A0F5MWP8_9MYCO GTP cyclohydrolase 1 OS= Mycobacterium nebraskense OX=244292 GN=folE PE=3 SV=1
MALTGLGPDTATPPIRVFDQARAEAAVRELLYAIGEDPDRHGLRETPARVARAYQEMFAGLYTDPDSVLNTMFDEEHDELVLVKEIPLYSTCEHHLVSFHGVAHVGYIPGADGRVTGLSKIARLVDLYAKRPQVQERLTSQIADALMNKLNPRGVIVVIEAEHLCMAMRGVRKPGATTTTSAVRGQFKSNAASRAEALDLILRK

SEQ ID NO: 11225 - protein, 192 aa, Mycobacterium nonchromogenicum
  misc_feature (1)..(192): tr|A0A1X1Z9Z0|A0A1X1Z9Z0_MYCNO GTP cyclohydrolase 1 OS= Mycobacterium nonchromogenicum OX=1782 GN=folE PE=3 SV= 1
MTSAIFDQARAEAAVRELLIAVGEDPDRAGLLDTPARVARAYREMFAGLYTDPDAVLETTFDEEHEELVIVKEIPLYSTCEHHLVAFHGVAHVGYIPGYDGRITGLSKLARVVDLYAKRPQVQERLTAQVADALMRKLNPRGVIVVVEAEHLCMAMRGVRKPGAITTTSAVRGQFKTDSTSRAEALELIRHR

SEQ ID NO: 11226 - protein, 202 aa, Mycobacterium noviomagense
  misc_feature (1)..(202): tr|A0A1X0GH94|A0A1X0GH94_9MYCO GTP cyclohydrolase 1 OS= Mycobacterium noviomagense OX=459858 GN=folE PE=3 SV=1
MAQPNPRTRALRMAVFDQARAEAAIRELLCAIGEDPDRHGLEDTPARVARTYREMFAGLYTDPDSVLNTTFDEQHDELVMVKEIPLYSTCEHHLVAFHGVAHVGYIPGDDGRVTGLSKIARLVDLYARRPQVQERLTGQIADALMRKLDPRGVIVVVEAEHLCMAMRGVRKPGAITTTSAVRGQFKTDAASRAEALELILRK

SEQ ID NO: 11227 - protein, 202 aa, Mycobacterium orygis; identical to SEQ ID NO: 11169
  misc_feature (1)..(202): tr|A0A501P7D7|A0A501P7D7_9MYCO GTP cyclohydrolase 1 OS= Mycobacterium orygis OX=1305738 GN=folE PE=3 SV=1

SEQ ID NO: 11228 - protein, 206 aa, Mycobacterium palustre
  misc_feature (1)..(206): tr|A0A1X1ZFT7|A0A1X1ZFT7_9MYCO GTP cyclohydrolase 1 OS= Mycobacterium palustre OX=153971 GN=folE PE=3 SV=1
MALPDLGPDTRHATPRIRVFDQQRAENAIRELLFAIGEDPDRDGLQDTPARVARAYREMFAGLYTEPDSVLNTMFDEDHDEMVIVKEIPLYSTCEHHLVSFHGVAHVGYIPGVDGRVTGLSKIARLVDLYARRPQVQERLTSQIADALVNKLDPRGVIVVVEAEHLCMAMRGVRKPGAITTTSAVRGMFKTSPASRAEALDLILRK

SEQ ID NO: 11229 - protein, 210 aa, Mycobacterium paraense
  misc_feature (1)..(210): tr|A0A1X2ARZ1|A0A1X2ARZ1_9MYCO GTP cyclohydrolase 1 OS= Mycobacterium paraense OX=767916 GN=folE PE=3 SV=1
MALPDLEPDLGPDTRHTTPRIRSFDQQRAEAAIRELLYAIGEDPDRNGLQDTPARVARAYREMFAGLYTDPDTVLNTMFDEDHDEMVIVKEIPLYSTCEHHLVSFHGVAHVGYIPGKDGRVTGLSKIARLVDLYAKRPQVQERLTSQIADALVSKLDPRGVIVVVEAEHLCMAMRGVRKPGAVTTTSAVRGMFKTSPASRAEALDLILRK

SEQ ID NO: 11230 - protein, 204 aa, Mycobacterium paraffinicum
  misc_feature (1)..(204): tr|A0A1Q4I125|A0A1Q4I125_9MYCO GTP cyclohydrolase 1 OS= Mycobacterium paraffinicum OX=53378 GN=folE PE=3 SV=1
MAVTGFGPDTASASTRVFDQDRAEAAVRELLYAIGEDPDRHGLRETPARVARAYREMFAGLYTDPDSVLNTMFDEEHDELVLVKEIPLYSTCEHHLVSFHGVAHVGYIPGADGRVTGLSKIARLVDLYAKRPQVQERLTSQIADALMKKLNPRGVIVVIEAEHLCMAMRGVRKPGATTTTSAVRGQFKSNAASRAEALDLILRK

SEQ ID NO: 11231 - protein, 200 aa, Mycobacterium paragordonae
  misc_feature (1)..(200): tr|A0A386UCY9|A0A386UCY9_9MYCO GTP cyclohydrolase 1 OS= Mycobacterium paragordonae OX=1389713 GN=folE PE=3 SV=1
MTQLESRETGARPFDQARAEAAVRELLIALGEDPDRHGLRDTPARVVRAYKEIFAGLYTEPTSVLNAMFDENHDELVLVKGIPMYSTCEHHLVAFHGVAHVGYIPGVDGRVTGLSKIARLVDLYAKRPQVQERLTSQIADALVQKLDPRGVIVVIEAEHLCMAMRGVRKPGATTTTSAVRGQFKSDAASRAEALDLILRK

SEQ ID NO: 11232 - protein, 200 aa, Mycobacterium paraintracellulare; identical to SEQ ID NO: 11175
  misc_feature (1)..(200): tr|A0A1X2KYL2|A0A1X2KYL2_9MYCO GTP cyclohydrolase 1 OS= Mycobacterium paraintracellulare OX=1138383 GN=folE PE= 3 SV=1

SEQ ID NO: 11233 - protein, 204 aa, Mycobacterium parascrofulaceum; identical to SEQ ID NO: 11216
  misc_feature (1)..(204): tr|D5P8P7|D5P8P7_9MYCO GTP cyclohydrolase 1 OS=Mycobact erium parascrofulaceum ATCC BAA-614 OX=525368 GN=folE P E=3 SV=1

SEQ ID NO: 11234 - protein, 204 aa, Mycobacterium paraseoulense
  misc_feature (1)..(204): tr|A0A1X0I2L0|A0A1X0I2L0_9MYCO GTP cyclohydrolase 1 OS= Mycobacterium paraseoulense OX=590652 GN=folE PE=3 SV=1
MSVTGVGPDTASPSIRVFDQARAEAAVRELLHAIGEDPDRHGLRDTPARVARAYREIFAGLYTDPDSVLNTMFDEDHDELVLVKEIPLYSTCEHHLVSFHGVAHVGYIPGNDGRVTGLSKIARLVDLYAKRPQVQERLTSQIADALMNKLDPRGVIVVIEAEHLCMAMRGVRKPGAVTTTSAVRGQFKTNAASRAEALDLILRK

SEQ ID NO: 11235 - protein, 200 aa, Mycobacterium parmense
  misc_feature (1)..(200): tr|A0A1X2BH13|A0A1X2BH13_9MYCO GTP cyclohydrolase 1 OS= Mycobacterium parmense OX=185642 GN=folE PE=3 SV=1
MALPDIVDPETRVFDQPRAEAAVRELLYAIGEDPDRHGLKETPARVARAYREIFAGLYTDPAAVLNTMFDEEHDELVLVKEIPLYSTCEHHLVSFHGVAHVGYIPGSDGRVTGLSKIARLVDLYAKRPQVQERLTSQIADALVSKLDPRGVIVVIEAEHLCMAMRGVRKPGAVTTTSAVRGQFKTSAASRAEALDLILRK

SEQ ID NO: 11236 - protein, 244 aa, Mycobacterium persicum
  misc_feature (1)..(244): tr|A0A498PFX6|A0A498PFX6_9MYCO GTP cyclohydrolase 1 OS= Mycobacterium persicum OX=1487726 GN=folE_1 PE=4 SV=1
MTAIPSAPRQARYQMPPVCSSGWAMTNDEVAHGAAAYPADIDYQTTDSPPWWDNNADAAVEGAVRQLLSALGVDEGEHTAETPARVARAWREMLWGYNEVPEDHLDTDFPAPDDPGLIVLHGISFASTCAHHLLPFSGTATIAYRPHPGQRIVGLSKLARLVHGYAARLQVQENIGHQATAGIMRKLNPSGAMSVITARHDCMRLRGVREPAAEATTESRKGMWLDREIALVHRLHAGGRPGAC

SEQ ID NO: 11237 - protein, 202 aa, Mycobacterium persicum
  misc_feature (1)..(202): tr|A0A1X0L8C0|A0A1X0L8C0_9MYCO GTP cyclohydrolase 1 OS= Mycobacterium persicum OX=1487726 GN=folE_2 PE=3 SV=1
MTQLDSRPTSSLPRAFDQPRAEAAVRELLCAIGEDPDRGGLRDTPARVARAYKEIFAGLYTDPDAVLNAMFDEDHDELVLVKQIPMYSTCEHHLVSFHGVAHVGYIPGEDGRVTGLSKIARLVDLYAKRPQVQERLTSQIADALVKKLEPRGVIVVVEAEHLCMAMRGVRKPGAVTTTSAVRGLFKTNAASRAEALDLILRK

SEQ ID NO: 11238 - protein, 202 aa, Mycobacterium pseudokansasii
  misc_feature (1)..(202): tr|A0A498QZ34|A0A498QZ34_9MYCO GTP cyclohydrolase 1 OS= Mycobacterium pseudokansasii OX=2341080 GN=folE_2 PE=3 SV=1
MTQLDSRPKPSIPGVFDQSRAEAAVRELLYAVGEDPEREGLRETPARVARAYKEIFAGLYSDPDAVLNAMFDEDHDELVLVKQIPLYSTCEHHLVSFHGVAHVGYIPGEDGRVTGLSKIARLVDLYAKRPQLQERLTSQIADALVKKLEPRGVIVVVEAEHLCMAMRGVRKPGAITTTSAVRGQFKTNAASRAEALDLILHK

SEQ ID NO: 11239 - protein, 244 aa, Mycobacterium pseudokansasii
  misc_feature (1)..(244): tr|A0A498QQ16|A0A498QQ16_9MYCO GTP cyclohydrolase 1 OS= Mycobacterium pseudokansasii OX=2341080 GN=folE_1 PE=4 SV=1
MTAIPSAPRQARYQMPPFCSSGWAMTNDEVAHGAAAYPADIGYQTTDSPAWWDNNADMAVEGAVRQLLSALGVDEGEHTAETPARVARAWREMLWGYNEVPEDHLDTDFPAPDDPGLIVLHGISFASTCAHHLLPFSGTATIAYRPHPGQRIVGLSKLARLVHGYAARLQVQERIGHQATAGIMRKLNPSGAMSVITARHDCMRLRGVREPAAEATTESRKGRWLDREIALVHRLHAGGRPGAC

SEQ ID NO: 11240 - protein, 221 aa, Mycobacterium pseudoshottsii
  misc_feature (1)..(221): tr|A0A2Z5TG63|A0A2Z5TG63_9MYCO GTP cyclohydrolase 1 OS= Mycobacterium pseudoshottsii JCM 15466 OX=1136880 GN=fo lE_2 PE=4 SV=1
MTNDGVAYGAASYHPNSGYPHSGRRPMNSPAWYDNNPDLAVECAVQQLLDALGVDDGEHTAGTPARVARAWREMLWGYHEVPEDQLATDFPAPDDPGLIVMHGISFSSTCAHHLLPFTGTATIAYRPHPGQRIVGLSKLARLVDGYAARLQVQERIGQQAVDGIMRRLNPSGAMCIITARHDCMRLRGVRDPAAEATTEARKGIWSDHEMALIHRLHGGAR

SEQ ID NO: 11241 - protein, 202 aa, Mycobacterium pseudoshottsii; identical to SEQ ID NO: 11220
  misc_feature (1)..(202): tr|A0A124BWR1|A0A124BWR1_9MYCO GTP cyclohydrolase 1 OS= Mycobacterium pseudoshottsii JCM 15466 OX=1136880 GN=fo lE_1 PE=3 SV=1

SEQ ID NO: 11242 - protein, 202 aa, Mycobacterium riyadhense
  misc_feature (1)..(202): tr|A0A1X2C394|A0A1X2C394_9MYCO GTP cyclohydrolase 1 OS= Mycobacterium riyadhense OX=486698 GN=folE PE=3 SV=1
MTQLDSRDAADQVRVFNQPRAEAAIRELLLAIGEDPDRDGLRETPARVARAYREIFAGLYIDPSTVLSTMFDEDHNELVIVKAIPLYSTCEHHLVSFHGVAHVGYIPNVDGRVTGLSKIARLVDLYAKRPQVQERLTSQIADALVERLEPRGVIVVVEAEHLCMAMRGVRKPGAITTTSAVRGQFKTDAASRAEALDLILRK

SEQ ID NO: 11243 - protein, 201 aa, Mycobacterium saskatchewanense
  misc_feature (1)..(201): tr|A0A1X2C960|A0A1X2C960_9MYCO GTP cyclohydrolase 1 OS= Mycobacterium saskatchewanense OX=220927 GN=folE PE=3 S V=1
MALSPDTVTPPVRVFDQARAEAAVRELLYAVGEDPDRHGLQETPARVARAYREMFAGLYTDPDTVLNTMFDEQHDELVLVKEIPLYSTCEHHLVAFHGVAHVGYIPGNDGRVTGLSKIARLVDLYAKRPQVQERLTSQIADALMNKLDPRGVIVVIEAEHLCMAMRGVRKPGATTTTSAVRGQFKSSAASRAEALDLILRK

SEQ ID NO: 11244 - protein, 204 aa, Mycobacterium scrofulaceum
  misc_feature (1)..(204): tr|A0A1A2UCE5|A0A1A2UCE5_MYCSC GTP cyclohydrolase 1 OS= Mycobacterium scrofulaceum OX=1783 GN=folE PE=3 SV=1
MAVTGLGPDTATPSTRVFDQDRAEAAVRELLYAVGEDPDRHGLRETPARVARAYREMFAGLYTDPDSVLNTMFDEEHDELVLVKEIPLYSTCEHHLVSFHGVAHVGYIPGADGRVTGLSKIARLVDLYAKRPQVQERLTSQIADALMKKLNPRGVIVVIEAEHLCMAMRGVRKPGATTTTSAVRGQFKSNAASRAEALDLILRK

SEQ ID NO: 11245 - protein, 204 aa, Mycobacterium scrofulaceum
  misc_feature (1)..(204): tr|A0A1X0KJG4|A0A1X0KJG4_MYCSC GTP cyclohydrolase 1 OS= Mycobacterium scrofulaceum OX=1783 GN=folE PE=3 SV=1
MALTGLGPDTASPPIRVFDQARAEAAVRELLYAIGEDPDRHGLRETPARVARAYQEMFAGLYTDPDSVLNTMFDEEHDELVLVKEIPLYSTCEHHLVSFHGVAHVGYIPGADGRVTGLSKIARLVDLYAKRPQVQERLTSQIADALMNKLSPRGVIVVIEAEHLCMAMRGVRKPGAVTTTSAVRGLFKTNAASRSEALDLILRK

SEQ ID NO: 11246 - protein, 202 aa, Mycobacterium sherrisii
  misc_feature (1)..(202): tr|A0A1E3SU76|A0A1E3SU76_9MYCO GTP cyclohydrolase 1 OS= Mycobacterium sherrisii OX=243061 GN=folE PE=3 SV=1
MVMPDTRTAPHRVRAFDQPRAEAAVRELLYAIGEDPDRDGLRDTPARVARAYREMFSGLYTEPDAVLNTMFDEDHDELVIVKEIPLYSTCEHHLVSFHGVAHVGYIPGPDGRVTGLSKIARLVDLYAKRPQVQERLTSQIADALVNRLAPRGVIVVVEAEHLCMAMRGVRKPGAITTTSAVRGQFKTDAASRAEALDLILRK

SEQ ID NO: 11247 - protein, 202 aa, Mycobacterium shigaense
  misc_feature (1)..(202): tr|A0A1Z4EP59|A0A1Z4EP59_9MYCO GTP cyclohydrolase 1 OS= Mycobacterium shigaense OX=722731 GN=folE PE=3 SV=1
MALPVTPNPVGRIHTFDQQRAEDAIRELLHAIGEDPDRDGLRDTPARVARAYREMFAGLYTDPDTVLNTMFDEDHDEMVIVKEIPLYSTCEHHLVSFHGVAHVGYIPGRDGRVTGLSKIARLVDLYAKRPQVQERLTSQIADALVNKLDPRGVIVVVEAEHLCLAMRGVRKPGAVTTTSAVRGQFKTSAASRAEALDLILRK

SEQ ID NO: 11248 - protein, 205 aa, Mycobacterium shimoidei
  misc_feature (1)..(205): tr|A0A1E3TJK3|A0A1E3TJK3_MYCSH GTP cyclohydrolase 1 OS= Mycobacterium shimoidei OX=29313 GN=folE PE=3 SV=1
MTSTAQPDPRFRSLRKPTFDQERAEAAIRELLYAVGEDPDRHGLEDTPARVARTYQEMFAGLYTDPDSVLDTTFDEQHDELVMVKEIPLYSTCEHHLVSFHGVAHVGYIPGHDGRVTGLSKIARLVDLYAKRPQVQERLTAQIADALMRKLDPRGVIVVVEAEHLCMSMRGVRKPGAITTTSAVRGQFKTNQASRAEALELILRK

SEQ ID NO: 11249 - protein, 202 aa, Mycobacterium shinjukuense
  misc_feature (1)..(202): tr|A0A1X0JR85|A0A1X0JR85_9MYCO GTP cyclohydrolase 1 OS= Mycobacterium shinjukuense OX=398694 GN=folE PE=3 SV=1
MSQLDSRIEHARVRVFDQRRAEAAVRELLYAVGEDPDRDGLRETPARVARAYREIFAGLYTDPDTVLNTMFDEEHDELVLVKAIPLYSTCEHHLVSFHGVAHVGYIPNHDGRVTGLSKIARLVDLYAKRPQVQERLTSQIADALVKKLDPRGVIVVIEAEHLCMAMRGVRKPGAITTTSAVRGQFKTSAASRAEALDLILRK

SEQ ID NO: 11250 - protein, 202 aa, Mycobacterium simiae
  misc_feature (1)..(202): tr|A0A5B1BL74|A0A5B1BL74_MYCSI GTP cyclohydrolase 1 OS= Mycobacterium simiae OX=1784 GN=folE PE=3 SV=1
MTQLDSHPNRAITRVFDQPRAEAAVRELLCAIGEDPDRDGLRDTPARVARAYGEIFAGLYTDPDAVLNTLFDEDHDELVLVKQIPMYSTCEHHLVSFHGVAHVGYIPGEEGRVTGLSKIARLVDLYAKRPQVQERLTSQIADALEKKLEPRGVIVVVEAEHLCMAMRGVRKPGAVTTTSAVRGLFKTNAASRAEALDLILRK

SEQ ID NO: 11251 - protein, 202 aa, Mycobacterium simiae
  misc_feature (1)..(202): tr|A0A1X0XPW8|A0A1X0XPW8_MYCSI GTP cyclohydrolase 1 OS= Mycobacterium simiae OX=1784 GN=folE PE=3 SV=1
MVMPDTRTALHRVRAFDQPRAEAAVRELLYAIGEDPDRDGLRDTPARVARAYREMFSGLYTEPDAVLNTMFDEDHDELVIVKEIPLYSTCEHHLVSFHGVAHVGYIPGPDGRVTGLSKIARLVDLYAKRPQVQERLTSQIADALVKRLAPRGVIVVVEAEHLCMAMRGVRKPGAITTTSAVRGQFKTDAASRAEALDLILRK

SEQ ID NO: 11252 - protein, 202 aa, Mycobacterium sp.
  misc_feature (1)..(202): tr|A0A1A1XW13|A0A1A1XW13_9MYCO GTP cyclohydrolase 1 OS= Mycobacterium sp. ACS4331 OX=1834121 GN=folE PE=3 SV=1
MVLPNSRVATVDRPVFDQARAEAAVRELLYAIGEDPDRHGLIETPARVARAYQEMFAGLYLDPDEVLNTTFDEQHDELVLVKDIPMYSTCEHHLVAFHGVAHVGYIPGVDGRVTGLSKLARVVDLYAKRPQVQERLTAQIADALMRKLDPRGVIVVVEAEHLCMAMRGIRKPGATTTTSAVRGQFKSDKASRAEALELILRK

SEQ ID NO: 11253 - protein, 204 aa, Mycobacterium sp.
  misc_feature (1)..(204): tr|A0A1A2NH91|A0A1A2NH91_9MYCO GTP cyclohydrolase 1 OS= Mycobacterium sp. E1747 OX=1834128 GN=folE PE=3 SV=1
MAVTGFGPDTATPSTRVFDQERAEAAVRELLYAIGEDPDRHGLRETPARVARAYQEMFAGLYTDPDSVLNTMFDEEHDELVLVKEIPLYSTCEHHLVSFHGVAHVGYIPGADGRVTGLSKIARLVDLYAKRPQVQERLTSQIADALMNKLNPRGVIVVIEAEHLCMAMRGVRKPGAVTTTSAVRGQFKSNAASRAEALDLILRK

SEQ ID NO: 11254 - protein, 204 aa, [Mycobacterium] stephanolepidis
  misc_feature (1)..(204): tr|A0A1Z4ES98|A0A1Z4ES98_9MYCO GTP cyclohydrolase 1 OS= [Mycobacterium] stephanolepidis OX=1520670 GN=folE PE=3 SV=1
MNSPETAERNGQPAGHVFDQARAEAAVRELLLAVGEDPDRHGLVDTPARVARAYKEIFAGLYTDPDTVLNTTFDEQHDELVLVKSIPMYSTCEHHLVSFHGVAHVGYIPGKHGRVTGLSKIARLVDLYAKRPQVQERLTAQIADALVRKLEPRGVIVVVEAEHLCMAMRGVRKPGATTTTSAVRGQFKSDAASRAEVLDLMMRA

SEQ ID NO: 11255 - protein, 205 aa, Mycobacterium syngnathidarum
  misc_feature (1)..(205): tr|A0A1Q9WIA7|A0A1Q9WIA7_9MYCO GTP cyclohydrolase 1 OS= Mycobacterium syngnathidarum OX=1908205 GN=folE PE=3 SV =1
MSQSLREHHNNTDTAARVFDQPRAEAAVRELLIAIGEDPERQGLLDTPARVARAYKELMAGLYTDPDAVLNTTFDEEHDELVLVKEIPMYSTCEHHLVSFHGVAHVGYIPGVDGRVTGLSKIARLVDLYSKRPQVQERLTAQIADALMRKLDPRGAIVVIEAEHLCMAMRGVRKPGAVTTTSAVRGQFKTDKASRAEALELILRK

SEQ ID NO: 11256 - protein, 202 aa, Mycobacterium szulgai; identical to SEQ ID NO: 11155
  misc_feature (1)..(202): tr|A0A1X2EYN6|A0A1X2EYN6_MYCSZ GTP cyclohydrolase 1 OS= Mycobacterium szulgai OX=1787 GN=folE PE=3 SV=1

SEQ ID NO: 11257 - protein, 202 aa, Mycobacterium talmoniae
  misc_feature (1)..(202): tr|A0A1S1NL85|A0A1S1NL85_9MYCO GTP cyclohydrolase 1 OS= Mycobacterium talmoniae OX=1858794 GN=folE PE=3 SV=1
MAQPNSRPIAPAGPTFDQDRAEAAIRELLCAVGEDPDRQGLAETPARVARAYREMFGGLYTDPDAVLETTFDEQHDELVLVKEIPLYSVCEHHLVAFHGVAHVGYIPGDDGRVTGLSKIARVVDLYAKRPQVQERLTGQIADAMTRKLDPRGVIVVIEAEHLCMSMRGVRKPGAITTTSAVRGLFKTDARSRSEALDLILRK

SEQ ID NO: 11258 - protein, 202 aa, Mycobacterium talmoniae; identical to SEQ ID NO: 11182
  misc_feature (1)..(202): tr|A0A2S8BRZ3|A0A2S8BRZ3_9MYCO GTP cyclohydrolase 1 OS= Mycobacterium talmoniae OX=1858794 GN=folE PE=3 SV=1

SEQ ID NO: 11259 - protein, 202 aa, Mycobacterium triplex
  misc_feature (1)..(202): tr|A0A024K5E4|A0A024K5E4_9MYCO GTP cyclohydrolase 1 OS= Mycobacterium triplex OX=47839 GN=folE PE=3 SV=1
MVLPDTRAALDGVRAFDQARAEAAVRELLYAIGEDPDREGLRDTPARVARAYREIFSGLYTDPSAVLNTMFDEEHDELVIVKEIPLYSTCEHHLVAFHGVAHVGYIPGTDGRVTGLSKIARLVDLYAKRPQVQERLTSQIADALVSRLDPRGVIVVVEAEHLCMAMRGVRKPGAITTTSAVRRQFKTDAASRAEALDLILRK

SEQ ID NO: 11260 - protein, 200 aa, Mycobacterium [tuberculosis]; identical to SEQ ID NO: 11177
  misc_feature (1)..(200): tr|A0A051TSD3|A0A051TSD3_9MYCO GTP cyclohydrolase 1 OS= Mycobacterium [tuberculosis] TKK-01-0051 OX=1324261 GN= folE PE=3 SV=1

SEQ ID NO: 11261 - protein, 202 aa, Mycobacterium tuberculosis; identical to SEQ ID NO: 11169
  misc_feature (1)..(202): sp|A5U8T4|GCH1_MYCTA GTP cyclohydrolase 1 OS=Mycobacter ium tuberculosis (strain ATCC 25177 / H37Ra) OX=419947 GN=folE PE=3 SV=1

SEQ ID NO: 11262 - protein, 202 aa, Mycobacterium tuberculosis; identical to SEQ ID NO: 11169
  misc_feature (1)..(202): tr|A0A045GMW7|A0A045GMW7_MYCTX GTP cyclohydrolase 1 OS= Mycobacterium tuberculosis OX=1773 GN=folE PE=3 SV=1

SEQ ID NO: 11263 - protein, 205 aa, Mycobacterium uberis
  misc_feature (1)..(205): tr|A0A3E1HLS1|A0A3E1HLS1_9MYCO GTP cyclohydrolase 1 OS= Mycobacterium uberis OX=2162698 GN=folE PE=3 SV=1
MALTDLGSESIAVPCIRVFDKQRAEAAIRELLYAIGEDPDREGLAGTPARVASAYREMFSGLYTDPQTVLNTMFDEEHNELVIVKEIPMYSTCEHHLVSFHGVAHVGYIPGEDGRVTGLSKIARLVDLYAKRPQVQERLTSQIADALMSKLDPRGVIVVVEAEHLCMAMRGVRKPGAVTTTSAVRGQFKTDAASRAEVLDLILRK

SEQ ID NO: 11264 - protein, 202 aa, Mycobacterium ulcerans
  misc_feature (1)..(202): sp|A0PV57|GCH1_MYCUA GTP cyclohydrolase 1 OS=Mycobacter ium ulcerans (strain Agy99) OX=362242 GN=folE PE=3 SV=1
MTQLDSRTEATTTRAFDQPRAEAAVRELLLAIGEDPDRGGLRDTPARVARAYREIFAGLYTDPDAVLNTMFDEDHDELVLIKEIPLYSTCEHHLVSFHGVAHVGYIPGRDGRVTGLSKIARLVDLYAKRPQVQERLTSQIADALVKRLGPRGVLVVVEAEHLCMAMRGVRKPGAVTTTSAVRGQFKTDAASRAEALDLILRK

SEQ ID NO: 11265 - protein, 40 aa, Mycobacterium ulcerans
  misc_feature (1)..(40): tr|X8F0X9|X8F0X9_MYCUL GTP cyclohydrolase 1 domain prot ein OS=Mycobacterium ulcerans str. Harvey OX=1299332 GN =folE PE=4 SV=1
MHGDARVRKPGAVTTTSAVRGQFKTDAASRAEALDLILRK

SEQ ID NO: 11266 - protein, 202 aa, Mycobacterium xenopi; identical to SEQ ID NO: 11193
  misc_feature (1)..(202): tr|A0A2X1S8G3|A0A2X1S8G3_MYCXE GTP cyclohydrolase 1 OS= Mycobacterium xenopi OX=1789 GN=folE PE=3 SV=1

SEQ ID NO: 11267 - protein, 58 aa, Mycobacterium xenopi
  misc_feature (1)..(58): tr|X8A047|X8A047_MYCXE GTP cyclohydrolase 1 OS=Mycobact erium xenopi 3993 OX=1299333 GN=I552_0068 PE=4 SV=1
MRKLDPRGVIVVVEAEHLCMAMRGVRKPGAVTTTSAVRGQFKTDAASRAEALELILRK

SEQ ID NO: 11268 - protein, 204 aa, Mycobacteroides abscessus
  misc_feature (1)..(204): sp|B1MGU9|GCH1_MYCA9 GTP cyclohydrolase 1 OS=Mycobacter oides abscessus (strain ATCC 19977 / DSM 44196 / CIP 10 4536 / JCM 13569 / NCTC 13031 / TMC 1543) OX=561007 GN= folE PE=3 SV=1
MNSPETAEYNGHPTGHVFDQARAEAAVRELLYAVGEDPDRHGLADTPARVARAYREIFAGLYTDPDTVLNTTFDEQHDELVLVKSIPMYSTCEHHLVSFHGVAHVGYIPGQHGRVTGLSKIARLVDLYAKRPQVQERLTAQIADALVRKLEPRGVIVVVEAEHLCMAMRGVRKPGATTTTSAVRGQFKRDAASRAEVLDLMMRT

SEQ ID NO: 11269 - protein, 204 aa, Mycobacteroides abscessus
  misc_feature (1)..(204): tr|A0A1M9YHQ8|A0A1M9YHQ8_9MYCO GTP cyclohydrolase 1 OS= Mycobacteroides abscessus subsp. bolletii OX=319705 GN= folE PE=3 SV=1
MNSPETAEYNGHPTGHVFDQARAEAAVRELLYAVGEDPDRHGLADTPARVARAYKEIFAGLYTDPDTVLNTTFDEQHDELVLVKSIPMYSTCEHHLVSFHGVAHVGYIPGQHGRVTGLSKIARLVDLYAKRPQVQERLTAQIADALVRKLEPRGVIVVVEAEHLCMAMRGVRKPGATTTTSAVRGQFKRDAASRAEVLDLMMRT

SEQ ID NO: 11270 - protein, 207 aa, Mycobacteroides chelonae
  misc_feature (1)..(207): tr|A0A448GMX9|A0A448GMX9_MYCCH GTP cyclohydrolase 1 OS= Mycobacteroides chelonae OX=1774 GN=folE_2 PE=3 SV=1
MLQSPEVSHAAHGQLPRGRTFDQAGVEAAIFDLLVALGEDPYRDGLRDTPARVARAYKETFAGLYSDPDEVLTTMFDEHHDELVLVKQIPMYSTCEHHLVSFHGVAHVGYLPGVDGRVTGLSKIARLVDLYARRPQVQERLTGQIAEALMNKLNPRGVIVVIEAEHLCMAMRGVRKPGALTTTSAVRGQFQTDPTSRAEALRLLLQR

SEQ ID NO: 11271 - protein, 204 aa, Mycobacteroides chelonae; identical to SEQ ID NO: 11254
  misc_feature (1)..(204): tr|A0A0E3TNK1|A0A0E3TNK1_MYCCH GTP cyclohydrolase 1 OS= Mycobacteroides chelonae OX=1774 GN=folE PE=3 SV=1

SEQ ID NO: 11272 - protein, 204 aa, Mycobacteroides franklinii
  misc_feature (1)..(204): tr|A0A4R5P4D1|A0A4R5P4D1_9MYCO GTP cyclohydrolase 1 OS= Mycobacteroides franklinii OX=948102 GN=folE PE=3 SV=1
MNSPETAERNGHPTGHVFDQARAEAAVRELLYAVGEDPDRNGLVDTPARVARAYQEIFAGLYTDPDTVLNTTFDEQHDELVLVKSIPMYSTCEHHLVSFHGVAHVGYIPGEHGRVTGLSKIARLVDLYAKRPQVQERLTAQIADALVRKLEPRGVIVVVEAEHLCMAMRGVRKPGATTTTSAVRGQFKSDAASRAEVLDLMMRA

SEQ ID NO: 11273 - protein, 204 aa, Mycobacteroides franklinii
  misc_feature (1)..(204): tr|A0A1S1L785|A0A1S1L785_9MYCO GTP cyclohydrolase 1 OS= Mycobacteroides franklinii OX=948102 GN=folE PE=3 SV=1
MNSPETAERNGHPTVHVFDQARAEAAVRELLYAVGEDPDRNGLVDTPARVARAYQEIFAGLYTDPDTVLNTTFDEQHDELVLVKSIPMYSTCEHHLVSFHGVAHVGYIPGEHGRVTGLSKIARLVDLYAKRPQVQERLTAQIADALVRKLEPRGVIVVVEAEHLCMAMRGVRKPGATTTTSAVRGQFKSDAASRAEVLDLMMRA

SEQ ID NO: 11274 - protein, 204 aa, Mycobacteroides immunogenum
  misc_feature (1)..(204): tr|A0A0N1CDW7|A0A0N1CDW7_9MYCO GTP cyclohydrolase 1 OS= Mycobacteroides immunogenum OX=83262 GN=folE PE=3 SV=1
MNSPETAEYNGHPTGHVFDQARAEAAVRELLYAVGEDPDRQGLADTPARVARAYREIFAGLYTDPDTVLNTTFDEQHDELVLVKSIPMYSTCEHHLVSFHGVAHVGYIPGEHGRVTGLSKIARLVDLYAKRPQVQERLTAQIADALVRKLEPRGVIVVVEAEHLCMAMRGVRKPGATTTTSAVRGQFKRDAASRSEVLDLMMRA

SEQ ID NO: 11275 - protein, 190 aa, Mycobacteroides salmoniphilum
  misc_feature (1)..(190): tr|A0A4R8SPZ9|A0A4R8SPZ9_9MYCO GTP cyclohydrolase 1 OS= Mycobacteroides salmoniphilum OX=404941 GN=folE_2 PE=4 SV=1
MIDVEKVKSAVTDLLLATGVGNDEHTEDTPGRVARAWAESLAGYDEDPAVHLRRRFPAPSDPGLVIVAGIRLVSTCAHHLLPITGVATVAYRPVTGSEVVGLSKLARVVHGYARRLQVQERIGYQVTTAVQEELSPVGAACFITAAHGCMEIRGVKEPASVTTTHAMSGQWVPGHPDVVAVLAEHAQIRR

SEQ ID NO: 11276 - protein, 190 aa, Mycobacteroides salmoniphilum
  misc_feature (1)..(190): tr|A0A4R8SA28|A0A4R8SA28_9MYCO GTP cyclohydrolase 1 OS= Mycobacteroides salmoniphilum OX=404941 GN=folE_2 PE=4 SV=1
MIDVEKVKSAITDLLLATGVGNDEHTEDTPGRVARAWAESLAGYDEDPAAHLRRRFPAPSDPGLVIVAGIRLVSTCAHHLLPITGVATVAYRPCTGSEVVGLSKLARVVHGYARRLQVQERIGYQVTTAVQEELSPVGAACFITAAHGCMEVRGVKEPASVTTTHAMSGQWVPGHPDVVAVLAEHAQVRR

SEQ ID NO: 11277 - protein, 204 aa, Mycobacteroides saopaulense
  misc_feature (1)..(204): tr|A0A1S4VFI5|A0A1S4VFI5_9MYCO GTP cyclohydrolase 1 OS= Mycobacteroides saopaulense OX=1578165 GN=folE PE=3 SV= 1
MNSPETAEYNGQQTGHVFDQARAEAAVRELLYAVGEDPDRHGLVDTPARVARAYKEIFAGLYTDPDTVLNTTFDEQHDELVLVKSIPMYSTCEHHLVSFHGVAHVGYIPGEHGRVTGLSKIARLVDLYAKRPQVQERLTAQIADALVRKLEPRGAIVVIEAEHLCMAMRGVRKPGATTTTSAVRGQFKRDAASRAEVLDLMMRA

SEQ ID NO: 11278 - protein, 204 aa, Mycobacteroides sp.
  misc_feature (1)..(204): tr|A0A0R3H5N3|A0A0R3H5N3_9MYCO GTP cyclohydrolase 1 OS= Mycobacteroides sp. H054 OX=1720567 GN=folE PE=3 SV=1
MNSPETAERNGQPAGHVFDQARAEAAVRELLLAVGEDPDRHGLVDTPARVARAYKEIFAGLYTDPDTVLNTTFDEQHDELVLVKSIPMYSTCEHHLVSFHGVAHVGYIPGKHGRVTGLSKIARLVDLYAKRPQVQERLTAQIADALVRKLEPRGVIVVVEAEHLCMAMRGVRKPGATTTTSAVRGQFKTDAASRAEVLDLMMRA

SEQ ID NO: 11279 - protein, 204 aa, Mycobacteroides sp.; identical to SEQ ID NO: 11278
  misc_feature (1)..(204): tr|A0A0R3EK55|A0A0R3EK55_9MYCO GTP cyclohydrolase 1 OS= Mycobacteroides sp. H092 OX=1720573 GN=folE PE=3 SV=1

SEQ ID NO: 11280 - protein, 204 aa, Mycolicibacillus koreensis
  misc_feature (1)..(204): tr|A0A1X2LI09|A0A1X2LI09_9MYCO GTP cyclohydrolase 1 OS= Mycolicibacillus koreensis OX=1069220 GN=folE PE=3 SV=1
MVDVELGADSLTLDGPVFDQARAEAAVRELLYAVGEDPERCGLKDTPARVARAYREMFAGLYTDPDEVLDTTFDEQHNELVLVKEIPMYSMCEHHLVSFHGVANVGYIPGADGRVTGLSKIARVVDLYARRPQVQERLTGQIADAMMNRLQPRGVIVVVEAEHMCMSMRGIRKPGAITTTSAVRGQFKTDTAARAEALDLMLRK

SEQ ID NO: 11281 - protein, 227 aa, Mycolicibacillus koreensis
  misc_feature (1)..(227): tr|A0A1E3T6Y4|A0A1E3T6Y4_9MYCO GTP cyclohydrolase 1 OS= Mycolicibacillus koreensis OX=1069220 GN=folE PE=3 SV=1
MINNGHHQVTALVPSRPTKPASRTYPYIGTALTPDAQITAIENSFRDIMVALGLDIHDDSLTRTPHRFAKMLVNEVFDGLDRRRFPEITTQDNKFGYSEPLCEANISIISTCEHHFVPIIGRCHIAYIPAGRLIGLSKLNRIARHLARRPQVQERLTIQIAETLAELVETDDVAVTVDAEHLCVKMRGIEDVNAVTRTTELKGAFQQSDVRKEYFAAIPRLSDLKSI

SEQ ID NO: 11282 - protein, 203 aa, Mycolicibacillus trivialis
  misc_feature (1)..(203): tr|A0A1X2EIG2|A0A1X2EIG2_9MYCO GTP cyclohydrolase 1 OS= Mycolicibacillus trivialis OX=1798 GN=folE PE=3 SV=1
MDAQFDARPAPSERPVFDQARAEAAVRELLLAIGEDPERCGLRDTPARVARAYQEMFAGLYTDPDDVLNTTFDEQHDELVMVKDIPMYSMCEHHLVSFRGSAHVGYIPGEDGRVTGLSKIARVVDLYARRPQVQERLTAQIADAMMNRLKPRGVIVVVEAEHMCMSMRGVRKPGAVTTTSAVRGQFKTDTALRAEALNLILHK

SEQ ID NO: 11283 - protein, 192 aa, Mycolicibacter algericus
  misc_feature (1)..(192): tr|A0A1W9YDS9|A0A1W9YDS9_9MYCO GTP cyclohydrolase 1 OS= Mycolicibacter algericus DSM 45454 OX=723879 GN=folE PE =3 SV=1
MTSTGFDQARAEAAVRELLYAVGEDPDRAGLVDTPARVARAYQEMFAGLYTDPDTVLETTFDEQHDEMVLVKEIPLYSTCEHHLVSFHGVAHVGYIPGDDGRITGLSKLARVVDLYAKRPQVQERLTGQVADALMRKLNPRGVIVVVEAEHLCMAMRGVRKPGAITTTSAVRGQFKSDSASRAEALELIRRK

SEQ ID NO: 11284 - protein, 192 aa, Mycolicibacter arupensis
  misc_feature (1)..(192): tr|A0A0F5MSU5|A0A0F5MSU5_9MYCO GTP cyclohydrolase 1 OS= Mycolicibacter arupensis OX=342002 GN=folE PE=3 SV=1
MTSAIFDQARAEAAVRELLLAVGEDPDRPGLVDTPARVARAYKEIFAGLYTDPDTVLETTFDEQHEELVIVREIPMYSTCEHHLVSFHGVAHVGYIPGYDGRITGLSKLARVVDLYAKRPQVQERLTAQVADALMRKLDPRGVIVVVEAEHLCMAMRGVRKPGAVTTTSAVRGQFKSDSTLRAEALELIRRR

SEQ ID NO: 11285 - protein, 192 aa, Mycolicibacter engbaekii
  misc_feature (1)..(192): tr|A0A1X1TPZ1|A0A1X1TPZ1_9MYCO GTP cyclohydrolase 1 OS= Mycolicibacter engbaekii OX=188915 GN=folE PE=3 SV=1
MSSAIFDQARAEAAVRELLFAVGEDPDRAGLLDTPARVARAYREMFGGLYTDPDEVLETTFDEQHEELVIVKEIPLYSTCEHHLVAFHGVAHVGYIPGDDGRITGLSKLARLVDLYAKRPQVQERLTAQVADAMMRKLDPRGVIVVVEAEHLCMAMRGVRKPGAITTTSAVRGQFKSDSTSRAEALELILRK

SEQ ID NO: 11286 - protein, 192 aa, Mycolicibacter heraklionensis
  misc_feature (1)..(192): tr|A0A0I9TBM1|A0A0I9TBM1_9MYCO GTP cyclohydrolase 1 OS= Mycolicibacter heraklionensis OX=512402 GN=folE PE=3 SV =1
MTSAIFDQARAEAAVRELLFAVGEDPDRPGLMDTPARVARAYHEMFAGLYTDPDAVLETTFDEQHEELVIVKEIPLYSTCEHHLVAFHGVAHVGYIPGYDGRITGLSKLARVVDLYAKRPQVQERLTAQVADALMRKLNPRGVIVVVEAEHLCMAMRGVRKPGAITTTSAVRGQFKTDSTSRAEALELIRRK

SEQ ID NO: 11287 - protein, 192 aa, Mycolicibacter heraklionensis; identical to SEQ ID NO: 11225
  misc_feature (1)..(192): tr|A0A1A2W2A0|A0A1A2W2A0_9MYCO GTP cyclohydrolase 1 OS= Mycolicibacter heraklionensis OX=512402 GN=folE PE=3 SV =1

SEQ ID NO: 11288 - protein, 192 aa, Mycolicibacter hiberniae
  misc_feature (1)..(192): tr|A0A1X1VT35|A0A1X1VT35_9MYCO GTP cyclohydrolase 1 OS= Mycolicibacter hiberniae OX=29314 GN=folE PE=3 SV=1
MSSAIFDQARAEAAVRELLFAVGEDPDRAGLLDTPARVARAYREMFAGLYTDPDEVLETTFDEQHEELVIVKEIPLYSTCEHHLVAFHGVAHVGYIPGHDGRITGLSKLARVVDLYAKRPQVQERLTAQVADALMRKLDPRGVIVVVEAEHLCMAMRGVRKPGAITTTSAVRGQFKSDSTSRAEALELILRK

SEQ ID NO: 11289 - protein, 192 aa, Mycolicibacter kumamotonensis
  misc_feature (1)..(192): tr|A0A1B8SIB2|A0A1B8SIB2_9MYCO GTP cyclohydrolase 1 OS= Mycolicibacter kumamotonensis OX=354243 GN=folE PE=3 SV =1
MASTVFDQARAEAAVRELLYAVGEDPDRPGLLDTPARVARAYQEMFAGLYTDPDTVLETTFDEQHDELVLVKEIPLYSTCEHHLVSFHGVAHIGYIPGADGRITGLSKLARVVDLYAKRPQVQERLTGQVADALMRKLDPRGVIVVVEAEHLCMAMRGVRKPGAITTTSAVRGQFKSDSASRAEALELIRRK

SEQ ID NO: 11290 - protein, 202 aa, Mycolicibacter kumamotonensis
  misc_feature (1)..(202): tr|A0A1B8SFT9|A0A1B8SFT9_9MYCO GTP cyclohydrolase 1 OS= Mycolicibacter kumamotonensis OX=354243 GN=folE PE=3 SV =1
MSVAAYADLRVVDRPVPDLAAAEQAAAAFLQALGISTDDESLQDTPRRMARAYAEMFTPKPFEATTFPNDEGYDELVLVRDIPLRSVCEHHLLPFTGTACVGYLPGDRILGLSKLARVVDYFACRPQVQERLTKQVADWLTDHLQPRAVGVVIRAEHTCMTLRGVHATGSTTVTSTLLGTLRTDARSRQEFFSLIGIGGVTG

SEQ ID NO: 11291 - protein, 200 aa, Mycolicibacter longobardus
  misc_feature (1)..(200): tr|A0A1X1Y9Y0|A0A1X1Y9Y0_9MYCO GTP cyclohydrolase 1 OS= Mycolicibacter longobardus OX=1108812 GN=folE PE=3 SV=1
MTEKVGSVMTPAVFDQARAEAAVRELLFAVGEDPDRAGLLDTPARVARAYKEMFAGLYTDPDTVLETTFDEEHEELVIVKEIPLYSTCEHHLVSFHGVAHVGYIPGYDGRITGLSKLARVVDLYAKRPQVQERLTGQVADALMRKLNPRGVIVVVEAEHLCMAMRGVRKPGAVTTTSAVRGQFKTDSASRAEALELILRK

SEQ ID NO: 11292 - protein, 200 aa, Mycolicibacter minnesotensis
  misc_feature (1)..(200): tr|A0A1X0FFI7|A0A1X0FFI7_9MYCO GTP cyclohydrolase 1 OS= Mycolicibacter minnesotensis OX=1118379 GN=folE PE=3 SV =1
MTEKAGSTLTSAIFDQARAEAAVRELLLAVGEDPDRPGLVDTPGRVARAYKEIFAGLYTDPDTVLETTFDEQHEELVIVREIPMYSTCEHHLVSFHGVAHVGYIPGYDGRITGLSKLARVVDLYAKRPQVQERLTAQVADALMRKLNPRGVIVVVEAEHLCMAMRGVRKPGAVTTTSAVRGQFKSDSTLRAEALELIRRR

SEQ ID NO: 11293 - protein, 201 aa, Mycolicibacter senuensis
  misc_feature (1)..(201): tr|A0A329KK93|A0A329KK93_9MYCO GTP cyclohydrolase 1 OS= Mycolicibacter senuensis OX=386913 GN=folE PE=3 SV=1
MSVAVYADLRAADRPVPDLEAAERAAAALLHALGISTAGEALRDTPRRMARAYAEMFTPTPFEATTFPNEEGYDELVLVRDIGFRSVCEHHLLPFTGTACVGYLPGDRLLGLSKLARVVEYFACRPQVQERLTKQVADWLTDHLQPRAVGVVIRAEHTCMTLRGVHAGGSTTVTSTLSGTLRSDDRSRREFFSLAGVGGTG

SEQ ID NO: 11294 - protein, 192 aa, Mycolicibacter senuensis; identical to SEQ ID NO: 11283
  misc_feature (1)..(192): tr|A0A329K6C2|A0A329K6C2_9MYCO GTP cyclohydrolase 1 OS= Mycolicibacter senuensis OX=386913 GN=folE PE=3 SV=1

SEQ ID NO: 11295 - protein, 192 aa, Mycolicibacter sinensis
  misc_feature (1)..(192): tr|A0A1A2DWL4|A0A1A2DWL4_MYCSD GTP cyclohydrolase 1 OS= Mycolicibacter sinensis (strain JDM601) OX=875328 GN=fo lE PE=3 SV=1
MVSTVFDQARAEAAVRELLYAVGEDPDRPGLLDTPARVARAYQEMFAGLYTDPDAVLETTFDEQHDELVLVKEIPLYSTCEHHLVSFHGVAHVGYIPGDDGRITGLSKLARVVDLYAKRPQVQERLTGQVADALMRKLDPRGVIVVVEAEHLCMAMRGVRKPGAITTTSAVRGQFKSDSASRAEALELIRRR

SEQ ID NO: 11296 - protein, 201 aa, Mycolicibacter sinensis
  misc_feature (1)..(201): tr|F5YW49|F5YW49_MYCSD GTP cyclohydrolase 1 OS=Mycolici bacter sinensis (strain JDM601) OX=875328 GN=folE PE=3 SV=1
MSVAVYAELRAADRPVPDLEAAERAAAALLHALGISTAGEALRNTPRRMARAYAEMFTPTPFEATTFPNEEEYEELVLVRDIGFRSVCEHHLLPFTGTACVGYLPGDRLLGLSKLARVVDYFACRPQVQERLTKQVADWLTDHLQPRAVGVVIRAEHTCMTLRGVHAGGSTTVTSTLSGTLRSDDRSRREFFSLAGIGSTG

SEQ ID NO: 11297 - protein, 201 aa, Mycolicibacter terrae
  misc_feature (1)..(201): tr|A0A1X2E1B4|A0A1X2E1B4_9MYCO GTP cyclohydrolase 1 OS= Mycolicibacter terrae OX=1788 GN=folE_1 PE=3 SV=1
MSVAAYADLRVVDRPVPNLDAAEQAAAAFLHALGISTADEGLQNTPRRVARAYAEMFTPKPFEATTFPNDEGYDELVLVRDIPLRTVCEHHLLPFTGTACVGYLPGDRILGLSKLARVVDYFASRPQVQERLTKQVADWLTDHLQPRAVGVVIRAEHTCMTLRGVHATGSTTVTSTLLGTLRTDARSRQEFFSLIGIGGTG

SEQ ID NO: 11298 - protein, 192 aa, Mycolicibacter terrae
  misc_feature (1)..(192): tr|A0A1X2DR66|A0A1X2DR66_9MYCO GTP cyclohydrolase 1 OS= Mycolicibacter terrae OX=1788 GN=folE_2 PE=3 SV=1
MTSTVFDQARAEAAVRELLYAVGEDPDRPGLLDTPARVARAYQEMFAGLYTDPDTVLETTFDEQHDELVLVKEIPLYSTCEHHLVSFHGVAHVGYIPGDDGRITGLSKLARVVDLYAKRPQVQERLTGQVADALMRKLDPRGVIVVVEAEHLCMAMRGVRKPGAITTTSAVRGQFKSDSASRAEALELIRRR

SEQ ID NO: 11299 - protein, 192 aa, Mycolicibacter virginiensis
  misc_feature (1)..(192): tr|A0A2S8C5N0|A0A2S8C5N0_9MYCO GTP cyclohydrolase 1 OS= Mycolicibacter virginiensis OX=1795032 GN=folE PE=3 SV= 1
MTSAIFDQARAEAAVRELLFAVGEDPDRQGLLDTPARVARAYREMFAGLYTDPDEVLETTFDEQHEELVIVKEIPLYSTCEHHLVAFHGVAHVGYIPGYDGRITGLSKLARVVDLYAKRPQVQERLTAQVADALMRKLNPRGVIVVVEAEHLCMAMRGVRKPGAITTTSAVRGQFKTDSTSRAEALELIRRK

SEQ ID NO: 11300 - protein, 202 aa, Mycolicibacterium agri
  misc_feature (1)..(202): tr|A0A2A7NGU4|A0A2A7NGU4_MYCAG GTP cyclohydrolase 1 OS= Mycolicibacterium agri OX=36811 GN=folE PE=3 SV=1
MTRPHNNSATFTTPVFDQPRAEAAIRELLIAVGEDPDRHGLEETPARVARAYREMFAGLYTNPDTVLNTTFDEQHDELVLVKEIPLYSTCEHHLVAFHGVAHVGYIPGQDGRVTGLSKIARLVDLYAKRPQVQERLTAQIADAMTRKLEPRGVIVVVECEHLCMSMRGVRKPGAVTTTSAVRGQFKTDKASRSEALELILRK

SEQ ID NO: 11301 - protein, 200 aa, Mycolicibacterium aichiense
  misc_feature (1)..(200): tr|A0A378RE74|A0A378RE74_9MYCO GTP cyclohydrolase 1 OS= Mycolicibacterium aichiense OX=1799 GN=folE PE=3 SV=1
MPQPDVSTLEMPVFDQSRAEAAVRELLLAVGEDPDRHGLQDTPARVARAFQEMFAGLYTDPDMVLDTTFDEQHDELVLVKDIPMYSTCEHHLVAFHGVAHVGYIPGEDGRVTGLSKLARVVDLYAKRPQVQERLTTQIADAVMRKLKPRGVIVVIEAEHLCMAMRGVRKPGASTTTSAVRGQFKSDHASRSEALDLILRK

SEQ ID NO: 11302 - protein, 206 aa, Mycolicibacterium aromaticivorans
  misc_feature (1)..(206): tr|A0A064CFN9|A0A064CFN9_9MYCO GTP cyclohydrolase 1 OS= Mycolicibacterium aromaticivorans JS19b1 = JCM 16368 OX =1440774 GN=folE PE=3 SV=1
MTNGASMAQPNASTLETPVFDQTRAEAAVRELLLAVGEDPDRHGLQDTPARVARAFQEMFSGLYTDPDAVLDTTFDEQHDELVLVKDIPMYSTCEHHLVAFHGVAHVGYIPGEDGRVTGLSKLARVVDLYAKRPQVQERLTTQIADAVMRKLKPRGVIVVIEAEHLCMAMRGVRKPGASTTTSAVRGQFKSDHASRSEALDLILRK

SEQ ID NO: 11303 - protein, 203 aa, Mycolicibacterium aurum
  misc_feature (1)..(203): tr|A0A3S4U1Q7|A0A3S4U1Q7_MYCAU GTP cyclohydrolase 1 OS= Mycolicibacterium aurum OX=1791 GN=folE PE=3 SV=1
MTRSPSNHSTTLTDEDFDQARAEAAVRELLIAVGEDPDRHGLADTPARVARAYREMFAGLYTDPDTVLNTTFDEQHDELVLVKEIPMYSTCEHHLVAFHGVAHVGYIPGVDGRVTGLSKIARLVDLYAKRPQVQERLTAQIADALMRKLDPRGAIVVIEAEHLCMAMRGVRKPGATTTTSAVRGQFKHDNASRAEALDLILRR

SEQ ID NO: 11304 - protein, 202 aa, Mycolicibacterium austroafricanum
  misc_feature (1)..(202): tr|A0A2S8LJV3|A0A2S8LJV3_MYCAO GTP cyclohydrolase 1 OS= Mycolicibacterium austroafricanum OX=39687 GN=folE PE=3 SV=1
MTRSHNHSATITTARFDQARAEAAVRELLIAVGEDPDREGLRDTPARVARAYQEIFAGLYTDPDEVLKTMFDEQHDEMVLVKDIPMYSTCEHHLVSFHGVAHVGYIPGVDGRVTGLSKLARVVDLYAKRPQVQERLTGQIADALMRRLDPRGVIVVIEAEHLCMAMRGIRKPGAVTTTSAVRGQFKTDKASRAEALDLILRK

SEQ ID NO: 11305 - protein, 205 aa, Mycolicibacterium bacteremicum
  misc_feature (1)..(205): tr|A0A1W9YXK3|A0A1W9YXK3_9MYCO GTP cyclohydrolase 1 OS= Mycolicibacterium bacteremicum OX=564198 GN=folE PE=3 S V=1
MTTSGKNGESTSGFIQADFDQARAEAAVRELLLAVGEDPDRHGLVDTPARVARAFKEIFAGLYTDPDTVLNTTFDEQHDELVLVKQIPMYSTCEHHLVSFHGVAHVGYIPGQDGRVTGLSKIARLVDLYAKRPQVQERLTAQVADALMRKLDPRGVIVVMEAEHLCMAMRGIRKPGAVTTTSAVRGQFKTDKASRAEALELILRR

SEQ ID NO: 11306 - protein, 205 aa, Mycolicibacterium boenickei
  misc_feature (1)..(205): tr|A0A2A7PAY0|A0A2A7PAY0_9MYCO GTP cyclohydrolase 1 OS= Mycolicibacterium boenickei OX=146017 GN=folE PE=3 SV=1
MSQTLREHHNNTDTTTRVFDQPRAEAAVRELLIAIGEDPDRQGLLDTPARVARAYKELMAGLYTDPDAVLNTTFDEEHDELVLVKEIPLYSTCEHHLVSFHGVAHVGYIPGVDGRVTGLSKIARLVDLYSKRPQVQERLTAQIADALMRKLDPRGAIVVIEAEHLCMAMRGVRKPGAVTTTSAVRGQFKTDKASRAEALELILRK

SEQ ID NO: 11307 - protein, 204 aa, Mycolicibacterium brisbanense; identical to SEQ ID NO: 11156
  misc_feature (1)..(204): tr|A0A100VX78|A0A100VX78_9MYCO GTP cyclohydrolase 1 OS= Mycolicibacterium brisbanense OX=146020 GN=folE PE=3 SV =1

SEQ ID NO: 11308 - protein, 193 aa, Mycolicibacterium brumae
  misc_feature (1)..(193): tr|A0A2G5P6L2|A0A2G5P6L2_9MYCO GTP cyclohydrolase 1 OS= Mycolicibacterium brumae OX=85968 GN=folE PE=3 SV=1
MAEFPEFDQERAEAAVRELLLAVGEDPERCGLRDTPARVARSFKEIFGGLYTDPDTVLETTFDEQHDELVLVKQIPMYSTCEHHLVAFHGVAHVGYIPGHDGRVTGLSKLARVVDLYAKRPQVQERLTGQIADAVMRKLDPRGVIVVIEAEHLCMAMRGVRKPGAITTTSAVRGQFKTDKASRAEALDLILRK

SEQ ID NO: 11309 - protein, 199 aa, Mycolicibacterium canariasense
  misc_feature (1)..(199): tr|A0A100WB17|A0A100WB17_9MYCO GTP cyclohydrolase 1 OS= Mycolicibacterium canariasense OX=228230 GN=folE PE=3 S V=1
MTASQANAALRDFDQPRAEAAVRELLLAVGEDPDRHGLVDTPARVARAYREIFAGLYTDPDAVLNTTFDEQHDELVLVKEIPMYSTCEHHLVSFHGVAHVGYIPGLDGRVTGLSKIARLVDLYAKRPQVQERLTAQIADALMRKLDPRGAIVVIEAEHLCMAMRGVRKPGAVTTTSAVRGQFKTDKASRSEALELILRK

SEQ ID NO: 11310 - protein, 200 aa, Mycolicibacterium celeriflavum
  misc_feature (1)..(200): tr|A0A1X0C261|A0A1X0C261_9MYCO GTP cyclohydrolase 1 OS= Mycolicibacterium celeriflavum OX=1249101 GN=folE PE=3 SV=1
MHSSAALQLVHPSPERDLAAAEAAATAFLSALGISLDSESLAGTPGRMARAYAELFTPRSFDLTTFPNDERYDELVISRNLPVRSVCEHHMLPFVGIAHIGYLPGERIIGLSKLARVAEHFACRPQCQERLTKQIADWLDNELQPRGVGVVIEAEHSCMTLRGVHAAGSATITSTLLGALREDLRSRQEFFALAGTHARP

SEQ ID NO: 11311 - protein, 202 aa, Mycolicibacterium celeriflavum
  misc_feature (1)..(202): tr|A0A1X0BSB3|A0A1X0BSB3_9MYCO GTP cyclohydrolase 1 OS= Mycolicibacterium celeriflavum OX=1249101 GN=folE PE=3 SV=1
MAQSRHNSVTFSPAKFDQPRAEAAVRELLLAVGEDPDRHGLESTPTRVARAYKELFAGLYIDPDSVLDTTFDEQHDELVLVKQIPMYSTCEHHLVSFHGVAHVGYIPGNDGRVTGLSKIARLVDLYAKRPQVQERLTGQIADAMMRKLDPRGVIVVVEAEHLCMAMRGVRKPGAVTTTSAVRGQFKVDAASRAEALDLILRG

SEQ ID NO: 11312 - protein, 202 aa, Mycolicibacterium chitae
  misc_feature (1)..(202): tr|A0A448HY24|A0A448HY24_MYCCI GTP cyclohydrolase 1 OS= Mycolicibacterium chitae OX=1792 GN=folE PE=3 SV=1
MAQPHSRTATVDVPVFDQERAEAAVRELLYAIGEDPDRHGLVDTPARVARAFQEMFAGLYLDPDEVLNTTFDEQHDELVLVKDIPMYSTCEHHLVAFHGVAHVGYIPGNDGRVTGLSKLARLVDLYAKRPQVQERLTAQVADALMRKLDPRGVIVVMEAEHLCMAMRGIRKPGAITTTSAVRGQFKTDNASRAEALELILRK

SEQ ID NO: 11313 - protein, 202 aa, Mycolicibacterium chlorophenolicum
  misc_feature (1)..(202): tr|A0A0J6WLS2|A0A0J6WLS2_9MYCO GTP cyclohydrolase 1 OS= Mycolicibacterium chlorophenolicum OX=37916 GN=folE PE= 3 SV=1
MTRSQDGSATITTPEFDQARAEAAVRELLIAVGEDPDRHGLVDTPARVARAYKEIFAGLHTNPDEVLNTTFDEQHDELVLVKDIPMYSTCEHHLVSFHGVAHVGYIPGRDGRVTGLSKLARVVDLYAKRPQVQERLTTQIADALMRKLDPRGAIVVVEAEHLCMAMRGIRKPGARTTTSAVRGQFKTDKASRAEALELILRK

SEQ ID NO: 11314 - protein, 202 aa, Mycolicibacterium chubuense
  misc_feature (1)..(202): tr|A0A0J6Z5A1|A0A0J6Z5A1_MYCCU GTP cyclohydrolase 1 OS= Mycolicibacterium chubuense OX=1800 GN=folE PE=3 SV=1
MTRSRDGSATITTPEFDQARAEAAVRELLIAVGEDPDRHGLVDTPARVARAYKEIFAGLHTDPDEVLNTTFDEQHDELVLVKDIPMYSTCEHHLVSFHGVAHVGYIPGRDGRVTGLSKLARVVDLYAKRPQVQERLTTQIADALMRKLDPRGAIVVVEAEHLCMAMRGIRKPGARTTTSAVRGQFKTDKASRAEALELILRK

SEQ ID NO: 11315 - protein, 205 aa, Mycolicibacterium conceptionense
  misc_feature (1)..(205): tr|A0A0J8UEX0|A0A0J8UEX0_9MYCO GTP cyclohydrolase 1 OS= Mycolicibacterium conceptionense OX=451644 GN=folE PE=3 SV=1
MSQSLREHHNNTDTARRVFDQPRAEAAVRELLIAIGEDPDRQGLLDTPARVARAYKELMAGLYTDPDAVLNTTFDEEHDELVLVKEIPMYSTCEHHLVSFHGVAHVGYIPGVDGRVTGLSKIARLVDLYSKRPQVQERLTAQIADALMRKLDPRGAIVVIEAEHLCMAMRGVRKPGAVTTTSAVRGQFKTDKASRAEALELILRK

SEQ ID NO: 11316 - protein, 202 aa, Mycolicibacterium confluentis
  misc_feature (1)..(202): tr|A0A1X1SHU7|A0A1X1SHU7_9MYCO GTP cyclohydrolase 1 OS= Mycolicibacterium confluentis OX=28047 GN=folE PE=3 SV= 1
MVLPNSRTATVDHPVFDQARAEAAVRELLYAIGEDPDRHGLIETPARVARAFEEMFAGLYLDPDEVLNTTFDEQHDELVLVKDIPMYSTCEHHLVAFHGVAHVGYIPGVDGRVTGLSKLARVVDLYAKRPQVQERLTAQIADALMRKLDPRGVIVVVEAEHLCMAMRGIRKPGATTTTSAVRGQFKSDKASRAEALELILRK

SEQ ID NO: 11317 - protein, 199 aa, Mycolicibacterium cosmeticum
  misc_feature (1)..(199): tr|W9APB4|W9APB4_9MYCO GTP cyclohydrolase 1 OS=Mycolici bacterium cosmeticum OX=258533 GN=folE PE=3 SV=1
MTASQANAALRDFDQPRAEAAVRELLLAVGEDPDRHGLVDTPARVARAYREIFAGLYTDPDAVLNTTFDEQHDELVLVKEIPMYSTCEHHLVSFHGVAHVGYIPGLDGRVTGLSKIARLVDLYAKRPQVQERLTAQIADALMRKLDPRGVIVVVEAEHLCMAMRGVRKPGAVTTTSAVRGQFKTDKASRSEALELILRK

SEQ ID NO: 11318 - protein, 205 aa, Mycolicibacterium diernhoferi
  misc_feature (1)..(205): tr|A0A1Q4HE96|A0A1Q4HE96_9MYCO GTP cyclohydrolase 1 OS= Mycolicibacterium diernhoferi OX=1801 GN=folE PE=3 SV=1
MTTSGNNLAETTAFTPVNFDQARAEAAVRELLIAVGEDPDRHGLVDTPARVARAYKEIFGGLYTDPDAVLNTTFDEQHDELVLVKEIPMYSTCEHHLVSFHGVAHVGYIPGLDGRVTGLSKIARLVDLYAKRPQVQERLTAQIADALMRKLDPRGVIVVVEAEHLCMAMRGVRKPGAITTTSAVRGQFKTDKASRSEALELILRR

SEQ ID NO: 11319 - protein, 201 aa, Mycolicibacterium doricum
  misc_feature (1)..(201): tr|A0A1X1TJ36|A0A1X1TJ36_9MYCO GTP cyclohydrolase 1 OS= Mycolicibacterium doricum OX=126673 GN=folE PE=3 SV=1
MTRAYGSATVKIAEFDQPRAEAAVRELLISVGEDPDRPGLVDTPARVARAYREMFAGLYTDPDDVLNTTFDEQHDEMVLVKDIPMYSTCEHHLVAFHGVAHVGYIPGVDGRVTGLSKLARVVDLYAKRPQVQERLTGQVADALMRKLDPRGVIVVMEAEHLCMAMRGVRKPGATTTTSAVRGQFKTDKASRAEALDLILRK

SEQ ID NO: 11320 - protein, 202 aa, Mycolicibacterium duvalii
  misc_feature (1)..(202): tr|A0A2A7N174|A0A2A7N174_9MYCO GTP cyclohydrolase 1 OS= Mycolicibacterium duvalii OX=39688 GN=folE PE=3 SV=1
MTRSHNNSATITLATFDQARAEAAVRELLIAVGEDPDREGLVDTPARVARAYREIFAGLYTDPDDVLKTMFDEQHDELVLVKDIPMYSTCEHHLVSFHGVAHVGYIPGEDGRVTGLSKLARVVDLYAKRPQVQERLTAQVADALMRRLDPRGVIVVIEAEHLCMAMRGIRKPGAVTTTSAVRGQFKTDKASRAEALDLILRK

SEQ ID NO: 11321 - protein, 207 aa, Mycolicibacterium elephantis
  misc_feature (1)..(207): tr|A0A439DW81|A0A439DW81_9MYCO GTP cyclohydrolase 1 OS= Mycolicibacterium elephantis DSM 44368 OX=1335622 GN=fo lE PE=3 SV=1
MTRSHRNSVTTSPGTFSPAKFDQTRVEAAVRELLIAVGEDPDRHGLEATPARVARAYRELFAGLYTDPDTVLDTTFDEQHDELVLVKQIPLYSTCEHHLVSFHGAAHVGYIPGADGRVTGLSKIARLVDLYAKRPQVQERLTGQIADALMRKLDPRGVIVVIEAEHLCMAMRGVRKPGAITTTSAVRGQFKHDAASRAEALDLILRK

SEQ ID NO: 11322 - protein, 207 aa, Mycolicibacterium elephantis
  misc_feature (1)..(207): tr|A0A0M2ZI45|A0A0M2ZI45_9MYCO GTP cyclohydrolase 1 OS= Mycolicibacterium elephantis OX=81858 GN=folE PE=3 SV=1
MTRSHRNWVTISPGTFSPAKFDQSRAEAAVRELLIAVGEDPDRHGLEETPARVARAYRELFAGLYTDPDTVLDTTFDEQHDELVLVKQIPLYSTCEHHLVSFHGAAHVGYIPGADGRVTGLSKIARLVDLYAKRPQVQERLTGQIADALMRKLDPRGVIVVIEAEHLCMAMRGVRKPGAITTTSAVRGQFKHDAASRAEALDLILRK

SEQ ID NO: 11323 - protein, 206 aa, Mycolicibacterium fallax
  misc_feature (1)..(206): tr|A0A1X1RFD2|A0A1X1RFD2_MYCFA GTP cyclohydrolase 1 OS= Mycolicibacterium fallax OX=1793 GN=folE PE=3 SV=1
MTTQAHPAPRQAGAEDYPVFDQPRAEAAVRELLLAIGEDPDRQGLRDTPARVARSFREIFAGLYSDPDAVLDTTFDEQHDELVLVKQIPMYSTCEHHLVSFHGFAHVGYIPGVDGRVTGLSKIARVVDMYAKRPQVQERLTGQIADAVMRKLDPRGVIVVVEAEHLCMAMRGVRKPGAVTTTSAVRGQFKTDKASRAEALELILRK

SEQ ID NO: 11324 - protein, 207 aa, Mycolicibacterium flavescens
  misc_feature (1)..(207): tr|A0A448HKZ9|A0A448HKZ9_MYCFV GTP cyclohydrolase 1 OS= Mycolicibacterium flavescens OX=1776 GN=folE_1 PE=3 SV= 1
MLQTPEAPQTGNGQRPPARVFDQAAVEAAIFDLLVAIGEDPHRDGLRDTPARVARAYQETFAGLYSDPDDVLTTMFDEHHGELVLIKQIPMYSTCEHHLVSFHGVAHVGYLPGEDGRVTGLSKIARLVDLYARRPQVQERLTGQIAEAVMNKLHPRGVIVVIEAEHLCMAMRGVRKPGAVTTTSAVRGQFQTDPASRAEALHLLLRR

SEQ ID NO: 11325 - protein, 204 aa, Mycolicibacterium flavescens
  misc_feature (1)..(204): tr|A0A1E3REQ5|A0A1E3REQ5_MYCFV GTP cyclohydrolase 1 OS= Mycolicibacterium flavescens OX=1776 GN=folE PE=3 SV=1
MTQHTAVNDQVHFNPAKFDQPRAEAAVRELLIAVGEDPDRHGLEATPARVARAYKELFAGLYTDPDSVLDTTFDEQHDELVLVKQIPMYSTCEHHLVSFHGFAHVGYIPGVDGRVTGLSKIARLVDLYAKRPQVQERLTGQIADAMMRKLNPRGAIVVIEAEHLCMAMRGIRKQGAITTTSAVRGQFKTDKASRAEALDLILRK

SEQ ID NO: 11326 - protein, 205 aa, Mycolicibacterium fortuitum
  misc_feature (1)..(205): tr|A0A117IG17|A0A117IG17_MYCFO GTP cyclohydrolase 1 OS= Mycolicibacterium fortuitum subsp. acetamidolyticum OX= 144550 GN=folE PE=3 SV=1
MSQSLREHHNNADTATRVFDQPRAEAAVRELLIAIGEDPDRQGLLDTPARVARAYKELMAGLYTDPDAVLNTTFDEEHDELVLVKEIPLYSTCEHHLVSFHGVAHVGYIPGVDGRVTGLSKIARLVDLYSKRPQVQERLTAQIADALMRKLDPRGAIVVIEAEHLCMAMRGVRKPGAVTTTSAVRGQFKTDKASRAEALELILRK

SEQ ID NO: 11327 - protein, 205 aa, Mycolicibacterium fortuitum; identical to SEQ ID NO: 11326
  misc_feature (1)..(205): tr|A0A0N9YCY5|A0A0N9YCY5_MYCFO GTP cyclohydrolase 1 OS= Mycolicibacterium fortuitum OX=1766 GN=folE PE=3 SV=1

SEQ ID NO: 11328 - protein, 202 aa, Mycolicibacterium gilvum
  misc_feature (1)..(202): sp|A4T5P2|GCH1_MYCGI GTP cyclohydrolase 1 OS=Mycoliciba cterium gilvum (strain PYR-GCK) OX=350054 GN=folE PE=3 SV=1
MTRSHNHSATLTTPDFDQARAEAAVRELLIAVGEDPDREGLLDTPARVARSYREIFAGLYTDPDEVLTTMFDEQHDEMVLVKDIPMYSTCEHHLVSFHGVAHVGYIPGVDGRVTGLSKLARVVDLYAKRPQVQERLTSQIADALMRKLDPRGAIVVIEAEHLCMAMRGIRKPGAVTTTSAVRGQFKTDKASRAEALDLILRK

SEQ ID NO: 11329 - protein, 202 aa, Mycolicibacterium gilvum
  misc_feature (1)..(202): tr|E6THN3|E6THN3_MYCSR GTP cyclohydrolase 1 OS=Mycolici bacterium gilvum (strain DSM 45189 / LMG 24558 / Spyr1) OX=278137 GN=folE PE=3 SV=1
MTRSHNHSATLTTPDFDQARAEAAVRELLIAVGEDPDREGLRDTPARVARSYREIFAGLYTDPDEVLTTMFDEQHDEMVLVKDIPMYSTCEHHLVSFHGVAHVGYIPGVDGRVTGLSKLARVVDLYAKRPQVQERLTAQIADALMRKLDPRGAIVVIEAEHLCMAMRGIRKPGAVTTTSAVRGQFKTDKASRAEALDLILRK

SEQ ID NO: 11330 - protein, 188 aa, Mycolicibacterium hassiacum
  misc_feature (1)..(188): tr|K5B7J9|K5B7J9_MYCHD GTP cyclohydrolase 1 OS=Mycolici bacterium hassiacum (strain DSM 44199 / CIP 105218 / JC M 12690 / 3849) OX=1122247 GN=folE PE=3 SV=1
MFDQARVEAAIRELLIGVGEDPDRHGLEDTPARVARAYKEVFAGLYTDPDEVLNTTFDEQHDELVLVKDIPMYSTCEHHLVAFHGVAHVGYIPGEDGRVTGLSKIARLVDLYAKRPQVQERLTAQIADALMRKLNPRGVIVVVEAEHLCMSMRGVRKPGAVTTTSAVRGQFKSDKASRAEALELILRK

SEQ ID NO: 11331 - protein, 191 aa, Mycolicibacterium hodleri
  misc_feature (1)..(191): tr|A0A544VVG6|A0A544VVG6_9MYCO GTP cyclohydrolase 1 OS= Mycolicibacterium hodleri OX=49897 GN=folE PE=3 SV=1
MPATFDQERAENAVRELLYAVGEDPERHGLLDTPARVARAYREMFAGLYSNPDDVLNTTFDEQHDELVLVKDIPMYSTCEHHLVSFHGVAHVGYIPGVDGRVTGLSKLARVVDMYAKRPQVQERLTGQVADALMRKLDPRGVIVVIEAQHLCMAMRGIRKPGASTTTSAVRGQFKTDNASRSEALDLILRK

SEQ ID NO: 11332 - protein, 201 aa, Mycolicibacterium hodleri
  misc_feature (1)..(201): tr|A0A502E118|A0A502E118_9MYCO GTP cyclohydrolase 1 OS= Mycolicibacterium hodleri OX=49897 GN=folE PE=3 SV=1
MSLPIDPHVFVPANFDQDRAEKAVRELLYAIGEDPQRPGLLDTPARVARAYKEMFAGLYTDPDDVLNTTFDEQHDELVLVKSIPMYSTCEHHLVAFHGVAHVGYIPGADGRVTGLSKLARVVDLYAKRPQVQERLTGQVADAVMRKLDPRGVIVVIEAEHLCMAMRGVRKPGATTTTSAVRGQFKTDSTLRAEALDLILRK

SEQ ID NO: 11333 - protein, 207 aa, Mycolicibacterium holsaticum
  misc_feature (1)..(207): tr|A0A1E3RTE3|A0A1E3RTE3_9MYCO GTP cyclohydrolase 1 OS= Mycolicibacterium holsaticum OX=152142 GN=folE PE=3 SV= 1
MTRSHNNSTTISPGRFSPATFDQARAEAAVRELLVAVGEDPDRNGLQDTPARVARAYQELFAGLYTDPDTVLDTTFDEQHDELVLVKQIPLYSTCEHHLVSFHGAAHVGYIPGADGRVTGLSKIARLVDLYAKRPQVQERLTAQIADALMRKLNPRGAIVVIEAEHLCMAMRGVRKPGAITTTSAVRGQFKCDAASRAEALDLILRK

SEQ ID NO: 11334 - protein, 198 aa, Mycolicibacterium holsaticum
  misc_feature (1)..(198): tr|A0A1E3R6I0|A0A1E3R6I0_9MYCO GTP cyclohydrolase 1 OS= Mycolicibacterium holsaticum OX=152142 GN=folE PE=3 SV= 1
MHSNAALQLVPPSPDRDVAAAEIAAAAFLRALGISLESEGLRDTPARMARGYAELLTPRTFDLTTFPNDEGYDELVMCRNLPIRSVCEHHMLPFTGTAHIGYLPGDRIIGLSKLARIAEHFACRPQLQERLTKQIAECLVEHLQPRGVGVVIEAEHSCMTLRGVHATGSATITSTLLGALRDDARSRQEFFALADVNA

SEQ ID NO: 11335 - protein, 199 aa, Mycolicibacterium insubricum
  misc_feature (1)..(199): tr|A0A1X0CT65|A0A1X0CT65_9MYCO GTP cyclohydrolase 1 OS= Mycolicibacterium insubricum OX=444597 GN=folE PE=3 SV= 1
MTTQEVAVAPGVFDQARAEAAVRELLLAVGEDPDRPGLLETPARVARSYREIFAGLYTDPDAVLDTTFDEDHDELVLVKSIPMYSTCEHHLVSFHGVAHVGYIPGADGRVTGLSKIARVVDLYAKRPQVQERLTCQIADAVMRKLDPRGVIVVIEAEHLCMAMRGVRKPGAITTTSAVRGQFKTDKASRAEALELILRK

SEQ ID NO: 11336 - protein, 202 aa, Mycolicibacterium iranicum
  misc_feature (1)..(202): tr|A0A178M3H9|A0A178M3H9_9MYCO GTP cyclohydrolase 1 OS= Mycolicibacterium iranicum OX=912594 GN=folE PE=3 SV=1
MTRSHNNSATLTTPDFDQARAEAAVRELLIAVGEDPDRHGLVDTPARVARAYREMFAGLYTDPDDVLNTTFDEQHDELVLVRDIPMYSTCEHHLVSFHGIAHVGYIPGADGRVTGLSKLARVVDLYAKRPQVQERLTSQIADALMRKLDPRGAIVVIEAEHLCMAMRGIRKPGARTTTSAVRGQFKTDKASRAEALDLILRK

SEQ ID NO: 11337 - protein, 202 aa, Mycolicibacterium iranicum
  misc_feature (1)..(202): tr|A0A1X1WMI5|A0A1X1WMI5_9MYCO GTP cyclohydrolase 1 OS= Mycolicibacterium iranicum OX=912594 GN=folE PE=3 SV=1
MTRSHNNSATLTTPDFDQARAEAAVRELLIAVGEDPDRHGLVDTPARVARAYREMFAGLYTDPDDVLNTTFDEQHDEMVLVRDIPMYSTCEHHLVSFHGVAHVGYIPGADGRVTGLSKLARVVDLYAKRPQVQERLTSQIADALMRKLDPRGAIVVIEAEHLCMAMRGIRKPGARTTTSAVRGQFKTDKASRAEALDLILRK

SEQ ID NO: 11338 - protein, 201 aa, Mycolicibacterium litorale
  misc_feature (1)..(201): tr|A0A4R8J0M8|A0A4R8J0M8_9MYCO GTP cyclohydrolase 1 OS= Mycolicibacterium litorale OX=758802 GN=folE PE=3 SV=1
MTRSHNSTTVNIADFDQQRAEAAVRELLIAVGEDPDRHGLIDTPARVARAYREMFAGLYVDPDDVLNTTFDEQHDEMVLVKDIPMYSTCEHHLVAFHGVAHVGYIPGVDGRVTGLSKLARVVDLYAKRPQVQERLTAQVADALMRKLDPRGVIVVMEAEHLCMAMRGIRKPGATTTTSAVRGQFKTDKASRAEALDLILRK

SEQ ID NO: 11339 - protein, 200 aa, Mycolicibacterium litorale
  misc_feature (1)..(200): tr|A0A1U9PMV4|A0A1U9PMV4_9MYCO GTP cyclohydrolase 1 OS= Mycolicibacterium litorale OX=758802 GN=folE PE=3 SV=1
MAQPTSITLVTPEFDQARAEAAVRELLLAVGEDPDRHGLQDTPARVARAFREMFAGLYTDPDAVLETTFDEQHDELVLVKDIPMYSTCEHHLVAFHGVAHVGYIPGEDGRVTGLSKLARVVDLYAKRPQVQERLTTQVADAVMRKLKPRGVIVVIEAEHLCMAMRGVRKPGATTTTSAVRGQFKTDKASRAEALELILRK

SEQ ID NO: 11340 - protein, 202 aa, Mycolicibacterium llatzerense
  misc_feature (1)..(202): tr|A0A0D1L720|A0A0D1L720_9MYCO GTP cyclohydrolase 1 OS= Mycolicibacterium llatzerense OX=280871 GN=folE PE=3 SV =1
MTRSQIHSARLTAPKFDHDRAEAAVRELLLAVGEDPDRDGLRDTPGRVARAFEEIFGGLYTDPDSVLNTTFDEGHDELVLVKDIPMYSTCEHHLVSFHGVAHVGYIPGEDGRVTGLSKIARLVDLYAKRPQVQERLTGQIADALMRKLNPQGAIVVIEAEHLCMAMRGVRKPGAVTTTSAVRGQFKTCASSRAEALDLILRK

SEQ ID NO: 11341 - protein, 203 aa, Mycolicibacterium mageritense
  misc_feature (1)..(203): tr|A0A5C7YTD8|A0A5C7YTD8_9MYCO GTP cyclohydrolase 1 OS= Mycolicibacterium mageritense OX=53462 GN=folE PE=3 SV= 1
MTSLREHNDTARDTPVFDQPRAEAAVRELLLAIGEDPDRQGLLDTPARVARAYKELMAGLYTDPDAVLNTTFDEQHDELVLVKQIPMYSTCEHHLVSFHGVAHVGYIPGVDGRVTGLSKIARLVDLYSKRPQVQERLTAQIADALMRKLDPRGVIVVVEAEHLCMAMRGVRKPGAITTTSAVRGQFKTDKASRAEALELILRK

SEQ ID NO: 11342 - protein, 203 aa, Mycolicibacterium mageritense; identical to SEQ ID NO: 11341
  misc_feature (1)..(203): tr|X5KXJ9|X5KXJ9_9MYCO GTP cyclohydrolase 1 OS=Mycolici bacterium mageritense DSM 44476 = CIP 104973 OX=1209984 GN=folE PE=3 SV=1

SEQ ID NO: 11343 - protein, 201 aa, Mycolicibacterium monacense
  misc_feature (1)..(201): tr|A0A1X0H617|A0A1X0H617_9MYCO GTP cyclohydrolase 1 OS= Mycolicibacterium monacense DSM 44395 OX=1226751 GN=fol E PE=3 SV=1
MTRSYDSALVKIADFDQPRAEAAVRELLIAIGEDPDRHGLVDTPARVARAYREMFAGLYTDPDDVLNTTFDEQHDEMVLVKDIPMYSTCEHHLVAFHGVAHVGYIPGVDGRVTGLSKLARVVDLYAKRPQVQERLTAQVADALMRKLDPRGVIVVMEAEHLCMAMRGIRKPGATTTTSAVRGQFKTDKASRAEALDLILRK

SEQ ID NO: 11344 - protein, 204 aa, Mycolicibacterium moriokaense
  misc_feature (1)..(204): tr|A0A318HFG8|A0A318HFG8_9MYCO GTP cyclohydrolase 1 OS= Mycolicibacterium moriokaense OX=39691 GN=folE PE=3 SV= 1
MTIARPHNNSATFTSPVFDQPRAEAAVRELLIAIGEDPDRHGLEDTPARVARAYKEMFAGLYTNPDTVLDTTFDEQHDELVLVKQIPLYSTCEHHLVAFHGVAHVGYIPGKDGRVTGLSKIARLVDLYAKRPQVQERLTAQIADALMRKLDPRGVIVVVEAEHLCMSMRGVRKPGATTTTSAVRGQFKADASSRSEALDLILRK

SEQ ID NO: 11345 - protein, 202 aa, Mycolicibacterium moriokaense
  misc_feature (1)..(202): tr|A0A370CVN8|A0A370CVN8_9MYCO GTP cyclohydrolase 1 OS= Mycolicibacterium moriokaense OX=39691 GN=folE PE=3 SV= 1
MTRPHNNSATISTPDFDQPRAEAAIRELLIAVGEDPDRHGLEDTPARVARAYKEMFAGLYTDPDDVLNTTFDEQHDEMVLVKDIPMYSTCEHHLVAFHGVAHVGYIPGEDGRVTGLSKLARVVDLYAKRPQVQERLTAQVADALMRKLQPRGAIVVIEAEHLCMSMRGIRKPGAVTTTSAVRGQFKTDKASRSEALDLILRK

SEQ ID NO: 11346 - protein, 202 aa, Mycolicibacterium mucogenicum
  misc_feature (1)..(202): tr|A0A1A3HGV7|A0A1A3HGV7_9MYCO GTP cyclohydrolase 1 OS= Mycolicibacterium mucogenicum OX=56689 GN=folE PE=3 SV= 1
MTRSQIHSARLTPPKFDHDRAEAAVRELLLAVGEDPDRDGLRDTPGRVARAFEEIFGGLYTDPDSVLDTTFDEGHDELVLVKDIPMYSTCEHHLVSFHGVAHVGYIPGEDGRVTGLSKIARLVDLYAKRPQVQERLTGQIADALMRKLNPQGAIVVIEAEHLCMAMRGVRKPGAVTTTSAVRGQFKTCASSRAEALDLILRK

SEQ ID NO: 11347 - protein, 196 aa, Mycolicibacterium mucogenicum
  misc_feature (1)..(196): tr|A0A495CS58|A0A495CS58_9MYCO GTP cyclohydrolase 1 OS= Mycolicibacterium mucogenicum 261Sha1.1M5 OX=1415782 GN =folE PE=3 SV=1
MSAGVDRDRVARAVRELLSAIGADPESDELRATPGRVADSYAEFFAGVGVDPQQFLSDAVPVDGETGELVLMRDIALRSICEHHLLPFRGRAHVAYQPRDRVVGLSALPRVVDALAARPQVQERLGEQIAQAIADGLDAKGVLVVLEASHGCVADRGVRETEAEAVTIAARGSLSDAAARSEIMALIAPGSPRASL

SEQ ID NO: 11348 - protein, 205 aa, Mycolicibacterium neoaurum
  misc_feature (1)..(205): tr|V5XGQ5|V5XGQ5_MYCNE GTP cyclohydrolase 1 OS=Mycolici bacterium neoaurum VKM Ac-1815D OX=700508 GN=folE PE=3 SV=1
MTTSGKNGESTSGFVQAEFDQPRAEAAVRELLLAVGEDPDRHGLVDTPARVARAYKEIFAGLYTDPDAVLNTTFDEQHDELVLVKQIPMYSTCEHHLVSFHGVAHVGYIPGRDGRVTGLSKIARLVDLYAKRPQVQERLTAQVADALMRKLDPRGVIVVMEAEHLCMAMRGIRKPGAVTTTSAVRGQFKTDHASRAEALDLILRR

SEQ ID NO: 11349 - protein, 205 aa, Mycolicibacterium neoaurum
  misc_feature (1)..(205): tr|A0A024QXG9|A0A024QXG9_MYCNE GTP cyclohydrolase 1 OS= Mycolicibacterium neoaurum OX=1795 GN=folE PE=3 SV=1
MTTSGKNGESTSGFVQAEFDQPRAEAAVRELLLAVGEDPDRHGLIDTPARVARAYKEIFAGLYTDPDAVLNTTFDEQHDELVLVKQIPMYSTCEHHLVSFHGVAHVGYIPGRDGRVTGLSKIARLVDLYAKRPQVQERLTAQVADALMRKLDPRGVIVVMEAEHLCMAMRGIRKPGAVTTTSAVRGQFKTDKASRAEALDLILRR

SEQ ID NO: 11350 - protein, 205 aa, Mycolicibacterium neworleansense
  misc_feature (1)..(205): tr|A0A0H5S975|A0A0H5S975_9MYCO GTP cyclohydrolase 1 OS= Mycolicibacterium neworleansense OX=146018 GN=folE PE=3 SV=1
MSQSLREHHNNTDTATRVFDQPRAEAAVRELLIAIGEDPDRQGLMDTPARVARAYKELMAGLYTDPDAVLNTTFDEEHDELVLVKEIPMYSTCEHHLVSFHGVAHVGYIPGVDGRVTGLSKIARLVDLYSKRPQVQERLTAQIADALMRKLDPRGAIVVIEAEHLCMAMRGVRKPGAVTTTSAVRGQFKTDKASRAEALELILRK

SEQ ID NO: 11351 - protein, 207 aa, Mycolicibacterium novocastrense
  misc_feature (1)..(207): tr|A0A100X2Z4|A0A100X2Z4_9MYCO GTP cyclohydrolase 1 OS= Mycolicibacterium novocastrense OX=59813 GN=folE PE=3 S V=1
MLQTPEAPQTGNGQLPRARVFDQEAVEAAIFDLLVAIGEDPHRDGLRDTPARVARAYQETFAGLYADPDDVLTTMFDEHHGELVLIKQIPMYSTCEHHLVSFHGVAHVGYLPGEDGRVTGLSKIARLVDLYARRPQVQERLTGQIAEAVMNKLHPRGVIVVVEAEHLCMAMRGVRKPGAVTTTSAVRGQFQTDPASRAEALHLLLRR

SEQ ID NO: 11352 - protein, 202 aa, Mycolicibacterium novocastrense
  misc_feature (1)..(202): tr|A0A124E755|A0A124E755_9MYCO GTP cyclohydrolase 1 OS= Mycolicibacterium novocastrense OX=59813 GN=folE PE=3 S V=1
MAQSQHNSVTFRPANFDQPRAEAAVRELLLAVGEDPDRHGLESTPARVARAYKELFAGLYIDPDSVLDTTFDEQHDELVLVKQIPMYSTCEHHLVSFHGVAHVGYIPGQDGRVTGLSKIARLVDLYAKRPQVQERLTGQIADAMMRKLDPRGVIVVVEAEHLCMAMRGVRKPGAVTTTSAVRGQFKVDAASRAEALDLILRK

SEQ ID NO: 11353 - protein, 202 aa, Mycolicibacterium obuense
  misc_feature (1)..(202): tr|A0A0J6WJ93|A0A0J6WJ93_9MYCO GTP cyclohydrolase 1 OS= Mycolicibacterium obuense OX=1807 GN=folE PE=3 SV=1
MTRSQEISATLTTPEFDQARAEAAVRELLLAVGEDPDRHGLLDTPARVARAYREMFAGLYTDPDDVLNTTFDEQHDELVLVKDIPMYSTCEHHLVSFHGVAHVGYIPGKDGRVTGLSKLARVVDLYAKRPQVQERLTCQVADALMRKLDPRGAIVVIEAEHLCMAMRGIRKPGARTTTSAVRGVFKTNTASRAEALDLILRK

SEQ ID NO: 11354 - protein, 202 aa, Mycolicibacterium obuense
  misc_feature (1)..(202): tr|A0A0M2JWD2|A0A0M2JWD2_9MYCO GTP cyclohydrolase 1 OS= Mycolicibacterium obuense OX=1807 GN=folE PE=3 SV=1
MTRSQEISATLTTPEFDQARAEAAVRELLLAVGEDPDRHGLLDTPARVARAYREIFAGLYTDPDDVLNTTFDEQHDELVLVKDIPMYSTCEHHLVSFHGVAHVGYIPGKDGRVTGLSKLARVVDLYAKRPQVQERLTCQVADALMRKLDPRGAIVVIEAEHLCMAMRGIRKPGARTTTSAVRGVFKTNTASRAEALDLILRK

SEQ ID NO: 11355 - protein, 202 aa, Mycolicibacterium parafortuitum
  misc_feature (1)..(202): tr|A0A375YBX1|A0A375YBX1_MYCPF GTP cyclohydrolase 1 OS= Mycolicibacterium parafortuitum OX=39692 GN=folE PE=3 S V=1
MTRSHNHTATLTARDFDQARAEAAVRELLIAVGEDPDREGLLDTPARVARSYREIFAGLYTDPDDVLTTMFDEQHDEMVLVKDIPMYSTCEHHLVSFHGVAHVGYIPGVDGRVTGLSKLARVVDLYAKRPQVQERLTAQIADALMRKLNPRGAIVVIEAEHLCMAMRGIRKPGAVTTTSAVRGQFKTDKASRAEALDLILRK

SEQ ID NO: 11356 - protein, 204 aa, Mycolicibacterium paratuberculosis
  misc_feature (1)..(204): sp|Q743Z2|GCH1_MYCPA GTP cyclohydrolase 1 OS=Mycoliciba cterium paratuberculosis (strain ATCC BAA-968 / K-10) O X=262316 GN=folE PE=3 SV=1
MAGNGSAPDTATHQVRQFDQARAEAAVRELLFAIGEDPDRHGLAETPARVARAYREMFAGLYTDPDSVLNTMFDEEHDELVLVKEIPLYSTCEHHLVSFHGVAHVGYIPGNDGRVTGLSKIARLVDLYAKRPQVQERLTSQIADALVKKLNPRGVIVVVEAEHLCMAMRGVRKPGAVTTTSAVRGLFKTNAASRAEALDLILRK

SEQ ID NO: 11357 - protein, 205 aa, Mycolicibacterium peregrinum
  misc_feature (1)..(205): tr|A0A1A0W084|A0A1A0W084_MYCPR GTP cyclohydrolase 1 OS= Mycolicibacterium peregrinum OX=43304 GN=folE PE=3 SV=1
MSQSLREHHNNTDTATRVFDQPRAEAAVRELLIAIGEDPDRQGLLDTPARVARAYKELMAGLYTDPDAVLNTTFDEEHDELVLVKQIPLYSTCEHHLVSFHGVAHVGYIPGVDGRVTGLSKIARLVDLYSKRPQVQERLTAQIADALMRKLDPRGAIVVIEAEHLCMAMRGVRKPGAVTTTSAVRGQFKTDKASRAEALELILRK

SEQ ID NO: 11358 - protein, 205 aa, Mycolicibacterium peregrinum
  misc_feature (1)..(205): tr|A0A1A0QK85|A0A1A0QK85_MYCPR GTP cyclohydrolase 1 OS= Mycolicibacterium peregrinum OX=43304 GN=folE PE=3 SV=1
MSQSLREHHNNTDTATRVFDQPRAEAAVRELLIAIGEDPDRQGLLDTPARVARAYKELMAGLYTDPDAVLNTTFDEEHDELVLVKQIPMYSTCEHHLVSFHGVAHVGYIPGVDGRVTGLSKIARLVDLYSKRPQVQERLTAQIADALMRKLDPRGAIVVIEAEHLCMAMRGVRKPGAVTTTSAVRGQFKTDKASRAEALELILRK

SEQ ID NO: 11359 - protein, 207 aa, Mycolicibacterium phlei; identical to SEQ ID NO: 11270
  misc_feature (1)..(207): tr|A0A139VLL6|A0A139VLL6_MYCPH GTP cyclohydrolase 1 OS= Mycolicibacterium phlei DSM 43239 = CCUG 21000 OX=12267 50 GN=folE PE=3 SV=1

SEQ ID NO: 11360 - protein, 202 aa, Mycolicibacterium phlei
  misc_feature (1)..(202): tr|A0A139VMQ8|A0A139VMQ8_MYCPH GTP cyclohydrolase 1 OS= Mycolicibacterium phlei DSM 43239 = CCUG 21000 OX=12267 50 GN=folE PE=3 SV=1
MAQSQRNSVTFHPAKFDQARAEAAVRELLIAVGEDPDRHGLEDTPARVARAYQELFAGLYTDPDSVLDTTFDEQHDELVLVKQIPMYSTCEHHLVSFHGVAHVAYIPGQDGRVTGLSKIARLVDLYAKRPQVQERLTGQIADAMMRKLDPRGVIVVIEAEHLCMAMRGVRKPGAITTTSAVRGQFKVDAASRAEALELILRK

SEQ ID NO: 11361 - protein, 205 aa, Mycolicibacterium porcinum
  misc_feature (1)..(205): tr|A0A1Q8XXH4|A0A1Q8XXH4_9MYCO GTP cyclohydrolase 1 OS= Mycolicibacterium porcinum OX=39693 GN=folE PE=3 SV=1
MSQSLREHHNNTDTATRVFDQPRAEAAVRELLIAIGEDPDRQGLLDTPARVARAYKELMAGLYTDPDAVLNTTFDEEHDELVLVKEIPLYSTCEHHLVSFHGVAHVGYIPGVDGRVTGLSKIARLVDLYSKRPQVQERLTAQIADALMRKLDPRGAIVVIEAEHLCMAMRGVRKPGAVTTTSAVRGQFKTDKASRAEALELILRK

SEQ ID NO: 11362 - protein, 205 aa, Mycolicibacterium porcinum; identical to SEQ ID NO: 11326
  misc_feature (1)..(205): tr|A0A393Y542|A0A393Y542_9MYCO GTP cyclohydrolase 1 OS= Mycolicibacterium porcinum OX=39693 GN=folE PE=3 SV=1

SEQ ID NO: 11363 - protein, 206 aa, Mycolicibacterium rhodesiae
  misc_feature (1)..(206): tr|A0A1X0IQJ8|A0A1X0IQJ8_MYCRH GTP cyclohydrolase 1 OS= Mycolicibacterium rhodesiae OX=36814 GN=folE PE=3 SV=1
MTNGASMPQPDASTLEAPVFDQCRAEAAVRELLLAVGEDPDRHGLQDTPARVARAFQEMFSGLYTDPDAVLDTTFDEQHDELVLVKDIPMYSTCEHHLVAFHGVAHVGYIPGEDGRVTGLSKLARVVDLYAKRPQVQERLTTQIADAVMRKLKPRGVIVVIEAEHLCMAMRGVRKPGASTTTSAVRGQFKSDHASRSEALDLILRK

SEQ ID NO: 11364 - protein, 200 aa, Mycolicibacterium rhodesiae
  misc_feature (1)..(200): tr|G4HRD5|G4HRD5_MYCRH GTP cyclohydrolase 1 OS=Mycolici bacterium rhodesiae JS60 OX=931627 GN=folE PE=3 SV=1
MPQPNAVMLDAPVFDQPRAEAAVRELLLAVGEDPDRHGLVETPARVARAFQEMFAGLYTDPDAVLETTFDEQHDELVLVKQIPMYSTCEHHLVAFHGVAHVGYIPGEDGRVTGLSKLARVVDLYAKRPQVQERLTGQIADAIMRKLKPRGVIVVVEAEHLCMAMRGVRKPGAVTTTSAVRGQFKTDTASRAEALELILRR

SEQ ID NO: 11365 - protein, 206 aa, Mycolicibacterium rutilum
  misc_feature (1)..(206): tr|A0A1H6JM47|A0A1H6JM47_9MYCO GTP cyclohydrolase 1 OS= Mycolicibacterium rutilum OX=370526 GN=folE PE=3 SV=1
MQSQHAAVSDEAVTFNPAKFDQPRAEAAVRELLIAVGEDPDRHGLEATPARVARAYKEVFAGLYTDPDSVLNTTFDEQHDELVLVKQIPMYSTCEHHLVSFHGVAHVGYIPGVDGRVTGLSKIARLVDLYAKRPQVQERLTGQIADALMRKLDPRGAIVVIEAEHLCMAMRGIRKPGAVTTTSAVRGQFKTDKASRAEALDLILRK

SEQ ID NO: 11366 - protein, 205 aa, Mycolicibacterium senegalense; identical to SEQ ID NO: 11315
  misc_feature (1)..(205): tr|A0A378W9R9|A0A378W9R9_9MYCO GTP cyclohydrolase 1 OS= Mycolicibacterium senegalense OX=1796 GN=folE PE=3 SV=1

SEQ ID NO: 11367 - protein, 205 aa, Mycolicibacterium setense
  misc_feature (1)..(205): tr|A0A0B2Y3V6|A0A0B2Y3V6_9MYCO GTP cyclohydrolase 1 OS= Mycolicibacterium setense OX=431269 GN=folE PE=3 SV=1
MSQSLREHHNNTETVTRVFDQPRAEAAVRELLIAIGEDPDRQGLVDTPARVARAYKELMAGLYTDPDAVLNTTFDEEHDELVLVKQIPLYSTCEHHLVSFHGVAHVGYIPGVDGRVTGLSKIARLVDLYSKRPQVQERLTAQIADALMRKLDPRGAIVVIEAEHLCMAMRGVRKPGAVTTTSAVRGQFKTDKASRAEALELILRK

SEQ ID NO: 11368 - protein, 203 aa, Mycolicibacterium smegmatis
  misc_feature (1)..(203): tr|I7FU46|I7FU46_MYCS2 GTP cyclohydrolase 1 OS=Mycolici bacterium smegmatis (strain ATCC 700084 / mc(2)155) OX= 246196 GN=folE PE=3 SV=1
MTQSLRGHQNNNVRRVFDQPRAEAAVRELLIAIGEDPEREGLVDTPARVARAYKELMAGLHTDPDSVLNTTFDEGHDELVLVKQIPMYSTCEHHLVSFHGVAHVGYIPGVDGRVTGLSKIARLVDLYSKRPQVQERLTAQIADALMRKLDPRGVIVVVEAEHLCMAMRGVRKPGAVTTTSAVRGQFKTDKASRAEALELILRK

SEQ ID NO: 11369 - protein, 203 aa, Mycolicibacterium smegmatis; identical to SEQ ID NO: 11368
  misc_feature (1)..(203): tr|A0A0D6J110|A0A0D6J110_MYCSM GTP cyclohydrolase 1 OS= Mycolicibacterium smegmatis OX=1772 GN=folE PE=3 SV=1

SEQ ID NO: 11370 - protein, 202 aa, Mycolicibacterium sp.
  misc_feature (1)..(202): tr|A0A391PAU7|A0A391PAU7_9MYCO GTP cyclohydrolase 1 OS= Mycolicibacterium sp. NCC-Tsukiji OX=2185272 GN=folE PE =3 SV=1
MTRSQIHSARLTPPKFDHDRAEAAVRELLLAVGEDPDRDGLRDTPGRVARAFEEIFGGLYTDPDSVLDTTFDEGHDELVLVKDIPMYSTCEHHLVSFHGVAHVGYIPGEDGRVTGLSKIARLVDLYAKRPQVQERLTGQIADALMRKLNPQGAIVVVEAEHLCMAMRGVRKPGAVTTTSAVRGQFKTCASSRAEALDLILRK

SEQ ID NO: 11371 - protein, 200 aa, Mycolicibacterium sp.
  misc_feature (1)..(200): tr|A0A5A7YPT5|A0A5A7YPT5_9MYCO GTP cyclohydrolase 1 OS= Mycolicibacterium sp. P1-5 OX=2024617 GN=folE PE=3 SV=1
MPQPNSSTLETPVFDQSRAEAAVRELLLAVGEDPDRQGLQDTPARVARAFEEMFAGLYTDPDDVLSTTFDEQHDELVLVKQIPMYSTCEHHLVSFHGVAHVGYIPGEDGRVTGLSKLARVVDLYAKRPQVQERLTGQIADAIMRKLKPRGVIVVIEAEHLCMAMRGVRKPGAITTTSAVRGQFKTDNASRSEALDLILRK

SEQ ID NO: 11372 - protein, 200 aa, Mycolicibacterium sphagni
  misc_feature (1)..(200): tr|A0A255DJQ7|A0A255DJQ7_9MYCO GTP cyclohydrolase 1 OS= Mycolicibacterium sphagni OX=1786 GN=folE PE=3 SV=1
MSQPNSVARDVPVFDQPRAEAAVRELLLAVGEDPDRHGLVDTPARVARAFQEMFAGLYTDPDAVLETTFDEQHDELVLVKQIPMYSTCEHHLVAFHGMAHVGYIPGVDGRITGLSKLARVVDLYAKRPQVQERLTGQVADAIMRKLKPRGVIVVIEAEHLCMAMRGVRKPGAITTTSAVRGQFKTDKASRAEALELILRK

SEQ ID NO: 11373 - protein, 204 aa, Mycolicibacterium thermoresistibile
  misc_feature (1)..(204): tr|A0A117IN76|A0A117IN76_MYCTH GTP cyclohydrolase 1 OS= Mycolicibacterium thermoresistibile OX=1797 GN=folE PE= 3 SV=1
MTRAHHNSATLTTKTPVFDQPRAEAAIRELLLAVGEDPDRDGLRDTPARVARAYKEVFAGLYTDPDAVLDTTFDEQHDELVLVRQIPLYSTCEHHLVSFHGFAHVGYIPGDDGRVTGLSKIARLVDLYAKRPQVQERLTAQIADALMRKLNPRGAIVVVEAEHLCMAMRGVRKPGALTTTSAVRGQFKTDNASRAEALELILRK

SEQ ID NO: 11374 - protein, 204 aa, Mycolicibacterium thermoresistibile; identical to SEQ ID NO: 11373
  misc_feature (1)..(204): tr|G7CF22|G7CF22_MYCT3 GTP cyclohydrolase 1 OS=Mycolici bacterium thermoresistibile (strain ATCC 19527 / DSM 44 167 / CIP 105390 / JCM 6362 / NCTC 10409 / 316) OX=1078 020 GN=folE PE=3 SV=1

SEQ ID NO: 11375 - protein, 195 aa, Mycolicibacterium tokaiense
  misc_feature (1)..(195): tr|A0A378TH50|A0A378TH50_9MYCO GTP cyclohydrolase 1 OS= Mycolicibacterium tokaiense OX=39695 GN=folE PE=3 SV=1
MTTQSRPVFDQVRAEKAVRELLYAVGEDPDRHGLIDTPARVARAYQEMFAGLYTDPDDVLNTTFDEQHDELVLVKDIPMYSTCEHHLVSFHGVAHVGYIPGKDGRVTGLSKLARVVDLYAKRPQVQERLTGQVADALMRKLDPRGVIVVMEAEHLCMAMRGIRKPGASTTTSAVRGQFKTDKASRAEALELILRK

SEQ ID NO: 11376 - protein, 202 aa, Mycolicibacterium tusciae
  misc_feature (1)..(202): tr|A0A1X0JPM7|A0A1X0JPM7_9MYCO GTP cyclohydrolase 1 OS= Mycolicibacterium tusciae OX=75922 GN=folE PE=3 SV=1
MTQSQNNSVKFKPVEFDQPRAEAAVRELLIAVGEDPDRHGLEDTPARVARAYRELFAGLYTDPDTVLDTTFDEQHDEMVLVKQIPMYSTCEHHLVSFHGVAHVGYIPGEDGRVTGLSKIARLVDLYAKRPQVQERLTAQIADALMRKLNPRGAIVVVEAEHLCMAMRGVRKPGAITTTSAVRGQFKTDSASRSEALDLILRK

SEQ ID NO: 11377 - protein, 202 aa, Mycolicibacterium vaccae
  misc_feature (1)..(202): tr|K0V6R4|K0V6R4_MYCVA GTP cyclohydrolase 1 OS=Mycolici bacterium vaccae ATCC 25954 OX=1194972 GN=folE PE=3 SV= 1
MTRSPHHTATITTPAFDQARAEAAVRELLIAVGENPDREGLRDTPARVARAYQEIFAGLYVDPDEVLKTMFDEQHDELVLVKDIPMYSTCEHHLVSFHGVAHVGYIPGEDGRVTGLSKLARVVDLYAKRPQVQERLTAQIADALMRRLKPRGAIVVIEAEHLCMAMRGIRKPGAVTTTSAVRGQFKTDKASRAEALELILRK

SEQ ID NO: 11378 - protein, 202 aa, Mycolicibacterium vanbaalenii; identical to SEQ ID NO: 11304
  misc_feature (1)..(202): sp|A1TG42|GCH1_MYCVP GTP cyclohydrolase 1 OS=Mycoliciba cterium vanbaalenii (strain DSM 7251 / JCM 13017 / NRRL B-24157 / PYR-1) OX=350058 GN=folE PE=3 SV=1

SEQ ID NO: 11379 - protein, 200 aa, Mycolicibacterium vulneris
  misc_feature (1)..(200): tr|A0A1X2KYF4|A0A1X2KYF4_9MYCO GTP cyclohydrolase 1 OS= Mycolicibacterium vulneris OX=547163 GN=folE PE=3 SV=1
MALPHTAMPTTRVFDQERAEAAVRELLHAIGEDPDRNGLRETPARVARAYREMFAGLYTDPDSVLNTMFEEDHDELVLVKEIPLYSTCEHHLVAFHGVAHVGYIPGNDGRVTGLSKIARLVDLYSKRPQVQERLTSQIADALVKKLNPRGVIVVVEAEHLCMAMRGVRKPGAITTTSAVRGLFKTNAASRAEALDLILRK

SEQ ID NO: 11380 - protein, 205 aa, Mycolicibacterium vulneris; identical to SEQ ID NO: 11326
  misc_feature (1)..(205): tr|X5LFK7|X5LFK7_9MYCO GTP cyclohydrolase 1 OS=Mycolici bacterium vulneris OX=547163 GN=folE PE=3 SV=1

SEQ ID NO: 11381 - protein, 207 aa, Mycolicibacterium wolinskyi
  misc_feature (1)..(207): tr|A0A1X2FHT8|A0A1X2FHT8_9MYCO GTP cyclohydrolase 1 OS= Mycolicibacterium wolinskyi OX=59750 GN=folE PE=3 SV=1
MTSVREHNTATNNAAKDHRVFDQPRAEAAVRELLIAIGEDPDRQGLVDTPARVARAYKELMAGLYTDPDAVLNTTFDEGHDELVLVKEIPLYSTCEHHLVSFHGVAHVGYIPGVDGRVTGLSKIARLVDLYSKRPQVQERLTAQIADALMRKLDPRGAIVVVEAEHLCMAMRGVRKPGAVTTTSAVRGQFKTDKASRAEALELILRK

SEQ ID NO: 11382 - protein, 207 aa, Mycolicibacterium wolinskyi
  misc_feature (1)..(207): tr|A0A132PLR7|A0A132PLR7_9MYCO GTP cyclohydrolase 1 OS= Mycolicibacterium wolinskyi OX=59750 GN=folE PE=3 SV=1
MTSVREHNTATNNAAKDHPVFDQPRAEAAVRELLIAIGEDPDRQGLVDTPARVARAYKELMAGLYTDPDAVLNTTFDEGHDELVLVKEIPLYSTCEHHLVSFHGVAHVGYIPGVDGRVTGLSKIARLVDLYSKRPQVQERLTAQIADALMRKLDPRGAIVVVEAEHLCMAMRGVRKPGAVTTTSAVRGQFKTDKASRAEALELILRK

SEQ ID NO: 11383 - protein, 205 aa, Mycoplana dimorpha
  misc_feature (1)..(205): tr|A0A2T5B7K3|A0A2T5B7K3_MYCDI GTP cyclohydrolase 1 OS= Mycoplana dimorpha OX=28320 GN=folE PE=3 SV=1
MDAVIKNFPIGDDKSGRPSQKEAEDAVRVLLRWAGDDPEREGLLDTPARVAKAYRELFSGYDQDPEDVLGRTFEEVAGYDDIVLVKDIPFYSHCEHHMVPIIGRAHVAYLPNGRVLGLSKIARVVEIFGRRLQTQETMTAQIASSIDETLRPRGVAVMIEAEHMCMAMRGIQKQGSTTLTTTFTGAFKTEPAEQVRFMTMIRGRG

SEQ ID NO: 11384 - protein, 258 aa, Mycoplasma capricolum
  misc_feature (1)..(258): tr|A0A078MWN1|A0A078MWN1_MYCCC GTP cyclohydrolase 1 typ e 2 OS=Mycoplasma capricolum subsp. capripneumoniae OX= 40480 GN=MCCPILRI181_00593 PE=4 SV=1
MLLDNIISYLNQLFNPKKASNWDHVGFQFEYKKLNNINISKVLVCLDLTNDCLEFAISNQIQLIITRHPFIFNELKLEKKNPNKKQMIKKLNKHKILVFSIHTNYDSSIKQNILEILNKKLKINSFKKYGKDKESNLFYLDQKISVNDLINDLKEVFSLNQIRLNSNISLDTKIKDFYLTSGSGASTMIENMLKDCTFITGEVKWDQWIYANSNNVNLIEIGHYAENHFIDDLKNKLQIKFKDIKIFSYDIKNQFIEK

SEQ ID NO: 11385 - protein, 263 aa, Mycoplasma sp.
  misc_feature (1)..(263): tr|A0A0L1IJ60|A0A0L1IJ60_9MOLU NIF3 family protein OS=M ycoplasma sp. HU2014 OX=1664275 GN=AB668_03195 PE=4 SV= 1
MLLVNITKYLDKKFNPKKASDWDNVGFQIFNKKPLDANFNVNKVLICLDLTNDCLEYAIKNNVNLIISRHPFIFAELKQEKQNPIKKEMIKKLTKHNIVVFSIHTNYDASSNQNLTEIINKEIEIKKYKKYGYENESNIFYFKKEIKIEDLIKSVSKIFNSESIRFNSNTDLNSKTNQMYITTGSGASTMIYNSLKKCVFITGEVKWNEWIYANDNNVCLVELGHYMENYFVDDIKNKLANKFNDLEILTYDINNQFITRKKV

SEQ ID NO: 11386 - protein, 209 aa, Myroides guanonis
  misc_feature (1)..(209): tr|A0A1I3M5C6|A0A1I3M5C6_9FLAO GTP cyclohydrolase 1 OS= Myroides guanonis OX=1150112 GN=folE PE=3 SV=1
MKKVMDFEGTDTVAELKQKVDFSDEEKVNRISGLFSEIMETLGLDLSDDSLKNTPNRVAKMYVKEAFSGLNPKNKPAISLFDNKYGYRQTLVEKDITLYSHCEHHFVPIIGKVHVAYVPYDSVIGLSKINRLVDYFAKRPQVQERLSVQIGEGLIEALGHQDVAVYIEANHLCVASRGIRDTNSYTVTEFFSGVFEDERMQQRFLESIK

SEQ ID NO: 11387 - protein, 223 aa, Myroides guanonis
  misc_feature (1)..(223): tr|A0A1I3LED1|A0A1I3LED1_9FLAO GTP cyclohydrolase 1 OS= Myroides guanonis OX=1150112 GN=folE PE=3 SV=1
MNQEDLLHEDIGDNHIASSEFTPLRKDAFDIADDEKIALIRKDVENILTTLGMDLTDDSMKGTPNRVAKMFVKEIFGGLNPSKKPSASTFENNYKYGEMLVEKNIVVYSTCEHHLLPIIGRAHVAYISNGKVVGLSKMNRIVDYYAKRPQVQERLTIQIVRELQRVLNTDDVACVIDAKHLCVNSRGIRDIESSTVTSEFGGKFKEEKVRRELLDYIKLNTEF

SEQ ID NO: 11388 - protein, 223 aa, Myroides indicus
  misc_feature (1)..(223): tr|A0A4R7EPL3|A0A4R7EPL3_9FLAO GTP cyclohydrolase 1 OS= Myroides indicus OX=1323422 GN=folE PE=3 SV=1
MSITEKFHDELGDNHIATSDATPMRSDAFDRTDDEKIELIKKDVENILNTLGLDLTDDSLKGTPNRVAKMFVKEVFGGLNPAKKPSSSTFENKYKYGEMLVEKNIVIYSTCEHHLLPIIGRAHIAYISNGTVVGLSKMNRIAEYYSKRPQVQERLTIQIVNELKRVLNTEDVACIIDAKHLCVNSRGIKDIESSTVTAEFGGRFKEENVRKEFLEYIKLETKF

SEQ ID NO: 11389 - protein, 223 aa, Myroides marinus
  misc_feature (1)..(223): tr|A0A161SAY1|A0A161SAY1_9FLAO GTP cyclohydrolase 1 OS= Myroides marinus OX=703342 GN=folE PE=3 SV=1
MNTDEKFHDEMGDNHIASSDATPLRSDAFDRTDDEKIELIKKDVENILNTLGLDLTDDSLKGTPNRVAKMFVKEMFGGLNPSKKPSASTFDNKYKYNEMLVEKNIVVYSTCEHHLLPIVGRAHVAYISNGTVVGLSKMNRIVDFYAKRPQVQERLTIQIVNELKRVLNTEDVACIIDAKHLCVNSRGIRDIESSTVTAEFGGKFQDENVRKEFLNYIQLETKF

SEQ ID NO: 11390 - protein, 223 aa, Myroides odoratimimus
  misc_feature (1)..(223): tr|A0A0E1Z590|A0A0E1Z590_9FLAO GTP cyclohydrolase 1 OS= Myroides odoratimimus CCUG 10230 OX=883150 GN=folE PE=3 SV=1
MNTDEKFHDEMGDNHIASSDATPLRSDAFDRTDDEKIELIKKDVENILNTLGLDLTDDSLKGTPNRVAKMFVKEMFGGLNPAKKPSASTFDNKYKYNEMLVEKNIVVYSTCEHHLLPIVGRAHVAYISNGTVVGLSKMNRIVDFYAKRPQVQERLTIQIVNELKRVLNTEDVACIIDAKHLCVNSRGIRDIESSTVTAEFGGKFQDENVRKEFLNYIQLETKF

SEQ ID NO: 11391 - protein, 223 aa, Myroides odoratimimus; identical to SEQ ID NO: 11390
  misc_feature (1)..(223): tr|A0A0S7EIM1|A0A0S7EIM1_9FLAO GTP cyclohydrolase 1 OS= Myroides odoratimimus OX=76832 GN=folE PE=3 SV=1

SEQ ID NO: 11392 - protein, 223 aa, Myroides odoratus
  misc_feature (1)..(223): tr|A0A378RLF6|A0A378RLF6_MYROD GTP cyclohydrolase 1 OS= Myroides odoratus OX=256 GN=folE PE=3 SV=1
MSLDEKFHDDMGDNHIASSDATPLRSDAFDRTDEEKIELIKKDVENILNTLGLDLTDDSLKGTPNRVAKMFVKEIFGGLNPAKKPSSSTFDNKYKYNEMLVEKNIVVYSTCEHHLLPIVGRAHVAYISNGTVVGLSKMNRIVDFYAKRPQVQERLTIQIVNELKRVLNTEDVACVMDAKHLCVNSRGIKDIESSTVTAEFGGRFKEESVRKEFLDYIKLDTTF

SEQ ID NO: 11393 - protein, 223 aa, Myroides odoratus
  misc_feature (1)..(223): tr|H1Z4S5|H1Z4S5_MYROD GTP cyclohydrolase 1 OS=Myroides odoratus DSM 2801 OX=929704 GN=folE PE=3 SV=1
MSLDEKFHDDMGDNHIASSDATPLRSDAFDRTDEEKIELIKKDVENILNTLGLDLTDDSLKGTPNRVAKMFVKEIFGGLNPAKKPSSSTFDNKYKYNEMLVEKNIVVYSTCEHHLLPIVGRAHVAYISNGTVVGLSKMNRIVDFYAKRPQVQERLTIQIVNELKRVLNTEDVACVMDAKHLCVNSRGIKDIESSTVTAEFGGRFKEESVRKEFLDYIKLDTQF

SEQ ID NO: 11394 - protein, 223 aa, Myroides phaeus
  misc_feature (1)..(223): tr|A0A1G8FPB7|A0A1G8FPB7_9FLAO GTP cyclohydrolase 1 OS= Myroides phaeus OX=702745 GN=folE PE=3 SV=1
MSQDEKFHDDMGDNHIASSDATPLRSDAFDRTDDEKIESIKKDVENILNTLGLDLTDDSLKGTPNRVAKMFVKEIFGGLNPERKPKSSTFDNKYKYNEMLVEKNIVVYSTCEHHLLPIVGRAHVAYISNGTVVGLSKMNRIVEFYSKRPQVQERLTIQIVNELKRVLNTEDVACIIDAKHLCVNSRGIKDIESSTVTAEFGGRFKEESVRKEFIEFIKLETKF

SEQ ID NO: 11395 - protein, 223 aa, Myroides profundi; identical to SEQ ID NO: 11390
  misc_feature (1)..(223): tr|A0A0B5RWL6|A0A0B5RWL6_9FLAO GTP cyclohydrolase 1 OS= Myroides profundi OX=480520 GN=folE PE=3 SV=1

SEQ ID NO: 11396 - protein, 188 aa, Myxococcaceae bacterium
  misc_feature (1)..(188): tr|A0A3N5HDP9|A0A3N5HDP9_9DELT GTP cyclohydrolase I Fol E OS=Myxococcaceae bacterium OX=2484252 GN=folE PE=4 SV =1
MRRAVRSFLEASGLSPDDPELRETPARVAEAWARHFLDGYGRDPDTVLAERIPVPEGSRGELVVVTGLRFHSMCPHHLLPVEGRAHLAYVPGDHVVGFGRLAALLDTWAHRLILQEHLARGVARSLARGLESPGAACILEAHQACLRVRGEEQRDAVTHAEAYEGVLRKDGMLRRELWARIAAAGAAW

SEQ ID NO: 11397 - protein, 55 aa, Myxococcaceae bacterium
  misc_feature (1)..(55): tr|A0A3N5H7N4|A0A3N5H7N4_9DELT GTP cyclohydrolase I Fol E (Fragment) OS=Myxococcaceae bacterium OX=2484252 GN=E HM78_26985 PE=4 SV=1
AEGVGVAIEAQHLCMMMRGVEKQNSMMTTSAMLGTFRDSAATRTEFLTLIGRRRP

SEQ ID NO: 11398 - protein, 199 aa, Myxococcales bacterium
  misc_feature (1)..(199): tr|A0A0S8F2I9|A0A0S8F2I9_9DELT GTP cyclohydrolase 1 OS= Myxococcales bacterium SG8_38_1 OX=1703408 GN=folE PE=3 SV=1
MSEKPRDQEAEECVRKLLAYIGDDPTREGLVDTPKRVLGAIGEHFRGYHEDPVEHLSRTFTEVEGYDELVLVSDIEIYSHCEHHVVPFVGKAHVAYIPNGKVVGLSKIARVVDTFGKRLQVQEKLTAQIANAIDETLTPQGTAVILQCQHFCMCYRGVRKPGSWTTTSRLTGCFLKDEAARMELLTLIGMPRSIGGAGG

SEQ ID NO: 11399 - protein, 261 aa, Myxococcales bacterium
  misc_feature (1)..(261): tr|A0A2D5EVG2|A0A2D5EVG2_9DELT GTP cyclohydrolase FolE2 OS=Myxococcales bacterium OX=2026763 GN=folE2 PE=3 SV= 1
MEDVQSHPDPRGIPLERVGVSGVRFPGVVAGQATSVTASMSVSIAAEHRGAHMSRFLLALEPHREALGLERMPALLRELRERMDAEAAEVDLRFPVFRRKAAPVSGESGWMDYEGRLVGRVDAEGLVVRAGAVVAVASLCPCSKAISDYGAHMQRGHVHLDVTPRRGESGAFAPLPFDDLVAVAERHASAPLYPVLKRPDERHVTMQAYDTPAFVEDMARGIAADLREDPRVEAFTVRVVNQESIHQHDAFAETSWSRSGR

SEQ ID NO: 11400 - protein, 185 aa, Myxococcus fulvus
  misc_feature (1)..(185): tr|F8CK20|F8CK20_MYXFH GTP cyclohydrolase I OS=Myxococc us fulvus (strain ATCC BAA-855 / HW-1) OX=483219 GN=fol E PE=4 SV=1
MARAVADFLRAAGLNLQDVHLSETPARVAEAWTSEFLDGYGRTPEQALGEAFPVPPGSSGELVVVTDLRFHSMCPHHLLPLTGRAHVAYVPGKQVVGFGRLSALVDCFAHRLILQEDLAREVARSLARVLGSPATACIIEAEQACLRLRGDKQRDAVTHAEAYEGALRRDGPLRRELWARLGARR

SEQ ID NO: 11401 - protein, 219 aa, Naasia sp.
  misc_feature (1)..(219): tr|A0A4S4FJ54|A0A4S4FJ54_9MICO GTP cyclohydrolase 1 OS= Naasia sp. YIM 131853 OX=2565933 GN=folE PE=3 SV=1
MTDNPGGVPTNGTPPGPDLERVAAAVRELLAALGEDVDRPELGATPVRSAQSWAELLSGRDADPVAPLIPLPGEESFSGQAVALRNIAFRSVCEHHLLPFDGVIHLMYRPSGAVAGLGSFIRTIEALSSRLQLQERLTEQIADAIEAALAPEGILVVAHARHGCVSDRGVRDVGARTMTIASRGSYSGSAEASAAALLLLPTPSDPPTSPADPSTPPGI

SEQ ID NO: 11402 - protein, 202 aa, Naasia sp.
  misc_feature (1)..(202): tr|A0A4S4FLA8|A0A4S4FLA8_9MICO GTP cyclohydrolase 1 OS= Naasia sp. YIM 131853 OX=2565933 GN=folE PE=3 SV=1
MDADRVRDAVRELMLALGEDPAEPRLVATPARSATAWVELLSGSDEDPVAPMSGIAAEEGFGEQVIALRDIAFRSVCEHHLLPFDGVAHLMYRSSGPVSGLGSFIRSIDVLSSRLQLQERLTDQIADAIVEAIAPIGLVVVLVARHGCVSDRGARSIAARTTTIASRGSFSGREEAAAASLLLAPHSPGTPINTTSRSKEDA

SEQ ID NO: 11403 - protein, 220 aa, Nakamurella multipartita
  misc_feature (1)..(220): tr|C8XA95|C8XA95_NAKMY GTP cyclohydrolase 1 OS=Nakamure lla multipartita (strain ATCC 700099 / DSM 44233 / CIP 104796 / JCM 9543 / NBRC 105858 / Y-104) OX=479431 GN=f olE PE=3 SV=1
MTAGPATDAGRAPAAATDGSPGANGGPGPARAPFDQARAEAAVRELLLAVGEDPDRDGLLQTPARVARAYAEQFAGLFTDPSEVLQTSFDENHNEMILMRDIDLYSTCEHHLVPFFGQAHVGYIPGPDGRVTGLSKLARLVDGYAKRPQVQERLTTQIADALVHRLRPAGAIVVIEAEHLCMAMRGIRKPGAVTTTSAVRGIFQSQARTRAEAMSLITGR

SEQ ID NO: 11404 - protein, 226 aa, Nakamurella multipartita
  misc_feature (1)..(226): tr|C8XFH8|C8XFH8_NAKMY GTP cyclohydrolase 1 OS=Nakamure lla multipartita (strain ATCC 700099 / DSM 44233 / CIP 104796 / JCM 9543 / NBRC 105858 / Y-104) OX=479431 GN=f olE PE=3 SV=1
MTAALPQSPSARPRPGPPEPVNRRHHHPLRVVHPTAPVDLAAAERAAAAFLAALGVDVATENRRDTPGRMARAYAEMFTPRPFDLTTFPNDDGYDEMVLARAIPVQSVCEHHLLPFVGVAHVGYLPGDRILGLSKLARVVELFARQPQVQERLTQQVADWLQTTLEPRGVGVVIEAEHLCMTMRGVHADGVTTVTSAVQGHLRQDAAARAEFFALALPRPTNRRRP

SEQ ID NO: 11405 - protein, 230 aa, Nakamurella panacisegetis
  misc_feature (1)..(230): tr|A0A1H0NNK6|A0A1H0NNK6_9ACTN GTP cyclohydrolase 1 OS= Nakamurella panacisegetis OX=1090615 GN=folE PE=3 SV=1
MTNATRADGSPERSVSPLVDDGSRADGVSSPVLLDGAPPVRPVFDHVRAEAAIRELLIAVGEDVDRDGLRETPARVARAFAEQFSGLYVDPDQVLETVFAENHSEMVLIRDIPMYSTCEHHLVPFFGHAHVGYIPGRAGQVTGLSKLARVVEGYSKRPQVQERLTTQIADALVRKLQPAGVIVVIEAEHLCMAMRGIRKPGAITTTSAVRGLFQSQASTRAEAMSLITGR

SEQ ID NO: 11406 - protein, 217 aa, Nakamurella panacisegetis
  misc_feature (1)..(217): tr|A0A1H0RL05|A0A1H0RL05_9ACTN GTP cyclohydrolase 1 OS= Nakamurella panacisegetis OX=1090615 GN=folE PE=3 SV=1
MTSAQLDVAATGGGRRVPLRVVHPPAHVDLAAAERAATDFLTALGVDLATEGRRDTARRMAQAYSELFRPRPFDLTTFPNDENYDELVVVRDVPVHSVCEHHVLPFVGVAHLAYLPGAHILGLSKLARVVELFARRPQVQERLTQQVADWLFVNLNPRGVGVIIEAEHLCMTIRGVQAAGTRTTTSALRGQLREDAASRAEFFALAVPRPSSGGRHG

SEQ ID NO: 11407 - protein, 185 aa, Nakamurella silvestris
  misc_feature (1)..(185): tr|A0A399VES1|A0A399VES1_9ACTN GTP cyclohydrolase 1 OS= Nakamurella silvestris OX=1645681 GN=folE PE=3 SV=1
MPRARAAVRELLLALGEDPDRSGLLETPDRVARAYAEQFSGLYGSPDSVLDTVFDEGHAELILVKDIEFYSTCEHHLVPFFGKAHVGYIPGAQGRITGLSKLARLVDGYAKRPQVQERLTTQIADAMVRRLDPAGTIVVLEAEHLCMAMRGVRKPGARTTTSAVRGIFQSSHRTRAEAMSLIVGR

SEQ ID NO: 11408 - protein, 192 aa, Nakamurella sp.
  misc_feature (1)..(192): tr|A0A3G8ZZ81|A0A3G8ZZ81_9ACTN GTP cyclohydrolase 1 OS= Nakamurella sp. s14-144 OX=1902245 GN=folE PE=3 SV=1
MAKRPYDSERAEAAIRELLLAVGEDPDREGLLNTPGRVSRAFAEQFSGLHTNPDDVLDTVFDENHAEMILIRDITFYSTCEHHLVPFLGKAHVGYIPGPDGRVTGLSKVARLVDGYSRRPQVQERLTTQIADAMVRRLVPAGVIVVMEAEHLCMAMRGVRKPGAVTSTSAVRGIFQTSQPTRAEAMSLITGR

SEQ ID NO: 11409 - protein, 203 aa, Nakamurella sp.
  misc_feature (1)..(203): tr|A0A4U6QEA0|A0A4U6QEA0_9ACTN GTP cyclohydrolase 1 OS= Nakamurella sp. N5BH11 OX=2576308 GN=folE PE=3 SV=1
MTATQQAPAAASGAQVVDLPRAASAVRELLLAMGEDPDRAGLLDTPMRVAKAFAEQFSGLHTDPDEVLATVFDEQHSEMILMRDIEMYSTCEHHLVPFFGRAHVGYIPGPDGRVTGLSKLARLVDGYARRPQVQERLTTQIADALVRRLRPAGAIVVIEAEHLCMAMRGVRKPGATTTTSAVRGIFQSRDRTRAEAMSLITGR

SEQ ID NO: 11410 - protein, 200 aa, Nannocystis exedens
  misc_feature (1)..(200): tr|A0A1I2EQX4|A0A1I2EQX4_9DELT GTP cyclohydrolase 1 OS= Nannocystis exedens OX=54 GN=folE PE=3 SV=1
MTDPHDRPPAEAVLPPMMDAVATLLRGVGEDPARDGLERTPERVAKALRFLTSGYDQSLETILNGAIFDVGHDEMVLVRDIDLFSLCEHHMLPFIGRAHIGYIPDRKVVGLSKLARVVEMFARRLQVQERLTRQVAEAVQEVLQPHGVGVVIEASHMCMIMRGVQKPNSWTVTSSMVGVFQDNLNTRQEFLNLIRHKVVF

SEQ ID NO: 11411 - protein, 192 aa, Natranaerobius trueperi
  misc_feature (1)..(192): tr|A0A226BVJ9|A0A226BVJ9_9FIRM GTP cyclohydrolase 1 OS= Natranaerobius trueperi OX=759412 GN=folE PE=3 SV=1
MNIERIENLVYQLLQEIGEDPERSGLKETPARVAKMYQEIFEGTNYTNKQIAEMADKTFDEDIYDENCKDMVIVEDIPCFSWCEHHMALMNLQISVAYLPVGKVVGLSKIVRIAEMVSKRLQLQERIGSDIADIMTMITGSEDVAVVIKGIHSCMTARGVKKPGTVTKTSTLRGKFEIESDLRNELINLLPD

SEQ ID NO: 11412 - protein, 188 aa, Natranaerovirga hydrolytica
  misc_feature (1)..(188): tr|A0A4V2Q0C7|A0A4V2Q0C7_9FIRM GTP cyclohydrolase 1 OS= Natranaerovirga hydrolytica OX=680378 GN=folE PE=3 SV=1
MDKQKIENAVRDILEAIGEDPNREGLLDTPKRIAKMYEEIFSGLHTDPKEHLEIYFEEENHEELVLVKDIPFHSVCEHHLVPFYGKAHVGYIPKNGKLTGLSKLARVVDSVAKRPQLQERLTSTIADAIQEKLNPYGVIVVVEAEHMCMTMRGVKKPGSKTLTSAVRGVFQNDGKVRAEAISLINFER

SEQ ID NO: 11413 - protein, 188 aa, Natranaerovirga pectinivora
  misc_feature (1)..(188): tr|A0A4R3MM09|A0A4R3MM09_9FIRM GTP cyclohydrolase 1 OS= Natranaerovirga pectinivora OX=682400 GN=folE PE=3 SV=1
MDRQKIENAVRDILAAIGEDPNREGLLDTPKRIAKMYEEIFSGLNEDPKEHLEIYFEEENHEELVLVKDIPFYSVCEHHLVPFHGIAHVGYIPKNGKLTGLSKLARVVETVARRPQLQERLTSTIADAIEEKLSPYGVIVVVEAEHMCMTMRGVKKSGSKTLTSAVRGVFQKDGKVRAEAISLINFGR

SEQ ID NO: 11414 - protein, 187 aa, Natribacillus halophilus
  misc_feature (1)..(187): tr|A0A1G8JDN7|A0A1G8JDN7_9BACI GTP cyclohydrolase 1 OS= Natribacillus halophilus OX=549003 GN=folE PE=3 SV=1
MNTFDHDKLEAAVRQLLEAIGENPDREGITETPARVARMYEEIFSGLNDEPEEHLRTIFGEEHEELVLVKDIPFYSMCEHHLLPFFGKAHIGYIPKNGRVTGLSKLARAVETVARRPQLQERITSEVANALVKTLEPHGVMVVVEAEHMCMTMRGIKKPGSTTVTSAVRGALEKDPASRSEVLALIN

SEQ ID NO: 11415 - protein, 188 aa, Natronincola ferrireducens
  misc_feature (1)..(188): tr|A0A1G9DVQ0|A0A1G9DVQ0_9CLOT GTP cyclohydrolase 1 OS= Natronincola ferrireducens OX=393762 GN=folE PE=3 SV=1
MDKEKIQRAVRDILEAIGEDPDREGLIDTPKRIAKMYEEIFAGLEMDPKEHLDIYFQDEKHEELVLVKDIPFYSVCEHHLVPFYGKAHVGYIPKNGKLTGLSKLARVVDTVAKRPQLQERLTSKIADTIVDKLDPYGVIVVVEAEHMCMTMRGIKKSGSKTVTSVVRGIFKKDAKARAEAMSLIQFGS

SEQ ID NO: 11416 - protein, 188 aa, Natronincola peptidivorans
  misc_feature (1)..(188): tr|A0A1I0DMD3|A0A1I0DMD3_9CLOT GTP cyclohydrolase 1 OS= Natronincola peptidivorans OX=426128 GN=folE PE=3 SV=1
MDKEKIEKAVRDILEAVGENPDREGLKDTPKRIAKMYEEIFSGLEVDPEEHLDIYFQEEKHEELVLVKDISFHSMCEHHLVPFFGKVHVGYIPKNGKLTGLSKLARVVDTVARRPQLQERLTATIADTMVKKLQPHGVIVVVEAEHMCMTMRGVKKPGSKTVTSVVRGIFQKDAKARSEAMSLIQFGS

SEQ ID NO: 11417 - protein, 207 aa, Natronoflexus pectinivorans
  misc_feature (1)..(207): tr|A0A4R2GHT7|A0A4R2GHT7_9BACT GTP cyclohydrolase 1 OS= Natronoflexus pectinivorans OX=682526 GN=folE PE=3 SV=1
MEFTLNGDNGYIKKESYDDETTQRLSEIYKESLELLGEDTSREGLEKTPLRVAKAMQFLTQGYNMSPEDIIRSAMFREDYQQMVVVKDIELYSLCEHHLLPFFGKAHVAYIPRHHITGLSKVARVVEAFARRLQVQERLTTQIKECIDSTLNPLGVAVVIEAQHMCMQMRGVQKQHSVTTTSDFTGAFLKNMATRGEFFNIIGSKLH

SEQ ID NO: 11418 - protein, 192 aa, Natronospirillum operossus
  misc_feature (1)..(192): tr|A0A4Z0WBU6|A0A4Z0WBU6_9BACT GTP cyclohydrolase 1 OS= Natronospirillum operossus OX=2562806 GN=folE PE=3 SV=1
MTKPLSEHYEAILRGLGEDPERGGLVGTPDRAAKAMQFLTEGYQQDLQTIVNGAVFESDNDEMVVVQNIEFYSLCEHHMLPFIGKAHIAYLPTGRVLGLSKFARIVDMFARRLQIQESLTRQVALAVEEVTQATGVGVIMEAKHMCMMMRGVQKQNSSMMTSVMLGSFRENQATRAEFLNLARGSSGFFDRG

SEQ ID NO: 11419 - protein, 310 aa, Natronospirillum operossus
  misc_feature (1)..(310): tr|A0A4Z0WJP3|A0A4Z0WJP3_9BACT GTP cyclohydrolase FolE2 OS=Natronospirillum operossus OX=2562806 GN=folE2 PE=3 SV=1
MNRLMPDVAEAGQPVQSGALDWVGMNGISLPLHLKDAQSLAPLSVQAKMGSFVSLDDPNAKGIHMSRLYLAQQDMAVKEGITPQDFSAVLEQFIDSHEGLSERAHLTADFELVTLRPSLKSGKQGYKAYPGAVRCIWHDGSPQMELEINVPYSSTCPCSAALSRQLIQDGFREQFGAEGQVSVEDVMAFLGTEEGISATPHSQRSNAQVKIKVDPTLSAFPFLSMIDAIEAALNTPVQTAVKREDEQEFARLNAANLMFCEDAARRVTAILNQQPWARDFWLRVDHYESLHAHDAVAINSKGIKGGYQPI

SEQ ID NO: 11420 - protein, 217 aa, Naumannella halotolerans
  misc_feature (1)..(217): tr|A0A4R7J0V6|A0A4R7J0V6_9ACTN GTP cyclohydrolase 1 OS= Naumannella halotolerans OX=993414 GN=folE PE=3 SV=1
MTAAGRLTRLTRRGPPGRRKYSARVSAEFDHDRVKAAVRELLFGIGEDPDRDGLRDTPDRVARAYAEMFSGLRTDPAEALSTTFDLGHDELVLVTDIELWSVCEHHLLPFTGVAHVGYIPAPDGRITGLSKLARLVDVYAKRPQVQERLTTEVANALVHGLQPRGVIVVMEAEHLCMTMRGVRKPGAQTITSAVRGQLRDPTTRAEALALIRGRRGG

SEQ ID NO: 11421 - protein, 192 aa, Nautilia profundicola
  misc_feature (1)..(192): tr|B9L6X5|B9L6X5_NAUPA GTP cyclohydrolase 1 OS=Nautilia profundicola (strain ATCC BAA-1463 / DSM 18972 / AmH) OX=598659 GN=folE PE=3 SV=1
MSVDLEKLELAAKMILEAIGEDVDRDGLVKTPRRVAKSFEYICSGYFKDPKEVLNDALFESTNNEMVVVRNIEFYSMCEHHILPFFGRVHVAYIPDKKVVGLSKIPRMVNVFARRLQIQEQLTEQIADAIMEVVQPKGVGVVIHARHMCMEMRGVETKHSYTSSSALRGIFLEEKTREEFFNIINAPIQTHF

SEQ ID NO: 11422 - protein, 192 aa, Nautilia sp.
  misc_feature (1)..(192): tr|A0A3T0L4F8|A0A3T0L4F8_9PROT GTP cyclohydrolase 1 OS= Nautilia sp. PV-1 OX=2579250 GN=folE PE=3 SV=1
MSVDLEKLELAAKMILEAIGEDVNREGLVKTPKRVAKSFEYICGGYFKDPKEVLNDALFESTNNEMVVVRNIEFYSMCEHHILPFFGRVHVAYIPDKKVVGLSKIPRMVNVFARRLQIQEQLTEQIADAIMEVVQPKGVGVVIHARHMCMEMRGVETKHSYTSSSALRGIFLEEKTREEFFNIINAPVQTHF

SEQ ID NO: 11423 - protein, 310 aa, Negativibacillus sp.; identical to SEQ ID NO: 5185
  misc_feature (1)..(310): tr|A0A3A8XHL2|A0A3A8XHL2_9FIRM GTP cyclohydrolase FolE2 OS=Negativibacillus sp. 1xD8-3 OX=2320085 GN=folE2 PE= 3 SV=1

SEQ ID NO: 11424 - protein, 196 aa, Negativicoccus succinicivorans
  misc_feature (1)..(196): tr|W1U650|W1U650_9FIRM GTP cyclohydrolase 1 OS=Negativi coccus succinicivorans DORA_17_25 OX=1403945 GN=folE PE =3 SV=1
MNEKAARAYRAFLEAYGLDLQALGMEKTPARVAELYEALLAGVGQGTKPIWGEVFKSDYHGLLTVTGLHFYSLCEHHMLPFFGTADIIYDPRDGMVAGLSKMEKLVQMLSRRPQLQERLTEEIARAVMDDLRAQGVFVRVRAAHLCMTMKGDSSPDTKITTVRGLGTLAPGGQNEARVLALLGGTDGGTTDVCTEE

SEQ ID NO: 11425 - protein, 257 aa, Neisseria animalis
  misc_feature (1)..(257): tr|A0A3N3EGX9|A0A3N3EGX9_NEIAN GTP cyclohydrolase FolE2 OS=Neisseria animalis OX=492 GN=folE2 PE=3 SV=1
MNAIADVQSTRDLRNLPINQVGIKDLRFPIILSSDEGEQATVARLTMTVRLPAEQKGTHMSRFVALMEQETEAMSFGHLQKLTRDMAALLESESGKITVSFPFFRKKTAPISAIQSLMDYDVTLIGELENGKYRHSIKVLVPVTSLCPCSKEISQYGAHNQRSHVTVTLTVNEEVGIEEIIDCVENQASCQLYGLLKRPDEKHVTEKAYENPKFVEDMVRDVATALMADKRIESFTVESENFESIHNHSAYAYIAYP

SEQ ID NO: 11426 - protein, 257 aa, Neisseria animaloris
  misc_feature (1)..(257): tr|A0A448U9P7|A0A448U9P7_9NEIS GTP cyclohydrolase FolE2 OS=Neisseria animaloris OX=326522 GN=folE2 PE=3 SV=1
MNAIADVQSSPDLRNMPINQVGIKDLRLPITLDTAEGSQNTVARLTMTVFLPADQKGTHMSRFVALMESQTEALCFNRLKILTEEMVALLDSHSGKISVSFPFFRKKAAPVSGIQSLLDYDVTLTGEIKNGAYSHTLKVLVPVTSLCPCSKEISQYGAHNQRSHVTVTITCGSEVGIEEVIDCVESQASCQLYGLLKRPDEKYVTEKAYENPKFVEDMVRDVATRLIADSRVCGFVVESENFESIHNHSAYAYISYP

SEQ ID NO: 11427 - protein, 257 aa, Neisseria arctica
  misc_feature (1)..(257): tr|A0A0J0YRC8|A0A0J0YRC8_9NEIS GTP cyclohydrolase FolE2 OS=Neisseria arctica OX=1470200 GN=folE2 PE=3 SV=1
MNAIADVQSSPDLRNMPINQVGIKDLRFPISITTAEGTQQTVGRLTMTVFLPADQKGTHMSRFVALMEEQTEPLSFTRLKALTEEMLQRLDSHSGKISVSFPFFRQKSAPISGIKSLLDYDVTLTGEIENGQYRHTLKVLVPVTSLCPCSKEISQYGAHNQRSHVTVTLSCSSEVGIEELIDCVEAQASCQLYGLLKRPDEKFVTEQAYENPKFVEDMVRDVATALSADKRICGYIVESENFESIHNHSAYAYIAYP

SEQ ID NO: 11428 - protein, 257 aa, Neisseria bacilliformis
  misc_feature (1)..(257): tr|F2BFB9|F2BFB9_9NEIS GTP cyclohydrolase FolE2 OS=Neis seria bacilliformis ATCC BAA-1200 OX=888742 GN=folE2 PE =3 SV=1
MSAIADVQSSKDLRNLPINQVGIKDLRFPIQTATASGIQSTVARLTMTVRLPADQKGTHMSRFVALMESRQRPLDYGELQNLTQQMLELLGAEAGRISVSFPFFRSKSAPVSGIRSLLDYDVTISGEVSGGAYAYGLKVLVPVTSLCPCSKEISQYGAHNQRSHVTVSLICTEDVPPEDIIDIVEAQASCQLYGLLKRPDEKYVTERAYENPKFVEDMVRDVAVALRSDKRIASFTVESENFESIHNHSAYACISYP

SEQ ID NO: 11429 - protein, 259 aa, Neisseria canis
  misc_feature (1)..(259): tr|A0A1X3CXN1|A0A1X3CXN1_9NEIS GTP cyclohydrolase FolE2 OS=Neisseria canis OX=493 GN=folE2 PE=3 SV=1
MNAIIADVQSSKDLRNTPINQVGIKDLRFPILLNTAEGVQHTIARLTMTVYLPADQKGTHMSRFVALMEQQTEALGFERLKTLTEEMAKLLDSDSGRISVSFPFFRKKTAPVSGIQSLLDYDVTLTGEVKGGAYCHSLKVLVPVTSLCPCSKEISEYGAHNQRSHVTVSLRCGGGEVGIEEVIDCVEEQASCQLYGLLKRPDEKFVTERAYENPKFVEDMVRDVAAALRSDKRITGFIVESENFESIHNHSAYACIVYP

SEQ ID NO: 11430 - protein, 298 aa, Neisseria cinerea
  misc_feature (1)..(298): tr|A0A2X3Z713|A0A2X3Z713_NEICI GTP cyclohydrolase FolE2 OS=Neisseria cinerea OX=483 GN=folE2 PE=3 SV=1
MQLLKASDIISHLQIDGIFPGGNAIPCTHLNNYMNIKEKQLMNTIADVQSSRDLRNLPINQVGIKDLRFPITLQTAEGIQSTVARLTMTVYLPAEQKGTHMSRFVALMEQHAEALDFAQLHRLTAEMVALLDSHSGKISVSFPFFRKKTAPVSGIQSLLDYDVCLTGEIKDGAYGHSMKVMIPVTSLCPCSKEISQYGAHNQRSHVTVSLTADAEVGIEEVIDYVETQASCQLYGLLKRPDEKYVTEKAYENPKFVEDMVRDVATALIADKRIKSFVVESENFESIHNHSAYAYIAYP

SEQ ID NO: 11431 - protein, 298 aa, Neisseria cinerea; identical to SEQ ID NO: 11430
  misc_feature (1)..(298): tr|D0W4T9|D0W4T9_NEICI GTP cyclohydrolase FolE2 OS=Neis seria cinerea ATCC 14685 OX=546262 GN=folE2 PE=3 SV=1

SEQ ID NO: 11432 - protein, 257 aa, Neisseria dentiae
  misc_feature (1)..(257): tr|A0A1X3D5M9|A0A1X3D5M9_9NEIS GTP cyclohydrolase FolE2 OS=Neisseria dentiae OX=194197 GN=folE2 PE=3 SV=1
MNAIADVQSTRDLRNLPINQVGIKDLRFPITLNTAEGTQATVARLTMTVFLPADQKGTHMSRFVALMERQTKALGFERLKTLTEEMVSLLDSHSGKISVSFPFFRKKSAPVSGIQSLLDYDVTLTGEIKNGEYSHTLKVLVPVTSLCPCSKEISQYGAHNQRSHVTVTITCGSEVGIEEVIDCVESQASCQLYGLLKRPDEKFVTEQAYENPKFVEDMVRDVATRLIADGRICGFVVESENFESIHNHSAYAYIAYP

SEQ ID NO: 11433 - protein, 257 aa, Neisseria dumasiana
  misc_feature (1)..(257): tr|A0A1X3DLY2|A0A1X3DLY2_9NEIS GTP cyclohydrolase FolE2 OS=Neisseria dumasiana OX=1931275 GN=folE2 PE=3 SV=1
MNAIADVQSTRDLRNLPINQVGIKDLRFPITLNTAEGTQATVARLTMTVYLPADQKGTHMSRFVALMERQTEALSFERLKHLVEEMVSLLDSHSGKISVSFPFFRKKTAPISGIQSLLDYDVTLTGEIKNGEYSHTLKVLVPVTSLCPCSKEISQYGAHNQRSHVTVTLTCSSEIGIEEVIDCVESQASCQLYGLLKRPDEKYVTEQAYENPKFVEDMVRDVATRLIADGRVCGFVVESENFESIHNHSAYAYIAYP

SEQ ID NO: 11434 - protein, 257 aa, Neisseria elongata
  misc_feature (1)..(257): tr|D4DS02|D4DS02_NEIEG GTP cyclohydrolase FolE2 OS=Neis seria elongata subsp. glycolytica ATCC 29315 OX=546263 GN=folE PE=3 SV=1
MNAIADVQSSKDLRNMPINQVGIKDLRFPLQITTASGTQSTVARLTMTVRLPAEQKGTHMSRFVALMEDRRRELDYGELKDLTQRMLDLLDSDAGKISIAFPFFRQKTAPVSGIRSLLDYDVTLCGEVAGGGYRHSLKVLVPVTSLCPCSKEISQYGAHNQRSHVTVSLVCRENVSVEEVIDIVENQASCQLYGLLKRPDEKYVTERAYENPKFVEDMVRDVAVALRGDDRIESFTVESENFESIHNHSAYAYIAYP

SEQ ID NO: 11435 - protein, 257 aa, Neisseria elongata
  misc_feature (1)..(257): tr|A0A378U2T0|A0A378U2T0_NEIEL GTP cyclohydrolase FolE2 OS=Neisseria elongata OX=495 GN=folE2 PE=3 SV=1
MNAIADVQSSKDLRNMPINQVGIKDLRFPLQITTASGTQSTVARLTMTVRLPAEQKGTHMSRFVALMEDRRRELDYGELKDLTQRMLELLDSDAGKISIAFPFFRQKTAPVSGIRSLLDYDVTLCGEVAGGGYRHSLKVLVPVTSLCPCSKEISQYGAHNQRSHVTVSLVCRENVSVEEVIDIVENQASCQLYGLLKRPDEKYVTERAYENPKFVEDMVRDVAVALRGDDRIESFTVESENFESIHNHSAYAYIAYP

SEQ ID NO: 11436 - protein, 257 aa, Neisseria flavescens
  misc_feature (1)..(257): tr|A0A154UAM5|A0A154UAM5_NEIFL GTP cyclohydrolase FolE2 OS=Neisseria flavescens OX=484 GN=folE2 PE=3 SV=1
MNAIADVQSSRDLRNLPINQVGIKDLRFPISLKSKEGAQSTVARLTMTVFLPADQKGTHMSRFVALMEKQTDALDFDTLHKLTADMVALLDSHSGKISVSFPFFRKKSAPVSGIQSLLDYDVTLTGEIKNGTYSHSLKVMVPVTSLCPCSKEISQYGAHNQRSHVTVSLIANSDVGIEEIIDYVEAQASCQLYGLLKRPDEKYVTEKAYENPKFVEDMVRDVATALIADKRIQSFVVESENFESIHNHSAYAYIAYP

SEQ ID NO: 11437 - protein, 257 aa, Neisseria flavescens
  misc_feature (1)..(257): tr|A0A154TNZ3|A0A154TNZ3_NEIFL GTP cyclohydrolase FolE2 OS=Neisseria flavescens OX=484 GN=folE2 PE=3 SV=1
MNAIADVQSSRDLRNLPINQVGIKDLRFPISLKSKEGEQSTVARLTMTVFLPADQKGTHMSRFVALMEKQTDALDFDTLHKLTADMVALLDSHSGKISVSFPFFRKKSAPVSGIQSLLDYDVTLTGEIKNGTYSHSLKVMVPVTSLCPCSKEISQYGAHNQRSHVTVSLIANADVGIEEIIDYVEAQASCQLYGLLKRPDEKYVTEKAYENPKFVEDMVRDVATVLIADKRIESFVVESENFESIHNHSAYAYIAYP

SEQ ID NO: 11438 - protein, 257 aa, Neisseria gonorrhoeae
  misc_feature (1)..(257): sp|Q5F9K6|GCH4_NEIG1 GTP cyclohydrolase FolE2 OS=Neisse ria gonorrhoeae (strain ATCC 700825 / FA 1090) OX=24223 1 GN=folE2 PE=1 SV=1
MNAIADVQSSRDLRNLPINQVGIKDLRFPITLKTAEGTQSTVARLTMTVYLPAEQKGTHMSRFVALMEQHTEVLDFAQLHRLTAEMVALLDSRAGKISVSFPFFRKKTAPVSGIRSLLDYDVSLTGEMKDGAYGHSMKVMIPVTSLCPCSKEISQYGAHNQRSHVTVSLTSDAEVGIEEVIDYVETQASCQLYGLLKRPDEKYVTEKAYENPKFVEDMVRDVATSLIADKRIKSFVVESENFESIHNHSAYAYIAYP

SEQ ID NO: 11439 - protein, 290 aa, Neisseria gonorrhoeae
  misc_feature (1)..(290): tr|D6H9A0|D6H9A0_NEIGO GTP cyclohydrolase FolE2 OS=Neis seria gonorrhoeae DGI2 OX=528348 GN=folE2 PE=3 SV=1
MQAGGRQRFFRRHLPAIQYTHLNNYLNIKDKQRMNAIADVQSSRDLRNLPINQVGIKDLRFPITLKTAEGTQSTVARLTMTVYLPAEQKGTHMSRFVALMEQHTEVLDFAQLHRLTAEMVALLDSRAGKISVSFPFFRKKTAPVSGIRSLLDYDVSLTGEMKDGAYGHSMKVMIPVTSLCPCSKEISQYGAHNQRSHVTVSLTSDAEVGIEEVIDYVETQASCQLYGLLKRPDEKYVTEKAYENPKFVEDMVRDVATSLIADKRIKSFVVESENFESIHNHSAYAYIAYP

SEQ ID NO: 11440 - protein, 257 aa, Neisseria iguanae
  misc_feature (1)..(257): tr|A0A2P7TYN4|A0A2P7TYN4_9NEIS GTP cyclohydrolase FolE2 OS=Neisseria iguanae OX=90242 GN=folE2 PE=3 SV=1
MNAIADVQSTRDLRNLPINQVGIKDLRFPITLRTAEGEQTTIARLAMTVYLPAEQKGTHMSRFVALMEKQTEALSFERLQQLTREMVELLDSHSGKINVSFPFFRKKTAPVSGIQSLLDYDVTLTGEINNSNYTYSLKVMVPVTSLCPCSKEISQYGAHNQRSHVTVSLAANTEVSIEEVIDYVESQASCQLYGLLKRPDEKFVTEHAYENPKFVEDMVRDVATSLIADTRVESFVVESENFESIHNHSAYAFIAYP

SEQ ID NO: 11441 - protein, 257 aa, Neisseria lactamica
  misc_feature (1)..(257): tr|E4ZE56|E4ZE56_NEIL0 GTP cyclohydrolase FolE2 OS=Neis seria lactamica (strain 020-06) OX=489653 GN=folE2 PE=3 SV=1
MSAIADVQSSRDLRNLPINQVGIKDLRFPITLQTAEGTQSTVARLTMTVYLPAEQKGTHMSRFVALMEQHTEAWDFAQLHRLTAEMVALLDSRAGKISVSFPFFRKKTAPVSSIQSLLDYDVCLTGEIKDGAYGHSMKVMIPVTSLCPCSKEISQYGAHNQRSHVTVSLTADAEVGIEEVIDYVEAQASCQLYGLLKRPDEKYVTEKAYENPKFVEDMVRDVATSLIADKRIKSFVVESENFESIHNHSAYAYIAYP

SEQ ID NO: 11442 - protein, 298 aa, Neisseria lactamica
  misc_feature (1)..(298): tr|D0W6Y6|D0W6Y6_NEILA GTP cyclohydrolase FolE2 OS=Neis seria lactamica ATCC 23970 OX=546265 GN=folE2 PE=3 SV=1
MQPLKASDIISHLQIDGIFPGGNAIPCTHLNNYMNIKEKQRMSAIADVQSSRDLRNLPINQVGIKDLRFPITMQTAEGTQSTVARLTMTVYLPAEQKGTHMSRFVALMEQHTEALDFAQLHRLTAEMVALLDSHSGKISVSFPFFRKKTAPVSGIQSLLDYDVCLTGEIKDGAYGHSMKVMIPVTSLCPCSKEISQYGAHNQRSHVTVSLTADAEVGIEEVIDYVEAQASCQLYGLLKRPDEKYVTEKAYENPKFVEDMVRDVATSLIADKRIKSFVVESENFESIHNHSAYAYIAYP

SEQ ID NO: 11443 - protein, 277 aa, Neisseria macacae
  misc_feature (1)..(277): tr|F9EVH1|F9EVH1_9NEIS GTP cyclohydrolase FolE2 OS=Neis seria macacae ATCC 33926 OX=997348 GN=folE2 PE=3 SV=1
MNPFPNDTHPNNPTIKDKQRMNAIADVQSSRDLRNLPINQVGIKDLRFPITLNTAESSQSTVARLTMTVFLPADQKGTHMSRFVALMEQQTEALDFDRLHKLTAEMVALLNSHSGKISVSFPFFRKKSAPVSGIQSLLDYDVTLTGEIKNGAYSHNLKVMVPVTSLCPCSKEISQYGAHNQRSHVTVSLTANAEVGIEEIIDCVEAQASCQLYGLLKRPDEKYVTEKAYENPKFVEDMVRDVATALIADGRIESFIVESENFESIHNHSAYAYIAYP

SEQ ID NO: 11444 - protein, 298 aa, Neisseria meningitidis
  misc_feature (1)..(298): sp|A1KT61|GCH4_NEIMF GTP cyclohydrolase FolE2 OS=Neisse ria meningitidis serogroup C / serotype 2a (strain ATCC 700532 / DSM 15464 / FAM18) OX=272831 GN=folE2 PE=3 SV =3
MQLLKASDIISHLQIDGIFPGGNAIPCTHLNNYMNIKEKQLMNTIADVQSSRDLRNLPINQVGIKDLRFPITLQTAEGIQSTIARLTMTVYLPAEQKGTHMSRFVALMEQHAEALDFAQLRKLTTEMVALLDSRAGKISVSFPFFRKKTAPVSGIRSLLDYDVCLTGEIKDGAYGHSMKVMIPVTSLCPCSKEISQYGAHNQRSHVTVSLTADAEVGIEEVIDYVEAQASCQLYGLLKRPDEKYVTEKAYENPKFVEDMVRDVATSLIADKRIKSFVVESENFESIHNHSAYAYIAYP

SEQ ID NO: 11445 - protein, 257 aa, Neisseria meningitidis
  misc_feature (1)..(257): tr|A0A425AQA0|A0A425AQA0_NEIME GTP cyclohydrolase FolE2 OS=Neisseria meningitidis OX=487 GN=folE2 PE=3 SV=1
MNTIADVQSSRDLRNLPINQVGIKDLRFPITLQTAEGIQSTIARLTMTVYLPAEQKGTHMSRFVALMEQHAEALDFAQLHRLTTEMVALLDSRAGKISVSFPFFRKKTAPVSGIRSLLDYDVCLTGEIKDGAYGHSMKVMIPVTSLCPCSKEISQYGAHNQRSHVTVSLTADAEVGIEEVIDYVEAQASCQLYGLLKRPDEKYVTEKAYENPKFVEDMVRDVATSLIADKRIKSFVVESENFESIHNHSAYAYIAYP

SEQ ID NO: 11446 - protein, 277 aa, Neisseria mucosa
  misc_feature (1)..(277): tr|A0A2R4AUM1|A0A2R4AUM1_NEIMU GTP cyclohydrolase FolE2 OS=Neisseria mucosa OX=488 GN=folE2 PE=3 SV=1
MNPFPNDTHPNNPTIKDKQRMNAIADVQSSRDLRNLPINQVGIKDLRFPITLNTAEGSQSTVARLTMTVFLPADQKGTHMSRFVALMEQQTEALDFDRLHKLTAEMVALLNSHSGKISVSFPFFRKKSAPVSGIQSLLDYDVTLTGEIKNGAYSHNLKVMVPVTSLCPCSKEISQYGAHNQRSHVTISLTANAEVGIEEIIDCVEAQASCQLYGLLKRPDEKYVTEKAYENPKFVEDMVRDVATALIADGRIESFIVESENFESIHNHSAYAYIAYP

SEQ ID NO: 11447 - protein, 277 aa, Neisseria mucosa
  misc_feature (1)..(277): tr|D2ZVN4|D2ZVN4_NEIMU GTP cyclohydrolase FolE2 OS=Neis seria mucosa ATCC 25996 OX=546266 GN=folE2 PE=3 SV=1
MNPFPNDTHPSNPTIKDKQRMNAIADVQSSRDLRNLPINQVGIKDLRFPITLNTAEGSQSTVARLTMTVFLPADQKGTHMSRFVALMEQQTEALDFDRLHKLTAEMVALLDSHSGKISVSFPFFRKKSAPISGIQSLLDYDVTLTGEIKNGTYSHNLKVMVPVTSLCPCSKEISQYGAHNQRSHVTVSLTANAEVGIEEIIDCVEAQASCQLYGLLKRPDEKYVTEKAYENPKFVEDMVRDVATALIADGRIESFIVESENFESIHNHSAYAYIAYP

SEQ ID NO: 11448 - protein, 257 aa, Neisseria perflava
  misc_feature (1)..(257): tr|A0A2I1QYH8|A0A2I1QYH8_NEIPE GTP cyclohydrolase FolE2 OS=Neisseria perflava OX=33053 GN=folE2 PE=3 SV=1
MNAIADVQSSRDLRNLPINQVGIKDLRFPISLKSKEGEQSTVARLTMTVFLPADQKGTHMSRFVALMEKQTDALDFDTLHKLTADMVALLDSHSGKISVSFPFFRKKSAPVSDIQSLLDYDVTLTGEIKNGTYSHNLKVMVPVTSLCPCSKEISQYGAHNQRSHVTVSLIANADVAIEEIIDYVEAQASCQLYGLLKRPDEKYVTEKAYENPKFVEDMVRDVATALIADKRIESFVVESENFESIHNHSAYAYIAYP

SEQ ID NO: 11449 - protein, 298 aa, Neisseria polysaccharea
  misc_feature (1)..(298): tr|E2PEL1|E2PEL1_NEIPO GTP cyclohydrolase FolE2 OS=Neis seria polysaccharea ATCC 43768 OX=546267 GN=folE2 PE=3 SV=1
MQPLKASDIISHLQIDGIFPGGNAIPCTHLNNYMNIKEKQRMSAIADVQSSRDLRNLPINQVGIKDLRFPITLKTAEGTQSTVARLTMTVYLPAEQKGTHMSRFVALMEQHTEALDFAQLHRLTAEMVALLDSHSGKISVSFPFFRKKTAPVSGIQSLLDYDVCLTGEIKDGAYGHSMKVMIPVTSLCPCSKEISQYGAHNQRSHVTVSLTADAEVGIEEVIDYVEAQASCQLYGLLKRPDEKYVTEKAYENPKFVEDMVRDVATSLIADKRIKSFVVESENFESIHNHSAYAYIAYP

SEQ ID NO: 11450 - protein, 260 aa, Neisseria shayeganii
  misc_feature (1)..(260): tr|G4CGS8|G4CGS8_9NEIS GTP cyclohydrolase FolE2 OS=Neis seria shayeganii 871 OX=1032488 GN=folE2 PE=3 SV=1
MNAIADVQSSPDSRNMPINQVGIKDLRLPLRIRSQDGEQNTVARLTMTVALPASQKGTHMSRFVALMEEQAGVLDFVRLRELTADMLALLDAQAGRISITFPFFRQKSAPVSGITSLLDYDVTLTGESENGIYTHTLKVLVPVTSLCPCSKEISQYGAHNQRSHVTVTLRCREQAVEAEEVIDLVENQASCQLYGLLKRPDEKYVTERAYENPKFVEDMVRDIAVALKNDPRILSFTVESENFESIHNHSAYALIQSDTL

SEQ ID NO: 11451 - protein, 277 aa, Neisseria sicca
  misc_feature (1)..(277): tr|C6M7C9|C6M7C9_NEISI GTP cyclohydrolase FolE2 OS=Neis seria sicca ATCC 29256 OX=547045 GN=folE2 PE=3 SV=1
MNPFPNDTHPNNPTIKDKQRMNAIADVQSSRDLRNLPINQVGIKDLRFPITLNTAEGSQSTVARLTMTVFLPADQKGTHMSRFVALMEQQTEALDFDRLHKLTAEMVALLNSHSGKISVSFPFFRKKSAPVSGIQSLLDYDVTLTGEIKNGAYSHNLKVMVPVTSLCPCSKEISQYGAHNQRSHVTVSLTANAEVGIEEIIDCVEAQASCQLYGLLKRPDEKYVTEKAYENPKFVEDMVRDVATALIADGRIESFIVESENFESIHNHSAYAYIAYP

SEQ ID NO: 11452 - protein, 277 aa, Neisseria sicca
  misc_feature (1)..(277): tr|I2NXD8|I2NXD8_NEISI GTP cyclohydrolase FolE2 OS=Neis seria sicca VK64 OX=1095748 GN=folE2 PE=3 SV=1
MNPFPNDTHPNNPTIKDKQRMNAIADVQSSRDLRNLPINQVGIKDLRFPITLNTAEGSQSTVARLTMTVFLPADQKGTHMSRFVALMEQQTEALDFDRLHKLTAEMVALLDSHSGKISVSFPFFRKKSAPVSGIQSLLDYDVTLTGEIKNGAYSHNLKVMVPVTSLCPCSKEISQYGAHNQRSHVTVSLTANAEVGIEEIIDCVEAQASCQLYGLLKRPDEKYVTEKAYENPKFVEDMVRDVATALIADGRIESFIVESENFESIHNHSAYAYIAYP

SEQ ID NO: 11453 - protein, 257 aa, Neisseria sp.; identical to SEQ ID NO: 11435
  misc_feature (1)..(257): tr|A0A1F1SKZ6|A0A1F1SKZ6_9NEIS GTP cyclohydrolase FolE2 OS=Neisseria sp. HMSC31F04 OX=1581075 GN=folE2 PE=3 SV =1

SEQ ID NO: 11454 - protein, 257 aa, Neisseria sp.
  misc_feature (1)..(257): tr|A0A2H9WZP4|A0A2H9WZP4_9NEIS GTP cyclohydrolase FolE2 OS=Neisseria sp. N95_16 OX=2024408 GN=folE2 PE=3 SV=1
MNAIADVQSTRDLRNLPINQVGIKDLRFPITLRTAEGEQATVARLTMTVYLPAEQKGTHMSRFVALMEQQTEALSFERLQQLTREMVELLDSHSGKISVSFPFFRKKTAPVSGIQSLLDYDVTLTGEIKNGAYSHSLKVMVPVTSLCPCSKEISQYGAHNQRSHVTVSLVANAEVGIEEVIDCVEAQASCQLYGLLKRPDEKFVTEQAYENPKFVEDMVRDVATSLIADARVESFVVESENFESIHNHSAYAVIAYP

SEQ ID NO: 11455 - protein, 257 aa, Neisseria subflava
  misc_feature (1)..(257): tr|A0A4D7WCV3|A0A4D7WCV3_NEISU GTP cyclohydrolase FolE2 OS=Neisseria subflava OX=28449 GN=folE2 PE=3 SV=1
MNAIADVQSSRDLRNLPINQVGIKDLRFPISLKSKEGEQSTVARLTMTVFLPADQKGTHMSRFVALMEKQTDALDFDTLHKLTADMVALLDSHSGKISVSFPFFRKKSAPVSGIQSLLDYDVTLTGEIKNGTYSHSLKVMVPVTSLCPCSKEISQYGAHNQRSHVTVSLIANADVGIEEIIDYVEAQASCQLYGLLKRPDEKYVTEKAYENPKFVEDMVRDVATALIADKRIESFVVESENFESIHNHSAYAYIAYP

SEQ ID NO: 11456 - protein, 257 aa, Neisseria subflava
  misc_feature (1)..(257): tr|D3A4U6|D3A4U6_NEISU GTP cyclohydrolase FolE2 OS=Neis seria subflava NJ9703 OX=546268 GN=folE2 PE=3 SV=1
MNAIADVQSSRDLRNLPINQVGIKDLRFPISLKSKEGEQSTVARLTMTVFLPADQKGTHMSRFVALMEKQTDALDFDTLHKLTADMVALLDSHSGKISVTFPFFRKKSAPVSGIQSLLDYDVTLTGEIKNGTYSHSLKVMVPVTSLCPCSKEISQYGAHNQRSHVTVSLIANADVGIEEIIDYVEAQASCQLYGLLKRPDEKYVTEKAYENPKFVEDMVRDVATVLIADKRIESFVVESENFESIHNHSAYAYIAYP

SEQ ID NO: 11457 - protein, 259 aa, Neisseria wadsworthii
  misc_feature (1)..(259): tr|G4CNL9|G4CNL9_9NEIS GTP cyclohydrolase FolE2 OS=Neis seria wadsworthii 9715 OX=1030841 GN=folE2 PE=3 SV=1
MNAIIADVQSSKDLRNTPINQVGIKDLRFPILLNTAEGTQHTIARLTMTVYLPADQKGTHMSRFVALMEQQTEALGFQRLKTLTEEMVKLLDSDSGRISVSFPFFRKKTAPVSGIQSLLDYDVTLTGEVKGGAYCHSLKVLVPVTSLCPCSKEISEYGAHNQRSHVTVSLECGGGEVGIEEVIDCVEEQASCQLYGLLKRPDEKFVTERAYENPKFVEDMVRDVAAALRSDKRITGFTVESENFESIHNHSAYACIMYP

SEQ ID NO: 11458 - protein, 258 aa, Neisseria weaveri
  misc_feature (1)..(258): tr|A0A3S5F9U1|A0A3S5F9U1_9NEIS GTP cyclohydrolase FolE2 OS=Neisseria weaveri OX=28091 GN=folE2 PE=3 SV=1
MNAAIADVQSTPDLRNMPINQVGIKDLRFPITLNTEEGTQATVARLTMTVFLPADQKGTHMSRFVALMEKQTEALSFSRLKTLTEEMTALLDSHSGKISVSFPFFRKKTAPISGIQSLLDYDVTLTGEIKNGAYSHTLKVLVPVTSLCPCSKEISQYGAHNQRSHVTVTLTCSEEVGIEEVIDCVEAQASCQLYGLLKRPDEKFVTEKAYENPKFVEDMVRDVATALRAESRICGFVVESENFESIHNHSAYAYIAYP

SEQ ID NO: 11459 - protein, 257 aa, Neisseria zoodegmatis
  misc_feature (1)..(257): tr|A0A378WI75|A0A378WI75_9NEIS GTP cyclohydrolase FolE2 OS=Neisseria zoodegmatis OX=326523 GN=folE2 PE=3 SV=1
MNAIADVQSTRDLRNLPINQVGIKDLRFPITLNTAEGTQATVARLTMTVYLPADQKGTHMSRFVALMERQTEALSFERLKQLVEEMVSLLDSPSGKISVSFPFFRKKTAPISGIQSLLDYDVTLTGEVKDSEYSHTLKVLVPVTSLCPCSKEISQYGAHNQRSHVTVTLTCSSEVGIEEVIDCVESQASCQLYGLLKRPDEKYVTEQAYENPKFVEDMVRDVATRLIADGRVCGFVVESENFESIHNHSAYAYIAYP

SEQ ID NO: 11460 - protein, 257 aa, Neisseria zoodegmatis
  misc_feature (1)..(257): tr|A0A1X3CSN8|A0A1X3CSN8_9NEIS GTP cyclohydrolase FolE2 OS=Neisseria zoodegmatis OX=326523 GN=folE2 PE=3 SV=1
MNAIADVQSTRDLRNLPINQVGIKDLRFPITLNTAEGTQATVARLTMTVYLPADQKGTHMSRFVALMERQTEALSFGRLKQLVEEMVSLLDSHSGKISVSFPFFRKKTAPISGIQSLLDYDVTLTGEVKDGEYSHTLKVLVPVTSLCPCSKEISQYGAHNQRSHVTVTLTCSSEVGIEEVIDCVESQASCQLYGLLKRPDEKYVTEQAYENPKFVEDMVRDVATRLIADGRVCGFVVESENFESIHNHSAYAYIAYP

SEQ ID NO: 11461 - protein, 225 aa, Neisseriaceae bacterium
  misc_feature (1)..(225): tr|A0A2I7N715|A0A2I7N715_9NEIS GTP cyclohydrolase 1 OS= Neisseriaceae bacterium DSM 100970 OX=2052837 GN=CUN60_ 07950 PE=3 SV=1
MKNTCYQSDYALGLEIQKILLDAGIENPVNTDKIRVWNDPAHMEQLTGKLAMFFDELGIYRDSNDCNHTANRLIDYWCQQLFYGLDYNRFPEVNPMSNEFAYHNPLIAEDIQFTSTCEHHLVPIHGVAVIAYKPDKIVVGLNKLNAIVDFFTHRPQLQERLTRQIFITLKYILQTEDIAVLIRARHDCICSNGITDFTSFHSSFELGGIFSSDTSFKQHLLDKLK

SEQ ID NO: 11462 - protein, 266 aa, Neisseriaceae bacterium
  misc_feature (1)..(266): tr|A0A3S0DEF4|A0A3S0DEF4_9NEIS GTP cyclohydrolase FolE2 OS=Neisseriaceae bacterium OX=2014784 GN=folE2 PE=3 SV =1
MNAPYDLQLPDVQSQQLEHGLAIDEVGVKDVRYPIRIRTANGEVQHSIAFFDMYVSLPPSDKGTHMSRFIEMLETFDDSFSLENFQQWLARMVQRLEAEQGMVSASFPYFISKQAPVSGVSSLMDYEVKLVGQFHHLRGHQLQINVQVPVTSLCPCSKQISAYGAHNQRSHISIRANARTGLNIESLIQIAEQSASCELWGLLKRPDEKFVTERAYENPKFVEDLVRDIAHRLMDDPRVGSFEVSSENFESIHNHSAFARIRHAKP

SEQ ID NO: 11463 - protein, 230 aa, Neisseriales bacterium
  misc_feature (1)..(230): tr|A0A5C8B3P6|A0A5C8B3P6_9NEIS GTP cyclohydrolase 1 OS= Neisseriales bacterium OX=2053582 GN=E6Q33_05145 PE=3 S V=1
MKNNQYQTNYELGKEVQKRLIEFGIENPVNHQLIKQWSNEEHLDSLAKKLIPFLENLGIYSNDEDSSHTANRLVDYWCNQLFYGLDYNYFPQINPMPNEFTYHNPLIAENIKFTSTCEHHLVPIHGVAIIAYKPDSILVGLNKLNSVLDFFAHRPQLQERLVKQIFISLQYLLKTENIAILIKARHDCICSNGVCDYSSSHSSFEFGGVFDSDLSFKQHLLNKLDRIEAF

SEQ ID NO: 11464 - protein, 218 aa, Neisseriales bacterium
  misc_feature (1)..(218): tr|A0A5C8AXN8|A0A5C8AXN8_9NEIS GTP cyclohydrolase 1 OS= Neisseriales bacterium OX=2053582 GN=folE PE=3 SV=1
MKSYEKDPTLGSKVAQHLKTLGIDNPVNGNIDNNLVQQSIATLLSGLGIPLDDESIAKTPERVSRFFINELFYGLNYANFPKMTFNHNKYGYSEPVIAKNISFKSTCEHHLVTISGEAFVAYIPGNQVVGLSKLNRVVDFFARRPQVQERATLQIFRALQFLLETKDVAVLIKATHHCITMRGVSDHNVENITYQFGGQFSNSEMKRNFLELIKDNQA

SEQ ID NO: 11465 - protein, 218 aa, Neoasaia chiangmaiensis
  misc_feature (1)..(218): tr|A0A511TJ62|A0A511TJ62_9PROT GTP cyclohydrolase 1 OS= Neoasaia chiangmaiensis OX=320497 GN=folE PE=3 SV=1
MSKPTADLVTLDAARHKGAGGERPIAPIERPANAHERIAGAVREILLALGEDPQREGLLDTPQRVARMYLDVLGGLHEDPRDHLHTQFVADHHEGTVIVRDIGFHSMCEHHLLPFFGRAHVAYLPDGGRLTGLSKLARTVNVLARRPQLQERLTDQIAAAITDVLDPKAVMVMVEAEHMCMAMRGIRSVGSRTVTTVARGVWQRDVAARAEILSLLKG

SEQ ID NO: 11466 - protein, 194 aa, Neoasaia chiangmaiensis
  misc_feature (1)..(194): tr|A0A1U9KUV6|A0A1U9KUV6_9PROT GTP cyclohydrolase 1 OS= Neoasaia chiangmaiensis OX=320497 GN=folE PE=3 SV=1
MAPIERPANAHERIAGAVREILLALGEDPQREGLLDTPQRVARMYLDVLGGLHEDPRDHLHTQFVADHHEGTVIVRDIGFHSMCEHHLLPFFGRAHVAYLPDGGRLTGLSKLARTVNVLARRPQLQERLTDQIAAAITDVLDPKAVMVMVEAEHMCMAMRGIRSVGSRTVTTVARGVWQRDVAARAEILSLLKG

SEQ ID NO: 11467 - protein, 234 aa, Neochlamydia sp.
  misc_feature (1)..(234): tr|A0A0C1K275|A0A0C1K275_9BACT GTP cyclohydrolase 1 OS= Neochlamydia sp. TUME1 OX=1478174 GN=folE PE=3 SV=1
MAKKAPKKQLSLRASAPLHIRTCYPSPILESIDDKTDEEKIKLIAEKYTEILQILGLDLSDDSLQDTPQRIARMYVKEIFSGLKDDNFPEVSFFENKYKPSKSENANIILVKVNFTSFCEHHFVPMRGYAYVAYIPHKKLIGLSKIPRIVRFFAKRPQVQERLAAQIVDSLAHLLETENVAISIIAEHYCVIARGIENEHSHTVTNILRGNFQNNEVVRREFFESIRIYNNTPV

SEQ ID NO: 11468 - protein, 234 aa, Neochlamydia sp.
  misc_feature (1)..(234): tr|A0A3T1CDI9|A0A3T1CDI9_9BACT GTP cyclohydrolase 1 OS= Neochlamydia sp. S13 OX=1353976 GN=folE PE=3 SV=1
MAKKAPKKQLSLRASAPLHIRTCYPSPILESVDDKTDEEKIKLIAEKYTEILQILGLDLSDDSLQDTPQRIARMYVKEIFSGLKDDNFPEVSFFENKYEPSKSENANIILVKVNFTSFCEHHFVPMRGYAYVAYIPHKKLIGLSKIPRIVRFFAKRPQVQERLAAQIVDSLAHLLETENVAISIIAEHYCVIARGIENEHSHTVTNILRGNFQNNEVVRREFFESIRIYNNTPV

SEQ ID NO: 11469 - protein, 213 aa, Neokomagataea sp.
  misc_feature (1)..(213): tr|A0A506UKI4|A0A506UKI4_9PROT GTP cyclohydrolase 1 OS= Neokomagataea sp. Jb2 OX=2558904 GN=folE PE=3 SV=1
MNDSSTPPASSDHATETRPDGARLQPAKARARLEDSIRNLLEAVGEDPDREGLRETPERVARLYLDLFSGLYEDPRRHLEKQFSTDGHSGPVIVKDIPFQSTCEHHLLPVRGKAAVAYLPDGGRLTGLSKLARLVEGYARRPQLQERLTDQIVAALVEVLRPRAVLVMLEAEHMCMTLRGVRAPGSLTVTLGAHGLWAEDLAARGEILGLMKS

SEQ ID NO: 11470 - protein, 212 aa, Neokomagataea tanensis
  misc_feature (1)..(212): tr|A0A4Y6V8Z4|A0A4Y6V8Z4_9PROT GTP cyclohydrolase 1 OS= Neokomagataea tanensis OX=661191 GN=folE PE=3 SV=1
MTDPKPVDSLSVQEDLRPLDALCCPEDAKSRIAGAVRTILDALGEDTSREGLRDTPRRVAEMYLEVFGGLYEDPREHLKTQFSADRHKGAVIVKDIRFHSMCEHHLLPVVGRAHVAYLPDGGRLTGLSKLARVVEGFARRPQLQERLTDQIAQGLEDILRPAAVLVVLEAEHMCMSMRGVRAPGSSTVTTVARGVWADDHAARQEILSLLRG

SEQ ID NO: 11471 - protein, 195 aa, Neomicrococcus aestuarii
  misc_feature (1)..(195): tr|A0A1L2ZRL2|A0A1L2ZRL2_9MICC GTP cyclohydrolase 1 OS= Neomicrococcus aestuarii OX=556325 GN=folE PE=3 SV=1
MRGQYIAPQIDQERIAKAVREILEAIGEDPDRDGLQETPKRVAKAYAEIFAGLHMDPKEILSKSFDIDHEEMVLVKDIPFYSTCEHHLVPFHGRAHVGYIPGNDGRVTGLSKLARLVDMYARRPQVQERLTTQIVEAIESLLEPRGAIVVVECEHLCMSMRGVRKPGAMTVTSAVRGQLRQPATRAEAMSLILGK

SEQ ID NO: 11472 - protein, 204 aa, Neorhizobium alkalisoli
  misc_feature (1)..(204): tr|A0A561Q7K7|A0A561Q7K7_9RHIZ GTP cyclohydrolase 1 OS= Neorhizobium alkalisoli OX=528178 GN=folE PE=3 SV=1
MDAIVKNFPASSQKQPQPTQQEVEEAVRVLLRWTGDDPEREGLLDTPKRVANAYRELFGGYAETTEEILGRTFEEVSGYDDIVLVRDIPFFSHCEHHMLPIIGKAHVAYLPQGRVLGLSKIARVVEVFGRRLQTQENLTAQIASAIDETLKPRGVAVMIEARHMCMEMRGVQKQGSHTLTTTFTGEFKANAAEQARFFTLARNP

SEQ ID NO: 11473 - protein, 204 aa, Neorhizobium galegae
  misc_feature (1)..(204): tr|A0A068SP86|A0A068SP86_RHIGA GTP cyclohydrolase 1 OS= Neorhizobium galegae bv. orientalis str. HAMBI 540 OX=1 028800 GN=folE PE=3 SV=1
MDAIVKNFPASKEKQVRPSQQEAEEAVRVLLRWAGDDPAREGLLDTPKRVAASYSELFSGYEQSPEDVLGRTFEEVSGYDDIVLVRDIPFFSHCEHHMLPIIGKAHVAYLPNGRVLGLSKIARVVEIFGRRLQTQENMTAQIANAIEETLKPRGVAVMIEAEHLCMEMRGVQKQGSHTMTTTFTGEFKANAAEQARFFTLARNR

SEQ ID NO: 11474 - protein, 204 aa, Neorhizobium galegae
  misc_feature (1)..(204): tr|A0A0T7FJS7|A0A0T7FJS7_RHIGA GTP cyclohydrolase 1 OS= Neorhizobium galegae bv. officinalis OX=323656 GN=folE PE=3 SV=1
MDAIVKNFPASKEKQVRPSQQEAEEAVRVLLRWAGDDPAREGLLDTPKRVAASYRELFAGYEQSPEDVLGRTFEEVSGYDDIVLVRDIPFFSHCEHHMLPIIGKAHVAYLPNGRVLGLSKIARVVEIFGRRLQTQENLTAQIANAIDETLKPRGVAIMIEAEHLCMEMRGVQKQGSHTMTTTFTGEFKANAAEQARFFTLARNR

SEQ ID NO: 11475 - protein, 208 aa, Neorhizobium sp.
  misc_feature (1)..(208): tr|A0A386DX98|A0A386DX98_9RHIZ GTP cyclohydrolase 1 OS= Neorhizobium sp. NCHU2750 OX=1825976 GN=folE PE=3 SV=1
MDAIVKNFPASSQEQGQKSARPSQQEAEEAVRVLLRWAGDDPAREGLLDTPSRVAKAYGELFAGYDQSPEDVLGRTFEEMSGFDDIVLVREIPFFSHCEHHMLPIKGMATVAYLPNGPVLGLSKIARVVEIFGRRLQTQENLTAQIANAIQNTLKPRGVAVLIEAEHMCMEMRGVQKQGSRTLTTTFTGEFKTNATEQARFFTLARNR

SEQ ID NO: 11476 - protein, 204 aa, Neorhizobium sp.
  misc_feature (1)..(204): tr|A0A4R3WXB6|A0A4R3WXB6_9RHIZ GTP cyclohydrolase 1 OS= Neorhizobium sp. S3-V5DH OX=2485166 GN=folE PE=3 SV=1
MDAIVKNFPASKEKLVRPSQQEAEEAVRVLLRWAGDDPAREGLIDTPKRVAAAYRELFGGYEQSAEEVLGRTFEEVSGYDDIVLVRDIPFFSHCEHHMLPIKGKAHVGYLPNGRVLGLSKIARVVEIFGRRLQTQENLTAQIAHAIEETLKPRGVAVMIEAEHMCMEMRGVQKQGSQTITTTFTGEIKTNAAEQARFFTFVRNR

SEQ ID NO: 11477 - protein, 180 aa, Neorickettsia helminthoeca
  misc_feature (1)..(180): tr|X5H4N3|X5H4N3_9RICK GTP cyclohydrolase 1 OS=Neoricke ttsia helminthoeca str. Oregon OX=1286528 GN=NHE_0568 P E=3 SV=1
MRKLSEDDIRGFIAAIGDDPDRRELKDTPRLLLEILTKCFAGYAHNSLDSLITPMESCCTESLVVLKDIPFFSFCEHHILPISGNISVGYVPDAFITSIGSIKRLVHACTRRLQMQERICTQIATALDRVLSPKGVIVYATARHMCMMHNDGIFDASAKTGVFLDNQRTEIQEFFCVIKK

SEQ ID NO: 11478 - protein, 180 aa, Neorickettsia sennetsu
  misc_feature (1)..(180): tr|Q2GDH9|Q2GDH9_NEOSM GTP cyclohydrolase I OS=Neoricke ttsia sennetsu (strain ATCC VR-367 / Miyayama) OX=22289 1 GN=folE PE=4 SV=1
MQKLSEGDIQDFFGVGVGETDRLGARGASHSFLKMFANYFSGYACSDFSSLVAKMENPDGGESLLVLKRTPFLSFCEHHVLPISGYISIGYIPDKSITSLGSLGRLVSACTKRLQLQERICAQIALAIEESLSPKGVIVYASAKHACVAHNTSVFESVAKRGAFAANTKGEVQEFFSILK

SEQ ID NO: 11479 - protein, 236 aa, Neosynechococcus sphagnicola
  misc_feature (1)..(236): tr|A0A098TK13|A0A098TK13_9CYAN GTP cyclohydrolase 1 OS= Neosynechococcus sphagnicola sy1 OX=1497020 GN=folE PE= 3 SV=1
MTIAPTNGSNRPDPSLVQNAIPTTPRPDRNTLNGGEPNLQPPCDEHENQEQMMAAVRNILLGVGEDPDREGLLKTPKRVAEAMQFLTSGYKQSLEELVNNAIFDEGHNEMVLVRDINAFSLCEHHMLPFMGKVHVAYIPNQKVVGLSKLARIVEMYARRLQVQERLTRQVAEAIQEVLEPKGVAVVMEAVHMCMVMRGVQKPGSWTVTSAMVGVFQDDQKTREEFLNLIRHQASFF

SEQ ID NO: 11480 - protein, 311 aa, Neptuniibacter caesariensis
  misc_feature (1)..(311): tr|A0A2G6JAN2|A0A2G6JAN2_NEPCE GTP cyclohydrolase FolE2 OS=Neptuniibacter caesariensis OX=207954 GN=folE2 PE=3 SV=1
MTNLPDVTSNQNPEIHGSLDWVGMNGITVPLQFDDYKLGVNNIEARVNTYVNLTNPKVKGIHMSRLYLALSNFFENQTLNVPALTDFLSHLLDSHHDISTQVFLNFEFDFLIKRDALKSDNSGWKNYSTTLRATLKDGDVIIELATRVPYSSTCPCSAALSRQLLQQAFTADFADRESFDLEDVEKWLLSEKGSFATPHSQRSQATAWVKLDKNMGAFPLTDLIDLVEGALKTPVQTAVKRADEQEFARLNGHNLMFCEDAARRVKQALQTQTQYTDFWLKVEHFESLHAHDAVALASKGIEGGYSPADYS

SEQ ID NO: 11481 - protein, 311 aa, Neptuniibacter sp.
  misc_feature (1)..(311): tr|A0A136H9H2|A0A136H9H2_9GAMM GTP cyclohydrolase FolE2 OS=Neptuniibacter sp. Phe_28 OX=1795871 GN=folE2 PE=3 SV=1
MTNLPDVTSNQNPEIHGSLDWVGMNGITVPLQFEDSKLGINNIEARVNTYVNLVNPKVKGIHMSRLYLALSNFFENQTLNVPALTEFLSHLLDSHHDISTQVFLNFEFDFLIKRDALKSDNSGWKNYSTTLRATLKDNEVVLELATRVPYSSTCPCSAALSRQLLQQAFSTDFADKGSLNIEDVEKWLLSEKGSFATPHSQRSQATAWIKLNKEMGAFPLTDLIDLIEDALKTPVQTAVKRADEQEFARLNGHNLMFCEDAARRLKQALNAQTQYADFWLKVEHYESLHAHDAVALASKGVEGGYSPANYT

SEQ ID NO: 11482 - protein, 212 aa, Neptuniibacter sp.
  misc_feature (1)..(212): tr|A0A136H4H8|A0A136H4H8_9GAMM GTP cyclohydrolase 1 OS= Neptuniibacter sp. Phe_28 OX=1795871 GN=folE PE=3 SV=1
MISAEASAVRDQLIEKGLETPTIDNGMNQEQRYEKIKGLMSDVVSTLGMNLEDDSLLETPHRIAKMYVYEIFSGLDYENFPKITMIENKMDLEEMVKVRNISVLSSCEHHFVTIDGTAKVAYIPNEKIIGLSKINRLVRFFSQRPQVQERLTKQILIALQTLLDTDNVAVSINATHYCVKSRGVMDVNSETETTALGGIFKSNPRTRAEFLT

SEQ ID NO: 11483 - protein, 212 aa, Neptunomonas antarctica
  misc_feature (1)..(212): tr|A0A1N7IWK3|A0A1N7IWK3_9GAMM GTP cyclohydrolase 1 OS= Neptunomonas antarctica OX=619304 GN=folE PE=3 SV=1
MISNEARAVRNQLIEKGLETPLTENNLNNEQKYERIKGLMAEVLATLGLDLNDDSLTETPHRIAKMYTYEIFSGLDYANFPAMSLIENKMQVEEMIKVRDISLISSCEHHFVTIDGTAKVAYIPGKKIIGLSKINRLVRFFSQRPQVQERLTQQILIALQTLLETDNVAITIQATHYCVKSRGVMDVNSSTETTALGGIFKTNDRTRAEFLL

SEQ ID NO: 11484 - protein, 179 aa, Neptunomonas antarctica
  misc_feature (1)..(179): tr|A0A1N7K9H0|A0A1N7K9H0_9GAMM GTP cyclohydrolase 1 OS= Neptunomonas antarctica OX=619304 GN=folE PE=3 SV=1
MEKAYATIIEQVGEDLSREGLVDTPARAAKAMAYLTRGYKQNLEEVVNNALFPSDNSEMVLVKNIELYSLCEHHLLPFIGKAHVAYIPDGKVIGLSKIARIVDMYARRLQIQENMTKEIAEAIMSVTGAKGVGVVIEAKHMCMMMRGVEKQNGSMTTSMMLGTFRSKPETRSEFLSLLS

SEQ ID NO: 11485 - protein, 180 aa, Neptunomonas qingdaonensis
  misc_feature (1)..(180): tr|A0A1I2TCZ0|A0A1I2TCZ0_9GAMM GTP cyclohydrolase 1 OS= Neptunomonas qingdaonensis OX=1045558 GN=folE PE=3 SV=1
MMEKAYATIIEQVGEDLNREGLLDTPARAAKAMAYLTRGYHQNLEEVVNNALFPSDNSEMVLVKDIELYSLCEHHLLPFIGKAHVAYIPDGKVIGLSKIARIVDMYARRLQIQENMTKEIAEAIMSMTGAKGVGVVIEAKHMCMMMRGVEKQNGSMKTSMMLGTFRSKPETRAEFLSLLC

SEQ ID NO: 11486 - protein, 212 aa, Neptunomonas qingdaonensis
  misc_feature (1)..(212): tr|A0A1I2PUB1|A0A1I2PUB1_9GAMM GTP cyclohydrolase 1 OS= Neptunomonas qingdaonensis OX=1045558 GN=folE PE=3 SV=1
MISPEATAVRDQLIEKGLETPTIDTNMSQQQRYERIKGLMTEVLSTLGLNLEDDSLQETPHRIAKMYVYEVFSGLDYENFPDIAMIDNKMGVEEMIKVRDISVLSSCEHHFVTIDGSAKVAYIPNKKIIGLSKINRLVRFFSQRPQVQERLTQQILIALQILLETDNVAISINATHYCVKSRGVMDVNSQTETTALGGIFKSNERTRAEFLN

SEQ ID NO: 11487 - protein, 318 aa, Neptunomonas sp.
  misc_feature (1)..(318): tr|A0A437Q5D3|A0A437Q5D3_9GAMM GTP cyclohydrolase FolE2 OS=Neptunomonas sp. HPM-16 OX=1815562 GN=folE2 PE=3 SV =1
MTVKRSNALPDITNTPAPDHSPLDWVGMTEVAVPFSLQDEAHSTTECEALASLFVNICRSDIKGIHMSRLYLLLAEFAEQNAFSPQAMQQFLHDKLATHKEISDQSSLTLAFDYLHKRPALLSQYQGWKAYPAVIKGTLEQETACHEVQLTIPYSSTCPCSASLSRQLLEEAFRHDFADQTQISADQIAQWLRSERGSVATPHSQRSYAYLVLKLAPNVSSHYPLLELIDLVEQSLGTPVQTAVKREDEQAFARLNGANLMFCEDAARRIKRALEQHSAISDFWVKVEHQESLHAHNAVAIATKGCAGGYRSVTTSPL

SEQ ID NO: 11488 - protein, 179 aa, Neptunomonas sp.
  misc_feature (1)..(179): tr|A0A437Q8U3|A0A437Q8U3_9GAMM GTP cyclohydrolase 1 OS= Neptunomonas sp. HPM-16 OX=1815562 GN=folE PE=3 SV=1
MEKAYATIIEQVGEDLTREGLVDTPARAAKAMAYLTRGYEQTLEDVVNGALFPSDNSEMVIVKDIELYSLCEHHMLPFIGKAHVAYIPDGQVVGLSKIARIVDMYARRLQIQENMTKQIAEAIEQVTGAKGVGVVIEAKHMCMMMRGVEKQNSSMKTSMMLGSFRSNSETRSEFLSLIR

SEQ ID NO: 11489 - protein, 366 aa, Nereida ignava
  misc_feature (1)..(366): tr|A0A0U1NJD6|A0A0U1NJD6_9RHOB GTP cyclohydrolase FolE2 OS=Nereida ignava OX=282199 GN=folE2 PE=3 SV=1
MNFHTPDMDREPTREEAEAALAVLRRWAGGATDVERSDLDPAVARLTVDAPADYPDLSRQYPAEFEVDAAYKASLPDLQNGPTSLIRGAKRQIQHVGISNFRLPIRFRTRDNGDLTLETSVTGTVSLDAEKKGINMSRIMRTFYQSADETFSFDVIDRTLDAYKTDLESFDARIQMRFSFPMKVTSLRSGLSGYQYYDIALELVEQAGARKKIVHLDYVYSSTCPCSLELSEHARQTRGQLATPHSQRSVARISVALENDAQVLWFEDLIEMARRAVPTETQVMVKREDEQAFAELNAANPIFVEDAARLFCEQLQADPRVGDFRVIASHQESLHSHDAVSVLFEGDTFASDSIDPKLFATLFHVG

SEQ ID NO: 11490 - protein, 209 aa, Nesiotobacter exalbescens
  misc_feature (1)..(209): tr|A0A1U7JKE9|A0A1U7JKE9_9RHOB GTP cyclohydrolase 1 OS= Nesiotobacter exalbescens OX=197461 GN=folE PE=3 SV=1
MDAVLRTVAQETSDERRAASRPSREEAEAAARVLLEWAGDNPEREGLVETPKRMVKAFEDLFAGYREDPREHLERTFEEVGGYNDIVLLRDIDFYSFCEHHVLPFKGKAHIAYYPSNKVIGLSKLARVVEIYARRLQTQENLTAEIIGAIDTYLAPRGIAVMLEAEHQCMAMRGIQKAGVSTITNQFTGIFKEDPAEQARFMTLIRTTS

SEQ ID NO: 11491 - protein, 201 aa, Nesterenkonia aurantiaca
  misc_feature (1)..(201): tr|A0A4R7G7U7|A0A4R7G7U7_9MICC GTP cyclohydrolase 1 OS= Nesterenkonia aurantiaca OX=1436010 GN=folE PE=3 SV=1
MPEHPGPPLTEPVDLPRIEAAVREILLAVGEDPEREGLKGTPARVARAYEEAFLGLREDPAELMSTTFDIGHEELVLVRDVPFYSTCEHHLVPFFGHAHIGYIPSPEGRVTGLSKLARLVDIFAKRPQVQEQLTTQVVDALVQHLTPGGAMVVVEAEHLCMSMRGVSKPGARTITSAVRGQLRDPATRAEAMSLMLHGRPR

SEQ ID NO: 11492 - protein, 207 aa, Nesterenkonia jeotgali
  misc_feature (1)..(207): tr|A0A0W8IIQ9|A0A0W8IIQ9_9MICC GTP cyclohydrolase 1 OS= Nesterenkonia jeotgali OX=317018 GN=folE PE=3 SV=1
MPDPRSGSDPAASATPGAVDLPRIEAAVREILLAVGEDPQREGLRGTPARVARAYEEAFQGLREDPAELMSTTFDIGHEELVLVRDVPFYSTCEHHLVPFFGHAHIGYIPSPEGKVTGLSKLARLVDIFAKRPQVQEQLTTQVVDALVEHLAPGGAIVVVEAEHLCMSMRGVSKPGARTITSAVRGQLRDAATRAEAMSLMLHGRPQ

SEQ ID NO: 11493 - protein, 206 aa, Nesterenkonia sandarakina
  misc_feature (1)..(206): tr|A0A2T0YQS8|A0A2T0YQS8_9MICC GTP cyclohydrolase 1 OS= Nesterenkonia sandarakina OX=272918 GN=folE PE=3 SV=1
MPERPAPAGAPAPLEGSVDLPRIEAAVREILLAVGEDPERDGLQGTPSRVARAYEEAFQGLREDPAELMSTTFDIGHEELVLVRDVPFYSMCEHHLVPFFGHAHIGYIPSPEGKVTGLSKLARLVDIFAKRPQVQEQLTTQVVDALVEHLAPGGAMVVVEAEHLCMSMRGVSKPGARTITSAVRGQLRDAATRAEAMSLMLHGRPH

SEQ ID NO: 11494 - protein, 204 aa, Nesterenkonia sp.
  misc_feature (1)..(204): tr|A0A3A4FBM8|A0A3A4FBM8_9MICC GTP cyclohydrolase 1 OS= Nesterenkonia sp. M8 OX=2174932 GN=folE PE=3 SV=1
MQRTSCRREGVVDEVSDVVDLPRIEAAVREILLAIGENPEREGLKQTPARVARAYAEAFKGLHEEPADLLGTTFDIGHQELVLVRDVAFYSMCEHHLVPFYGKAHVGYIPAEEGKVTGLSKLARLVDIFAKRPQVQEQLTTQIADALMEHLQPEGVIVVIESEHLCMSMRGVSKPGAKTVTSAVRGALRNAATRAEAMSLILRN

SEQ ID NO: 11495 - protein, 204 aa, Nesterenkonia sp.
  misc_feature (1)..(204): tr|A0A1X3P4J0|A0A1X3P4J0_9MICC GTP cyclohydrolase 1 OS= Nesterenkonia sp. PF2B19 OX=1881858 GN=folE PE=3 SV=1
MSSTITTPGSPELPQDAPVDLPRIEAAVREILVAVGEDPERDGLKDTPGRVARAYQEAFRGLHEDPAELLATTFDIGHEELVLVRDIPFYSMCEHHLVPFFGHAHIGYIPSADGKVTGLSKLARLVDIFAKRPQVQENLTTEVVEALMAHLEPLGAIVVVECEHLCMSMRGVSKPGAKTITSAVRGQLRDAATRSEAMSLILHR

SEQ ID NO: 11496 - protein, 212 aa, Nevskiales bacterium
  misc_feature (1)..(212): tr|A0A2F0A1B0|A0A2F0A1B0_9GAMM GTP cyclohydrolase 1 OS= Nevskiales bacterium OX=2026766 GN=folE PE=3 SV=1
MDTSVTTAKAAVDTTSDAVTRPTREEAEAAVRTLIAWTGDNPNREGLLDTPGRVVRAYEEFYAGYKEDPREILSRTFEEVDGYDDMVMLRDIRLESHCEHHMVPIIGRVHIAYLPVSRVVGISKLARVIEIYARRLQTQETMTAQIANVLEEVLKPAGVAVLVDAAHQCMTTRGIRKPGVFTITSRFTGRFKEDMRLHDRFMQMIRPTPNDM

SEQ ID NO: 11497 - protein, 198 aa, Niabella drilacis
  misc_feature (1)..(198): tr|A0A1G7BMQ9|A0A1G7BMQ9_9BACT GTP cyclohydrolase 1 OS= Niabella drilacis OX=1285928 GN=folE PE=3 SV=1
MAYKKEDKYNEPVTQALIQHYQQVIAQLGEDPQREGLLKTPERVAKAMQVLTQGYQMDAHEIINSAKFHEDVSEMIIVKDIELYSLCEHHMLPFFGRAHVAYIPNGWITGLSKIARVVDVYSHRLQVQERLTVQIMNAIKETLNPLGVAVVIEAKHLCMMMRGVQKQNSETTTSAFDGEFQKNSTRSEFLKLISARLS

SEQ ID NO: 11498 - protein, 220 aa, Niabella drilacis
  misc_feature (1)..(220): tr|A0A1G6ZTT0|A0A1G6ZTT0_9BACT GTP cyclohydrolase 1 OS= Niabella drilacis OX=1285928 GN=folE PE=3 SV=1
MENDPVNGLLHQEPGDLLLNPPLREDAFEQSDQEKIDEIAYHFGRIMHVLGLDLNDDSLNKTPGRVAKMYVKELFSGLNPTSKPEISLFENRYGYDRMLVEKDITLYSCCEHHFVPIIGKVHVAYIPGTRVIGLSKINRLVQYYARRPQVQERLTVQIADGLKAVLQHNDVAVMVEATHLCVAARGIKDIQSSTVTAHYSGRFQNETTRAGFLSLIRSGK

SEQ ID NO: 11499 - protein, 198 aa, Niabella ginsenosidivorans
  misc_feature (1)..(198): tr|A0A1A9HXS0|A0A1A9HXS0_9BACT GTP cyclohydrolase 1 OS= Niabella ginsenosidivorans OX=1176587 GN=folE PE=3 SV=1
MAYKNEDRYDESVTQKLIENYKSIITNLGEDAEREGLLKTPERVAKAMQVLTKGYHSDAHKIINSAKFHEDVSEMIIVKDIELYSLCEHHMLPFFGRAHVAYIPNGWITGLSKIARVVDVFSHRLQVQERLTVQIMNAIKETLNPLGVAVVIEAKHLCMMMRGVQKQNSVTTTSAFYGEFEKNPTRSEFLKLISAHLS

SEQ ID NO: 11500 - protein, 221 aa, Niabella soli
  misc_feature (1)..(221): tr|W0EZB3|W0EZB3_9BACT GTP cyclohydrolase 1 OS=Niabella soli DSM 19437 OX=929713 GN=folE PE=3 SV=1
MNTDHLIQETNDVLPGKTLAESPVRANAFELSTDEKIRRIKYHFAKIMDTLGLDLEDDSLKDTPGRVAKMYVNELFSGLNPDNKPRISLFENKYGYKKMLVEKDITFYSSCEHHFVPIIGRAHVAYIPGKQVVGLSKINRLVHYYARRPQVQERLTIQIAEALKEILRHNDVAVVIEAEHLCVASRGIKDTAATTVTASYSGQFENETIKQELLAYIYSKK

SEQ ID NO: 11501 - protein, 198 aa, Niabella soli
  misc_feature (1)..(198): tr|W0F5J8|W0F5J8_9BACT GTP cyclohydrolase 1 OS=Niabella soli DSM 19437 OX=929713 GN=folE PE=3 SV=1
MAYKRTEQYDETVTNALIGNYQSVIAHLGEDPEREGLLKTPERVAKAMQVLTQGYYMDAHAIINSAKFHEEVSEMIIVKDIELYSLCEHHMLPFFGKAHVAYIPNGWITGLSKIARVVDVFSHRLQVQERLTVQIMNAIKETLNPLGVAVVIEAKHLCMMMRGVQKQNSETTTSAFFGEFEKDSTRSEFMKLISARLS

SEQ ID NO: 11502 - protein, 269 aa, Niabella sp.
  misc_feature (1)..(269): tr|A0A5C7W823|A0A5C7W823_9BACT GTP cyclohydrolase FolE2 OS=Niabella sp. OX=1962976 GN=folE2 PE=3 SV=1
MNHFTNFSVMPDVQASSDSREIAIQRVGVKNVRHPIILETLSGTQASIAHYDLDVLLEADKKGTHMSRFIELLEAQKTPLSLRSFRQMLTAMLDKLNAQAGRIVLSCPYFIKKTAPVSGVQSLLDYQISFSGEVKQHEGQTDCALWLKVEVPVTSLCPCSKEISRYGAHNQRSFIIIQAELIDDVAIEELIRIAEEESSCELWGLLKRSDEKYVTERAYENPKFVEDLVRGVAVRLDADKRIRHYVVEAENFESIHNHSAYALIDSRAR

SEQ ID NO: 11503 - protein, 198 aa, Niastella koreensis
  misc_feature (1)..(198): tr|G8T9X6|G8T9X6_NIAKG GTP cyclohydrolase 1 OS=Niastell a koreensis (strain DSM 17620 / KACC 11465 / GR20-10) O X=700598 GN=folE PE=3 SV=1
MGFKKIEQYDEKIMPGLIHHYSESLKLLGEDPQREGLEKTPERVAKAMQYMMQGYDQDARAILNSAKFKEPVSEMILVKDIELYSMCEHHMLPFFGKAHIAYIPNGYITGLSKLARVVDVYARRLQVQERLTTQILDAIKETLNPLGVAVVIEAKHLCMMMRGVQKQNSVTTTSAFWGEFEKNETRSEFTKLISSRLH

SEQ ID NO: 11504 - protein, 198 aa, Niastella populi
  misc_feature (1)..(198): tr|A0A1V9FGM2|A0A1V9FGM2_9BACT GTP cyclohydrolase 1 OS= Niastella populi OX=550983 GN=folE PE=3 SV=1
MAYKKIDQYEDKIMPGLIHHYRETLSLLGEDPEREGLVKTPERVAKAMQYMTQGYEMDARAILNSAKFKENVSEMILVKDIELYSLCEHHILPFFGKAHIAYIPNGYITGLSKLARVVDVYARRLQVQERLTTQILDAIKETLQPLGVAVVIEASHLCMMMRGVQKQNSVTTTSAFWGEFEKNETRSEFTKLISSRLH

SEQ ID NO: 11505 - protein, 198 aa, Niastella sp.
  misc_feature (1)..(198): tr|A0A4R2VQW1|A0A4R2VQW1_9BACT GTP cyclohydrolase 1 OS= Niastella sp. CF465 OX=2135684 GN=folE PE=3 SV=1
MAYKKVDQYDEKIMPELMHHYRETLSLLGEDPNREGLVKTPERMAKAMQYLTQGYEMDAKAILDSAKFKESVSEMILVKDIELYSMCEHHLLPFFGKAHIAYIPNGYITGLSKLARVVDVYARRLQVQERLTTQILDAIKETLQPLGVAVVIEASHLCMMMRGVQKQNSVTTTSAFWGEFEKNETRAEFTKLISSHLH

SEQ ID NO: 11506 - protein, 218 aa, Niastella sp.
  misc_feature (1)..(218): tr|A0A1E4E7U6|A0A1E4E7U6_9BACT GTP cyclohydrolase 1 OS= Niastella sp. SCN 39-18 OX=1660119 GN=folE PE=3 SV=1
MDITDFTPAVKKEFTPNGKIINAVFTDNKMDISSQEKSIEYHFSKIMEALGLNLHEDGLKDTARRVAKMYVQEIFKGLNPANEPGITLFENKFKYNEMVVEKNIPVFSYCEHHFVPFIGKAHIAYISKGKVIGLSKLNRIVDFYARRPQIQERLTAQIADHIKKVLQTEDVAVILKASHLCIASRGVAQQGCETITNSLHGSFINTVNKQEFFTLINL

SEQ ID NO: 11507 - protein, 198 aa, Niastella vici
  misc_feature (1)..(198): tr|A0A1V9FUQ8|A0A1V9FUQ8_9BACT GTP cyclohydrolase 1 OS= Niastella vici OX=1703345 GN=folE PE=3 SV=1
MAYKKIEHYEDKLMPGLTHHYREALALLGEDPEREGLLKTPERVAKAMQYMTQGYDMDARAILNSAKFKENVSEMILVKDIELYSLCEHHLLPFFGKAHIAYIPNGYITGLSKLARVVDVYARRLQVQERLTTQILDAIKETLQPLGVAVVIEASHLCMMMRGVQKQNSVTTTSAFWGEFEKNETRSEFTKLISSRLH

SEQ ID NO: 11508 - protein, 198 aa, Niastella yeongjuensis
  misc_feature (1)..(198): tr|A0A1V9EZ29|A0A1V9EZ29_9BACT GTP cyclohydrolase 1 OS= Niastella yeongjuensis OX=354355 GN=folE PE=3 SV=1
MAFKKIEQYDEKIMPGLIHHYSESLKLLGEDPEREGLVKTPERVAKAMQYMMQGYDQDARAILNSAKFKESVSEMILVKDIELYSMCEHHMLPFFGKAHIAYIPNGYITGLSKLARVVDVYARRLQVQERLTTQILDAIKETLNPLGVAVVIEAKHLCMMMRGVQKQNSVTTTSAFWGEFEKNETRSEFTKLITSRLH

SEQ ID NO: 11509 - protein, 325 aa, Nibricoccus aquaticus
  misc_feature (1)..(325): tr|A0A290QJ38|A0A290QJ38_9BACT GTP cyclohydrolase FolE2 OS=Nibricoccus aquaticus OX=2576891 GN=folE2 PE=3 SV=1
MKKKPMYLHRSADGAEPKIARAFDATFKADAAYRATLPDMMEAAQDSIQGAHVPIQQVGVHNFRLPLKFRTKKKDVITLEASVTGTVSLEAELKGINMSRIVRSFYEHKDEVFTGEWMGKILRAYLKKVESKNARLKIRFSYPMLRPSLRSGLDGYQFYNVAFEGVMTGAGEYRRFIHFDFVYSSACPCSAELSEHARDKRGAYTVPHSQRSKARVIVEEVEGAKIWIEDIHALCERALKTETQVMVKREDEQAFAELNGAHLKFVEDAARLLYGEFNREKRVKDFLIACSHLESLHSHDAVSVVCKGVKDGFKADFMDFGSLLC

SEQ ID NO: 11510 - protein, 219 aa, Nicoletella semolina
  misc_feature (1)..(219): tr|A0A4R2N499|A0A4R2N499_9PAST GTP cyclohydrolase 1 OS= Nicoletella semolina OX=271160 GN=folE PE=3 SV=1
MSIISPEAQNVRTALLAKGIETPTVTLSKDKNSRRAEIQQHLRAVLELLGLDLRDDSLEETPHRLAKMYVDEIFSGLDYSTFPKITKIKNQMKVSEMVLVDEITLTSTCEHHFVTIDGNVSVAYYPKDWVIGLSKINRIVQFFAQRPQVQERFTEQILTAFQTILETEDVAIYVKATHFCVKCRGVKDTNSKTITSAFGGVFLQDRDTRKEFLSLINKL

SEQ ID NO: 11511 - protein, 214 aa, Nisaea sp.; identical to SEQ ID NO: 6180
  misc_feature (1)..(214): tr|A0A2D7JQM1|A0A2D7JQM1_9PROT GTP cyclohydrolase 1 OS= Nisaea sp. OX=2024842 GN=folE PE=3 SV=1
  misc_feature (64)..(64): Xaa can be any naturally occurring amino acid

SEQ ID NO: 11512 - protein, 194 aa, Nisaea sp.
  misc_feature (1)..(194): tr|A0A2D7Z1J5|A0A2D7Z1J5_9PROT GTP cyclohydrolase 1 OS= Nisaea sp. OX=2024842 GN=folE PE=3 SV=1
MERQNVPKPSRQTAESAVRTLIEWAGDDPEREGLIDTPKRVVDAYEEFFAGYEADPDAVLGRTFEEVSGYDDMVLLRDIAVESHCEHHMVAILGHAHLAYIPDGKVVGISKLARVVEIFARRLQTQETMTAQIVECIERVLRPRGVAIVVDAKHQCMTTRGIKKPNVATLTSRFTGAFADDARLEARFFEMIKG

SEQ ID NO: 11513 - protein, 220 aa, Nissabacter sp.
  misc_feature (1)..(220): tr|A0A4P8SEC5|A0A4P8SEC5_9GAMM GTP cyclohydrolase 1 OS= Nissabacter sp. SGAir0207 OX=2126321 GN=folE PE=3 SV=1
MATLSKEAALVHEALMARGLETPLRPEPMLDRETRTRHIQEHMTSIMQLLNLDLNDDSLAETPNRIAKMYVDEIFSGLDYSNFPKITIIENKMRVDEMVTVRDITLTSTCEHHFVTIDGKATVAYIPKDGVIGLSKINRIVQFFSQRPQVQERLTQQILVALQTLLGTNNVAVSIDAVHYCVKARGIRDATSATTTTSLGGLFKSSQNTRQEFLRAVRHV

SEQ ID NO: 11514 - protein, 193 aa, Nitratifractor salsuginis
  misc_feature (1)..(193): tr|E6WXW1|E6WXW1_NITSE GTP cyclohydrolase 1 OS=Nitratif ractor salsuginis (strain DSM 16511 / JCM 12458 / E9I37 -1) OX=749222 GN=folE PE=3 SV=1
MSDKSKKIEAAVRTILENLGEDPDREGLLKTPHRVAKALEFLTEGYHKDPEEILKKALFTSSNDEMVLVRDIEFYSLCEHHMLPIIGRAHVAYIPDGKVVGLSKIPRVVNLFARRLQIQEQLTEQIADAISDTIHPKGVAVVIHARHMCMEMRGVEKINSTTVTSALRGLFKKDIRTRNEFYDLINANVPSNF

SEQ ID NO: 11515 - protein, 221 aa, Nitratireductor aquibiodomus
  misc_feature (1)..(221): tr|I5C0F5|I5C0F5_9RHIZ GTP cyclohydrolase 1 OS=Nitratir eductor aquibiodomus RA22 OX=1189611 GN=folE PE=3 SV=1
MDAVIKNFPPHTEKGEKIAEKKSYMDKPVTDRPSREEVENAVRTLLRWTGDDIAREGLIETPQRVAKAYREMFSGYDQCPAEELGRTFEEVQGYNDMVLIKDISFHSHCEHHMVPIIGKAHVAYLPDGKVVGLSKIARVVDIFARRLQTQEAMTAQIAHVIQDVLKPRGVAVLVEAEHMCMAMRGIRKQGSVTLTTTFTGVYREDLQEQARFMTMLRDKHG

SEQ ID NO: 11516 - protein, 215 aa, Nitratireductor basaltis
  misc_feature (1)..(215): tr|A0A084UBB3|A0A084UBB3_9RHIZ GTP cyclohydrolase 1 OS= Nitratireductor basaltis OX=472175 GN=folE PE=3 SV=1
MDAILKNQKHADTSAKAAADSASTSHAARPDRAEVEEAVLTLLRWVGEDPKREGLIETPARVAKAYAEMFSGYEQDAAEELGRTFEEVAGYDDIVLMRDLSFHSHCEHHMVPIIGKAHVAYLPDGKVVGLSKIARVVDIYARRLQTQEAMTAQIAGVIQDVLQPRGVAVMVEAEHMCMAMRGIRKQGSTTITTRFTGEFRNNNEEQQRFLSLIRG

SEQ ID NO: 11517 - protein, 221 aa, Nitratireductor indicus
  misc_feature (1)..(221): tr|K2N0K0|K2N0K0_9RHIZ GTP cyclohydrolase 1 OS=Nitratir eductor indicus C115 OX=1231190 GN=folE PE=3 SV=1
MDAVIKNFPPHTDKGGKDAESKSFMDKPFTDRPSQEEVEAAVRTLLRWTGDDISREGLIETPQRVAKAYREMFSGYDQCPAEELGRTFEEVQGYNDMVLIKDISFHSHCEHHMVPIIGKAHVAYLPDGKVVGLSKIARVVDIFARRLQTQESMTAQIAGVIQEVLQPRGVAVLIEAEHMCMAMRGIRKQGSTTLTTTFTGAYKQDLQEQARFMTMLRDIRN

SEQ ID NO: 11518 - protein, 221 aa, Nitratireductor pacificus
  misc_feature (1)..(221): tr|K2MQW3|K2MQW3_9RHIZ GTP cyclohydrolase 1 OS=Nitratir eductor pacificus pht-3B OX=391937 GN=folE PE=3 SV=1
MDAVIKNFPPHADQGTDAAGKKHSMHKPLTDRPSQQEVEAAVTTLLRWTGDDIAREGLIETPARVAKAFREMFSGYDQSPEDELGRTFEEVQGYDDMVLIKDMSFHSHCEHHMVPIIGKAHVAYLPDGKVVGLSKIARVVDIFARRLQTQEAMTAQIATVIQDVLKPRGVAVLIEAEHMCMAMRGIRKQGSTTLTTTFTGVFKTDFQEQARFMTMLRDKHG

SEQ ID NO: 11519 - protein, 221 aa, Nitratireductor sp.; identical to SEQ ID NO: 11515
  misc_feature (1)..(221): tr|A0A1H4IY43|A0A1H4IY43_9RHIZ GTP cyclohydrolase 1 OS= Nitratireductor sp. ES.061 OX=1855335 GN=folE PE=3 SV=1

SEQ ID NO: 11520 - protein, 224 aa, Nitratireductor sp.
  misc_feature (1)..(224): tr|A0A2P8NCN1|A0A2P8NCN1_9RHIZ GTP cyclohydrolase 1 OS= Nitratireductor sp. StC3 OX=2126741 GN=folE PE=3 SV=1
MNITADHLQRPTRATTLPEDRDHAAAKAQPRRSDTPVPTRSETEAAVAALIRWAGDDPARPGLVDTPARVARAFEDWFGGYGLVPDNILGTTFDEIGGYADPVELRDIPFFSWCEHHMAPIRGKAHIAYLPDQRVVGISKLARLVDAFARRLQIQERMTDQIAAAIQRVLQPAGVAVVIEAQHDCMRSRGIRACGTSLMTKAMSGAYRENAALRGEFLASLQSR

SEQ ID NO: 11521 - protein, 192 aa, Nitratiruptor sp.
  misc_feature (1)..(192): tr|A6Q1B9|A6Q1B9_NITSB GTP cyclohydrolase 1 OS=Nitratir uptor sp. (strain SB155-2) OX=387092 GN=folE PE=3 SV=1
MDRQKEFENHVKAILQLLGEDPQREGLIKTPQRVYKAFLHLTEGYHKDPKEVLGEALFESSNDEMVLVRDIEFYSLCEHHLLPIIGRAHVAYIPNGKVVGLSKIPRMVNVFARRLQIQEQMTEQIADALMQTIEPKGVGVVLQARHMCMEMRGVEKICSTTVSSALRGIFKTNQKTREEFFSLINAPQTTRF

SEQ ID NO: 11522 - protein, 192 aa, Nitratiruptor tergarcus
  misc_feature (1)..(192): tr|A0A1W1WRA7|A0A1W1WRA7_9PROT GTP cyclohydrolase 1 OS= Nitratiruptor tergarcus DSM 16512 OX=1069081 GN=folE PE =3 SV=1
MDRKEEFVKAVKTILEIIGEDPKREGLLKTPERVYKAFLHLTEGYHKDPKEVLGEALFTSTNDEMVLVRDIEFYSLCEHHLLPIIGRAHVAYIPDGKVVGLSKIPRMVNVYARRLQIQEQMTEQIADALMETVKPKGVGVVVQARHMCMEMRGVEKICSTTVSSALRGIFKENIKTREEFFSLINAPQNRRF

SEQ ID NO: 11523 - protein, 315 aa, Nitrincola lacisaponensis
  misc_feature (1)..(315): tr|A0A063Y2E1|A0A063Y2E1_9GAMM GTP cyclohydrolase FolE2 OS=Nitrincola lacisaponensis OX=267850 GN=folE2 PE=3 S V=1
MNARAEMPDVAAHTAPVTRETLDWVGMSHITLPLNVAQPDGRLQPVIAHLDIHVDIVNPEVKGIHMSRLYLLLNRFAAEQTLTPAAMETLLTEVCDSHEGISESAILRLTFDYPLNRPALKSDYSGWKPYPTTIEAIKRNNEFSLELSVSVPYSSTCPCSAALSRQLLQEAFRDDFANEEQISRERVETWLRSERGSVATPHSQRSYARIRARINPVDHTLLPLLDLIDRTEQALKTPVQTAVKREDEQEFARLNGANMMFCEDAARRLKSAFNQAEQYLDFWIRVEHHESLHDHDAVAIVSKGIPGGYTPLLQR

SEQ ID NO: 11524 - protein, 212 aa, Nitrincola lacisaponensis
  misc_feature (1)..(212): tr|A0A063Y2V0|A0A063Y2V0_9GAMM GTP cyclohydrolase 1 OS= Nitrincola lacisaponensis OX=267850 GN=folE PE=3 SV=1
MISAEAARVKQVLIERGLETPLIEHHLSADKKYQKIKQAMTEVVETLGLDLTDDSLAETPHRIAKMYVYEIFSGLDYANFPAMSLIENKMQVDEMVKVSDIDLTSTCEHHFITIDGSAKVAYIPGQKIIGLSKINRLVRFFAQRPQVQERLTQQVLIALQTLLETENVAVSIEATHYCVKSRGVMDVNSRTSTTALGGVFKSNIHTRAEFLK

SEQ ID NO: 11525 - protein, 298 aa, Nitrincola nitratireducens
  misc_feature (1)..(298): tr|W9V324|W9V324_9GAMM GTP cyclohydrolase FolE2 OS=Nitr incola nitratireducens OX=1229521 GN=folE2 PE=3 SV=1
MNAPLPDVSLTDIAPTLRPLQWVGMQSIDIPVTLEEVGYRRELHARADVQVNLPTPHIKGIHMSRLYQLLDKLSHGMALSPARLHELLEAMIDSHHDCHTQSARLRLNVDLLVRRPALVTQGLSGWKSYPLRIDAELIDGTFHCQLRVRVDYSSTCPCSAALSRQLIANAFLQEFGRTAQVEPSVVASWLQQFASLATPHSQRSEAEVTVSLPSDAEMLGALKLIECIEHAVGTPVQTAVKRADEQEFAALNGQNLMFVEDAARRIEAALFAYTEPQVHVRHLESLHPHDAVAWTMPA

SEQ ID NO: 11526 - protein, 212 aa, Nitrincola nitratireducens
  misc_feature (1)..(212): tr|W9VN08|W9VN08_9GAMM GTP cyclohydrolase 1 OS=Nitrinco la nitratireducens OX=1229521 GN=folE PE=3 SV=1
MISKEAALVQKALFDRGLETPMLDTGMSPEQKYERLKGLMTEVVATLGLDLSDDSLAETPHRIAKMYVQEIFSGLDYQNFPKITVIDNKMKLDEMVRVSDISLTSTCEHHFITIDGTATVAYLPATKIIGLSKINRIVRFFAQRPQVQERLTQQLLVALQALLETDNVAVSIKATHYCVKSRGVQDVNSSTSTTALGGIFKTNLHTRAEFLR

SEQ ID NO: 11527 - protein, 319 aa, Nitrincola sp.
  misc_feature (1)..(319): tr|A0A099PBT6|A0A099PBT6_9GAMM GTP cyclohydrolase FolE2 OS=Nitrincola sp. A-D6 OX=1545442 GN=folE2 PE=3 SV=1
MRAAMNARIEMPDVATHTTAVSRETLDWVGMSHITLPLNVCQPGGQLQPVIAHLDIHVDIVNPEVKGIHMSRLYLLLNEFAAQEALTPASMQKLLQRVCESHRGISEAAILKLSFEYPLQRPALKSDYTGWKPYPSSIEAIQKGNEFSLELSVSVPYSSTCPCSAALSRQLLQEAFRDDFSGEEQVSREQVEHWLRSERGSVATPHSQRSYARLRVKIDPMAHDILPLLDLIDRTEQALQTPVQTAVKREDEQEFARLNGANMMFCEDAARRLKTTFNQVDAYQDFWIRVEHHESLHDHDAVAVVSKGVPGGYTPLLQR

SEQ ID NO: 11528 - protein, 308 aa, Nitrincola sp.
  misc_feature (1)..(308): tr|A0A5A9W2B6|A0A5A9W2B6_9GAMM GTP cyclohydrolase FolE2 OS=Nitrincola sp. MEB193 OX=1708751 GN=folE2 PE=3 SV=1
MPDIAATARPITRETLDWVGMSQISLPLRVQQAPGQTQAVVAHLDIHVDVANPEVKGIHMSRLYLLLNRFAEEETLTGHSLNALLDAICASHEGISESAIVQLRFDYPLNRPALKSEFSGWKPYPTIIQASRLQQDKCLEISVTVPYSSTCPCSAALSRQLLQQAFRDDFASSDQISREQVEAWLRSERGSVATPHSQRSYARTWVKLDVQTSLLPIVGLIDAIEAALKTPVQTAVKREDEQEFARLNGENMMFCEDAARRLKSALNQDSTYQDFWVRVEHHESLHDHDAVAVVSKGIAGGYTPLLQR

SEQ ID NO: 11529 - protein, 212 aa, Nitrincola tibetensis; identical to SEQ ID NO: 11526
  misc_feature (1)..(212): tr|A0A364NQC8|A0A364NQC8_9GAMM GTP cyclohydrolase 1 OS= Nitrincola tibetensis OX=2219697 GN=folE PE=3 SV=1

SEQ ID NO: 11530 - protein, 298 aa, Nitrincola tibetensis
  misc_feature (1)..(298): tr|A0A364NQS6|A0A364NQS6_9GAMM GTP cyclohydrolase FolE2 OS=Nitrincola tibetensis OX=2219697 GN=folE2 PE=3 SV=1
MNALLPDVSLTDTAPALRPLQWVGMQNIDIPVTLEEIGYRRELHARADVQVNLPAPHIKGIHMSRLYQLLDKLSHGVALSPANLRELLEAMIASHHDCHTQSARLRLNVDLLVRRPALVTQGLSGWKSYPLRLDAELIDGTFHCQLRVTVNYSSTCPCSAALSRQLIAQTFLQEFGSTAQVESSAVTSWLQQFASLATPHSQRSEAEVKVSLPPDAEMLGALKLIERIEHAVGTPLQTAVKRADEQEFAALNGQNLMFVEDAARRIESALFDYTKPQVHVRHLESLHPHDAVAWTMPA

SEQ ID NO: 11531 - protein, 226 aa, Nitritalea halalkaliphila
  misc_feature (1)..(226): tr|I5BY47|I5BY47_9BACT GTP cyclohydrolase 1 OS=Nitrital ea halalkaliphila LW7 OX=1189621 GN=folE PE=3 SV=1
MLNTTGSKPMQDIDEMGDEHIGTSTETPLRADAFEMDDELKMELIAKHFKEIMHILGLDLSDDSLRGTPQRVAKMYVQEVFSGLDPKNKPDIKLFENKYRYSEMLVEKDITFFSNCEHHFVPIYGKAHVAYISNGKVIGLSKINRIVQYFAKRPQVQERLTMQIGNELKEMLGTEDIAVVIDAHHMCVSSRGIKDVNSATVTSYYSGQFEQEEKRAEFMKYITLGK

SEQ ID NO: 11532 - protein, 234 aa, Nitrobacter hamburgensis
  misc_feature (1)..(234): tr|Q1QMS3|Q1QMS3_NITHX GTP cyclohydrolase 1 OS=Nitrobac ter hamburgensis (strain DSM 10229 / NCIMB 13809 / X14) OX=323097 GN=folE PE=3 SV=1
MDALIKPLRGSKPSEVKSNNAKAAGFSPAKLDPSEFMDAAVQPDQSRPSRHEAEYAVRTLLSYIGENPDREGLLDTPRRVIEAYDEIYQGYHQCPAEVLNRTFGETAGYDDFVLVRDIAFTSQCEHHMMPFYGKAHIAYTPVERVVGLSKLARLTDIFARRLQTQEHMTAQIAAAVDEVLKPRGVAVMIEAEHTCMSVRGVAKHGALTLTSRFTGVFRDNPAEQARFLSMVRGS

SEQ ID NO: 11533 - protein, 232 aa, Nitrobacter sp.
  misc_feature (1)..(232): tr|A3WVN6|A3WVN6_9BRAD GTP cyclohydrolase 1 OS=Nitrobac ter sp. Nb-311A OX=314253 GN=folE PE=3 SV=1
MDALIKQLRGSKPSDVKSNSAKPAGFSPAQLDPSEFLAAVQPNRQRPSRHEAEDAVRTLLSYIGENPEREGLLDTPRRVIESYDEIYQGYHQCPAEVLNRTFGETAGYDDFVLVRDIEFTSQCEHHMMPFYGKAHIAYTPVERVVGLSKLARLTDIFARRLQTQEHMTAQIAAAVDEVLKPRGVAVMIEAEHTCMSVRGVAKHGAMTFTSRFTGVFRDNPAEQARFLSMVRP

SEQ ID NO: 11534 - protein, 236 aa, Nitrobacter sp.
  misc_feature (1)..(236): tr|A0A1Q3K8Q3|A0A1Q3K8Q3_9BRAD GTP cyclohydrolase 1 OS= Nitrobacter sp. 62-13 OX=1895797 GN=folE PE=3 SV=1
MDALIKPLRGAKPVEAKSSNTKPAGFAPAELDPSEFLAAAAQPDRSRPSRHEAEYAVRTLLSYIGENPDREGLLDTPRRVVEAYDEIYQGYHQCPAEVLNRTFGETAGYDDFVLVRDIAFTSQCEHHMMPFYGKAHIAYTPVERVVGLSKLARLTDIFARRLQTQEHMTAQIAAAVDEVLKPRGVAVMIEAEHTCMSVRGVAKHGAMTFTSRFTGVFRDNPAEQARFLSMVRGGGR

SEQ ID NO: 11535 - protein, 232 aa, Nitrobacter vulgaris
  misc_feature (1)..(232): tr|A0A1V4HZD0|A0A1V4HZD0_NITVU GTP cyclohydrolase 1 OS= Nitrobacter vulgaris OX=29421 GN=folE PE=3 SV=1
MDALIKPLRGSKPSDVKSNNVKPAGFSPAQLDPSEFLAAVQPNRQRPSRHEAEGAIRTLLSYIGENPDREGLLDTPRRVIESYDEIYQGYHQCPAEVLNRTFGETAGYDDFVLVRDIQFTSQCEHHMMPFYGKAHIAYTPVERVVGLSKLARLTDIFARRLQTQEHMTAQIAAAVDEVLKPRGVAVMIEAEHTCMSVRGVAKHGAMTFTSRYTGVFRDNPTEQARFLSMVRG

SEQ ID NO: 11536 - protein, 241 aa, Nitrobacter winogradskyi
  misc_feature (1)..(241): tr|Q3ST01|Q3ST01_NITWN GTP cyclohydrolase 1 OS=Nitrobac ter winogradskyi (strain ATCC 25391 / DSM 10237 / CIP 1 04748 / NCIMB 11846 / Nb-255) OX=323098 GN=folE PE=3 SV =1
MDALIKPLRSGKPSDINKASDIKSSNAKPAGFSPAQLDPSEFMAAVQPNRQRPSRHEAEDAVRTLLAYIGENPDREGLLDTPRRVIESYDEIYQGYHQCPAEVLNRTFGETAGYDDFVLVRDIQFTSQCEHHMMPFYGKAHIAYTPVERVVGLSKLARLTDIFARRLQTQEHMTAQIAAAVDEVLKPRGVAVMIEAEHTCMSVRGVAKHGAMTVTSRFTGVFRDDPAEQARFLSMVRGQPR

SEQ ID NO: 11537 - protein, 241 aa, Nitrobacter winogradskyi
  misc_feature (1)..(241): tr|A0A4Y3W983|A0A4Y3W983_NITWI GTP cyclohydrolase 1 OS= Nitrobacter winogradskyi OX=913 GN=folE PE=3 SV=1
MDALIKPLRSGKPSDINKASDIKSSNAKPAGFSPAQLDPSEFMAAVQPNRQRPSRHEAEDAVRTLLAYIGENPDREGLLDTPRRVIESYDEIYQGYHQCPAEVLNRTFGETAGYDDFVLVRDIQFTSQCEHHMMPFYGKAHIAYTPVERVVGLSKLARLTDIFARRLQTQEHMTAQIAAAVDEVLKPRGVAVMIEAEHTCMSVRGVAKHGAMTVTSRFTGLFRDDPAEQARFLSMVRGQQR

SEQ ID NO: 11538 - protein, 277 aa, Nitrococcus mobilis
  misc_feature (1)..(277): tr|A4BSY0|A4BSY0_9GAMM GTP cyclohydrolase FolE2 OS=Nitr ococcus mobilis Nb-231 OX=314278 GN=folE2 PE=3 SV=1
MAEATKGALALPIEDVQGRQDTRRIPINKVGIKDIRHPVRVRARNGEEQHTVATFNMYVDLPHHFKGTHMSRFVEILEGHNREITIASFKAMLREVAQRLKAASGHIEMRFPFFICKRAPVSGVESLLDYEVAFIGETQGDHTELTLEVLVPVTSLCPCSKSISEQGAHNQRSRVTIRARTGGFIWLEELIQIAEESASCELYGLLKRPDEKYVTERAYNNPKFVEDIVREVAGRLEADDRILAYSVASENFESIHNHSAYALIERDKQLAAGERHS

SEQ ID NO: 11539 - protein, 190 aa, Nitrolancea hollandica
  misc_feature (1)..(190): tr|I4EDP4|I4EDP4_9CHLR GTP cyclohydrolase 1 OS=Nitrolan cea hollandica Lb OX=1129897 GN=folE PE=3 SV=1
MSENGVDRVKLEAAVLAILEAIGEDPTRPDLRRTPERAARMFEEMFGGLLINPEAFLEETLRQEHQELIVLRDISVHSMCEHHLVPMTGIAHIGYIPNGRIVGFDRLAKVVDAYARRPQVQERLTQQIADLIHAMLQPTGVAIHMELEHMCMTIRGIRETQSRVITTAYRGVFREDPALRAEFNSMIAPA

SEQ ID NO: 11540 - protein, 271 aa, Nitrosococcus halophilus
  misc_feature (1)..(271): tr|D5BXV1|D5BXV1_NITHN GTP cyclohydrolase FolE2 OS=Nitr osococcus halophilus (strain Nc4) OX=472759 GN=folE2 PE =3 SV=1
MNPIAPAVERPIEDVQAKADKRQIAINKVGIKDIRHPVRVRDRSGGEQHTVANFNMYVDLPHHFKGTHMSRFVEILNQHEHEITVQSFKEMLQEMAHRLQAESGHIEMSFPYFVTKEAPISKVQSLMDYQVTFIGEIKGNKPQMTVKVVVPVTSLCPCSKQISDYGAHNQRSHVTITVRVERFVWIEDIIDWVEEEASCEIYGLLKRPDEKYVTERAYDNPKFVEDMVRDIAARLNQDDRISAYMVESENFESIHNHSAYAMIERDKQLNP

SEQ ID NO: 11541 - protein, 213 aa, Nitrosococcus halophilus
  misc_feature (1)..(213): tr|D5C0X6|D5C0X6_NITHN GTP cyclohydrolase 1 OS=Nitrosoc occus halophilus (strain Nc4) OX=472759 GN=folE PE=3 SV =1
MDKKLTKAVKEGHYIGSLDVEPGEHYDREFEASVKKILTRLGEDPDREGLKRTPQRVAKALDFLTSGYNMTVEEVVRDALFEDECEEMVIVKDVEFYSLCEHHVLPFFGRAHVGYLPRGRIVGLSKIARVIDVFARRLQVQERLTTQIATGLMSVLNARGVGVVLEACHFCMVMRGVQKQNSQTVTSAMLGTFRQDPRTRAEFMELIRRSSGG

SEQ ID NO: 11542 - protein, 267 aa, Nitrosococcus oceani
  misc_feature (1)..(267): sp|Q3J9J7|GCH4_NITOC GTP cyclohydrolase FolE2 OS=Nitros ococcus oceani (strain ATCC 19707 / BCRC 17464 / NCIMB 11848 / C-107) OX=323261 GN=folE2 PE=3 SV=1
MNPIVPAVERPIEDVQAKADERQIAINKVGIKDIRHPVRVSDRNGGEQHTVANFNMYVDLPHHFKGTHMSRFVEILNQHEHEITVRSFREMLREMNHRLQAESGHIEMVFPYFVTKQAPVSKVQSLMDYQVTFIGEIKGDKPQITVKVVVPVTSLCPCSKQISDYGAHNQRSHVTVAVRIEGFIWLEDIIDLVEEEASCEIYGLLKRPDEKYVTERAYDNPKFVEDMVRDVAARLNQDDRVSAYRVESENFESIHNHSAYAMIEREK

SEQ ID NO: 11543 - protein, 213 aa, Nitrosococcus oceani
  misc_feature (1)..(213): tr|A0A0E2Z7P0|A0A0E2Z7P0_9GAMM GTP cyclohydrolase 1 OS= Nitrosococcus oceani C-27 OX=314279 GN=folE PE=3 SV=1
MDTKLTKVVREGRYIGSLDVKPGEHYDPEFEASVEEILTRLGEDPKREGLKRTPQRVAKALDFLTSGYHMTVEEVVKDALFEDECEEMVIVKDVEFYSLCEHHMLPFFGRAHVGYLPKGRIVGLSKIARVIDVFARRLQVQERLTTQIASGLMAVLNARGVGVVLEACHFCMVMRGVQKQNSQTVTSAMLGTFREDSRTRAEFMELIRRSSVS

SEQ ID NO: 11544 - protein, 271 aa, Nitrosococcus wardiae
  misc_feature (1)..(271): tr|A0A4P7BXY9|A0A4P7BXY9_9GAMM GTP cyclohydrolase FolE2 OS=Nitrosococcus wardiae OX=1814290 GN=folE2 PE=3 SV=1
MNPIVPAVECSIEDVQAKADKRKIAINKVGIKDIRHPVRVRDRSGGEQHTVANFNMYVDLPHHFKGTHMSRFVEILNQHEHEITVQSFKEMLQEMTHRLQAESGHIEMNFPYFVTKEAPISKVQSLMDYQVTFIGEIKGNKPQMTVKVVVPVTSLCPCSKQISDYGAHNQRSHVTITVQVERFVWIEDIIDWVEEEASCEIYGLLKRPDEKYVTERAYDNPKFVEDMVRDIAARLNQDDRISAYMVESENFESIHNHSAYAMIERDKQLNP

SEQ ID NO: 11545 - protein, 213 aa, Nitrosococcus wardiae
  misc_feature (1)..(213): tr|A0A4V1AWA0|A0A4V1AWA0_9GAMM GTP cyclohydrolase 1 OS= Nitrosococcus wardiae OX=1814290 GN=folE PE=3 SV=1
MDKKLTKVVKEGHYIGSLDVAPGEHYDREFEASMKKILIRLGEDPDREGLKRTPQRVAKALDFLTSGYNMTVEEVVKDALFEDECEEMVIVKDVEFYSLCEHHMLPFFGRAHVGYLPRGRIVGLSKIARVIDVFARRLQVQERLTTQIATGLMSVLNARGVGVVLEACHFCMVMRGVQKQNSQTVTSAMLGTFRQDSRTRAEFMELIRRYSGG

SEQ ID NO: 11546 - protein, 213 aa, Nitrosococcus watsoni
  misc_feature (1)..(213): tr|D8K6P0|D8K6P0_NITWC GTP cyclohydrolase 1 OS=Nitrosoc occus watsoni (strain C-113) OX=105559 GN=folE PE=3 SV= 1
MDTKLTKVVREGHYIGSLDVGPGEHYDPEFEASVEEILTRLGEDPKREGLKRTPQRVAKALDFLTSGYHMTVEEVVKDALFEDECEEMVIVKDVEFYSLCEHHMLPFFGRAHVGYLPKGRIVGLSKIARVIDVFARRLQVQERLTTQIASGLMSVLNARGVGVVLEACHFCMVMRGVQKQNSQTVTSAMLGTFREDSRTRAEFMDLIRRSSVS

SEQ ID NO: 11547 - protein, 271 aa, Nitrosococcus watsoni
  misc_feature (1)..(271): tr|D8K522|D8K522_NITWC GTP cyclohydrolase FolE2 OS=Nitr osococcus watsoni (strain C-113) OX=105559 GN=folE2 PE= 3 SV=1
MNPIVPAVDHPIEDVQAKTDKRQIAINKVGIKDIRHPVRVSDRSGGEQHTVASFNMYVDLPHHFKGTHMSRFVEILNQHEHEITVRSFREMLREMSHRLQAESGHIEMGFPYFVTKQAPISKVQSLMDYQVTFLGEIKEDKPQITVKVVVPVTSLCPCSKQISDYGAHNQRSHVTVAVRIEGFIWLEDIIDLVEEEASCEIYGLLKRPDEKYVTERAYDNPKFVEDMVRDVAARLNQDDRISAYRVESENFESIHNHSAYAMIEREKQLST

SEQ ID NO: 11548 - protein, 267 aa, Nitrosomonadaceae bacterium
  misc_feature (1)..(267): tr|A0A2E6UT10|A0A2E6UT10_9PROT GTP cyclohydrolase FolE2 OS=Nitrosomonadaceae bacterium OX=2026767 GN=folE2 PE= 3 SV=1
MNKRADSLIADVQSTPDTRHIEIDRVGIKAIRHPIKVADKTGGVQHTVAMFNMYVNLPHNFKGTHMSRFVEILNSHDREISVESFEKILRTMLERLETQSGHIEMTFPYFINKFAPVSKVKSLLDYDVTFIGEIKNGCYEFTIKVVVPVTSLCPCSKKISDYGAHNQRSHISISARTNSFVWIEDIIQIAEEKASCELYGLLKRPDEKYVTEKAYNNPKFVEDLVRDVAIELNKDSRIDAYTVESENFESIHNHSAYALIEQNKMKS

SEQ ID NO: 11549 - protein, 267 aa, Nitrosomonadaceae bacterium
  misc_feature (1)..(267): tr|A0A4P5UEI9|A0A4P5UEI9_9PROT GTP cyclohydrolase FolE2 OS=Nitrosomonadaceae bacterium OX=2026767 GN=folE2 PE= 3 SV=1
MHKEADLPIADVQSTPDTRHIAIDRVGIKAIRHPVKVADKDGGVQHTVAVFNMYVGLPHNFKGTHMSRFVEILNDHEREISVESFESILWAMVKRLESESGHIEMTFPYFINKAAPVSGVQSLLDYEVTFIGEIKNGRYEFNMKVVVPVTSLCPCSKKISDYGAHNQRSHISISVRTNCFVWIEDMVRMAESYASCELYGLLKRPDEKYVTEKAYDNPKFVEDLVRDVASSLNKDSRIDAYTVESENFESIHNHSAYALIERDKTES

SEQ ID NO: 11550 - protein, 267 aa, Nitrosomonadales bacterium
  misc_feature (1)..(267): tr|A0A524MC23|A0A524MC23_9PROT GTP cyclohydrolase FolE2 OS=Nitrosomonadales bacterium OX=2026761 GN=folE2 PE=3 SV=1
MNKQVDFPIADVQNTPDTRHIAIDRVGIKAIRHPVKVADKDGGVQHTVAVFNMYVNLPHNFKGTHMSRFVEILNSHEREISVESFENILRTMVKKLGTDSGHIEMTFPYFINKSAPVSGVRSLLDYEVTFIGEIKNGCYEFTMKVVVPVASLCPCSKKISDYGAHNQRSHISISVRTNSFVWIEDIIRIAEDKASCELYGLLKRPDEKYVTEKAYDNPKFVEDLVRDVAVELNKDARIDAYMVESENFESIHNHSAYALIEQNKMIS

SEQ ID NO: 11551 - protein, 191 aa, Nitrosomonadales bacterium
  misc_feature (1)..(191): tr|A0A1E4GI55|A0A1E4GI55_9PROT GTP cyclohydrolase 1 OS= Nitrosomonadales bacterium SCN 54-20 OX=1660164 GN=folE PE=3 SV=1
MDSSDSEFGIDDWQRLLRALGEDPSRQGLRETPGRVTRAWAHWTRGYKQDPAAILKTFADGGESYDELIVVRQIPVYSHCEHHLAPFFGHATIGYLPSGHIVGLSKLTRLVNCFAARLQVQERLTQQVAQSLLEHLQPKAVGVILRCRHMCMESRGIAVAGEETVTSAMLGDLKTNAAQRAEFMALAEPHE

SEQ ID NO: 11552 - protein, 269 aa, Nitrosomonas aestuarii
  misc_feature (1)..(269): tr|A0A1I4A7K5|A0A1I4A7K5_9PROT GTP cyclohydrolase FolE2 OS=Nitrosomonas aestuarii OX=52441 GN=folE2 PE=3 SV=1
MNKEIDLPIADVQSTFDTRRIAIDRVGIKAIRHPVVVADKDDGVQHTVAMFNMYVNLPHKFKGTHMSRFVEILNGHEREISVESFKTILQEMVNKLESDSGHIEMTFPYFIDKAAPISGVKSLLDYEVTFIGEIKNGEYNFTIKVVVPITSLCPCSKKISDYGAHNQRSHVTIAARTNSFVWIEDLIKIAEDKASCELYGLLKRPDEKYVTEKAYDNPKFVEDIVRDVADTLNKDNRIDAYVVESENFESIHNHSAYALIEHEKRTVDI

SEQ ID NO: 11553 - protein, 271 aa, Nitrosomonas communis
  misc_feature (1)..(271): tr|A0A1I4PH10|A0A1I4PH10_9PROT GTP cyclohydrolase FolE2 OS=Nitrosomonas communis OX=44574 GN=folE2 PE=3 SV=1
MNKQTDFSIADVQSSLDTRRIAIDRVGIKAIRHPVKVADKDGGVQHTVAVFNMYVNLPHNFKGTHMSRFVEILNSHEREISVESFEDILRAMVTRLESDSGHIEMTFPYFVNKSAPISGVQSLLDYEVTFVGEIKQNHYEFTMKVIVPVTSLCPCSKKISEYGAHNQRSHVTVSVRTNSFVWIEDIIKIAEENASCELYGLLKRPDEKYVTERAYDNPKFVEDLVRDIAEVLNSDDRIDAYVVESENFESIHNHSAYALIEQDKCNELPHT

SEQ ID NO: 11554 - protein, 271 aa, Nitrosomonas communis
  misc_feature (1)..(271): tr|A0A0F7KJW2|A0A0F7KJW2_9PROT GTP cyclohydrolase FolE2 OS=Nitrosomonas communis OX=44574 GN=folE2 PE=3 SV=1
MNKQTDFSIADVQSSLDTRRIAIDRVGIKAIRHPVKVADKDGGVQHTVAVFNMYVNLPHNFKGTHMSRFVEILNSHEREISVESFEGILRAMVTRLESDSGHIEMTFPYFVNKSAPISGVQSLLDYEVTFIGEIKQNHYAFTMKVIVPVTSLCPCSKKISEYGAHNQRSHVTVSVRTNSFVWIEDMIKVAEENASCELYGLLKRPDEKYVTERAYDNPKFVEDLVRDIAEVLNSDDRIDAYVVESENFESIHNHSAYALIERDKCNELPHT

SEQ ID NO: 11555 - protein, 270 aa, Nitrosomonas cryotolerans
  misc_feature (1)..(270): tr|A0A1N6HAW2|A0A1N6HAW2_9PROT GTP cyclohydrolase FolE2 OS=Nitrosomonas cryotolerans ATCC 49181 OX=1131553 GN= folE2 PE=3 SV=1
MNKQIDLPIADVQSSPDKRRIAIDRVGIKAIRHPIMVADKDGGVQHTVAVFNMYVNLPHNFKGTHMSRFVEILNSHEREISVKSFEKILREMVEKLESDSGHIEMTFPYFVNKSAPVSGVKSLLDYEVTFVGEIKDNDYTFTMKVVVAVTSLCPCSKKISDYGAHNQRSHVTIAVRTNSFVWIEDVIKIAEDKASCELYGLLKRPDEKYVTEKAYDNPKFVEDIVRDVAEVLNQDSRIDAYTVESENFESIHNHSAYALIERDKKSMPVI

SEQ ID NO: 11556 - protein, 268 aa, Nitrosomonas europaea
  misc_feature (1)..(268): sp|Q82VD1|GCH4_NITEU GTP cyclohydrolase FolE2 OS=Nitros omonas europaea (strain ATCC 19718 / CIP 103999 / KCTC 2705 / NBRC 14298) OX=228410 GN=folE2 PE=1 SV=1
MNKQIDLPIADVQGSLDTRHIAIDRVGIKAIRHPVVVADKGGGSQHTVAQFNMYVNLPHNFKGTHMSRFVEILNSHEREISVESFEEILRSMVSRLESDSGHIEMAFPYFINKSAPVSGVKSLLDYEVTFIGEIKHGNQYSFTMKVIVPVTSLCPCSKKISDYGAHNQRSHVTISVRTNSFIWIEDIIRIAEEQASCELYGLLKRPDEKYVTERAYNNPKFVEDIVRDVAEVLNHDDRIDAYIVESENFESIHNHSAYALIERDKRIR

SEQ ID NO: 11557 - protein, 268 aa, Nitrosomonas europaea; identical to SEQ ID NO: 11556
  misc_feature (1)..(268): tr|A0A1I0C6N7|A0A1I0C6N7_NITER GTP cyclohydrolase FolE2 OS=Nitrosomonas europaea OX=915 GN=folE2 PE=3 SV=1

SEQ ID NO: 11558 - protein, 267 aa, Nitrosomonas eutropha
  misc_feature (1)..(267): sp|Q0AFY5|GCH4_NITEC GTP cyclohydrolase FolE2 OS=Nitros omonas eutropha (strain DSM 101675 / C91) OX=335283 GN= folE2 PE=3 SV=1
MKKHTDQPIADVQGSPDTRHIAIDRVGIKAIRHPVLVADKDGGSQHTVAQFNMYVNLPHNFKGTHMSRFVEILNSHEREISVESFEEILRSMVSRLESDSGHIEMTFPYFVNKSAPISGVKSLLDYEVTFIGEIKHGDQYGFTMKVIVPVTSLCPCSKKISDYGAHNQRSHVTISVHTNSFVWIEDVIRIAEEQASCELFGLLKRPDEKYVTEKAYNNPKFVEDIVRDVAEILNHDDRIDAYVVESENFESIHNHSAYALIERDKRK

SEQ ID NO: 11559 - protein, 267 aa, Nitrosomonas eutropha; identical to SEQ ID NO: 11558
  misc_feature (1)..(267): tr|A0A1G4V3N2|A0A1G4V3N2_9PROT GTP cyclohydrolase FolE2 OS=Nitrosomonas eutropha OX=916 GN=folE2 PE=3 SV=1

SEQ ID NO: 11560 - protein, 271 aa, Nitrosomonas halophila
  misc_feature (1)..(271): tr|A0A1H3I9Y9|A0A1H3I9Y9_9PROT GTP cyclohydrolase FolE2 OS=Nitrosomonas halophila OX=44576 GN=folE2 PE=3 SV=1
MNKQVDLPIADVQSSEDTRRIAIDRVGIKAIRHPVRVADKDDGIQHTVAQFNMYVNLPHNFKGTHMSRFVEILNGYEREISVESFESILRAMVERLESDSGHIEMTFPYFVNKSAPISGVKSLLDYEVTFIGEIRHDGQYEFTMKVVVPVTSLCPCSKKISDYGAHNQRSHVTIAVRTNSFVWIEDIIKIAEEQASCELYGLLKRPDEKHVTERAYDNPKFVEDLVRDVAEILNRDARIDAYVVESENFESIHNHSAYALIERDKRKPLKN

SEQ ID NO: 11561 - protein, 270 aa, Nitrosomonas marina
  misc_feature (1)..(270): tr|A0A1I0ARA2|A0A1I0ARA2_9PROT GTP cyclohydrolase FolE2 OS=Nitrosomonas marina OX=917 GN=folE2 PE=3 SV=1
MNKEIDLPIADVQSTHDTRRIAIDRVGIKAIRHPVVVADKDDGVQHTVAMFNMYVNLPHKFKGTHMSRFVEILNSHEREISVESFKTILQEMVEKLESDSGHIEMTFPYFVDKAAPVSGVRSLLDYEVTFIGEIKNKAYAFTIKVVVPITSLCPCSKKISDYGAHNQRSHVTISARTNSFVWIEDLIKIAEDNASCELYGLLKRPDEKYVTEKAYDNPKFVEDIVRDIADTLNKDERIDAYIVESENFESIHNHSAYALIEHDKKTAVRI

SEQ ID NO: 11562 - protein, 270 aa, Nitrosomonas marina
  misc_feature (1)..(270): tr|A0A1H8EAY9|A0A1H8EAY9_9PROT GTP cyclohydrolase FolE2 OS=Nitrosomonas marina OX=917 GN=folE2 PE=3 SV=1
MNKEIDLPIADVQSTHDTRRIAIDRVGIKAIRHPVVVADKDDGVQHTVAMFNMYVNLPHKFKGTHMSRFVEILNSHEREISVESFKTILQEMVERLESDSGHIEMTFPYFVDKAAPVSGVRSLLDYEVTFIGEIKNNAYAFTIKVVVPITSLCPCSKKISDYGAHNQRSHVTISARTNSFVWIEDLIKIAEDNASCELYGLLKRPDEKYVTEKAYDNPKFVEDIVRDIADTLNKDKRIDAYIVESENFESIHNHSAYALIDHDKKTAVHI

SEQ ID NO: 11563 - protein, 269 aa, Nitrosomonas mobilis
  misc_feature (1)..(269): tr|A0A1G5SJG3|A0A1G5SJG3_9PROT GTP cyclohydrolase FolE2 OS=Nitrosomonas mobilis OX=51642 GN=folE PE=3 SV=1
MNKQIDLPIADVQNSADTRRIAIDRVGIKAIRHPVKVGDKDGGVQHTVALFNMYVDLPHNFKGTHMSRFVEILNSQEREISVESFESILRAMVARLESTSGRIEMTFPYFVNKAAPVSGVQSLMDYEVMFIGEIGQPSGQYTFTMKVVVPVTSLCPCSKKISDYGAHNQRSHVSIAVKTNSFVWIEDIIRIAEENASCELFGLLKRPDEKYVTEKAYDNPKFVEDLVRDVAEVLNRDNRIDAYVVESENFESIHNHSAYAMIERDKQKS

SEQ ID NO: 11564 - protein, 248 aa, Nitrosomonas mobilis
  misc_feature (1)..(248): tr|A0A1G5SH66|A0A1G5SH66_9PROT Putative GTP cyclohydrol ase 1 type 2 OS=Nitrosomonas mobilis OX=51642 GN=NSMM_5 20017 PE=4 SV=1
MHQKALEDYLNTILEVTRFRDYCPNGLQVEGRTQIQTIVTGVTASQALIAHAIELRADAIIVHHGYFWRGEDACLRGIKRQRIAALIKHDINLYAYHLPLDAHIALGNNAQLAKKLNIAIEGSFGEQAIALHGSFETPTTLRELNTNLTQLLTRQPLIIGDPSKSIRRIAWCSGAAQHTFEEAISLEVDAYLTGEISEQSVHTARETGVAFISAGHHATERYGIQALGEHIAKQFDLCHYFIDVENPV

SEQ ID NO: 11565 - protein, 271 aa, Nitrosomonas nitrosa
  misc_feature (1)..(271): tr|A0A3D0FB67|A0A3D0FB67_9PROT GTP cyclohydrolase FolE2 OS=Nitrosomonas nitrosa OX=52442 GN=folE2 PE=3 SV=1
MNKQTDLPIADVQSTLDTRRIAIDRVGIKAIRHPVRVADKDGGVQHTVAVFNMYVNLPHNFKGTHMSRFVEILNSHEREISVESFEDILRAMVTRLESESGHIEMTFPYFVNKSAPISGVQSLLDYEVTFAGEIKKSQYEFTMKVVVPVTSLCPCSKKISDYGAHNQRSHVTVSVRTNSFVWIEDIIRIAEDQASCELYGLLKRPDEKFVTERAYDNPKFVEDIVRDVAEVLNKDDRIDAYVVESENFESIHNHSAYALIERDKRKAAPHS

SEQ ID NO: 11566 - protein, 271 aa, Nitrosomonas nitrosa
  misc_feature (1)..(271): tr|A0A1I4NZA0|A0A1I4NZA0_9PROT GTP cyclohydrolase FolE2 OS=Nitrosomonas nitrosa OX=52442 GN=folE2 PE=3 SV=1
MNKQTDLPIADVQSTLDTRRIAIDRVGIKAIRHPVRVADKDGGVQHTVAVFNMYVNLPHNFKGTHMSRFVEILNSHEREISVESFEDILRAMVTRLESESGHIEMTFPYFVNKSAPISGVQSLLDYEVTFAGEIKKSQYEFTMKVVVPVTSLCPCSKKISDYGAHNQRSHVTVSVRTSSFVWIEDIIRIAEDQASCELYGLLKRPDEKFVTERAYDNPKFVEDIVRDVAEVLNKDDRIDAYVVESENFESIHNHSAYALIERDKRKAAPHS

SEQ ID NO: 11567 - protein, 273 aa, Nitrosomonas oligotropha
  misc_feature (1)..(273): tr|A0A1H8LSI1|A0A1H8LSI1_9PROT GTP cyclohydrolase FolE2 OS=Nitrosomonas oligotropha OX=42354 GN=folE2 PE=3 SV= 1
MNKQIDLPIADVQSSPDTRRIAIDRVGIKAIRHPVVVADKSDGVQHTIAVFNMYVNLPHNFKGTHMSRFVEILNSHEREISVESFQVILREMIQKLETDSGHIEMSFPYFINKSAPVSQVKSLLDYEVTFIGEIRDGEYLFTMKVIIPVTSLCPCSKKISDYGAHNQRSHVTISVRTNSFVWIEDVIRIAETNASCELYGLLKRPDEKYVTEKAYDNPKFVEDIVRDIAEVLNRDERIDAYVVESENFESIHNHSAYALIKNDKTQSSGISLE

SEQ ID NO: 11568 - protein, 273 aa, Nitrosomonas oligotropha
  misc_feature (1)..(273): tr|A0A2T5HYF9|A0A2T5HYF9_9PROT GTP cyclohydrolase FolE2 OS=Nitrosomonas oligotropha OX=42354 GN=folE2 PE=3 SV= 1
MNKQIDLPIADVQSSPDTRRIAIDRVGIKAIRHPVVVADKSDGVQHTIAVFNMYVNLPHNFKGTHMSRFVEILNSHEREISVESFQTILREMIQKLETDSGHIEMSFPYFINKSAPVSQVKSLLDYEVTFIGEIKDGEYLFTMKVIIPVTSLCPCSKKISDYGAHNQRSHVTISVRTNSFVWIEDVIRIAETNASCELYGLLKRPDEKYVTEKAYDNPKFVEDIVRDIAEVLNRDERIDAYVVESENFESIHNHSAYALIKNDKTQSSGISLE

SEQ ID NO: 11569 - protein, 269 aa, Nitrosomonas sp.
  misc_feature (1)..(269): tr|A0A5C7VHG0|A0A5C7VHG0_9PROT GTP cyclohydrolase FolE2 OS=Nitrosomonas sp. OX=42353 GN=folE2 PE=3 SV=1
MNKQIDMPIADVQSSLDTRQIAIDRVGIKAIRHPVRVADKGGGVQHTVAMFNMYVNLPHNFKGTHMSRFVEILNSHEREISVESFEDILRAMVTRLESDSGHIEMTFPYFVNKSAPISGVQSLLDYEVTFIGEVKQGEYRFTMKVVVPVTSLCPCSKKISDYGAHNQRSHVTVAVRTNSFVWIEDVIKIAEEQASCELYGLLKRPDEKYVTERAYDNPKFVEDIVRDVAEVLNHDDRIDAYVVESENFESIHNHSAYALIERDKHRKQI

SEQ ID NO: 11570 - protein, 271 aa, Nitrosomonas sp.
  misc_feature (1)..(271): tr|A0A1H3LW17|A0A1H3LW17_9PROT GTP cyclohydrolase FolE2 OS=Nitrosomonas sp. Nm33 OX=133724 GN=folE2 PE=3 SV=1
MNKQTDLPIADVQSSLDTRRIAIDRVGIKAIRHPVKVADKDGGVQHTVAVFNMYVNLPHNFKGTHMSRFVEILNSHEREISVESFEDILRAMVIRLESDSGHIEMTFPYFVNKSAPISGVQSLLDYEVTFIGEIKQNHYEFTMKVVVPVTSLCPCSKKISDYGAHNQRSHVTVSVRTNNFVWIEDIIKIAEDNASCELYGLLKRPDEKYVTEKAYDNPKFVEDIVRDVAEVLNRDDRIDAYVVESENFESIHNHSAYALIERDKRNVLPHT

SEQ ID NO: 11571 - protein, 267 aa, Nitrosomonas stercoris
  misc_feature (1)..(267): tr|A0A4Y1YSJ9|A0A4Y1YSJ9_9PROT GTP cyclohydrolase FolE2 OS=Nitrosomonas stercoris OX=1444684 GN=folE2 PE=3 SV= 1
MKKDTNQPIADVQGSPDTRHIAIDRVGIKAIRHPVVVADKGGGSQHTVAQFNMYVNLPHNFKGTHMSRFVEILNSHEREISVESFEEILRSMVSRLESDSGHIEMAFPYFVRKSAPISGVKSLLDYEVTFIGEIKQGDQYSFTMKVVVPVTSLCPCSKKIADYGAHNQRSHVTISVRTNSFVWIEDVIRIAEEQASCELFGLLKRPDEKYVTEKAYNNPKFVEDIVRDVAEVLNQDERIDAYIVESENFESIHNHSAYALIERDKRK

SEQ ID NO: 11572 - protein, 268 aa, Nitrosomonas ureae
  misc_feature (1)..(268): tr|A0A286A2X3|A0A286A2X3_9PROT GTP cyclohydrolase FolE2 OS=Nitrosomonas ureae OX=44577 GN=folE2 PE=3 SV=1
MNKHIDMPIADVQSSLDTRRIAIDRVGIKAIRHPVVVADKDDGVQHTVAVFNMYVNLPHNFKGTHMSRFVEILNSHEREISVESFQIILQEMITKLETDSGHIEMTFPYFINKSAPVSQVKSLLDYEVTFIGEIKNGEYLFTMKVIVPVTSLCPCSKKISNYGAHNQRSHVTISVRTNSFVWIEDIIQIAENNASCELYGLLKRPDEKYVTEKAYDNPKFVEDIVRDIAEVLNHDERIDAYVVESENFESIHNHSAYALIENDKKQRG

SEQ ID NO: 11573 - protein, 268 aa, Nitrosomonas ureae
  misc_feature (1)..(268): tr|A0A1H9CEB8|A0A1H9CEB8_9PROT GTP cyclohydrolase FolE2 OS=Nitrosomonas ureae OX=44577 GN=folE2 PE=3 SV=1
MNKHIDMPIADVQSSLDTRRIAIDRVGIKAIRHPVVVADKDDGVQHTVAVFNMYVNLPHNFKGTHMSRFVEILNSHEREISVESFQIILQEMITKLETDSGHIEMTFPYFINKSAPVSQVKSLLDYEVTFIGEMKNGEYLFTMKVIVPVTSLCPCSKKISNYGAHNQRSHVTISVRTNSFVWIEDIIQIAENNASCELYGLLKRPDEKYVTEKAYDNPKFVEDIVRDIAEVLNHDGRIDAYVVESENFESIHNHSAYALIENDKKQRG

SEQ ID NO: 11574 - protein, 277 aa, Nitrosospira briensis
  misc_feature (1)..(277): tr|A0A1I5BLX2|A0A1I5BLX2_9PROT GTP cyclohydrolase FolE2 OS=Nitrosospira briensis OX=35799 GN=folE2 PE=3 SV=1
MNAPIQEVNTSMNEVNLHMVDVQGASDTRLIAINRAGIKGIRHPVTIADKGSGIQHTVATFNMYVNLPHHLKGVHMSRFVEVLNGYDRAISAEGFESLLRIMITRLEAESGGIEMSFPYFMTKAAPVSRIKSLLDYEVSFVGRIENGSYQFTMKAVVPVTSLCPCSKQVSDYGAHNQRSHMSVSVRTSGLVWIAELIRMAEDQASCELYGLLKRSDEKHVTEKAYDNPKFVEDVVRDTAAVLNRDARIEAYVVESENFESIHNHSAYAMIERDKLES

SEQ ID NO: 11575 - protein, 191 aa, Nitrosospira briensis
  misc_feature (1)..(191): tr|A0A1I5C600|A0A1I5C600_9PROT GTP cyclohydrolase 1 OS= Nitrosospira briensis OX=35799 GN=folE PE=3 SV=1
MNSSDNSEFGVADWQRLLRSIGEDPSRQGLRETPGRVTRAWAHWTRGYQQDPATILKTFADGGESYDELIVVRQIPVYSHCEHHLAPFFGHATIGYLPSGHIVGLSKLTRLVNCFAARLQVQERLTQQIAQSLIEHLQPKAVGVIVRCRHMCMESRGIAVAGEETVTSAMLGDLKENAAQRAEFLALAEQP

SEQ ID NO: 11576 - protein, 256 aa, Nitrosospira lacus
  misc_feature (1)..(256): tr|A0A1W6SKR0|A0A1W6SKR0_9PROT GTP cyclohydrolase 1 OS= Nitrosospira lacus OX=1288494 GN=folE PE=3 SV=1
MDVDVLQNASFLSRRDWRILHIPLPQLIICVTLLPAPGDPITGMGADVSKCSVDTLDNLHLNKGKVTMTTPRDSEFGVADWQRLLRSIGEDPERQGLTDTPNRVARAWAHWMRGYKQDPATILKTFADGGECYDELIVVRQIPVYSHCEHHLAPFFGHATVGYLPSGHIVGLSKLTRLVNCFAARLQVQERLTQQIAQSLLEHLQPKAVGVIIRCRHMCMESRGIAVVGEETVTSAMLGDLKTNAAQRAEFLALAE

SEQ ID NO: 11577 - protein, 266 aa, Nitrosospira lacus
  misc_feature (1)..(266): tr|A0A1W6SL72|A0A1W6SL72_9PROT GTP cyclohydrolase FolE2 OS=Nitrosospira lacus OX=1288494 GN=folE2 PE=3 SV=1
MNDMNFLIADVQGVLDTRRIAINRAGIKAVRHPVTIKDKDGSKQHTVALFNMYVNLPHNMKGAHMSRFVEILNSHEREISVESFENILRAMVEKLESESGGIEMTFPYFINKAAPVSRITSLLDYEVTFIGEISEGSYKFTMKVIVPVTSLCPCSKEISAYGAHNQRSHMSISICINSFVWIEELIKIAEGQASCELYGVLKRTDEKYVTEKAYDNPKFVEDAVRDVAVVLDRDARIDAYVVESENFESIHNHSAYALIERNKMKN

SEQ ID NO: 11578 - protein, 263 aa, Nitrosospira multiformis
  misc_feature (1)..(263): sp|Q2YCH6|GCH4_NITMU GTP cyclohydrolase FolE2 OS=Nitros ospira multiformis (strain ATCC 25196 / NCIMB 11849 / C 71) OX=323848 GN=folE2 PE=3 SV=1
MNKMLIADVQSVADTRRIAIDKAGIRAIRHPVRIMDKAGVQHTVAVFNMYVNLAHHLKGVHMSRFVEMLNEHDSVISVETFEKLLISMVKKLEAESGDIEMRFPYFIGKTAPVSGIKSLMDYDVTFIGQTRNGESRFTLKVVVPVTSLCPCSKEVSDDGAHNQRSHISISIRANHFVWIEDLIRIAEDQASCELYGLLKRSDEKYVTEKAYGNPKFVEDAVRDIASVLDRDERIDAYTVEAENFESIHNHSAYALIECDKLKN

SEQ ID NO: 11579 - protein, 191 aa, Nitrosospira multiformis
  misc_feature (1)..(191): tr|A0A1I7IS69|A0A1I7IS69_9PROT GTP cyclohydrolase 1 OS= Nitrosospira multiformis OX=1231 GN=folE PE=3 SV=1
MDSSDSEFGIGDWQRLLRSLGEDPSRQGLRETPGRVARAWTHWTRGYKQDPATILKTFADGGESYDELIVVRQIPVYSHCEHHLAPFFGHATIGYLPSGHIVGLSKLTRLVNCFAARLQVQERLTQQIAQSLIEHLQPKAVGVIIRCRHMCMESRGIAVAGEETVTSAMLGDLKTNAAQRAEFMALAEPHE

SEQ ID NO: 11580 - protein, 190 aa, Nitrosospira sp.
  misc_feature (1)..(190): tr|A0A2T5WX15|A0A2T5WX15_9PROT GTP cyclohydrolase 1 OS= Nitrosospira sp. Nsp37 OX=2135783 GN=folE PE=3 SV=1
MSSSDSEFGIADWQRLLRSIGEDPTRQGLRETPGRVARAWAHWTRGYHQDPATILKTFADGGESYDELIVVRQIPVYSHCEHHLAPFFGHATIGYLPRGHIVGLSKLTRLVNCFAARLQVQERLTQQIAQSLIEHLQPKAVGVIVRCRHMCMESRGIAVAGEETVTSAMLGDLKENAAQRAEFMALAEAP

SEQ ID NO: 11581 - protein, 281 aa, Nitrosospira sp.
  misc_feature (1)..(281): tr|A0A495EMX3|A0A495EMX3_9PROT GTP cyclohydrolase FolE2 OS=Nitrosospira sp. Nsp44 OX=1945879 GN=folE2 PE=3 SV= 1
MASNACQAAFPDHGMNDVNIPIADVQGALDSRRIAINKAGIKSIRHPVKIIDKGRRAQHVVATFDMHASLSHQLKGVHMSRFVEILNDSTRLISVKSFESVVDAVVRKLETESGGVEMTFPYFMSKAAPITGISSLMDYQVTFTGEIHEGAYHFTLKVVVPVTSLCPCSKQVSAYGAHNQRSHMSISVCPSSSIWIEDLIRLAEDQASSEVYGLLKRADEKYVTEKAYDNPKFVEDVVRDVAAALNRDVRIDAYVVESENFESIHNHSAYAVIERNKLQNP

SEQ ID NO: 11582 - protein, 190 aa, Nitrosovibrio sp.
  misc_feature (1)..(190): tr|A0A497X8N7|A0A497X8N7_9PROT GTP cyclohydrolase 1 OS= Nitrosovibrio sp. Nv12 OX=2135773 GN=folE PE=3 SV=1
MSSNDSEFGIADWQRLLRSIGEDPTRQGLRETPGRVARAWAHWTRGYHQDPATILKTFADGGESYDELIVVRQIPVYSHCEHHLAPFFGHATIGYLPSGHIVGLSKLTRLVNCFAARLQVQERLTQQIAQSLIEHLQPKAVGVIIRCRHMCMESRGIAVAGEETVTSAMLGDLKENAAQRAEFLALAEAP

SEQ ID NO: 11583 - protein, 267 aa, Nitrosovibrio sp.
  misc_feature (1)..(267): tr|A0A1K1NC15|A0A1K1NC15_9PROT GTP cyclohydrolase FolE2 OS=Nitrosovibrio sp. Nv17 OX=1855339 GN=folE2 PE=3 SV= 1
MTDTSVSISDVQGASDARRIAIDEVGIRALRHPVTIVDRHGGRQHTVAVCSLHVGLPHSRKGAHMSRFVEVLAAHGDDVSVVSFEHILRTVMVRLEADSGGVEIVFPYFVEKVAPVSRLKSLLDYEVTFAGEIRNGKYTFTMKAVVPTTSLCPCSKEISAYGAHNQRSHVSISIQGNRPVWVEELIDLAESQASCGLYGLLKRADEKYVTEKAYDNPKFVEDTVRDIAAVLDQDERVDRYTVESENFESIHNHSAYARIERDKSKSA

SEQ ID NO: 11584 - protein, 192 aa, Nitrosovibrio tenuis
  misc_feature (1)..(192): tr|A0A1H7GC19|A0A1H7GC19_9PROT GTP cyclohydrolase 1 OS= Nitrosovibrio tenuis OX=1233 GN=folE PE=3 SV=1
MDASNDPEFGIADWQRLLRSIGEDPSRQGLAETPGRVSRAWAHWTRGYKQDPATILKTFADGGESYDELIVVRQIPVYSHCEHHLAPFFGHATVGYLPSGHIVGLSKLTRLVNCFAARLQVQERLTAQIAQSLLEHLQPKAVGVIIRCRHMCMESRGIAVAGEETVTSAMLGNLKTNPAQRAEFLALAERPD

SEQ ID NO: 11585 - protein, 268 aa, Nitrosovibrio tenuis
  misc_feature (1)..(268): tr|A0A1H7RS69|A0A1H7RS69_9PROT GTP cyclohydrolase FolE2 OS=Nitrosovibrio tenuis OX=1233 GN=folE2 PE=3 SV=1
MNEANSSIADVQSVLDTRSIAINRAGIRAIRHPVRIADRSDEIQHTIATFNMHVHLSHQFKGVHMSRFVEILNSHKQELSVQSFERMVRAMVNKLETESGDIEMTFPYFVRKAAPISHVESLLDYEVTFIGQIRNGSYKFFMKVVVPVTSLCPCSKQISAYGAHNQRSHMSISIHTNSFIWIEDLIRMAEDQASCELYSLLKRSDEKYVTEKAYDNPKFVEDVVRDVAAILNQDVRIDAYVVESENFESIHNHSAYALIERNKVEELS

SEQ ID NO: 11586 - protein, 187 aa, Nitrospina gracilis
  misc_feature (1)..(187): tr|M1Z1T4|M1Z1T4_NITG3 GTP cyclohydrolase 1 OS=Nitrospi na gracilis (strain 3/211) OX=1266370 GN=folE PE=3 SV=1
MKELIEKLLLELGEDPSREGLKNTPERVSRSLKFLTGGYWVNIDELVNDALFTDANTDEMVIVKDIDMFSLCEHHMLPFFGKAHVAYLPDGKIIGLSKIPRVVDAFSRRLQVQERLTTQIADCIQRVLKPKGVAVVIEALHLCMSMRGVEKQNSYTTTSSMLGYFKTNPSTRGEFLSLINGSQRYRT

SEQ ID NO: 11587 - protein, 204 aa, Nitrospina sp.
  misc_feature (1)..(204): tr|A0A3C8C698|A0A3C8C698_9BACT GTP cyclohydrolase 1 OS= Nitrospina sp. OX=2024844 GN=folE PE=3 SV=1
MRSNFLSPNAILSFTGELNLKDLIKQILLQIGEDPSREGLQNTPERVEKSLKFLTSGYWVNIKELVNGALFNEDYDEMVIVKDIDLFSMCEHHMLPFIGKCHVAYLPKGKIIGISKVPRIVDAFSRRLQVQERLTKQIADSLNEILQPIGVGVVIEALHLCMCMRGVAKQNSYTTTSAMLGSFKADARTRSEFLSLIPPQGTRR

SEQ ID NO: 11588 - protein, 184 aa, Nitrospina sp.
  misc_feature (1)..(184): tr|A0A523NPQ1|A0A523NPQ1_9BACT GTP cyclohydrolase 1 OS= Nitrospina sp. OX=2024844 GN=folE PE=3 SV=1
MKDLIEKLLVELGEDPSRKGLQNTPERVAKSMKFLTSGYWVNIEELVNDALYEDPNTDEMVIVKDIDVFSLCEHHLLPFFGKCHVAYLPDGKIIGLSKIPRIVETFGRRLQVQERLTTQIANCLQEILKPKGVAVVIDALHLCMSMRGVEKQNACTITSSMLGFFKSNPSTRSEFLSLIAGRRG

SEQ ID NO: 11589 - protein, 203 aa, Nitrospinae bacterium
  misc_feature (1)..(203): tr|A0A2H0MK33|A0A2H0MK33_9BACT GTP cyclohydrolase 1 OS= Nitrospinae bacterium CG11_big_fil_rev_8_21_14_0_20_56_ 8 OX=1974049 GN=folE PE=3 SV=1
MSLNYLNPTKTLSFIEDHNVKELIKELLKGLGEDPAREGLQSTPERVERSLKFLTSGYWVNIEELVNDALYSEDNNEMVIVRDIDLYSLCEHHLLPFFGKCHVAYVPQGKIIGLSKIPRIIDAFSRRLQVQERMTTQIAECVNSILQPHGVAVVIEALHLCMSMRGVEKQNSYTTTSSMLGCFKEDARTRSEFLSLIRPQRPC

SEQ ID NO: 11590 - protein, 181 aa, Nitrospinae bacterium
  misc_feature (1)..(181): tr|A0A351RU54|A0A351RU54_9BACT GTP cyclohydrolase 1 OS= Nitrospinae bacterium OX=2026769 GN=folE PE=3 SV=1
MKNIIKELLINLGEDPERDGLKRTPERVEKSLGFLTEGYGKDIKKIVEKAVFEEKCDEMVILKDIDIFSMCEHHLLPFYGKCHVAYIPDGRIIGLSKIPRIIEVFSRRLQVQERLTNQIAECLTDALKPKGVAVVIEALHLCMCMRGVEKQNAITITSSMLGVFKRDSRTRMEFMGFIKGR

SEQ ID NO: 11591 - protein, 187 aa, Nitrospira bacterium
  misc_feature (1)..(187): tr|A0A0S8ATT1|A0A0S8ATT1_9BACT GTP cyclohydrolase 1 OS= Nitrospira bacterium SG8_35_4 OX=1704025 GN=folE PE=3 S V=1
MNKNKIEKGVKLILEGIGEDIDRPGIKDTPKRIAELYEEIFSGLQTPTEEILKPIEGETHDEMVLLKDIPFYSVCEHHLLPFIGKAHVAYIPSGGKIVGLSKLAKAVEFFAKRPQVQERLTTQLADLIMKNLKPRGAMVIIDAEHLCLSMRGEKKPNARTVTSAVRGIFRTKESTRLEFLALLKRSD

SEQ ID NO: 11592 - protein, 187 aa, Nitrospira bacterium
  misc_feature (1)..(187): tr|A0A2N1UK47|A0A2N1UK47_9BACT GTP cyclohydrolase 1 OS= Nitrospira bacterium HGW-Nitrospira-1 OX=2013825 GN=fol E PE=3 SV=1
MNLKKIEKGVRMILEGIGEDTERPGIKDTPSRVAKMYQEIFSGIETPTEEILKHLEGESHDEMVLLKDIPFYSVCEHHLLPFIGKAHVAYIPGAGKIAGIGELARALEIFAKRPQVQERLTAQLADVIMEKLKPKGAMVVIDAEHLCLSMRGIKKPGARTVTSAVRGIFRTKESTRQELLELIKKRD

SEQ ID NO: 11593 - protein, 211 aa, Nitrospira defluvii
  misc_feature (1)..(211): tr|D8PJ02|D8PJ02_9BACT GTP cyclohydrolase 1 OS=Nitrospi ra defluvii OX=330214 GN=folE PE=3 SV=1
MAKVVSGARARRSRVSAAPTDQDPIEGLMTNLLLELGEDPDRNGLLNTPKRVAKAMRFMTQGYRQDIDHLLNGALFPIEYDEMVIVKDIDFFSMCEHHLLPFFGKCHVGYLPNKKVVGLSKIPRVVDAFSRRLQVQERLTLQIAETLKKKLNAHGVAVVMEARHLCMMMRGVEKQNTVAVSSSMLGVFRTQQQTREEFLKLIRGSSVRDGN

SEQ ID NO: 11594 - protein, 213 aa, Nitrospira japonica
  misc_feature (1)..(213): tr|A0A1W1I0S2|A0A1W1I0S2_9BACT GTP cyclohydrolase 1 OS= Nitrospira japonica OX=1325564 GN=folE PE=3 SV=1
MAKLRRRTLQRIEDLPPVKRPADEGHIQSLVAQLLKALGETPSRNGLLKTPERVAKALQFMTRGYHQNIDHLLNGALFPIEYDEMVIVKDIDFFSMCEHHMLPFFGKCHVGYLPNKKVVGLSKIPRVVDAFSRRLQVQERLTTQIAETLKQKLNAHGVGVVMEAQHLCMMMRGVEKQNTIAVTSSMLGAFRTQQQTRAEFLKLISRNGVGDLG

SEQ ID NO: 11595 - protein, 214 aa, Nitrospira lenta
  misc_feature (1)..(214): tr|A0A330L888|A0A330L888_9BACT GTP cyclohydrolase 1 OS= Nitrospira lenta OX=1436998 GN=folE PE=3 SV=1
MAKQAASRRRKPVEDMSGTGRPADLGVLQALVTETLLALGENPGRNGLLKTPERVAKALAFMTQGYHRDIDQLLNGALFPIEYDEMVIVKDIDFYSMCEHHLLPFYGKVHVGYLPNKKVVGLSKIPRIVDTFARRLQVQERLTVQIAETLKTKLNAHGVGVVVEARHLCMMMRGVEKQNTVAVSSSMLGAFRTQQQTRLEFLKLIRRSGVGTSD

SEQ ID NO: 11596 - protein, 216 aa, Nitrospira moscoviensis
  misc_feature (1)..(216): tr|A0A0K2GHX1|A0A0K2GHX1_NITMO GTP cyclohydrolase 1 OS= Nitrospira moscoviensis OX=42253 GN=folE PE=3 SV=1
MAKSRRRTLQRLNRIEVLPPISPPADPEHVRSLITDLLKSLGETPQRHGLLKTPERVAKALQFMTRGYHQDIDHLLNGALFPIEYDEMVIVKDIDFFSMCEHHMLPFFGKCHVGYLPNKKVVGLSKIPRVVDAFSRRFQVQERLTVQIAETLQNKLNAHGVGVVVEARHLCMMMRGVEKQNTIAVTSSMLGAFRTQQQTRLEFLKLIRHRSVGDSD

SEQ ID NO: 11597 - protein, 202 aa, Nitrospira sp.
  misc_feature (1)..(202): tr|A0A1W9GDK2|A0A1W9GDK2_9BACT GTP cyclohydrolase 1 OS= Nitrospira sp. SG-bin1 OX=1827376 GN=folE PE=3 SV=1
MEDTGGTGKPADLRVLQSLVTEMLLALGEKPGRNGLLKTPERVAKALAFMTQGYQRDIDHLLNGALFPIEYDEMVIVKDIDFFSMCEHHLLPFFGRVHVGYLPNKKVVGLSKIPRIVDTFARRLQVQERLTVQIAETLSTKLNAHGVGVVVEARHLCMMMRGVEKQNTVAVTSSMLGAFRSQSQTRVEFLKLIRRGNVGDSD

SEQ ID NO: 11598 - protein, 202 aa, Nitrospira sp.
  misc_feature (1)..(202): tr|A0A354BHN5|A0A354BHN5_9BACT GTP cyclohydrolase 1 OS= Nitrospira sp. OX=70125 GN=folE PE=3 SV=1
MEDVNGSGQAPDLPVLQSLVTEMLLALGEKPSRNGLLKTPERVAKALAFMTQGYQRDIDHLLNGALFPIEYDEMVIVKDIDFFSMCEHHLLPFFGRVHVGYLPNKKVVGLSKIPRIVDMFARRLQVQERLTVQIAETLSTKLNAHGVGVVIEARHLCMMMRGVEKQNTVAVTSSMLGAFRSQSQTREEFLKLIRRGSVGDPE

SEQ ID NO: 11599 - protein, 187 aa, Nitrospiraceae bacterium
  misc_feature (1)..(187): tr|A0A419FVS6|A0A419FVS6_9BACT GTP cyclohydrolase 1 OS= Nitrospiraceae bacterium OX=2026770 GN=folE PE=3 SV=1
MDRKKIEKGVRLILEGIGEDPERAGLKDTPLRIVKLYEEIFAGLETPTEELLKPIEGESHDEMVLLKDIPFYSVCEHHLLPFIGKAHVAYIPSGGKIVGLSELAKAVEMFAKRPQVQERLTTQLADTIMDKLKPKGAMVIIDAEHLCLSMRGIKKPNARTITSAVRGIFRTKESTRMELLELIKRRD

SEQ ID NO: 11600 - protein, 215 aa, Nitrospiraceae bacterium
  misc_feature (1)..(215): tr|A0A3N5HS99|A0A3N5HS99_9BACT GTP cyclohydrolase 1 OS= Nitrospiraceae bacterium OX=2026770 GN=folE PE=3 SV=1
MAKQGINRRGRQAVEEVNGNSRPADLAVLQSLVTEMLLALGEKPGRNGLLKTPERVAKALAFMTQGYHRNIDHLLNGALFPIEYDEMVIVKDIDFFSMCEHHLLPFYGRVHVGYLPNKKVVGLSKIPRIVDVFARRLQVQERLTVQIAETLKSKLNAHGVGVVVEARHLCMMMRGVEKQNTVAVSSSMLGAFRSQPQTRLEFLKLIHRGSVGDSD

SEQ ID NO: 11601 - protein, 183 aa, Nitrospirae bacterium
  misc_feature (1)..(183): tr|A0A1G1EVX2|A0A1G1EVX2_9BACT GTP cyclohydrolase 1 OS= Nitrospirae bacterium GWB2_47_37 OX=1801692 GN=folE PE= 3 SV=1
MDKKKIEEGVRLILDGIGEDKQRPGLKDTPKRVAEMFAEIFAGLETPGEDLLKPIEGESHDEMVLLKDIPFYSVCEHHLLPFIGRAHIAYIPSGSIVGLSELAKALEHLAKRPQVQERLTSQLADMIMDRIKPRGCMVVIDAEHLCMSMRGIKKPGSRTATSAVRGIFRSKQSTREEMLSLIK

SEQ ID NO: 11602 - protein, 215 aa, Nitrospirae bacterium
  misc_feature (1)..(215): tr|A0A388QJ86|A0A388QJ86_9BACT GTP cyclohydrolase 1 OS= Nitrospirae bacterium OX=2026887 GN=folE PE=3 SV=1
MAKQVVKRRGQRQVEDVNGSGKPVDLDVLQSLVTEMLLALGEKPGRNGLVKTPERVAKALAFMTQGYQRDIDHLLNDALFPIEYDEMVIVKDLDFFSMCEHHLLPFYGKVHVGYLPNKKVVGLSKIPRIVDTFARRLQVQERLTLQIAETLKAKLNAHGVGVVVEARHLCMMMRGVEKQNTIAVTSSMLGAFRSQPQTRLEFLKLIRRGSVGDSD

SEQ ID NO: 11603 - protein, 222 aa, Nitrospirillum amazonense
  misc_feature (1)..(222): tr|A0A560JWY0|A0A560JWY0_9PROT GTP cyclohydrolase 1 OS= Nitrospirillum amazonense OX=28077 GN=folE PE=3 SV=1
MTHAKNTPADKIVAGPVHGRRTVVAQGRPSREEAEEAVRTLLRWAGDDPTREGLLGTPDRVVRSYEEFFAGYASDPMELLARTFEETDGYDEMVVLRDIRFESYCEHHMVPIIGVAHVAYLPRSRVVGISKLARVVEVYAKRLQIQEKMTSQIANTIDEVLQPLGVAVVIEASHQCMTTRGVHKPGVSMVTSRMLGAFRSDPSTRREFLAMIGNPSPAGSMF

SEQ ID NO: 11604 - protein, 222 aa, Nitrospirillum amazonense
  misc_feature (1)..(222): tr|A0A560FAV7|A0A560FAV7_9PROT GTP cyclohydrolase 1 OS= Nitrospirillum amazonense OX=28077 GN=folE PE=3 SV=1
MTHAKNTPADKIVAGPVHGRRTVVAQGRPSREEAEEAVRTLLRWAGDDPTREGLLGTPDRVVRSYEEFFAGYASDPMELLARTFEETDGYDEMVVLRDIRFESYCEHHMVPIIGVAHVAYLPRSRVVGISKLARVVEVYAKRLQIQEKMTSQIANTIDEVLQPLGVAVVIEASHQCMTTRGVHKPGVSMVTSRMLGAFRNDPSTRREFLAMIGNPSPAGSMF

SEQ ID NO: 11605 - protein, 214 aa, Niveispirillum cyanobacteriorum
  misc_feature (1)..(214): tr|A0A2K9NHN2|A0A2K9NHN2_9PROT GTP cyclohydrolase 1 OS= Niveispirillum cyanobacteriorum OX=1612173 GN=folE PE=3 SV=1
MPGPVHGRRAGPAATNPNLVRPSKAEAEAAVRTLIRWAGDDPDREGLVGTPDRVVRSYEEFFAGYEVDPVDLLARTFEETDGYDEMVVLRNIRLESYCEHHMVPIIGKVHIAYLPRNRVVGISKLARVAEVYSKRLQIQEKMTAQIANTVDEVLEPLGVAVVIEATHQCMTTRGIHKPGVTMVTSRMLGAFREDEKTRREFLAMIGNPASSGEG

SEQ ID NO: 11606 - protein, 225 aa, Niveispirillum lacus
  misc_feature (1)..(225): tr|A0A255Z6E0|A0A255Z6E0_9PROT GTP cyclohydrolase 1 OS= Niveispirillum lacus OX=1981099 GN=folE PE=3 SV=1
MTAPKKTTDKVVPGPVHARRAGPAATNPNLIRPSKAEAEAAVRTLIRWAGDDPDREGLVGTPDRVVRSYEEFFAGYDVDPVDLLARTFEETDGYDEMVVLRNIRLESYCEHHMVPIIGKVHIAYLPRNRVVGISKLARVAEVYSKRLQIQEKMTAQIANTIDEVLEPLGVAVVIEATHQCMTTRGIHKPGVTMVTSRMLGAFREDDKTRREFLAMIGNPASSGEG

SEQ ID NO: 11607 - protein, 223 aa, Nocardia africana
  misc_feature (1)..(223): tr|A0A378WLR5|A0A378WLR5_9NOCA GTP cyclohydrolase 1 OS= Nocardia africana OX=134964 GN=folE PE=3 SV=1
MSANNSAPAGSDSASGAGAAVVAEAPAPVALGTGRTFDQKRAEAAVRELLVAVGEDPDRPGLIDTPARVARAYLEMFAGLYVEPDSVLNTTFDEGHQELVLVRDIPMYSTCEHHLVSFHGVAHVGYIPGPQGRVTGLSKLARLVDLYAKRPQVQERLTSQIADAVMRKLDPRGAIVVVEAEHLCMAMRGIRKPGASTTTSAVRGLLQTNAASRAEALDLILRK

SEQ ID NO: 11608 - protein, 217 aa, Nocardia alba
  misc_feature (1)..(217): tr|A0A4R1G3A0|A0A4R1G3A0_9NOCA GTP cyclohydrolase 1 OS= Nocardia alba OX=225051 GN=folE PE=3 SV=1
MSANKQDLDPTGELGASSPSELTALATGLPFDQARAESAVRELLLAVGEDPDRPGLVDTPARVARAYREIFAGLYTEPDAVLATTFDEGHQELVLVRDIPMFSTCEHHLVSFHGVAHVGYIPGSHGRVTGLSKLARVVDLYAKRPQVQERLTSQIADAVMRRLDPRGAIVVVEAEHLCMAMRGIRKPGASTTTSAVRGQLQTDAASRAEALDLILRK

SEQ ID NO: 11609 - protein, 227 aa, Nocardia amikacinitolerans
  misc_feature (1)..(227): tr|A0A285LVJ1|A0A285LVJ1_9NOCA GTP cyclohydrolase 1 OS= Nocardia amikacinitolerans OX=756689 GN=folE PE=3 SV=1
MSANHHAVGSALNGRDEVERNGAMPASTLPELVALETGRPFDQDRAEAAVRELLIAIGEDPDRPGLIETPARVARAYRETFAGLYQEPDAVLNTTFDEGHQELVLVRDIPMYSTCEHHLVSFHGVAHVGYIPGEHGRVTGLSKLARLVDLYAKRPQVQERLTSQIVDAIMRKLEPRGAIVVVEAEHLCMAMRGIRKPGASTTTSAVRGLLQTNAASRAEALELILRR

SEQ ID NO: 11610 - protein, 224 aa, Nocardia asteroides
  misc_feature (1)..(224): tr|U5EBG6|U5EBG6_NOCAS GTP cyclohydrolase 1 OS=Nocardia asteroides NBRC 15531 OX=1110697 GN=folE PE=3 SV=1
MTANKKVAEPAGNGSIADGELGATSPQDLTALATGRRFDQDRAEAAVRELLIAVGEDPDRPGLLDTPARVARAYREMFAGLYTEPDEVLATTFDEGHQELVLVRDIPMFSTCEHHLVSFHGVAHVGYIPGTHGRVTGLSKLARVVDLYAKRPQVQERLTSQIADAVMRRLDPRGAIVVIEAEHLCMAMRGIRKPGASTTTSAVRGLLQTNAASRAEALDLILRK

SEQ ID NO: 11611 - protein, 197 aa, Nocardia bhagyanarayanae
  misc_feature (1)..(197): tr|A0A543FDR8|A0A543FDR8_9NOCA GTP cyclohydrolase 1 OS= Nocardia bhagyanarayanae OX=1215925 GN=folE PE=3 SV=1
MTRAALRVVHDHTTLDLDAAELAARDFLLALGVDLDADHLHATPGRMARAYAELFTSRPFDLTTFPNDEGYDELVLARRIPLRSVCEHHLLPFVGIAHVGYLPGQRILGLSKLARIVEHFSRRPQVQERLTKQIADWLAEHLQPKGVGVVIEAEHTCMTLRGVQAAGATTVTSTLLGSLREDPRSRQEFFALTGIAP

SEQ ID NO: 11612 - protein, 227 aa, Nocardia bhagyanarayanae
  misc_feature (1)..(227): tr|A0A543F608|A0A543F608_9NOCA GTP cyclohydrolase 1 OS= Nocardia bhagyanarayanae OX=1215925 GN=folE PE=3 SV=1
MSANHHAVGSALNGRDEVERNGSMPASTRPELVALETGRPFDQDRAEAAVRELLIAIGEDPDRPGLIETPARVARAYRETFAGLYQEPDAVLNTTFDEGHQELVLVRDIPMYSTCEHHLVSFHGVAHVGYIPGEHGRVTGLSKLARLVDLYAKRPQVQERLTSQIVDAVMRKLEPRGAIVVVEAEHLCMAMRGIRKPGASTTTSAVRGLLQTNAASRAEALELILRR

SEQ ID NO: 11613 - protein, 227 aa, Nocardia brasiliensis
  misc_feature (1)..(227): tr|A0A379A743|A0A379A743_9NOCA GTP cyclohydrolase 1 OS= Nocardia brasiliensis OX=37326 GN=folE PE=3 SV=1
MSANNHLGGHALADPDGAAENGSANGVTGPELVALATGKSFDQARAEAAVRELLLAVGEDPDRPGLIDTPARVARAYREMFAGLYVEPDAVLNTTFDEGHQELVLVRDIPLYSTCEHHLVSFHGVAHVGYIPGKHGRVTGLSKLARVVDLYAKRPQVQERLTSQIADAVMRKLDPRGAIVVVEAEHLCMAMRGIRKPGASTTTSAVRGLLQSSPSSRAEALDLILRK

SEQ ID NO: 11614 - protein, 227 aa, Nocardia brasiliensis
  misc_feature (1)..(227): tr|K0ELT8|K0ELT8_9NOCA GTP cyclohydrolase 1 OS=Nocardia brasiliensis ATCC 700358 OX=1133849 GN=folE PE=3 SV=1
MSANNHLGGHALADPDGAAETGSANGVTGPELVALETGRPFDQARAEAAVRELLIAVGEDPDRPGLVDTPARVARAYREMFAGLYVEPDAVLNTTFDEGHQELVLVRDIPLYSTCEHHLVSFHGVAHVGYIPGKHGRVTGLSKLARVVDLYAKRPQVQERLTSQIADAVMRKLDPRGAIVVVEAEHLCMAMRGIRKPGASTTTSAVRGLLQSSPSSRAEALDLILRK

SEQ ID NO: 11615 - protein, 223 aa, Nocardia cerradoensis
  misc_feature (1)..(223): tr|A0A231H6C9|A0A231H6C9_9NOCA GTP cyclohydrolase 1 OS= Nocardia cerradoensis OX=85688 GN=folE PE=3 SV=1
MSANNSAPAGSDSASGAGAAVVAEAPAPIALGTGRTFDQKRAEAAVRELLVAVGEDPDRPGLIDTPARVARAYLEMFAGLYVEPDSVLNTTFDEGHQELVLVRDIPMYSTCEHHLVSFHGVAHVGYIPGPQGRVTGLSKLARLVDLYAKRPQVQERLTSQIADAVMRKLDPRGAIVVVEAEHLCMAMRGIRKPGASTTTSAVRGLLQTNASSRAEALDLILRK

SEQ ID NO: 11616 - protein, 227 aa, Nocardia cyriacigeorgica
  misc_feature (1)..(227): tr|H6RAY8|H6RAY8_NOCCG GTP cyclohydrolase 1 OS=Nocardia cyriacigeorgica (strain GUH-2) OX=1127134 GN=folE PE=3 SV=1
MSANDHSNGQAPTVPNRAVLDDPGPELSDSELIALHTGKPFDQARAEAAIRELLIAVGEDPDRPGLVDTPARVARAYREMFAGLYLEPDAVLNTTFDEEHQELVLVRDIPLYSTCEHHLVSFHGVAHVGYIPGTHGRVTGLSKLARLVDLYAKRPQVQERLTSQIADAVMRKLDPRGAIVVVEAEHLCMAMRGIRKPGASTTTSAVRGLLQTNAASRAEALDLILRK

SEQ ID NO: 11617 - protein, 209 aa, Nocardia cyriacigeorgica
  misc_feature (1)..(209): tr|A0A2L2JYS3|A0A2L2JYS3_9NOCA GTP cyclohydrolase 1 OS= Nocardia cyriacigeorgica OX=135487 GN=folE PE=3 SV=1
MLDDPGPELSDSELIALHTGKPFDQPRAEAAIRELLIAVGEDPDRPGLIDTPARVARAYREMFAGLYLEPDAVLNTTFDEEHQELVLVRDIPLYSTCEHHLVSFHGVAHVGYIPGTHGRVTGLSKLARLVDLYAKRPQVQERLTSQIADAVMRKLDPRGAIVVVEAEHLCMAMRGIRKPGASTTTSAVRGLLQTNAASRAEALDLILRK

SEQ ID NO: 11618 - protein, 216 aa, Nocardia donostiensis
  misc_feature (1)..(216): tr|A0A1W0BPB5|A0A1W0BPB5_9NOCA GTP cyclohydrolase 1 OS= Nocardia donostiensis OX=1538463 GN=folE PE=3 SV=1
MTPAIPDIAAELGEGETSEGLVAQHTGKPFDRVRAEAAVRELLIAVGEDPDRPGLIDTPARVARAYQEMFAGLYVEPDRVLDTTFDEGHQELVLVRDIPLYSTCEHHLVSFHGVAHVGYIPGQSGRVTGLSKLARLVDLYAKRPQVQERLTSQIADAVMRKLEPRGAIVVVEAEHLCMAMRGIRKPGASTTTSAVRGLLQTSAASRSEALELILRK

SEQ ID NO: 11619 - protein, 203 aa, Nocardia farcinica
  misc_feature (1)..(203): tr|A0A1C2B408|A0A1C2B408_NOCFR GTP cyclohydrolase 1 OS= Nocardia farcinica OX=37329 GN=folE PE=3 SV=1
MSISERRDAVLEGPRSDFDQARAEAAVRELLLAVGEDPDREGLIRTPTRVANAYREMFAGLYTEPDEVLATTFDEDHDELVLVKDIPMYSTCEHHLVSFHGVAHVGYIPGTSGRVTGLSKLARLVDLYAKRPQVQERLTSQIADAMMRRLEPRGVIVVIEAEHLCMAMRGIRKPGATTTTSAVRGIFKTSAVSRGEALDLIAR

SEQ ID NO: 11620 - protein, 228 aa, Nocardia farcinica
  misc_feature (1)..(228): tr|Q5Z2V0|Q5Z2V0_NOCFA GTP cyclohydrolase 1 OS=Nocardia farcinica (strain IFM 10152) OX=247156 GN=folE PE=3 SV =1
MSANHNAVDQVPNGLDRAAFDDDAQPAVAEPPLHALATGRPFDQPRAEAAIRELLIAVGEDPDRPGLIDTPARVARAYREMFAGLYVEPDRVLDTTFDEGHQELVLVRDIPMYSTCEHHLVSFHGVAHVGYIPGPAGRVTGLSKLARLVDLYAKRPQVQERLTSQIADAVMRKLEPRGAIVVVEAEHLCMAMRGIRKPGASTTTSAVRGLLQTNAASRAEALDLILRK

SEQ ID NO: 11621 - protein, 231 aa, Nocardia fluminea
  misc_feature (1)..(231): tr|A0A2N3V9K8|A0A2N3V9K8_9NOCA GTP cyclohydrolase 1 OS= Nocardia fluminea OX=134984 GN=folE PE=3 SV=1
MLGASRKYHGGAEKLSANKQELDPAGELGATSPSVLTALATGMPFDQVRAENAVRELLIAVGEDPDRPGLLDTPARVARAYREMFAGLYTEPDAVLATTFDEGHQELVLVRDIPMFSTCEHHLVSFHGVAHVGYIPGSHGRVTGLSKLARVVDLYAKRPQVQERLTSQIADAVMRRLDPRGAIVVIEAEHLCMAMRGIRKPGASTTTSAVRGQLQTDSASRAEALDLILRK

SEQ ID NO: 11622 - protein, 226 aa, Nocardia ignorata
  misc_feature (1)..(226): tr|A0A4R6PM81|A0A4R6PM81_9NOCA GTP cyclohydrolase 1 OS= Nocardia ignorata OX=145285 GN=folE PE=3 SV=1
MSANRKVAEPAGNGSGFDPAGELGETSPAELTALATGRPFDQQRAENAVRELLLAVGEDPDRPGLLDTPARVARAYREMFAGLYTEPDEVLATTFDEGHQELVLVRDIPMFSTCEHHLVSFHGVAHVGYIPGPHGRVTGLSKLARVVDLYAKRPQVQERLTSQVADAVMRRLDPRGAIVVIEAEHLCMAMRGIRKPGASTTTSAVRGLLQTNAASRSEALDLILRK

SEQ ID NO: 11623 - protein, 227 aa, Nocardia iowensis
  misc_feature (1)..(227): tr|Q8GLS8|Q8GLS8_NOCIO GTP cyclohydrolase 1 OS=Nocardia iowensis OX=204891 GN=gch PE=3 SV=1
MSANNHVGGHALADSDGTAENGSGNGMTRPELIALETGRAFDQDRAEAAVRELLLAVGENPDRPGLIDTPARVARAYREMFAGLYVEPEDVLNTTFDEGHQELVLVRDIPLYSTCEHHLVSFHGVAHVGYIPGKHGRVTGLSKLARLVDLYAKRPQVQERLTSQVADAVMRKLDPRGAIVVVEAEHLCMAMRGIRKPGASTTTSAVRGLLQSSPSSRSEALDLILRK

SEQ ID NO: 11624 - protein, 222 aa, Nocardia mexicana
  misc_feature (1)..(222): tr|A0A370GZ80|A0A370GZ80_9NOCA GTP cyclohydrolase 1 OS= Nocardia mexicana OX=279262 GN=folE PE=3 SV=1
MSVNNRAVAESDASSVVAEDFESAVSPVALDTGRPFDQDRAEAAVRELLLAVGENPDRPGLADTPARVARAYREMFAGLYTEPDSVLNTTFDEGHQELVLVRDIPLYSTCEHHLVSFHGVAHVGYIPGPHGRVTGLSKLARLVDLYAKRPQVQERLTSQIADAVMRKLDPRGAIVVVEAEHLCMAMRGIRKPGASTTTSAVRGLLQTSASSRAEALDLILRK

SEQ ID NO: 11625 - protein, 226 aa, Nocardia neocaledoniensis
  misc_feature (1)..(226): tr|A0A317N2V7|A0A317N2V7_9NOCA GTP cyclohydrolase 1 OS= Nocardia neocaledoniensis OX=236511 GN=folE PE=3 SV=1
MSADKNLAEQARNGRLADPAGELGANSPAELTALATGRPFDQARAEAAVRELLLAVGEDPDRPGLLDTPARVARAYREMFAGLYTEPDEVLATTFDEGHQELVLVRDIPMFSTCEHHLVSFHGVAHVGYIPGTHGRVTGLSKLARVVDLYAKRPQVQERLTSQIADAVMRRLDPRGAIVVVEAEHLCMAMRGIRKPGASTTTSAVRGLLQTNAASRAEALDLILRK

SEQ ID NO: 11626 - protein, 227 aa, Nocardia ninae
  misc_feature (1)..(227): tr|A0A511M9Q7|A0A511M9Q7_9NOCA GTP cyclohydrolase 1 OS= Nocardia ninae NBRC 108245 OX=1210091 GN=folE PE=3 SV=1
MSANNHLGGHVLADSDGFDEDGSGNGVTRPELIALETGRPFDQDRAEAAIRELLLAVGENPDRPGLIDTPARVARAYREMFAGLYVEPDAVLNTTFDEGHQELVLVRDIPMYSTCEHHLVSFHGVAHVGYIPGKHGRVTGLSKLARLVDLYAKRPQVQERLTSQVADAVMRKLDPRGAIVVIEAEHLCMAMRGIRKPGASTTTSAVRGLLQSSPSSRSEALDLILRK

SEQ ID NO: 11627 - protein, 220 aa, Nocardia nova
  misc_feature (1)..(220): tr|W5TDC7|W5TDC7_9NOCA GTP cyclohydrolase 1 OS=Nocardia nova SH22a OX=1415166 GN=folE1 PE=3 SV=1
MSANNGASAGSDTASLDAAVVEAPPIALSTGRPFDQERAEAAVRELLIAVGEDPDRPGLLDTPARVARAYRETFAGLYTEPDSVLNTTFDEGHQELVLVRDIPMYSTCEHHLVSFHGVAHVGYIPGPQGRVTGLSKLARLVDLYAKRPQVQERLTSQIADAVMRKLDPRGAIVVIEAEHLCMAMRGIRKPGASTTTSAVRGLLQTNASSRAEALDLILRK

SEQ ID NO: 11628 - protein, 198 aa, Nocardia nova
  misc_feature (1)..(198): tr|W5TGG8|W5TGG8_9NOCA GTP cyclohydrolase 1 OS=Nocardia nova SH22a OX=1415166 GN=folE2 PE=3 SV=1
MTRSTLHVARTASSVIDLPAAEDAARAFLTALGMDLTSDHLQATPRRMASAYAELFTPRSFALTTFPNEEGYDELVLARRIPLRSVCEHHLLPFVGVAHVGYLPGERILGLSKLARVVEHFSSRPQVQERLTKQIADWLTEQLQPRGVGVVIEAEHSCMTLRGVHAIGTSTVTSTLLGALREDARSRQEFLSLTAVTS

SEQ ID NO: 11629 - protein, 206 aa, Nocardia otitidiscaviarum
  misc_feature (1)..(206): tr|A0A378YEC9|A0A378YEC9_9NOCA GTP cyclohydrolase 1 OS= Nocardia otitidiscaviarum OX=1823 GN=folE PE=3 SV=1
MSANNRVVSGPIALDTGRPFDQERAEAAVRELLIAVGEDPNRPGLIDTPGRVARAYREMFAGLYTEPDAVLNTTFDEGHQELVLVRDIPMYSTCEHHLVSFHGVAHVGYIPGPHGRVTGLSKLARLVDLYAKRPQVQERLTSQIVDAVMRKLDPRGAIVVVEAEHLCMAMRGIRKPGASTTTSAVRGLLQSSPSSRAEALDLILRK

SEQ ID NO: 11630 - protein, 211 aa, Nocardia pseudobrasiliensis
  misc_feature (1)..(211): tr|A0A370I5Q6|A0A370I5Q6_9NOCA GTP cyclohydrolase 1 OS= Nocardia pseudobrasiliensis OX=45979 GN=folE PE=3 SV=1
MSANNRVVTEPDIDAQVAIETGRPFDQGRAEAAVRELLLAVGENPDRPGLRDTPARVARAYREIFAGLFTEPDSVLNTTFDEGHQELVLVRDIPMYSTCEHHLVSFHGVAHVGYIPGTHGRVTGLSKLARLVDLYAKRPQVQERLTSQIVDAVMRKLDPRGAIVVIEAEHLCMAMRGIRKPGASTTTSAVRGILQSSASSRAEALDLILRK

SEQ ID NO: 11631 - protein, 221 aa, Nocardia puris
  misc_feature (1)..(221): tr|A0A366DBC6|A0A366DBC6_9NOCA GTP cyclohydrolase 1 OS= Nocardia puris OX=208602 GN=folE PE=3 SV=1
MSANNHVVGSALTEVARDGQPARPELVALGTGRAFDQARAEAAVRELLIAVGEDPDRPGLIDTPSRVARAYREVFAGLYVEPDRVLDTTFDEGHQELVLVRDIPMYSTCEHHLVSFHGVAHVGYIPGPSGRVTGLSKLARLVDLYAKRPQVQERLTSQVADAVMRKLEPRGAIVVVEAEHLCMAMRGIRKPGASTTTSAVRGLLQSNAASRAEALDLILRK

SEQ ID NO: 11632 - protein, 195 aa, Nocardia seriolae
  misc_feature (1)..(195): tr|A0A3F2UPL6|A0A3F2UPL6_9NOCA GTP cyclohydrolase 1 OS= Nocardia seriolae OX=37332 GN=folE PE=3 SV=1
MALETGRPFDQDRAEAAVRELLIAVGEDPDRPGLADTPGRVARAYREMFAGLFTDPAEVLNTTFDEGHQELVLVRDIPMYSTCEHHLVAFHGVAHVGYIPGQHGRVTGLSKLARLVDLYAKRPQVQERLTSQIADAVMAKLDPRGAIVVIEAEHLCMAMRGIRKPGASTTTSAVRGTLQSNASTRAEALDLILRK

SEQ ID NO: 11633 - protein, 211 aa, Nocardia seriolae
  misc_feature (1)..(211): tr|A0A0B8NE02|A0A0B8NE02_9NOCA GTP cyclohydrolase 1 OS= Nocardia seriolae OX=37332 GN=gch1 PE=3 SV=1
MSATNTTANNRVGSGPIALETGRPFDQDRAEAAVRELLIAVGEDPDRPGLADTPGRVARAYREMFAGLFTDPAEVLNTTFDEGHQELVLVRDIPMYSTCEHHLVAFHGVAHVGYIPGQHGRVTGLSKLARLVDLYAKRPQVQERLTSQIADAVMAKLDPRGAIVVIEAEHLCMAMRGIRKPGASTTTSAVRGTLQSNASTRAEALDLILRK

SEQ ID NO: 11634 - protein, 203 aa, Nocardia sp.
  misc_feature (1)..(203): tr|A0A2T2ZN39|A0A2T2ZN39_9NOCA GTP cyclohydrolase 1 OS= Nocardia sp. MDA0666 OX=2135448 GN=folE PE=3 SV=1
MVAEAPAPIALGTGRTFDQKRAEAAVRELLVAVGEDPERPGLIDTPARVARAYLEMFAGLYVEPDSVLNTTFDEGHQELVLVRDIPMYSTCEHHLVSFHGVAHVGYIPGPQGRVTGLSKLARLVDLYAKRPQVQERLTSQIADAVMRKLDPRGAIVVVEAEHLCMAMRGIRKPGASTTTSAVRGLLQTNASSRAEALDLILRK

SEQ ID NO: 11635 - protein, 218 aa, Nocardia sp.
  misc_feature (1)..(218): tr|A0A3A4KFJ9|A0A3A4KFJ9_9NOCA GTP cyclohydrolase 1 OS= Nocardia sp. YIM PH 21724 OX=2340916 GN=folE PE=3 SV=1
MSASKHVGDPALNGSDGAAQEALVALHTAAPFDQARAESAIRELLLAVGEDPDRPGLLETPARVARAYREMFAGLYVEPDSVLDTTFDEGHQELVLVRDIPMYSTCEHHLVSFHGVAHVGYIPGPHGRVTGLSKLARLVDLYAKRPQVQERLTSQIADAVMRKLEPRGAIVVIEAEHLCMAMRGIRKPGASTTTSAVRGLLQSSAVSRSEALDLILRR

SEQ ID NO: 11636 - protein, 223 aa, Nocardia tenerifensis
  misc_feature (1)..(223): tr|A0A318K0M4|A0A318K0M4_9NOCA GTP cyclohydrolase 1 OS= Nocardia tenerifensis OX=228006 GN=folE PE=3 SV=1
MSANNHIGAQALADSDGVDEIGSGVTELVALETGRSFDQARAEAAVRELLLAVGEDPDRPGLLDTPARVARAYREMFAGLYVEPDSVLNTTFDEGHQELVLVRDIPMYSTCEHHLVSFHGVAHVGYIPGKHGRVTGLSKLARLVDLYAKRPQVQERLTSQIADAVMRKLDPRGAIVVVEAEHLCMAMRGIRKPGASTTTSAVRGLLQSSPSSRSEALDLILRK

SEQ ID NO: 11637 - protein, 211 aa, Nocardia terpenica
  misc_feature (1)..(211): tr|A0A164HPZ8|A0A164HPZ8_9NOCA GTP cyclohydrolase 1 OS= Nocardia terpenica OX=455432 GN=folE PE=3 SV=1
MEVSRVSANNRVVPGPVALDTGRSFDQPRAEAAIRELLIAVGEDPDRPGLAETPSRVARAYREMFAGLFTEPDAVLDTTFEEGHQEMVLVRDIPMYSTCEHHLVSFHGVAHVGYIPGSHGRVTGLSKLARLVDLYAKRPQVQERLTSQVADAVMRKLDPRGAIVVIEAEHLCMAMRGIRKPGASTTTSAVRGILQSSASTRAEALDLILRK

SEQ ID NO: 11638 - protein, 206 aa, Nocardia terpenica
  misc_feature (1)..(206): tr|A0A291RDX7|A0A291RDX7_9NOCA GTP cyclohydrolase 1 OS= Nocardia terpenica OX=455432 GN=folE PE=3 SV=1
MSANNRVVPGPVALDTGRSFDQSRAEAAIRELLIAVGEDPDRPGLAETPARVARAYREMFAGLFTEPDAVLDTTFEEGHQEMVLVRDIPMYSTCEHHLVSFHGVAHVGYIPGSHGRVTGLSKLARLVDLYAKRPQVQERLTSQVADAVMRKLDPRGAIVVIEAEHLCMAMRGIRKPGASTTTSAVRGILQSSASTRAEALDLILRK

SEQ ID NO: 11639 - protein, 201 aa, Nocardia vulneris
  misc_feature (1)..(201): tr|A0A0C1AVS2|A0A0C1AVS2_9NOCA GTP cyclohydrolase 1 OS= Nocardia vulneris OX=1141657 GN=folE PE=3 SV=1
MTGPELVALETGKPFDQARAEAAVRELLIAVGEDPDRPGLVDTPARVARAYREMFAGLYVEPDAVLNTTFDEGHQELVLVRDIPLYSTCEHHLVSFHGVAHVGYIPGKHGRVTGLSKLARVVDLYAKRPQVQERLTSQIADAVMRKLDPRGAIVVVEAEHLCMAMRGIRKPGASTTTSAVRGLLQSSPSSRAEALDLILRK

SEQ ID NO: 11640 - protein, 212 aa, Nocardioidaceae bacterium
  misc_feature (1)..(212): tr|E9UND6|E9UND6_9ACTN GTP cyclohydrolase 1 OS=Nocardio idaceae bacterium Broad-1 OX=408672 GN=folE PE=3 SV=1
MSETFDDVAPVHVPERDVADVPPFDQKRAEAAVRELLYAIGEDPDREGLLETPARVARAYQEVTRGLHQEPKDVLTTTFDLGHDEMVLVRDIELWSMCEHHLVPFTGVAHVGYIPAESGKITGLSKLARLVDVYAKRPQVQERLTTQVADALTEILEARGVIVVIEAEHLCMTMRGVKKAGARTITSAVRGTMRSNATTRAEAMALIRGGTR

SEQ ID NO: 11641 - protein, 222 aa, Nocardioides albertanoniae
  misc_feature (1)..(222): tr|A0A543A1W9|A0A543A1W9_9ACTN GTP cyclohydrolase 1 OS= Nocardioides albertanoniae OX=1175486 GN=folE PE=3 SV=1
MSDVDEKSDGVSARNTQVTPVHTPERDVADVPAFDQQRAEAAVRELLFAIGEDPDREGLLDTPARVARAYRELTQGLHQAPEDVLTTTFDLGHDEMVLVRDIELWSMCEHHLVPFTGVAHVGYIPAATGKITGLSKLARLVDVYAKRPQVQERLTTQVADALMDILEARGVIVVIEAEHLCMTMRGVRKAGARTITSAVRGTMRSNATTRAEAMALIRGGTR

SEQ ID NO: 11642 - protein, 201 aa, Nocardioides albidus
  misc_feature (1)..(201): tr|A0A5C4VS28|A0A5C4VS28_9ACTN GTP cyclohydrolase 1 OS= Nocardioides albidus OX=1517589 GN=folE PE=3 SV=1
MTVLEDRWRPRIVTEAPSVDRAAAQVAAVDLLSALGLDLSVEHLVDTPRRMVDALVELTSPPEFELTTFPNDDEYDELVLVEDIPVQSLCEHHMLPFVGVAHVGYLPGGRILGLSKFARMVDHHARRPQTQERLTKRIADHLQRALEPRGVGVVIDAQHTCMSLRGARATGSRTLTSALFGQLRDDARSRAEFLDLTRGRR

SEQ ID NO: 11643 - protein, 208 aa, Nocardioides albidus
  misc_feature (1)..(208): tr|A0A5C4VK43|A0A5C4VK43_9ACTN GTP cyclohydrolase 1 OS= Nocardioides albidus OX=1517589 GN=folE PE=3 SV=1
MIDPVSAPDRGPQDIPPFDQPRAEAAVRELLAAIGEDPDREGLRDTPARVARAYAELTAGLRMVPEDVLTTTFDLGHDEMVLVRDIELWSMCEHHLVPFTGVAHVGYIPAETGKITGLSKLARLVDVYAKRPQVQERLTTQVADSLMELLDARGVIVVIEAEHLCMTMRGVRKAGARTITSAVRGTMLSDPATRAEAMALIHSSRGRG

SEQ ID NO: 11644 - protein, 206 aa, Nocardioides alpinus
  misc_feature (1)..(206): tr|A0A1I1AS46|A0A1I1AS46_9ACTN GTP cyclohydrolase 1 OS= Nocardioides alpinus OX=748909 GN=folE PE=3 SV=1
MTDPVSTPERAPEDIPAFDHPRAEAAIRELLAAMGEDPDREGLLDTPARVARAYAELTQGIRQTAHDVLTTTFDLGHNEMVLVRDIELWSMCEHHLVPFTGVAHVGYIPARTGKITGLSKLARLVDVYAKRPQVQERLTTQVADSLMEILEARGVIVVIEAEHLCMTMRGVKKAGARTITSAVRGSFLKNQATRAEAMALIHSGTR

SEQ ID NO: 11645 - protein, 218 aa, Nocardioides bacterium
  misc_feature (1)..(218): tr|A0A3D0RU99|A0A3D0RU99_9ACTN GTP cyclohydrolase 1 OS= Nocardioides bacterium OX=1565122 GN=folE PE=3 SV=1
MTSTATNATNQATRPAVEQVAARRWRPRVTHTRPEIDSAAAEQAAADLLTALGLDLTDENLAETPRRMARALIEMTSGSDFELTTFPNDEEYDELVLVRDIPLRSVCEHHMLPFVGVAHVGYLPGDRILGLSKFARMVDLHARRPQTQERLTKRIADHLQDEMQPRGVGVVIEAEHTCMSLRGARAAGARTTTSALFGRLRDDPRSRAEFLALTRRTP

SEQ ID NO: 11646 - protein, 205 aa, Nocardioides bacterium
  misc_feature (1)..(205): tr|A0A4S5APC8|A0A4S5APC8_9ACTN GTP cyclohydrolase 1 OS= Nocardioides bacterium OX=1565122 GN=folE PE=3 SV=1
MADPIFTPQREPEDVPPYDHERAEAAVRELLIAIGEDPEREGLQQTPARVARAYAELTAGMRMRPEDVLTTTFDIGHDEMVLVRDIELWSMCEHHLVPFTGVAHVGYIPAESGKITGLSKLARLVDLYAKRPQVQERLTTQIADSLMELLEARGVIVVIEAEHLCMTMRGVRKAGARTITSAVRGLMHRSATRSEAMALIHSPRH

SEQ ID NO: 11647 - protein, 204 aa, Nocardioides baekrokdamisoli
  misc_feature (1)..(204): tr|A0A3G9J2W7|A0A3G9J2W7_9ACTN GTP cyclohydrolase 1 OS= Nocardioides baekrokdamisoli OX=1804624 GN=folE PE=3 SV =1
MADPISLSEPAERPAFDQARAEAAVRELLIAIGEDPDREGLLETPARVARAYEELTSGLRQKPDDVLTTVFDIGHDELVLVRDIELWSMCEHHLVPFTGVAHVGYIPAESGKITGLSKLARLVDVYAKRPQVQERLTTQVADALMEILEARGVIVVIEAEHLCMTMRGVRKAGARTITSAVRGSMRSNASTRAEAMSLIRGGTR

SEQ ID NO: 11648 - protein, 206 aa, Nocardioides caeni
  misc_feature (1)..(206): tr|A0A4S8NDC9|A0A4S8NDC9_9ACTN GTP cyclohydrolase 1 OS= Nocardioides caeni OX=574700 GN=folE PE=3 SV=1
MPDPISLPDRGASDAPEFDHGRAEAAVRELLAAIGEDPEREGLRDTPARVARAYAELTAGLRMRPEDVLTTTFDLGHDEMVLVRDIELWSMCEHHLVPFTGVAHVGYIPAESGKITGLSKLARLVDVYAKRPQVQERLTTQVADSLVEILEARGVIVVIEAEHLCMTMRGVRKAGARTITSAVRGSFLTDQATRAEAMALIHSPRG

SEQ ID NO: 11649 - protein, 202 aa, Nocardioides currus
  misc_feature (1)..(202): tr|A0A2R7Z2A8|A0A2R7Z2A8_9ACTN GTP cyclohydrolase 1 OS= Nocardioides currus OX=2133958 GN=folE PE=3 SV=1
MTDPISLEERDVPDFDHDRAEAAVRELLAAIGEDPDREGLRDTPARVARAYAELTQGLRQRPEDVLTTTFDLGHDEMVLVRDIELWSMCEHHLVPFTGVAHVGYIPAATGKITGLSKLARLVDVYAKRPQVQERLTTQVADALMDILDARGVIVVIEAEHLCMTMRGVRKAGARTITSAVRGTMLTKQATRAEAMALINSRR

SEQ ID NO: 11650 - protein, 201 aa, Nocardioides daphniae
  misc_feature (1)..(201): tr|A0A4P7UF84|A0A4P7UF84_9ACTN GTP cyclohydrolase 1 OS= Nocardioides daphniae OX=402297 GN=folE PE=3 SV=1
MVAPERDPADVPAFDHARAEAAVRELLAAMGEDVEREGLRDTPARVARAYAELTVGLHQRPEDVLTTTFDLGHDEMVLVRDIELWSMCEHHLVPFTGVAHVGYIPSTSGKITGLSKMARLVDVYSKRPQVQERLTTQIADAMTDILEARGVIVVIEAEHLCMTMRGVRKAGARTITSAVRGQMRDAATRSEAMALIRSGTR

SEQ ID NO: 11651 - protein, 206 aa, Nocardioides dokdonensis
  misc_feature (1)..(206): tr|A0A1A9GIF8|A0A1A9GIF8_9ACTN GTP cyclohydrolase 1 OS= Nocardioides dokdonensis FR1436 OX=1300347 GN=folE_1 PE =3 SV=1
MTDPVTVAERDPGDIPDFDHARAEAAVRELLLAIGEDPDREGLLETPARVARAYAETTAGLRMRAEDVLTTTFDLGHGEMVLVRDIELWSMCEHHLVPFTGVAHVGYIPAESGKITGISKLARLVDVYAQRPQVQERLTTQIVESLMRILDARGAVVVIEAEHLCMTMRGVRKAGARTITSAVRGTMLTDQATRAEAMALIHGTTR

SEQ ID NO: 11652 - protein, 213 aa, Nocardioides dokdonensis
  misc_feature (1)..(213): tr|A0A1A9GJW6|A0A1A9GJW6_9ACTN GTP cyclohydrolase 1 OS= Nocardioides dokdonensis FR1436 OX=1300347 GN=folE_2 PE =3 SV=1
MTALTAMTTATRTTPSCAPAPDTEAATRAAAALLTALGVDWDTVHMARTPARLAAAYAEMLTAPAFELTTFPNDQGHDGQGHDELVVVRDIAFQSLCEHHLLPFVGVAHVGYLPGERLLGLSKFARLVDFTARAPQTQERLTQQVARQLEKHLRPRGVGVVLEADHSCMTLRGARAGGARTVTSTLLGTLRHDPAARAEFLDLARPARSPGVR

SEQ ID NO: 11653 - protein, 206 aa, Nocardioides exalbidus
  misc_feature (1)..(206): tr|A0A1H4R930|A0A1H4R930_9ACTN GTP cyclohydrolase 1 OS= Nocardioides exalbidus OX=402596 GN=folE PE=3 SV=1
MTDPVSIPERAPEDVPVFDHERAEAAVRELLFAIGEDPDREGLLETPARVARAYAELTQGLRQSAADVLTTTFDLGHEEMVLVRDIELWSMCEHHLVPFTGVAHVGYIPAETGKITGLSKLARLVDVYAKRPQVQERLTTQVADSLLEILEARGVIVVIEAEHLCMTMRGVRKAGARTITSAVRGSFLTDSATRAEAMALIRSGTR

SEQ ID NO: 11654 - protein, 206 aa, Nocardioides ganghwensis
  misc_feature (1)..(206): tr|A0A4Q2SFF2|A0A4Q2SFF2_9ACTN GTP cyclohydrolase 1 OS= Nocardioides ganghwensis OX=252230 GN=folE PE=3 SV=1
MTDPITVPERAPEDVPDFDHARAEAAVRELLFAIGEDPDREGLRETPARVARAYAELTHGLRQTAEDVLTTTFDLGHEEMILVRDIELWSMCEHHLVPFTGVAHVGYIPADTGKITGLSKLARLVDVYAKRPQVQERLTTQVADSLMEILGARGVIVVIEAEHLCMTMRGVKKAGARTITSAVRGGFLTNQATRAEAMTLIHSGTR

SEQ ID NO: 11655 - protein, 206 aa, Nocardioides glacieisoli
  misc_feature (1)..(206): tr|A0A4Q2RSE9|A0A4Q2RSE9_9ACTN GTP cyclohydrolase 1 OS= Nocardioides glacieisoli OX=1168730 GN=folE PE=3 SV=1
MTDPITVPERPVEDVPEFDHARAEAAVRELLAAIGEDPDREGLRDTPARVARAYAELTQGLRQTAQEVLTTTFDLGHDEMVLVRDIELWSMCEHHLVPFTGVAHVGYIPADTGKITGLSKLARLVDVYAKRPQVQERLTTQVADSLMEILGARGVIVVIEAEHLCMTMRGVKKAGARTITSAVRGSFLTHQATRAEAMALIHSGTR

SEQ ID NO: 11656 - protein, 201 aa, Nocardioides immobilis
  misc_feature (1)..(201): tr|A0A417Y2G3|A0A417Y2G3_9ACTN GTP cyclohydrolase 1 OS= Nocardioides immobilis OX=2049295 GN=folE PE=3 SV=1
MHTPDRDPAQVPPYDHVRAEAAVRELLIAVGEDPEREGLLETPARVARAYAELTAGLRLRPEDVLTTTFDLGHDEMVLVRDIELWSMCEHHLVPFTGVAHVGYIPAETGKITGLSKLARLVDVYAKRPQVQERLTTQIADALMRILEARGVIVVVEAEHLCMTMRGVRKAGARTITSAIRGSMHNAATRNEAMSLIMHGTR

SEQ ID NO: 11657 - protein, 212 aa, Nocardioides iriomotensis
  misc_feature (1)..(212): tr|A0A4Q5J9U8|A0A4Q5J9U8_9ACTN GTP cyclohydrolase 1 OS= Nocardioides iriomotensis OX=715784 GN=folE PE=3 SV=1
MQTDGHASGEITRITQEPRDNIPEFDQPRAEAAVRELLFAVGEDPDREGLRDTPARVARAYKELLSGMRLGAEDVLTTTFDLGHDELILVRDIELWSMCEHHLVPFTGVAHIGYIPNDNGRITGLSKLARLVDVYAKRPQVQERLTTQVADALMEILEAQGAIVVIEAEHLCMTMRGVKKPGAKTITSAIRGSMHRAATRQEAMSLIMRGTR

SEQ ID NO: 11658 - protein, 208 aa, Nocardioides iriomotensis
  misc_feature (1)..(208): tr|A0A4Q5J0L4|A0A4Q5J0L4_9ACTN GTP cyclohydrolase 1 OS= Nocardioides iriomotensis OX=715784 GN=folE PE=3 SV=1
MSSRQPEAHVLPLRARMSAPHVDVDRETAEAAATTLLAALGLPLDSPHMRETPRRMVAAYAEMLTAPSFDFTTFPNSEEYDELVVVEDIPVRSLCEHHMLPFVGVAHVGYLPADHVLGLSKLARVVDLYSHRAQTQERLTKQVAEHLQEHLTPRGVGVVIEAEHTCMTLRGVRAPGTRTVTSALLGTLRTHPSSRAEFLDLVRGTRPR

SEQ ID NO: 11659 - protein, 206 aa, Nocardioides lianchengensis
  misc_feature (1)..(206): tr|A0A1G6PJ71|A0A1G6PJ71_9ACTN GTP cyclohydrolase 1 OS= Nocardioides lianchengensis OX=1045774 GN=folE PE=3 SV= 1
MTDPVSSPVRRPEDVPAFDHARAEAAVRELLFAIGEDPDREGLLETPARVARAYAELTAGIRMTPEDVLTTTFDLGHDEMVLVRDIELWSMCEHHLVPFTGVAHVGYIPAETGKITGLSKLARLVDVYAKRPQVQERLTTQVADALVEILEARGVIVVIEAEHLCMTMRGVRKAGARTITSAVRGSFLNSPSTRAEAMALIHSPRR

SEQ ID NO: 11660 - protein, 212 aa, Nocardioides luteus
  misc_feature (1)..(212): tr|A0A1J4NAW3|A0A1J4NAW3_9ACTN GTP cyclohydrolase 1 OS= Nocardioides luteus OX=1844 GN=folE PE=3 SV=1
MSDTFDDVAPVHVPERDVADVPVFDQKRAEAAVRELLYAIGEDPDREGLLETPARVARAYQEVTRGLHQTPEEVLTTTFDLGHDEMVLVRDIELWSMCEHHLVPFTGVAHVGYIPAESGKITGLSKLARLVDVYAKRPQVQERLTTQVADALTEILEARGVIVVIEAEHLCMTMRGVKKAGARTITSAVRGSMRSNATTRAEAMALIRGGTR

SEQ ID NO: 11661 - protein, 206 aa, Nocardioides oleivorans
  misc_feature (1)..(206): tr|A0A4Q2RXW7|A0A4Q2RXW7_9ACTN GTP cyclohydrolase 1 OS= Nocardioides oleivorans OX=273676 GN=folE PE=3 SV=1
MTDPISTPVRAPEDVPVFDHARAEAAVRELLVAIGEDPDREGLLETPARVARAYAEVTQGLRQSAEEVLTTTFDLGHEEMVLVRDIELWSMCEHHLVPFTGVAHVGYIPAVTGKITGLSKLARLVDVYAKRPQVQERLTTQVADSLMEILEARGVIVVIEAEHLCMTMRGVRKAGARTITSAVRGTMLTDQATRAEAMSLIRSGTR

SEQ ID NO: 11662 - protein, 204 aa, Nocardioides psychrotolerans
  misc_feature (1)..(204): tr|A0A1I3MZF1|A0A1I3MZF1_9ACTN GTP cyclohydrolase 1 OS= Nocardioides psychrotolerans OX=1005945 GN=folE PE=3 SV =1
MTDPISLTIDPSTVPEFDHPRAEAAIRELLYAIGEDPTREGLLDTPARVARAYAELTQGLRQTPEEVLTTTFDLGHDEMVLVRDIELWSMCEHHLVPFTGVAHVGYIPAESGLITGLSKLARLVDVYAKRPQVQERLTTQVADALMEILEARGVIVVIEAEHLCMTMRGVRKAGARTITSAVRGIMHNGPTRAEAMALIHSSRR

SEQ ID NO: 11663 - protein, 206 aa, Nocardioides simplex
  misc_feature (1)..(206): tr|A0A0A1DKZ6|A0A0A1DKZ6_NOCSI GTP cyclohydrolase 1 OS= Nocardioides simplex OX=2045 GN=folE PE=3 SV=1
MTDPISVPDRGPQDVPPFDHDRAEAAVRELLAAIGEDPDREGLRETPARVARAYAELTAGLRMAPEDVLTTTFDLGHDEMVLVRDIELWSMCEHHLVPFTGVAHVGYIPAESGKITGLSKLARLVDLYAKRPQVQERLTTQVADSLMELLDARGVIVVIEAEHLCMTMRGVRKAGARTITSAVRGSMLSNATTRAEAMALIHSPRG

SEQ ID NO: 11664 - protein, 200 aa, Nocardioides sp.
  misc_feature (1)..(200): tr|A0A2T8FA39|A0A2T8FA39_9ACTN GTP cyclohydrolase 1 OS= Nocardioides sp. WSJ-1 OX=2138300 GN=folE PE=3 SV=1
MAAPVRDPDDVPPFDHARAEAAVRELLIAIGEDPEREGLRETPARVARAYAEVTHGLRQRPEDVLTTTFDIGHDEMVLVRDIELWSMCEHHLVPFTGVAHVGYIPAESGKITGLSKLARLVDVYAKRPQVQERLTTQVADALMELLEARGVIVVIEAEHLCMTMRGVRKAGARTITSAVRGQMHNAATRAEAMALIHRNP

SEQ ID NO: 11665 - protein, 206 aa, Nocardioides sp.
  misc_feature (1)..(206): tr|A0A4Q2T5Z0|A0A4Q2T5Z0_9ACTN GTP cyclohydrolase 1 OS= Nocardioides sp. HLT2-9 OX=1168729 GN=folE PE=3 SV=1
MTDPVTVPERSPEDVPDFDHPRAEAAIRELLAAMGEDPTREGLLDTPARVARAYAELTQGLRQTAHDVLTTTFDLGHNEMVLVRDIELWSMCEHHLVPFTGVAHVGYIPAVTGKITGLSKLARLVDVYSKRPQVQERLTTQIADSLMEILEARGVVVVIEAEHLCMTMRGVKKAGARTITSAVRGTMLTDQATRAEAMALIRSGTR

SEQ ID NO: 11666 - protein, 204 aa, Nocardioides szechwanensis
  misc_feature (1)..(204): tr|A0A1H0C4J5|A0A1H0C4J5_9ACTN GTP cyclohydrolase 1 OS= Nocardioides szechwanensis OX=1005944 GN=folE PE=3 SV=1
MPDPISTPERAPRDIPDFDHDRAAAAVRELLIALGEDPDREGLKETPARVARAYAELTQGLRQAPEDVLTTTFDIGHDEMVLIRDIELWSMCEHHLVPFTGVAHVGYIPAESGKITGLSKLARLVDVYAKRPQVQERLTTQVADALMDILDARGVIVVIEAEHLCMTMRGVKKAGARTITSAVRGIMHNAATRSEAMALINRNH

SEQ ID NO: 11667 - protein, 202 aa, Nocardioides terrae
  misc_feature (1)..(202): tr|A0A1I1H8F3|A0A1I1H8F3_9ACTN GTP cyclohydrolase 1 OS= Nocardioides terrae OX=574651 GN=folE PE=3 SV=1
MIDPVTIQDAEPVGAFDKDRAEAAVRELLIAIGENPDREGLRETPARVARAYAELTAGLRMEAEDVLTTTFDLGHDEMILVRDIELWSMCEHHLVPFTGVAHVGYIPAESGKITGLSKLARLVDVYAKRPQVQERLTTQIADSLTRILDARGVIVVIEAEHLCMTMRGVKKAGARTITSAVRGTMRSNPTTRAEAMALIHRR

SEQ ID NO: 11668 - protein, 211 aa, Nocardioides terrae
  misc_feature (1)..(211): tr|A0A1I1LWX2|A0A1I1LWX2_9ACTN GTP cyclohydrolase 1 OS= Nocardioides terrae OX=574651 GN=folE PE=3 SV=1
MSHATIDPSVEPSHSRLRITHEPAAVDLVAAERAAADMLAALGLPIDGEDMFETPRRLVHAYAELLTVPEFDLTTFDNAASYDELVLVSDIPVRSLCEHHLLPFTGVAHVGYLPGERILGLSKFARTVDFFARRAQTQERLTAQIADHLHDRLAPLGVGVVIEAEHSCMSLRGARATGARTTTSTLRGRLREDAAARAEFLALARDGRSGR

SEQ ID NO: 11669 - protein, 195 aa, Nocardiopsaceae bacterium
  misc_feature (1)..(195): tr|A0A3N0DY81|A0A3N0DY81_9ACTN GTP cyclohydrolase 1 OS= Nocardiopsaceae bacterium YIM 96095 OX=2487137 GN=folE PE=3 SV=1
MVSSTNGSVDQPRIEKAVREILLAIGEDPDREGLQETPARVARAYEEQFAGLAQRPEDVLTTVFEAGHEEMVLVKDIELYSTCEHHLVPFYGSAHVGYIPNNRGQITGLSKLARLVDVYARRPQVQERLTSEVADAIQTTLEPRGVIVVIEAEHLCMTMRGVRKPGAKTVTSAVRGDFRNRDRTRAEAMSLILGH

SEQ ID NO: 11670 - protein, 188 aa, Nocardiopsis alba
  misc_feature (1)..(188): tr|J7L9U6|J7L9U6_NOCAA GTP cyclohydrolase 1 OS=Nocardio psis alba (strain ATCC BAA-2165 / BE74) OX=1205910 GN=f olE PE=3 SV=1
MDRERVARAVREILIAIGEDPDRDGLLETPDRVARAYEEQFAGLGQKPGDVLTTVFEAGHEEMVLVKDIELYSTCEHHLVPFYGVAHVGYIPGEDGRITGLSKLARLVDVYARRPQVQERLTGEVADAIMQHLEPRGVIVVIEAEHLCMTMRGVRKPGAQTVTSAVRGIFRSSDRTRAEAMSLILDRR

SEQ ID NO: 11671 - protein, 192 aa, Nocardiopsis dassonvillei
  misc_feature (1)..(192): tr|A0A223QE71|A0A223QE71_NOCDA GTP cyclohydrolase 1 OS= Nocardiopsis dassonvillei OX=2014 GN=CGQ36_15630 PE=3 S V=1
MTLADLPRDSTVRDPLEDVARRLLIEIGEDPDRSGLRDTPQRFARWWREFSDYQAGRVETSFPLHTDGQIVMVSDVTVWSLCEHHLLPFSCVLTIAYRPDERVLGLSKFARIAHRHAHRLQVQERLVRDIAEEVSKVAHTNDVAVIGRGEHLCMSMRGIRTPALMTCSAFDGIFRDYGPPRDELVRIALSGN

SEQ ID NO: 11672 - protein, 199 aa, Nocardiopsis dassonvillei
  misc_feature (1)..(199): tr|D7B845|D7B845_NOCDD GTP cyclohydrolase 1 OS=Nocardio psis dassonvillei (strain ATCC 23218 / DSM 43111 / CIP 107115 / JCM 7437 / KCTC 9190 / NBRC 14626 / NCTC 10488 / NRRL B-5397 / IMRU 509) OX=446468 GN=folE PE=
MSPTEDLPPRSVDRPRIERAVREILLAIGEDPDRDGLVKTPERVARAYEEQFAGLGQKPGDVLTTVFEADHEEMVLVKDIELYSTCEHHLVPFYGVAHVGYIPGADGRITGLSKLARLVDVYARRPQVQERLTGQVSDAIMEFLQPRGVIVVVEAEHLCMTMRGVRKPGAKTVTSAVRGIFRSSDRTRSEAMSLILSQR

SEQ ID NO: 11673 - protein, 198 aa, Nocardiopsis flavescens
  misc_feature (1)..(198): tr|A0A1M6P1I5|A0A1M6P1I5_9ACTN GTP cyclohydrolase 1 OS= Nocardiopsis flavescens OX=758803 GN=folE PE=3 SV=1
MTGAQAPGGRVDRERIESAVREILIAIGEDPDRDGLVETPERVARAYEEQFAGLGQKPGDVLTTVFEAGHQELVLVKDIELYSTCEHHLVPFYGVAHVGYIPGSDGRITGLSKLARLVDIYARRPQVQERLTGQVADAVMEHLNPRGVIVVVEAEHLCMTMRGVRKPGAQTVTSAVRGIFRGSDRTRAEAMSLILDRR

SEQ ID NO: 11674 - protein, 198 aa, Nocardiopsis gilva
  misc_feature (1)..(198): tr|A0A223SEJ3|A0A223SEJ3_9ACTN GTP cyclohydrolase 1 OS= Nocardiopsis gilva YIM 90087 OX=1235441 GN=folE PE=3 SV =1
MFTTEAPAAGVDQPRIEKAVREILLAIGEDPDRDGLLDTPARVARAYQEQFAGLSQRPEDVLTTVFEAGHDEMVLVKDIEMYSTCEHHLVPFHGSAHIGYIPNTKGQITGLSKLARLVDVYARRPQVQERLTTEIADALMEYLDPRGVIVVIEAEHLCMTMRGVRKPGAKTVTSAVRGVFAKRDRTRAEAMSLIIGHS

SEQ ID NO: 11675 - protein, 200 aa, Nocardiopsis sinuspersici
  misc_feature (1)..(200): tr|A0A1V3C7C1|A0A1V3C7C1_9ACTN GTP cyclohydrolase 1 OS= Nocardiopsis sinuspersici OX=501010 GN=folE PE=3 SV=1
MSSEDEQLPPRSVDRPRVEKAIREILIAIGEDPDRDGLLKTPERVARAYEEQFAGLGQKPGDVLTTVFEADHEEMVLVKDIELYSTCEHHLVPFYGVAHVGYIPGADGRITGLSKLARLVDVYARRPQVQERLTGQVSDAIMGHLQPRGVIVVIEAEHLCMTMRGVRKPGAKTVTSAVRGIFRSSDRTRSEAMSLILDRR

SEQ ID NO: 11676 - protein, 193 aa, Nocardiopsis sp.
  misc_feature (1)..(193): tr|A0A0M8XZZ1|A0A0M8XZZ1_9ACTN GTP cyclohydrolase 1 OS= Nocardiopsis sp. NRRL B-16309 OX=1519494 GN=folE PE=3 S V=1
MEPRPVDRERIERAVREILIAIGEDPERDGLVKTPERVARAYEEQFSGLGQKPGDVLTTVFEAGHEEMILVKDIELYSTCEHHLVPFYGVAHVGYIPAADGRITGLSKLARLVDVYARRPQVQERLTGQVADAIMDHLQPRGVIVVVEAEHLCMTMRGVRKPGAKTVTSAVRGIFRGSDRTRAEAMSLILDRR

SEQ ID NO: 11677 - protein, 199 aa, Nocardiopsis sp.
  misc_feature (1)..(199): tr|A0A495L204|A0A495L204_9ACTN GTP cyclohydrolase 1 OS= Nocardiopsis sp. Huas11 OX=2183912 GN=folE PE=3 SV=1
MTAMEGLEPRPVDRERIERAVREILIAIGEDPERDGLVKTPERVARAYEEQFSGLGQKPGDVLTTVFEAGHEEMILVKDIEMYSTCEHHLVPFYGVAHVGYIPAADGRITGLSKLARLVDVYARRPQVQERLTGQVADAIMDNLQPRGVIVVVEAEHLCMTMRGVRKPGAKTVTSAVRGIFRGSDRTRAEAMSLIFDRR

SEQ ID NO: 11678 - protein, 235 aa, Nodularia sp.
  misc_feature (1)..(235): tr|A0A218PX82|A0A218PX82_9CYAN GTP cyclohydrolase 1 OS= Nodularia sp. NIES-3585 OX=1973477 GN=folE_1 PE=3 SV=1
MTIASSNGSNRSKSPLSPDLIEAISPKPDRNTHNGRQPDLHPPSGEEMESMMDGVRALIVGVGEDPEREGLLKTPKRVAEAMQFLTSGYNQSLEELLNDAIFDEGHNEMVLVRDINFFSLCEHHMLPFMGKAHVAYIPNQKVVGLSKLARIVEMFSRRLQVQERLTRQIAEAIQTILEPQGVAVVMEATHMCMAMRGVQKPGSWTVTSAMVGAFDEQQKTREEFFNLIRHQPSFY

SEQ ID NO: 11679 - protein, 216 aa, Nodularia sp.
  misc_feature (1)..(216): tr|A0A218Q691|A0A218Q691_9CYAN GTP cyclohydrolase 1 OS= Nodularia sp. NIES-3585 OX=1973477 GN=folE_2 PE=3 SV=1
MTLSIRPDLTSADQVLSSLTAQKQPKVTEAEMMQAVRTLLIGLGEDPDREGLKDTPKRVMKALQFLTKGYTESLDELLNGAVFTEDANEMVLVRDIDIFSSCEHHILPIIGRAHVAYIPNGKVIGLSKIARICEMYGRRLQVQERLTTQIADALQNLLKPQGVAVVVEATHMCMVMRGVQKPGSWTLSSAMRGVFAEDSKTRDEFMNLIRHNANFH

SEQ ID NO: 11680 - protein, 236 aa, Nodularia spumigena
  misc_feature (1)..(236): tr|A0A2S0Q457|A0A2S0Q457_NODSP GTP cyclohydrolase 1 OS= Nodularia spumigena UHCC 0039 OX=1914872 GN=folE PE=3 S V=1
MPTEISQLTNSAKHSYKTQKMTLSIRPDLTSADQVISSLTAQKQPKVTEAEMMQAVRTLLIGLGEDPDREGLKDTPKRVMKALQFLTKGYTDSLDELLNGAVFTEDANEMVLVRDIDIFSSCEHHILPIIGRAHVAYIPNGKVIGLSKIARICEMYGRRLQVQERLTTQIADALQGLLKPQGVAVVVEATHMCMVMRGVQKPGSWTVSSAMRGVFAEDSRTREEFMNLIRHNANFH

SEQ ID NO: 11681 - protein, 235 aa, Nodularia spumigena
  misc_feature (1)..(235): tr|A0A166JFF8|A0A166JFF8_NODSP GTP cyclohydrolase 1 OS= Nodularia spumigena CENA596 OX=1819295 GN=folE PE=3 SV= 1
MTIASSNGSNRSKSPLSQDLVEAISPKPDRNTHNGRQPNLHPPTGEEMESMMDGVRAIIVGVGEDPEREGLLKTPKRVAEAMQFLTSGYNQSLEELLNDAIFDEGHNEMVLVRDINFFSLCEHHMLPFMGKAHVAYIPNQKVVGLSKLARIVEMYSRRLQVQERLTRQIAEAIQTILEPQGVAVVMEATHMCMAMRGVQKPGSWTVTSAMVGAFDEEQKTREEFFNLIRHQPSFY

SEQ ID NO: 11682 - protein, 198 aa, Nonlabens agnitus
  misc_feature (1)..(198): tr|A0A2S9WTC9|A0A2S9WTC9_9FLAO GTP cyclohydrolase 1 OS= Nonlabens agnitus OX=870484 GN=folE PE=3 SV=1
MPYRVFEEYNIEVTEDIQQKYKSVITDLGEDVEREGLLKTPERAAKAMQFLTSGYDQDASEVLKSAMFAEDYQDMVIIKDIELYSLCEHHMLPFFGKAHIAYIPNGHIVGLSKIPRIVDIFARRLQVQERLTHDILECIHQTLKPKGVAVVIEASHMCMMMRGVQKQNSSTTTSGFRGQFEKVETRSEFLHLISSDLH

SEQ ID NO: 11683 - protein, 223 aa, Nonlabens agnitus
  misc_feature (1)..(223): tr|A0A2S9WUS8|A0A2S9WUS8_9FLAO GTP cyclohydrolase 1 OS= Nonlabens agnitus OX=870484 GN=folE PE=3 SV=1
MKVEDFLDNMEDQDHLSSNEQTPLREDAFQLSDAEKIESIKKNVHEILVTLGMDMTDDSLKGTPNRVAKMFVNEIFGGLRPQMKPSASTFENKYKYNEMLVEKNIVLYSTCEHHLLPIVGRAHVAYISNGNVVGLSKMNRIVDYYAKRPQVQERLNIQIVRELQQVLNTEDVACVIDAKHLCVNSRGIRDIDSSTVTGEFGGKFKDPQVKSEFLDYIKLETKF

SEQ ID NO: 11684 - protein, 198 aa, Nonlabens arenilitoris
  misc_feature (1)..(198): tr|A0A2S7UCG6|A0A2S7UCG6_9FLAO GTP cyclohydrolase 1 OS= Nonlabens arenilitoris OX=1217969 GN=folE PE=3 SV=1
MPYRVFEEYNIEVTEDIKNQYKEVIQNIGEDVEREGLIKTPERAAKAMQFLTSGYDSDPAEILKGAMFAEDYNDMVIIKDIELYSLCEHHMLPFFGKAHIAYIPNGHIVGLSKIPRIVDVFARRLQVQERLTHDILECIHNTLKPMGVAVVIEASHMCMMMRGVQKQNSVTTTSGFRGQFEKVETRNEFLKLITAKLH

SEQ ID NO: 11685 - protein, 223 aa, Nonlabens arenilitoris
  misc_feature (1)..(223): tr|A0A2S7UF14|A0A2S7UF14_9FLAO GTP cyclohydrolase 1 OS= Nonlabens arenilitoris OX=1217969 GN=folE PE=3 SV=1
MKIEDLINNVDDHDHLSSNEQTPLRPDAFEKSDAEKIELIKKDVHNILETLGMDMTDDSLKGTPNRVAKMFVKEIFGGLRPDAKPSASTFDNKYKYGEMLVEKNIVLYSTCEHHLLPIVGRAHVAYISNGSVVGLSKMNRIVDYYAKRPQVQERLNIQIVRELQQVMNTEDVACVIDAKHLCVNSRGIRDIESSTVTGEFGGAFKDPIVRREFLDYIKMETKF

SEQ ID NO: 11686 - protein, 223 aa, Nonlabens dokdonensis
  misc_feature (1)..(223): tr|A0A1Z8B2A9|A0A1Z8B2A9_9FLAO GTP cyclohydrolase 1 OS= Nonlabens dokdonensis OX=328515 GN=folE PE=3 SV=1
MKIEDLLENIEDNDHLSSNEQTPLRPDAFDMSDADKIASIKKDVHHILETLGMDMTDDSLKGTPNRVAKMFVNEIFGGLRPDRKPSASTFENKYKYNEMLVEKDIVVYSTCEHHLLPIVGRAHVAYISNGSVVGLSKMNRIVDYYAKRPQVQERLNIQIVRELQQVMNTEDVACIIDAKHLCVNSRGIRDIESSTVTGEFGGKFKDPAVKREFLDYIKMDTKF

SEQ ID NO: 11687 - protein, 199 aa, Nonlabens dokdonensis
  misc_feature (1)..(199): tr|A0A1Z8B7L7|A0A1Z8B7L7_9FLAO GTP cyclohydrolase 1 OS= Nonlabens dokdonensis OX=328515 GN=folE PE=3 SV=1
MAPYRTFEEYNIKTTEEIKDKYREVITEIGEDVEREGLLKTPERAAKAMQFLTSGYDIDPAEILKGAMFAEDYNDMVIIKDIELYSLCEHHMLPFFGKAHIAYIPNGHIVGLSKIPRIVDVFARRLQVQERLTHDILECIDNTLNPKGVAVVIEASHMCMMMRGVQKQNSSTTTSGFRGQFENSETRAEFMTLISSQLH

SEQ ID NO: 11688 - protein, 223 aa, Nonlabens marinus
  misc_feature (1)..(223): tr|W8VRA3|W8VRA3_9FLAO GTP cyclohydrolase 1 OS=Nonlaben s marinus S1-08 OX=1454201 GN=folE PE=3 SV=1
MNVEDFLENIEDQDHLSANEQTPLRDNAFEMTDGEKIESIKKNVYEILHTLGMDMSDDSLKGTPNRVAKMFVNEIFGGLKPERKPSASTFENKYKYNEMLVEKNIVLYSTCEHHLLPIVGRAHVAYISNGNVVGLSKMNRIVDYYAKRPQVQERLNIQIVRELQKVLNTDDVACVIDAKHLCVNSRGIRDIDSSTVTGEFGGKFKDPQTKSEFLDYIKLETKF

SEQ ID NO: 11689 - protein, 198 aa, Nonlabens marinus
  misc_feature (1)..(198): tr|W8VWP3|W8VWP3_9FLAO GTP cyclohydrolase 1 OS=Nonlaben s marinus S1-08 OX=1454201 GN=folE PE=3 SV=1
MPYRVFEEFNIQVTDDIKENYKSVIEHLGEDVSREGLVKTPERAAKAMQFLTSGYDQDPGAVLKGAMFAEDYQDMVIIKDIELYSLCEHHMLPFFGKAHIAYIPNGHIVGLSKIPRIVDIFARRLQVQERLTHDILECIHSTLKPQGVAVVIEASHMCMMMRGVQKQNSVTTTSGFRGQFEKEGTRSEFLNLISAKLH

SEQ ID NO: 11690 - protein, 235 aa, Nonlabens sediminis
  misc_feature (1)..(235): tr|A0A090Q197|A0A090Q197_9FLAO GTP cyclohydrolase 1 OS= Nonlabens sediminis OX=319236 GN=folE PE=3 SV=1
MKNKELEVDELITNDNLLDNLTFDEIGDDHLFTGMETPMKADAFVMSDDEKKDKIANLFSQIMDVMGLDLTDDSLKGTPRRVAKMYIDEIFSGLNPANKPKIALFDNKYQYNQMLVEKNITFYSNCEHHFVPIIGKAHVAYISSGRVIGLSKLNRIVQYYAKRPQVQERLTNQIGTDLQEILNTEDVAVVIDAKHLCVSSRGVKDDTSSTVTAFYGGKFNDDEKIRQLQNYIYNQ

SEQ ID NO: 11691 - protein, 223 aa, Nonlabens sediminis
  misc_feature (1)..(223): tr|A0A090PZK8|A0A090PZK8_9FLAO GTP cyclohydrolase 1 OS= Nonlabens sediminis OX=319236 GN=folE PE=3 SV=1
MKVEDLLDDINDHDHSWSSEETPLREDAFSLTDEEKIESIKKDVHNILQTLGMDMTDDSLQGTPKRVAKMFVNEIFGGLRPDKKPKASTFDNKYKYNEMLVEKNITLYSTCEHHLLPIVGRAHVAYISNGTVVGLSKMNRIVDYYAKRPQVQERLNIQIVRELQRVLGTENVACVIDAKHLCVNSRGIRDIESSTVTGEFGGEFKKPEVKKEFLDYISLETKF

SEQ ID NO: 11692 - protein, 199 aa, Nonlabens sp.
  misc_feature (1)..(199): tr|A0A2K8X9W7|A0A2K8X9W7_9FLAO GTP cyclohydrolase 1 OS= Nonlabens sp. MB-3u-79 OX=2058134 GN=folE PE=3 SV=1
MAPYRVFEEYNIKITDEIKSKYRDVITELGEDVEREGLVKTPERAAKAMQFLTSGYDIDPAEILRGAMFAEDYHDMVIIKDIELYSLCEHHMLPFFGKAHIAYIPNGHIVGLSKIPRIVDVFARRLQVQERLTHDILECIDKTLKPKGVAVVIEASHMCMMMRGVQKQNSATTTSGFRGQFQKVETRTEFMNLISSKLH

SEQ ID NO: 11693 - protein, 198 aa, Nonlabens sp.
  misc_feature (1)..(198): tr|A0A0Q0XVB9|A0A0Q0XVB9_9FLAO GTP cyclohydrolase 1 OS= Nonlabens sp. YIK11 OX=1453349 GN=folE PE=3 SV=1
MPYRVFEEYNIEVTDDIREKYKSVITDLGEDVEREGLLKTPERAAKAMQFLTSGYDQDAAEVLKSAMFAEDYQDMVIIKDIELYSLCEHHMLPFFGKAHIAYIPNGHIVGLSKIPRIVDIFARRLQVQERLTHDILECIHQTLKPKGVAVVIEASHMCMMMRGVQKQNSSTTTSGFRGQFEKVETRSEFLHLISSDLH

SEQ ID NO: 11694 - protein, 235 aa, Nonlabens spongiae
  misc_feature (1)..(235): tr|A0A1W6MPE9|A0A1W6MPE9_9FLAO GTP cyclohydrolase 1 OS= Nonlabens spongiae OX=331648 GN=folE PE=3 SV=1
MKENVIALEEYLNENNVISNLSDEEIGDDHLFTGLETPMKVDAFKLSDEQKKQKIAEHFAEIMDILGLDLTDDSLKGTPSRVAKMYVEEIFSGLNPANKPKIALFENKYQYNQMLVEKNITFYSNCEHHFVPIIGKAHVAYISSGKVIGLSKLNRIVQYYAKRPQVQERLTNQIGVDLQKLLGTEDVAVIIDAKHLCVSSRGVKDDTSSTVTVFYGGQFKNDEKIFQLNNLISNS

SEQ ID NO: 11695 - protein, 223 aa, Nonlabens spongiae
  misc_feature (1)..(223): tr|A0A1W6MJD5|A0A1W6MJD5_9FLAO GTP cyclohydrolase 1 OS= Nonlabens spongiae OX=331648 GN=folE PE=3 SV=1
MKVEDFLEDIDNHDHMSSNEETPLREDAFKLSDDEKIASIQDDVFNILQTLGMDMTDDSLKGTPKRVAKMFVNEIFGGLRPDKKPSASTFDNKYKYGEMLVEKNIVLYSTCEHHLLPIVGRAHVAYISNGNVVGLSKMNRIVDYYAKRPQVQERLNIQIVRELQNVLNTEDVACVIDAKHLCVNSRGIRDIDSSTVTGEFGGAFKNLETKREFLDYIKMDTRF

SEQ ID NO: 11696 - protein, 235 aa, Nonlabens tegetincola
  misc_feature (1)..(235): tr|A0A2S7TEF7|A0A2S7TEF7_9FLAO GTP cyclohydrolase 1 OS= Nonlabens tegetincola OX=323273 GN=folE PE=3 SV=1
MKNKELEVDELITNDNLLNNLTFDEIGDDHLFTGMETPMKADAFVMSDDEKKDKIANLFSQIMDVMGLDLTDDSLKGTPRRVAKMYIDEIFSGLNPANKPKIALFDNKYQYNQMLVEKNITFYSNCEHHFVPIIGKAHVAYISSGRVIGLSKLNRIVQYYAKRPQVQERLTNQIGTDLQEILNTEDVAVVIDAKHLCVSSRGVKDDTSSTVTAFYGGKFNDDEKIRQLQNYIYNQ

SEQ ID NO: 11697 - protein, 223 aa, Nonlabens tegetincola; identical to SEQ ID NO: 11691
  misc_feature (1)..(223): tr|A0A2S7T331|A0A2S7T331_9FLAO GTP cyclohydrolase 1 OS= Nonlabens tegetincola OX=323273 GN=folE PE=3 SV=1

SEQ ID NO: 11698 - protein, 232 aa, Nonlabens ulvanivorans
  misc_feature (1)..(232): tr|A0A081DDJ1|A0A081DDJ1_NONUL GTP cyclohydrolase 1 OS= Nonlabens ulvanivorans OX=906888 GN=folE PE=3 SV=1
MAPFRANVHMKIEDLINNVDDHDHLSSNEQTPLRPDAFEKSDAEKIEIIKKDVHHILETLGMDMTDDSLKGTPNRVAKMFVKEIFGGLRPDAKPSASTFDNKYKYGEMLVEKNIVLYSTCEHHLLPIVGRAHVAYISNGSVVGLSKMNRIVDYYAKRPQVQERLNIQIVRELQQVMNTEDVACVIDAKHLCVNSRGIRDIESSTVTGEFGGAFKDPIVRREFLDYIKMETKF

SEQ ID NO: 11699 - protein, 198 aa, Nonlabens ulvanivorans
  misc_feature (1)..(198): tr|A0A081DEM1|A0A081DEM1_NONUL GTP cyclohydrolase 1 OS= Nonlabens ulvanivorans OX=906888 GN=folE PE=3 SV=1
MPYRVFEEYNIEVTEDIKNQYKGVIQNIGENVEREGLIKTPERAAKAMQFLTSGYDKDPAEILKGAMFAEDYNDMVIIKDIELYSLCEHHMLPFFGKAHIAYIPNGHIVGLSKIPRIVDVFARRLQVQERLTHDILECIHNTLKPLGVAVVIEASHMCMMMRGVQKQNSVTTTSGFRGQFEKVETRNEFLKLITAKLH

SEQ ID NO: 11700 - protein, 223 aa, Nonlabens xylanidelens
  misc_feature (1)..(223): tr|A0A2S6IH80|A0A2S6IH80_9FLAO GTP cyclohydrolase 1 OS= Nonlabens xylanidelens OX=191564 GN=folE PE=3 SV=1
MKIDDLLDNIEDHDHLSSNEQTPLRPDAFELSDADKIESIKKDVYSILETLGMDMTDDSIKGTPNRVAKMFVNEIFGGLRPDKKPNASTFENKYKYNEMLVEKDIVVYSTCEHHLLPIVGRAHVAYISNGSVVGLSKMNRIVDYYAKRPQVQERLNIQIVRELQKVMNTEDVACIIDAKHLCVNSRGIRDIESSTVTGEFGGKFKDPEVKREFLDYIKMETKF

SEQ ID NO: 11701 - protein, 227 aa, Nonlabens xylanidelens
  misc_feature (1)..(227): tr|A0A2S6IMM3|A0A2S6IMM3_9FLAO GTP cyclohydrolase 1 OS= Nonlabens xylanidelens OX=191564 GN=folE PE=3 SV=1
MINVVLKMDEKEIELIGDNHISHNTDTPMLPTAFDKTDAEKIKTIEYHFSEIMKELGLDLSDDSLSGTPYRVAKMYVKELFSGLNPENKPQLSVFENKYGYNKMLVDQNINIDSACEHHFLPITGFAHVAYVPKNKVIGLSKINRLVDYYARRPQVQERLSMQILKDLQESLDTEDVIVMISAKHLCVSSRGIKDKNSTTTTLVYGGCFEKKQYRADFLNIIDQPST

SEQ ID NO: 11702 - protein, 192 aa, Nonomuraea fuscirosea
  misc_feature (1)..(192): tr|A0A2T0MXP7|A0A2T0MXP7_9ACTN GTP cyclohydrolase 1 OS= Nonomuraea fuscirosea OX=1291556 GN=folE PE=3 SV=1
MTQHDVDLGRIEKAVREILYAIGEDPDRDGLIETPARVARAMAEQYSGLGQTPEEVLTKVFDVDHDEMVLVRDIEVYSTCEHHLVPFHGLAHVGYIPNTKGQVTGLSKLARLVDVYARRPQVQERMTSQIADALMRVLEPRGVIVVVEAEHLCMTMRGVRKPGAKTVTSAVRGSFRSSDSTRSEAMALILGR

SEQ ID NO: 11703 - protein, 215 aa, Nonomuraea fuscirosea
  misc_feature (1)..(215): tr|A0A2T0LXS8|A0A2T0LXS8_9ACTN GTP cyclohydrolase 1 OS= Nonomuraea fuscirosea OX=1291556 GN=folE PE=3 SV=1
MTTEAVRPPETAQFSRAESQSPEDVPGSPVNTPLVAGLIRELLIALGEDPQREGLLDTPARVASWWRSFLSPDPSAMATRFADTHASDQLVVVGGLNVWSLCEHHLLPMQLDAHVGYLTDGTVLGLSKFGRIAQRYAGRLQMQERFTRQLADEVATAVGSHDVAVTVHGVHLCMSMRGVRMESARTSTVHAAGRFRTDPLLSQQFLTLTTSGRTT

SEQ ID NO: 11704 - protein, 219 aa, Nonomuraea gerenzanensis
  misc_feature (1)..(219): tr|A0A1M4EE23|A0A1M4EE23_9ACTN GTP cyclohydrolase 1 OS= Nonomuraea gerenzanensis OX=93944 GN=folE PE=3 SV=1
MQRSRAGGMSESVAEPAVTPAEHQQRRLRVVRRGDGVDLEAAQRAVADLLTALGRDATSEHLADTPRRVAHAYAELLAPREFNLTTFPNEEGYDELVLARDIPVQSLCEHHLLPFQGVAHVGYLPGDRILGLSKLARVVELFARDLQVQERLTKQVADWLRQHLAPKGVGVVIEAEHLCMSMRGVRVRGSRTVTSALQGVLREDARSRQEFFALSGVHA

SEQ ID NO: 11705 - protein, 192 aa, Nonomuraea gerenzanensis
  misc_feature (1)..(192): tr|A0A1M4DWI4|A0A1M4DWI4_9ACTN GTP cyclohydrolase 1 OS= Nonomuraea gerenzanensis OX=93944 GN=folE PE=3 SV=1
MTQHDVDLGRIEKAVREILYAIGEDPDRDGLVETPSRVARAMAEQYSGLGQTPEDVLNKVFDVDHDEMVLVRDIEVYSTCEHHLVPFHGLAHVGYIPNDRGQVTGLSKLARLVDVYARRPQVQERMTSQIADALMRVLDPRGVIVVVECEHLCMTMRGVRKPGAKTVTSAVRGDFRTSDKTRSEAMALILGR

SEQ ID NO: 11706 - protein, 217 aa, Nonomuraea jiangxiensis
  misc_feature (1)..(217): tr|A0A1G8A3P4|A0A1G8A3P4_9ACTN GTP cyclohydrolase 1 OS= Nonomuraea jiangxiensis OX=633440 GN=folE PE=3 SV=1
MTQPPHTPLHMAPETPEPPKPAHTALHVVRSSGEPDLAAAELAAESFLHALGIETGSESMRGTPGRMARAYAELFSPRPFDLTTFPNDEGYDELVLARDIPLRSVCEHHLLPFVGRAHIGYLPGSRILGLSKLARTLEHFASRPQVQERLTKQVADWLQAQLDPKGVGVVIQAEHTCMTLRGAQAIGSTTTTSTLLGLLRTDARSRSEFLTLTGASS

SEQ ID NO: 11707 - protein, 192 aa, Nonomuraea jiangxiensis
  misc_feature (1)..(192): tr|A0A1G8XRJ6|A0A1G8XRJ6_9ACTN GTP cyclohydrolase 1 OS= Nonomuraea jiangxiensis OX=633440 GN=folE PE=3 SV=1
MTQHDVDLGRIEKAVREILYAIGEDPDRDGLVDTPSRVARAMAEQYSGLGQAPEDVLTKVFDVDHDEMVLVRDIEVYSSCEHHLVPFHGVAHVGYIPNDRGQVTGLSKLARLVDVFARRPQVQERMTSQIADALMRVLDPRGVIVVVEAEHLCMTMRGVRKPGAKTVTSAVRGDFRTSDKTRSEAMALILGR

SEQ ID NO: 11708 - protein, 192 aa, Nonomuraea maritima
  misc_feature (1)..(192): tr|A0A1G9E8V3|A0A1G9E8V3_9ACTN GTP cyclohydrolase 1 OS= Nonomuraea maritima OX=683260 GN=folE PE=3 SV=1
MTQYDVDLARIEKAVREILYAIGEDPDRDGLVETPARVARAMAEQYSGLGQAPEDVLTKVFDVDHDEMVLVRDIEVYSTCEHHLVPFHGLAHVGYIPNERGQVTGLSKLARLVDVFARRPQVQERMTSQIADALVRVLDPRGVIVVVEAEHLCMTMRGVRKPGAKTVTSAVRGNFRTSDSTRSEAMALILGR

SEQ ID NO: 11709 - protein, 192 aa, Nonomuraea polychroma
  misc_feature (1)..(192): tr|A0A438MIR4|A0A438MIR4_9ACTN GTP cyclohydrolase 1 OS= Nonomuraea polychroma OX=46176 GN=folE PE=3 SV=1
MTQHDVDLARIEKAVREILYAIGEDPDRDGLVETPARVARAMAEQYSGLGLTPEDVLNKVFDVDHDEMILVKDIEVYSNCEHHLVPFHGLAHVGYIPNESGQVTGLSKLARLVDVFARRPQVQERMTSQIADALMRVLEPRGVIVVIEAEHLCMTMRGVRKPGAKTVTSAVRGDFRTSDKTRSEAMALILGR

SEQ ID NO: 11710 - protein, 197 aa, Nonomuraea pusilla
  misc_feature (1)..(197): tr|A0A1H8CVA0|A0A1H8CVA0_9ACTN GTP cyclohydrolase 1 OS= Nonomuraea pusilla OX=46177 GN=folE PE=3 SV=1
MTRNDEVFDRVDLGRIEKAVREILYAIGEDPDRDGLLDTPSRVARAMAEQFSGLGQTPEDVLTKVFDVDHDEMVLVRDIEVYSTCEHHLVPFHGVAHVGYIPNERGQVTGLSKLARLVDVFARRPQVQERMTSQIADALMRVLEPRGVIVVVECEHLCMTMRGVRKPGAKTVTSAVRGDFRTSDKTRAEAMALILGR

SEQ ID NO: 11711 - protein, 192 aa, Nonomuraea solani
  misc_feature (1)..(192): tr|A0A1H6D6M0|A0A1H6D6M0_9ACTN GTP cyclohydrolase 1 OS= Nonomuraea solani OX=1144553 GN=folE PE=3 SV=1
MTQHDVDLGRIEKAVREILYAIGEDPERDGLLETPSRVARAMAEQYSGLGQTPEQVLNKVFDVDHDEMVLVRDIEVYSTCEHHLVPFHGLAHVGYIPNEKGQVTGLSKLARLVDVFARRPQVQERMTSQIADALMRVLEPRGVIVVIECEHLCMTMRGVRKPGAKTVTSAVRGDFRTSDKTRSEAMALILGR

SEQ ID NO: 11712 - protein, 264 aa, Nonomuraea solani
  misc_feature (1)..(264): tr|A0A1H6EZ45|A0A1H6EZ45_9ACTN GTP cyclohydrolase FolE2 OS=Nonomuraea solani OX=1144553 GN=folE2 PE=3 SV=1
MLTDVQAAHDSRGVPLDEVGIEGLRYPVLVADGQGAKRETVATATMAVDLGPEAKGAHLSRFIEVLHGSREQLTPATAAGLADELRLHMGSDRARVHLTFPYFLEREAPVTRARAFVEYTCSITARSSVAGTQLAWSVEVPVTSVCPCSKAISDRGAHNQRGHITIEVKDADHTSGPWFDELIDIAEAAASSPVYALLKRPDERHVTMAGYDNPVFVEDMVRNVCQVLSDCDRIAAYRVRAVNDESIHNHAAYAAITWSSPRGV

SEQ ID NO: 11713 - protein, 192 aa, Nonomuraea sp.
  misc_feature (1)..(192): tr|A0A5C8J8S1|A0A5C8J8S1_9ACTN GTP cyclohydrolase 1 OS= Nonomuraea sp. C10 OX=2600577 GN=folE PE=3 SV=1
MKAHEVDFGRIEKAVREILYAIGEDPDRDGLLETPARVARAYAEQFSGLGLTPEDVLNKVFDVDHDEMILVKDIEVYSTCEHHLVPFYGLAHVGYIPNEHGQVTGLSKLARLVDVYARRPQVQERMTSQIADGIMRVLEPRGVIVVVEAEHLCMTMRGVRKPGAKTVTSAVRGDFRTSDKTRAEAMALILGR

SEQ ID NO: 11714 - protein, 192 aa, Nonomuraea sp.
  misc_feature (1)..(192): tr|A0A4R5F3X9|A0A4R5F3X9_9ACTN GTP cyclohydrolase 1 OS= Nonomuraea sp. 6K102 OX=2530382 GN=folE PE=3 SV=1
MTQHDIDQGRIEKAVREILYAIGEDPDRDGLIDTPARVARAMAEQYSGLGQTPEDVLTKVFDVDHDEMVLVRDIEVYSTCEHHLVPFHGVAHVGYIPNQRGEVTGLSKLARLVDVFARRPQVQERMTSQIADALMRVLEPRGVIVVVEAEHLCMTMRGVRKPGAKTVTSAVRGDFRTSDKTRSEAMALILHR

SEQ ID NO: 11715 - protein, 209 aa, Nonomuraea wenchangensis
  misc_feature (1)..(209): tr|A0A1I0LJW4|A0A1I0LJW4_9ACTN GTP cyclohydrolase 1 OS= Nonomuraea wenchangensis OX=568860 GN=folE PE=3 SV=1
MSEILAVPAAASDQQQRRLRVVRSGGGVDVEAAQRAVADLLTALGRDAESEHLADTPRRVAHAYAELLAPREFNLTTFPNEEGYDELVLARDIPVQSLCEHHLLPFQGVAHVGYLPGDRILGLSKLARVVELFARDLQVQERLTKQVAGWLQQHLEPKGVGVVIEAEHLCMSMRGVRVRGSRTVTSALQGLLREDARSRQEFFALSGIH

SEQ ID NO: 11716 - protein, 192 aa, Nonomuraea wenchangensis
  misc_feature (1)..(192): tr|A0A1I0HH03|A0A1I0HH03_9ACTN GTP cyclohydrolase 1 OS= Nonomuraea wenchangensis OX=568860 GN=folE PE=3 SV=1
MTQHDVDLARIEKAVREILAAIGEDPDRDGLVETPARVARAMAEQFSGLGQTPEDVLNKVFDVDHDEMVLVRDIEVYSTCEHHLVPFHGLAHVGYIPNQRGQVTGLSKLARLVDVFARRPQVQERMTSQIADALMRVLEPRGVIVVVECEHLCMTMRGVRKPGAKTVTSAVRGDFRTSDKTRSEAMALILGR

SEQ ID NO: 11717 - protein, 235 aa, Nostoc azollae
  misc_feature (1)..(235): tr|D7E2V7|D7E2V7_NOSA0 GTP cyclohydrolase 1 OS=Nostoc a zollae (strain 0708) OX=551115 GN=folE PE=3 SV=1
MTIASSNASNRSQSPLIPDLSQAISTRPDRNTHNGKQADLHPPSEESMEQMMEAVRTMLIGVGEDPEREGLLKTPKRVAEAMMFLTGGYNQSLEELVNGAIFDEGHNEMVLVRDINFFTLCEHHMLPFMGRAHVAYIPNQKVVGLSKMARIVEMYSRRLQVQERLTRQIAEAVQTILEPKGVAVVMEATHMCMVMRGVQKPGSWTVTSSMVGVFQDEQKTREEFLNLIRHQPAFF

SEQ ID NO: 11718 - protein, 216 aa, Nostoc calcicola
  misc_feature (1)..(216): tr|A0A1U7IWX7|A0A1U7IWX7_9NOSO GTP cyclohydrolase 1 OS= Nostoc calcicola FACHB-389 OX=1357508 GN=folE PE=3 SV=1
MTLSICPDLTSADQRLSTLAIEQQPTVTEAEMMQAVRTLLIGLGEDPDREGLKDTPKRVMKALQFLTKGYHESLDELLNGAVFTENANEMVLVRDIDIFSSCEHHILPIIGRAHVAYIPNGKVIGLSKIARICEMYARRLQVQERLTVQIADALQGLLKPQGVAVVIEATHMCMVMRGVQKPGSWTVTSAMRGVFAEDVRTRQEFMNLIRHNSNFH

SEQ ID NO: 11719 - protein, 235 aa, Nostoc calcicola
  misc_feature (1)..(235): tr|A0A1U7IXE1|A0A1U7IXE1_9NOSO GTP cyclohydrolase 1 OS= Nostoc calcicola FACHB-389 OX=1357508 GN=folE PE=3 SV=1
MTIASSNGSNYSQSPLIPDLAEAITPRPDRNTHNGRQPDVFPPTEEQMEQMKDAVRTIILGVGEDPEREGLLKTPKRVAEAMRFLTSGYNQSLEELVNDAIFDEGHNEMVLVRDINFFSLCEHHMLPFMGRAHVAYIPNQKVVGLSKLARIVEMYSRRLQVQERLTRQIAEAIQTILEPQGVAVVMEASHMCMVMRGVQKPGSWTVTSAMVGVFQEEHKTREELFNLIRHQATFM

SEQ ID NO: 11720 - protein, 211 aa, Nostoc carneum
  misc_feature (1)..(211): tr|A0A1Z4HIE4|A0A1Z4HIE4_9NOSO GTP cyclohydrolase 1 OS= Nostoc carneum NIES-2107 OX=1973483 GN=folE PE=3 SV=1
MTLSITPELISATALPNQQLPHVTESDMIQAVRTLLIGLGENPDREGLKDTPKRVVKALQFLTKGYDESLDELLNGAVFTENADEMVLVRDIDIFSSCEHHILPIIGRAHVAYIPNGKVIGLSKIARICEMYARRLQVQERLTIQIADALQGLLKPRGVAVVLEATHMCMVMRGVQKPGSWTVTSAMRGVFAEDVRTRQEFMNLIRHNASF

SEQ ID NO: 11721 - protein, 235 aa, Nostoc carneum
  misc_feature (1)..(235): tr|A0A1Z4HVZ4|A0A1Z4HVZ4_9NOSO GTP cyclohydrolase 1 OS= Nostoc carneum NIES-2107 OX=1973483 GN=folE PE=3 SV=1
MTIASPNGSNRSQSPLIPDLAEAITIRPDRNTHDGHEPNLHPPQEEEMEQMTAAVRQILLGVGEDPEREGLLKTPKRVAEAMRFLTSGYNQSLEELVNGAIFNEGHNEMVLVRDINFFSLCEHHMLPFMGRAHIAYIPNQKVVGLSKLARIVEMYSRRLQVQERLTRQIAEAVQTILNPQGVAVVMEATHMCMVMRGVQKPGSWTVTSAMLGVFQDEQKTREEFLNLIRHQAAFF

SEQ ID NO: 11722 - protein, 235 aa, Nostoc commune
  misc_feature (1)..(235): tr|A0A2R5FQC7|A0A2R5FQC7_NOSCO GTP cyclohydrolase 1 OS= Nostoc commune NIES-4072 OX=2005467 GN=folE PE=3 SV=1
MTIASSNGSNFPQSPVIPDLAEAITPRPDRNTHNGRQADVSPPKEEHLEEMKDAVRTLILGVGEDPEREGLLKTPKRVAEAMRFLTSGYTQSLEELVNDAIFDEGHNEMVLVRDINFFSLCEHHMLPFMGRAHVAYIPNQKVVGLSKLARIVEMYSRRLQVQERLTRQIAEAIQTILEPQGVAVVMEASHMCMVMRGVQKPGSWTVTSAMVGAFQEEHKTREEFFNLIRHQAAFF

SEQ ID NO: 11723 - protein, 235 aa, Nostoc cycadae; identical to SEQ ID NO: 4555
  misc_feature (1)..(235): tr|A0A2H6LB20|A0A2H6LB20_9NOSO GTP cyclohydrolase 1 OS= Nostoc cycadae WK-1 OX=1861711 GN=folE PE=3 SV=1

SEQ ID NO: 11724 - protein, 235 aa, Nostoc flagelliforme
  misc_feature (1)..(235): tr|A0A2K8SP67|A0A2K8SP67_9NOSO GTP cyclohydrolase 1 OS= Nostoc flagelliforme CCNUN1 OX=2038116 GN=folE PE=3 SV= 1
MTIASSNGSNSSQSPLIPDLAEAITPRPDRNTHNGRQADVSPPKEEHLEEMKDAVRTLILGVGEDPEREGLLKTPKRVAEAMRFLTSGYTQSLEELVNDAIFDEGHNEMVLVRDINFFSLCEHHMLPFMGRAHVAYIPNQKVVGLSKLARIVEMYSRRLQVQERLTRQIAEAIQTILEPQGVAVVMEASHMCMVMRGVQKPGSWTVTSAMVGAFQEEHKTREEFFNLIRHQPAFI

SEQ ID NO: 11725 - protein, 235 aa, Nostoc linckia
  misc_feature (1)..(235): tr|A0A2C6WCD8|A0A2C6WCD8_NOSLI GTP cyclohydrolase 1 OS= Nostoc linckia z16 OX=1628751 GN=folE PE=3 SV=1
MTIASSNGSNYSQSPLISDLAEAITPRPDRNTHNGKQADLFSPKEEQMEQMMDAVRTLILGVGEDPEREGLLKTPKRAAEAMRFLTSGYNQSLEELVNGAIFDEGHNEMVLVRDINFFSLCEHHMLPFMGRAHVAYIPNQKVVGLSKLARIVEMYSRRLQVQERLTRQIAEAIQTILEPQGVAVVMEATHMCMVMRGVQKPGSWTVTSAMVGVFQEEHKTREELFNLIRHQATFI

SEQ ID NO: 11726 - protein, 216 aa, Nostoc linckia
  misc_feature (1)..(216): tr|A0A2C6WFF8|A0A2C6WFF8_NOSLI GTP cyclohydrolase 1 OS= Nostoc linckia z16 OX=1628751 GN=folE PE=3 SV=1
MILSIRPDLTSADQRLSSLVVEEQQTVTEAEMMQAVRTLLIGLGEDPDREGLKDTPKRLMKALQFLTKGYHESLDELLNGAVFTEDAHEMVLVRDIDIFSSCEHHILPIIGRAHVAYIPNGKVIGLSKIARICEMYARRLQVQERLTAQIADALQGLLKPQGVAVVIEATHMCMVMRGVQKPGSWTVTSAMRGVFAEDERTRQEFMNLVRHNSNFG

SEQ ID NO: 11727 - protein, 235 aa, Nostoc minutum
  misc_feature (1)..(235): tr|A0A367QB14|A0A367QB14_9NOSO GTP cyclohydrolase 1 OS= Nostoc minutum NIES-26 OX=1844469 GN=folE PE=3 SV=1
MTIASSNGSDCFQSPLIPDLAETINSRPDRNTHDGRQPDLHQPKEEDMEQMMDAVRTLLVGVGEDPEREGLLKTPKRVAEAMRFLTSGYNQSLEELVNGAIFNEGHNEMVLVRDINFFSLCEHHMLPFMGRAHVAYIPNQKVVGLSKLARIVEMYSRRLQVQERLTRQIAEAIQTILEPQGVAVVMEASHMCMVMRGVQKPGSWTVTSAMVGVFQEEHKTREEFFNLIRHQAAFF

SEQ ID NO: 11728 - protein, 235 aa, Nostoc piscinale
  misc_feature (1)..(235): tr|A0A0M3V5G8|A0A0M3V5G8_9NOSO GTP cyclohydrolase 1 OS= Nostoc piscinale CENA21 OX=224013 GN=folE PE=3 SV=1
MTIASSNGSNRFQSPLISELADAINTRPDRNTHDGRQPDLHPPSEEQMEQMMDAVRNIIVGVGEDPEREGLLKTPKRVAEAMRFLTSGYNQSLDELVNGAIFDEGHNEMVLVRDINFFSLCEHHMLPFMGRAHLAYIPNQKVVGLSKLARIVEMYSRRLQVQERLTRQIAEAIQTILEPQGVAVVMEATHMCMVMRGVQKPGSWTVTSAMLGVFQEEQKTREEFFNLIRHQPSFF

SEQ ID NO: 11729 - protein, 235 aa, Nostoc punctiforme
  misc_feature (1)..(235): sp|B2J1L7|GCH1_NOSP7 GTP cyclohydrolase 1 OS=Nostoc pun ctiforme (strain ATCC 29133 / PCC 73102) OX=63737 GN=fo lE PE=3 SV=1
MTIASSNGSNYSQSPLIPDLADAITPRPDRNTNNGRQADVFPPKEEHIEEMKDAVRKIILGVGEDPEREGLLKTPKRVAEAMRFLTSGYNQSLEELVNDAIFDEGHNEMVLVRDINFFSLCEHHMLPFMGRAHVAYIPNQKVVGLSKLARIVEMYSRRLQVQERLTRQIAEAIQTILEPRGVAVVMEASHMCMVMRGVQKPGSWTVTSAMVGVFQEEHKTREEFFNLIRHQPAFF

SEQ ID NO: 11730 - protein, 235 aa, Nostoc punctiforme
  misc_feature (1)..(235): tr|A0A367RYC2|A0A367RYC2_NOSPU GTP cyclohydrolase 1 OS= Nostoc punctiforme NIES-2108 OX=1356359 GN=folE PE=3 SV =1
MTIASSNGSNCSQSPLIPDLAEAITPRPDRNTHNGRQPDVFPPKEEQMEEMKDAVRTLILGVGEDPEREGLLKTPKRVAEAMRFLTSGYNQSLEELVNDAIFDEGHSEMVLVRDINFFSLCEHHMLPFMGRAHVAYIPNQKVVGLSKLARIVEMYSRRLQVQERLTRQIAEAIQTILEPQGVAVVMEASHMCMVMRGVQKPGSWTVTSAMVGVFQEEHKTREEFFNLIRHQPAFF

SEQ ID NO: 11731 - protein, 216 aa, Nostoc sp.
  misc_feature (1)..(216): sp|Q8YN49|GCH12_NOSS1 GTP cyclohydrolase 1 2 OS=Nostoc sp. (strain PCC 7120 / SAG 25.82 / UTEX 2576) OX=103690 GN=folE2 PE=3 SV=1
MTLSIRPDTVSAAQMVSSLSTQQTPTVTEAEMVQAVRTLLIGLGENPDREGLLDTPKRVVKALQFLTKGYNESLDELLNGAVFTEDANEMVLIRDIDIFSSCEHHILPIIGRAHVAYIPNGKVIGLSKIARVCEMYARRLQVQERLTLQIADALQGLLKPQGVAVVIEATHMCMVMRGVQKPGSWTVTSAMRGVFAEDARTREEFMNLVRHNANFH

SEQ ID NO: 11732 - protein, 235 aa, Nostoc sp.
  misc_feature (1)..(235): tr|K9QZ45|K9QZ45_NOSS7 GTP cyclohydrolase 1 OS=Nostoc s p. (strain ATCC 29411 / PCC 7524) OX=28072 GN=folE PE=3 SV=1
MTIASSNGSNRFQSPLIPDLAEAINTRPDRNTHDGKQPDLHPPSEEQMEPMMDAVRAILLGVGEDPEREGLLKTPKRVAEAMRFLTSGYNQSLEELINGAVFDEGHNEMVLVRDINFFSLCEHHMLPFMGRAHVAYIPNQKVVGLSKLARIVEMYSRRLQVQERLTRQIAEAIQTILEPQGVAVVMEASHMCMVMRGVQKPGSWTVTSAMVGVFQEEHKTREEFFNLIRHQAAFF

SEQ ID NO: 11733 - protein, 236 aa, Nostocales cyanobacterium
  misc_feature (1)..(236): tr|A0A1Y0RIC2|A0A1Y0RIC2_9CYAN GTP cyclohydrolase 1 OS= Nostocales cyanobacterium HT-58-2 OX=1940762 GN=folE PE =3 SV=1
MTIARSNGTNRSQQSPLISDLTEAITTRPDRNTHDGRQADLHPQTEEQMEQMMDAVRTLLVGVGEDPEREGLLKTPKRVAEAMRFLTSGYNQSLEELVNGAIFDEGHNEMVLVRDINFFSLCEHHMLPFMGKAHVAYIPNQKVVGLSKLARIVEMYSRRLQVQERLTRQIAEAVQTILEPKGVAVVMEATHMCMVMRGVQKPGSWTVTSAMVGVFQEEHKTREEFFNLIRHQSAFF

SEQ ID NO: 11734 - protein, 207 aa, Notoacmeibacter marinus
  misc_feature (1)..(207): tr|A0A231UWF0|A0A231UWF0_9RHIZ GTP cyclohydrolase 1 OS= Notoacmeibacter marinus OX=1876515 GN=folE PE=3 SV=1
MDATIHKFRDASGREDRPSRTEAEDAVRTLLRYIGEDEMREGLVDTPARVVKAYDEMFAGYDQDPEQILGRTFEDVSGYRDMVLIRDIVFHSHCEHHMVPIHGRAHIAYLPDGKVLGLSKIARLVDAFAHRLQTQESMTAQIADQIQGVLKPQGVAVMIEAEHMCMVMRGIRREGSDTVTTAFTGTFSDEVAERARFFDLIRTGSGR

SEQ ID NO: 11735 - protein, 209 aa, Notoacmeibacter sp.
  misc_feature (1)..(209): tr|A0A3L7JB69|A0A3L7JB69_9RHIZ GTP cyclohydrolase 1 OS= Notoacmeibacter sp. M2BS9Y-3-1 OX=2448481 GN=folE PE=3 SV=1
MDATIHKFLDKSDKNERPTRSEAEEAVRTLLRYIGEDETREGLQDTPSRVVRAYEEMFAGYEQDPEQILGRTFEEVAGYKDIVLIRDIAFHSHCEHHMVPIHGKAHIAYLPDGKVLGLSKVARLVDVFAHRLQTQEAMTAQIADQIQSVLQPLGVAIMIEAEHMCMVMRGIRREGSDTVTTAFTGIFSDEASERARFFDLIRTGSGRRS

SEQ ID NO: 11736 - protein, 199 aa, Novibacillus thermophilus
  misc_feature (1)..(199): tr|A0A1U9K9J8|A0A1U9K9J8_9BACL GTP cyclohydrolase 1 OS= Novibacillus thermophilus OX=1471761 GN=folE PE=3 SV=1
MVLGRFCGGERSLAVDHEKIEAAVRMILDAIGEDPDREGLVDTPKRVARMYEELFTGMNEDPGEHFSVMFNEEHEELVLVKDIPFFSMCEHHLVPFFGQAHVAYIPRDGRVTGLSKLARAVEAVSRRPQLQERITSTVADTIMKKLNPYGVVVVLEAEHMCMTMRGVKKPGAKTVTSAVRGIFNKDAAARAEVFSLINS

SEQ ID NO: 11737 - protein, 189 aa, Noviherbaspirillum autotrophicum
  misc_feature (1)..(189): tr|A0A0C1YRB4|A0A0C1YRB4_9BURK GTP cyclohydrolase 1 OS= Noviherbaspirillum autotrophicum OX=709839 GN=folE PE=3 SV=1
MDDNNFSADDWRRLLRHIGEDPQRQGLQDTPERVDRAWKHWTSGYGQDPADILKVFEDGAEKYNELIVVRGIPVYSHCEHHLAPFFGSATVGYTPNGRIVGLSKLTRLVECFSKRLQVQERLTIQIAEALMTHLQPLSVGVVIRCRHMCMESRGIRTPGQETVTSALLGEMQTNFPLRTEFLALAREKD

SEQ ID NO: 11738 - protein, 268 aa, Noviherbaspirillum autotrophicum
  misc_feature (1)..(268): tr|A0A0C1YL30|A0A0C1YL30_9BURK GTP cyclohydrolase FolE2 OS=Noviherbaspirillum autotrophicum OX=709839 GN=folE2 PE=3 SV=1
MNSPDPNLHAIPDVQSTVDTRRLSIQRVGVKGVRYPVTIKTRNGAQPTVGTWNMYVHLPQDQKGTHMSRFIALLEGNRAPLDVARFGALMSKMVKLLEADAGRIELSFPYFINKTAPVSGVESLMDYEVGFTGEVRNGELEVTLKVLVPVTSLCPCSKKISAYGAHNQRSHITVSAVLDGDLEVDDLIAKIEEQASCELFGLLKRPDEKYVTERAYDNPKFVEDLVRDVAGMLNADRRIMAYTLEAENFESIHNHSAYALIENDKRNK

SEQ ID NO: 11739 - protein, 189 aa, Noviherbaspirillum denitrificans
  misc_feature (1)..(189): tr|A0A254TL06|A0A254TL06_9BURK GTP cyclohydrolase 1 OS= Noviherbaspirillum denitrificans OX=1968433 GN=folE PE= 3 SV=1
MEEENFTQHDWRRLLKHLGDDPSRQGLLDTPQRVEKAWQQWTSGYAMDPADILKVFEDGAEQYNELIVVRGIPVYSHCEHHLAPFFGTATVGYTPNGKIVGLSKLTRLVDCFAKRLQVQERLTIQIAEALMEHVEPLSVGVVIRCRHMCMESRGIQTPGEETVTSALLGEMRTNLGLRGEFLALARENK

SEQ ID NO: 11740 - protein, 189 aa, Noviherbaspirillum denitrificans
  misc_feature (1)..(189): tr|A0A254TEF8|A0A254TEF8_9BURK GTP cyclohydrolase 1 OS= Noviherbaspirillum denitrificans OX=1968433 GN=folE PE= 3 SV=1
MSDKNFSTEDWRRLLGHLGEDPDRQGLRDTPERVDKAWKHWTSGYDQNPADILKVFEDGAEKYNELIVVRGIPVYSHCEHHLAPFFGSATVGYTPNGRIVGLSKLTRLVDCFSKRLQVQERLTVQIADSLMEHLQPLSVGVVIRCRHMCMESRGIRTPGEETVTSALLGEMRTNLGLRTEFLSLAREKD

SEQ ID NO: 11741 - protein, 266 aa, Noviherbaspirillum humi
  misc_feature (1)..(266): tr|A0A239BWH9|A0A239BWH9_9BURK GTP cyclohydrolase FolE2 OS=Noviherbaspirillum humi OX=1688639 GN=folE2 PE=3 SV =1
MNAPVDHFLPDVQSALDRRNIAIQRVGVKSITHPVMVKTATGAQPSVATIDMTVRLPAHVKGTHMSRFLEVLQAHEEALSPASLSRMLDAMLLRLDADSGLIEMSMPYFLRKTAPVSGVESLLDYKLMLRAEQTEGRRRLTLQVLVPVTSLCPCSKEISQYGAHNQRSHITIAATLAPGAEMAAEELIALAERSASCELWGLLKRPDEKYVTERAYENPKFVEDLVRDIATVLNADRRIARYEVASENFESIHNHSAYAWIEGPAD

SEQ ID NO: 11742 - protein, 191 aa, Noviherbaspirillum humi
  misc_feature (1)..(191): tr|A0A239L0D7|A0A239L0D7_9BURK GTP cyclohydrolase 1 OS= Noviherbaspirillum humi OX=1688639 GN=folE PE=3 SV=1
MEVKQFSDEDWRRFLESLGEDPDRPGLVETPQRVAKAWTHWASGYEQDPAEILKVFEDGAEQYNELIVVRGIPVYSHCEHHLAPFFGFATVGYTPRGKIVGLSKLTRLVDCFSKRLQVQERLTIQIAEALMTHVEPLAVGVVIRCRHLCMESRGIRTPGEETVTSAILGEMRTNPALRAEFLALAREREKV

SEQ ID NO: 11743 - protein, 268 aa, Noviherbaspirillum sp.
  misc_feature (1)..(268): tr|A0A3A3GIT6|A0A3A3GIT6_9BURK GTP cyclohydrolase FolE2 OS=Noviherbaspirillum sp. K1S02-23 OX=2320865 GN=folE2 PE=3 SV=1
MNTRDLNLTTIPDVQSTVDTRRLTIQRVGVKGVRYPVTVKTSSGAQPTVGTWNMYVQLPEEQKGTHMSRFIALLEGNRAPLDIAHFSALMRKMVKLLEAEAGRIELTFPYFINKTAPVSGVESLMDYEVGLTGDIRGDQVEVTLKVMVPVTSLCPCSKKISAYGAHNQRSHITVNALLAGDILVDQLIAKIEQQASCELFGLLKRPDEKYVTERAYENPKFVEDLVRDVAGMLNADGRIVAYTLEAENFESIHNHSAYALIEHDKRAQ

SEQ ID NO: 11744 - protein, 189 aa, Noviherbaspirillum sp.
  misc_feature (1)..(189): tr|A0A5B8N7R2|A0A5B8N7R2_9BURK GTP cyclohydrolase 1 OS= Noviherbaspirillum sp. UKPF54 OX=2601898 GN=folE PE=3 S V=1
MNDNHFSADDWRRLLRHIGEDPQRQGLQDTPERVDRAWKHWTSGYGQDPAEILKVFEDGAEKYNELIVVRGIPVYSHCEHHLAPFFGSATVGYTPNGRIVGLSKLTRLVECFSKRLQVQERLTIQIAEALMTHLQPLSVGVVIRCRHMCMESRGIRTPGQETVTSALLGEMQTNFPLRTEFLALAREKD

SEQ ID NO: 11745 - protein, 265 aa, Novimethylophilus kurashikiensis
  misc_feature (1)..(265): tr|A0A2R5F7C5|A0A2R5F7C5_9PROT GTP cyclohydrolase FolE2 OS=Novimethylophilus kurashikiensis OX=1825523 GN=folE PE=3 SV=1
MNQVVDFPIEDVQGMVDTRHLAIDKVGIKSMRHPVKVKDKSGGVQHTVAMFNMYVHLPHHFKGTHMSRFVEMLNVNDREISMENFESILREMAHRLEAQSGLIEMSFPYFINKSAPVSGVTSLLDYDVTFIGEVKNGEYSITVKVLVPVTSLCPCSKKISNYGAHNQRSHVTVTAKINEFIWVEDIIGLVEGQASSELYGLLKRPDEKYVTELAYDNPKFVEDMVRDVAAQLNEEPRLGAYTVECENFESIHNHSAYAVIEGKQS

SEQ ID NO: 11746 - protein, 267 aa, Novimethylophilus kurashikiensis
  misc_feature (1)..(267): tr|A0A2R5FGY0|A0A2R5FGY0_9PROT GTP cyclohydrolase FolE2 OS=Novimethylophilus kurashikiensis OX=1825523 GN=folE PE=3 SV=1
MNQLTTPAIEDVQNTPDVRHLAIDKVGIKSIRHPVKVKDKSGGVQHTVALFNMYVHLPHNFKGTHMSRFVEILNMNEREISIENFETILREMVKRLEAESGHIEMTFPYFINKAAPVSGVTSLLDYDVTFIGEIKNGEYNITVKVLVPVTSLCPCSKKISDYGAHNQRSHVTITALINEFIWVEDLIRIVEEQASSELYGLLKRPDEKFVTEHAYDNPKFVEDMVRDVAAQLNAEPRIDAYVVESENFESIHNHSAYALIERDKRQG

SEQ ID NO: 11747 - protein, 211 aa, Novosphingobium aromaticivorans
  misc_feature (1)..(211): tr|Q2G8Z8|Q2G8Z8_NOVAD GTP cyclohydrolase 1 OS=Novosphi ngobium aromaticivorans (strain ATCC 700278 / DSM 12444 / CIP 105152 / NBRC 16084 / F199) OX=279238 GN=folE PE =3 SV=1
MNVLSPSLAASSGMADVIGEDGKIVVPADVEEAIRTLIRWSGDQPEREGLLDTPKRVARAWREYCSGYAQDPGLHLSRTFEEVGGYDEVVLLRDIPFQSHCEHHMAPITGTASIAYLPRDRVVGISKLARVLHGFAQRLQVQERLTAEVAQCIWDNLKPHGVAVVIEAQHGCMTGRGVRTHGVGMVTSRMLGCFLDDASSRKEVLALMGRG

SEQ ID NO: 11748 - protein, 192 aa, Novosphingobium aromaticivorans
  misc_feature (1)..(192): tr|A4XEY3|A4XEY3_NOVAD GTP cyclohydrolase 1 OS=Novosphi ngobium aromaticivorans (strain ATCC 700278 / DSM 12444 / CIP 105152 / NBRC 16084 / F199) OX=279238 GN=folE PE =3 SV=1
MEQGKPHVPREVEEAIATLIRWAGDDPTREGLLDTPRRVARAWRECCSGYAEDPAHHLSRQFEEVGGYDEIVLLKDIPFQSHCEHHMAPIIGKAAIAYLPREKVVGISKLARVLHAYARRLQIQERLTSEVAQCIWDNLRPHGVAVVIEAQHGCMTGRGVRTPGVGMVTSRMMGTFLDDNRTRKEVLGLMGY

SEQ ID NO: 11749 - protein, 202 aa, Novosphingobium barchaimii
  misc_feature (1)..(202): tr|A0A561I070|A0A561I070_9SPHN GTP cyclohydrolase 1 OS= Novosphingobium barchaimii OX=1420591 GN=folE PE=3 SV=1
MSSLDGPGEDNPLGKPAVPEHVQDAIRTLIEWAGDDPSREGLLDTPKRVARAWKEYCQGYGEDPAVHLSRVFEEVGGYNEVVLLKDIPFQSHCEHHMAPIIGKAAIAYLPKDHVVGISKLARVLHGFARRLQIQERLTAEVAQCIWDHLQPQGVAVVIEASHACMTARGVRTPGVSMITSRMMGTFLDDERSRKEVLSLMGY

SEQ ID NO: 11750 - protein, 206 aa, Novosphingobium barchaimii
  misc_feature (1)..(206): tr|A0A0J7Y6Y5|A0A0J7Y6Y5_9SPHN GTP cyclohydrolase 1 OS= Novosphingobium barchaimii LL02 OX=1114963 GN=folE PE=3 SV=1
MSSLVGHDEDDLQDGPLGKPAVPGHVQDAIRTLIEWAGDDPTREGLVDTPKRVARAWLEYCQGYQEDPAVHLSRIFEEVGGYDEVVLLKDIPFQSHCEHHMAPIIGKAAIAYLPRDHVVGISKLARVLHGFARRLQIQERLTAEVAQCIWQHLKPQGVAVVIEANHACMTARGVRTPGVSMITSRMMGTFLEDERSRKEVLSLMGY

SEQ ID NO: 11751 - protein, 204 aa, Novosphingobium fuchskuhlense
  misc_feature (1)..(204): tr|A0A117UTU9|A0A117UTU9_9SPHN GTP cyclohydrolase 1 OS= Novosphingobium fuchskuhlense OX=1117702 GN=folE PE=3 S V=1
MDVHHGLDDDDAGEVGKIPVPADVQEAIRTLIRWSGDDPDREGLIDTPRRVARAWKEYCQGYGEDPASHLARQFEEVGGYNELVLLKDIPFQSHCEHHMAPIIGKAAIAYLPRDKVVGISKLARVLNAFARRLQIQERLTAEVARCIWDNLKPHGVAVVIEAQHGCMTGRGVRTPGVGMVTSRLMGTFLEDNRSRKEVLSLMGY

SEQ ID NO: 11752 - protein, 204 aa, Novosphingobium fuchskuhlense
  misc_feature (1)..(204): tr|A0A117UXW5|A0A117UXW5_9SPHN GTP cyclohydrolase 1 OS= Novosphingobium fuchskuhlense OX=1117702 GN=folE PE=3 S V=1
MNYVNHEFEARDEDGKLIVPEPVQEAIRTLLRWAGDDPEREGLADTPSRVGRAWREYCAGYDEDPGQHLRRTFSEVAGYDEVVLLRDIPFQSHCEHHLAPITGTASIAYLPRNRVVGISKLARVLHGYARRLQIQERLTSEVATCIWDNLQPHGVAVVIEAQHGCMTGRGVRTPGVGMVTSRMLGCFLEDDSSRKEVLSLMGRK

SEQ ID NO: 11753 - protein, 201 aa, Novosphingobium ginsenosidimutans
  misc_feature (1)..(201): tr|A0A5B8S6A7|A0A5B8S6A7_9SPHN GTP cyclohydrolase 1 OS= Novosphingobium ginsenosidimutans OX=1176536 GN=folE PE =3 SV=1
MGCDHEPELDENGKLPVPPEVQEAIRTLIRWSGDDPQREGLIDTPSRVARAWKEYCQGYGEDPAYHLSRQFEEVGGYDELVLLKDIPFQSHCEHHMAPITGKAAIAYMPKDRVVGISKLARVLHAFARRLQIQERLTAEVAQCIWDNLHPHGVAVVIEAQHGCMTGRGVRTPGVGMVTSRLMGCFLDDNRSRKEVLSLMGY

SEQ ID NO: 11754 - protein, 200 aa, Novosphingobium ginsenosidimutans
  misc_feature (1)..(200): tr|A0A5B8S836|A0A5B8S836_9SPHN GTP cyclohydrolase 1 OS= Novosphingobium ginsenosidimutans OX=1176536 GN=folE PE =3 SV=1
MTSHLDHDEGETKLVVPDEVQDALRTLLRWAGEDPSREGLIDTPARVARAWREYCQGNEEDPALHLSRTFEEVGGYDEVVLLKDIPFQSHCEHHMAPITGKASIAYLPKNRVVGISKLARVLHGFARRLQIQERLTAEVAQCIWDHLQPHGVAVVIEAQHGCMTGRGVRTPGVGMVTSRMLGCFLEDERSRKEVLSLMGY

SEQ ID NO: 11755 - protein, 202 aa, Novosphingobium guangzhouense
  misc_feature (1)..(202): tr|A0A2K2G2K8|A0A2K2G2K8_9SPHN GTP cyclohydrolase 1 OS= Novosphingobium guangzhouense OX=1850347 GN=folE PE=3 S V=1
MSSLVGPDEDNPLGKPNVPDNVQDAIRTLIEWAGDDPTREGLIDTPKRVARAWLEYCQGYQEDPAIHLSRIFEEVGGYDEVVLLKDIPFQSHCEHHMAPIIGKAAIAYLPRNHVVGISKLARVLHGFARRLQIQERLTAEVAQCIWEHLKPQGVAVVIEANHACMTARGVRTPGVGMITSRMMGTFLEDERSRKEVLSLMGY

SEQ ID NO: 11756 - protein, 203 aa, Novosphingobium kunmingense
  misc_feature (1)..(203): tr|A0A2N0I3C4|A0A2N0I3C4_9SPHN GTP cyclohydrolase 1 OS= Novosphingobium kunmingense OX=1211806 GN=folE PE=3 SV= 1
MTHDHDDYGDAGPMAKLPVPDDVQEAIRTLIRWSGDDPSREGLLDTPARVARAWKEYCLGYQEEPAYHLSRTFEEVGGYNELVLLKDIPFQSHCEHHMAPITGKAAIAYMPNERVVGISKLARVLHGFAQRLQIQERLTAEVAQCIWDNLQPQGVAVVIEAQHGCMTGRGVKTPGVGMVTSRLIGCFLDDSRSRKEVLSLMGY

SEQ ID NO: 11757 - protein, 202 aa, Novosphingobium lindaniclasticum
  misc_feature (1)..(202): tr|T0IC38|T0IC38_9SPHN GTP cyclohydrolase 1 OS=Novosphi ngobium lindaniclasticum LE124 OX=1096930 GN=folE PE=3 SV=1
MSSLDGPDEDNPQGKPAVPEHVQQAIRTLIEWAGDDPSREGLLDTPKRVARAWKEYCQGYGEDPAFHLSRVFEEVGGYDEVVLLKDIPFQSHCEHHMAPIIGKAAIAYLPKNHVVGISKLARVLHGFARRLQIQERLTAEVAQCIWDHLQPQGVAVVIEASHACMTARGVRTPGVGMITSRMMGTFLDDERSRKEVLSLMGY

SEQ ID NO: 11758 - protein, 202 aa, Novosphingobium malaysiense
  misc_feature (1)..(202): tr|A0A0B1ZQ84|A0A0B1ZQ84_9SPHN GTP cyclohydrolase 1 OS= Novosphingobium malaysiense OX=1348853 GN=folE PE=3 SV= 1
MSSLVGPDEDNPLGKPDVPDDVQEAIRTLIRWAGDDPTREGLQDTPKRVARAWLEYCQGYQQDPSIHLSRIFEEVGGYDEVVLLKDIPFQSHCEHHMAPIIGKAAIAYLPRDHVVGISKLARVLHGFARRLQIQERLTAEVAQCIWDNLQPHGVAVVIEASHACMTARGVRTPGVGMITSRMMGTFLEDDRSRKEVLSLMGY

SEQ ID NO: 11759 - protein, 204 aa, Novosphingobium malaysiense
  misc_feature (1)..(204): tr|A0A0B1ZQK5|A0A0B1ZQK5_9SPHN GTP cyclohydrolase 1 OS= Novosphingobium malaysiense OX=1348853 GN=folE PE=3 SV= 1
MNVMHGHVVACRETDEAPVPAEVQEAVRTLLRWAGDDPGREGLLDTPSRVGRAWREYCAGYEEDPAVHLKRTFEEVSGYDEVVLLRDIPFHSHCEHHLAPIVGTASIAYLPTDRVVGISKLARVLHGYARRLQIQERLTAEIAQCIWDNLDPLGVAVVVKATHGCMTGRGVRTHGVDMVTSKLLGCFREDPSSRKEVLSLMNAN

SEQ ID NO: 11760 - protein, 202 aa, Novosphingobium mathurense
  misc_feature (1)..(202): tr|A0A1U6H328|A0A1U6H328_9SPHN GTP cyclohydrolase 1 OS= Novosphingobium mathurense OX=428990 GN=folE PE=3 SV=1
MSSLIGPDEDDPLGKPPVPQDVQEAIRTLIRWAGDDPEREGLLDTPQRVARAWKEYCLGYAEDPAIHLSRIFEEVGGYDEVVLLKDIPFQSHCEHHMAPIIGKAAIAYLPRDHVVGISKLARVLHGYARRLQIQERLTAEVAQCIWDHLQPHGVAVVIEANHACMSARGVRTPGVGMITSRMMGTFLEDERSRKEVLSLMGY

SEQ ID NO: 11761 - protein, 217 aa, Novosphingobium nitrogenifigens
  misc_feature (1)..(217): tr|F1ZCX8|F1ZCX8_9SPHN GTP cyclohydrolase 1 OS=Novosphi ngobium nitrogenifigens DSM 19370 OX=983920 GN=folE PE= 3 SV=1
MGAPEGTDTLNELAFTLDHCEAHETAAEHPPVPEEVRSAIRTLLRWTGDNPDREGLRDTPSRVARAWKEYCSGYTENPGLHLRRTFSEVAGYDEVVLLKDIPFQSHCEHHLAPITGCASIAYLPRHRVVGISKLARVLHGFSRRLQIQERMTSEIAQCIWNALQPHGVAVVIEAQHGCMTGRGVRTPGVAMITSRMLGCFLDDASSRKEVLALMGRG

SEQ ID NO: 11762 - protein, 206 aa, Novosphingobium nitrogenifigens
  misc_feature (1)..(206): tr|F1Z9Q1|F1Z9Q1_9SPHN GTP cyclohydrolase 1 OS=Novosphi ngobium nitrogenifigens DSM 19370 OX=983920 GN=folE PE= 3 SV=1
MTTFDLPDMDDDTETRPGKIPVPDHVQEAIRTLIRWAGDDPEREGLRDTPLRVARAWKEYCQGYGEDPSFHLGRQFEEVGGYHELVLLKDIPFQSHCEHHMAPIIGKASIAYLPRDKVVGISKLARVLHGYARRLQIQERLTSEVAQCIWDSLKPHGVAVVIEAQHGCMTGRGVRTPGVGMVTSRLMGEFLKDNRSRKEVLSLMGY

SEQ ID NO: 11763 - protein, 202 aa, Novosphingobium pentaromativorans
  misc_feature (1)..(202): tr|G6EI04|G6EI04_9SPHN GTP cyclohydrolase 1 OS=Novosphi ngobium pentaromativorans US6-1 OX=1088721 GN=folE PE=3 SV=1
MSSLIGPDEDNPLGKPPVPEDVQEAIRTLIRWAGDDPQREGLLDTPKRVARAWKEYCIGYAEDPAIHLSRIFEEVGGYDEVVLLKDIPFQSHCEHHMAPIIGKAAIAYLPRDHVVGISKLARVLHGFARRLQIQERLTAEVAQCIWDHLKPHGVAVVIEASHACMSARGVRTPGVGMITSRMMGTFLEDERTRKEVLSLMGY

SEQ ID NO: 11764 - protein, 202 aa, Novosphingobium pentaromativorans
  misc_feature (1)..(202): tr|A0A2W5NRX0|A0A2W5NRX0_9SPHN GTP cyclohydrolase 1 OS= Novosphingobium pentaromativorans OX=205844 GN=folE PE= 3 SV=1
MSSLDGPDEDNPLGKPAVPEHVQQAIRTLIEWAGDDPSREGLLDTPKRVARAWKEYCQGYGEDPAIHLSRVFEEVGGYDEVVLLKDIPFQSHCEHHMAPIIGKAAIAYLPKDHVVGISKLARVLHGFARRLQIQERLTAEVAQCIWDHLQPQGVAVVIEASHACMTARGVRTPGVSMITSRMMGTFLDDERSRKEVLSLMGY

SEQ ID NO: 11765 - protein, 206 aa, Novosphingobium resinovorum
  misc_feature (1)..(206): tr|A0A1D8A0Q6|A0A1D8A0Q6_9SPHN GTP cyclohydrolase 1 OS= Novosphingobium resinovorum OX=158500 GN=folE PE=3 SV=1
MSSQVSPDEDSPRHDPLRKPDVPDNVQDAIRTLIEWAGDDPTREGLVDTPKRVARAWLEYCQGYQEDPAVHLSRIFEEVGGYDEVVLLKDIPFQSHCEHHMAPIIGKAAIAYLPRNHVVGISKLARVLHGFARRLQIQERLTAEVAQCIWEHLKPQGVAVVIEANHACMTARGVRTPGVGMITSRMMGTFLEDERSRKEVLSLMGY

SEQ ID NO: 11766 - protein, 206 aa, Novosphingobium resinovorum
  misc_feature (1)..(206): tr|A0A031K6N0|A0A031K6N0_9SPHN GTP cyclohydrolase 1 OS= Novosphingobium resinovorum OX=158500 GN=folE PE=3 SV=1
MSSLVGPDEDSPRHDPLRKPDVPDNVQDAIRTLIQWAGDDPTREGLVDTPKRVARAWLEYCQGYQEDPAVHLSRIFEEVGGYDEVVLLKDIPFQSHCEHHMAPIIGKAAIAYLPRNHVVGISKLARVLHGFARRLQIQERLTAEVAQCIWEHLKPQGVAVVIEANHACMTARGVRTPGVGMITSRMMGTFLEDERSRKEVLSLMGY

SEQ ID NO: 11767 - protein, 204 aa, Novosphingobium sediminis
  misc_feature (1)..(204): tr|A0A512AMZ8|A0A512AMZ8_9SPHN GTP cyclohydrolase 1 OS= Novosphingobium sediminis OX=707214 GN=folE_2 PE=3 SV=1
MNYVNHEFEARDEDGKLIVPEPVQEAIRTLLRWAGDDPEREGLADTPARVGRAWREYCAGYEEDPGIHLRRTFSEVAGYDEVVLLRDIPFQSHCEHHLAPITGTASIAYLPKNRVVGISKLARVLHGFARRLQIQERLTSEVANCIWDNLQPHGVAVVIDAQHGCMTGRGVRTPGVGMVTSRMLGCFLEDDSSRKEVLSLMGRK

SEQ ID NO: 11768 - protein, 204 aa, Novosphingobium sediminis
  misc_feature (1)..(204): tr|A0A512AFM7|A0A512AFM7_9SPHN GTP cyclohydrolase 1 OS= Novosphingobium sediminis OX=707214 GN=folE_1 PE=3 SV=1
MTVHHGHDDDDFGEDGKIVVPDHVQDAIRTLIRWSGDDPDREGLLDTPRRVARAWKEYCQGYGEDPATHLARQFEEVGGYNELVLLKDIPFQSHCEHHMAPIIGKAAIAYLPRHKVVGISKLARVLNAYARRLQIQERLTAEVATCIWDNLKPHGVAVVIEAQHGCMTGRGVRTPGVGMVTSRMMGTFLEDNRSRKEVLSLMGY

SEQ ID NO: 11769 - protein, 209 aa, Novosphingobium sp.
  misc_feature (1)..(209): tr|A0A2Z5EA51|A0A2Z5EA51_9SPHN GTP cyclohydrolase 1 OS= Novosphingobium sp. P6W OX=1609758 GN=folE PE=3 SV=1
MSPAQHENIEGAIAVDVRPTDAPVTQAKIEEAFRTLFQWVGEDPDREGLLDTPGRAARAWLEYCAGYLEDPRAYLARTFAEVGGYDDVVLLRDIPFHSHCEHHLAPITGTASIAYLPGERVVGISKLARVLHGFARRLQVQERLTAQVADCIWERLRPRGVAVVIDAQHGCMSGRGVRTHGVAMVTSRMMGCFKDDPDSRREILSLMGR

SEQ ID NO: 11770 - protein, 204 aa, Novosphingobium sp.
  misc_feature (1)..(204): tr|A0A3B7DPH9|A0A3B7DPH9_9SPHN GTP cyclohydrolase 1 OS= Novosphingobium sp. THN1 OX=1016987 GN=folE PE=3 SV=1
MSSLVGPDEDDDLARGKPPVPEDVQDAIRTLIRWSGDDPSREGLLDTPKRVARAWKEYCLGYGEDPASHLSRQFEEVGGYDEIVLLKDIPFQSHCEHHMAPIIGKAAIAYLPRHKVVGISKLARVLHGFARRLQIQERLTAEVAQCIWDNLKPHGVAVVIEASHACMTARGVRTPGVGMVTSRMMGTFLDDTRSRKEVLSLMGY

SEQ ID NO: 11771 - protein, 204 aa, Novosphingobium subterraneum
  misc_feature (1)..(204): tr|A0A0B8ZPT1|A0A0B8ZPT1_9SPHN GTP cyclohydrolase 1 OS= Novosphingobium subterraneum OX=48936 GN=folE PE=3 SV=1
MSSLVGPDEDDDLAQGKPPVPEDVQDAIRTLIRWSGDDPAREGLLDTPKRVARAWKEYCLGYGEDPASHLSRQFEEVGGYDEIVLLKDIPFQSHCEHHMAPIIGKAAIAYLPRHKVVGISKLARVLHGFARRLQIQERLTAEVAQCIWDNLKPHGVAVVIEASHACMTARGVRTPGVGMVTSRMMGTFLDDTRSRKEVLSLMGY

SEQ ID NO: 11772 - protein, 211 aa, Novosphingobium subterraneum
  misc_feature (1)..(211): tr|A0A0B8ZHX5|A0A0B8ZHX5_9SPHN GTP cyclohydrolase 1 OS= Novosphingobium subterraneum OX=48936 GN=folE PE=3 SV=1
MNVLSPSLAASSGMADVIGEDGKIVVPAEVEEAIRTLIRWSGDEPEREGLLDTPKRVARAWREYCRGYAEDPGLHLSRTFEEVGGYDEVVLLRDIPFQSHCEHHMAPIIGTASIAYLPKDRVVGISKLARVLHGYASRLQVQERLTAEVAKCIWDNLQPQGVAVVIEAQHGCMTGRGVRTHGVGMVTSRMLGCFLDDASSRKEVLALMGRG

SEQ ID NO: 11773 - protein, 204 aa, Novosphingobium taihuense
  misc_feature (1)..(204): tr|A0A562JIN9|A0A562JIN9_9SPHN GTP cyclohydrolase 1 OS= Novosphingobium taihuense OX=260085 GN=folE PE=3 SV=1
MSSVVGPDEDDDLARGKLPVPDDVQDAIRTLIRWSGDDPSREGLLDTPKRVARAWKEYCLGYGEDPASHLARQFEEVGGYDEIVLLKDIPFQSHCEHHMAPIIGKAAIAYLPRHKVVGISKLARVLHAYARRLQIQERLTAEVAQCIWDNLKPHGVAVVIEASHACMTARGVRTPGVGMVTSRLMGTFLEDNRSRKEVLSLMGY

SEQ ID NO: 11774 - protein, 211 aa, Novosphingobium taihuense
  misc_feature (1)..(211): tr|A0A562JZ75|A0A562JZ75_9SPHN GTP cyclohydrolase 1 OS= Novosphingobium taihuense OX=260085 GN=folE PE=3 SV=1
MNVLSPSLAASSGMADVIGEDGKIIVPADVEDAIRTLIRWSGDEPEREGLLDTPKRVARAWREYCRGYAEDPGLHLSRTFEEVGGYDEVVLLKDIPFQSHCEHHMAPIIGTASIAYLPKDRVVGISKLARVLHGYASRLQVQERLTAEVARCIWDNLQPHGVAVVIEAQHGCMTGRGVRTHGVGMVTSRMLGCFLDDASSRKEVLALMGRG

SEQ ID NO: 11775 - protein, 202 aa, Novosphingobium tardaugens
  misc_feature (1)..(202): tr|U2YJ30|U2YJ30_9SPHN GTP cyclohydrolase 1 OS=Novosphi ngobium tardaugens NBRC 16725 OX=1219035 GN=folE PE=3 S V=1
MSSLVGPDEDDPRGKAPVPQDVQEAIRTLIRWAGDDPEREGLLDTPKRVARAWKEYCSGYDDDPAIHLSRIFEEVGGYDEVVLLKDIPFQSHCEHHMAPIIGKAAIAYLPKDHVVGISKLARVMHGYARRLQIQERLTAEVAQCIWDNLKPRGVAVVIEASHACMTARGVRTPGVTMVTSQMMGVFLEDERSRKEVLSLMGY

SEQ ID NO: 11776 - protein, 220 aa, Obesumbacterium proteus
  misc_feature (1)..(220): tr|A0A1B7KA36|A0A1B7KA36_9GAMM GTP cyclohydrolase 1 OS= Obesumbacterium proteus ATCC 12841 OX=1354268 GN=folE P E=3 SV=1
MSSLSKEAVLVHTALEARGLETPLKGEVLDRETRKQRIKEHMTEIMQLLNLDLSDDSLAETPHRIAKMYVDEIFSGLDYANFPKITVIENKMKVDEMVTVRDITLTSTCEHHFVTIDGKATVAYIPKDCVIGLSKINRIVQFFAQRPQVQERLTQQILVALQTLLGTNNVAVSIDATHYCVKARGVRDATSATTTTSLGGLFKSSQNTRQEFLRAVRHHG

SEQ ID NO: 11777 - protein, 306 aa, Obesumbacterium proteus
  misc_feature (1)..(306): tr|A0A1B7KFK2|A0A1B7KFK2_9GAMM GTP cyclohydrolase FolE2 OS=Obesumbacterium proteus ATCC 12841 OX=1354268 GN=fo lE2 PE=3 SV=1
MVGTPEGPLADAQAMKDKASNIGLDWVGMEGIALPVEISGRPVSAFVNAGINLISRDEGQKGIHMSRLYQGLDELTQGELTPQRIEKTLNHFLSSHEGQTSQANMRVSGDILLSRSSMLSGNRGWKAYPLEIDATLADSLILTLKIGVPYSSTCPSSAALSVQVAQQQFNLDFDSHGDSVSQKDVSKWLIERGLPATPHSQRSWAWITVRLGLNASQFPVIELINRIEVALSTPVQTVVKRNDEQAFAIANGQNLMFCEDAARRLYNALKNQCHFDRVDIQVEHQESLHAHNAVARTSWKRGFYAA

SEQ ID NO: 11778 - protein, 184 aa, Oblitimonas alkaliphila
  misc_feature (1)..(184): tr|A0A0K1XEX9|A0A0K1XEX9_9GAMM GTP cyclohydrolase 1 OS= Oblitimonas alkaliphila OX=1697053 GN=folE PE=3 SV=1
MCDAIANNYREILQQLGEDPEREGLLDTPQRAAKAMQYLCNGYGKTLDEVVNGALFESDSDEMVIVRNIELYSLCEHHILPFIGKAHVAYIPTGKVIGLSKVARIVDMFARRLQIQENLTRQIADAIQDVTQAAGVAVVIEAQHMCMMMRGVEKQNSVMTSSAMLGAFRNSGTTRQEFLQLIRD

SEQ ID NO: 11779 - protein, 213 aa, Oceanibacterium hippocampi
  misc_feature (1)..(213): tr|A0A1Y5RWD8|A0A1Y5RWD8_9PROT GTP cyclohydrolase 1 OS= Oceanibacterium hippocampi OX=745714 GN=folE PE=3 SV=1
MLDSPNSQALAESSAESGSTAIKRPSRQQAEEAVRTLLRWAGDDPNREGLIGTPDRVVRAYEEFFAGYDQNPATYLERTFEDVEGYDEVILLRDIRFESYCEHHMLPIIGRAHVAYLPSDRVVGISKLARVVDAFAKRLQIQEKLTAQIAQTIQEALTPRGVAVVLESEHQCMSTRGVHKDGVSMVTSCMLGAFRDDPTTRRELLTMIGTSTG

SEQ ID NO: 11780 - protein, 218 aa, Oceanibaculum indicum
  misc_feature (1)..(218): tr|K2IU49|K2IU49_9PROT GTP cyclohydrolase 1 OS=Oceaniba culum indicum P24 OX=1207063 GN=folE PE=3 SV=1
MNENIMKPSVEASRLALGSVSGVERPSREEAEAAVRTLLRWAGDDPAREGLLDTPKRVAKAYEEWFGGYAVDPVEMLKRTFDETDGYDEMVLLRDIRFVSHCEHHMAPIVGRAHVAYLPLNRVVGISKLARVVNAYARRLQIQERLTAQIANTINDVLEPKGVAVVIEAEHGCMTSRGVNTHGTSMVTSRMLGAFRANASTRREFLTMIGNPQSSAAL

SEQ ID NO: 11781 - protein, 218 aa, Oceanibaculum indicum; identical to SEQ ID NO: 11780
  misc_feature (1)..(218): tr|A0A420WHA5|A0A420WHA5_9PROT GTP cyclohydrolase 1 OS= Oceanibaculum indicum OX=526216 GN=folE PE=3 SV=1

SEQ ID NO: 11782 - protein, 215 aa, Oceanibaculum pacificum
  misc_feature (1)..(215): tr|A0A154W2U1|A0A154W2U1_9PROT GTP cyclohydrolase 1 OS= Oceanibaculum pacificum OX=580166 GN=folE PE=3 SV=1
MTPLVRRSTDPAKLAVPPALPRPTREEAEAAVKTLLLWAGEDPAREGLLDTPKRVAKAYEEWFGGYSVDPVDMLKRTFDETDGYDEMVLLRDIRFVSHCEHHMAPIVGRAHIAYLPLNRVVGISKLARVVNAYARRMQIQERLTAQIANTINDVLEPKGVAVVIEAEHGCMTSRGVNTHGTSMVTSRMLGAFRTDPSTRREFLTMIGNPQNTAML

SEQ ID NO: 11783 - protein, 209 aa, Oceanicaulis sp.
  misc_feature (1)..(209): tr|A0A2T4ZNK9|A0A2T4ZNK9_9RHOB GTP cyclohydrolase 1 OS= Oceanicaulis sp. PT13A OX=2135616 GN=folE PE=3 SV=1
MDAMTDKETLANLPEDAIARPTREEAEEAVRTLLRWAGDDPRREGLLETPKRVVKAYQDWFRGYNEDPHEILGKRFEDVQGYDDMVMLTNIDVESHCEHHIAPILGTACVAYLPDRAVVGISKIAKVVEAFSKRLQTQETMTAQIADAIEDAMSPLGVAIFVDAKHQCMTTRGVHHPNVSTITTMFRGEFKANAELRQRFMNLCEQSKR

SEQ ID NO: 11784 - protein, 205 aa, Oceanicaulis sp.
  misc_feature (1)..(205): tr|A0A2E5V1N6|A0A2E5V1N6_9RHOB GTP cyclohydrolase 1 OS= Oceanicaulis sp. OX=1924941 GN=folE PE=3 SV=1
MDAVTPEAARLAGVTNSKPTREEAEEAVRTLIAWAGDDPAREGLIDTPKRVVKAWSEWFSGYEADPMAALGKTFEDVQGYDDMVMLTNIDVESHCEHHLAPILGVAHVAYLPRKAVVGISKIARVVEIFSKRMQTQETMTAQIADALTEAMQPLGVAVLIDAKHQCMTTRGVHHPNVSTITTTFTGEFKTDPALKDRFIRMVERA

SEQ ID NO: 11785 - protein, 357 aa, Oceanicella actignis
  misc_feature (1)..(357): tr|A0A1M7TN97|A0A1M7TN97_9RHOB GTP cyclohydrolase FolE2 OS=Oceanicella actignis OX=1189325 GN=folE2 PE=3 SV=1
MNIKPGSMTPAEPAPSEEAARAALEVLRRLRRADPALAARLEAESGAAAPARVYDEGFRPDAPYLAAMPDLQNGPESLIRGARRPIQHVGISNFRLPLLWPLRDGGTATLETSVVGSVALEATRKGINMSRIMRSFYRLAQGPMDFEALGRILDAYLHDLDSDEARLMLRLRLPLRRKALRSGLEGWQYYDLAFELAQAGGRRLRAMHLDYVYSSTCPCSLELAEHARAARGRMATPHSQRSLARVSAALAEGAERLWPEDLIDMCARAIPTETQVMVKREDEQAFAELNGANPIFVEDAARLLCAALEADPRIGDFRVAASHQESLHSHDAVSVLVSGPTFAQASIDPRFFETLRA

SEQ ID NO: 11786 - protein, 230 aa, Oceanicoccus sagamiensis
  misc_feature (1)..(230): tr|A0A1X9NAJ4|A0A1X9NAJ4_9GAMM GTP cyclohydrolase 1 OS= Oceanicoccus sagamiensis OX=716816 GN=folE PE=3 SV=1
MMESVAEQTLSFPNVSVTYSEEAELVRKALIDAGLETPLTAKQLTRDEKYERIREAMTDVVDALGLDLTDDSLCETPHRIAKMYVDEIFSGLDYSQFPKITAIENKMGVEEMVKVSDISLVSTCEHHFVTIDGVAKVAYIPGDKIIGLSKINRIVRFFAQRPQVQERLTQQVLLALQTLLETEHVAVRIDASHYCVKARGVMDASSVTQTTALGGKFKHNATSRKEFLDA

SEQ ID NO: 11787 - protein, 201 aa, Oceanicoccus sagamiensis
  misc_feature (1)..(201): tr|A0A1X9NQL8|A0A1X9NQL8_9GAMM GTP cyclohydrolase 1 OS= Oceanicoccus sagamiensis OX=716816 GN=folE PE=3 SV=1
MGQPIKNAKDTANPEDSLENMITAFEQIIDGVGEDRQRDGLLDTPKRAAKAMQFLTKGYDQTVEEIVNGALFESDANEMVLVSDIELYSMCEHHMLPFIGKCHVAYIPNGKVVGLSKIARIVDMYARRLQIQESLTSQIGRAIMDVTGAAGVGVIIEAKHMCMMMRGVEKQNSVMRTSSLMGSFRDNDKTRAEFLSLVNPR

SEQ ID NO: 11788 - protein, 368 aa, Oceanicola granulosus
  misc_feature (1)..(368): tr|Q2CBE6|Q2CBE6_OCEGH GTP cyclohydrolase FolE2 OS=Ocea nicola granulosus (strain ATCC BAA-861 / DSM 15982 / KC TC 12143 / HTCC2516) OX=314256 GN=folE2 PE=3 SV=1
MNLHAPDVDREISRAEAEDALALVRRWAELRTPEEVAALDPVISRLLPAGEVSNYPALSRRYPDDFDADAAYKATMPDLQNGPTSLIRGEATQIQHVGISNFRLPIRYRLRDGGEVTLETSVTGTVSLEAEKKGINMSRIMRSFYRNAEEAFSFGVMARTLDDYLADLESLDARLMMRFSFPVKVKSLRSGLEGYQYYDIAMELVEHAGTRKKIFHLDYVYSSTCPCSLELSEHARQQRGQLATPHSQRSVARISLLVDPEATERLWFEDLIDLARAAVPTETQVMVKREDEQAFAELNAANPIFVEDAARLFCERLRADARIADFRVVASHQESLHSHDAVSILTEGDTFAAESLDPKLFATLHHPG

SEQ ID NO: 11789 - protein, 365 aa, Oceanicola litoreus
  misc_feature (1)..(365): tr|A0A1N6EII3|A0A1N6EII3_9RHOB GTP cyclohydrolase FolE2 OS=Oceanicola litoreus OX=1217970 GN=folE2 PE=3 SV=1
MNIHAAALDAATEEEARAALELLRRWAKGATPEEVAALDPAIARLLPDAPLPNYPALARAYPEEFKVDEAYKAGLPDLQNGPSSLIRGARQHIEHVGISNFRLPIRFHRRDGGDITLETSVTGTVSLEAEKKGINMSRIMRTFYARAEEVFSLDVVEETLEAYKGDLESFDARIQMRFSFPMKVGSLRSGLEGYQYYDIAMEVVDTGGRRKKLMHLDFVYSSTCPCSLELSEHARRARGQLATPHSQRSVARISVECLPGQRLWFEDLVELCRRAVPTETQVMVKREDEQAFAELNAANPIFVEDAARSFCEALQAEPRVGDFRVVASHQESLHSHDAVAVLTEGGTFAAQSLDPRLFTTLVHGG

SEQ ID NO: 11790 - protein, 365 aa, Oceanicola sp.
  misc_feature (1)..(365): tr|A0A5B8BWK0|A0A5B8BWK0_9RHOB GTP cyclohydrolase FolE2 OS=Oceanicola sp. D3 OX=2587163 GN=folE2 PE=3 SV=1
MNILAAALGETTDEEARAALDVLRRWAEKATPEEVAALDPAIARLLPDAPLPNYPALARAYPEEFKVDEAYKAGLPDLQNGPSSLIRGARQHIEHVGISNFRLPIRFHRRDGGDITLETSVTGTVSLEAEKKGINMSRIMRTFYARAEEVFSLDVVEETLEAYKGDLESFDARIQMRFSFPMKVDSLRSGLTGYQYYDIAMEVVDAGGRRKKLMHLDFVYSSTCPCSLELSEHARRARGQLATPHSQRSVARISVECLPGQRLWFEDLVELCRSAVPTETQVMVKREDEQAFAELNAANPIFVEDAARSFCEALQAEPRVGDFRIVASHQESLHSHDAVAVLTEGPTFAAQSLDPKLFTTLVHGG

SEQ ID NO: 11791 - protein, 364 aa, Oceanicola sp.
  misc_feature (1)..(364): tr|A0A254R5L8|A0A254R5L8_9RHOB GTP cyclohydrolase FolE2 OS=Oceanicola sp. 22II-s10i OX=1317116 GN=folE2 PE=3 S V=1
MNIHPKDMARRPDRDEARAALDKLRAWAETASDSDIASLDPVIAKLLPAQGEYPVMSRVYPDNFIADDAYRATLPDLQNGPASLIRGARRTLQHVGISNFRLPIRFRTRSGGEMTLETSVTGSVSLEANKKGINMSRIMRSFYAHSEKSFSFSVIEDALEDYKTDLESLDARIQMRFSYPVKRQSLRSGLEGYQYYDIALELVEQAGQRLKIMHLDYVYSSTCPCSLELSEHARRERGQLATPHSQRSVARISVVVEGDETLWFEDLIDMARVAVPTETQVMVKREDEQAFAELNAANPIFVEDAARLFSQQLEDDARVGDFRVVASHQESLHSHDAVSVVTEGPTFAQASLDPRLFSTLHHPG

SEQ ID NO: 11792 - protein, 225 aa, Oceanihabitans sediminis
  misc_feature (1)..(225): tr|A0A368P4J2|A0A368P4J2_9FLAO GTP cyclohydrolase 1 OS= Oceanihabitans sediminis OX=1812012 GN=folE PE=3 SV=1
MKFDEKLEEFESLGENHIGTSSDTPMRKDAFKLSNDEKIEIIKDDVRHIMETLGLDLTDDSLKGTPNRVAKMFVKEIFGGLDPKSKPNASTFDNKYKYGEMLVEKNITVYSTCEHHLLPIVGRAHVAYISNGTVVGLSKMNRIVDYYAKRPQVQERLTIQIVKELQEVLNTEDVACVIDAKHLCVNSRGIRDVDCSTVTSEFGGKFKDLETRREFLDYIKLDTTF

SEQ ID NO: 11793 - protein, 198 aa, Oceanihabitans sediminis
  misc_feature (1)..(198): tr|A0A368P524|A0A368P524_9FLAO GTP cyclohydrolase 1 OS= Oceanihabitans sediminis OX=1812012 GN=folE PE=3 SV=1
MPYKQFEEYNIQVTEDIKQQYKSIIEDLGEDTKREGLVKTPERAAKAMQFLTQGYHQDPAEVLRGAMFKEDYKDMVIVKDIELYSLCEHHILPFFGKAHIAYIPNGQIVGLSKLPRIVDIFARRLQVQERLTHQILDCINDTLKPEGVAVVIEASHMCMMMRGVQKQNSVTTTSGFRGQFEKIETRNEFLNLIGQKLS

SEQ ID NO: 11794 - protein, 217 aa, Oceanimonas baumannii
  misc_feature (1)..(217): tr|A0A235CFB9|A0A235CFB9_9GAMM GTP cyclohydrolase 1 OS= Oceanimonas baumannii OX=129578 GN=folE PE=3 SV=1
MTALSDEAIRVRSALEARGLETPMRSNNLTTAQQQEQITGLMTQVMDVLGLDLEDDSLAETPQRIAKMYVREIFSGLDYTQFPKITLIDNKMKVDEMVQVRDITMTSTCEHHFVTIDGTATVAYIPRGKVIGLSKINRIVQFFARRPQVQERLTQQVLLALQTLLESDDVAVSITATHYCVKARGVMDATSTTTTTSLGGIFKSRQETRQEFLRGVR

SEQ ID NO: 11795 - protein, 322 aa, Oceanimonas baumannii
  misc_feature (1)..(322): tr|A0A235CBR4|A0A235CBR4_9GAMM GTP cyclohydrolase FolE2 OS=Oceanimonas baumannii OX=129578 GN=folE2 PE=3 SV=1
MNRDLPDVAATETPSIQAPLQWVGMSRIDIPFHLAEPGCPGPVHAMADVQVNLPAATIKGIHMSRIYRMLDDLSRQTAITPSHLETLLGQMVESHRDCETDSARVILNFNLLVRRPALKTPELAGWKSYPARLEATLARGHFSLEARVQVEYSSTCPCSAALSRQLVARGFREHFPGDKAVTTDEVTAWLKQHATLATPHSQRSEAQVTVTLASNAPDFGLMPLIDQIEEVLTTPVQTAVKRADEQAFAWLNGQNLMYVEDAARRIQHALLKPYATALVHVRHLESLHSHDAVASANGNVSSARFYTEEPDSRHNPIPQNSD

SEQ ID NO: 11796 - protein, 218 aa, Oceanimonas doudoroffii
  misc_feature (1)..(218): tr|A0A233RHC5|A0A233RHC5_9GAMM GTP cyclohydrolase 1 OS= Oceanimonas doudoroffii OX=84158 GN=folE PE=3 SV=1
MTALSDAAIRVRSALEARGLETPMRGTHLSTDEQQEQITGLMTQVMDVLGLDLEDDSLAETPQRIAKMYVREIFSGLDYAHFPKITLIENKMQVDEMVQVRDITLTSTCEHHFVTIDGTATVAYIPRGKVIGLSKINRIVQFFARRPQVQERLTQQVLVALQTLLESEDVAISITATHYCVKARGVMDATSATTTTSLGGIFKTRPATRHEFLSGVVR

SEQ ID NO: 11797 - protein, 305 aa, Oceanimonas doudoroffii
  misc_feature (1)..(305): tr|A0A233RB42|A0A233RB42_9GAMM GTP cyclohydrolase FolE2 OS=Oceanimonas doudoroffii OX=84158 GN=folE2 PE=3 SV=1
MNRDLPDVAADEHSPIQAPLEWVGMSGIDLPVTISEPGCPGPVHAVVDAQVNLPSATVKGIHMSRIYRMLNELSHQAEIAPAQLETLLERMIESHSDCHTDSARIRLRFNLLARRAALKTPELAGWKSYPVRLEATLKRGELSLQASVQVEYSSTCPASAALSRQLVAQGFRDHFPDGKGVTTEDVAAWLEQHATLATPHSQRSEAQVAVTLCSDAPSFGLMALIDRIEQALATPVQTAVKRADEQAFASLNGQNLMYVEDAARRIQHALGVHDSEAQIHVRHLESLHPHDAVASANGNPAMAAP

SEQ ID NO: 11798 - protein, 218 aa, Oceanimonas sp.
  misc_feature (1)..(218): tr|H2FWH6|H2FWH6_OCESG GTP cyclohydrolase 1 OS=Oceanimo nas sp. (strain GK1) OX=511062 GN=folE PE=3 SV=1
MTALSDAAIRVRSALEARGLETPMRSHNLTTDEQQEKITGLMTQVMDVLGLDLDDDSLAETPQRIAKMYVREIFSGLDYAHFPKITLIDNKMKVDEMVQVRDITLTSTCEHHFVTIDGTATVAYIPRGKVIGLSKINRIVQFFARRPQVQERLTQQVLVALQALLESDDVAVSITATHYCVKARGVMDATSNTTTTSLGGIFKSRPATRQEFLSGVVR

SEQ ID NO: 11799 - protein, 365 aa, Oceaniovalibus guishaninsula
  misc_feature (1)..(365): tr|K2H9Z9|K2H9Z9_9RHOB GTP cyclohydrolase FolE2 OS=Ocea niovalibus guishaninsula JLT2003 OX=1231392 GN=folE2 PE =3 SV=1
MNVHLPKTAPLGDADDAARALDALRLWAASAAPEELARADPALRALLPGAAGPAPLSRVYPHAFASDAAYIATLPDLQNGPAASIRGARRTIQHVGISNFRLPIRYRTRDGDDMTLETAVTGTVSLDAESKGINMSRIMRTFYRHADRTFSFGVIEAALDDYKTDLGSFDARIQMRLSFPMRVQSLRSGLSGWQYYDIALELVDQGGVRRKIVHLDYVYSSTCPCSLELSEHARLSRRQLATPHSQRSVARLSVLLEPDRPCLWFEDLVGICRAAVPTETQAMVKREDEQAFAELNAANPVFVEDAARLFAQGLHADERIADFRVVASHQESLHSHDAVSVLTQGDTFAQASLDPRLFASLFHVG

SEQ ID NO: 11800 - protein, 367 aa, Oceaniovalibus sp.
  misc_feature (1)..(367): tr|A0A5D0SDJ0|A0A5D0SDJ0_9RHOB GTP cyclohydrolase FolE2 OS=Oceaniovalibus sp. ACAM 378 OX=2599923 GN=folE2 PE= 3 SV=1
MTRLATEFDRTPDRDQAAAALRLLQDWVAQAGAKDIAALDPVLARLLPGQPPETCAKLSRSYPDEFVVDADYRATLPDLQNGSHTLIKGSKRQIQHVGISNFRLPIRYHTRDGADLVLETSVTGTVSLEAEKKGINMSRIMRTFYRHAEATFSFEVIEAALDDYKTDLESFDARIQMRLSFPMKMDSLRSGLSGYQYYDIALELVEIDGVRRKILHLDYVYSSTCPCSLELSEHAREARGQLATPHSQRSVARLSMALTPDAPCLWFEDLVDLCRAAVPTETQVMVKREDEQAFAELNAANPIFVEDAARLFAGRLQDDPRIGDFRVVASHQESLHSHDAVSVLTEGDTFAQASLDPRLFATLFHVG

SEQ ID NO: 11801 - protein, 218 aa, Oceanisphaera arctica
  misc_feature (1)..(218): tr|A0A2P5TQY1|A0A2P5TQY1_9GAMM GTP cyclohydrolase 1 OS= Oceanisphaera arctica OX=641510 GN=folE PE=3 SV=1
MTALSDAAIRVRSALEAKGLETPMKGNTLTLDEKQSRITGLMTEMMDVLGLDLEDDSLAETPKRIAKMYVREIFSGLDYSYFPKITLIENKMKVDEMVQVRDITLTSTCEHHFVTIDGTATVAYIPRSKVIGLSKINRIVQFFARRPQVQERLTQQVLVALQELLESDDVAVSITATHYCVKARGVMDATSSTTTTSLGGIFKSRPETRQEFLGGVVR

SEQ ID NO: 11802 - protein, 218 aa, Oceanisphaera avium
  misc_feature (1)..(218): tr|A0A1Y0CVS2|A0A1Y0CVS2_9GAMM GTP cyclohydrolase 1 OS= Oceanisphaera avium OX=1903694 GN=folE PE=3 SV=1
MTALSDAAIRVRSALEQRGLETPMKGNSLTLDEKQARITALMTEMMDVLGLDLADDSLADTPQRIAKMYVREIFSGLDYSYFPKITLIDNKMKVDEMVQVRDITLTSTCEHHFVTIDGTATVAYIPRTKVIGLSKINRIVQFFARRPQVQERLTQQVLVALQTLLESEDVAVSISATHYCVKARGVMDATSSTTTTSLGGIFKSRAATRHEFLSGVVR

SEQ ID NO: 11803 - protein, 218 aa, Oceanisphaera profunda
  misc_feature (1)..(218): tr|A0A1Y0D2J7|A0A1Y0D2J7_9GAMM GTP cyclohydrolase 1 OS= Oceanisphaera profunda OX=1416627 GN=folE PE=3 SV=1
MTALSDAAIRVRSALEERGLETPMKSNNLTADDKQARITGLMTEMMDVLGLDLADDSLAETPQRIAKMYVREIFSGLDYSYFPKITMIDNKMKVDEMVQVRDITLTSTCEHHFITIDGRATVAYIPRSKVIGLSKINRIVQFFARRPQVQERLTQQILVALQTLLESDDVAVSISATHYCVKARGVMDATSSTTTTSLGGIFKSRAETRHEFLSGIVR

SEQ ID NO: 11804 - protein, 218 aa, Oceanisphaera psychrotolerans
  misc_feature (1)..(218): tr|A0A1J4QAB0|A0A1J4QAB0_9GAMM GTP cyclohydrolase 1 OS= Oceanisphaera psychrotolerans OX=1414654 GN=folE PE=3 S V=1
MTALSDAAIRVRSALEARGLETPMKGNNLTLDEKQSRITGLMTEMMDVLGLDLEDDSLAETPKRIAKMYVREIFSGLDYSYFPKITLIENKMKVDEMVQVRDITLTSTCEHHFVTIDGTATVAYIPRSKVIGLSKINRIVQFFARRPQVQERLTQQVLVALQALLESDDVAVSITATHYCVKARGVMDATSSTTTTSLGGIFKSRPETRQEFLGGVVR

SEQ ID NO: 11805 - protein, 185 aa, Oceanispirochaeta sp.
  misc_feature (1)..(185): tr|A0A370AHS1|A0A370AHS1_9SPIO GTP cyclohydrolase 1 OS= Oceanispirochaeta sp. M1 OX=2283433 GN=folE PE=3 SV=1
MNKEKVSGLIRELLIEIGEDPDREGLLKTPERVAEAYKFLTSGYSMDLKSVINNAVFESEANNMIVCKDIEVYSLCEHHMLPFFGVCHIGYIAKDKVLGVSKLARIVDFYSRRLQIQERLTAEIARTVRDEAGAEGVGVVMECRHMCMMMRGVQKQNSSMLTSSVLGSFHSSIATREEFMSLIRH

SEQ ID NO: 11806 - protein, 187 aa, Oceanispirochaeta sp.
  misc_feature (1)..(187): tr|A0A5C1QJM6|A0A5C1QJM6_9SPIO GTP cyclohydrolase 1 OS= Oceanispirochaeta sp. K2 OX=2518645 GN=folE PE=3 SV=1
MNKERVSQLIKELLIEIGEDPHREGLLKTPERVAEAYRFLTSGYSMDLKEIINDAVFESEANNMIVCKDIEVYSLCEHHMLPFFGVCHIGYIAKNKVLGVSKLARIVDFYSRRLQIQERLTAEIARTVKDESGAEGVGVVMECRHMCMMMRGVQKQNSSMLTSTVLGSFHSSVATREEFMSLISRQK

SEQ ID NO: 11807 - protein, 204 aa, Oceanithermus desulfurans
  misc_feature (1)..(204): tr|A0A511RGF6|A0A511RGF6_9DEIN GTP cyclohydrolase 1 OS= Oceanithermus desulfurans NBRC 100063 OX=1227550 GN=fol E PE=3 SV=1
MKKRIELEDTGMTFETAYDLEAMSRLARSWLEQIGEDPDREGLVDTPGRVARAWAFLTRGYQQSLEEVINGAIFEAEGSEMVVVKGIEFYSMCEHHLLPFFGQVHIGYIPGGKILGLSKFARLVDMYARRLQLQERLATQIAGALMQVLEPRGVGVVVEGAHLCMMMRGVEKQHSTTVTSAMRGVFQEDLKTREEFLALLRSQP

SEQ ID NO: 11808 - protein, 204 aa, Oceanithermus profundus
  misc_feature (1)..(204): tr|E4U9M4|E4U9M4_OCEP5 GTP cyclohydrolase 1 OS=Oceanith ermus profundus (strain DSM 14977 / NBRC 100410 / VKM B -2274 / 506) OX=670487 GN=folE PE=3 SV=1
MKKRIELEDTGMTFETAYDLEAMSRLARSWLEQIGEDPAREGLADTPGRVARAWAFLTRGYQQSLEEVINGAVFEAEGSEMVVVKGIEFYSMCEHHLLPFFGQVHIGYIPDGKILGLSKFARLVDMYARRLQLQERLATQIAGALMQVLEPRGVGVVVEGAHLCMMMRGVEKQHSTTVTSAMRGVFKEDLKTREEFLALLRSQP

SEQ ID NO: 11809 - protein, 185 aa, Oceanobacillus arenosus
  misc_feature (1)..(185): tr|A0A3D8PQN0|A0A3D8PQN0_9BACI GTP cyclohydrolase 1 OS= Oceanobacillus arenosus OX=1229153 GN=folE PE=3 SV=1
MDKQKIEEAVRMILEAIGEDPDRQGLLDTPKRVAKMYEEVFSGLKKDPAEHCKTVFEEEHDEVVLVKDIQFSSMCEHHLVPFFGVAHIAYIPKHGRVIGLSKLARIIDDFSKRPQLQERITTSVAELLMEELDPIGVMVVLEAEHMCMTIRGVKKQGAKTVTSAVRGEFRTNSKSRNEVLSLIKF

SEQ ID NO: 11810 - protein, 185 aa, Oceanobacillus bengalensis
  misc_feature (1)..(185): tr|A0A494Z844|A0A494Z844_9BACI GTP cyclohydrolase 1 OS= Oceanobacillus bengalensis OX=1435466 GN=folE PE=3 SV=1
MDKEKIATAVRMILEAIGEDPDRQGLLDTPKRVANMYEEVFSGLDKDPAVHCQTVFEEPHEEIVLVKDIQFSSMCEHHLVPFIGVAHVAYLPKNGQVIGLSKLARIVDDISKRPQLQERITKSVADLLMKELDPIGVMVVIEAEHMCMSIRGVKKQGSKTITSAVRGEFKTNNKSRSEVLALINR

SEQ ID NO: 11811 - protein, 185 aa, Oceanobacillus caeni
  misc_feature (1)..(185): tr|A0A0N1N1X6|A0A0N1N1X6_9BACI GTP cyclohydrolase 1 OS= Oceanobacillus caeni OX=405946 GN=folE PE=3 SV=1
MDKEKIQSAVRQILEAIGEDPDRQGLLDTPKRVANMYEEVFSGLSKNPAVHCETVFEEQHEEMVLVKDIQFSSMCEHHLVPFIGVAHVAYIPKNGRVIGLSKMARIVDDISKRPQLQERITKSVADLLMEELDPVGVMVILEAEHMCMSIRGVKKQGSKTVTSAVRGSFRENSKSRNEVLALISK

SEQ ID NO: 11812 - protein, 185 aa, Oceanobacillus chungangensis
  misc_feature (1)..(185): tr|A0A3D8PXY7|A0A3D8PXY7_9BACI GTP cyclohydrolase 1 OS= Oceanobacillus chungangensis OX=1229152 GN=folE PE=3 SV =1
MDKKKMEEAVRMILEAIGEDPDRQGLLDTPARVAKMYEEVFSGLKKDPAEHCKTVFEEEHDEVVLVKDIQFSSMCEHHLVPFFGVAHIAYIPKNGRVIGLSKLARIVDDFSKRPQLQERITTSVAELLMEELSPIGVMVVLEAEHMCMTIRGVKKQGAKTVTSAVRGEFRTNSKSRNEVLSLIKF

SEQ ID NO: 11813 - protein, 190 aa, Oceanobacillus halophilus
  misc_feature (1)..(190): tr|A0A495A2W7|A0A495A2W7_9BACI GTP cyclohydrolase 1 OS= Oceanobacillus halophilus OX=930130 GN=folE PE=3 SV=1
MRQQIMDKEKIASAVKMILEAIGDDPDRQGLLDTPKRVANMYEEVFAGLSKNPAIHCETVFEEQHEEMVLVKDIPFSSMCEHHLVPFIGEAHVAYIPKNGRVIGLSKIARIVDDISKRPQLQERITKSVADLLMEELDPVGVMVVLEAEHMCMSIRGVNKQGAKTVTSAVRGSFHSNSKSRNEVLALINK

SEQ ID NO: 11814 - protein, 302 aa, Oceanobacillus iheyensis
  misc_feature (1)..(302): sp|Q8EQK9|GCH4_OCEIH GTP cyclohydrolase FolE2 OS=Oceano bacillus iheyensis (strain DSM 14371 / CIP 107618 / JCM 11309 / KCTC 3954 / HTE831) OX=221109 GN=folE2 PE=3 SV =2
MPKKQLPPKEERHKLFGSVPPKERTKPIEKNKMADLQNTKRDFLFKLDAVGISNVKYPVIIHSDLAPKEQTSIGTFEFSSSIPTMSKGTNMSRFMELLQEYSSSGMNVSISELKRFTKELSGKLEQKDATIEVSFPWFFERKGPESQSAGMNHADAKLSVTYDSNSGFSIDVSLSAWITTLCPCSKEISEYSAHNQRGNVTLEATLVEDFDEAKIDWKLALLEAAESNASARLHPVLKRTDEKMVTEQAYENPRFVEDMVRLIAADLYEMPFVSKFHVSCRNEESIHMHDAIASITYDKSSE

SEQ ID NO: 11815 - protein, 311 aa, Oceanobacillus iheyensis
  misc_feature (1)..(311): tr|A0A2P1WJX2|A0A2P1WJX2_9BACI GTP cyclohydrolase FolE2 OS=Oceanobacillus iheyensis OX=182710 GN=folE2 PE=3 SV =1
MNTKFFPLKQLPSKAERHKLFGSVLPVPRTKPIEKSQMADLQNTKKDFLFDLDAVGISNVKHPVSVTGDLDPKVQSSIANISFSTSLKSTSKGTNMSRFTEQLSTYYRQGVFQADWQILKTFTKELADRLDQQDATIELQFPWFFERRGPQSDLAGLNHTDITMKVIYDYQTGYTFSASLSALITTLCPCSKEISEYSAHNQRGVVSIEVELNEGAVQAEMDWKTMLLEAAESNASARIHPVLKRPDEKMVTEQAYENPRFVEDMVRLVAADLYEMDMVDKFRVACRNEESIHMHDAIASVTYDKRTENLG

SEQ ID NO: 11816 - protein, 188 aa, Oceanobacillus limi
  misc_feature (1)..(188): tr|A0A1I0AGA7|A0A1I0AGA7_9BACI GTP cyclohydrolase 1 OS= Oceanobacillus limi OX=930131 GN=folE PE=3 SV=1
MKKMNNEKIKNAVQMILEAIGEDTSREGILDTPERVAKMYEELFSGLHTDPKECFSTSFCDDHEELVLVKDIAFHSICEHHLVPFYGKAHFAYIPKDGRVTGIGNFAKALEVVAKRPQIQERMTSTLANTIDETVDPIGIMVVIEAEHMCMTMRGVKKPGSKTVTTAVRGSLKNDSAARSEILSLIHQ

SEQ ID NO: 11817 - protein, 310 aa, Oceanobacillus oncorhynchi
  misc_feature (1)..(310): tr|A0A0A1MDQ4|A0A0A1MDQ4_9BACI GTP cyclohydrolase FolE2 OS=Oceanobacillus oncorhynchi OX=545501 GN=folE2 PE=3 SV=1
MHQLNTIPLKKLPSKEERHKLFGSVPPGEKKKPTEKNEMADLQNVKRDFLFDLDVVGVSNVKYPVRVLSGQAPFEQTTVGTFTFSSSIPANSKGTNMSRFMELLEQYHQGGFTVSIDELKQFAKDLAVKLEQTDATVSVSFPWFYERKAPQTYAAGLNHAEASVSVRYSKYEDYQITVSLNVQITTLCPCSKEISEYSAHNQRGNVTVETELEPSFSNTDGDWKGILLEAAESNASARLHPILKRPDEKMVTEAAYENPRFVEDMVRLIAADLYELPAVMKFHVACRNEESIHMHDAIASVTYDKRNRQG

SEQ ID NO: 11818 - protein, 311 aa, Oceanobacillus picturae
  misc_feature (1)..(311): tr|W9A9H8|W9A9H8_9BACI GTP cyclohydrolase FolE2 OS=Ocea nobacillus picturae OX=171693 GN=folE2 PE=3 SV=1
MNTKFFPLKQLPSKAERHKLFGSVLPVPRTKPIEKSQMADLQNTKKDFLFDLDAVGISNVKHPLSVTGDLEPKIQSSIANISFSTSLKSTSKGTNMSRFTEQLSTYYRQGVFQADWQLLKTFTKELADRLDQQDATIELQFPWFFERRGPQSDLAGLNHADITMKVIYDYQTGYTLSASLSALITTLCPCSKEISEYSAHNQRGVVSIDVELNEGAVQAEMDWKTLLLEAAESNASARIHPVLKRPDEKMVTEQAYENPRFVEDMVRLVAADLYEMDMVDKFQVACRNEESIHMHDAIASVTYDKRTENLG

SEQ ID NO: 11819 - protein, 311 aa, Oceanobacillus profundus
  misc_feature (1)..(311): tr|A0A417YA53|A0A417YA53_9BACI GTP cyclohydrolase FolE2 OS=Oceanobacillus profundus OX=372463 GN=folE2 PE=3 SV =1
MQHTKIFPLKQLPTKEQRHKLFGSVQPAERTKPVEKSKMADLQNTKKDFLFDLNVVGISNVKYPITIESNMNPGFQTSIGTFKFSSSLANTSKGTNMSRFMEQLNQYHEQGFNITLANLKSFAKELAERLEQKDATIEVDFPWFYERKGPSSNLAGLNHANASIRVTYKQAKGTSVNVALSALITTLCPCSKEISEYSAHNQRGEVAMDITLSDDFDENKTDWKETLLQAAESNASARIHPVLKRPDEKMVTEQAYENPRFVEDIVRLVAADLYELPFVTKFNVSCRNEESIHLHDAIASITFDKQNAEIE

SEQ ID NO: 11820 - protein, 310 aa, Oceanobacillus sojae
  misc_feature (1)..(310): tr|A0A511ZJ28|A0A511ZJ28_9BACI GTP cyclohydrolase FolE2 OS=Oceanobacillus sojae OX=582851 GN=folE2 PE=3 SV=1
MQQIDTISLKKLPSKEERHRLFGSVPPGEKKKPTEKSKMADLQNVKRDFLFDLDAVGVANVKYPVRVLSGQTPYEQTTIGTFTFSSSIPANSKGTNMSRFMELLEQYYQGGFTISIDELKQFTKDLANKLEQDDASVSVSFPWFYEREAPQTLASGLNHAEASVSVRYSKHEDYQINVSLKVQITTLCPCSKEISEYSAHNQRGNVTIETELESNFSNADDDWKVLLLEAAESNASARLHPILKRPDEKMVTEQAYENPRFVEDMVRLIAADLYELPSVLKFHVSCRNEESIHMHDAIASVTYDKRNGQG

SEQ ID NO: 11821 - protein, 185 aa, Oceanobacillus sp.
  misc_feature (1)..(185): tr|A0A345PEY6|A0A345PEY6_9BACI GTP cyclohydrolase 1 OS= Oceanobacillus sp. 160 OX=2052660 GN=folE PE=3 SV=1
MDKKKMEEAVRMILEAIGEDPDRQGLLDTPARVAKMYEEVFSGLKKDPAEHCKTVFEEEHDEVVLVKDIQFSSMCEHHLVPFFGVAHIAYIPKNGRVIGLSKLARIVDDFSKRPQLQERITTSVAELLMEELNPIGVMVVLEAEHMCMTIRGVKKQGAKTVTSAVRGEFRTNSKSRNEVLSLIKF

SEQ ID NO: 11822 - protein, 185 aa, Oceanobacillus sp.
  misc_feature (1)..(185): tr|A0A498DAY1|A0A498DAY1_9BACI GTP cyclohydrolase 1 OS= Oceanobacillus sp. YLB-02 OX=2448030 GN=folE PE=3 SV=1
MDKEKIQSAVRMILEAIGENPDRQGLMDTPRRVADMYEEVFAGIEKDPAIHAQTVFDEPHEEMVLVKDIQFSSMCEHHLVPFIGVAHVAYMPKNGRVIGLSKLARIVDDISKRPQLQERITKSVADLLMEELAPIGVMVVIEAEHMCMSIRGVKKQGSTTVTSAVRGEFKTNSKSRNEVLALINR

SEQ ID NO: 11823 - protein, 183 aa, Oceanobacter sp.
  misc_feature (1)..(183): tr|A0A2G2JE48|A0A2G2JE48_9GAMM GTP cyclohydrolase 1 OS= Oceanobacter sp. OX=2030817 GN=folE PE=3 SV=1
MSKLETLYHDVLSELGENPEREGLLDTPKRAAKAMQFLTSGYTTELNDVVNGAVFSSDNDEMVVVQGIEFYSMCEHHMLPFIGRAHIGYLPEGKVLGLSKFARIVDMFGRRLQIQENMTKQIAEAVEEVTGCRGVGVIIEAQHMCMMMRGVQKQNSKMRTSVMKGVFRENPATRDEFMRLAGV

SEQ ID NO: 11824 - protein, 189 aa, Oceanococcus atlanticus
  misc_feature (1)..(189): tr|A0A1Y1SAX9|A0A1Y1SAX9_9GAMM GTP cyclohydrolase 1 OS= Oceanococcus atlanticus OX=1317117 GN=folE PE=3 SV=1
MRYNADVEHQYLEILKALGEDPERDGLRDTPKRAAAAMQFLTSGYTQKLEDIVNDAIFESEMDEMVIVRDIEMYSLCEHHLLPFTGRCHVAYLPAGKVIGLSKIPRIVDMFARRLQIQEGLTRDIALAVEQVTGARGVGVVIESRHMCMMMRGVEKQNSSMMTSMMLGAFREDPRTRGEFLNLLNCGQR

SEQ ID NO: 11825 - protein, 198 aa, Oceanococcus atlanticus
  misc_feature (1)..(198): tr|A0A1Y1SDI3|A0A1Y1SDI3_9GAMM GTP cyclohydrolase 1 OS= Oceanococcus atlanticus OX=1317117 GN=folE PE=3 SV=1
MGKYQDNTPASLTRPSREQAEEAVRTLIRWAGDDPLREGLLDTPARVTRAYEEFFAGYAQSPQDLLQATFEEVSGYQDMVLLRDIRLESHCEHHIVPIIGKAHVAYMPSSRVVGISKLVRLVEVFAKRLQTQETLTAQIAQALDAALAPRGVAVLIDAAHQCMTTRGVKQPGVSTVTSQFSGVFAADVALQERIWRLL

SEQ ID NO: 11826 - protein, 237 aa, Oceanococcus sp.
  misc_feature (1)..(237): tr|A0A520SWF1|A0A520SWF1_9GAMM GTP cyclohydrolase 1 OS= Oceanococcus sp. OX=1958892 GN=folE PE=3 SV=1
MATARKPASRLVTSGCVFALWPPCVSPPRKRTKSVSAITVGKCQDNTPASLIRPSREQAEEAVRTLIRWAGDDPLREGLLDTPARVTRAYEEFFAGYAQSPQDLLQATFEEVSGYQDMVLLRDIRLESHCEHHIVPIIGKAHVAYMPSSRVVGISKLVRLVEVFAKRLQTQETLTAQIAQALDAALAPRGVAVLIDAAHQCMTTRGVKQPGVSTVTSQFSGVFATDVALQERIWRLL

SEQ ID NO: 11827 - protein, 189 aa, Oceanococcus sp.; identical to SEQ ID NO: 11824
  misc_feature (1)..(189): tr|A0A520SQ87|A0A520SQ87_9GAMM GTP cyclohydrolase 1 OS= Oceanococcus sp. OX=1958892 GN=folE PE=3 SV=1

SEQ ID NO: 11828 - protein, 185 aa, Oceanospirillaceae bacterium
  misc_feature (1)..(185): tr|A0A2E9DLU7|A0A2E9DLU7_9GAMM GTP cyclohydrolase 1 OS= Oceanospirillaceae bacterium OX=1899355 GN=folE PE=3 SV =1
MSEALQGCYAQIIEGLGEDLNRDGLRDTPKRAAKAMAYLCNGYDKSLEEVVNGALFPTNNDEMVIVKDVELYSLCEHHLLPFVGKAHVAYIPTGRVLGLSKIARIVDMFARRLQIQENLTLEIAEAIQGVTGAAGVGVVIEAQHMCMMMRGVEKQNSVMSSSVMLGAFRESNTTRQEFLQLIGRG

SEQ ID NO: 11829 - protein, 301 aa, Oceanospirillaceae bacterium
  misc_feature (1)..(301): tr|A0A2D6DL30|A0A2D6DL30_9GAMM GTP cyclohydrolase FolE2 OS=Oceanospirillaceae bacterium OX=1899355 GN=folE2 PE =3 SV=1
MFIKSLPDVTSDKHAETAGTLQWVGMEDIAVPVAIPSKGNKPYSTSAKAGVYVNLADPKAKGIHMSRLHLMLNNLAELECNKANIDQLLDNMVASQGAISQQAKIKLAFDLMLNKPALLSDESGFQSYPIIIHAEKNNQGYSYELEVTVAYSSTCPCSASLAQQLYAKAVHKSFPGDTIDKAELMDWIQSQAGAVATPHSQRSYAYIRLAIGANNWPDLGALIVQLEAMIGTPVQTAVKRIDEQAFAKLNAENLMFCEDAARRIKFGLEALDYVQDYWFKVEHQESLHAHNAVVIDQKFTA

SEQ ID NO: 11830 - protein, 183 aa, Oceanospirillales bacterium
  misc_feature (1)..(183): tr|A0A3D3E433|A0A3D3E433_9GAMM GTP cyclohydrolase 1 OS= Oceanospirillales bacterium OX=1914300 GN=folE PE=3 SV= 1
MKALSDLYSQVITELGEDVNREGLLDTPQRAAKAMQFLTSGYEQSLEDIVNNAVFASDNDEMVVISDIEMYSMCEHHMLPFIGKVHIGYLPNGNVLGLSKFARITDMFARRLQIQENLTKQIAEAVQQVTGARGVAVVVEARHMCMMMRGVQKQNSSMSSSVMMGSFRESQATRSEFLRLIGK

SEQ ID NO: 11831 - protein, 189 aa, Oceanospirillales bacterium
  misc_feature (1)..(189): tr|A0A2A4YLY7|A0A2A4YLY7_9GAMM GTP cyclohydrolase 1 OS= Oceanospirillales bacterium OX=1914300 GN=folE PE=3 SV= 1
MTKLLDDLAGNYRAIINGLGEDTNREGLQDTPMRAAKAMQFLTRGYQQDLGDLVNNAVFESAMDEMVVVQDIELYSMCEHHMLPFIGKCHIAYLPQGRVLGLSKFARIVDMYARRLQIQENLTRQIAEAVESVTDAKGVAVVIEAQHMCMMMRGVEKQNSKMKTSMMLGQFRKSQATRSEFLNLISNHR

SEQ ID NO: 11832 - protein, 298 aa, Oceanospirillum linum
  misc_feature (1)..(298): tr|A0A1T1HFA0|A0A1T1HFA0_OCELI GTP cyclohydrolase FolE2 OS=Oceanospirillum linum OX=966 GN=folE2 PE=3 SV=1
MNQELPDVARHQVSNIRTPLEWVGMSGIDIPLSLSEPEGSAPLHASVEAQVNLPDVTVKGIHMSRIYRMLDGLSQQDSVTPVDLKAVLEQMVISHSDCGTDSARLVIEFKMLARRSALSTPGLAGWKAYPVKIEAVLQQGVLQLSAAVQVEYSSTCPCSAALARQLIASHFREHFSGEQLTTEVVSDWLETHATYATPHSQRSVASVQVSLGANEGGFGLMPLIDRTEQALATAVQTAVKRADEQAFALLNGQNLMYVEDAARRIQEALSEGYQGVEVSVRHLESLHPHDAVAYTKGF

SEQ ID NO: 11833 - protein, 184 aa, Oceanospirillum linum
  misc_feature (1)..(184): tr|A0A1T1HF68|A0A1T1HF68_OCELI GTP cyclohydrolase 1 OS= Oceanospirillum linum OX=966 GN=folE PE=3 SV=1
MTEKLTGLYETILAELGENPEREGLTDTPKRAAKAMQYLTKGYNETLESVTNGAVFESETDEMVIVKDIELYSMCEHHILPFIGKCHIAYLPTGKVLGLSKFARIVDMYARRLQIQENLTKQIADAVMQVTGARGVAVTIEAKHMCMMMRGVEKQNSVMKSSVMLGAFRESQSTRMEYLQLISN

SEQ ID NO: 11834 - protein, 184 aa, Oceanospirillum multiglobuliferum
  misc_feature (1)..(184): tr|A0A1T4KWL8|A0A1T4KWL8_9GAMM GTP cyclohydrolase 1 OS= Oceanospirillum multiglobuliferum OX=64969 GN=folE PE=3 SV=1
MTEKLASLYETLLTEVGENPKREGLLDTPVRAAKAIKYLTKGYQQTLEEVTNNAIFESEADEMVVVKDIELYSMCEHHLLPFIGKCHIAYLPNGKVLGLSKFARIVDMYARRFQIQENLTKQIADAVMQVTGARGVAVTIEAKHMCMMMRGVEKQNSSMKSSVMLGAFRNSAATRQEYLTLISN

SEQ ID NO: 11835 - protein, 314 aa, Oceanospirillum sp.
  misc_feature (1)..(314): tr|A0A2D5GIV3|A0A2D5GIV3_9GAMM GTP cyclohydrolase FolE2 OS=Oceanospirillum sp. OX=2021254 GN=folE2 PE=3 SV=1
MPDVAATERPQVTGALDWVGMAGIALPLRIQDSLQGEKLCQGQAQTYVSLDQPETKGIHMSRLYLLLEEFCQQQALQPQALQTLLQQQLISHEGLSEQSGIRFNFDLYLQRSALKSDSSGWKAYPITLKVKQKTAQPETSQSAATEIELTVTVAYSSTCPCSASLSRQLLEQAMQDAFAGQEQVSKSELSEWLLSKQGSIATPHSQRSLATVTVRLDAQLQTLPVTELIDQIEGALQTPVQTAVKRQDEQEFARLNGQNLMFCEDAARRIRQGLLNQEIYQDFCLKVEHLESLHAHDAVAFASKGVKGGLRADF

SEQ ID NO: 11836 - protein, 184 aa, Oceanospirillum sp.
  misc_feature (1)..(184): tr|A0A2D5GA19|A0A2D5GA19_9GAMM GTP cyclohydrolase 1 OS= Oceanospirillum sp. OX=2021254 GN=folE PE=3 SV=1
MSEKLADLYETILTELGEDPKREGLLDTPTRAAKAMQYLTRGYHQTLTEVTNGAVFESETDEMVIVKDIELYSMCEHHLLPFIGKCHIAYLPAGKVLGLSKFARIVDMYARRFQIQENLTKQIADAVLEVTGARGVAVTIEAKHMCMMMRGVEKQNSVMKSSVMLGSFRESQATRQEYLQLITS

SEQ ID NO: 11837 - protein, 213 aa, Ochrobactrum anthropi
  misc_feature (1)..(213): sp|A6X0X0|GCH1_OCHA4 GTP cyclohydrolase 1 OS=Ochrobactr um anthropi (strain ATCC 49188 / DSM 6882 / JCM 21032 / NBRC 15819 / NCTC 12168) OX=439375 GN=folE PE=3 SV=1
MDARILKEDDESGLPNKQADVTLLHGKPTQADAEAAVRTLLLWAGDDPEREGLLETPKRVAKAYKELFAGYTESPEEVLGTVFEEVGGYNDLVLVKDISFHSHCEHHMVPIIGKAHVAYLPDHKVVGLSKIARVVDIFARRLQTQESITAQIADSIQRILKPRGVAVMIEAEHMCMAMRGIRKQGSTTITTTFTGEMQVNAEEQVRFMTLTRR

SEQ ID NO: 11838 - protein, 213 aa, Ochrobactrum anthropi; identical to SEQ ID NO: 11837
  misc_feature (1)..(213): tr|A0A137XS66|A0A137XS66_OCHAN GTP cyclohydrolase 1 OS= Ochrobactrum anthropi OX=529 GN=folE PE=3 SV=1

SEQ ID NO: 11839 - protein, 213 aa, Ochrobactrum cytisi; identical to SEQ ID NO: 11837
  misc_feature (1)..(213): tr|A0A1J6I3B7|A0A1J6I3B7_9RHIZ GTP cyclohydrolase 1 OS= Ochrobactrum cytisi OX=407152 GN=folE PE=3 SV=1

SEQ ID NO: 11840 - protein, 206 aa, Ochrobactrum gallinifaecis
  misc_feature (1)..(206): tr|A0A502BMW5|A0A502BMW5_9RHIZ GTP cyclohydrolase 1 OS= Ochrobactrum gallinifaecis OX=215590 GN=folE PE=3 SV=1
MDARILKVDDEINATANLKKPTQAEAEAAVRTLLLWAGENPEREGLLDTPTRVAKSYGELFGGYAESPEDVLGTTFEDVSGYDDMVLVKDISFFSHCEHHMVPIIGKTHVAYLPDGKVLGLSKIARVVDIFARRLQTQESITAQIADSIQRILKPRGVAVMIDAEHMCMAMRGIRKQGSSTITTTFTGEFKSEVNEQVRFMNLIRK

SEQ ID NO: 11841 - protein, 206 aa, Ochrobactrum grignonense
  misc_feature (1)..(206): tr|A0A256FMG2|A0A256FMG2_9RHIZ GTP cyclohydrolase 1 OS= Ochrobactrum grignonense OX=94627 GN=folE PE=3 SV=1
MDARILKIDDESNLPVDLPKPTQAEAEAAVRTLLRWAGDNPDREGLLDTPQRVAKSYSELFGGYAESPEDVLGTTFEEVSGYDDMVLVKDISFFSHCEHHMVPIIGKAHVAYLPDGKVLGLSKIARVVDIFARRLQTQESITAQIAESIQRILKPRGVAVMIDAEHMCMAMRGIRKQGSSTITTTFTGTFKEDVNEQVRFMSLIRK

SEQ ID NO: 11842 - protein, 214 aa, Ochrobactrum haematophilum
  misc_feature (1)..(214): tr|A0A397L136|A0A397L136_9RHIZ GTP cyclohydrolase 1 OS= Ochrobactrum haematophilum OX=419474 GN=folE PE=3 SV=1
MDARILKEENETGLPSKQTNVTPLHGTPTQADAEAAVRTLLLWAGDDPDREGLLETPKRVAKAYKELFAGYTESPEEVLGTVFEEVAGYNDLVLVKDISFFSHCEHHMVPIIGKAHVAYLPDGKVVGLSKVARVVDIFARRLQTQESITAQIADSIQSILKPRGVAVMIEAEHMCMAMRGIRKQGSTTITTTFTGEMKDKVDEQVRFMTLSRSK

SEQ ID NO: 11843 - protein, 215 aa, Ochrobactrum haematophilum; identical to SEQ ID NO: 5824
  misc_feature (1)..(215): tr|A0A2P9HN00|A0A2P9HN00_9RHIZ GTP cyclohydrolase 1 OS= Ochrobactrum haematophilum OX=419474 GN=folE PE=3 SV=1

SEQ ID NO: 11844 - protein, 213 aa, Ochrobactrum intermedium; identical to SEQ ID NO: 11837
  misc_feature (1)..(213): tr|U4VHK0|U4VHK0_9RHIZ GTP cyclohydrolase 1 OS=Ochrobac trum intermedium 229E OX=1337887 GN=folE PE=3 SV=1

SEQ ID NO: 11845 - protein, 213 aa, Ochrobactrum intermedium; identical to SEQ ID NO: 11837
  misc_feature (1)..(213): tr|C4WI97|C4WI97_9RHIZ GTP cyclohydrolase 1 OS=Ochrobac trum intermedium LMG 3301 OX=641118 GN=folE PE=3 SV=1

SEQ ID NO: 11846 - protein, 213 aa, Ochrobactrum lupini; identical to SEQ ID NO: 11837
  misc_feature (1)..(213): tr|A0A256GZ22|A0A256GZ22_9RHIZ GTP cyclohydrolase 1 OS= Ochrobactrum lupini OX=255457 GN=folE PE=3 SV=1

SEQ ID NO: 11847 - protein, 213 aa, Ochrobactrum oryzae
  misc_feature (1)..(213): tr|A0A2S7IXT4|A0A2S7IXT4_9RHIZ GTP cyclohydrolase 1 OS= Ochrobactrum oryzae OX=335286 GN=folE PE=3 SV=1
MDARILKEDDESGLPNKQADVTLLHGKPTQADAEAAVRTLLLWAGDDPEREGLLETPKRVAKAYKELFAGYTESPEEVLGTVFEEVGGYNDLVLVKDISFHSHCEHHMVPIIGKAHVAYLPDHKVVGLSKIARVVDIFARRLQTQESITAQIADSIQRILNPRGVAVMIEAEHMCMAMRGIRKQGSTTITTTFTGEMQVNAEEQVRFMTLTRR

SEQ ID NO: 11848 - protein, 214 aa, Ochrobactrum pecoris
  misc_feature (1)..(214): tr|A0A5C5CJA0|A0A5C5CJA0_9RHIZ GTP cyclohydrolase 1 OS= Ochrobactrum pecoris OX=867683 GN=folE PE=3 SV=1
MDARILKEDDESGLPTNKQANVALLHGKPTQADAEAAVRTLLLWAGDDPEREGLLETPKRVAKAYKELFAGYTESPEEVLGTVFEEVGGYNDLVLVKDISFHSHCEHHMVPIIGKAHVAYLPDHKVVGLSKIARVVDIFARRLQTQESITAQIADSIQRILKPRGVAVMIEAEHMCMAMRGIRKQGSTTITTTFTGEMQVNAEEQVRFMTLTRR

SEQ ID NO: 11849 - protein, 206 aa, Ochrobactrum pseudogrignonense
  misc_feature (1)..(206): tr|A0A256GUQ8|A0A256GUQ8_9RHIZ GTP cyclohydrolase 1 OS= Ochrobactrum pseudogrignonense OX=419475 GN=folE PE=3 S V=1
MDARILKIDDESNPSADLPRPTQADAEAAVRTLLLWAGDNPDREGLLDTPKRVAKSYSELFGGYAESPEDVLGTTFEEVSGYNDMVLVKDISFFSHCEHHMVPIIGKAHVAYLPDGKVLGLSKIARVVDIFARRLQTQESITAQIAESIQRILKPRGVAVMIDAEHMCMAMRGIRKQGSSTITTTFTGTFQEEVNEQVRFMSLIRQ

SEQ ID NO: 11850 - protein, 206 aa, Ochrobactrum pseudogrignonense
  misc_feature (1)..(206): tr|A0A1A9FLF0|A0A1A9FLF0_9RHIZ GTP cyclohydrolase 1 OS= Ochrobactrum pseudogrignonense OX=419475 GN=folE PE=3 S V=1
MDARILKIDDESNPSADLPRPTQAEAEAAVRTLLLWAGDNPDREGLLDTPKRVAKSYSELFGGYDESPEDVLGTTFEEVSGYNDMVLVKDISFFSHCEHHMVPIIGKAHVAYLPDGKVLGLSKIARVVDIFARRLQTQESITAQIAESIQRILKPRGVAVMIDAEHMCMAMRGIRKQGSSTITTTFTGTFQEEVNEQVRFMSLIRQ

SEQ ID NO: 11851 - protein, 206 aa, Ochrobactrum quorumnocens
  misc_feature (1)..(206): tr|A0A248UKG4|A0A248UKG4_9RHIZ GTP cyclohydrolase 1 OS= Ochrobactrum quorumnocens OX=271865 GN=folE PE=3 SV=1
MDARILKIDDESNLPADLPKPTQAEAEAAVRTLLRWAGDNPDREGLLDTPKRVAKSYSELFGGYAESPEDVLGTTFEEVSGYNDMVLVKDISFFSHCEHHMVPIIGKAHVAYLPDGKVLGLSKIARVVDIFARRLQTQESITAQIADSIQRILKPRGVAVMIDAEHMCMAMRGIRKQGSSTITTTFTGTFKEEVNEQVRFMSLIRK

SEQ ID NO: 11852 - protein, 206 aa, Ochrobactrum rhizosphaerae
  misc_feature (1)..(206): tr|A0A256FJC1|A0A256FJC1_9RHIZ GTP cyclohydrolase 1 OS= Ochrobactrum rhizosphaerae OX=571254 GN=folE PE=3 SV=1
MDARILKIDDESNLPADLPKPTQAEAEAAVRTLLRWAGDNPDREGLLDTPKRVAKSYSELFGGYAENPEDVLGTTFEEVSGYDDMVLVKDISFFSHCEHHMVPIIGKAHVAYLPDGKVLGLSKIARVVDIFARRLQTQESITAQIANSIQRILKPRGVAVMIDAEHMCMAMRGIRKQGSSTITTTFTGTFKEEVNEQVRFMSLIRK

SEQ ID NO: 11853 - protein, 206 aa, Ochrobactrum sp.
  misc_feature (1)..(206): tr|A0A4R7WT55|A0A4R7WT55_9RHIZ GTP cyclohydrolase 1 OS= Ochrobactrum sp. LP_5_YM OX=2485134 GN=folE PE=3 SV=1
MDARILKIDDESNLPADLPKPTQAEAEAAVRTLLRWAGDNPDREGLLDTPKRVAKSYSELFGGYTESPEDVLGTTFEEVSGYNDMVLVKDISFFSHCEHHMVPIIGKAHVAYLPDGKVLGLSKIARVVDIFARRLQTQESITAQIADSIQRILKPRGVAVMIEAEHMCMAMRGIRKQGSSTITTTFTGTFKEEVNEQVRFMSLIRK

SEQ ID NO: 11854 - protein, 215 aa, Ochrobactrum sp.; identical to SEQ ID NO: 5824
  misc_feature (1)..(215): tr|A0A5C5CY80|A0A5C5CY80_9RHIZ GTP cyclohydrolase 1 OS= Ochrobactrum sp. LCB8 OX=2479765 GN=folE PE=3 SV=1

SEQ ID NO: 11855 - protein, 206 aa, Ochrobactrum thiophenivorans
  misc_feature (1)..(206): tr|A0A256FWB7|A0A256FWB7_9RHIZ GTP cyclohydrolase 1 OS= Ochrobactrum thiophenivorans OX=571255 GN=folE PE=3 SV= 1
MDARILKIDDESTSSAYLPKPTQAEAEAAVRTLLRWAGDNPDREGLLDTPMRVTKSYSELFGGYAESPEDVLGTTFEEVSGYDDMVLVKDISFFSHCEHHMVPIIGKAHVAYLPDGKVLGLSKIARVVDIFARRLQTQESITAQIAGSIQRILKPRGVAVMIDAEHMCMAMRGIRKQGASTITTTFTGEYKSEVHEQVRFMSLIRQ

SEQ ID NO: 11856 - protein, 191 aa, Unknown
  misc_feature (1)..(191): tr|A0A2A4Z8V5|A0A2A4Z8V5_9PROT GTP cyclohydrolase 1 OS= OCS116 cluster bacterium OX=2030921 GN=folE PE=3 SV=1
MSELVKPSREEAEAAVKTLLAWAGDNTEREGLLDTPRRVVKAYEQYFKGYDEDPIEILGRRFDEVGGYDDIVLLRDINFHSHCEHHMAPFIGKAHVAYIPNKAVVGISKIARVVDIYARRLQIQEKMTMQIADAIEEALQPRGVAVFVQAEHQCMSMRGVMKPNVDTITTQFRGEYSTPEMKAAFMSMIRS

SEQ ID NO: 11857 - protein, 392 aa, Octadecabacter antarcticus
  misc_feature (1)..(392): tr|M9RBK0|M9RBK0_9RHOB GTP cyclohydrolase FolE2 OS=Octa decabacter antarcticus 307 OX=391626 GN=folE2 PE=3 SV=1
MEKDRTHPHLDVLRAVPKGNAMNIQSKDLNRDLTHEDAAEALALLRNWAGQVTDEEVAALDPLVSRLVPGREVSNYPALARAYPEEFEVDDVYKASMPDLQNGPSSLIKGAKRAIQHVGISNFRLPIRFHTRVGKSVGDDLTLETSVTGTVSLEAEKKGINMSRIMRTFYKHAEETFSFEVIDAALDAYKTDLDSFDARIMMRMSFPMKVDSLRSGLAGYQYYDIALELIETGGQRKKIVHLDYVYSSTCPCSLELSEHARQFRGQLATPHSQRSVARVSVELAPEGDVLWFEDLIDICRAAVPTETQVMVKREDEQAFAELNAANPIFVEDAARLFAQKLQSDARVADYRVIASHQESLHSHDAVSVLTEGTTFDAESLDPRLFASLFHVG

SEQ ID NO: 11858 - protein, 392 aa, Octadecabacter arcticus
  misc_feature (1)..(392): tr|M9RLW0|M9RLW0_9RHOB GTP cyclohydrolase FolE2 OS=Octa decabacter arcticus 238 OX=391616 GN=folE2 PE=3 SV=1
MEKDRIHPHLDVLRGVPKGDSMNIRPKDLNRDLTHEDAAEALALLRNWAGQVTDEEVAALDPLVSRLVPGREVSNYPALARAYPEEFEVDDVYKASMPDLQNGPSSLIKGAKRAIQHVGISNFRLPIRFHTRSGKAVGDDLTLETSVTGTVSLEAEKKGINMSRIMRTFYKHAEETFSFEVIDAALDAYKTDLDSFDARIMMRMSFPMKVNSLRSGLVGYQYYDIALELIEAGGQRKKIVHLDYVYSSTCPCSLELSEHARQFRGQLATPHSQRSVARVSVELAPEADVLWFEDLIDMCRAAVPTETQVMVKREDEQAFAELNAANPIFVEDAARLFAQQMQADPRIADYRVIASHQESLHSHDAVSVLTEGTTFDAESLDPRLFQSLFHVG

SEQ ID NO: 11859 - protein, 388 aa, Octadecabacter ascidiaceicola
  misc_feature (1)..(388): tr|A0A238K4V4|A0A238K4V4_9RHOB GTP cyclohydrolase FolE2 OS=Octadecabacter ascidiaceicola OX=1655543 GN=folE2 P E=3 SV=1
MENDHDHPHVEVLRALSEGDDMNIHTSEPERTLTHEEAAEALALLRHWAGQVSEEEVVALDPLVSRLVPGRELSNYPALARAYPEEFEVDETYKASMPDLQNGPSSLIKGAKRAIQHVGISNFRLPIRFHRRDGADLTLETSVTGTVSLEAEKKGINMSRIMRTFYKHAEKTFSFEVIDAALDAYKTDLESFDARIMMRTSFPMKVNSLRSGLSGYQYYDIALELIEADNVRKKIVHLDYVYSSTCPCSLELSEHARQFRGQLATPHSQRSVARVSVEMAQDADILWFEDLIDMCRAAVPTETQVMVKREDEQAFAELNAANPIFVEDAARLFAETFQADVRIADYRVIASHQESLHSHDAVSVLTEGSTFDAESLDPRLFATLFHVG

SEQ ID NO: 11860 - protein, 367 aa, Octadecabacter sp.
  misc_feature (1)..(367): tr|A0A5B9ETF2|A0A5B9ETF2_9RHOB GTP cyclohydrolase FolE2 OS=Octadecabacter sp. SW4 OX=2602067 GN=folE2 PE=3 SV= 1
MNIHQPDAARAPSRAEAEDALALLRRWAVDATAEEVATLDPLVSRLIPGSELPNYPALARAYPEDFAVDEAYRAMLPDLQNGPASLIRGAKQQIQHVGISNFRLPIRFHTRDGDDLTLETSVTGTVSLEAEKKGINMSRIMRTFYKHAGETFSFDVIERALEAYKADLDSFDARIQMRFSFPMKVQSLRSGLEGFQYYDIALVLIEQKGVAKKIVHLDYVYSSTCPCSLELSEHARQYRGQLATPHSQRSVARISVELEQDAPCLWFEDLIDICRAAVPTETQVMVKREDEQAFAELNAANPIFVEDAARSFCEKLQQDQRIRDFRVVASHQESLHSHDAVSVLTEGQTFAADSLDPKLFATLFHIG

SEQ ID NO: 11861 - protein, 388 aa, Octadecabacter temperatus
  misc_feature (1)..(388): tr|A0A0K0Y3H3|A0A0K0Y3H3_9RHOB GTP cyclohydrolase FolE2 OS=Octadecabacter temperatus OX=1458307 GN=folE2 PE=3 SV=1
MENDHDHPHVEVLRAASKGDDMNIQTGEPERTLTHAEAAEALALLRHWAGQVSEEEVAALDPLVSRLVPGRELSNYPALARAYPEEFEVDETYKASMPDLQNGPSSLIKGAKRAIQHVGISNFRLPIRFHRRDGDDLTLETSVTGTVSLEAEKKGINMSRIMRTFYKHAEKTFSFEVIDAALDAYKTDLESFDARIMMRTSFPMKVDSLRSGLSGYQYYDIALELIEADGVRKKIVHLDYVYSSTCPCSLELSEHARQFRGQLATPHSQRSVARVSVEMAQDADILWFEDLIDMCRAAVPTETQVMVKREDEQAFAELNAANPIFVEDAARLFAETFQADKRITDYRVIASHQESLHSHDAVSVLTEGSTFDAESLDPRLFATLFHVG

SEQ ID NO: 11862 - protein, 207 aa, Odoribacter laneus
  misc_feature (1)..(207): tr|R5US47|R5US47_9BACT GTP cyclohydrolase 1 OS=Odoribac ter laneus CAG:561 OX=1263089 GN=folE PE=3 SV=1
MEQEITNEEEFYKKVEYFNAERTKQLSYHYQEILKLLGEDPEREGLLKTPLRVAKAMQFMTQGYSQNPEEILSSALFKEDYRQMVIVKDIEIYSLCEHHMLPFYGRAHVAYIPNGYVTGLSKIARVVETYARRLQVQERLTYEIKNCIQNTLHPLGVAVVIEAKHMCMAIRGVEKQNSVTTTSDFSGAFEKLATREEFIRLISSKLH

SEQ ID NO: 11863 - protein, 207 aa, Odoribacter laneus; identical to SEQ ID NO: 11862
  misc_feature (1)..(207): tr|H1DJ90|H1DJ90_9BACT GTP cyclohydrolase 1 OS=Odoribac ter laneus YIT 12061 OX=742817 GN=folE PE=3 SV=1

SEQ ID NO: 11864 - protein, 208 aa, Odoribacter sp.; identical to SEQ ID NO: 5920
  misc_feature (1)..(208): tr|A0A373U9L6|A0A373U9L6_9BACT GTP cyclohydrolase 1 OS= Odoribacter sp. AF21-41 OX=2293111 GN=folE PE=3 SV=1

SEQ ID NO: 11865 - protein, 208 aa, Odoribacter sp.
  misc_feature (1)..(208): tr|A0A1Q6II96|A0A1Q6II96_9BACT GTP cyclohydrolase 1 OS= Odoribacter sp. 43_10 OX=1897010 GN=folE PE=3 SV=1
MKYTELNDCEEFYHKVEYYNKTKTEQLSYHYKEILKLLGEDPDREGLVKTPYRVAKAMQFMTRGYHENPEEILRSALFKEDYRQMVIVKNIEIYSMCEHHMLPFIGQAHVAYIPNGYITGLSKIARVVEAFSRRLQVQERLTNDIKNCIQNTLNPLGVAVVIEAQHMCMMMRGVQKQNSVTTTSDFSGAFEKLATREEFIRLISNKFH

SEQ ID NO: 11866 - protein, 208 aa, Odoribacter splanchnicus
  misc_feature (1)..(208): tr|F9ZBT1|F9ZBT1_ODOSD GTP cyclohydrolase 1 OS=Odoribac ter splanchnicus (strain ATCC 29572 / DSM 20712 / CIP 1 04287 / JCM 15291 / NCTC 10825 / 1651/6) OX=709991 GN=f olE PE=3 SV=1
MKYTELDDCEEFYHKVEYYNKTKTEQLSYHYKEILKLLGEDPDREGLVKTPYRVAKAMQFMTRGYHENPEEILRSALFKEDYRQMVIVKNIEIYSMCEHHMLPFIGQAHVAYIPNGYITGLSKIARVVEAFSRRLQVQERLTNDIKNCIQNTLNPLGVAVVIEAQHMCMMMRGVQKQNSVTTTSDFSGAFEKLATREEFIRLISNKFH

SEQ ID NO: 11867 - protein, 208 aa, Odoribacter splanchnicus; identical to SEQ ID NO: 11866
  misc_feature (1)..(208): tr|R6G2P2|R6G2P2_9BACT GTP cyclohydrolase 1 OS=Odoribac ter splanchnicus CAG:14 OX=1263090 GN=folE PE=3 SV=1

SEQ ID NO: 11868 - protein, 351 aa, Oenococcus sp.
  misc_feature (1)..(351): tr|A0A3T0TMZ4|A0A3T0TMZ4_9LACT GTP cyclohydrolase 1 OS= Oenococcus sp. UCMA 16435 OX=2259623 GN=folE PE=3 SV=1
MENVFLSLGSNLGNRQLNLQRAIKYLGQNENILIETASSYYETSPVGNLDQANFLNMAVKICTKLSPRELLLYIHQIETKLKRTREIHWGPRTLDIDIIFFGKQTISDSKLIIPHPETFKRLFVLEPILEICDTNLIYYQEIKESIKELKNGQQKIRIVRKEEFGQQKIEQAVKQLLEAIGEDPKRPGLTETPTRVARMYQEIFSAQGIDEFTDYKIFQIPETDNPQMILIKDIRFNSVCEHHLLPFFGKVSLAYIPKDGKIIGLSKIPRLIDFVSHRLNIQEKMTANIAEIFNEILQPKGVAVLTNARHMCMEMRGIKKIGETTQMTYFSGLFDSQSQLQTQFLKMLEQK

SEQ ID NO: 11869 - protein, 203 aa, Oerskovia enterophila
  misc_feature (1)..(203): tr|A0A163RG82|A0A163RG82_9CELL GTP cyclohydrolase 1 OS= Oerskovia enterophila OX=43678 GN=folE PE=3 SV=1
MAQVPDQGLRAPADVPEYDEERARAAVRELLLAVGEDPDREGLQETPSRVARAYREIFAGLRQEPSDVLTTMFDLGHEEMVLVKDIEVYSTCEHHLVPFHGVAHVGYIPNVDGRITGLSKLARLVDVFARRPQVQERLTSQIADALVENLAPRGVIVVVECEHLCMSMRGVRKPGSRTVTSAVRGQMRDGATRAEAMSLILGR

SEQ ID NO: 11870 - protein, 307 aa, Oerskovia enterophila
  misc_feature (1)..(307): tr|A0A163R9H5|A0A163R9H5_9CELL Putative GTP cyclohydrol ase 1 type 2 OS=Oerskovia enterophila OX=43678 GN=OJAG_ 23530 PE=4 SV=1
MTAVRRRAADSLVPVTAHPTLAHVVRTLEALYPPSTAEGWDAVGLVTGDPAQPVRKILFAVDPVATVADEAIEWGADLIVTHHPLFLRPVHSIAATTFKGSLVHRLVRAGVGLYVAHTNADAAPRGVADALADAIGLVDRSPLVPAPSAPDGGAYPVETGIGRVGRLEEPTTLRAFAQRVATALPATEQGVRVAGDLDAAVSTVAVVGGSGDSLFDAVRSAGADVYVTADLRHHPASELRERAEYEGGAAGGPFLVDVAHFASEWPWLRYAAADLTERLADAGTVETRVSVRRTDPWTARIGSAPRA

SEQ ID NO: 11871 - protein, 200 aa, Oerskovia sp.
  misc_feature (1)..(200): tr|A0A0Q9CWP1|A0A0Q9CWP1_9CELL GTP cyclohydrolase 1 OS= Oerskovia sp. Root918 OX=1736607 GN=folE PE=3 SV=1
MPDQGLRAPADVPEYDEERARAAVRELLLAVGEDPDREGLQETPSRVARAYREIFAGLRQEPSDVLTTMFDLGHEEMVLVKDIEVYSTCEHHLVPFHGVAHVGYIPNVDGRITGLSKLARLVDVFARRPQVQERLTSQIADALVENLAPRGVIVVVECEHLCMSMRGVRKPGSRTVTSAVRGQMRDGATRAEAMSLILGR

SEQ ID NO: 11872 - protein, 195 aa, Oerskovia turbata
  misc_feature (1)..(195): tr|A0A4Q1L3A1|A0A4Q1L3A1_9CELL GTP cyclohydrolase 1 OS= Oerskovia turbata OX=1713 GN=folE PE=3 SV=1
MRAAADVPEYDEERARAAVRELLLAVGEDPDREGLQETPARVARAYREIFGGLRQEPADVLTTMFDLGHEEMVLVKDIEVYSTCEHHLVPFHGVAHVGYIPNADGRITGLSKLARLVDVYARRPQVQERLTTQIADALVEHLEPRGVIVVVECEHLCMSMRGVRKPGSRTVTSAVRGQMRDGATRAEAMSLILGR

SEQ ID NO: 11873 - protein, 211 aa, Oharaeibacter diazotrophicus
  misc_feature (1)..(211): tr|A0A4R6RK03|A0A4R6RK03_9RHIZ GTP cyclohydrolase 1 OS= Oharaeibacter diazotrophicus OX=1920512 GN=folE PE=3 SV =1
MDAILTPAGLLQRSAPATDAPRRRPTREEAEAAVRTLIAWAGDDPTREGLLDTPKRVVKAYGELFRGYDEDPHAVLDRVFEEVSGYDDLVLVRDIPFQSHCEHHMVPFVGKAHVAYYPAEGVVGLSKLARVVDIYARRLQTQETMTAQIVAAIDEALKPRGIAVMIEAEHMCMSMRGVQKAGVSTLTTQFTGVFRDDPTEQVRFMTLVRSK

SEQ ID NO: 11874 - protein, 229 aa, Ohtaekwangia koreensis
  misc_feature (1)..(229): tr|A0A1T5M3P1|A0A1T5M3P1_9BACT GTP cyclohydrolase 1 OS= Ohtaekwangia koreensis OX=688867 GN=folE PE=3 SV=1
MRQKGISLNIRPVNPEEEDIADDHVATSADTPMREDAFNMDDEEKIDLIEKHFREIMNILGLDLTDDSLNGTPRRVAKMYVKEVFSGLNPKNRPHARLFENKYNYDQMLVEKDITFYSHCEHHFVPIYGKVHVAYFSSGKVIGLSKINRIVQYFSKRPQVQERLTVQIGKEMQRVLQTEDVGVVIDANHMCVASRGVGDTNSKTGTAYFSGKFKDENIKREFLNYINSK

SEQ ID NO: 11875 - protein, 212 aa, Okeania hirsuta
  misc_feature (1)..(212): tr|A0A3N6PEB0|A0A3N6PEB0_9CYAN GTP cyclohydrolase 1 OS= Okeania hirsuta OX=1458930 GN=folE PE=3 SV=1
MTLPTVPDFVSTNDLKTKSQPPVTEAEMIQAVRTLLIGLGENPDREGLLDTPKRVVKALKFLTSGYHQSLDELLNGAVFNEDISEMVLVRDIDLFSSCEHHILPILGRAHVAYIPNGKVIGLSKIARICEMYARRLQVQERLTAQIADALQGLLQPLGVAVVVEATHMCMVMRGVQKPGSWTTTSAMRGVFADDVKTRQEFMSLIKHSNSFH

SEQ ID NO: 11876 - protein, 237 aa, Okeania hirsuta
  misc_feature (1)..(237): tr|A0A3N6R778|A0A3N6R778_9CYAN GTP cyclohydrolase 1 OS= Okeania hirsuta OX=1458930 GN=folE PE=3 SV=1
MTQTFSNASNNTISTNGVKTSTNGISHRPDRSSSSNGQPIKQQPPATETNEAMMEAVRTMLLSVGENPEREGLLKTPKRVAEAMRFLTQGYNQSLEEIVNNAIFDEGHNEMVLVRDINLFSLCEHHMLPFMGKAHVAYIPNQKVVGLSKLARIVEMYSRRLQVQERLNRQIAEAIQQVLEPKGVAVVIEATHTSMVMRGVQKPGSWTVTSAMLGLFEEDQKVREEYLSLIRHQPAFF

SEQ ID NO: 11877 - protein, 198 aa, Okibacterium fritillariae
  misc_feature (1)..(198): tr|A0A1T5KU81|A0A1T5KU81_9MICO GTP cyclohydrolase 1 OS= Okibacterium fritillariae OX=123320 GN=folE PE=3 SV=1
MTGVDRPRIEAAVRELLAAIGEDVSREGLAETPRRVGEAYAEFFGGLHVDAEAFLANTVPVGDRAGEVVLVRDIAFRSICEHHLLPFLGTAHVAYVPGEHVVGLGSLPRVVDAIASRPQMQERLTEEIADTLERGLQARGVLVVLDAVHGCVVARGQQQRDSSTVTVASRGTLGDPAARAEIFALIGARPAPDAGATP

SEQ ID NO: 11878 - protein, 186 aa, Olavius algarvensis
  misc_feature (1)..(186): tr|A0A3P5VLH0|A0A3P5VLH0_9SPIR GTP cyclohydrolase 1 OS= Olavius algarvensis spirochete endosymbiont OX=260710 G N=folE PE=3 SV=1
MNKQRVEKLIRSLLIEIGENPDREGLCGTPQRVTESWNFLSSGYRSNLEEIVRGAVFKSDSNNMILCKDIEVYSICEHHMLPFFGTCTIGYISKVKIVGVSKLARMVNHFSRRLQLQERLTTDIAKAVMRLVDADGAGVVINAKHMCMTMRGVEKQHSSMTTSSVLGSFHSDPSTRTEFLTLATKC

SEQ ID NO: 11879 - protein, 318 aa, Oleiagrimonas soli
  misc_feature (1)..(318): tr|A0A099CWI0|A0A099CWI0_9GAMM GTP cyclohydrolase FolE2 OS=Oleiagrimonas soli OX=1543381 GN=folE2 PE=3 SV=1
MANDDNTARALSDVAHQAQAQVAGTLDWVGMDSIQAPLLVTDADGQTQRVAARVDAHVNLHRPEARGIHMSRLYLLVEQALTAEPLAPCMLRKLLHGFLDTHADLSDRARLRIRFEHLLRRSALKSDHSGWRSYPVTVTAIMRDGQVDVELAVDIVYSSTCPASAALSRQLIQQQFATDFGADTALDREAVLAWLGSEQGMVATPHAQRSTASLRLRMAPAFGFDLESIIDRVEHALGTPVQTAVKREDEQAFALANGQNLMFCEDAARRIQAALDADERIADFAVRVAHHESLHPHDAVAHASKGVDGGYRGSAFDD

SEQ ID NO: 11880 - protein, 197 aa, Oleiagrimonas soli
  misc_feature (1)..(197): tr|A0A099CSM1|A0A099CSM1_9GAMM GTP cyclohydrolase 1 OS= Oleiagrimonas soli OX=1543381 GN=folE PE=3 SV=1
MSDPSNTDVTREQAEEAVRVLLRWAGEDPSREGLLDTPKRVVKAYGDWFSGYTEDPGEYLRRTFEEVEGYDELVVLRGIEFESHCEHHMAPIIGRAHVGYLPDKKVVGISKLARVVDGYARRFQVQEKLTAQIANCIQETLQPRGVGVVIDASHECMTTRGVHKRGVSMVTSQMLGTFREDARTRAEFLRFIDIDGH

SEQ ID NO: 11881 - protein, 205 aa, Oleiagrimonas sp.
  misc_feature (1)..(205): tr|A0A328SVB7|A0A328SVB7_9GAMM GTP cyclohydrolase 1 OS= Oleiagrimonas sp. MCCC 1A03011 OX=1926883 GN=folE PE=3 SV=1
MPWADTPALDSKPGTRKAKARPTRSEAEGAVRTLIRWAGDRPSREGMADTPARVVKAYEEWFRGYAVDPESLLRRTFEHAGYKEVVVLRDIPVQSICEHHMAPIRGMAHVAYLPNSRVVGISKLARVVDAYARRFQIQERLTVEIADVIQRALEPRGVAVVIKAAHECISSRGIQMHGVSMVTRHVMGHFEQEPHRRDIMTMLSP

SEQ ID NO: 11882 - protein, 197 aa, Oleiagrimonas sp.
  misc_feature (1)..(197): tr|A0A328T2H1|A0A328T2H1_9GAMM GTP cyclohydrolase 1 OS= Oleiagrimonas sp. MCCC 1A03011 OX=1926883 GN=folE PE=3 SV=1
MSDPTHSDVTREQAEDAVRVLLRWAGEDPSREGLLDTPKRVVKAYRDWFSGYEEDPGEYLRRTFEEVEGYDELVVLRGIEFESHCEHHMAPIIGRAHVGYLPDKKVVGISKLARVVDGFARRFQVQEKLTAQIAHCILETLQPRGVGVVIDASHECMTTRGVHKRGVSMVTSQMLGTFREDARTRAEFLRFIDIDGH

SEQ ID NO: 11883 - protein, 183 aa, Oleibacter marinus
  misc_feature (1)..(183): tr|A0A1N7P9K5|A0A1N7P9K5_9GAMM GTP cyclohydrolase 1 OS= Oleibacter marinus OX=484498 GN=folE PE=3 SV=1
MSKLESLYSDVLTELGEDVSREGLLDTPKRAAKAMQFLTSGYETKIDEVVNGAVFSSDNDEMVVVEGIEFYSLCEHHMLPFIGRCHIGYLPNGKVLGLSKFARIVDMFGRRLQIQENMTKQIAEAVEEVTGCRGVGVIVEAKHMCMMMRGVQKQNSMMRTSVMKGDFRANQATREEFMRLVGL

SEQ ID NO: 11884 - protein, 307 aa, Oleibacter marinus
  misc_feature (1)..(307): tr|A0A1N7QAL6|A0A1N7QAL6_9GAMM GTP cyclohydrolase FolE2 OS=Oleibacter marinus OX=484498 GN=folE2 PE=3 SV=1
MYPSQATQSTRSLPDVSVTDKAHAGGGLTHVGMNAIDLPITLSELIEHPTVNARVSATVNLPAPDIKGIHMSRLYQRLLPFGDSELLTPNALQRLLTDMISSHETCSSTAAEVSFSFILLLKKSALKTLDAYGWSHYPVEIRARMQNNKTTIQLRVSVGYSSTCPCSAALSRQMIAEQFLEDFQHDSANLNAETVAHWLKDNATYATPHSQRSRADIEVIIDNLSTGFGLTSLIGKIENALQTPLQTAVKRIDEQAFARLNGSNLMFVEDAARRLSSALSPHYSGLKVDVSHFESLHPHDAVASFSA

SEQ ID NO: 11885 - protein, 183 aa, Oleibacter sp.
  misc_feature (1)..(183): tr|A0A2D8AD51|A0A2D8AD51_9GAMM GTP cyclohydrolase 1 OS= Oleibacter sp. OX=2024845 GN=folE PE=3 SV=1
MSDLESLYRQVLAGLGEDTEREGLLDTPKRAAKAMQFLTSGYETNLTEVINNAVFTSDNDEMVVVQGIEFYSLCEHHVLPFIGRCHIGYLPDGQVLGLSKFARIVDMFARRLQIQENMTKQIAEAVQEVTGCRGVGVIVEAQHMCMMMRGVQKQNSMMRTSVMLGDFRSSQATRDEFMRLVGL

SEQ ID NO: 11886 - protein, 184 aa, Oleiphilus messinensis; identical to SEQ ID NO: 11833
  misc_feature (1)..(184): tr|A0A1H5T3T0|A0A1H5T3T0_9GAMM GTP cyclohydrolase 1 OS= Oleiphilus messinensis OX=141451 GN=folE PE=3 SV=1

SEQ ID NO: 11887 - protein, 185 aa, Oleiphilus messinensis
  misc_feature (1)..(185): tr|A0A1Y0I296|A0A1Y0I296_9GAMM GTP cyclohydrolase 1 OS= Oleiphilus messinensis OX=141451 GN=folE PE=3 SV=1
MPEKMESHYRQIIEAVGENPDREGLRDTPARAAKAMAFLTRGYHQNLEEVVNNATFESDNDEMVIVQNIELYSMCEHHLLPFVGKCHIAYLPQGRVLGLSKFARIVDMFARRLQIQENLTREIAEAVQQVTQARGVGVVIEAQHMCMMMRGVEKQNSVMSTSVMLGALRNSQATRNEFLTLIGKR

SEQ ID NO: 11888 - protein, 183 aa, Oleispira antarctica
  misc_feature (1)..(183): tr|R4YNA1|R4YNA1_OLEAN GTP cyclohydrolase 1 OS=Oleispir a antarctica RB-8 OX=698738 GN=folE PE=3 SV=1
MKALSDLYSQVITELGEDVNREGLLDTPKRAAKAMQFLTSGYEQSLEVIVNNAVFASDNDEMVVISDIEMYSMCEHHMLPFIGKVHIGYLPNGQVLGLSKLARITDMFARRLQIQENLTKQIAEAVQEVTGARGVAVVIEARHMCMMMRGVQKQNSSMSTSVMMGSFRESPATRSEFLRLIGK

SEQ ID NO: 11889 - protein, 183 aa, Oleispira antarctica
  misc_feature (1)..(183): tr|A0A1Y5HW05|A0A1Y5HW05_OLEAN GTP cyclohydrolase 1 OS= Oleispira antarctica OX=188908 GN=folE PE=3 SV=1
MKALSNLYSQVITELGEDVNREGLLDTPNRAAKAMQFLTSGYETSLEDIVNNAVFASDNDEMVVISNVEMYSMCEHHMLPFIGKVHIGYLPNGNVLGLSKFARITDMFARRLQIQENLTKQIADAVQEVTGARGVGVVIEARHMCMMMRGVEKQNSSMSTSVMLGAFREQPATRSEFFRLIGK

SEQ ID NO: 11890 - protein, 183 aa, Oleispira sp.; identical to SEQ ID NO: 11830
  misc_feature (1)..(183): tr|A0A2E3BEN4|A0A2E3BEN4_9GAMM GTP cyclohydrolase 1 OS= Oleispira sp. OX=2024846 GN=folE PE=3 SV=1

SEQ ID NO: 11891 - protein, 221 aa, Oleomonas sp.
  misc_feature (1)..(221): tr|A0A418WG31|A0A418WG31_9PROT GTP cyclohydrolase 1 OS= Oleomonas sp. K1W22B-8 OX=2320859 GN=folE PE=3 SV=1
MKLAGKPARPARGRESGNLVLGSARTDKPTREEAEAAVRTLLLWAGDDPDREGLADTPGRVVRSYEEFFAGYDADPVEMLNRTFEEVDGYDEMIVLKDIRLESYCEHHMVPIIGKAHVGYLPSTRVVGISKLARVVDAYAKRFQVQEKLTAQIANSIEEVLQPRGVAVIIEAAHQCMTTRGVHKPGVALVTSRMLGAFRHDPLTRREFLTIVGNPSSSFGV

SEQ ID NO: 11892 - protein, 268 aa, Oligella ureolytica
  misc_feature (1)..(268): tr|A0A378XJF0|A0A378XJF0_9BURK GTP cyclohydrolase FolE2 OS=Oligella ureolytica OX=90244 GN=folE2 PE=3 SV=1
MKSTELNTPAMPDVQGSVDERSVQIDRVGVRQVKHPLSVKNGQGAILGTVGVWDTAVLLPASEKGTHMSRFMGLIDEYHAKGMDAKLFKEMAADMLPLLNAEEGEIRVTFPYFITKKAPVSGVSSMMDYEVTWVALADKEKGVRFITEVVVPVMSLCPCSKAISDYGAHNQRSHVTVKLEATEDYVLDDFIKAIEEQGSSQLWALLKRPDEKYVTETSYDNPKFVEDLIRDVALRVKQWPGLVAYRVEVENFESIHNHSAYAVLEGTA

SEQ ID NO: 11893 - protein, 232 aa, Oligella ureolytica
  misc_feature (1)..(232): tr|A0A378XDY5|A0A378XDY5_9BURK GTP cyclohydrolase 1 OS= Oligella ureolytica OX=90244 GN=folE PE=4 SV=1
MSGSDTDTTYISNVIRKRITTAGARFNANDNIAEFIEDGELELLQQEVEKKMTEVLKSLVIDIETDHNTQETARRVAKMYVREVFAGRYHKMPPITEFPNIEQLSELIIIGPIQVRSACSHHLCPIMGQVWVGVLPDSDSNLIGLSKYARLTQWVMGRPQIQEEAIVQLADLLVDKMNPRGLAIVMRADHFCMQWRGVKDMNSKMINSVMRGAFLKNSDLRKEFLDLLTKTE

SEQ ID NO: 11894 - protein, 268 aa, Oligella urethralis
  misc_feature (1)..(268): tr|A0A2X1WJ62|A0A2X1WJ62_9BURK GTP cyclohydrolase FolE2 OS=Oligella urethralis OX=90245 GN=folE2_1 PE=3 SV=1
MKLTESTAAVMPDVQGSTDLRRIQIDRVGVRKVKHPLTIKNGQGDVLATVGMWETTVLLPATEKGTHMSRFMGLIDEYHAQGMDATLFKQMATAMLPLLNAEEGEIRVTFPYFITKKAPVSGVASMMDYEVTWTAIATTDGVRLITEVVVPVMSLCPCSKAISEYGAHNQRSHVTVRLEAGSDYVLDDLIRAIEEQGSSQLWALLKRPDEKYVTEYSYDNPKFVEDLIRDVALRLHQWPGMIAYRVEVENFESIHNHSAYAMLEGRAE

SEQ ID NO: 11895 - protein, 231 aa, Oligella urethralis
  misc_feature (1)..(231): tr|A0A2X1WFM6|A0A2X1WFM6_9BURK GTP cyclohydrolase 1 OS= Oligella urethralis OX=90245 GN=folE_2 PE=4 SV=1
MSDSDSKYISNIIRQRIQHAGARFNANDNIADFIEEGELDQLQAEVEEKMTEVLKSLVIDIDTDHNTQETARRVAKMYVREVFGGRYHSMPPITEFPNIEKLSELIIIGPIQVRSACSHHLCPIMGQVWIGVLPDSNSNLIGLSKYARITNWVMGRPQIQEEAIVQLADLLNDKMKPQGLAIVMKADHFCMQWRGVKDMNSKMINSVMRGAFLKNSDLRKEFLDLLPLNKN

SEQ ID NO: 11896 - protein, 210 aa, Oligotropha carboxidovorans
  misc_feature (1)..(210): tr|B6JAN4|B6JAN4_OLICO GTP cyclohydrolase 1 OS=Oligotro pha carboxidovorans (strain ATCC 49405 / DSM 1227 / KCT C 32145 / OM5) OX=504832 GN=folE1 PE=3 SV=1
MSNLSNVQVLERDRKAEEESARPDRAEVEAAVRTIIRWAGDDPKRDGLIETPSRVARAFEEFFIGYSQNPTTILQKTFEEIDGYDEMITLRAVRFESHCEHHMAPIVGKAWVAYIPNGRVVGISKLARVVEVYAKRLQIQEKMTAQIANTINEVLKPQGVAVLIKAQHHCMTTRGIHKPGTDLVTSRMLGCFRDNATTRQEFLSMTTDPE

SEQ ID NO: 11897 - protein, 227 aa, Oligotropha carboxidovorans
  misc_feature (1)..(227): tr|B6JEN3|B6JEN3_OLICO GTP cyclohydrolase 1 OS=Oligotro pha carboxidovorans (strain ATCC 49405 / DSM 1227 / KCT C 32145 / OM5) OX=504832 GN=folE2 PE=3 SV=1
MDAVIKPLRSKLDKTEVPAAEIDQAGVRPDQPRPTREEAESAVKTLLSYIGENPSREGLLDTPRRMVEAYDELFQGYHQCPAEVLNRTFGETAGYDDFVLIRDIEFHSHCEHHVMPFYGKAHIAYTPVDRVVGLSKIARLVDAFAHRLQTQEHLTAQIAAALDKVLQPRGVAVLLEAEHTCMSVRGIAKHGAKTVTSRFTGMFYDNPDEQNRFLHMVRGISAPFAGA

SEQ ID NO: 11898 - protein, 213 aa, Olivibacter sp.
  misc_feature (1)..(213): tr|A0A5C0ZF61|A0A5C0ZF61_9SPHI GTP cyclohydrolase 1 OS= Olivibacter sp. LS-1 OX=2592345 GN=folE PE=3 SV=1
MNINNNEAPLDDEELDGYVKIDRYNTDKIESIANHYEDILSQLGENPKRQGLLKTPERIAKALQYLTHGYDIDPAAILKSAMFEEDYSQMVVVKDIEVYSMCEHHLLPFFGKAHIAYIPKGHIVGLSKIPRVVDAFARRLQVQERLTNEIRDCIQETLNPAGVAVVIECKHLCMAMRGIQKQNSVTTTSAFTGEFAHERTRAEFLRLITASLD

SEQ ID NO: 11899 - protein, 225 aa, Olleya aquimaris
  misc_feature (1)..(225): tr|A0A327R4V4|A0A327R4V4_9FLAO GTP cyclohydrolase 1 OS= Olleya aquimaris OX=639310 GN=folE PE=3 SV=1
MKIENNIEENDAIGENHISTNHDTPLRLDAFKLSDSDKIESIKKDVTNIMETLGLDLTDDSLKGTPKRVAKMFVNEIFGGLHPDKKPSASTFENKYQYGEMLVEKNITVYSTCEHHLLPIVGKAHVAYISNGTVVGLSKMNRIVDYFAKRPQVQERLTIQIVKELQDVLGTKDVACVIDAKHLCVNSRGIRDVESSTVTSEFGGQFKKKETKREFLDYIKLDTKF

SEQ ID NO: 11900 - protein, 198 aa, Olleya aquimaris
  misc_feature (1)..(198): tr|A0A327R597|A0A327R597_9FLAO GTP cyclohydrolase 1 OS= Olleya aquimaris OX=639310 GN=folE PE=3 SV=1
MPYKKFEEYNIKVTDDVKDRYKKIIEDLGEDSNREGLLKTPERAAKAMQFLTQGYAQDAAKILKGAMFAEDYNDMVIVKDIEFYSLCEHHILPFFGKAHIAYIPNGHIVGLSKLPRIVDVFSRRLQVQERLTHQILDCINDTLKPEGVAVVLEASHMCMQMRGVQKQSSVTTTSGFRGAFENIETRTEFLNLINSKLS

SEQ ID NO: 11901 - protein, 198 aa, Olleya namhaensis
  misc_feature (1)..(198): tr|A0A1I3SUI3|A0A1I3SUI3_9FLAO GTP cyclohydrolase 1 OS= Olleya namhaensis OX=1144750 GN=folE PE=3 SV=1
MPYKKFEEYNVKVTDDVKNRYKNIIEDLGEDTQREGLLKTPERAAKAMQYLTQGYDQDAAEILKGAMFKEDYNDMVIVKDIEFYSLCEHHILPFFGKAHIAYIPNGHIVGLSKLPRIVDVFSRRLQVQERLTHQILDCINDTLQPEGVAVVIEASHMCMQMRGVQKQNSVTTTSGFRGAFQNIETRTEFLNLISSKLS

SEQ ID NO: 11902 - protein, 225 aa, Olleya namhaensis
  misc_feature (1)..(225): tr|A0A1I3RKQ5|A0A1I3RKQ5_9FLAO GTP cyclohydrolase 1 OS= Olleya namhaensis OX=1144750 GN=folE PE=3 SV=1
MKIENNIDDNDAIGENHIGTNHDTPLRADAFDLSDADKIESIKKDVTKILETLGLDLTDDSLKGTPNRVAKMFVNEIFGGLHPDKKPKASTFDNKYQYGEMLVEKNITVYSTCEHHLLPIVGRAHVAYISNGTVVGLSKMNRIVDYYAKRPQVQERLTIQIVKELQKALGTDDVACVIDAKHLCVNSRGIRDIESSTVTSEFGGQFKKKSTRHEFLEYIKLETKF

SEQ ID NO: 11903 - protein, 225 aa, Olleya sp.
  misc_feature (1)..(225): tr|A0A2K8X3S5|A0A2K8X3S5_9FLAO GTP cyclohydrolase 1 OS= Olleya sp. Bg11-27 OX=2058135 GN=folE PE=3 SV=1
MKIENNIDDNDAIGENHIGTNHDTPLRADAFDLSDADKIESIKKDVTKILETLGLDLTDDSLKGTPNRVAKMFVNEIFGGLHPDKKPKASTFDNKYQYGEMLVEKNITVYSTCEHHLLPIVGRAHVAYISNGTVVGLSKMNRIVDYYAKRPQVQERLTIQIVKELQEALGTDDVACVIDAKHLCVNSRGIRDIESSTVTSEFGGQFKKKSTRREFLEYIKLETKF

SEQ ID NO: 11904 - protein, 198 aa, Olleya sp.
  misc_feature (1)..(198): tr|A0A559R8E8|A0A559R8E8_9FLAO GTP cyclohydrolase 1 OS= Olleya sp. Hel_I_94 OX=1250001 GN=folE PE=3 SV=1
MPYKKFEEYNIKVTDDVKNRYKNIIEDLGEDTTREGLIKTPERAAKAMQFLTQGYNQDAANILKGAMFKEEYNDMVIVKDIEFYSLCEHHILPFFGKAHIAYIPNGHIVGLSKLPRIVDVFSRRLQVQERLTHQILDCINDTLKPEGVAVVIEASHMCMQMRGVQKQNSVTTTSGFRGAFENIETRTEFLNLISTKLS

SEQ ID NO: 11905 - protein, 195 aa, Olsenella profusa
  misc_feature (1)..(195): tr|U2TTB5|U2TTB5_9ACTN GTP cyclohydrolase 1 OS=Olsenell a profusa F0195 OX=1125712 GN=folE PE=3 SV=1
MTERAHMDRARIERGVRLMLEGMGEDPEREGLLETPARVARALEESCAGLHQDPAPLFEKSFDAHCHEMVIVRDIPFYSLCEHHLLPFFGMAHVAYLPGRDGRVCGISKLARVVDVYAKRPQIQEQLTRQVADAIMEGVDALGVLVVMEAEHLCMTMRGVRKPGSKTTTSAVRGAFEHHGATRDEAMSLIMRGSR

SEQ ID NO: 11906 - protein, 186 aa, Olsenella scatoligenes
  misc_feature (1)..(186): tr|A0A124EGW6|A0A124EGW6_9ACTN GTP cyclohydrolase 1 OS= Olsenella scatoligenes OX=1299998 GN=folE PE=3 SV=1
MDKPRVEAAVRELLAAIGEDPDRPGLVGTPDRVARACEEIFGGMQEDPGRYLRKQFHEPGNEEMVVVRDIPFASMCEHHVLPFMGKASVCYIPRDGRITGLSKIARCVTGYAHRLQLQERLTSQIADAMVRELDPLGVLVVVEAEHTCMTIRGIRTPGAKTVTSAVRGCLKTDSKSRAEALRLLGL

SEQ ID NO: 11907 - protein, 185 aa, Olsenella sp.
  misc_feature (1)..(185): tr|A0A1Y4DPP7|A0A1Y4DPP7_9ACTN GTP cyclohydrolase 1 OS= Olsenella sp. An270 OX=1965615 GN=folE PE=3 SV=1
MDKPRVEAAVRELLLAIGEDPDREGLVGTPDRVARACEEVLGGMQEDPGAHLRKQFHEPGNQEMVIVKDIPFSSLCEHHILPFTGRAHVCYIPRDGRITGLSKIARCVSGYARRLQVQERLTGQIADAMVRELDPLGVLVVLEAEHTCMTMRGIRAAGALTTTSAVRGCLRDLKTREEALRLLEL

SEQ ID NO: 11908 - protein, 214 aa, Olsenella sp.
  misc_feature (1)..(214): tr|A0A1K1VLJ0|A0A1K1VLJ0_9ACTN GTP cyclohydrolase 1 OS= Olsenella sp. kh2p3 OX=1797112 GN=folE PE=3 SV=1
MDDRDDEDFDLPEQTEGPGRTSELQYGKLDKPRVEAAVRELLIAIGENPDRPGLVGTPDRVARAYEEIFGGMQEDPAAYLRKQFHEPGNEEMVVVRDIPFASMCEHHILPFMGKASVCYIPRDGRITGLSKIARCVTGYAHRLQLQERLTSQIADAMVRELDPLGVLVVVEAEHTCMTIRGIRTPGAKTVTSAVRGCLKSDIKTRSEALRLLGL

SEQ ID NO: 11909 - protein, 200 aa, Olsenella uli
  misc_feature (1)..(200): tr|X8HSP5|X8HSP5_9ACTN GTP cyclohydrolase 1 OS=Olsenell a uli MSTE5 OX=1190621 GN=folE PE=3 SV=1
MVEPTMHDGWRMDHDKIERGVRLMLAGMGEDPDREGLRETPARVARALEESCAGLCQDPALLFEKSFDVGCHEMVIVRDIPFYSLCEHHLLPFFGVAHVAYLPGEDGRVCGISKLARVVDVFAKRPQVQEQLTRQVADAVMEGVGASGVLVVMEAEHLCMTMRGVRKPGAKTTTSAVRGAFERHDATRAEAMSLIFNGTK

SEQ ID NO: 11910 - protein, 200 aa, Olsenella uli; identical to SEQ ID NO: 11909
  misc_feature (1)..(200): tr|E1QXW8|E1QXW8_OLSUV GTP cyclohydrolase 1 OS=Olsenell a uli (strain ATCC 49627 / DSM 7084 / CIP 109912 / JCM 12494 / NCIMB 702895 / VPI D76D-27C) OX=633147 GN=folE PE=3 SV=1

SEQ ID NO: 11911 - protein, 194 aa, Olsenella umbonata
  misc_feature (1)..(194): tr|A0A1H9NWZ8|A0A1H9NWZ8_9ACTN GTP cyclohydrolase 1 OS= Olsenella umbonata OX=604330 GN=folE PE=3 SV=1
MDNQLSYNALDKKRVEAAVRDFLLAIGEDPDREGLRGTPDRVARACEEIFGGMQEDPGVYLRKQFHEGENEEMVIVRDIAFSSMCEHHLLPFVGKAHVCYIPRKGRITGLSKIARCVNGYAKRPQLQERLTSQIADAMMRELEPLGVLVVMQAEHTCMTMRGVRSAGALTVTSAVRGCFDNLKTREEALRLLGV

SEQ ID NO: 11912 - protein, 217 aa, Olsenella umbonata
  misc_feature (1)..(217): tr|A0A1H1LR31|A0A1H1LR31_9ACTN GTP cyclohydrolase 1 OS= Olsenella umbonata OX=604330 GN=folE PE=3 SV=1
MVPETSSFRAAEPTGEKDRYGRPLNDQGFAPIDKPRAEAAVREFLLAIGEDPDREGLRGTPERVARAAEELFGGMQEDPAAHLRRQFQEEQNQEMVVVRDIPFSSMCEHHILPFEGTASVCYIPRKGRITGLSKIARCVVGYGHRLQVQERLTAQVADALMRELDPLGVMVVMQAEHTCMTMRGVRAAGSSTVTSAVRGVFKADSKTREEAFRLLRG

SEQ ID NO: 11913 - protein, 229 aa, Unknown
  misc_feature (1)..(229): tr|A0A520S1X7|A0A520S1X7_9GAMM GTP cyclohydrolase 1 OS= OM182 bacterium OX=2510334 GN=folE PE=3 SV=1
MSVTAEGLKNKNCHLPNTCSAEANLVREALVLKGLETPTIDNGLSRDEKYIRIKAAMTDVVTALGLDLRDDSLAETPHRIAKMYVDEIFGGLDYRNFPKITAIDNKMGVEEMVKVDNISVVSTCEHHFVTIDGASRVAYIPGKKIIGLSKINRIVRFFAQRPQVQERLTQQILIALQTLLGIDDVAVTIDATHYCVKSRGVMDTNSSTRTTALGGQFKDDHRTRSEFLR

SEQ ID NO: 11914 - protein, 305 aa, Unknown
  misc_feature (1)..(305): tr|A0A520RQK9|A0A520RQK9_9GAMM GTP cyclohydrolase FolE2 OS=OM182 bacterium OX=2510334 GN=folE2 PE=3 SV=1
MPDIANRTLAEAQSTLDWVGMSNVHQPLLVKDGDHNREVHANVQVYVNLADPLAKGIHMSRLYLLLDEHASTRPLTAAGLKMLLASVLESHHDLSTNAFVQFEFDHSIRRRALLSDNMGWSSYPVMVKGTLIKGQIALELSVEVKYSSTCPCSAALARQLIQEQFCKDFGKEGDVSISEVKQWLGTEEGVLATPHSQRSTAKILVQLDVENDDLPLTALIDQIEASLKTPVQSAVKREDEQEFARLNGKNLMFIEDAGRRLKGALSEDSRWSDYWVRIEHHESLHAHDAVGVFTKGVENGYLPIP

SEQ ID NO: 11915 - protein, 193 aa, Omnitrophica bacterium
  misc_feature (1)..(193): tr|A0A1G1JWR7|A0A1G1JWR7_9BACT GTP cyclohydrolase 1 OS= Omnitrophica bacterium RIFCSPHIGHO2_02_FULL_46_11 OX=18 01820 GN=folE PE=3 SV=1
MHDLETQVKQGNIESIVKDLISLLGEDPNREGLLKTPKRVESSLKFLTRGYKQDIEKILNGAIYEENYDEMVVVKDIDLFSLCEHHLLPFYGKANVAYLPDGKIIGLSKIPRIVDVFSRRMQVQERLTSQIADCLMQHLRPKGVAVVIEAFHLCMAMRGVEKKDSFCVTSSMLGMFRSDPRSRAEFFSLVGKR

SEQ ID NO: 11916 - protein, 181 aa, Omnitrophica bacterium
  misc_feature (1)..(181): tr|A0A1G1KQP7|A0A1G1KQP7_9BACT GTP cyclohydrolase 1 OS= Omnitrophica bacterium RIFCSPLOWO2_12_FULL_44_17 OX=180 1832 GN=folE PE=3 SV=1
MESLIKEMLVQLGENPNREGLLKTPKRVAASFKYLTRGYRQDIDQVVNGAIFQENYDEMVLVKEIDLFSLCEHHLLPFYGKVHVAYFPNGKVIGLSKIPRIVDVFAQRLQLQERLTSQIADCLMHYLNPKGVAVVIEAYHLCMAMRGVEKKDAFCTTSAMLGMFRKDPRSRAEFLNLIARK

SEQ ID NO: 11917 - protein, 184 aa, Unknown
  misc_feature (1)..(184): tr|A0A1G1M2R6|A0A1G1M2R6_9BACT GTP cyclohydrolase 1 OS= Omnitrophica WOR_2 bacterium GWB2_45_9 OX=1801843 GN=fo lE PE=3 SV=1
MDKKKIEKAVRDILEAIGENPRRKDLLDTPLRVAEMYEEIFSGVRKDPAKELEIILEQKHEEIVLLKGIPLYSVCEHHLLPFLGRANVAYIPKQGRVTGLSKIARVVDILAKRPQVQERLTTQIAEIIMAKLKPLGVMVVIEAEHMCMSMRGVQKPGTLTVTSAVRGVFKENFKTRSEALSLMK

SEQ ID NO: 11918 - protein, 257 aa, Unknown
  misc_feature (1)..(257): tr|A0A0S8IGJ9|A0A0S8IGJ9_9BACT GTP cyclohydrolase FolE2 OS=Omnitrophica WOR_2 bacterium SM23_72 OX=1703777 GN= folE2 PE=3 SV=1
MRDIQNQQDHRNIAIDKVGVKDIRYPITVLDKATKTQQTVAMINMYVNLPKDFKGTHMSRLVEILNEHDRRISIKNFSEILSTMKERLNAESAHIEISFPYFVMKTSPTTKSKGLMEYQCTFKGSLNKGKDLVVIINVPITTLCPCSQEISKFGAHNQRGEVRLQVRFKKFVWIEDLIKLVEDSASCDVYSVLKREDEKYVTEKAYQNPKFVEDVVRDIAEKLERNNDIVWFAVEAENFESIHNHNAYAYIERHKES

SEQ ID NO: 11919 - protein, 319 aa, Opitutaceae bacterium
  misc_feature (1)..(319): tr|A0A178IGU8|A0A178IGU8_9BACT GTP cyclohydrolase FolE2 OS=Opitutaceae bacterium TSB47 OX=1184151 GN=folE2 PE= 3 SV=1
MYLHQAADGPAPRIARGYDAAFKPDAAYRASLPDLMGAGGPIEGAAVGIQQVGVSNFRLPLRFAARRGGPVTLEASVSGSVSLDAHLKGINMSRVVRSFYEHQDQVCTPELLERILKKYLRAVGSREARLRVAFSFPLRQESLRSGLEGWQYYRVVFEASLSAGTKARRFVEFDFVYSSACPCSAELAEHARDRRGVYAVGHSQRSKARLRVELAPGRRLAVEDLHAHCRAALRTETQVMVKREDEQAFAELNGAHLKFVEDAARLVYARLDADARIRDFRVVCAHFESLHSHDAVSVICKGAPGGMTAEFMEFETLAG

SEQ ID NO: 11920 - protein, 343 aa, Opitutaceae bacterium
  misc_feature (1)..(343): tr|A0A2T6E1I1|A0A2T6E1I1_9BACT GTP cyclohydrolase FolE2 OS=Opitutaceae bacterium EW11 OX=2161865 GN=folE2 PE=3 SV=1
MKSISSSGGTAASSRASTRRAAKSMYLHNGPGGAAPKIKRRYDAEFVATPAYRESLPDLMEAEDAIHGAKVPVQQVGVSNFRLPLKLGVRGGKPVVLEASVLGTVSLDANLKGINMSRIVRSFYDHRDEVFTPELLKKILLRYQRSVGSLEARLRVSFSYPILQKSLRSGLEGFQYYQVAYEGVIDRSGTFRKYIDFDFVYSSACPCSAELAEHARDKRGAYAVPHNQRSKVRVRAEIAPAKKLAVEDLHDRCLAALKTETQVMVKREDEQAFAELNGAYIKFVEDAARLVYQQLDADDRIRDFQAACAHFESLHSHDAVSVICKGVPGGLAADFTDFRSLVC

SEQ ID NO: 11921 - protein, 317 aa, Opitutae bacterium
  misc_feature (1)..(317): tr|A0A2D6VJ88|A0A2D6VJ88_9BACT GTP cyclohydrolase FolE2 OS=Opitutae bacterium OX=2026771 GN=folE2 PE=3 SV=1
  misc_feature (41)..(41): Xaa can be any naturally occurring amino acid
  misc_feature (89)..(89): Xaa can be any naturally occurring amino acid
MDTPSDKKKKLKREYDSSFVVTPEYRKSLPDIQNSGSEGMXGAHVPILQVGISGFRLPLQFVGPDGESLNIETKITGTVSLDADKKGIXMSRIIRIFYEYKDEVFSPEILGKILRHYKERLDSQEARLKADFSYPMIQQSLRSGLEGYQYYGCSFEGTIDRADRVRKIIHFDFVYSSACPCASELSEHARESRDLLAIPHSQRSKARVSVEVHPDRELSLLELRDMCINALNTETQVMVRREDEQAFAEMNGAKVKFVEDAARLVYEQLEEDARIIDFRVICSHFESLHSHDAVAVLCRGVDGGFRAEYEDFGNLVV

SEQ ID NO: 11922 - protein, 324 aa, Opitutae bacterium
  misc_feature (1)..(324): tr|A0A2A2QCR0|A0A2A2QCR0_9BACT GTP cyclohydrolase FolE2 OS=Opitutae bacterium Tous-C1TDCM OX=1982319 GN=folE2 PE=3 SV=1
MKKKPMFLHRTAGGIEPLIARGFQAKFKSDAAYRESLPDMMEAVDAIGGANVPIQQVGCANFRLPLKFKAKDGRVLTLETAVTGTVSLEANLKGINMGRIMRTFYEHEEKVFSPDLLRRILEQYRRKIVAFEARVRLSFSYPILQPSLRSGLKGWQYYKVTFEGTMDREGRFRKFIEFDFVYSSTCPCSAELAEHARRTRGVYATPHAQRSKARVKVEIAAGRTLPIEDLQRHCAEGLKTETQVMVKREDEQAFAELNGTYIKFVEDAARLLYRELAGDKRIADFQIACSHLESLHSHDAVSVICKGVPGGLRADFTDFGSLVC

SEQ ID NO: 11923 - protein, 317 aa, Opitutales bacterium
  misc_feature (1)..(317): tr|A0A2E7PY93|A0A2E7PY93_9BACT GTP cyclohydrolase FolE2 OS=Opitutales bacterium OX=2026772 GN=folE2 PE=3 SV=1
MDAPSKKPKPLKREYDKTFVVTPEYRASLPDVQNSGGKEMEGARVPILQVGISGFRLPLRFVGPDGEDLAVETKVTGTVSLDADKKGINMSRIIRIFYEYKEETFSPEILAKILRHYKTKLDSKEARIKADFSYPMVQQSLRSGLEGYQYYGCSFEGIIDRADRVRKIIHFDFVYSSACPCASELSEHAREKRGLLAIPHSQRSKARVSVEVHPDRELSLLELRDMCVNGLSTETQVMVRREDEQAFAEMNGANIKFVEDAARLLYAQLIEDSRIIDFRVVCSHFESLHSHDAIAVLCRGVDGGFRAEYEDFANLIV

SEQ ID NO: 11924 - protein, 269 aa, Opitutales bacterium
  misc_feature (1)..(269): tr|A0A2E7VDP4|A0A2E7VDP4_9BACT GTP cyclohydrolase FolE2 OS=Opitutales bacterium OX=2026772 GN=folE2 PE=3 SV=1
MPGKHSTTFTTTSPLHDEQSTRDTRELPIDKVGVRGLRFPIQVQDRAHMVQNTVATVGLFVDLPMEFKGTHMSRFIEVLHSHGRMIHVENIPDLLARMQERLKANTSHLEMEFPYFITKTAPATGREGLMDYTVRFEANATGSNIDFVMTLRVAVTTLCPCSKAISQYGAHNQRGEVTVAIRSSETVWIEDLIALVEQSASSELYSLLKRPDEKAVTEQAYDNPVFVEDLVRNVVLRLKAHKHVTWYRVEAENFESIHNHNAYACIEKG

SEQ ID NO: 11925 - protein, 326 aa, Opitutus sp.
  misc_feature (1)..(326): tr|A0A2T6CQA3|A0A2T6CQA3_9BACT GTP cyclohydrolase FolE2 OS=Opitutus sp. ER46 OX=2161864 GN=folE2 PE=3 SV=1
MSKAKPMYLHRSASGTAPRIARRYDAAFRVTPQYRASLPDMMEAEHDAIQGAHVPIQQVGVHNFRLPLKFRTKQKEIVTLEASVTGTVSLEADLKGINMSRIVRSFYEHKDAVFTGEWMGRILRAYLRNVATKDARLRVKFSYPMLQRSLRSGLEGYQFYDVAWEGVMTRGGDYRRFIHFDFVYSSACPCSAELSEHARDTRGMYTVPHSQRSKARVTVEEAPGKKIWIEDIQALCARGLQTETQVMVKREDEQAFAELNGAHLKFVEDAARLLYREFDADPRIRDFRIACSHLESLHSHDAVSVICKGVKGGFNADFMDFGSLVC

SEQ ID NO: 11926 - protein, 327 aa, Opitutus terrae
  misc_feature (1)..(327): sp|B1ZTR5|GCH4_OPITP GTP cyclohydrolase FolE2 OS=Opitut us terrae (strain DSM 11246 / JCM 15787 / PB90-1) OX=45 2637 GN=folE2 PE=3 SV=1
MSKKKKSMYLHESASGAAPKIQRRYDPAFEVDAAYRASLPDMMEAAYAAIQGAHVPIQQVGVSNFKLPLKFRTKKGEILTLEASITGTVSLEADLKGINMSRIVRSFYDHKDEVFTGEWMGKILCAYLRNVKSKDARLKVSFSYPMLHRSLRSGLEGYQFYNVAFEGVLTRKGDYRRFIHFDFVYSSACPCSAELAEHARDQRGVYSVPHSQRSKARIVVEETQGKKIWIEDVHAHCLRALQTETQVMVKREDEQAFAELNGAHLKFVEDAARLLYREFDADEKIADFRIACSHLESLHSHDAVSVICKGVKGGFTADFMDFQSLVC

SEQ ID NO: 11927 - protein, 211 aa, Opitutus terrae
  misc_feature (1)..(211): tr|B1ZNQ4|B1ZNQ4_OPITP GTP cyclohydrolase 1 OS=Opitutus terrae (strain DSM 11246 / JCM 15787 / PB90-1) OX=4526 37 GN=Oter_2141 PE=3 SV=1
MDTKSPRDLSVVAHAPDLAEIARHYAAIITEIGGDLSSAGMRDTPLRAAKALVEMTEGARTGTERLLTMFEAECHQAVCNDMVIVEGIHEVGLCEHHLLPIIMSITIAYIPDKKIIGLSKLPRIAGHFARRWQNQERTAHLIAEFLENLVQPLGAAVFIAGKHMCAMARGVRDTHSVMKVNVLHGAFQHDVNRRNELLMRLSPGSAAGFGW

SEQ ID NO: 11928 - protein, 219 aa, Orbus hercynius
  misc_feature (1)..(219): tr|A0A495RH55|A0A495RH55_9GAMM GTP cyclohydrolase 1 OS= Orbus hercynius OX=593135 GN=folE PE=3 SV=1
MSELSLEAQKVKTALEQKNLETPLCRVAMDNRERKAKIEAHFREIMQLMELDLSDDSLVETPRRVAKMYVDEIFSGLDYHNFPKITLIENKMQVDEMITVRDITLTSVCEHHFVTIDGKATVSYIPKSSVIGLSKINRIVEFFSQRPQVQERLTQQILVALQTLLGTAHVAVSIDATHYCVKARGVKDATSITTTTSLGGGFKTNPSTRQEFLRSLKHY

SEQ ID NO: 11929 - protein, 256 aa, Orenia marismortui
  misc_feature (1)..(256): tr|A0A4R8GSB4|A0A4R8GSB4_9FIRM GTP cyclohydrolase 1 OS= Orenia marismortui OX=46469 GN=folE PE=3 SV=1
MDVEVKFNDIIIDEIDNFDCAFLANSLMGLIKLSRIKELRYTNDNGLFDKLVREFNNQLYGVEEGWGRMDKKKIERAVRNILEAIGEDPTREGLQRTPERVAQMYEDIFAGTNQNPEEHLEFFSDDMDYEDLILVKDISFYSMCEHHLVPFFGKVHIAYIPKEGRITGFSRLARLVETVARRLQLQERMNKMIADAIVKILEPLGVLVIVEAEQMCMTMRGIKKTESRTITSAVRGIFKEDSASRAEVMNLIKGSD

SEQ ID NO: 11930 - protein, 259 aa, Orenia marismortui
  misc_feature (1)..(259): tr|A0A4R8H668|A0A4R8H668_9FIRM GTP cyclohydrolase FolE2 OS=Orenia marismortui OX=46469 GN=folE2 PE=3 SV=1
MKDIQNTQGDYKFDINKVGVDNLVCPFKIQSKIGEVISTVGNFSMMVNLPKELKGINMSRLPQLLSELKQEELTLNDLKQDIRSIVERMKKRMESKDAYLDLDFDYFLEKKAPVSGFMGIVPYHAKINASLQGSSYNFILTVEVPITTLCPCSKEISDYSAHNQRGYVEVSIKFDGLFYIEDIIEIVEEVASCEIYSVLKRVDEKYVTERAYENPRFVEDVVRLVAEKLDQASQIKSFSVSSRHQESIHSHDAYAIIER

SEQ ID NO: 11931 - protein, 188 aa, Orenia metallireducens
  misc_feature (1)..(188): tr|A0A1C0A5E8|A0A1C0A5E8_9FIRM GTP cyclohydrolase 1 OS= Orenia metallireducens OX=1413210 GN=folE PE=3 SV=1
MDKKKIERAVRDILEAIGENPDREGLQRTPERVAEMYEDILSGTNQQPEEHLEFFSEDEKYEDLIMVKDISFYSICEHHLVPFFGKVHIAYVPKEGRITGFSRLARLVETVARRLQLQERMNKMIADAIVNVLEPLGVLVIVEAEQMCMTMRGIKKTESRTITSAARGVFKEDSAARAEIMNLIKSSR

SEQ ID NO: 11932 - protein, 261 aa, Orenia metallireducens
  misc_feature (1)..(261): tr|A0A285GVS8|A0A285GVS8_9FIRM GTP cyclohydrolase FolE2 OS=Orenia metallireducens OX=1413210 GN=folE2 PE=3 SV= 1
MKDVQNTKGNYKFAINKVGVNNLIHPIRIKAKSGEVVATVGDFSLAVNLSKSLKGINMSRLPQLLSELNRDRFTIEDFKEDILKVLEEIKSRMESDNAYFEVEFDYFIEKQAPVSEYSGIAPYKCRIEGSLADGEYDLILTVEVPITTLCPCSKEISNYSAHNQRGYVKTSIRYNDLIYLEDIIKLVEEVGSCEIYPILKRVDEKYVTEKAYENPRFVEDVVRLVAEELEINPKVTWFRVSSRHQESIHPHDAYAMLESWK

SEQ ID NO: 11933 - protein, 190 aa, Oribacterium sp.
  misc_feature (1)..(190): tr|A0A1I2Q3Y4|A0A1I2Q3Y4_9FIRM GTP cyclohydrolase 1 OS= Oribacterium sp. WCC10 OX=1855343 GN=folE PE=3 SV=1
MIDKKAIEEHIRGILIALGDDPEREGLKDTPKRVAEMYEEVFEGMNYSNHEIAEMFGKTFEAEMDESIDTDRVVVMKDIDIFSYCEHHLALMYDMKVNVAYLPKGRVIGLSKIARVCDMVGRRLQLQEKIGKDIADIICEITGSEDVAVTIEGYHSCVTARGIKKTNTKTFSAELRGRFKTDASLQFYIK

SEQ ID NO: 11934 - protein, 190 aa, Oribacterium sp.
  misc_feature (1)..(190): tr|A0A1H3XLI4|A0A1H3XLI4_9FIRM GTP cyclohydrolase 1 OS= Oribacterium sp. KHPX15 OX=1855342 GN=folE PE=3 SV=1
MIDKKAIEEHIRGILIALGDDPNREGLLETPKRVAEMYAEVFEGMNYTNHEIAEMFDKSFEEDLQGTSSVGRVVVMKDIDIFSYCEHHLALMYDMKVNVAYVPKGKVVGLSKIARVCDMVGRRLQLQEKIGKDIADIMIEITGSEDVAVTIEGCHSCVTARGIKKHNTKTFTAELRGEFKTDPSLQMYLR

SEQ ID NO: 11935 - protein, 212 aa, Oricola cellulosilytica
  misc_feature (1)..(212): tr|A0A4R0PDT3|A0A4R0PDT3_9RHIZ GTP cyclohydrolase 1 OS= Oricola cellulosilytica OX=1429082 GN=folE PE=3 SV=1
MDAVITSFAKRSEENKRRDLERPTQEEAEAAVRTLLLWAGDDPDREGLLETPARVAKAYQEMFAGYGMDPDEVLGRTFEEVAGYDDIVLVKDIAFHSHCEHHMVPIIGKAHVAYLPDGRVLGLSKIARVVDIYAQRLQTQEAMTAQIAGAIDDALQPRGVAVMIEAEHMCMAMRGIRKQGSTTLTTTFTGAFLDDVQEQGRFMSMLRGSGAA

SEQ ID NO: 11936 - protein, 201 aa, Oricola sp.
  misc_feature (1)..(201): tr|A0A3M8GXV2|A0A3M8GXV2_9RHIZ GTP cyclohydrolase 1 OS= Oricola sp. OX=1979950 GN=folE PE=3 SV=1
MDAIAPTSTHPSDEKPSRAEAEAAVLTLLKWIGDDPAREGLIDTPARVVKAYEEMFGGYDSDPADILGRTFEEVAGYDDIVLVKDIAFHSHCEHHMVPIIGKAHVAYLPRERVLGLSKIVRVVDIFARRLQTQETMTAQIATSIDDALAPRGVAVMVEAEHMCMAMRGIRKHGSTTITTRFTGAFDDPAWQNRFTDLIRTR

SEQ ID NO: 11937 - protein, 183 aa, Ornatilinea apprima
  misc_feature (1)..(183): tr|A0A0P6XY95|A0A0P6XY95_9CHLR GTP cyclohydrolase 1 OS= Ornatilinea apprima OX=1134406 GN=folE PE=3 SV=1
MSVHDLLTNIGEDPEREGLLNTPDRIARMYDELTAGYHVDTEKLINGALFNVDYDEMVIVKDIEFYSLCEHHMLPFFGRAHVAYIPDGKVIGLSKIPRIVEMFARRLQVQERMTKQIADFIKETIQPKGVAVVVEGVHMCSMMRGVKKAEASMITSAYLDQLKNNRDLRTEFIDHINSRRSMD

SEQ ID NO: 11938 - protein, 304 aa, Ornithinibacillus halophilus
  misc_feature (1)..(304): tr|A0A1M5CHE9|A0A1M5CHE9_9BACI GTP cyclohydrolase FolE2 OS=Ornithinibacillus halophilus OX=930117 GN=folE2 PE= 3 SV=1
MENIKIKSLPNKEERHRLFGSVPPGPKTKPTEKNKMSDLQNVEKDFLFDIDTVGIANVKHPIFVNSNLQPTHQTTVATFQFESSISKNNKGTNMSRFTEQLNQYHEQGFTADLSTLKSFTYELAQRLGKDDATISVAFPWFYERKGPQSNLVGMNHADISITVSYDAKKGYSVVASLSALITTLCPCSKEISEYSAHNQRGNVTMEVTFTDDFDDTSLDWKELLLEAAESNASARIHPVLKRPDEKIVTEQAYENPRFVEDMVRLVAADLYEMTFVRKFKVSCRNEESIHMHDAIASLTYDKEK

SEQ ID NO: 11939 - protein, 305 aa, Ornithinibacillus sp.
  misc_feature (1)..(305): tr|A0A3C1I174|A0A3C1I174_9BACI GTP cyclohydrolase FolE2 OS=Ornithinibacillus sp. OX=1898027 GN=folE2 PE=3 SV=1
MNVKDNSQKILPNKIERLKLFGSVEPGPKHKPTEKDKMSDLQNLEKDFLFELDAVGITNVKYPVILKSKLKPYTQNSIGTFTFTSSIKQTSKGTNMSRFMEQLELYSKNGFIIELHTLKEFTKELAERLGQRDATVEINTTWFYERKGPSSQIAGLNHADINLIVSYHQDSGYKVSAGLSVFVTTLCPCSKEISEYSAHNQRGNVSIQVSLTEDFNEDEFDWKYALLEAAESNASSRLHPILKRPDEKMVTEGAYENPRFVEDMARLVAADLYELPYVKSFEVTCQNEESIHMHDAIATIRYTKE

SEQ ID NO: 11940 - protein, 212 aa, Ornithinicoccus hortensis
  misc_feature (1)..(212): tr|A0A542YVY5|A0A542YVY5_9MICO GTP cyclohydrolase 1 OS= Ornithinicoccus hortensis OX=82346 GN=folE PE=3 SV=1
MAGDRPDNGNGNGDAGEMPTVAPVDHARIAAAVREILIAVGEDPDRDGLRDTPARVARSYAELFSGLVQRPEQVLTTSFDVGHSEMILVRDIEMFSLCEHHLVPFHGVAHVGYIPGADGRVTGLSKLARLVDVFARRPQVQERLTSQIADAIEEHLGPQGALVVIEAEHLCMSMRGVRRPGARTITSAVRGQLRNPATRAEAMSLVMADRSR

SEQ ID NO: 11941 - protein, 206 aa, Ornithinicoccus hortensis
  misc_feature (1)..(206): tr|A0A542YRE5|A0A542YRE5_9MICO GTP cyclohydrolase 1 OS= Ornithinicoccus hortensis OX=82346 GN=folE PE=3 SV=1
MTTLETEFPDLRVMPSPDAEVGLEAATRAAQDFLEALGVDCETPGTLDSPRRMAKAYADLLSAPEFTMTTFPNDEGYQELVLVSDLPVTSVCEHHLLPFTGVAHIGYLPGARLLGLSKFARAVESFARRPQVQERLTSQLAHWLHEALAPRGVGVIVEASHSCMSLRGATVSGSTTRTTALTGAIHDHPATRAEFLAAVADRTRRI

SEQ ID NO: 11942 - protein, 213 aa, Ornithinimicrobium humiphilum
  misc_feature (1)..(213): tr|A0A543KKG8|A0A543KKG8_9MICO GTP cyclohydrolase 1 OS= Ornithinimicrobium humiphilum OX=125288 GN=folE PE=3 SV =1
MSIPVSTDLVGPDEEDAPGAPATTQVDHARIEAAVREILAAIGEDPERDGLRDTPARVARAYAEVFSGLSQDPAEVLGTTFDVEHEEMILVRDIELHSTCEHHLVPFHGAAHIAYIPGADGRVVGLSKLARLVDVFARRPQVQERLTTQVAEALVEHLDPAGVLVVVEAEHLCMSMRGVRRPGARTITSAVRGQLRNPATRAEAMSLVMGRTS

SEQ ID NO: 11943 - protein, 206 aa, Ornithinimicrobium humiphilum
  misc_feature (1)..(206): tr|A0A543KJM6|A0A543KJM6_9MICO GTP cyclohydrolase 1 OS= Ornithinimicrobium humiphilum OX=125288 GN=folE PE=3 SV =1
MNAVAAVEQATPLRPRIVAERPVVDLEAAEAAAADLLAALGLDLTQESLVDTPRRMARALHELMAPEGFELTSFANEEGYDELVLVRDIPVRSLCEHHMLPLVGVAHVGYLPDRRILGLSKLARMVDLHSRRPQTQERLTTAVADHLRRELAPAGVGVVVEAEHTCMTLRGARAPGARTLTSAVLGRLRDDPSSRAEFLSLARRLP

SEQ ID NO: 11944 - protein, 224 aa, Ornithinimicrobium pekingense
  misc_feature (1)..(224): tr|A0A285VQH5|A0A285VQH5_9MICO GTP cyclohydrolase 1 OS= Ornithinimicrobium pekingense OX=384677 GN=folE PE=3 SV =1
MADVSIPAPSDEAAPDEGEAPAPDEGDAPGGPARVAVDHARIEAAVRELLVAVGEDPDRDGLLDTPARVARSYAEIFSGLGQDPGTVLGTTFDVDHDEMILVKDIEMFSVCEHHLVPFHGVAHVGYIPGRDGRVVGLSKLARLVDVFARRPQVQERLTTQIADALEAHLDPRGVIVVVEAEHLCMSMRGIRRPGARTITSTVRGQLRNPATRAEAITLMTRPTP

SEQ ID NO: 11945 - protein, 203 aa, Ornithinimicrobium sp.
  misc_feature (1)..(203): tr|A0A1U7MRA4|A0A1U7MRA4_9MICO GTP cyclohydrolase 1 OS= Ornithinimicrobium sp. CNJ-824 OX=1904966 GN=folE PE=3 SV=1
MTDEADAPGGPVVQEVDHDRIAAAVREILLAVGEDPDRDGLRDTPARVARSYAEVFSGLRQDASEVLGTRFDVEHDEMIIVRDIALYSVCEHHLVPFHGVAHIGYVPGRDGRVVGLSKLARLVDVYARRPQVQERLTTQIAEALVDHLDPGGVMVVVEAEHLCMSMRGVRRPGARTTTSAVRGMLRDPATRAEAMSLMTGRST

SEQ ID NO: 11946 - protein, 197 aa, Ornithinimicrobium sp.
  misc_feature (1)..(197): tr|A0A516GEG9|A0A516GEG9_9MICO GTP cyclohydrolase 1 OS= Ornithinimicrobium sp. H23M54 OX=2594265 GN=folE PE=3 S V=1
MSTVASTEVDHGRIEAAVREILIAVGEDPDREGLRDTPARVARSYAEIFAGLHQDPESAMSVTFDVAHDEMVLVKDIAMYSTCEHHLVPFHGVAHVGYIPGADGRVTGLSKLARLVEVFARRPQVQERLTTQIAEALKEHLQPRGVIVVIEAEHLCMSMRGVRKPGATTITSAVRGQLTDPATRAEAMSLILADRGR

SEQ ID NO: 11947 - protein, 228 aa, Ornithobacterium rhinotracheale
  misc_feature (1)..(228): tr|I3ZZQ0|I3ZZQ0_ORNRL GTP cyclohydrolase 1 OS=Ornithob acterium rhinotracheale (strain ATCC 51463 / DSM 15997 / CCUG 23171 / CIP 104009 / LMG 9086) OX=867902 GN=folE PE=3 SV=1
MAHNNLDELYEDMGDGHIPGNHETPLRDDAFALPDEQKIASIEENFHQIMQTLGLDMTDDSLKGTPRRVAKMFVKEIFGGLSPERKPKMSTFENKYQYNQMLVEKDIVVYSTCEHHFLPIVGRAHVAYISKGSVVGLSKINRIVDYYAKRPQVQERLTMQIVRAMQEALGTKDVACVIDAKHLCVNSRGIRDIESSTVTAELGGAFKTNPTTRAEFLKYIGMETRFNV

SEQ ID NO: 11948 - protein, 228 aa, Ornithobacterium rhinotracheale
  misc_feature (1)..(228): tr|A0A410JU53|A0A410JU53_9FLAO GTP cyclohydrolase 1 OS= Ornithobacterium rhinotracheale OX=28251 GN=folE PE=3 S V=1
MTENNLDELYEDMGDGHIAGNHETPLRADAFAIPEEEKIASIEAHFHQIMQTLGLDMTDDSLKGTPRRVAKMFVKEIFGGLNPERKPKMSTFENKYQYNQMLVEKDIVVYSTCEHHFLPIVGRAHVAYISKGRVVGLSKINRIVDYYAKRPQVQERLTMQIVRAMQEALGTKDVACVIDAKHLCVNSRGIRDIESSTVTAELGGAFKTNPTTRAEFLKYIGMETRFNV

SEQ ID NO: 11949 - protein, 265 aa, Orrella dioscoreae
  misc_feature (1)..(265): tr|A0A1C3K7X9|A0A1C3K7X9_9BURK GTP cyclohydrolase FolE2 OS=Orrella dioscoreae OX=1851544 GN=folE2 PE=3 SV=1
MNSPVDSAIVMPDVQSSVDIRQIPIQRVGIRGVRHPMLVAGADGAQPTVANWTLTVALPAEEKGTHMSRFIALLEKYRRVPMTPALFATMAREMLPLLHAERGDITATFPYFIEKSAPVSGVRSLLDYEVQWTARAGAQGTEFELSVLVPVTSLCPCSKTISDYGAHNQRSHVTVVAVMQDENVDMDAMIRLVEDEASCELWGLLKRPDEKYVTERAYDNPKFVEDLVRDVAVRVKAQPGVLRFRVEAENFESIHNHSAYAVVEG

SEQ ID NO: 11950 - protein, 214 aa, Oryzihumus leptocrescens
  misc_feature (1)..(214): tr|A0A542ZED0|A0A542ZED0_9MICO GTP cyclohydrolase 1 OS= Oryzihumus leptocrescens OX=297536 GN=folE PE=3 SV=1
MTSAAPESSPARLLHTGNEAPRRLRVVHGRDGVDLPAAERAVADLLRALGKDPSTEHLTDTPRRVAESLTELITPREFDLTTFPNDEGYDELVLARDIPVQSLCEHHLLPFRGVAHVGYLPGPRLLGLSKLARVVELFARDLQVQERLTTQVAGWLQEHLAPKGVGVVIEAEHLCMSLRGVQATGSRTVTSAVHGLIREDARSRQEFFTLARGF

SEQ ID NO: 11951 - protein, 193 aa, Oryzihumus leptocrescens
  misc_feature (1)..(193): tr|A0A542ZEK5|A0A542ZEK5_9MICO GTP cyclohydrolase 1 OS= Oryzihumus leptocrescens OX=297536 GN=folE PE=3 SV=1
MSTPTHIDLERAERAVRELLVAIGENPDRDGLQATPGRVARAYAEMFAGMGQQPEDVLTTTFEIGHSELILVRDIEVYSTCEHHLVPFHGVAHVGYIPGKDGRVTGLSKLARLVDVFARRPQVQERLTTQVADALVDHLKPQGVIVVVECEHLCMSMRGVRRPGSRTITSAVRGQLRDPATRAEAMGLIGGHR

SEQ ID NO: 11952 - protein, 269 aa, Oryzomicrobium terrae
  misc_feature (1)..(269): tr|A0A5C1E5G3|A0A5C1E5G3_9RHOO GTP cyclohydrolase FolE2 OS=Oryzomicrobium terrae OX=1735038 GN=folE PE=3 SV=1
MNAPDKIFLPDIQSTPDTRQLAIQQVGVKGLRYPLLLRTPAGERATVAEFAMTVALPPEVKGTHMSRFVEILERPRAALAPADFLAVLGDTLVRLDARSGRIEARFPYFIEKRAPVSGVASLLDYDVAIVAEQLPDAAPRLTLEITAAATSLCPCSKKISAYGAHNQRSHLTLRAQLRPGQEDRLSIEALVRLAEEEASCEVFGLLKRPDEKWVTERAYDNPKFVEDLVRDIALRLMAEPAVAAWTVASENFESIHNHSAYAELHGVNA

SEQ ID NO: 11953 - protein, 268 aa, Oryzomicrobium terrae
  misc_feature (1)..(268): tr|A0A5C1E7S1|A0A5C1E7S1_9RHOO GTP cyclohydrolase FolE2 OS=Oryzomicrobium terrae OX=1735038 GN=folE PE=3 SV=1
MTSTPQHLAIPDVQSSADTRQLAINKVGIKSIRHPVQISDRSGDVQHTVATFNMYVGLPHNFKGTHMSRFVEILNSREREISVESFPAMLRDMVQRLEAETGHIEMNFPYFINKTAPVSGVQSLLDYDVTFIGDIRNGQVSFSLKVVVPVTSLCPCSKKISDYGAHNQRSHVTITAELDGHLWIEELVRLVEDEASCELYGLLKRPDEKFVTERAYDNPKFVEDMVRDVAARLNAEPRVVAYVAESENFESIHNHSAYALIERDKRQG

SEQ ID NO: 11954 - protein, 216 aa, Oscillatoria acuminata
  misc_feature (1)..(216): tr|K9TKM0|K9TKM0_9CYAN GTP cyclohydrolase 1 OS=Oscillat oria acuminata PCC 6304 OX=56110 GN=folE PE=3 SV=1
MTLSIPANLTVSNSVPSSLDNGSQPPVSEAEMIQAVRTLLIGLGEDPDREGLVDTPKRMVKALKFLTQGYQQSVDELLNGAVFTEDVNEMVLVRDIDIFSSCEHHILPIIGRVHVAYIPNGKVIGLSKIARICEMYGRRLQVQERLTAQIADAIEGLLKPQGVAVVVEATHMCMVMRGVQKPGSWTVTSAMRGIFSEDARTRQEFMSLVRHNPQFH

SEQ ID NO: 11955 - protein, 241 aa, Oscillatoria acuminata
  misc_feature (1)..(241): tr|K9THY4|K9THY4_9CYAN GTP cyclohydrolase 1 OS=Oscillat oria acuminata PCC 6304 OX=56110 GN=folE PE=3 SV=1
MTIAASHGSQLPETGNGMKSAQTSDKTPRIETRPDRNTLNGAQANIHQPPAESADQMMEAFREVLIGVGEDPEREGLLKTPKRAADAMRFLTSGYNQSLEELLNGAIFDEGHNEMVLVRDINFFSLCEHHMLPFMGRAHVAYIPNEKVVGLSKLARIVEMYSRRLQVQERLTRQVAEAIQSILEPKGVAVVMEATHMCMVMRGVQKPGSWTVTSAMVGQFQEEQKTREEFLNLIRHQPSFF

SEQ ID NO: 11956 - protein, 244 aa, Oscillatoria nigroviridis
  misc_feature (1)..(244): tr|K9VDE4|K9VDE4_9CYAN GTP cyclohydrolase 1 OS=Oscillat oria nigro-viridis PCC 7112 OX=179408 GN=folE PE=3 SV=1
MTIASSTDSNGSNSLSTDSMKLSETADNNTPRIPTRPDRNSSHGQESSVPIASEVGLEEMMEAVRTMLLGVGEDPEREGLLKTPKRVAEAMRFLTSGYSQSLEELLNGAIFDEGHNEMVLVRDISVFSMCEHHMLPFMGRVHIAYIPNQKVVGLSKLARIAEMYSRRLQVQERLTRQIAEAVQTILEPKGVAVVMEASHMCMTMRGVQKPGAWTVTSAMLGVFQEEQKTREEFLNLIRHQPTFF

SEQ ID NO: 11957 - protein, 216 aa, Oscillatoria nigroviridis
  misc_feature (1)..(216): tr|K9VQN6|K9VQN6_9CYAN GTP cyclohydrolase 1 OS=Oscillat oria nigro-viridis PCC 7112 OX=179408 GN=folE PE=3 SV=1
MTLSTRPELTSPNGIVSSITTQSQPAVSDEEMRQAVRTLLLGLGEDPDREGLRDTPKRVVKALQFITEGYRQSLDELLNGAVFTENANEMVLVRDIDIFSSCEHHILPIIGKAHVAYIPNGKVIGLSKIARICEMYGRRLQVQERLTAQIADALQGLLKPQGVAVVIEATHMCMVMRGVQKPGSWTATSAMRGVFTEDARTRQEFMSLIAHKSSFH

SEQ ID NO: 11958 - protein, 243 aa, [Oscillatoria] sp.
  misc_feature (1)..(243): tr|D8FVZ7|D8FVZ7_9CYAN GTP cyclohydrolase 1 OS=[Oscilla toria] sp. PCC 6506 OX=272129 GN=folE PE=3 SV=1
MTIAPPNAFNGSNSPSTNSAKLSETTSDVPRISTRPDRNSLNGQEPNLPVPSEVSSDEMMAAVRTMLLGVGEDPEREGLLKTPKRVAEAMKFLTSGYSQSLEELLNGAIFDEGHNEMVLVRDISVFSLCEHHMLPFMGKAHVAYIPNQKVVGLSKLARIVEMYARRLQVQERLTRQIAEAVQTILEPKGVAVVLEASHMCMVMRGVQKPGSWTVTSAMLGEFQDEQKTREEFLNLIRHQPAFF

SEQ ID NO: 11959 - protein, 216 aa, Oscillatoriales cyanobacterium
  misc_feature (1)..(216): tr|A0A1C0V2K5|A0A1C0V2K5_9CYAN GTP cyclohydrolase 1 OS= Oscillatoriales cyanobacterium USR001 OX=1880991 GN=fol E PE=3 SV=1
MTAQIPVRNLSADQAIAAIPTQPQPRVSQSEMEQAVRTLLLGLGEDPDREGLRDTPKRVVKALKFLTSGYQQSLDELLNGAVFHEDANEMVLVRDIDLFSSCEHHILPILGRAHVAYIPNGKVIGLSKIARICEMYGRRLQVQERLTQQIADALQGLLQPQGVAVVVEATHMCMVMRGVQKPGSWTVTSSMQGVFADDARTRQEFMDLIRHSPSFH

SEQ ID NO: 11960 - protein, 229 aa, Oscillatoriales cyanobacterium
  misc_feature (1)..(229): tr|A0A1J5GWU3|A0A1J5GWU3_9CYAN GTP cyclohydrolase 1 OS= Oscillatoriales cyanobacterium CG2_30_40_61 OX=1805291 GN=folE PE=3 SV=1
MTISPNTNGVKNEDLNGFSIRPDRTLSYDQSTISQPSIEVSDEEMMGAVRTMLLGVGEDPEREGLLKTPKRVAEAMRFLTSGYNQSLEDLVNGAIFDEGHEEMVLVRDITFFSMCEHHMLPFMGRAHVAYIPNQKVIGLSKLARIVEMYSRRLQVQERLTRQIAESIQSVLEPQGVAVVMEATHMCMAMRGVQKPGSWTVTSAMVGVFQDEQKTREEFLNLIRHQPAFF

SEQ ID NO: 11961 - protein, 185 aa, Oscillibacter sp.
  misc_feature (1)..(185): tr|A0A3D1X2Q7|A0A3D1X2Q7_9FIRM GTP cyclohydrolase 1 OS= Oscillibacter sp. OX=1945593 GN=folE PE=3 SV=1
MDSEKIKEGVRLILSGIGEDINREGLLETPDRIARMYEELAGGYTDSAATHLQKRFHVDNNDMVLEKDIHFYSFCEHHMLPFYGTAAIAYIPNGEVVGLSKIARTVEVFAKRFQLQERLTAQIADAFMDELKPKGVMVLVQAEHMCMTMRGIKKQGAKTVTVVTRGVFDDDERLRTDFYRMLEHC

SEQ ID NO: 11962 - protein, 179 aa, Osedax symbiont
  misc_feature (1)..(179): tr|A0A1Y5HF65|A0A1Y5HF65_9BACT GTP cyclohydrolase 1 OS= 'Osedax' symbiont bacterium Rs2_46_30_T18 OX=1856298 GN =folE PE=3 SV=1
MEKAFAKIIDSIGEDLNRDGLRDTPARAAKAMSYLTRGYTQSLDQVVNNALFDSDNSEMVVVTNIEFYSLCEHHMLPFIGQAHVAYIPQGKVIGLSKIARIVDMFARRLQIQENMSKEIAEAIMQVTNAEGVGVVIEAEHMCMKMRGVEKQNSVMKTSMLLGSFRERAATRAEFFSLVS

SEQ ID NO: 11963 - protein, 179 aa, Osedax symbiont
  misc_feature (1)..(179): tr|S6HND3|S6HND3_9GAMM GTP cyclohydrolase 1 OS=Osedax s ymbiont Rs2 OX=1330035 GN=folE PE=3 SV=1
MEKAFAKIIDSIGEDLSRDGLRDTPARAAKAMSYLTRGYTQSLDEVVNNALFDSDNSEMVVVTNIEFYSLCEHHMLPFIGRAHVAYIPQGKVIGLSKIARIVDMFARRLQIQENMSKEIAEAIMQVTNAEGVGVVIEAEHMCMKMRGVEKQNSVMKTSMLLGSFRERAATRAEFFSLVS

SEQ ID NO: 11964 - protein, 179 aa, Osedax symbiont
  misc_feature (1)..(179): tr|S6HUW7|S6HUW7_9GAMM GTP cyclohydrolase 1 OS=Osedax s ymbiont Rs1 OX=1330036 GN=folE PE=3 SV=1
MEKAFAKIIEEIGEDLSREGLIDTPSRAAKAIKYLTQGYTQSLDEVVNNALFPSDNSEMVVVQNIEFYSLCEHHMLPFIGRAHVAYIPQGKVIGLSKIARIVDMFARRLQIQENMTKEIAEAIMQVTNAEGVGVVIEAEHMCMKMRGVEKQNSTMKTSMLLGSFRARPATRAEFFSLVS

SEQ ID NO: 11965 - protein, 218 aa, Otariodibacter oris
  misc_feature (1)..(218): tr|A0A420XJC8|A0A420XJC8_9PAST GTP cyclohydrolase 1 OS= Otariodibacter oris OX=1032623 GN=folE PE=3 SV=1
MNTISPEAQSVKEALLAKGIETPTIPHQKDKDHRRAEIQQHMRAVLELLGLDLRDDSLEETPHRLAKMYVDEIFSGLDYQTFPKITKIRNQMKVSEMVIVDDITLTSTCEHHFVTIDGSVAVAYYPKDWVIGLSKINRVVQFFAQRPQVQERFTEQILTAFQTILETEDVAVYVKATHFCVKCRGVKDTNSQTMTSAFGGVFLQDRETRKEFLSLINR

SEQ ID NO: 11966 - protein, 197 aa, Ottowia sp.
  misc_feature (1)..(197): tr|A0A5C7VHG8|A0A5C7VHG8_9BURK GTP cyclohydrolase 1 OS= Ottowia sp. OX=1898956 GN=folE PE=3 SV=1
MSDDSRNDVSRQQAEEAVRTLLRWAGEDPTREGLLDTPRRVAEAYGDWFSGYRDDPRAYLERTFEEVAGYDEMIVLRDIEYESHCEHHMAPIIGKVHVGYLPDGKVVGISKLARVVEVYARRFQVQEKMTAQIAQCIQHVLHPLGVGVVVEGAHECMTTRGIHKRGVSMVTSKMLGSFREDARTRAEFLRFIETGRR

SEQ ID NO: 11967 - protein, 234 aa, Owenweeksia hongkongensis
  misc_feature (1)..(234): tr|G8R360|G8R360_OWEHD GTP cyclohydrolase 1 OS=Owenweek sia hongkongensis (strain DSM 17368 / CIP 108786 / JCM 12287 / NRRL B-23963 / UST20020801) OX=926562 GN=folE P E=3 SV=1
MSTDKNNDHLVVSDDMMDDAGDAHISGRAETPMRADAFDKSEAEKIESIRQNFENIMNTLGLDLTDDSLKGTPLRVAKMFVKEIFGGLDPAREPKASVFDNKYKYGEMLVEKNIVVYSTCEHHFLPIVGRAHVAYISNGTVIGLSKMNRIVDYFAKRPQVQERMTKQIVQALQVALGTDDVACVIDAKHLCVNSRGIRDIESSTVTAEFGGKFQEDSVKRDFLDYINMKTTFDA

SEQ ID NO: 11968 - protein, 231 aa, Owenweeksia sp.
  misc_feature (1)..(231): tr|A0A1Z8LAH1|A0A1Z8LAH1_9FLAO GTP cyclohydrolase 1 OS= Owenweeksia sp. TMED14 OX=1986609 GN=folE PE=3 SV=1
MEEFSNHTECFDDGHDHRATSFDNPIKKDAFLKNDNEKIEIIEKHVQGILETLGMDLTDDSLKGTPRRVAKMFVTETFGGLNPSRKPDLNTFENSYKYGEMLVEKNIVVYSTCEHHLMPIIGRAHIAYLSKDRVIGLSKMNRIVDYYAKRPQVQERLTRQITNAMQEALRTLDVAVLIDAKHLCVNARGIRDIDSSTVTAEYGGEFQNDEGLKSSFLTYTQLNTDFENLNE

SEQ ID NO: 11969 - protein, 232 aa, Owenweeksia sp.
  misc_feature (1)..(232): tr|A0A2D8SLX7|A0A2D8SLX7_9FLAO GTP cyclohydrolase 1 OS= Owenweeksia sp. OX=2024847 GN=folE PE=3 SV=1
MEIKKNSKALEAIAEEQGDIHLSSGNTDTPMREGAFDRSDDEKIEIIRNHFEKILDTLGMDLTDDSLKGTPLRVAKMFVKEIFGGLNPERKPSTSTFENKYQYGEMLVEKNIVVYSTCEHHLLPIVGRAHVAYISNGTVIGLSKMNRIVDYYAKRPQVQERMTKQIVLALQEALGTKDVACVIDAKHLCVNSRGIRDIESSTVTAEFGGKFKEESAKRDFLDYINMKTTFDA

SEQ ID NO: 11970 - protein, 299 aa, Oxalobacter formigenes
  misc_feature (1)..(299): tr|C3X5X7|C3X5X7_OXAFO GTP cyclohydrolase FolE2 OS=Oxal obacter formigenes HOxBLS OX=556268 GN=folE2 PE=3 SV=2
MNFRDSHSFECNWEDCSNIRTTITSSSATKMNSDLHSIPDVQSTLDTRHIAIQKVGVKGVRHPLRIQTKNGIQSSVGTWNMYVRLPDQKKGTHMSRFIALLEEFTGSDSAPLNIGVFGQLIRDMLKLLDAESGSIELSFPFFMTKAAPVSGVKSLMDYEVGFIGEMNKDHIEISQTVLVPVTSLCPCSKEISAYGAHNQRSHITVKAILKEDLPVEELITKIEAEASCELFGLLKRPDEKYVTEHAYDNPKFVEDLVRDVACMLNTDERIVAYTLEAENFESIHNHSAYACIEFDKRIR

SEQ ID NO: 11971 - protein, 270 aa, Oxalobacter formigenes
  misc_feature (1)..(270): tr|C3XC57|C3XC57_OXAFO GTP cyclohydrolase FolE2 OS=Oxal obacter formigenes OXCC13 OX=556269 GN=folE2 PE=3 SV=1
MNADDNFSIPDVQNTLDTRHIAIQRVGVKGVRHPLQIQTRDGIQSSVGTWNMTVHLPEQKKGTHMSRFMALLEEFTSSDSKPLNVDVFGKLIRNMLELLDAESGRIELSFPFFITKTAPVSGVKSLMDYEVGLIGEMKNGQIEISQKVLVPVTSLCPCSKEISAYGAHNQRSHITVHAIIKDDLPIEDLISKIEAQASCELFGLLKRPDEKYVTEHAYDNPKFVEDLVRDVAGMLNADSRVLAYSLEAENFESIHNHSAYACIEFDKRKQ

SEQ ID NO: 11972 - protein, 282 aa, Oxalobacter sp.
  misc_feature (1)..(282): tr|A0A3A6P081|A0A3A6P081_9BURK GTP cyclohydrolase FolE2 OS=Oxalobacter sp. OX=2093374 GN=folE2 PE=3 SV=1
MQEAKRTGTIGAKKAKQVAKTMPDVQSSADTRHIAIQRVGVKDVRYPIRLKTPTGILSTVGNWTLAVQLSEHQKGTHMSRFIGLLEAMNGADSMAIDVAIFSRMVRKMLTLLEAESGRIDVTFPYFINKTAPVSGVQSLMDYEVGLSGEVKHGLLEVTQKVVVPVTSLCPCSKEIAAYGAHNQRSHITVHAVMAGHFPMEELIAKIEAQASCELYGLLKRPDEKFVTERAYDNPKFVEDLVRDVASMLNADDRIAAYKLEAENFESIHNHSAYALIEHDKRI

SEQ ID NO: 11973 - protein, 271 aa, Oxalobacteraceae bacterium
  misc_feature (1)..(271): tr|A0A3D6AJU0|A0A3D6AJU0_9BURK GTP cyclohydrolase FolE2 OS=Oxalobacteraceae bacterium OX=1871070 GN=folE2 PE=3 SV=1
MNSRDPNLTSIPDVQSTVDTRRLAIQRVGVKGVRYPVTVKTSVGAQPTVGTWNMYVQLPEDQKGTHMSRFIALLEGNRAPLDIPHFSGLMRKMVKLLEAEAGRIELSFPYFINKTAPVSGVESLMDYEVGLTGEVRGDQVEVTLKVMVPVTSLCPCSKKISAYGAHNQRSHITVSALIAGDILVDQLIAKIEQQASCELFGLLKRPDEKYVTERAYDNPKFVEDLVRDVAGMLNADGRIAAYTLEAENFESIHNHSAYALIEHDKRKPGAA

SEQ ID NO: 11974 - protein, 188 aa, Oxalobacteraceae bacterium
  misc_feature (1)..(188): tr|A0A4Y9RIQ4|A0A4Y9RIQ4_9BURK GTP cyclohydrolase 1 OS= Oxalobacteraceae bacterium OM1 OX=2561929 GN=folE PE=3 SV=1
MDKNFSEQDWRRLLAHLGEDPERQGLQDTPARVDKAWKHWTSGYDQNPADILKVFEDGAEHYSELIVVRGIPVYSHCEHHLAPFFGTATVGYTPNGKIVGLSKLTRLVDCFAKRLQVQERLTVQIANSLMEHLEPLSVGVVIRCRHMCMESRGIRTPGEETVTSALLGEMRTNLGLRTEFLALEREKS

SEQ ID NO: 11975 - protein, 368 aa, Pacificibacter marinus
  misc_feature (1)..(368): tr|A0A1Y5SQP9|A0A1Y5SQP9_9RHOB GTP cyclohydrolase FolE2 OS=Pacificibacter marinus OX=658057 GN=folE2 PE=3 SV=1
MTMHQANVDTDAKRSDAKAALDVLRAWARTATPTEVAELDPAISRLLPEAQDLANYPALRRAYPEEFTVDEAYRDTLPDLQNGPESLIKGAKQHIQHVGISNFRLPIQFHTRDDGDLTLETSVTGTVSLEAEKKGINMSRIMRSYYKHAERTFSFEVIEAALDDYMSDLDSFDARIQMRFSFPMKVPSLRSGLLGYQYYDIALELVERAGVRTKIMHLDYVYSSTCPCSLELSEHARTTRQQLATPHSQRSVARISIEILQDQSCLWFEDLIDLCRAAVATETQVMVKREDEQAFAELNAANPIFVEDAARLFCEVLQNDVRIGDFRIIASHQESLHSHDAVSVLTEGDTFASDSLDPKLFSTLIHVG

SEQ ID NO: 11976 - protein, 368 aa, Pacificibacter maritimus
  misc_feature (1)..(368): tr|A0A3N4UU11|A0A3N4UU11_9RHOB GTP cyclohydrolase FolE2 OS=Pacificibacter maritimus OX=762213 GN=folE2 PE=3 SV =1
MNIRETNMNKDDDHSEVRAALDLLRTWATHATPTEVAELDPAIARLLPQSQDLANYPALRRAYPEDFAVDQAYRDTLPDLQNGPESLIKGAKQHIQHVGISNFRLPIRFHTRDNGDLTLETSVTGTVSLEAEKKGINMSRIMRSYYKHAERTFSFDVIEAALDDYITDLESFDARIQMRFSFPMKVPSLRSGLEGYQYYDIALELVEQGGVRSKIMHLDYVYSSTCPCSLELSEHARATRQQLATPHSQRSVARISIEILPDQNILWFEDLIDLCRQAVSTETQVMVKREDEQAFAELNAANPIFVEDAARLFCQAMQSDGRIGDFRVIASHQESLHSHDAVSILTEGDTFAANSLDPKLFSTLIHVG

SEQ ID NO: 11977 - protein, 212 aa, Pacificimonas flava
  misc_feature (1)..(212): tr|M2SF87|M2SF87_9SPHN GTP cyclohydrolase 1 OS=Pacifici monas flava OX=1234595 GN=folE PE=3 SV=1
MTEDEQRASPDDGDLVRGEDRDANIPGEVLAAIRTLIEWTGDDPAREGLVDTPGRVARAWKEYCQGYDENPGSHLSRVFEEVGGYDEIVLLRDIPFQSHCEHHMAPIIGKAHIAYLPKSHVVGISKLARVLHGFARRLQVQERLTAEVADCIWEKLQPLGVAVVIEATHACMTARGVRTPGVTMTTSRMMGVFRDDERSRDEVLNLMGVGKG

SEQ ID NO: 11978 - protein, 209 aa, Pacificimonas flava
  misc_feature (1)..(209): tr|A0A219B3E5|A0A219B3E5_9SPHN GTP cyclohydrolase 1 OS= Pacificimonas flava OX=1234595 GN=folE PE=3 SV=1
MTDTPDPADGDLVSPPDRDAEIPDDVLAAVKTLIRWTGDDPAREGLVDTPGRVARAWKEYCQGYEEDPGTHLSRIFEEVGGYDEIVLLRDIPFQSHCEHHMAPIIGKAHIAYLPENYVVGISKLARVLHGFARRLQVQERLTAEVADCIWEKLQPRGVAVVIEASHACMTARGVRTPGVTMTTSRMMGVFRDDERSRKEVLTLMGVAKG

SEQ ID NO: 11979 - protein, 270 aa, Paenalcaligenes hominis
  misc_feature (1)..(270): tr|A0A1U9K267|A0A1U9K267_9BURK GTP cyclohydrolase FolE2 OS=Paenalcaligenes hominis OX=643674 GN=folE2 PE=3 SV= 1
MSTMTSPVETMPDVQSSVDTRHIPIQKVGVRDVTYPMLIDTGTEALPTVAEWELTVALPAEEKGTHMSRFLALLEQHRTQPMSMQGFCHMTAEMLELLNATEGDVTATFPYFINKVAPVSEVSSLLDYQVSWAANAVATVDNDVDVQFELTVLVPVTSLCPCSKAISKYGAHNQRSHVTVSVVAHPDQLNINQLIQAIEAQASCELWGLLKRTDEKYVTEQAYENPKFVEDLVRDVAVAIEQIEGIQGYRIEAENFESIHNHSAYAVVEG

SEQ ID NO: 11980 - protein, 211 aa, Paenarthrobacter aurescens
  misc_feature (1)..(211): tr|A1R155|A1R155_PAEAT GTP cyclohydrolase 1 OS=Paenarth robacter aurescens (strain TC1) OX=290340 GN=folE PE=3 SV=1
MTHFDDDDDLAAAHGSAAGSKHDHKVDRPRIEAAVREILLAIGEDPERGGLLDTPKRVAKAYAEMFAGLHQHPVDVLSTTFDLDHEELVLVKDIPFYSTCEHHLVPFHGVAHVGYIPSHDGKVTGLSKLARLVDIYARRPQVQERLTTQIVEALVTHLNPRGAIVVVECEHMCMSMRGIRKPGAKTVTSAVRGQLHDPATRAEAMSLILGR

SEQ ID NO: 11981 - protein, 210 aa, Paenarthrobacter aurescens
  misc_feature (1)..(210): tr|A0A4Y3NJR1|A0A4Y3NJR1_PAEAU GTP cyclohydrolase 1 OS= Paenarthrobacter aurescens OX=43663 GN=folE PE=3 SV=1
MTHFDDDDLAAAHGSAAGSTHGHKVDRPRIEAAVREILLAIGEDPERGGLLDTPKRVAKAYAEVFAGLHQHPAEVLSTTFDLDHEELVLVKDIPFYSTCEHHLVPFHGVAHVGYIPSHDGKVTGLSKLARLVDIFARRPQVQERLTTQIVEALVKHLNPRGAIVVVECEHMCMSMRGIRKPGAKTVTSAVRGQLHDPATRAEAMSLILGR

SEQ ID NO: 11982 - protein, 210 aa, Paenarthrobacter nicotinovorans
  misc_feature (1)..(210): tr|A0A175J962|A0A175J962_PAENI GTP cyclohydrolase 1 OS= Paenarthrobacter nicotinovorans OX=29320 GN=folE PE=3 S V=1
MTHFDDDDLAAAHGSATGSKAHSKVDRPRIEAAVREILLAIGEDPDRGGLQDTPKRVAKAYAEVFAGLHQHPADVLSTTFDLDHEELVLVKDIPFYSTCEHHLVPFHGVAHVGYIPSHDGKVTGLSKLARLVDIYARRPQVQERLTTQIVEALVKHLNPRGAIVVVECEHMCMSMRGIRKPGAKTVTSAVRGQLHDPATRAEAMSLIIGR

SEQ ID NO: 11983 - protein, 211 aa, Paenarthrobacter nitroguajacolicus
  misc_feature (1)..(211): tr|A0A558GN63|A0A558GN63_PAENT GTP cyclohydrolase 1 OS= Paenarthrobacter nitroguajacolicus OX=211146 GN=folE PE =3 SV=1
MTHFDDDDDLAAAHGSAAGSKHGHKVDRPRIEAAVREILLAIGEDPDRGGLQDTPKRVAKAYAEVFAGLHQHPADVLSTTFDLDHEELVLVKDIPFYSTCEHHLVPFHGVAHVGYIPSHDGKVTGLSKLARLVDIYARRPQVQERLTTQIVEALVKHLNPRGAIVVVECEHMCMSMRGIRKPGAKTVTSAVRGQLHDPATRAEAMSLILGR

SEQ ID NO: 11984 - protein, 210 aa, Paenarthrobacter ureafaciens
  misc_feature (1)..(210): tr|A0A444GVJ6|A0A444GVJ6_9MICC GTP cyclohydrolase 1 OS= Paenarthrobacter ureafaciens OX=37931 GN=folE PE=3 SV=1
MTHFDDEDLAAAHGPAGDSKGGHKVDRPRIEAAVREILLAIGEDPDRGGLKDTPKRVAKAYAEVFAGLHHDPVDVLSTTFDLDHEELVLVKDIPFYSTCEHHLVPFHGVAHVGYIPSHDGKVTGLSKLARLVDIYARRPQVQERLTTQIVEALVEHLNPRGAIVVVECEHMCMSMRGIRKPGAKTVTSAVRGQLHDPATRAEAMSLILGR

SEQ ID NO: 11985 - protein, 197 aa, Paenibacillaceae bacterium
  misc_feature (1)..(197): tr|A0A2A6E3A1|A0A2A6E3A1_9BACL GTP cyclohydrolase 1 OS= Paenibacillaceae bacterium JTherm OX=1906605 GN=folE PE =3 SV=1
MAEIREYRNEWVQANREQLEYHVREILRLIGEDVDREGLRDTPARVVRMFEEIFAGYSVDPREVLGTTFDERHEELVIVKDIVYYSQCEHHMAPFFGKIHIGYIPSGKVLGLSKFARLVDAVTRRLQVQERITSEIADILVETVRPRGVMVVVEGEHLCMCARGVKKPGSKTVTSAVRGEFGSNAALRAEFLSLLNR

SEQ ID NO: 11986 - protein, 197 aa, Paenibacillaceae bacterium
  misc_feature (1)..(197): tr|A0A1Y3Q9T1|A0A1Y3Q9T1_9BACL GTP cyclohydrolase 1 OS= Paenibacillaceae bacterium ZCTH02-B3 OX=1861638 GN=folE PE=3 SV=1
MSGIKEYRNGSIERHRGELELHIREILRLVGEDPEREGLRDTPSRVVNWYAEMLSGYGVDPRDVLGDTFDERHEELVIVKDIMYYSLCEHHLVPFFGKAHIGYIPSGKIAGLSKLARLVDAVTKRLQVQERLTSQIADTLEEVLKPHGVMVVVEGEHLCMCARGVKKYGSKTVTSAVRGQFLRSAAARSEFLSLIRE

SEQ ID NO: 11987 - protein, 197 aa, Paenibacillus agaridevorans
  misc_feature (1)..(197): tr|A0A2R5ETU5|A0A2R5ETU5_9BACL GTP cyclohydrolase 1 OS= Paenibacillus agaridevorans OX=171404 GN=folE PE=3 SV=1
MAGRKDYVNSKVASNREQIEHHVKEILKLIGEDVEREGLLETPARVTRMYEEIFAGYDVDPREVLGVSFDEQHEELVIVRDIVYYSLCEHHMAPFFGKAHIGYIPSGKIAGLSKLARLVDAITRKLQVQERVTTQIADILEQELSPHGVMVVVEGEHLCMCSRGVKKPGSKTVTSAVRGEFRTSSPLRSEFLALLKQ

SEQ ID NO: 11988 - protein, 197 aa, Paenibacillus algorifonticola
  misc_feature (1)..(197): tr|A0A1I2FBB8|A0A1I2FBB8_9BACL GTP cyclohydrolase 1 OS= Paenibacillus algorifonticola OX=684063 GN=folE PE=3 SV =1
MAGKKDYVNSKVIQNREQIEFHVKEILKLVGENVEREGLLETPARVTRMYEEIFAGYEVDPSEVLGVTFDEQHEELVIVKDIIYYSQCEHHMAPFFGKAHIGYIPSGKIAGLSKLARLVEAITRRLQVQERITSQIADILEQELQPHGVMVVVEGEHLCMCSRGVKKPGSMTVTSAVRGEFRSNPALRSEFLALLKS

SEQ ID NO: 11989 - protein, 196 aa, Paenibacillus alvei
  misc_feature (1)..(196): tr|S9U4I4|S9U4I4_PAEAL GTP cyclohydrolase 1 OS=Paenibac illus alvei TS-15 OX=1117108 GN=folE PE=3 SV=1
MAGLKDYVNTQVGTNREKIEHHIKEILKLVGEDVEREGLLDTPARVTRMYEEIFAGYEVDPRDALGVAFDENHEELVIVKDITYYSQCEHHMAPFFGKVHIGYIPSGKIAGLSKFARLVEAISRRLQVQERITTEIADIMDEVLMPHGVMVVVEGEHLCMCARGVKKPGSKTVTMATRGSFRTDAAQRAEFLSLIK

SEQ ID NO: 11990 - protein, 197 aa, Paenibacillus alvei
  misc_feature (1)..(197): tr|K4Z9L3|K4Z9L3_PAEA2 GTP cyclohydrolase 1 OS=Paenibac illus alvei (strain ATCC 6344 / DSM 29 / NBRC 3343 / NC IMB 9371 / NCTC 6352) OX=1206781 GN=folE PE=3 SV=1
MAGLKDYVNTQVDANREQIEHHIKEILRLVGEDVEREGLLDTPARVTRMYEEIFAGYEVDPRDALGVAFDENHEELVIVKDITYYSQCEHHMAPFFGKVHIGYIPSGKIAGLSKFARLVEAISRRLQVQERITSEIADIMDEVLKPHGVMVVVEGEHLCMCARGVKKPGSKTVTMATRGSFRTDAAQRAEFLSLIKQ

SEQ ID NO: 11991 - protein, 197 aa, Paenibacillus amylolyticus
  misc_feature (1)..(197): tr|A0A124DYU0|A0A124DYU0_PAEAM GTP cyclohydrolase 1 OS= Paenibacillus amylolyticus OX=1451 GN=folE PE=3 SV=1
MAGVKDYMNSKVSDNREKIEYHVEQILKLIGEDSTREGLLETPARVTRMYEEIFGGYEVDPRDVLGVTFDENHEELVIVKDIVYYSQCEHHMAPFFGKVHIGYVPSGKIVGLSKMARLVEAVTRRLQVQERITSQIADILTEAVEPHGVMVVVEGEHLCMCSRGVKKPGSKTVTSAVRGSFRENPAQRAEFLSLVKD

SEQ ID NO: 11992 - protein, 197 aa, Paenibacillus amylolyticus
  misc_feature (1)..(197): tr|A0A1R1DF54|A0A1R1DF54_PAEAM GTP cyclohydrolase 1 OS= Paenibacillus amylolyticus OX=1451 GN=folE PE=3 SV=1
MAGVKDYLNSKVSDNREKIEYHVEQILKLIGEDSTREGLLETPARVTRMYEEIFGGYEVDPRDVLGVTFDENHEELVIVKDIVYYSQCEHHMAPFFGKVHIGYVPSGKIVGLSKMARLVEAVTRRLQVQERITSQIADILTEAVEPHGVMVVVEGEHLCMCSRGVKKPGSKTVTSAVRGSFRENPAQRAEFLSLVKD

SEQ ID NO: 11993 - protein, 197 aa, Paenibacillus anaericanus
  misc_feature (1)..(197): tr|A0A433XTY5|A0A433XTY5_9BACL GTP cyclohydrolase 1 OS= Paenibacillus anaericanus OX=170367 GN=folE PE=3 SV=1
MAGLKDYVNNKVGENRDQIEHHVREILKLIGEDIEREGLHETPARVTRMYEEIFGGYEIDPREVLGVTFEENHQELVIVKDIVYYSQCEHHMAPFFGKAHIGYIPSGRIAGLSKLARLVEVVTRRLQVQERITSQLADIMEEVLDPAGVMVVVEGEHLCMCARGVKKPGSKTITSAVRGSFRTDAASRAEFLSLIKD

SEQ ID NO: 11994 - protein, 198 aa, Paenibacillus antarcticus
  misc_feature (1)..(198): tr|A0A168NHS1|A0A168NHS1_9BACL GTP cyclohydrolase 1 OS= Paenibacillus antarcticus OX=253703 GN=folE PE=3 SV=1
MSGVKDYVNTDVGNNREKIEYHIEQILNLIGEDTKREGLLETPARVTRMYEEIYAGYEVDPRDVLGVTFDENHEELVIVKDIVYYSQCEHHMAPFFGKIHIGYIPSGKIAGLSKFARLVEAVTRRLQVQERITSQIADILNEVLEPNGVMVVVEGEHLCMCSRGVKKPGSKTVTSAVRGIFREDSASRAEFLSLLRDY

SEQ ID NO: 11995 - protein, 197 aa, Paenibacillus aquistagni
  misc_feature (1)..(197): tr|A0A1X7LDC0|A0A1X7LDC0_9BACL GTP cyclohydrolase 1 OS= Paenibacillus aquistagni OX=1852522 GN=folE PE=3 SV=1
MAGVKDYVNTSVSDNREKVEYHIRELLKLIGENVEREGLLDTPARVTRMYEEIFSGYSVDPREVLGVTFDEQHEELVIVKDIVYYSQCEHHMAPFFGKVHIGYVPSGQIVGLSKLARLVDAITRRLQVQERITTEIADILEEVLKPQGVIVVVEGEHLCMCARGVRKPGSKTVTTAARGVFKTDAAGRQEFMSLLKQ

SEQ ID NO: 11996 - protein, 196 aa, Paenibacillus baekrokdamisoli
  misc_feature (1)..(196): tr|A0A3G9JA23|A0A3G9JA23_9BACL GTP cyclohydrolase 1 OS= Paenibacillus baekrokdamisoli OX=1712516 GN=folE PE=3 S V=1
MAGKKDYVNSIVSDNREQIEYHIKQILSLIGEDVDREGLQETPARVTRMYEEIFAGYDVDPRDVLGVTFDEQHEELVIVKDIVYYSQCEHHMAPFFGKVHIGYIPSGKIAGLSKFARLVEAISRRLQVQERITSQIANILEEVLQPHGVMVVVEGEHLCMCARGVKKPGSQTVTSAVRGEFRKSAALRSEFLSLIK

SEQ ID NO: 11997 - protein, 308 aa, Paenibacillus barcinonensis
  misc_feature (1)..(308): tr|A0A2V4V987|A0A2V4V987_PAEBA GTP cyclohydrolase FolE2 OS=Paenibacillus barcinonensis OX=198119 GN=folE2 PE=3 SV=1
MNSRVRPDGYILPGKAERLRIFGSVDPVEGNKPVSKAEMKDLQNMKKDFLFELQQVGVDNVKYPLEVISAKEPEQLSSIGNFRLTTALDYESKGINMSRLMEQLERSRTRGLSDRIQDLITLTQQFAELMQQPKAELKVTYPWFYERTAPVTGLSGLNHSLAIVHVIWKAGETPIIRAGLEIQITTLCPCSKEISEYSAHNQRGTLRIQVQSNPCENLPSYWKEELLNAAESNASSCLHPILKRPDEKRVTERAYENPRFVEDMVRLTAADLYEKHWLSQFEVDCRNEESIHQHDAVTRIVYDKRTPQ

SEQ ID NO: 11998 - protein, 197 aa, Paenibacillus barcinonensis
  misc_feature (1)..(197): tr|A0A2V4V4P8|A0A2V4V4P8_PAEBA GTP cyclohydrolase 1 OS= Paenibacillus barcinonensis OX=198119 GN=folE PE=3 SV=1
MAGVKDYLNSKVSDNREKIEYHVEQILKLIGEDSTREGLLETPARVTRMYEEIFGGYEVDPRDVLGVTFDENHEELVIVKDIVYYSQCEHHMAPFFGKVHIGYVPSGKIVGLSKMARLVEAVTRRLQVQERITSQIADILTEAVEPHGVMVVVEGEHLCMCSRGVKKPGSKTVTSAVRGSFRDNPAQRAEFLSLIKE

SEQ ID NO: 11999 - protein, 197 aa, Paenibacillus barengoltzii
  misc_feature (1)..(197): tr|R9L7Q8|R9L7Q8_9BACL GTP cyclohydrolase 1 OS=Paenibac illus barengoltzii G22 OX=1235795 GN=folE PE=3 SV=1
MSGLKDYVNTQVGDHREQIEYHVREILKLIGEDVEREGLIETPARVTRMYEEIFAGYEVDPRDVLGVTFEENHEELVIVKDIVYYSQCEHHMAPFFGKAHIGYIPSGRIAGLSKLARLVEAVTRRLQVQERITSQIADIMEEVLQPKGVMVVVEGEHLCMCSRGVKKPGSKTVTSAVRGSFRKDAASRAEFLSLIKE

SEQ ID NO: 12000 - protein, 197 aa, Paenibacillus beijingensis
  misc_feature (1)..(197): tr|A0A0D5NGZ9|A0A0D5NGZ9_9BACL GTP cyclohydrolase 1 OS= Paenibacillus beijingensis OX=1126833 GN=folE PE=3 SV=1
MAGAKDYVNSMVSRNREQIEYHIKEILKLIGEDVEREGLLETPARVTRMYEEIFAGYDVDPRDVLGVTFDERHEELVIVRDIVYYSQCEHHMAPFFGKAHIGYIPSGKIAGLSKLARLVEAVSRKLQVQERITTQIADILVETLQPHGVMVVVEGEHLCMCARGVKKPGSKTVTSAVRGEFRSSEALRSEFLSLLKQ

SEQ ID NO: 12001 - protein, 197 aa, Paenibacillus borealis
  misc_feature (1)..(197): tr|A0A089L7M5|A0A089L7M5_9BACL GTP cyclohydrolase 1 OS= Paenibacillus borealis OX=160799 GN=folE PE=3 SV=1
MGSIKEYMNGKVSVNREQIEYHVEKILELIGEDTSREGLLETPARVTRMYEEIFGGYSIDPREALGVTFDESHEELVIVKDIVYYSQCEHHMAPFFGKVHIGYVPSGRIAGLSKLARLVEAVSRRLQVQERITAQIADIMTEVLNPHGVMVVVEGEHLCMCARGVKKPGSKTVTMATRGTFREDAAARAEFLALIKE

SEQ ID NO: 12002 - protein, 197 aa, Paenibacillus borealis
  misc_feature (1)..(197): tr|A0A1R0YB77|A0A1R0YB77_9BACL GTP cyclohydrolase 1 OS= Paenibacillus borealis OX=160799 GN=folE PE=3 SV=1
MGGIKEYVNGKVSVNREQIEYHVEKILELIGEDTGREGLLETPARVTRMYEEIFGGYSIDPREALGVTFDESHEELVIVKDIVYYSQCEHHMAPFFGKVHIGYVPSGRIAGLSKLARLVEAVSRRLQVQERITTQIADIMTEVLNPHGVMVVVEGEHLCMCARGVKKPGSKTVTMATRGSFREEAAARAEFLALIKE

SEQ ID NO: 12003 - protein, 198 aa, Paenibacillus bovis
  misc_feature (1)..(198): tr|A0A172ZDR3|A0A172ZDR3_9BACL GTP cyclohydrolase 1 OS= Paenibacillus bovis OX=1616788 GN=folE PE=3 SV=1
MAGIKDYTNLKVAAHRDQIEYHIKEILNLIGEDTEREGLLETPARVTRMYEEIFAGYSVDPREALGVTFDENHQEMVIVKDIVYYSQCEHHMAPFFGKVHIGYVPSGKIAGLSKFARLVEAVTRRLQVQERITSQIADILDEVLKPTGVMVVVEGEHLCMCARGVKKPGSKTITSAVRGGFQNDAPLRAEFLSLIKDH

SEQ ID NO: 12004 - protein, 196 aa, Paenibacillus catalpae
  misc_feature (1)..(196): tr|A0A1I2D4L8|A0A1I2D4L8_9BACL GTP cyclohydrolase 1 OS= Paenibacillus catalpae OX=1045775 GN=folE PE=3 SV=1
MAGMKDYVNSAVSRNREQIEHHVKEILKLVGEDVEREGLLETPARVTRMYEEIFAGYEVDPREVLGVTFDEQHEELVIVKDIVYYSQCEHHMAPFFGKVHIGYIPSGKIAGLSKLARLVEAITRRLQVQERITTQIADIMQEVLKPQGVMVVVEGEHLCMCARGVKKPGSKTVTSAVRGVFSDSALRSEFLALLKQ

SEQ ID NO: 12005 - protein, 197 aa, Paenibacillus cellulosilyticus
  misc_feature (1)..(197): tr|A0A2V2YRT6|A0A2V2YRT6_9BACL GTP cyclohydrolase 1 OS= Paenibacillus cellulosilyticus OX=375489 GN=folE PE=3 S V=1
MAGKKDYVNSMVSSNRDQIEYHVREILKLIGEDVEREGLLETPARVARMYEEIFAGYEVDPREVLGVTFDEQHEELVIVKDIVYYSQCEHHMAPFFGKVHIGYIPSGKIVGLSKLARLVEAVSRKLQVQERITSQIADILMEELKPHGVMVVVEGEHLCMCARGVKKTGSKTVTSAVRGQFHGNAAARAEFMALIRD

SEQ ID NO: 12006 - protein, 195 aa, Paenibacillus chitinolyticus
  misc_feature (1)..(195): tr|A0A410X3N2|A0A410X3N2_9BACL GTP cyclohydrolase 1 OS= Paenibacillus chitinolyticus OX=79263 GN=folE PE=3 SV=1
MPAKEYKNTKVADNREEIEGHIREILRLIGENPEREGLLDTPARVARMYEEIFAGYEADFHDVLGVTFDEQHEELVIIKDIVYYSQCEHHMAPFFGKIHVGYIPSGKIAGLSKFARLVEAITRKLQVQERITSQIANTLDEVLEPHGVMVVVEGEHLCMCSRGVKKPGSKTVTSAVRGSFRTDSALRAEFLSLIK

SEQ ID NO: 12007 - protein, 196 aa, Paenibacillus contaminans
  misc_feature (1)..(196): tr|A0A329LXY6|A0A329LXY6_9BACL GTP cyclohydrolase 1 OS= Paenibacillus contaminans OX=450362 GN=folE PE=3 SV=1
MPAKEYRNERVIANREKVEEHVREILRLIGEDVDREGLLETPARVTRMYEEIFSGYDADPREVLGVTFDEKHEELVIVKDIVYYSQCEHHMAPFFGKVHIGYIPSGKIAGLSKFARLVDAVTRKLQVQERITSEIADIMEDVLKPHGIMVVVEGEHMCMCSRGVKKSGSKTVTSAVRGIFRTDAASRSEFLSLVKE

SEQ ID NO: 12008 - protein, 196 aa, Paenibacillus crassostreae
  misc_feature (1)..(196): tr|A0A167AIC7|A0A167AIC7_9BACL GTP cyclohydrolase 1 OS= Paenibacillus crassostreae OX=1763538 GN=folE PE=3 SV=1
MAGVKDYSNTEVSKNREKIEYHIEQILNLVGEDAKREGLLETPARVTRMYEEIFAGYEVDPRDVLGVTFDENHEELVIVKDIVYYSQCEHHMAPFFGKIHIGYIPSGKIAGLSKFARLVEAITRRLQVQERITSQIADIINEVLQPNGVMVVVEGEHLCMCSRGVKKPGSKTVTSAVRGIFREDSASRAEFLSLVK

SEQ ID NO: 12009 - protein, 196 aa, Paenibacillus curdlanolyticus
  misc_feature (1)..(196): tr|E0I7E6|E0I7E6_9BACL GTP cyclohydrolase 1 OS=Paenibac illus curdlanolyticus YK9 OX=717606 GN=folE PE=3 SV=1
MASKEYRNIQAAENREQIEAHIRSILRLIGEDADREGLLETPARVARMYEEIFSGYVADYHEVLGVLFDENHEELVIVKDIDYFSQCEHHMVPFMGKVHIGYVPSGKVAGLSKFARLVEAVSKKLQLQERMTTEISGVIMDVLAPKGVMVVVTGQHLCMCGRGVKKSGAVTVTSATRGEFRHNYALRNEFMALIQS

SEQ ID NO: 12010 - protein, 197 aa, Paenibacillus curdlanolyticus
  misc_feature (1)..(197): tr|E0IB02|E0IB02_9BACL GTP cyclohydrolase 1 OS=Paenibac illus curdlanolyticus YK9 OX=717606 GN=folE PE=3 SV=1
MAGMKDYVNAAVGSNREQIEFHVKEILKLIGEDVEREGLLETPARVARMYEEIFAGYEVDPRDVLGVTFDEQHEELVIVKDIVFYSQCEHHMAPFFGKVHIGYIPSGKIAGLSKLARLVEAVTRKLQVQERITSQIADILAETLSPHGVMVVVEGEHLCMCARGVKKPGSKTITSAVRGQFHRNAAARAEFMALIRD

SEQ ID NO: 12011 - protein, 197 aa, Paenibacillus darwinianus
  misc_feature (1)..(197): tr|A0A015LTW8|A0A015LTW8_9BACL GTP cyclohydrolase 1 OS= Paenibacillus darwinianus OX=1380763 GN=folE PE=3 SV=1
MAGVKDYLNGKVSANREQIEYHVKEILKLIGENVEREGLLETPARVTRMYEEIFAGYDVDPREVLGVTFDEQHEELVIVRDIVYYSQCEHHMAPFFGKAHIGYIPSGKIAGLSKLARLVEAVTRKLQVQERITSQLADIMNDALHPNGVMVVVEGEHLCMCARGVKKSGSKTVTSAVRGEFVTNAALRSEFLSLLKQ

SEQ ID NO: 12012 - protein, 186 aa, Paenibacillus darwinianus
  misc_feature (1)..(186): tr|A0A015P8Z3|A0A015P8Z3_9BACL GTP cyclohydrolase 1 OS= Paenibacillus darwinianus OX=1380763 GN=folE PE=3 SV=1
MAGSDPLEMSIRTILEEIGENPNREGLLDTPKRVAKMYREVFANVGVDPATALTTTFEEEYDGIITVKDIAYYTFCEHHLIPFYGQAHIGYMPEGRIVGLSKFARLVELVSGRPQVQERMTQQIAAAVVDVLKPKGVIVTVEGTHLCMCARGVKKPGTSTVTTVKKGIFADNVALCEEFDRSISRK

SEQ ID NO: 12013 - protein, 197 aa, Paenibacillus dendritiformis
  misc_feature (1)..(197): tr|H3SKQ8|H3SKQ8_9BACL GTP cyclohydrolase 1 OS=Paenibac illus dendritiformis C454 OX=1131935 GN=folE PE=3 SV=1
MAGLKDYVNSKVGENREQIEHHVKEILRLIGEDVDREGLKETPARVTRMYEEIFGGYEVDPRDVLGVTFDEAHEELVIVKDITYYSLCEHHMAPFFGKVHIGYIPSGQVAGLSKLARLVEAVTRRLQVQERVTSEIADIMEEVLKPHGVMVVVEGEHLCMCSRGVKKPGSKTVTMSTRGSFKDDAAQRAEFLSLIKQ

SEQ ID NO: 12014 - protein, 197 aa, Paenibacillus dendritiformis; identical to SEQ ID NO: 12013
  misc_feature (1)..(197): tr|A0A2W4IXG8|A0A2W4IXG8_9BACL GTP cyclohydrolase 1 OS= Paenibacillus dendritiformis OX=130049 GN=folE PE=3 SV= 1

SEQ ID NO: 12015 - protein, 197 aa, Paenibacillus donghaensis
  misc_feature (1)..(197): tr|A0A2Z2KRS0|A0A2Z2KRS0_9BACL GTP cyclohydrolase 1 OS= Paenibacillus donghaensis OX=414771 GN=folE PE=3 SV=1
MGGIKEYINGKVAGNREQIEYHVSKILELIGEDTRREGLLETPARVTRMYEEIFGGYSVDPREALGVTFDESHEELVIVKDIVYYSQCEHHMAPFFGKVHIGYIPSGRIAGLSKLARLVEAVSRRLQVQERITAQIADIMTEVLNPHGVIVVVEGEHLCMCARGVKKPGSKTVTMASRGSFREDAAARAEFLSLIKE

SEQ ID NO: 12016 - protein, 197 aa, Paenibacillus durus
  misc_feature (1)..(197): tr|A0A089HJ50|A0A089HJ50_PAEDU GTP cyclohydrolase 1 OS= Paenibacillus durus OX=44251 GN=folE PE=3 SV=1
MGGVKDYVNGSVSANREKIEYHVQKILELIGEDTGREGLLETPARVTRMYEEIFAGYSVDPREVLGVTFDESHEELVIVKDIVYYSQCEHHMAPFFGKVHIGYIPSGRIAGLSKLARLVEAVTRRLQVQERITSQIADIMTEVLDPNGVMVVVEGEHLCMCARGVKKPGSKTVTSAVRGIFRENPATRAEFLSLIKE

SEQ ID NO: 12017 - protein, 197 aa, Paenibacillus durus
  misc_feature (1)..(197): tr|A0A0F7FEP3|A0A0F7FEP3_PAEDU GTP cyclohydrolase 1 OS= Paenibacillus durus ATCC 35681 OX=1333534 GN=folE PE=3 SV=1
MGGVKDYVNGSVSANREKIEYHVQKILELIGEDTGREGLLETPARVTRMYEEIFAGYSVDPREVLGVTFNESHEELVIVKDIVYYSQCEHHMAPFFGKVHIGYIPSGRIAGLSKLARLVEAVTRRLQVQERITTQIADIMTEVLNPNGVMVVVEGEHLCMCARGVKKPGSKTVTSAVRGIFRENPATRAEFLSLIKE

SEQ ID NO: 12018 - protein, 196 aa, Paenibacillus elgii
  misc_feature (1)..(196): tr|A0A163VD09|A0A163VD09_9BACL GTP cyclohydrolase 1 OS= Paenibacillus elgii OX=189691 GN=folE PE=3 SV=1
MPAKEYKNSRVADNREQVEHHIREILRLIGEDPDREGLLDTPARVTRMYEEIFAGYDADVKDILGVAFDEKHEELVIVKDIVYYSQCEHHMAPFFGKIHIGYIPSGKIAGLSKFARLVEAVTRRLQVQERITSEIADIIETELEPHGCMVVVEGEHLCMCARGVKKPGSKTVTSAVRGLFRTDAASRSEFLSLIKD

SEQ ID NO: 12019 - protein, 197 aa, Paenibacillus etheri
  misc_feature (1)..(197): tr|A0A0W1APZ2|A0A0W1APZ2_9BACL GTP cyclohydrolase 1 OS= Paenibacillus etheri OX=1306852 GN=folE PE=3 SV=1
MGNINEYVNGKVSENREQIEYHVEKILELIGEDTGREGLLETPARVTRMYEEIFGGYSIDPREALGVTFDESHEELVIVKDIVYYSQCEHHMAPFFGKVHIGYIPSGRIAGLSKLARLVEAVSRRLQVQERITTQIADIMTEVLSPHGVMVVVEGEHLCMCARGVKKPGSKTVTMATRGVFREDAAARAEFLNLIKE

SEQ ID NO: 12020 - protein, 197 aa, Paenibacillus faecis
  misc_feature (1)..(197): tr|A0A5D0CP74|A0A5D0CP74_9BACL GTP cyclohydrolase 1 OS= Paenibacillus faecis OX=862114 GN=folE PE=3 SV=1
MSGVKDYVNTRVESNREQIEHHVREILKLIGEDVEREGLLETPARVTRMYEEIFGGYEVDPRDVLGVTFDENHEELVIVKDIVYYSQCEHHMAPFFGKAHIGYIPSGKIAGLSKLARLVEAVTRRLQVQERITSQIADIIDEVLKPQGVMVVVEGEHLCMCARGVKKPGSKTVTSAVRGTFRSDAASRAEFLSLIKE

SEQ ID NO: 12021 - protein, 195 aa, Paenibacillus ferrarius
  misc_feature (1)..(195): tr|A0A1V4HNB7|A0A1V4HNB7_9BACL GTP cyclohydrolase 1 OS= Paenibacillus ferrarius OX=1469647 GN=folE PE=3 SV=1
MASIEYKNTRVSENRELIEQHVREILRLIGEDVDREGLLDTPARVTRMYEEIFSGYEANPRDVLGVTFDEQHEELVIIKDIIYYSQCEHHMAPFFGKVHVGYLPSGKVAGLSKFARLVDVITRKLQVQERITSEIADILDEVLKPHGVMVVVEGEHMCMCSRGVKKYGSQTITSAVRGSFRTDSTLRSEFLSLLK

SEQ ID NO: 12022 - protein, 197 aa, Paenibacillus ginsengarvi
  misc_feature (1)..(197): tr|A0A3B0BHE5|A0A3B0BHE5_9BACL GTP cyclohydrolase 1 OS= Paenibacillus ginsengarvi OX=400777 GN=folE PE=3 SV=1
MAGLKDYSNEHVGRNRDKIEEHIREILRLMGEDVEREGLIETPARVTRMYEEIFAGYSVDPREVLGVTFDERHEELVIIKDIVYYSQCEHHMAPFFGKIHVGYLPSGKIAGLSKFARLVEAVTRRLQVQERITSEIADILVEVLHPQGVMVIVEGEHLCMCSRGVKKPGSKTVTSAVRGRFTSDSALRAEFLSLVKE

SEQ ID NO: 12023 - protein, 197 aa, Paenibacillus glacialis
  misc_feature (1)..(197): tr|A0A162M810|A0A162M810_9BACL GTP cyclohydrolase 1 OS= Paenibacillus glacialis OX=494026 GN=folE PE=3 SV=1
MSGVKDYVNTGVGNNREKIEYHIEQILGLIGEDTKREGLLETPARVTRMYEEIFAGYEVDPRDVLGVTFDENHEELVIVKDIVYYSQCEHHMAPFFGKIHIGYIPSGKIAGLSKFARLVEAVTRRLQVQERITSQIADILNEVLQPNGVMVVVEGEHLCMCSRGVKKPGSKTVTSAVRGIFREDSASRAEFLSLVKD

SEQ ID NO: 12024 - protein, 197 aa, Paenibacillus glucanolyticus
  misc_feature (1)..(197): tr|A0A163K0U9|A0A163K0U9_9BACL GTP cyclohydrolase 1 OS= Paenibacillus glucanolyticus OX=59843 GN=folE PE=3 SV=1
MAGVKDYVNNKVGENREQIEYHVEQILKLIGEDTEREGLLETPARVTRMYEEIFAGYEVDPKDVLGVTFDENHEELVIVKDIVYYSQCEHHMAPFFGKVHIGYVPSGKIAGLSKLARLVEAVTRRLQVQERITSQIADIMVEALEPNGVMVVVEGEHLCMCARGVKKPGSKTVTSAVRGSFRSDSAQRSEFLSLIKE

SEQ ID NO: 12025 - protein, 197 aa, Paenibacillus graminis
  misc_feature (1)..(197): tr|A0A089NCW1|A0A089NCW1_9BACL GTP cyclohydrolase 1 OS= Paenibacillus graminis OX=189425 GN=folE PE=3 SV=1
MGGVKDYMNGKVAANRDQIEYHVEKILELIGEDTGREGLLETPARVTRMYEEIFGGYSIDPREALGVTFDESHEELVIVKDIVYYSQCEHHMAPFFGKVHIGYIPSGRIAGLSKLARLVEAVSRRLQVQERITAQIADIMTEVLNPHGVMVVVEGEHLCMCARGVKKPGSKTVTMATRGTFREDAAARAEFLALIKE

SEQ ID NO: 12026 - protein, 197 aa, Paenibacillus hemerocallicola
  misc_feature (1)..(197): tr|A0A5C4T9S6|A0A5C4T9S6_9BACL GTP cyclohydrolase 1 OS= Paenibacillus hemerocallicola OX=1172614 GN=folE PE=3 S V=1
MAGVKDYRNDNVDRNRERIEEHVREILRLMGENVEREGLLETPARVTRMYEEIFAGYSVDPRDVMGVTFDENHQELVIIKDIVYYSQCEHHMAPFFGKIHIGYLPSGKIAGLSKFARLVEAVTRRLQVQERITSEIADILVEVLDPQGVMVVVDGEHMCMCSRGVKKPGSKTVTSAVRGRFTSDSALRAEFLSLVKD

SEQ ID NO: 12027 - protein, 197 aa, Paenibacillus herberti
  misc_feature (1)..(197): tr|A0A229NVY5|A0A229NVY5_9BACL GTP cyclohydrolase 1 OS= Paenibacillus herberti OX=1619309 GN=folE PE=3 SV=1
MAGLKDYSNSMVARNREQIEYHLREILKLVGEDVDREGLLDTPARVTRMYEEIFAGYEVNPADVLGVTFDENHEELVIVKDIVYYSQCEHHMAPFFGKIHIGYLPNGHILGLSKMARLVEAVTRKLQVQERITSQIADILEKALNPQGVMVVVEGEHLCMCSRGVKKPGSKTITSGVRGEFRSSSALRSEFLALLKQ

SEQ ID NO: 12028 - protein, 197 aa, Paenibacillus ihbetae
  misc_feature (1)..(197): tr|A0A1B2DZ47|A0A1B2DZ47_9BACL GTP cyclohydrolase 1 OS= Paenibacillus ihbetae OX=1870820 GN=folE PE=3 SV=1
MAGVKDYVNDKVVENREQIEYHIEQILKLIGEDPQREGLLETPARVTRMYEEIFAGYSVDPKDVLGVTFDEQHEELVIVKDIVYYSQCEHHMAPFFGKVHIGYVPSGKIAGLSKLARLVEAVTRRLQVQERITSQIANIIVEELQPSGVMVVVEGEHLCMCARGVKKPGSKTVTSAVRGTFQSDAAQRSEFLSLIKE

SEQ ID NO: 12029 - protein, 197 aa, Paenibacillus illinoisensis
  misc_feature (1)..(197): tr|A0A2W0D660|A0A2W0D660_9BACL GTP cyclohydrolase 1 OS= Paenibacillus illinoisensis OX=59845 GN=folE PE=3 SV=1
MAGVKDYLNSKVSDNREKIEYHVEQILKLIGEDSTREGLLETPARVTRMYEEIFGGYEVDPRDVLGVTFDENHEELVIVKDIVYYSQCEHHMAPFFGKVHIGYVPSGKIVGLSKMARLVEAVTRRLQVQERITSQIADILNEAVEPHGVMVVVEGEHLCMCSRGVKKPGSKTVTSAVRGSFRDNTAQRAEFLSLVKD

SEQ ID NO: 12030 - protein, 197 aa, Paenibacillus jilunlii
  misc_feature (1)..(197): tr|A0A1G9WU32|A0A1G9WU32_9BACL GTP cyclohydrolase 1 OS= Paenibacillus jilunlii OX=682956 GN=folE PE=3 SV=1
MGGVKDYMNGKVAANREQIEYHVEKILELIGEDPGREGLLETPARVTRMYEEIFGGYSVDPREALGVTFDESHEELVIVKDIVYYSQCEHHMAPFFGKVHIGYIPSGRIAGLSKLARLVEAVSRRLQVQERITAQIADIMTEVLNPHGVMVVVEGEHLCMCARGVKKPGSKTVTMATRGTFREDAAARAEFLALIKE

SEQ ID NO: 12031 - protein, 197 aa, Paenibacillus kribbensis
  misc_feature (1)..(197): tr|A0A222WSX9|A0A222WSX9_9BACL GTP cyclohydrolase 1 OS= Paenibacillus kribbensis OX=172713 GN=folE PE=3 SV=1
MAGVKDYINRKAADNRDKIEYHVEQILQLIGEDPKREGLLETPARVARMYEEIFAGYEVDPRDALGVTFDENHEELVIVKDIVYYSQCEHHMAPFFGKVHIGYVPSGKIVGLSKLARLVEAVTRRLQVQERITSQIADILNEAVSPHGVMVVVEGEHLCMCARGVKKPGSKTVTSAVRGSFRDDAAQRAEFLSLIKE

SEQ ID NO: 12032 - protein, 304 aa, Paenibacillus kribbensis
  misc_feature (1)..(304): tr|A0A222WNZ0|A0A222WNZ0_9BACL GTP cyclohydrolase FolE2 OS=Paenibacillus kribbensis OX=172713 GN=folE2 PE=3 SV =1
MRENRVTSKLPSKAERHRLFGSVDPTPGDKPTLKEHMSDLQNEQRNYLFDIEQVGIARVKHPITVEAGLAPASQVSIGTFKLTTSLNREAKGINMSRLTEHLEEYRQQGGTTDLAQLIRFTKGLTARMNQERAELELSFPWFYERRSPMLGKTGLNHAEGLIRISYEEGRGSCVVVGLTVAVTTLCPCSKEISEYSAHNQRGVVTMEAHIDELDMEQDWKVMLLNAAESNASAPLHPILKRPDEKAVTEKAYENPRFVEDMVRLIAADLVELKAVRAFTVECRNEESIHLHDAIAKISYKKPRS

SEQ ID NO: 12033 - protein, 197 aa, Paenibacillus lactis; identical to SEQ ID NO: 12028
  misc_feature (1)..(197): tr|G4HPJ8|G4HPJ8_9BACL GTP cyclohydrolase 1 OS=Paenibac illus lactis 154 OX=743719 GN=folE PE=3 SV=1

SEQ ID NO: 12034 - protein, 196 aa, Paenibacillus larvae
  misc_feature (1)..(196): tr|V9W647|V9W647_9BACL GTP cyclohydrolase 1 OS=Paenibac illus larvae subsp. larvae DSM 25430 OX=697284 GN=folE PE=3 SV=1
MPAKEHRNGQVAENREQIEYHIREILRLIGEDVDREGLLDTPARVTRMYEEIFGGYEADYEEVLGVTFDENHEELVIVKDIVYYSQCEHHMAPFFGKVHIGYIPSGKIAGLSKFARLVEAVTRKLQVQERITSQIADIIEEVLKPQGIMVMVDGEHLCMCSRGVKKPGSKTVTSAVRGIFRTDAALRAEFLSLIKD

SEQ ID NO: 12035 - protein, 196 aa, Paenibacillus larvae; identical to SEQ ID NO: 12034
  misc_feature (1)..(196): tr|A0A2L1UII0|A0A2L1UII0_9BACL GTP cyclohydrolase 1 OS= Paenibacillus larvae subsp. larvae OX=147375 GN=folE PE =3 SV=1

SEQ ID NO: 12036 - protein, 197 aa, Paenibacillus lautus
  misc_feature (1)..(197): tr|A0A2A5LAS4|A0A2A5LAS4_PAELA GTP cyclohydrolase 1 OS= Paenibacillus lautus OX=1401 GN=folE PE=3 SV=1
MAGVKDYVNHKVGQNREQIEYHVEQILKLIGEDPKREGLLETPARVTRMYEEIFAGYEVDPKDVLGVTFDENHEELVIVKDIVYYSQCEHHMAPFFGKVHIGYVPSGKIAGLSKLARLVEAVTRRLQVQERITSQIADIMVEALQPNGVMVVVEGEHLCMCARGVKKPGSKTVTSAVRGTFQSDSAQRSEFLSLIKD

SEQ ID NO: 12037 - protein, 197 aa, Paenibacillus lautus
  misc_feature (1)..(197): tr|A0A385TS61|A0A385TS61_PAELA GTP cyclohydrolase 1 OS= Paenibacillus lautus OX=1401 GN=folE PE=3 SV=1
MAGVKDYVNHKVGQNREQIEYHVEQILKLIGEDPEREGLLETPARVTRMYEEIFAGYEVDPKDVLGVTFDENHEELVIVKDIVYYSQCEHHMAPFFGKVHIGYVPSGKIAGLSKLARLVEAVTRRLQVQERITSQIADIMVEALQPNGVMVVVEGEHLCMCARGVKKPGSKTVTSAVRGTFQSDSAQRSEFLSLIKD

SEQ ID NO: 12038 - protein, 197 aa, Paenibacillus lentus
  misc_feature (1)..(197): tr|A0A3Q8S3C0|A0A3Q8S3C0_9BACL GTP cyclohydrolase 1 OS= Paenibacillus lentus OX=1338368 GN=folE PE=3 SV=1
MAGVKDYVNTRVGANREKIEHHVREILKLIGEDVEREGLIDTPARVARMYEEIYGGYEVDPRDVLGVTFEENHEELVIVKDIVYYSQCEHHTAPFFGKVHIGYIPSGKIAGLSKLARLVEAITRRLQVQERITSQIADIMDEVLKPQGVMVVVEGEHLCMCARGVKKPGSKTVTSAVRGTFRKDAASRAEFLSLIKE

SEQ ID NO: 12039 - protein, 309 aa, Paenibacillus macerans
  misc_feature (1)..(309): tr|A0A090ZPH6|A0A090ZPH6_PAEMA GTP cyclohydrolase FolE2 OS=Paenibacillus macerans OX=44252 GN=folE2 PE=3 SV=1
MQPIKNQKILPAKPERHRRFGSTAPIPGNKPTVKEQMADLQNRREDYLFPIDRVGICRVQHPILVCSEMEPGTQTSVATITLTTSLPRESKGINMSRLTEQLERYRQKGWTSELPDLCDFVRDLAERMGQDKAEITMTFPWFYERTAPVTENAGLNHAEASIKTAYEKGKPFTAEVSLRAAVTTLCPCSKEISEYSAHNQRGMVTMTVEIDPASPPVRDWKAMLLEAAESNASSALHPVLKRPDEKRVTEQAYENPRFVEDMVRLVAADLYEMEAVQAFTVECRNEESIHMHDAYAVITYDKRNEALTH

SEQ ID NO: 12040 - protein, 197 aa, Paenibacillus macerans
  misc_feature (1)..(197): tr|A0A090ZR09|A0A090ZR09_PAEMA GTP cyclohydrolase 1 OS= Paenibacillus macerans OX=44252 GN=folE PE=3 SV=1
MAGLKDYVNKQVGENHEKIEHHVREILKLIGENVEREGLLDTPARVARMYEEIFAGYEVDPRDVLGVTFEENHEELVIVKDIVYYSQCEHHMAPFFGKVHIGYIPSGRIAGLSKLARLVEAVTRRLQVQERITSQIADIMEEVLNPQGVMVVVEGEHLCMCARGVKKPGSKTVTSAVRGSFRKDAASRAEFLSLIKE

SEQ ID NO: 12041 - protein, 198 aa, Paenibacillus macquariensis
  misc_feature (1)..(198): tr|A0A168G8B1|A0A168G8B1_9BACL GTP cyclohydrolase 1 OS= Paenibacillus macquariensis subsp. defensor OX=467974 G N=folE PE=3 SV=1
MSGVKDYVNTEVGNNREKIEYHIEQILNLIGEDTKREGLLETPARVTRMYEEIFAGYEVDPRDVLGVTFDENHEELVIVKDIVYYSQCEHHMAPFFGKIHIGYIPSGKIAGLSKFARLVEAVTRRLQVQERITSQIADILNEVLQPNGVMVVVEGEHLCMCSRGVKKPGSKTVTSAVRGIFREDSASRAEFLSLLRDY

SEQ ID NO: 12042 - protein, 198 aa, Paenibacillus macquariensis; identical to SEQ ID NO: 12041
  misc_feature (1)..(198): tr|A0A167WMI6|A0A167WMI6_PAEMC GTP cyclohydrolase 1 OS= Paenibacillus macquariensis OX=1468 GN=folE PE=3 SV=1

SEQ ID NO: 12043 - protein, 197 aa, Paenibacillus montanisoli
  misc_feature (1)..(197): tr|A0A328TVA6|A0A328TVA6_9BACL GTP cyclohydrolase 1 OS= Paenibacillus montanisoli OX=2081970 GN=folE PE=3 SV=1
MAGKKDYVNSAVSTNREKIEHHIREILALIGENVEREGLLETPARVTRMYEEIFAGYEVDPREVLGVTFDEQHEELVIVRDIVYYSQCEHHMAPFFGKAHIGYIPSGKIAGLSKLARLVEAVTRRLQVQERITSQIADIMDEVLQPHGVMVVVEGEHLCMCARGVKKPGSKTVTSAVRGDFRTSAALRSEFLSLLKQ

SEQ ID NO: 12044 - protein, 196 aa, Paenibacillus mucilaginosus
  misc_feature (1)..(196): tr|F8FQ24|F8FQ24_PAEMK GTP cyclohydrolase 1 OS=Paenibac illus mucilaginosus (strain KNP414) OX=1036673 GN=folE PE=3 SV=1
MPAKEYRNNRVIENREQIEHHVREILRLIGEDVDREGLHDTPARVTRMYEEIFAGYEADVKDILGVAFDEKHEELVIVKDIVYYSQCEHHMAPFFGRIHIGYIPSGKIAGLSKFARLVEAVTRRLQVQERITSELADIIEGELEPHGCMVVVEGEHLCMCARGVKKPGSKTISSAVRGVFRTDASSRAEFLSLIKD

SEQ ID NO: 12045 - protein, 196 aa, Paenibacillus mucilaginosus; identical to SEQ ID NO: 12044
  misc_feature (1)..(196): tr|H6NSN3|H6NSN3_9BACL GTP cyclohydrolase 1 OS=Paenibac illus mucilaginosus 3016 OX=1116391 GN=folE PE=3 SV=1

SEQ ID NO: 12046 - protein, 197 aa, Paenibacillus nanensis
  misc_feature (1)..(197): tr|A0A3A1VPI1|A0A3A1VPI1_9BACL GTP cyclohydrolase 1 OS= Paenibacillus nanensis OX=393251 GN=folE PE=3 SV=1
MAGLKDYVNSKVTNNREKIEYHIKEILKLIGEDVEREGLLETPARVTRMYEEIFAGYEVDPKDVLGVSFDEQHEELVIVRDIVYYSQCEHHMAPFFGKAHIGYIPSGKIAGLSKLARLVEAVTRRLQVQERITSQIANIIESELSPHGVMVVVEGEHLCMCARGVKKPGSKTVTSAVRGEFRTSEALRSEFLALLKQ

SEQ ID NO: 12047 - protein, 196 aa, Paenibacillus naphthalenovorans
  misc_feature (1)..(196): tr|A0A480BK75|A0A480BK75_9BACL GTP cyclohydrolase 1 OS= Paenibacillus naphthalenovorans OX=162209 GN=folE PE=3 SV=1
MPAKEYKNRLVAENREQIEEHIRQILRLIGEDVDREGLLDTPARVTRMYEEIFAGYEADFREILGVAFDEKHEELVIVKDIVYYSQCEHHMAPFFGKIHIGYIPSGKIAGLSKFARLVEAVTRRLQVQERITSEIADIIEEVLEPHGCMVVVEGEHLCMCARGVKKPGSKTVTSAVRGLFRNDAAARAEFLALVKE

SEQ ID NO: 12048 - protein, 196 aa, Paenibacillus naphthalenovorans
  misc_feature (1)..(196): tr|A0A0U2INA0|A0A0U2INA0_9BACL GTP cyclohydrolase 1 OS= Paenibacillus naphthalenovorans OX=162209 GN=folE PE=3 SV=1
MPAKEYKNRLVAENREQIEEHIRQILRLIGEDVDREGLLDTPARVTRMYEEIFAGYEADFREILGVAFDEKHEELVIVKDIVYYSQCEHHMAPFFGKIHIGYIPSGKIAGLSKFARLVEAVTRRLQVQERITSEIADIIEEVLEPHGCMVVVEGEHLCMCARGVKKPGSKTVTSAVRGLFRKDAAARAEFLALVKE

SEQ ID NO: 12049 - protein, 197 aa, Paenibacillus nuruki
  misc_feature (1)..(197): tr|A0A1E3KZX1|A0A1E3KZX1_9BACL GTP cyclohydrolase 1 OS= Paenibacillus nuruki OX=1886670 GN=gch1 PE=3 SV=1
MAGIKDYTNLDVGENRAQIEDHIRQILKLIGEDTEREGLLDTPARVTRMYEEIFAGYSVDPREALGVTFNENHEEMVIVKDIVYYSQCEHHMAPFFGKVHIGYVPSGKIAGLSKFARLVEAVSRRLQVQERITSQIADILVEVLDPTGVMVVVEGEHLCMCARGVKKPGSKTITSAVRGGFRTDAPLRAEFLALIKD

SEQ ID NO: 12050 - protein, 197 aa, Paenibacillus odorifer
  misc_feature (1)..(197): tr|A0A1R0ZBW6|A0A1R0ZBW6_9BACL GTP cyclohydrolase 1 OS= Paenibacillus odorifer OX=189426 GN=folE PE=3 SV=1
MGNINEYVNGKVSENREQIEYHVEKILELIGEDTGREGLLETPARVTRMYEEIFGGYSIDPREALGVTFDESHEELVIVKDIVYYSQCEHHMAPFFGKVHIGYIPSGRIAGLSKLARLVEAVSRRLQVQERITTQIADIMTEVLSPHGVMVVVEGEHLCMCARGVKKPGSKTVTMSTRGVFREDAAARAEFLNLIKE

SEQ ID NO: 12051 - protein, 197 aa, Paenibacillus odorifer
  misc_feature (1)..(197): tr|A0A1R0WVP4|A0A1R0WVP4_9BACL GTP cyclohydrolase 1 OS= Paenibacillus odorifer OX=189426 GN=folE PE=3 SV=1
MGNIKEYVNGKVAENREQIEYHVEKILELIGEDTGREGLLETPARVTRMYEEIFGGYSIDPREALGVTFDESHEELVIVKDIVYYSQCEHHMAPFFGKVHIGYIPSGRIAGLSKLARLVEAVSRRLQVQERITAQIADIMTEVLGPHGVMVVVEGEHLCMCARGVKKPGSKTVTMATRGVFREDAAARAEFLSLIKE

SEQ ID NO: 12052 - protein, 197 aa, Paenibacillus oryzae
  misc_feature (1)..(197): tr|A0A1A5YJ10|A0A1A5YJ10_9BACL GTP cyclohydrolase 1 OS= Paenibacillus oryzae OX=1844972 GN=folE PE=3 SV=1
MAGAKDYLNSNVADNREQIQYHVKEILKLIGEDVEREGLLETPARVTRMYEEIFAGYSVDPRDVLGVTFDEQHEELVIVRDIVYYSQCEHHMAPFFGKAHIGYIPSGKIAGLSKLARLVEAITRRLQVQERITSQIADILEQELKPHGVMVVVEGEHLCMCARGVKKPGSKTVTSAVRGEFRTSAALRSEFLALLKQ

SEQ ID NO: 12053 - protein, 195 aa, Paenibacillus oryzisoli
  misc_feature (1)..(195): tr|A0A198A8Q9|A0A198A8Q9_9BACL GTP cyclohydrolase 1 OS= Paenibacillus oryzisoli OX=1850517 GN=folE PE=3 SV=1
MASIDYKNGLVAENREQIESHVREILRLIGEDVDREGLLDTPARVTRMYEEIFAGYAADPREVLGVTFDEQHEELVIIKDIVYYSQCEHHMAPFFGKVHVGYLPSGKVAGLSKFARLVDVVTRKLQVQERITSEIADILFDVLKPHGVMVVVEGEHMCMCARGVKKYGSQTVTSAVRGSFRKDATLRSEFLSLLK

SEQ ID NO: 12054 - protein, 197 aa, Paenibacillus pabuli
  misc_feature (1)..(197): tr|A0A327P8Z9|A0A327P8Z9_9BACL GTP cyclohydrolase 1 OS= Paenibacillus pabuli OX=1472 GN=folE PE=3 SV=1
MAGVKDYLNSKVSDNREKIEYHIEQILQLIGEDSTREGLLETPARVTRMYEEIFGGYEVDPRDVLGVTFDENHEELVIVKDIVYYSQCEHHMAPFFGKVHIGYVPSGKIVGLSKMARLVEAVTRRLQVQERITSQIADILTEAVEPNGVMVVVEGEHLCMCSRGVKKPGSKTVTSAVRGSFRENPAQRAEFLSLIKD

SEQ ID NO: 12055 - protein, 197 aa, Paenibacillus paeoniae
  misc_feature (1)..(197): tr|A0A371PG13|A0A371PG13_9BACL GTP cyclohydrolase 1 OS= Paenibacillus paeoniae OX=2292705 GN=folE PE=3 SV=1
MAGRKDYVNSKVSDNREQIEFHVKEILKLIGEDVEREGLLDTPARVTRMYEEIFAGYEVDPREVLGVTFDEQHEELVIVRDIVYYSQCEHHMAPFYGKAHIGYLPSGKIAGLSKLARLVEAVTRKLQVQERITSQIADILDEELAPHGVMVVVEGEHLCMCARGVKKPGSKTVTSAVRGEFRSSSALRSEFLALLKQ

SEQ ID NO: 12056 - protein, 197 aa, Paenibacillus pasadenensis
  misc_feature (1)..(197): tr|A0A2N5NBQ2|A0A2N5NBQ2_9BACL GTP cyclohydrolase 1 OS= Paenibacillus pasadenensis OX=217090 GN=folE PE=3 SV=1
MAGLKDYSNSMVARNRDQIEYHLREILKLVGEDVEREGLLDTPARVTRMYEEIFAGYEVNPADVLGVTFDENHEELVIVKDIVYYSQCEHHMAPFFGKIHIGYLPNGHILGLSKMARLVEAVTRKLQVQERITSQLADILDEALSPQGVMVVVEGEHLCMCSRGVKKPGSKTITSGVRGEFRSNSALRAEFLSLLKQ

SEQ ID NO: 12057 - protein, 196 aa, Paenibacillus pectinilyticus
  misc_feature (1)..(196): tr|A0A1C1A657|A0A1C1A657_9BACL GTP cyclohydrolase 1 OS= Paenibacillus pectinilyticus OX=512399 GN=folE PE=3 SV= 1
MASIDYKNALVAENREKIEGHVREILRLIGEDVDREGLLDTPARVTRMYEEIFSGYAADPRDVIGVTFDEQHEELVIIKDIVYYSQCEHHMAPFYGKVHVGYLPSGKVAGLSKFARLVDVITRKLQVQERITSEIADILDEVLKPHGVMVVVEGEHMCMCARGVKKYGSQTVTSAVRGSFRKDATLRSEFLSLIKS

SEQ ID NO: 12058 - protein, 197 aa, Paenibacillus peoriae
  misc_feature (1)..(197): tr|A0A0K2F4H9|A0A0K2F4H9_9BACL GTP cyclohydrolase 1 OS= Paenibacillus peoriae OX=59893 GN=folE PE=3 SV=1
MAGVKDYINRKAADNRDKIEYHVEQILQLIGEDPKREGLLETPARVARMYEEIFAGYEVDPRDALGVTFDENHEELVIVKDIVYYSQCEHHMAPFFGKVHIGYVPSGKIVGLSKLARLVEAVTRRLQVQERITSQIADILNEAVSAHGVMVVVEGEHLCMCARGVKKPGSKTVTSAVRGTFRDDAAQRAEFLSLLKD

SEQ ID NO: 12059 - protein, 197 aa, Paenibacillus peoriae
  misc_feature (1)..(197): tr|A0A2S6NT84|A0A2S6NT84_9BACL GTP cyclohydrolase 1 OS= Paenibacillus peoriae OX=59893 GN=folE PE=3 SV=1
MAGVKDYINRKAADNRDKIEYHVEQILQLIGEDPKREGLLETPARVARMYEEVFAGYEVDPRDALGVTFDENHEELVIVKDIVYYSQCEHHMAPFFGKVHIGYVPSGKIVGLSKLARLVEAVTRRLQVQERITSQIADILNEAVSAHGVMVVVEGEHLCMCARGVKKPGSKTVTSAVRGTFRDDAAQRAEFLSLLKD

SEQ ID NO: 12060 - protein, 197 aa, Paenibacillus pini
  misc_feature (1)..(197): tr|W7YQ53|W7YQ53_9BACL GTP cyclohydrolase 1 OS=Paenibac illus pini JCM 16418 OX=1236976 GN=folE PE=3 SV=1
MAGVKDYVNTEVGNNREQIEHHVAQILRLIGEDTEREGLLETPARVTRMYEEIFAGYEVDPREALGVTFDENHEELVIVKDIVYYSQCEHHMAPFFGKVHIGYIPSGKIAGLSKFARLVEAVTRKLQVQERITSQIADIMVEVLNPHGVMVVVEGEHLCMCARGVKKPGSKTVTSGVRGIFREDSASRAEFLSLIKS

SEQ ID NO: 12061 - protein, 197 aa, Paenibacillus pinisoli
  misc_feature (1)..(197): tr|A0A3A6PDN9|A0A3A6PDN9_9BACL GTP cyclohydrolase 1 OS= Paenibacillus pinisoli OX=1276110 GN=folE PE=3 SV=1
MAGKKDYVNSKVSDNREQIEFHVKEILKLIGEDVEREGLLETPARVTRMYEEIFAGYDVDPREVLGVTFDEQHEELVIVRDIVYYSQCEHHMAPFFGKAHIGYLPSGKIAGLSKLARLVEAVTRKLQVQERITSQIADILDEELSPHGVMVVVEGEHLCMCARGVKKPGSKTVTSAVRGEFRTSSALRSEFLALLKQ

SEQ ID NO: 12062 - protein, 197 aa, Paenibacillus polymyxa
  misc_feature (1)..(197): tr|A0A5B8JYS6|A0A5B8JYS6_PAEPO GTP cyclohydrolase 1 OS= Paenibacillus polymyxa OX=1406 GN=folE PE=3 SV=1
MAGVKDYINRKAADNRDKIEYHVEQILKLIGEDPKREGLLETPARVARMYEEIFAGYEVDPRDALGVTFDENHEELVIVKDIVYYSQCEHHMAPFFGKVHIGYVPSGKIVGLSKLARLVEAVTRRLQVQERITSQIADILNEAVSPHGVMVVVEGEHLCMCARGVKKPGSKTVTSAVRGTFRGDAAQRAEFLSLIKE

SEQ ID NO: 12063 - protein, 197 aa, Paenibacillus polymyxa; identical to SEQ ID NO: 12058
  misc_feature (1)..(197): tr|A0A074M1D4|A0A074M1D4_PAEPO GTP cyclohydrolase 1 OS= Paenibacillus polymyxa OX=1406 GN=folE PE=3 SV=1

SEQ ID NO: 12064 - protein, 197 aa, Paenibacillus polysaccharolyticus
  misc_feature (1)..(197): tr|A0A1G5LF07|A0A1G5LF07_9BACL GTP cyclohydrolase 1 OS= Paenibacillus polysaccharolyticus OX=582692 GN=folE PE= 3 SV=1
MAGVKDYLNSKVSDNREKIEYHVEQILKLIGEDSTREGLLETPARVTRMYEEIFGGYEVDPRDVLGVTFDENHEELVIVKDIVYYSQCEHHMAPFFGKVHIGYIPSGKIVGLSKMARLVEAVTRRLQVQERITSQIADILTEAVAPHGVMVVVEGEHLCMCSRGVKKPGSKTVTSAVRGSFRDNPAQRAEFLSLVKE

SEQ ID NO: 12065 - protein, 197 aa, Paenibacillus popilliae
  misc_feature (1)..(197): tr|M9LP60|M9LP60_PAEPP GTP cyclohydrolase 1 OS=Paenibac illus popilliae ATCC 14706 OX=1212764 GN=folE PE=3 SV=1
MAGLRDYANSKVGENRELIEHHVKEILRLLGEDVDREGLRETPARVTRMYEEILGGYEVDPRDVLGVTFDEAYEELVIVKDITYYSLCEHHMAPFFGKVHIGYTPSGQVAGLSKLAQLVEAVTRRLQVQERVTSEIADIMEEVLKPHGVMVVVEGEHLCMCSRGVKKPGSKTVTMSTRGSFKDGAAQRAEFLSLIKQ

SEQ ID NO: 12066 - protein, 197 aa, Paenibacillus prosopidis
  misc_feature (1)..(197): tr|A0A368W772|A0A368W772_9BACL GTP cyclohydrolase 1 OS= Paenibacillus prosopidis OX=630520 GN=folE PE=3 SV=1
MAGRKDYVNSKVTSNREQIEHHVREILKLVGENVEREGLLETPARVTRMYEEIFAGYEVDPREVLGVSFDEQHEELVIVKDIVYYSQCEHHMAPFFGKVHIGYIPSGKIAGLSKLARLVEAITRRLQVQERITSQIADIMDEELKPNGVMVVVEGEHLCMCARGVKKPGSKTVTSAVRGEFRTSSALRSEFLALLKQ

SEQ ID NO: 12067 - protein, 299 aa, Paenibacillus prosopidis
  misc_feature (1)..(299): tr|A0A368W1U5|A0A368W1U5_9BACL GTP cyclohydrolase FolE2 OS=Paenibacillus prosopidis OX=630520 GN=folE2 PE=3 SV =1
MSKLNLPTKQERHTRFGSIQPAAGTKPTSKELMTDLQNKPHDYLFALDAVGICEVKYPVNIPSSTSPTMQVSMAAFKMTTSLGRHSKGINMSRIMEQLEAYRQENWVMNLPTLANFTQELAARMQQTSAEIEVWFPWFYERISPALKKTGLQHSEAFIKISYEKDCPIKAEIGIKAAITTLCPCSKEISEYSAHNQRGIVTITAVPYDPINVNEDWKAMLLEAAESNASSMLYPVLKRPDEKKVTETAYENPRFVEDMVRLVAADLYEMESIQAFTVECRNEESIHLHDAIAKITFSKE

SEQ ID NO: 12068 - protein, 197 aa, Paenibacillus rhizosphaerae
  misc_feature (1)..(197): tr|A0A1R1EAF9|A0A1R1EAF9_9BACL GTP cyclohydrolase 1 OS= Paenibacillus rhizosphaerae OX=297318 GN=folE PE=3 SV=1
MAGVKDYVNTRVGENREKIEYHIEQILKLIGENPEREGLLETPARVTRMYEEIFAGYEVDPRDVLGVTFDENHEELVIVKDIVYYSQCEHHMAPFFGKVHIGYIPSGKIAGLSKLARLVEAVTRRLQVQERITSQIADIMVDVLQPHGVMVVVEGEHLCMCSRGVKKPGSKTVTSGVRGIFREDPASRAEFLSLIKE

SEQ ID NO: 12069 - protein, 309 aa, Paenibacillus rhizosphaerae
  misc_feature (1)..(309): tr|A0A1R1ECA3|A0A1R1ECA3_9BACL GTP cyclohydrolase FolE2 OS=Paenibacillus rhizosphaerae OX=297318 GN=folE2 PE=3 SV=1
MKSTSNQRIFPPKAERLRRFGSTDPIPGNKPTVKEHMTDLQNFRQDYLFPIDHVGICRVKHPVLVCSELEPRIQSSIATMTLTTSLPRESKGINMSRLTEQLELYRQKDWTSNLADLCNFVHELAKRMEQDKAEMTMTFPWFYERAAPVTGKSGLSHAEVSIKTGYEKGRDFTAEVSLRVAVTTLCPCSKEISEYSAHNQRGTVTMTIEINPLLDSGCDWKAILLEAAESNASSSLHPILKRPDEKKVTEQAYENPRFVEDMVRLISADLYEIDAVQAFTVECRNEESIHMHDAYAVITYDKRKEAATR

SEQ ID NO: 12070 - protein, 196 aa, Paenibacillus rigui
  misc_feature (1)..(196): tr|A0A229UNR6|A0A229UNR6_9BACL GTP cyclohydrolase 1 OS= Paenibacillus rigui OX=554312 GN=folE PE=3 SV=1
MPAKEYKNTRVAENRAAIEGHIREILRLIGEDVDREGLLDTPARVTRMYEEIFAGYEADYKDILGVAFDEKHEELVIVKDIVYYSQCEHHMAPFFGKIHIGYVPSGKIAGLSKFARLVEAVTRKLQVQERITSEIADIIETELSPHGCMVVVEGEHLCMCARGVKKPGSKTVTSAVRGLFRKDAASRAEFLSLIKD

SEQ ID NO: 12071 - protein, 197 aa, Paenibacillus riograndensis
  misc_feature (1)..(197): tr|A0A0E4CUJ8|A0A0E4CUJ8_9BACL GTP cyclohydrolase 1 OS= Paenibacillus riograndensis SBR5 OX=1073571 GN=folE PE= 3 SV=1
MGGVKDYMNGKVAANREQIEYHVEKILQLIGEDPGREGLLETPARVTRMYEEIFGGYSIDPREALGVTFDESHEELVIVKDIVYYSQCEHHMAPFFGKVHIGYIPSGRIAGLSKLARLVEAVSRRLQVQERITAQIADIMTEVLNPHGVMVVVEGEHLCMCARGVKKPGSKTVTMAARGTFREDAAARAEFLALIKE

SEQ ID NO: 12072 - protein, 197 aa, Paenibacillus riograndensis; identical to SEQ ID NO: 12071
  misc_feature (1)..(197): tr|A0A132TZ10|A0A132TZ10_9BACL GTP cyclohydrolase 1 OS= Paenibacillus riograndensis OX=483937 GN=folE PE=3 SV=1

SEQ ID NO: 12073 - protein, 197 aa, Paenibacillus sabinae
  misc_feature (1)..(197): tr|X4ZSV7|X4ZSV7_9BACL GTP cyclohydrolase 1 OS=Paenibac illus sabinae T27 OX=1268072 GN=folE PE=3 SV=1
MGGIKDYVNETVSANREKIEYHVQKILELIGEDTGREGLLETPARVTRMYEEIFGGYSIDPKEALGVTFDESHEELVIVKDIVYYSQCEHHMAPFFGKVHIGYIPSGRIAGLSKLARLTEAVTRRLQVQERITSQIADIMTEVLHPHGVMVVVEGEHLCMCARGVKKPGSKTVTSAVRGTFRKNPAARAEFLSLIKE

SEQ ID NO: 12074 - protein, 196 aa, Paenibacillus selenitireducens
  misc_feature (1)..(196): tr|A0A1T2X7K6|A0A1T2X7K6_9BACL GTP cyclohydrolase 1 OS= Paenibacillus selenitireducens OX=1324314 GN=folE PE=3 SV=1
MSGAKDYVNENVEQNREKIEYHVQQILKLIGEDVEREGLIETPARVARMYEEIFAGYAVDPREVIGVTFDEQHEELVIVKDITYYSQCEHHMAPFFGKIHIGYIPSGKIAGLSKLARLVEAVTRKLQVQERITSEIADIMQEVLQPHGVMVVVEGEHLCMCARGVKKPGSKTVTSGVRGSFRKSATLRNEFLSLIK

SEQ ID NO: 12075 - protein, 197 aa, Paenibacillus silvae
  misc_feature (1)..(197): tr|A0A2W6NAG6|A0A2W6NAG6_9BACL GTP cyclohydrolase 1 OS= Paenibacillus silvae OX=1325358 GN=folE PE=3 SV=1
MAGVKDYLNSKVSDNREKIEYHVEQILKLIGEDSTREGLLETPARVTRMYEEIFGGYEVDPRDVLGVTFDENHEELVIVKDIVYYSQCEHHMAPFFGKVHIGYVPSGKIVGLSKMARLVEAVTRRLQVQERITSQIADILTEAVEPHGVMVVVEGEHLCMCARGVKKPGSKTVTSAVRGSFRDNPAQRAEFLSLIKE

SEQ ID NO: 12076 - protein, 197 aa, Paenibacillus solani
  misc_feature (1)..(197): tr|A0A0M1N476|A0A0M1N476_9BACL GTP cyclohydrolase 1 OS= Paenibacillus solani OX=1705565 GN=folE PE=3 SV=1
MSGVKDYVNLLVGENREQIEYHVEQILKLIGEDPDREGLIETPARVTRMYEEIFAGYAVDPKDVLGVTFDENHEELVIVKDIVYYSLCEHHMAPFFGKVHIGYVPSGKIAGLSKLARLVEAVSRRLQVQERITSQIANIIVDALEPNGVMVVVEGEHLCMCSRGVKKPGSKTVTSAVRGSFQTDSAQRAEFLSLIKD

SEQ ID NO: 12077 - protein, 197 aa, Paenibacillus sophorae
  misc_feature (1)..(197): tr|A0A1H8S8U9|A0A1H8S8U9_9BACL GTP cyclohydrolase 1 OS= Paenibacillus sophorae OX=1333845 GN=folE PE=3 SV=1
MGGVKDYVNGSVSANREKIEYHVQKILELIGEDTGREGLLETPARVTRMYEEIFAGYSVDPREVLGVTFDESHEELVIVKDIVYYSQCEHHMAPFFGKVHIGYIPSGRIAGLSKLARLVEAVTRRLQVQERITSQIADIMTEVLSPHGVMVVVEGEHLCMCARGVKKPGSKTVTSAVRGIFRENPATRAEFLSLIKE

SEQ ID NO: 12078 - protein, 197 aa, Paenibacillus sp.
  misc_feature (1)..(197): tr|A0A089HZK3|A0A089HZK3_9BACL GTP cyclohydrolase 1 OS= Paenibacillus sp. FSL H7-0357 OX=1536774 GN=folE PE=3 S V=1
MGGIKEYVNGKVSVNREQIEYHVEKILELIGEDTGREGLLETPARVTRMYEEIFGGYSIDPREALGVTFDESHEELVIVKDIVYYSQCEHHMAPFFGKVHIGYVPSGRIAGLSKLARLVEAVSRRLQVQERITTQIADIMTEVLNPHGVMVVVEGEHLCMCARGVKKPGSKTVTMATRGSFREDAAARAEFLALIKE

SEQ ID NO: 12079 - protein, 195 aa, Paenibacillus sp.
  misc_feature (1)..(195): tr|A0A0Q7JTM4|A0A0Q7JTM4_9BACL GTP cyclohydrolase 1 OS= Paenibacillus sp. Root444D2 OX=1736538 GN=folE PE=3 SV= 1
MASIDYKNTRVAENRELIEQHVREILRLIGEDVDREGLLDTPARVTRMYEEIFSGYEANPRDVMGVTFDEQHEELVIIKDIIYYSQCEHHMAPFFGKVHVGYLPSGKVAGLSKFARLVDVITRKLQVQERITSEIADILDDVLKPHGVMVVVEGEHMCMCSRGVKKYGSQTITSAVRGSFRSDSTLRAEFLSLLK

SEQ ID NO: 12080 - protein, 197 aa, Paenibacillus spiritus
  misc_feature (1)..(197): tr|A0A5J5FUV8|A0A5J5FUV8_9BACL GTP cyclohydrolase I Fol E OS=Paenibacillus spiritus OX=2496557 GN=folE PE=4 SV= 1
MRGVKDCRNVKVAENRELIEGHIREILELIGEDPGREGLLDTPARVARMYEEIFGGYAADPRETLGVTFDESHEELVIVKDIVYYSQCEHHMAPFFGKVHIGYIPNGRIAGLSKLARLVEAVTRRLQVQERITSQIADIMEEVLEAQGVMVVVEGEHLCMCARGVKKPGSKTVTTAARGLFRADPAARAEFLALIKE

SEQ ID NO: 12081 - protein, 197 aa, Paenibacillus stellifer
  misc_feature (1)..(197): tr|A0A089LSW8|A0A089LSW8_9BACL GTP cyclohydrolase 1 OS= Paenibacillus stellifer OX=169760 GN=folE PE=3 SV=1
MGGVKDYVNGSVTANREKIEYHVQKILELIGEDTEREGLLETPARVTRMYEEIFGGYSIDPRDALGVTFDESHEELVIVKDIVYYSQCEHHMAPFFGKVHIGYVPSGRIAGLSKLARLVEAVSRRLQVQERITTQIADIMEEVLHPHGVMVVVEGEHLCMCARGVKKPGSKTVTTGVRGCFREDPAARAEFLSLIKE

SEQ ID NO: 12082 - protein, 197 aa, Paenibacillus swuensis
  misc_feature (1)..(197): tr|A0A172TPE0|A0A172TPE0_9BACL GTP cyclohydrolase 1 OS= Paenibacillus swuensis OX=1178515 GN=folE PE=3 SV=1
MAGVKDYLNDQVGENREAIEGHIREILRLIGEDVDREGLLETPARVTRMYEEIFGGYSVNPRDVLGVTFDEKHEELVIVKDIVYYSQCEHHMAPFFGKAHIGYIPSGKIAGLSKLARLVEAVTRRLQVQERITSEIADIMDEVLQPHGVMVVVEGEHLCMCARGVKKPGSRTMTSAVRGLFRTDPAARSEFLSLIRD

SEQ ID NO: 12083 - protein, 197 aa, Paenibacillus taichungensis; identical to SEQ ID NO: 12054
  misc_feature (1)..(197): tr|A0A2V3S2H8|A0A2V3S2H8_9BACL GTP cyclohydrolase 1 OS= Paenibacillus taichungensis OX=484184 GN=folE PE=3 SV=1

SEQ ID NO: 12084 - protein, 295 aa, Paenibacillus taichungensis
  misc_feature (1)..(295): tr|A0A329QE29|A0A329QE29_9BACL GTP cyclohydrolase FolE2 OS=Paenibacillus taichungensis OX=484184 GN=folE2 PE=3 SV=1
MPDKAERLRLFGSVDPIQGDKPVQKEKMQDLQNSKNDFLFELQQVGIDQVKYPLDVISAKDPVRLSSIGTFRLTTSLDRESKGINMSRLMEQLQHSRSEGLSDRIPDLIALTQQMAEQMNQPKAELKVTYPWFYERTAPVTGLSGLNHSLATVHVIWEAGKSPVLRTGLHIQVTTLCPCSKEISEYSAHNQRGLLRIQVQANPGEALPGYWKEELLNVAESNASSCLYPILKRPDEKRVTERAYENPRFVEDIVRLVAADLYEKHWVNKFKVDCKNEESIHQHDAVARIVYDKSK

SEQ ID NO: 12085 - protein, 197 aa, Paenibacillus taihuensis
  misc_feature (1)..(197): tr|A0A3D9SB83|A0A3D9SB83_9BACL GTP cyclohydrolase 1 OS= Paenibacillus taihuensis OX=1156355 GN=folE PE=3 SV=1
MAGKKDYVNSLVSDNREKVEHHIREILRLIGEDVDREGLLETPARVTRMYEEIFAGYEVDPRDVLGVTFDEQHEELVIVRDIVYYSQCEHHMAPFFGKAHIGYIPSGKIAGLSKLARLVEAVSRRLQVQERITTQIADIMDEVLDPHGVMVVVEGEHLCMCARGVKKPGSKTVTSAVRGEFRTSPALRSEFLSLLKQ

SEQ ID NO: 12086 - protein, 197 aa, Paenibacillus terrae
  misc_feature (1)..(197): tr|G7VYQ8|G7VYQ8_PAETH GTP cyclohydrolase 1 OS=Paenibac illus terrae (strain HPL-003) OX=985665 GN=folE PE=3 SV =1
MAGVKDYINRKAADNRDKIEYHVEQILQLIGEDPKREGLLETPARVARMYEEIFAGYEVDPRDALGVTFDENHEELVIVKDIVYYSQCEHHMAPFFGKVHIGYVPSGKIVGLSKLARLVEAVTRRLQVQERITAQIADILNEAVSAHGVMVVVEGEHLCMCSRGVKKPGSKTVTSAVRGTFRDDAAQRAEFLSLLKD

SEQ ID NO: 12087 - protein, 197 aa, Paenibacillus terrae
  misc_feature (1)..(197): tr|A0A4U2Q0X4|A0A4U2Q0X4_9BACL GTP cyclohydrolase 1 OS= Paenibacillus terrae OX=159743 GN=folE PE=3 SV=1
MAGVKDYINRKAADNRDKIEYHVEQILQLIGEDPKREGLLETPARVARMYEEIFAGYEVDPRDALGVTFDENHEELVIVKDIVYYSQCEHHMAPFFGKVHIGYVPSGKIVGLSKLARLVEAVTRRLQVQERITAQIADILNEAVSAHGVMVVVEGEHLCMCARGVKKPGSKTVTSAVRGTFRDDAAQRAEFLSLLKD

SEQ ID NO: 12088 - protein, 197 aa, Paenibacillus thermophilus; identical to SEQ ID NO: 12040
  misc_feature (1)..(197): tr|A0A388MYK3|A0A388MYK3_9BACL GTP cyclohydrolase 1 OS= Paenibacillus thermophilus OX=1181891 GN=folE PE=3 SV=1

SEQ ID NO: 12089 - protein, 197 aa, Paenibacillus thiaminolyticus
  misc_feature (1)..(197): tr|A0A378XB51|A0A378XB51_PANTH GTP cyclohydrolase 1 OS= Paenibacillus thiaminolyticus OX=49283 GN=folE PE=3 SV= 1
MAGLKDYVNSKVGENREKIEHHVKEILRLIGEDVDREGLQETPARVTRMYEEIFGGYEVDPRDVLGVTFDEAHEELVIVKDITYYSLCEHHMAPFFGKVHIGYIPSGQVAGLSKLARLVEAVTRRLQVQERVTASIADIMEEVLKPHGVMVVVEGEHLCMCSRGVKKPGSKTVTMSTRGSFKDDAAQRAEFLSLIKQ

SEQ ID NO: 12090 - protein, 197 aa, Paenibacillus thiaminolyticus
  misc_feature (1)..(197): tr|A0A3A3H9D9|A0A3A3H9D9_PANTH GTP cyclohydrolase 1 OS= Paenibacillus thiaminolyticus OX=49283 GN=folE PE=3 SV= 1
MAGLKDYVNSKVGVNREQIEHHVKEILRLIGEDVDREGLQETPARVTRMYEEIFGGYEVDPRDVLGVTFDEAHEELVIVKDITYYSLCEHHMAPFFGKVHIGYIPSGHVAGLSKLARLVEAVTRRLQVQERVTANIADIMEEVLKPHGVMVVVEGEHLCMCSRGVKKPGSKTVTMSTRGSFKDDAAQRAEFLSLIKQ

SEQ ID NO: 12091 - protein, 196 aa, Paenibacillus tianmuensis
  misc_feature (1)..(196): tr|A0A1G4RX79|A0A1G4RX79_9BACL GTP cyclohydrolase 1 OS= Paenibacillus tianmuensis OX=624147 GN=folE PE=3 SV=1
MPAKEYRNSRVADNREQVEYHVREILRLIGEDPDREGLLDTPARVTRMYEEIFAGYDADVKDILGVAFDEKHEELVIVKDIVYYSQCEHHMAPFFGKIHIGYIPSGKIAGLSKFARLVEAVTRRLQVQERITSEIADIIESVLEPHGCMVVVEGEHLCMCARGVKKPGSKTVTSAVRGLFRTDAASRSEFLSLIKE

SEQ ID NO: 12092 - protein, 197 aa, Paenibacillus typhae
  misc_feature (1)..(197): tr|A0A1G8SV79|A0A1G8SV79_9BACL GTP cyclohydrolase 1 OS= Paenibacillus typhae OX=1174501 GN=folE PE=3 SV=1
MGGIKEYVNGKVSANREQIEYHVARILELIGEDTGREGLLDTPARVTRMYEEIFGGYSVDPREALGVTFDESHEELVIVKDIVYYSQCEHHMAPFFGKVHIGYVPSGRIAGLSKLARLVEAVSRRLQVQERITAQIADIMAEVLSPHGVMVVVEGEHLCMCARGVKKPGSKTVTMATRGTFREDAAARAEFLALIKE

SEQ ID NO: 12093 - protein, 196 aa, Paenibacillus tyrfis
  misc_feature (1)..(196): tr|A0A081NTW6|A0A081NTW6_9BACL GTP cyclohydrolase 1 OS= Paenibacillus tyrfis OX=1501230 GN=folE PE=3 SV=1
MPAKEYKNSRVADNREQVEHHIREILRLIGEDPDREGLLDTPARVTRMYEEIFAGYDADVKDILGVAFDEKHEELVIVKDIVYYSQCEHHMAPFFGKIHIGYIPSGKIAGLSKFARLVEAVTRRLQVQERITSEIADIIESELEPHGCMVVVEGEHLCMCARGVKKPGSKTVTSAVRGLFRTDAASRSEFLSLIKE

SEQ ID NO: 12094 - protein, 197 aa, Paenibacillus uliginis
  misc_feature (1)..(197): tr|A0A1X7HQU7|A0A1X7HQU7_9BACL GTP cyclohydrolase 1 OS= Paenibacillus uliginis N3/975 OX=1313296 GN=folE PE=3 S V=1
MAGVKDYVNNKVGEHREQIEYHVEQILKLIGEDTEREGLLETPARVTRMYEEIFAGYEIDPRDVLGVTFDEQHEELVIVKDIVYYSQCEHHMAPFFGKVHIGYVPSGKIAGLSKLARLVEAVTRRLQVQERITSQIANIMVEVLQPQGVMVVVEGEHLCMCARGVKKPGSKTITSAVRGTFQSDSAQRAEFMSLIKN

SEQ ID NO: 12095 - protein, 197 aa, Paenibacillus vortex
  misc_feature (1)..(197): tr|A0A2R9SZM7|A0A2R9SZM7_9BACL GTP cyclohydrolase 1 OS= Paenibacillus vortex V453 OX=715225 GN=folE PE=3 SV=1
MAGVKDYVNNKVGENREQIEYHVEQILKLIGEDTEREGLLETPARVTRMYEEIFAGYEVDPKDVLGVTFDENHEELVIVKDIVYYSQCEHHMAPFFGKVHIGYVPSGKIAGLSKLARLVEAVTRRLQVQERITSQIADIMVEALEPNGVMVVVEGEHLCMCARGVKKPGSKTVTSAVRGSFRSDSAQRSEFLSLIKD

SEQ ID NO: 12096 - protein, 196 aa, Paenibacillus whitsoniae
  misc_feature (1)..(196): tr|A0A3S0A453|A0A3S0A453_9BACL GTP cyclohydrolase 1 OS= Paenibacillus whitsoniae OX=2496558 GN=folE PE=3 SV=1
MASTEYKNTLVAENRAQIEEHVRAILRLIGEDADREGLLDTPARVTRMYEEIFAGYAADPRDVLGVTFDEQHEELVIIKDIVYFSQCEHHMAPFFGKVHVGYIPSGKVAGLSKFARLVDVVTRKLQVQERITSQIADILEEVLKPHGVMVVVDGEHMCMCSRGVKKFGSKTVTSAVRGIFHTDASLRSEFLSLLKQ

SEQ ID NO: 12097 - protein, 299 aa, Paenibacillus whitsoniae
  misc_feature (1)..(299): tr|A0A3S0BP63|A0A3S0BP63_9BACL GTP cyclohydrolase FolE2 OS=Paenibacillus whitsoniae OX=2496558 GN=folE2 PE=3 S V=1
MNHKKIINLPSKIERHKRFGSVDPIQGTKPTTKEKMADLQNTPHDYLFQLDSVGICQVQHPITVYSDIEPIEQTTIASLQLTTSLHREAKGINMSRLTEQLEVYRQEGWSTELGTLAKFTKELAVRMNQDKAEIKLSFPWFYETASPVMNLKGLNHAQATVQMTYQQGRLFTNVGLQVAVATLCPCSKEISEYSAHNQRGIVTISVELHSDFEGDWKVLLLSAAESNASSALFPILKRPDEKAVTERAYENPRFVEDMVRLVAADLYEMDSVRSFTVECRNEESIHLHDAIAKVSYTKA

SEQ ID NO: 12098 - protein, 197 aa, Paenibacillus wynnii
  misc_feature (1)..(197): tr|A0A098MBR9|A0A098MBR9_9BACL GTP cyclohydrolase 1 OS= Paenibacillus wynnii OX=268407 GN=folE PE=3 SV=1
MGRINEYVNGKVSDNREKIEYHVGKILELIGEDAGREGLLETPARVTRMYEEIFGGYSVDPREALGVTFDESHEELVIVKDIVYYSQCEHHMAPFFGKVHIGYIPSGRIAGLSKLARLVEAVSRRLQVQERITAQIADIMTEVLHPHGVMVVVEGEHLCMCARGVKKYGSKTLTLATRGTFREDAAARAEFLALIKE

SEQ ID NO: 12099 - protein, 196 aa, Paenibacillus xerothermodurans
  misc_feature (1)..(196): tr|A0A2W1NVM0|A0A2W1NVM0_9BACL GTP cyclohydrolase 1 OS= Paenibacillus xerothermodurans OX=1977292 GN=folE PE=3 SV=1
MPAREYRNTRVDENRALIEGHVREILRLIGEDVDREGLVDTPARVTRMYEEIFAGYEADYKDILGVAFDEQHEELVIVKDIVYYSQCEHHMAPFFGQIHIGYIPSGKIAGLSKFARLVEAVTRKLQVQERITSELADIIESELTPHGCMVVVEGEHLCMCARGVKKPGSKTVTSAVRGLFRTDAAARSEFLSLVKH

SEQ ID NO: 12100 - protein, 197 aa, Paenibacillus xylanexedens
  misc_feature (1)..(197): tr|A0A1L5LK42|A0A1L5LK42_9BACL GTP cyclohydrolase 1 OS= Paenibacillus xylanexedens OX=528191 GN=folE PE=3 SV=1
MAGVKDYLNSKVSDNREKIEYHVEQILKLIGEDSTREGLLETPARVTRMYEEIFGGYEVDPRDVLGVTFDENHEELVIVKDIVYYSQCEHHMAPFFGKVHIGYIPSGKIVGLSKMARLVEAVTRRLQVQERITSQIADILTEAVEPHGVMVVVEGEHLCMCSRGVKKPGSKTVTSAVRGSFRENPAQRAEFLSLMKD

SEQ ID NO: 12101 - protein, 197 aa, Paenibacillus xylanexedens; identical to SEQ ID NO: 11992
  misc_feature (1)..(197): tr|A0A3N6DY34|A0A3N6DY34_9BACL GTP cyclohydrolase 1 OS= Paenibacillus xylanexedens OX=528191 GN=folE PE=3 SV=1

SEQ ID NO: 12102 - protein, 307 aa, Paenibacillus yonginensis
  misc_feature (1)..(307): tr|A0A1B1MZ05|A0A1B1MZ05_9BACL GTP cyclohydrolase FolE2 OS=Paenibacillus yonginensis OX=1462996 GN=folE2 PE=3 SV=1
MKSYAAQPFPSKEERLIRFGSVPPIPGNKPTTKEEMPDLQNRSHDYLFNINQVGICKVRHPIKIRSELMPDLQTTVAELTLTTSLQRESKGINMSRLTELLERYRRENWEADFEGLQRLATEMAEYMGQTQAEIELEFPWFYERSSPVLGMTGLNHSQASMKVIYNQGNPLEFVLKLQTAVTTLCPCSKEISEYSAHNQRGNVTVTVELDETSLPQGDWKTLLLDAIESNASSPLHPVLKRPDEKAVTERAYENPRFVEDMARLVAADLYEMDFMKAFKVECRNEESIHLHDALAVISFDKTTEAAL

SEQ ID NO: 12103 - protein, 197 aa, Paenibacillus yonginensis
  misc_feature (1)..(197): tr|A0A1B1N6A6|A0A1B1N6A6_9BACL GTP cyclohydrolase 1 OS= Paenibacillus yonginensis OX=1462996 GN=folE PE=3 SV=1
MAGVKDYLNTQVGKNREQIEHHIREILKLVGEDVEREGLLDTPARVTRMYEEIFAGYEVDPRDVLGVTFEENHEELVIVKDIVYYSQCEHHMAPFFGKVHIGYIPSGRIAGLSKLARLVEAVTRRLQVQERITSQIADLMDEVLKPQGVMVVVEGEHLCMCSRGVKKPGSKTVTSAVRGTFRTDSASRSEFLSLIKG

SEQ ID NO: 12104 - protein, 152 aa, Paeniclostridium sordellii
  misc_feature (1)..(152): tr|T0E6W1|T0E6W1_PAESO GTP cyclohydrolase 1 OS=Paeniclo stridium sordellii ATCC 9714 OX=1292036 GN=folE PE=3 SV =1
MYEEIFSGIHKDPREHLKILFQSEEHEELVLVKDIPFYSCCEHHLVPFFGKAHIAYLPKDGRLTGLSKLARVIEDLAKRPQLQERITKETADIIMQELKPYGVIVVLEAEHMCMTMRGVKKPGSKTITSAVRGIFEKDIAARAEAMSLINMR

SEQ ID NO: 12105 - protein, 190 aa, Paeniclostridium sordellii
  misc_feature (1)..(190): tr|A0A0A1SG51|A0A0A1SG51_PAESO GTP cyclohydrolase 1 OS= Paeniclostridium sordellii OX=1505 GN=folE PE=3 SV=1
MYSVDKSKIENAIRDILEAIGEDPNREGLLDTPSRVAKMYEEIFSGIHKDPREHLKILFQSEEHEELVLVKDIPFYSCCEHHLVPFFGKAHIAYLPKDGRLTGLSKLARVIEDLAKRPQLQERITKETADIIMQELKPYGVIVVLEAEHMCMTMRGVKKPGSKTITSAVRGIFEKDIAARAEAMSLINMR

SEQ ID NO: 12106 - protein, 203 aa, Paeniglutamicibacter gangotriensis
  misc_feature (1)..(203): tr|M7MYI2|M7MYI2_9MICC GTP cyclohydrolase 1 OS=Paeniglu tamicibacter gangotriensis Lz1y OX=1276920 GN=folE PE=3 SV=1
MNEIEQREENNVQGAGGVDLERIEKAVREILYAIGEDPGRDGLLETPKRVAKAYGEFFAGLHQDPSDHLSTTFDIEHDELVLVKDIPFYSTCEHHLVPFHGTAHVGYIPGPEGKVTGLSKLARLVEVFAKRPQVQERLTTQIVEALVEHLNPRGAMVVIECEHMCMSMRGVRKPGAKTVTSAVRGQLREPATRAEAMSLILGK

SEQ ID NO: 12107 - protein, 206 aa, Paeniglutamicibacter gangotriensis
  misc_feature (1)..(206): tr|A0A5B0EQF5|A0A5B0EQF5_9MICC GTP cyclohydrolase 1 OS= Paeniglutamicibacter gangotriensis OX=254787 GN=folE PE =3 SV=1
MGSVNEIEQREENNVQGAGGVDLERIEKAVREILYAIGEDPGRDGLLETPKRVAKAYGEFFAGLHQDPSDHLSTTFDIEHDELVLVKDIPFYSTCEHHLVPFHGTAHVGYIPGPEGKVTGLSKLARLVEVFAKRPQVQERLTTQIVEALVEHLNPRGAMVVIECEHMCMSMRGVRKPGAKTVTSAVRGQLREPATRAEAMSLILGK

SEQ ID NO: 12108 - protein, 365 aa, Paenimaribius caenipelagi
  misc_feature (1)..(365): tr|A0A547Q5S3|A0A547Q5S3_9RHOB GTP cyclohydrolase FolE2 OS=Paenimaribius caenipelagi OX=2489174 GN=folE2 PE=3 SV=1
MNVHPKDIAPSLTREDADEMLTALKAWAKTASREEVLDLEPALLPLVDGGVQDYPALRRAYPEEFEVDDAYKANMPDLQNGPSSLIRGAKREIQHVGISNFRLPIRYHTRNSGDLTLETSVTGSVSLDAGKKGINMSRIMRTFYERAGDTFSFEVMERTLDAYKENLDSFDARLSMRFSFPMMMKSLRSGLSGYQYYDFALEVIDRDGQRMKVVHLDYVYSSTCPCSLELSEHARMARGQLATPHSQRSVARISVVVEPGDPLWFEDLIDLCRRAVVTETQAMVKREDEQAFAELNAANPIFVEDAARLFAEQFQADQRVGDFRVVASHQESLHSHDAISILTEGPTFASDSVDPHLFPTLIHVG

SEQ ID NO: 12109 - protein, 363 aa, Paenirhodobacter enshiensis
  misc_feature (1)..(363): tr|A0A086XSN0|A0A086XSN0_9RHOB GTP cyclohydrolase FolE2 OS=Paenirhodobacter enshiensis OX=1105367 GN=folE2 PE= 3 SV=1
MEAAKAAPDVHAAKAALATLRAWAESADPTEVARLDPAIARLLPGHELANYPDLSRRYDPEFRADPGYIATLPDLQNGPASLIVGARARIEHVGISNFHLPIRYRLRKGGDMPLETSVTGTVSLEATQKGINMSRVIRAFYTHAESAFSFEVMAAVIDGYKEKLGAFDARLMMRFRYPTEIRSLRSGLTGWQYYDIALEMADTDGQRLKAIHLDYVYSSTCPCSLELSEHARRERGQLATPHSQRSVARISVALAPGQGALWFEDLIDIARKAVPTETQVMVKREDEQAFAELNAANPIFVEDAVRAFAEGLLAEPRIGDFRVVASHQESLHSHDAVAVLSEGPTFSSQSIDPRLFASLVHQG

SEQ ID NO: 12110 - protein, 189 aa, Paenisporosarcina antarctica
  misc_feature (1)..(189): tr|A0A4P6ZXZ2|A0A4P6ZXZ2_9BACL GTP cyclohydrolase 1 OS= Paenisporosarcina antarctica OX=417367 GN=folE PE=3 SV= 1
MSTVNLQKIEEAVKMILEAVGEDPQREGLIETPKRVAKMYAEMFSGLNEDPKEYFKTVFHEEHEELVLVKDIPFHSMCEHHLVPFYGKAHIAYIPRGGVVTGLSKLARAVETTARRPQLQERITSTIADSIMEMLKPYGVYVVIEAEHMCMTMRGIKKPGAKTVTAVARGIYEQDHVKRSEILSFIQMK

SEQ ID NO: 12111 - protein, 189 aa, Paenisporosarcina quisquiliarum
  misc_feature (1)..(189): tr|A0A1H7VIR5|A0A1H7VIR5_9BACL GTP cyclohydrolase 1 OS= Paenisporosarcina quisquiliarum OX=365346 GN=folE PE=3 SV=1
MTKVDLNKIEEAVKMILEAVGEDPNREGLLETPKRVSKMYAEMFEGLHQDPKEYFKTVFNEEHEELVLVKDIPFYSMCEHHLVPFYGKAHVAYIPRNGVVTGLSKLARAVETTARRPQLQERITSSVADDIMQMLNPHGVYVVVEAEHMCMTMRGIKKPGAKTITAVARGILETDDVKRSEILSFIKMK

SEQ ID NO: 12112 - protein, 189 aa, Paenisporosarcina sp.
  misc_feature (1)..(189): tr|A0A2T6K6T9|A0A2T6K6T9_9BACL GTP cyclohydrolase 1 OS= Paenisporosarcina sp. OV554 OX=2135694 GN=folE PE=3 SV= 1
MSTVDLQKIEEAVKMILEAVGENPEREGLLETPKRVAKMYAEMFSGLNEDPKEYFKTVFHEDHEELVLVKDIPFHSMCEHHLVPFYGKAHIAYIPRDGVVTGLSKLARAVETTARRPQLQERITSTIADSIMEMLNPFGVYVIIEAEHMCMTMRGIKKPGAKTVTAVARGIYEQDDIKRSEILSFIQMK

SEQ ID NO: 12113 - protein, 189 aa, Paenisporosarcina sp.
  misc_feature (1)..(189): tr|S2YN59|S2YN59_9BACL GTP cyclohydrolase 1 OS=Paenispo rosarcina sp. HGH0030 OX=1078085 GN=folE PE=3 SV=1
MSKVNLQKIEEAVKMILEAVGEDPEREGLLETPKRVAKMYAEMFSGLQEDPKEYFKTVFHEDHEELVLVKDIPFHSMCEHHLVPFYGKAHIAYIPRDGVVTGLSKLARAVETTARRPQLQERITSTIADSIMEMLNPYGVYVVIEAEHMCMTMRGIKKPGAKTVTAVARGVYEEDDIKRSEILSFIQMN

SEQ ID NO: 12114 - protein, 187 aa, Pajaroellobacter abortibovis
  misc_feature (1)..(187): tr|A0A1L6MYD8|A0A1L6MYD8_9DELT GTP cyclohydrolase 1 OS= Pajaroellobacter abortibovis OX=1882918 GN=BCY86_07780 PE=3 SV=1
MLEIDVAIQGIQTFLKSMGHFDQNDAELEATAKRVAMTYLHDLCDGYAVEPGPMIAAQRIRGSTEIVLLRDIYITTLCPHHLLPASGMATIVFSPNEWIVGLGAMIRTLEAFAHRLTFQEQIGEQVVEVLMAHLKPYWTACRLIMRHQCLALREATQHQTQVETLAIKGTLSAEERRAIYSLVGLGT

SEQ ID NO: 12115 - protein, 365 aa, Palleronia abyssalis
  misc_feature (1)..(365): tr|A0A2R8BXG2|A0A2R8BXG2_9RHOB GTP cyclohydrolase FolE2 OS=Palleronia abyssalis OX=1501240 GN=folE2 PE=3 SV=1
MNLHSREFDTPKDRDEAADLLGRLRAWAESASPEEVADLDPGLALLVTGQSGSYPALKRAYPEDFTIDDAYKAQMPDLQNGPSSLIRGAKRAIQHVGISNFRLPVRYHTRDNGDLMLETSVTGTVSLDAEKKGINMSRIIRTFYDRAERTFSFDVMEETLDAYKENLESFDARLQMKLSFPVRKDSLRSGLSGYQYYDIALEVIDRDGVRTKVIHLDYVYSSTCPCSLELSEHARQQRGQLATPHSQRSVARLSVVVEDGQTLWFEDLVDLCRQAVPTETQVMVKREDEQAFAELNAANPIFVEDAVRLFAQGCQADPRIGDFRVVASHQESLHSHDAVSVLTEGTTFEGASLEPRLFGTLIHGG

SEQ ID NO: 12116 - protein, 389 aa, Palleronia marisminoris
  misc_feature (1)..(389): tr|A0A1Y5SWN8|A0A1Y5SWN8_9RHOB GTP cyclohydrolase FolE2 OS=Palleronia marisminoris OX=315423 GN=folE2 PE=4 SV= 1
MTQGRGTGNGNAYLEGEFVKGPKVMNIQPRDFDTPATREEAADLLARLRNWAATADAAELNDLDPRLRLLVEGDEVSYPVLDRVYPEAFKADAAYVAGMPDLQNGPASLIRGARRAIQHVGISNFRLPIRYRLRDGGEAMLETSVTGTVSLEAEKKGINMSRIMRSFYEHVDETFGLDVIERAVDGYKASMDSFDARIQMRFSQPLRVESMRSGLSGYQYYDVALELIDRGEVRTRVLHLDYVYASTCPCSLELSEHARQTRGQLATPHSQRSVARISVVVEPDADLLVEDMVDLCRGAVPTETQVMVKREDEQAFAELNAANPIFVEDAARLFAHACEADPRIGDFRIVASHQESLHSHDAVSILTEGETFDAISIDPRHLQTLVHAG

SEQ ID NO: 12117 - protein, 192 aa, Paludibacter jiangxiensis
  misc_feature (1)..(192): tr|A0A170YR47|A0A170YR47_9BACT GTP cyclohydrolase 1 OS= Paludibacter jiangxiensis OX=681398 GN=folE PE=3 SV=1
MEIVKQDNEQLEKLKYHYGEILRLLGEDTERDGLIKTPERVAKAVQFMTQGYEMDAREVLLSAKFREDYRQMVIVKEIEFYSTCEHHMLPFFGKAHVAYIPNKYITGLSKIARVVDIFAHRLQVQERMTTQIKECIQQTLNPLGVMVVIEAQHTCMQMRGVQKYGAVTTTSDFTGVFEVAKTREEFISLIKN

SEQ ID NO: 12118 - protein, 198 aa, Paludibacter propionicigenes
  misc_feature (1)..(198): tr|E4T723|E4T723_PALPW GTP cyclohydrolase 1 OS=Paludiba cter propionicigenes (strain DSM 17365 / JCM 13257 / WB 4) OX=694427 GN=folE PE=3 SV=1
MDFNLNQPVPFDAEKTAKIAEHYHQIIELLGEDVNREGLLKTPERVSKAMQFLMQGYEQDPEEILRSAMFTENYRQMVIVKDIDFYSMCEHHMLPFFGKAHIAYIPNKQITGLSKIARIVEVYARRMQVQERMTTQIKACIQKTLNPMGVMVIIEAQHLCMQMRGVQKQHSITTTSDFTGVFEQAKTREEFMNLINRK

SEQ ID NO: 12119 - protein, 190 aa, Paludibacter sp.
  misc_feature (1)..(190): tr|A0A2G6QZI6|A0A2G6QZI6_9BACT GTP cyclohydrolase 1 OS= Paludibacter sp. OX=1898105 GN=folE PE=3 SV=1
MVYNEKTTTSLSKKYKEIIEILGENPNREGLTKTPERVAKAMQFFLQGYSQDPAEILKSAMFTENYKQMVIVKEIDFYSLCEHHMVPFFGKVHVAYIPDKKITGLSKIARVVDVFARRLQVQERLTTQIKEAIQTNLNPLGVIVVIEAQHLCMQMRGVEKQHSITTTSDFTGAFRKAKTREEFFNLIKRG

SEQ ID NO: 12120 - protein, 197 aa, Paludibacter sp.
  misc_feature (1)..(197): tr|A0A1M3MDW1|A0A1M3MDW1_9BACT GTP cyclohydrolase 1 OS= Paludibacter sp. 47-17 OX=1895899 GN=folE PE=3 SV=1
MDFNPTTIAPFDADKTNQIALHYKEIIRLLGETPEREGLLKSPERVSKAMQFLMSGYEQDPDEILKSAMFTEDYRQMVIVKDIDFYSMCEHHMLPFFGKAHVAYIPNHKITGLSKIARIVEVFARRMQVQERMTTQIKECIQNTLNPLGVMVILEAQHLCMQMRGVQKQNSITTTSDFTGVFQQAKTREEFMNLIKR

SEQ ID NO: 12121 - protein, 190 aa, Paludifilum halophilum
  misc_feature (1)..(190): tr|A0A235BBZ3|A0A235BBZ3_9BACL GTP cyclohydrolase 1 OS= Paludifilum halophilum OX=1642702 GN=folE PE=3 SV=1
MEINHEKIQQAVRMILEAVGEDPDREGLVDTPKRVARMYEEVFSGMREDPEEHFSTIFNEVHEELVLVKDIPFFSMCEHHLVPFFGKAHVGYIPRGGRVTGLSKLARAVEAISRRPQLQERITYSIADSIKKTLDPHGVIVVAEAEHMCMTMRGVKKPGAMTVTSSVRGVFEKDPAARAEALSLIGIGSK

SEQ ID NO: 12122 - protein, 196 aa, Paludisphaera borealis
  misc_feature (1)..(196): tr|A0A1U7CJP7|A0A1U7CJP7_9BACT GTP cyclohydrolase 1 OS= Paludisphaera borealis OX=1387353 GN=folE PE=3 SV=1
MAANTPRHEVDLDRIRRAVREILLAVGEDPEREGLVETPDRVARMYAEVFQGLHQDPRVHLTKLFTQKYDEMVLVKDIRFVSFCEHHLLPVVGQAHVAYIPNGKVVGLSKIPRVIDVLAKRPQMQERLTEELADLLMRELDARGVAVVIEASHSCMTIRGVNKPNATFVTSAVRGAFKERMATRSEVMSLIFGAKN

SEQ ID NO: 12123 - protein, 185 aa, Panacagrimonas perspica
  misc_feature (1)..(185): tr|A0A4R7P129|A0A4R7P129_9GAMM GTP cyclohydrolase 1 OS= Panacagrimonas perspica OX=381431 GN=folE PE=3 SV=1
MTSIIVEEHFRAIIEAIGENPDREGLVKTPYRAARAMEFLTQGYEQDLGEIVNEAIFASSNDEMVIVRDIEMYSMCEHHMLPFIGKCHVAYLPAGKVIGLSKIPRIVDMFARRLQIQENLTKQIGESIQQVTEANGVAVVIEAKHLCAMMRGVEKQNSTMITSMMLGRFREDQRTRQELLSLLRT

SEQ ID NO: 12124 - protein, 198 aa, Panacibacter ginsenosidivorans
  misc_feature (1)..(198): tr|A0A5B8VEQ1|A0A5B8VEQ1_9BACT GTP cyclohydrolase 1 OS= Panacibacter ginsenosidivorans OX=1813871 GN=folE PE=3 SV=1
MAYKKTEQYDEKTTAQLIDNYKNVLGLLGEDSEREGLQKTPERIAKAMQYLTQGYQMNAIDIINSAKFHETVSEMVIVKDIELYSMCEHHMLPFIGKAHIAYIPNGWITGLSKIARVVDVFSRRLQVQERLTVQIMDAIRESLNPLGVAVVIEAKHLCMMMRGVQKQNSVTTTSAFYGEFEKDTTRSEFVKLISADLS

SEQ ID NO: 12125 - protein, 241 aa, Panacibacter sp.
  misc_feature (1)..(241): tr|A0A4U3KXQ2|A0A4U3KXQ2_9BACT GTP cyclohydrolase 1 OS= Panacibacter sp. 17mud1-8 OX=2575867 GN=folE PE=3 SV=1
MKQNETSWNIQHPEDNDNIEWSNVLIDEIGDNHIAASTDTPMKADAFKLTDDEKIAIIEKHFAAIMDTLGLNLADDSLRGTPKRVAKMYVQEIFSGLNPANRPAVTLFENKYKYNQMLVEKNITFYSNCEHHFVPIYGKAHIAYISSGKVIGLSKLNRFVQYFARRPQVQERLSMQIGKELQQILQTEDVAVVIDALHLCVSSRGVNDTSASTVTAFYGGKFKEETTRQEFLRYLELKPDA

SEQ ID NO: 12126 - protein, 217 aa, Panacibacter sp.
  misc_feature (1)..(217): tr|A0A4V5UWE2|A0A4V5UWE2_9BACT GTP cyclohydrolase 1 OS= Panacibacter sp. 17mud1-8 OX=2575867 GN=folE PE=3 SV=1
MINGKLTVDVMDDKRASTCFDIAIHDDVFELTKEEKIRRISLHFKQIMLALGLNLHDDSLRDTPNRVARMYVEEIFSGLDPLNKPDITLFNNNYRYNGMLIEKNISLYSYCEHHFVPIAGKAHVAYIPNGKVIGLSKINRVVQYYSKRPQVQERLTRQIGDALKDILGTEDVAVMIDAIHYCVASRGIEDTNSSTITTHYSGKFLNSDERREFLSML

SEQ ID NO: 12127 - protein, 249 aa, Pandoraea apista
  misc_feature (1)..(249): tr|A0A0G4JDK0|A0A0G4JDK0_9BURK Nif3-like dinuclear meta l center hexameric protein OS=Pandoraea apista OX=93218 GN=ybgI PE=4 SV=1
MNRVELELYLNDTLQIAQFRDYCPNGLQVEGRSDIRKIASGVTASLAFLEAARDWGADAVLVHHGYFWKNEDARITGMKRRRLGVLIGHDINLFAYHLPLDAHPEMGNNAQLGKLLDFTDDGGRFGPDQLGWLGAPAQPTTLAALAAHVGARLGRVPLMLGAPNREVRRVAWCTGGAQGFFEAAIAAGADAYISGEVSEPTQHLALESGVGYLAAGHHATERGGAKAVGEHVAARFGLEHRFFDMPNPA

SEQ ID NO: 12128 - protein, 269 aa, Pandoraea apista
  misc_feature (1)..(269): tr|A0A0B5F8B6|A0A0B5F8B6_9BURK GTP cyclohydrolase FolE2 OS=Pandoraea apista OX=93218 GN=folE2 PE=3 SV=1
MNQMNPAFVMPDVQSTVDTRQIPIQRVGVRGVRHPLSVRLADGDAQATVGLFNLDVHLPADQKGTHMSRFVALLEAHRAPMDVAGFRAMLGSMLDKLEAEAGRIEVTFPYFINKTAPVSGVQSLMDYEVTLTGDVRDGQTRVWLKVLVPVTSLCPCSKKISQYGAHNQRSHITIDAEIAGDIAVEDLVRMAEEEASCELWGLLKRPDEKYVTERAYENPKFVEDLVRDVATRLNNEPRVVAYVLQAENFESIHNHSAYAVIERDKRSVA

SEQ ID NO: 12129 - protein, 269 aa, Pandoraea faecigallinarum
  misc_feature (1)..(269): tr|A0A0H3WRV9|A0A0H3WRV9_9BURK GTP cyclohydrolase FolE2 OS=Pandoraea faecigallinarum OX=656179 GN=folE2 PE=3 S V=1
MNQMNPAFVMPDVQSTVDTRQIPIQRVGVRGVRHPLTVRLADGGVQASVGLFNLDVHLPADQKGTHMSRFVALLEANRAPLDVAGFRAMLASMLDKLEAEAGRIEVTFPYFINKTAPVSGVQSLMDYEVTLTGDVRNGETRVWLKVLVPVTSLCPCSKKISQYGAHNQRSHITIDAEIAGDIAVEALVRMAEEEASCELWGLLKRPDEKYVTERAYENPKFVEDLVRDVATRLNEEPRIVAYVLQAENFESIHNHSAYAVIERDKRHAA

SEQ ID NO: 12130 - protein, 188 aa, Pandoraea faecigallinarum
  misc_feature (1)..(188): tr|A0A0H3WNC9|A0A0H3WNC9_9BURK GTP cyclohydrolase 1 OS= Pandoraea faecigallinarum OX=656179 GN=folE PE=3 SV=1
MSHDTFDENDWKRFLKHIGEDPNRPGLHETPARVQKAWRQWTAGYEQDPAEVLKVFEDGAEQYNELIVVRGIPVYSHCEHHLAPFFGKATIGYLPNGKIVGLSKLTRLVDCFARRLQVQERLTTQVAEALMTHLQPKAVGVVVSCRHMCMESRGIRTAGEETVTSAMLGELQPNLALRTEFLALARDK

SEQ ID NO: 12131 - protein, 187 aa, Pandoraea fibrosis
  misc_feature (1)..(187): tr|A0A0B3T484|A0A0B3T484_9BURK GTP cyclohydrolase 1 OS= Pandoraea fibrosis OX=1891094 GN=folE PE=3 SV=1
MEQLFGDGDWRRFLASVGEDPDRSGLQETPQRVRLAWEHWTQGYRQDPAEVLKVFEDGAQMYNELIIVRNIPVYSHCEHHLAPFFGQATIGYVPAGRIVGLSKLTRLVDCFAKRLQVQERLTTQVANALMTHLQPKAVGVILTCRHLCMESRGIRTPGEESVTSAMLGELQPNLALRTEFLSLARMK

SEQ ID NO: 12132 - protein, 269 aa, Pandoraea fibrosis
  misc_feature (1)..(269): tr|A0A0B3T0C1|A0A0B3T0C1_9BURK GTP cyclohydrolase FolE2 OS=Pandoraea fibrosis OX=1891094 GN=folE2 PE=3 SV=1
MNQMNPAFVMPDVQSTVDTRQIPIQRVGVRGVRHPLSVRLADGDAQATVGLFNLDVHLPADQKGTHMSRFVALLEAHRAPMDVAGFRAMLGSMLDKLEAEAGRIEVTFPYFINKTAPVSGVQSLMDYEVTLTGDVRNGQTRVWLKVLVPVTSLCPCSKKISQYGAHNQRSHITIDAEIAGDIAVEDLVRMAEEEASCELWGLLKRPDEKYVTERAYENPKFVEDLVRDVATRLNDESRVVAYVLQAENFESIHNHSAYAVIERDKRVAA

SEQ ID NO: 12133 - protein, 188 aa, Pandoraea norimbergensis
  misc_feature (1)..(188): tr|A0A0U2Y8H7|A0A0U2Y8H7_9BURK GTP cyclohydrolase 1 OS= Pandoraea norimbergensis OX=93219 GN=folE PE=3 SV=1
MSHDTFDENDWKRFLKHLGEDPDRPGLHETPARVSKAWRQWTSGYGQDPAEVLKVFEDGAEQYNELIVVRGIPVYSHCEHHLAPFFGKATIGYLPNGKIVGLSKLTRLVDCFARRLQVQERLTVQIADALMTHLQPKAVGVVVSCRHMCMESRGIRTAGEETVTSSMLGELQPNLALRTEFLALARDK

SEQ ID NO: 12134 - protein, 269 aa, Pandoraea norimbergensis
  misc_feature (1)..(269): tr|A0A0U2Y9N5|A0A0U2Y9N5_9BURK GTP cyclohydrolase FolE2 OS=Pandoraea norimbergensis OX=93219 GN=folE2 PE=3 SV= 1
MNQMNPAFVMPDVQSSVDTRQIPIQRVGVRGVRHPLSVRLAGGDVQASVGLFNLDVHLPADQKGTHMSRFVALLEENRAPLDLAAFRAMLDSMLVKLEAEAGRIEVTFPYFINKTAPVSGVQSLMDYEVTLTGDVRNGVSRIWLKVLVPVTSLCPCSKKISQYGAHNQRSHITIDAELSGDIAVEDLVRMAEEEASCELWGLLKRPDEKFVTERAYENPKFVEDLVRDVATRLNNEPRVVAYVLQAENFESIHNHSAYAVIERDKRVTA

SEQ ID NO: 12135 - protein, 188 aa, Pandoraea oxalativorans
  misc_feature (1)..(188): tr|A0A0E3U803|A0A0E3U803_9BURK GTP cyclohydrolase 1 OS= Pandoraea oxalativorans OX=573737 GN=folE PE=3 SV=1
MSHDTFDEYDWKRFLKHIGEDPERSGLHETPARVQKAWRHWTAGYGQDPAEVLKVFEDGAEQYNELIVVRGIPVYSHCEHHLAPFFGKATIGYLPNGKIVGLSKLTRLVDCFARRLQVQERLTTQVAEALMTHLQPKAVGVVVSCRHMCMESRGIRTAGEETVTSSMLGELQPNLALRTEFLALAREK

SEQ ID NO: 12136 - protein, 269 aa, Pandoraea oxalativorans
  misc_feature (1)..(269): tr|A0A0E3U832|A0A0E3U832_9BURK GTP cyclohydrolase FolE2 OS=Pandoraea oxalativorans OX=573737 GN=folE2 PE=3 SV= 1
MNQMNPAFVMPDVQSTVDTRQIPIQRVGVRGVRHPLSVRLADGDVQATIGLFNLDVHLPADQKGTHMSRFVALLEANRDPMSVAGFRAMLASMLDKLEAEAGRIEVTFPYFISKTAPVSGVQSLMDYEVTLTGDVRNGETRVWLKVLVPVTSLCPCSKKISQYGAHNQRSHITIDVEIAGDIAVEELVRMAEEEASCELWGLLKRPDEKYVTERAYENPKFVEDLVRDVATRLNNEPRVAAYVLQAENFESIHNHSAYAVIERDKRVAA

SEQ ID NO: 12137 - protein, 269 aa, Pandoraea pnomenusa
  misc_feature (1)..(269): tr|A0A518R4Z2|A0A518R4Z2_9BURK GTP cyclohydrolase FolE2 OS=Pandoraea pnomenusa OX=93220 GN=folE2 PE=3 SV=1
MNQMNPAFVMPDVQSTVDTRQIPIQRVGVRGVRHPLTVRLTGGDTQATVGMFNLDVHLPADQKGTHMSRFVALLEENRVPMDVAGFRAMLDGMLEKLEAQAGRIEVTFPYFINKTAPVSGVRSLMDYEVTLTGDMRDGQTRVWLKVLVPVTSLCPCSKKISQYGAHNQRSHITIDAEIDGDIAVEALVKMAEEEASCELWGLLKRPDEKYVTERAYENPKFVEDLVRDVATRLNDEPRIVAYVLQAENFESIHNHSAYAVIERDKRTTV

SEQ ID NO: 12138 - protein, 245 aa, Pandoraea pnomenusa
  misc_feature (1)..(245): tr|A0A378YF44|A0A378YF44_9BURK GTP cyclohydrolase 1 OS= Pandoraea pnomenusa OX=93220 GN=folE_2 PE=4 SV=1
MGAVIDSQQAIAITQGPQEGIPLSQAIRQRLRGAGVRFHANDNIAAYLREGDVDRLQDEVTVHIENALRALVIDVDNDHNTRDTAKRVAKMFVKEVFAGRYEPPPAITEFPNIGQLNELTLIGPLRVRSACSHHLCPIMGHAWIGVLPNADSNLPGLSKYARLLNWVMARPQIQEEAVKQIADLLEEKIAPDGLAVVMEADHFCMHWRGTKDDGARMVSSVMRGRFLEDSALRREFLALMASRAR

SEQ ID NO: 12139 - protein, 188 aa, Pandoraea pulmonicola
  misc_feature (1)..(188): tr|A0A378ZBH2|A0A378ZBH2_9BURK GTP cyclohydrolase 1 OS= Pandoraea pulmonicola OX=93221 GN=folE PE=3 SV=1
MSHDTFDENDWKRFLKHIGEDPNRPGLHETPSRVAKAWRHWTAGYEQDPAEVLKVFEDGAEQYNELIVVRGIPVYSHCEHHLAPFFGKATIGYLPNGKIVGLSKLTRLVDCFARRLQVQERLTTQIADALMTHLQPKAVGVVVSCRHMCMESRGIRTAGEETVTSAMLGELQPNLALRTEFLALARDK

SEQ ID NO: 12140 - protein, 269 aa, Pandoraea pulmonicola
  misc_feature (1)..(269): tr|A0A378ZAH7|A0A378ZAH7_9BURK GTP cyclohydrolase FolE2 OS=Pandoraea pulmonicola OX=93221 GN=folE2 PE=3 SV=1
MNQMNPAFVMPDVQSSVDTRQIPIQRVGVRGVRHPLSVRLAGGDVQATVGLFNLDVHLPADQKGTHMSRFVALLEAHRAPLDMAAFRAMLGDMLQKLEAEAGRIEVTFPYFINKTAPVSGVQSLLDYEVTLTGDVRDGVTRVWLKVLVPVTSLCPCSKKISQYGAHNQRSHITIDAEVSEDIAVEELVRMAEEEASCELWGLLKRPDEKFVTERAYENPKFVEDLVRDVATRLNHESRVVAYLLQAENFESIHNHSAYAVIERDKRLAA

SEQ ID NO: 12141 - protein, 188 aa, Pandoraea sp.
  misc_feature (1)..(188): tr|A0A1Q4CKW0|A0A1Q4CKW0_9BURK GTP cyclohydrolase 1 OS= Pandoraea sp. 64-18 OX=1895806 GN=folE PE=3 SV=1
MSHDTFDENDWKRFLKHIGEDPNRPGLHETPSRVQKAWRQWTSGYGQDPAEVLKVFEDGAEQYNELIVVRGIPVYSHCEHHLAPFFGKATIGYLPNGKIVGLSKLTRLVDCFARRLQVQERLTTQIAEALMTHLQPKAVGVVVSCRHMCMESRGIRTAGEETVTSAMLGELQPNLALRTEFLALARDK

SEQ ID NO: 12142 - protein, 269 aa, Pandoraea sp.
  misc_feature (1)..(269): tr|A0A522ERI2|A0A522ERI2_9BURK GTP cyclohydrolase FolE2 OS=Pandoraea sp. OX=1883445 GN=folE2 PE=3 SV=1
MNQMNPAFVMPDVQSSVDTRQIPIQRVGVRAVRHPLTLRTPDGQAQTTVGVFNMDVHLPAEQKGTHMSRFVALLEERKTPLDLAGFRSMLAGMLEKLEATAGRIEVIFPYFITKTAPISGVQSLMDYEVALVGELRDGVARCWLKVLVPVTSLCPCSKKISDYGAHNQRSHVTITAELAGDISVEEIVRMAEEEASCELWGLLKRPDEKFVTERAYDNPKFVEDLVRDVARRLNDEPRIVAYVLEAENFESIHNHSAYAVIERDKRIDA

SEQ ID NO: 12143 - protein, 269 aa, Pandoraea sputorum
  misc_feature (1)..(269): tr|A0A239SDX7|A0A239SDX7_9BURK GTP cyclohydrolase FolE2 OS=Pandoraea sputorum OX=93222 GN=folE2 PE=3 SV=1
MNQMNPAFVMPDVQSTVDTRQIPIQRVGVRGVRHPLSVRLADGDVQATIGLFNLDVHLRADQKGTHMSRFVALLEANREPMNVAGFRAMLASMLDKLEAEAGRIEVTFPYFINKTAPVSGVQSMMDYEVTLTGDVRHGETRVWLKVLVPVTSLCPCSKKISQYGAHNQRSHITIDAEIAGDIAVEELVRMAEEEASCELWGLLKRPDEKYVTERAYENPKFVEDLVRDVATRLNSEPRVAAYVLQAENFESIHNHSAYAVIERDKRVAA

SEQ ID NO: 12144 - protein, 269 aa, Pandoraea sputorum
  misc_feature (1)..(269): tr|A0A5E5AVZ1|A0A5E5AVZ1_9BURK GTP cyclohydrolase FolE2 OS=Pandoraea sputorum OX=93222 GN=folE2 PE=3 SV=1
MNQMNPAFVMPDVQSTVDTRQIPIQRVGVRGVRHPLSVRLADGDVQATIGLFNLDVHLPADQKGTHMSRFVALLEANREPMNVAGFRAMLASMLDKLEAEAGRIEVTFPYFINKTAPVSGVQSLMDYEVTLTGDVRHGETRVWLKVLVPVTSLCPCSKKISQYGAHNQRSHITIDAEIAGDIAVEELVRMAEEEASCELWGLLKRPDEKYVTERAYENPKFVEDLVRDVATRLNNEPRVAAYVLQAENFESIHNHSAYAVIERDKRVAA

SEQ ID NO: 12145 - protein, 269 aa, Pandoraea terrae
  misc_feature (1)..(269): tr|A0A5E4XRI7|A0A5E4XRI7_9BURK GTP cyclohydrolase FolE2 OS=Pandoraea terrae OX=1537710 GN=folE2 PE=3 SV=1
MNQMNPAFVMPDVQSSVDTRQIPIQRVGVRAVRFPLVLKTPAGQPQATVGVFNMDVHLPADQKGTHMSRFVALLEENRAPLDVAGFRHMLAVMLEKLEAEAGRIEVTFPYFITKTAPVSGVQSLMDYEVTLVGDVRDGQARVWLKVLVPVTSLCPCSKKISEYGAHNQRSHVTINAELAGEIGVEEIVRMAEEEASCELWGLLKRPDEKFVTERAYDNPKFVEDLVRDVAQRLNQEPRIVAYVLEAENFESIHNHSAYAVIERDKRLDA

SEQ ID NO: 12146 - protein, 269 aa, Pandoraea thiooxydans
  misc_feature (1)..(269): tr|A0A0G3EV38|A0A0G3EV38_9BURK GTP cyclohydrolase FolE2 OS=Pandoraea thiooxydans OX=445709 GN=folE2 PE=3 SV=1
MNQMNPAFVMPDVQSSVDTRQIPIQRVGVRAVRHPLTLRTPDGQVQATVGVFNMDVHLPAEQKGTHMSRFVALLEERKTPLDLAGFRSMLAGMLEKLEATAGRIEVTFPYFITKTAPISGVQSLMDYEVALVGELREGVARCWLKVLVPVTSLCPCSKKISDYGAHNQRSHVTITAELAADVSVEEIVRMAEEEASCELWGLLKRPDEKFVTERAYDNPKFVEDLVRDVARRLNEEPRIVAYVLEAENFESIHNHSAYAVIERDKRIDA

SEQ ID NO: 12147 - protein, 269 aa, Pandoraea vervacti
  misc_feature (1)..(269): tr|A0A0C5K1U9|A0A0C5K1U9_9BURK GTP cyclohydrolase FolE2 OS=Pandoraea vervacti OX=656178 GN=folE2 PE=3 SV=1
MNQMNPAFVMPDVQSTVDTRQIPIQRVGVRGVRHPLSVRLADGDVQATVGLFNLDVHLLADQKGTHMSRFVALLEANRAPLDVAGFRAMLASMLEKLEAEAGRIEVTFPYFINKTAPVSGVQSLMDYEVTLMGDVRNGETRVWLKVLVPVTSLCPCSKKISQYGAHNQRSHITIDAEITGDIAVEDLVRMAEEEASCELWGLLKRPDEKYVTERAYENPKFVEDLVRDVATRLNNEPRIVAYVLQAENFESIHNHSAYAVIERDKRMGA

SEQ ID NO: 12148 - protein, 188 aa, Pandoraea vervacti
  misc_feature (1)..(188): tr|A0A0C5K747|A0A0C5K747_9BURK GTP cyclohydrolase 1 OS= Pandoraea vervacti OX=656178 GN=folE PE=3 SV=1
MSHDTFDENDWKRFLKHIGEDPNRPGLHETPARVQKAWRQWTAGYDQDPAEVLKVFEDGAEQYNELIVVRGIPVYSHCEHHLAPFFGKATIGYLPNGKIVGLSKLTRLVDCFARRLQVQERLTTQVAEALMTHLQPKAVGVVVSCRHMCMESRGIRTAGEETVTSAMLGELQPNLALRTEFLALARDK

SEQ ID NO: 12149 - protein, 211 aa, Pannonibacter indicus
  misc_feature (1)..(211): tr|A0A0K6IBI2|A0A0K6IBI2_9RHOB GTP cyclohydrolase 1 OS= Pannonibacter indicus OX=466044 GN=folE PE=3 SV=1
MDAILKPADEKAPRRAPHEIARPSREQAEAAVRTLLAYIGEDPEREGLLDTPKRVVKSFAELYSGYAEDPKAHLERTFEDVGGYEDMIMVRGIPFHSHCEHHMLPFIGKAYIAYYPSGGVVGLSKLARVVDIYANRLQTQENLTSQIVSSIDEHLAPRGIAVMLEAEHQCMTMRGVQKAGVSTITTQFTGVFQDDPAEQARFMTFIRGGDR

SEQ ID NO: 12150 - protein, 211 aa, Pannonibacter phragmitetus
  misc_feature (1)..(211): tr|A0A378ZTF8|A0A378ZTF8_9RHOB GTP cyclohydrolase 1 OS= Pannonibacter phragmitetus OX=121719 GN=folE PE=3 SV=1
MDAILKPADEKAPRRAPHEIARPSREQAEAAVRTLLAYIGEDPEREGLLDTPKRVVKSFAELYSGYAEDPKAHLERTFEDVGGYEDMIMVRGIPFHSHCEHHMLPFIGKAYIAYYPSGGVVGLSKLARVVDIYANRLQTQENLTSQIVSSIDEHLAPRGIAVMLEAEHQCMTMRGVQKAGVTTITTQFTGVFQDDPAEQARFMTFIRGGDR

SEQ ID NO: 12151 - protein, 211 aa, Pannonibacter phragmitetus
  misc_feature (1)..(211): tr|A0A0U3P6U5|A0A0U3P6U5_9RHOB GTP cyclohydrolase 1 OS= Pannonibacter phragmitetus OX=121719 GN=folE PE=3 SV=1
MDAILKPADEKAPRRAPHEIARPSREQAEAAVRTLLAYIGEDPEREGLLDTPKRVVKSYAELYSGYAEDPKAHLERTFEDVGGYEDMIMVRGIPFHSHCEHHMLPFIGKAYIAYYPSGGVVGLSKLARVVDIYANRLQTQENLTSQIVSSIDEHLAPRGIALMLEAEHQCMTMRGVQKAGVSTITTQFTGVFQDDPAEQARFMTFIRGGDR

SEQ ID NO: 12152 - protein, 221 aa, Pantoea alhagi
  misc_feature (1)..(221): tr|A0A1W6BB56|A0A1W6BB56_9GAMM GTP cyclohydrolase 1 OS= Pantoea alhagi OX=1891675 GN=folE PE=3 SV=1
MATLSHEAALVHDALVARGLETPLRAPVREMDDETRKRLIAGHMTEIMQLLNLDLEDDSLMETPHRIAKMYVNEIFSGLDYANFPKITLIENKMKVDEMVTVRDITLTSTCEHHFVIIDGQATVAYIPKDKVIGLSKINRIVQFFAQRPQVQERLTQQVLIALQTLLGTNNVAVSIDAVHYCVKARGIRDANSATTTTSLGGLFKSSQNTRQEFLRAVRHN

SEQ ID NO: 12153 - protein, 187 aa, Pantoea allii
  misc_feature (1)..(187): tr|A0A4S3B7T1|A0A4S3B7T1_9GAMM GTP cyclohydrolase 1 (Fr agment) OS=Pantoea allii OX=574096 GN=folE PE=3 SV=1
MSTLSQEAALVHEALLARGLETPLRAPTRDIDDKTRKSLIAGHMTEIMQLLNLDLEDDSLMETPHRIAKMYVDEVFSGLDYANFPKITVIENKMKVDEMVTVRDITLTSTCEHHFVIIDGKATVAYIPKEKVIGLSKINRIVQFFAQRPQVQERLTQQVLVALQTLLGTNNVAVSIDAVHYLSLIHI

SEQ ID NO: 12154 - protein, 43 aa, Pantoea allii
  misc_feature (1)..(43): tr|A0A4S3BCI0|A0A4S3BCI0_9GAMM GTP cyclohydrolase I Fol E (Fragment) OS=Pantoea allii OX=574096 GN=folE PE=4 SV =1
VHYCVKARGVKDATSATTTTSLGGLFKSSQNTRQEFLRAVRHS

SEQ ID NO: 12155 - protein, 221 aa, Pantoea ananas
  misc_feature (1)..(221): tr|A0A2S8A1Q8|A0A2S8A1Q8_PANAN GTP cyclohydrolase 1 OS= Pantoea ananas OX=553 GN=folE PE=3 SV=1
MSTLSQEAALVHEALLARGLETPLRAPTRDIDDETRKSLIAGHMTEIMQLLNLDLEDDSLMETPHRIAKMYVDEIFSGLDYANFPKITVIENKMKVDEMVTVRDITLTSTCEHHFVIIDGKATVAYIPKEKVIGLSKINRIVQFFAQRPQVQERLTQQVLVALQTLLGTNNVAVSIDAVHYCVKARGVKDATSATTTTSLGGLFKSSQNTRQEFLRAVRHS

SEQ ID NO: 12156 - protein, 221 aa, Pantoea ananas
  misc_feature (1)..(221): tr|A0A2U1DDG1|A0A2U1DDG1_PANAN GTP cyclohydrolase 1 OS= Pantoea ananas OX=553 GN=folE PE=3 SV=1
MSTLSQEAALVHEALLARGLETPLRAPTREIDDETRKSLIAGHMTEIMQLLNLDLEDDSLMETPHRIAKMYVDEVFSGLDYANFPKITLIENKMKVDEMVTVRDITLTSTCEHHFVIIDGKATVAYIPKDKVIGLSKINRIVQFFAQRPQVQERLTQQVLLALQTLLGTNNVAVSIDAVHYCVKARGVKDATSATTTTSLGGLFKSSQNTRQEFLRAVRHN

SEQ ID NO: 12157 - protein, 221 aa, Pantoea ananatis; identical to SEQ ID NO: 12156
  misc_feature (1)..(221): tr|A0A0H3KXY7|A0A0H3KXY7_PANAA GTP cyclohydrolase 1 OS= Pantoea ananatis (strain AJ13355) OX=932677 GN=folE PE= 3 SV=1

SEQ ID NO: 12158 - protein, 221 aa, Pantoea ananatis
  misc_feature (1)..(221): tr|D4GIH7|D4GIH7_PANAM GTP cyclohydrolase 1 OS=Pantoea ananatis (strain LMG 20103) OX=706191 GN=folE PE=3 SV=1
MSTLSQEAAQVHEALLARGLETPLRAPTREIDDETRKSLIAGHMTEIMQLLNLDLEDDSLMETPHRIAKMYVDEVFSGLDYANFPKITLIENKMKVDEMVTVRDITLTSTCEHHFVIIDGKATVAYIPKDKVIGLSKINRIVQFFAQRPQVQERLTQQVLLALQTLLGTNNVAVSIDAVHYCVKARGVKDATSATTTTSLGGLFKSSQNTRQEFLRAVRHN

SEQ ID NO: 12159 - protein, 221 aa, Pantoea anthophila
  misc_feature (1)..(221): tr|A0A506PG98|A0A506PG98_9GAMM GTP cyclohydrolase 1 OS= Pantoea anthophila OX=470931 GN=folE PE=3 SV=1
MSTLSQEAALVHEALLARGLETPLRAPTRDIDDNTRKSLIAGHMTEIMQLLNLDLEDDSLMETPHRIAKMYVDEVFSGLDYANFPKITVIENKMKVDEMVTVRDITLTSTCEHHFVIIDGKATVAYIPKDKVIGLSKINRIVQFFAQRPQVQERLTQQVLVALQTLLGTNNVAVSIDAVHYCVKARGVKDATSATTTTSLGGLFKSSQNTRQEFLRAVRHS

SEQ ID NO: 12160 - protein, 221 aa, Pantoea coffeiphila
  misc_feature (1)..(221): tr|A0A2S9IG70|A0A2S9IG70_9GAMM GTP cyclohydrolase 1 OS= Pantoea coffeiphila OX=1465635 GN=folE PE=3 SV=1
MATLSQEAALVHEALLARGLETPLRAPVREMDDETRRQLIAGHMTEIMQLLNLDLDDDSLRETPQRIAKMYVNEVFSGLDYANFPKITVIENKMKVDEMVTVRDITLTSTCEHHFVIIDGKATVAYIPKDKVIGLSKINRIVQFFSSRPQVQERLTQQILVALQTLLGTNNVAVSIDAVHYCVKARGIRDATSATTTTSLGGLFKSSQNTRQEFLRAVRHS

SEQ ID NO: 12161 - protein, 221 aa, Pantoea conspicua
  misc_feature (1)..(221): tr|A0A1X1BW25|A0A1X1BW25_9GAMM GTP cyclohydrolase 1 OS= Pantoea conspicua OX=472705 GN=folE PE=3 SV=1
MSTLSQEAALVHEALLARGLETPLRAPTRDLDDETRKSLIAGHMTEIMQLLNLDLEDDSLIETPHRIAKMYVDEVFSGLDYANFPKITVIENKMKVDEMVTVRDITLTSTCEHHFVIIDGKATVAYIPKDKVIGLSKINRIVQFFAQRPQVQERLTQQVLVALQTLLGTNNVAVSIDAVHYCVKARGVKDATSATTTTSLGGLFKSSQNTRQEFLRAVRHS

SEQ ID NO: 12162 - protein, 221 aa, Pantoea cypripedii
  misc_feature (1)..(221): tr|A0A1X1EW07|A0A1X1EW07_PANCY GTP cyclohydrolase 1 OS= Pantoea cypripedii OX=55209 GN=folE PE=3 SV=1
MSTLSQEAALVHEALLARGLETPLRAPVREMDDETRKRQIAGHMTEIMQLLNLDLEDDSLMETPHRIAKMYVDEIFSGLDYANFPKITVIENKMKVDEMVTVRDITLTSTCEHHFVIIDGKATVAYIPKDKVIGLSKINRIVQFFAQRPQVQERLTQQVLIALQTLLGTNNVAVSIDAVHYCVKARGVKDATSATTTTSLGGLFKSSQNTRQEFLRAVRHN

SEQ ID NO: 12163 - protein, 221 aa, Pantoea deleyi
  misc_feature (1)..(221): tr|A0A506Q1B4|A0A506Q1B4_9GAMM GTP cyclohydrolase 1 OS= Pantoea deleyi OX=470932 GN=folE PE=3 SV=1
MSTLSQEAALVHEALLARGLETPLRAPTRDIDDETRKSLIAGHMTEIMQLLNLDLEDDSLMETPHRIAKMYVDEVFSGLDYANFPKITVIENKMKVDEMVTVRDITLTSTCEHHFVIIDGKATVAYIPKDKVIGLSKINRIVQFFAQRPQVQERLTQQVLVALQTLLGTNNVAVSIDAVHYCVKARGVKDATSATTTTSLGGLFKSSQNTRQEFLRAVRHS

SEQ ID NO: 12164 - protein, 221 aa, Pantoea dispersa
  misc_feature (1)..(221): tr|A0A518XE10|A0A518XE10_9GAMM GTP cyclohydrolase 1 OS= Pantoea dispersa OX=59814 GN=folE PE=3 SV=1
MSTLSQEAALVHEALLARGLETPLRAPVRDMDDETRKREIAGHMTQIMQLLNLDLEDDSLMETPHRIAKMYVDEIFSGLDYANFPKITVIENKMKVDEMVTVRDITLTSTCEHHFVIIDGKATVAYIPKDKVIGLSKINRIVQFFAQRPQVQERLTQQVLVALQTLLGTNNVAVSIDAVHYCVKARGVKDATSATTTTSLGGLFKSSQNTRQEFLRAVRHS

SEQ ID NO: 12165 - protein, 221 aa, Pantoea dispersa
  misc_feature (1)..(221): tr|A0A437T505|A0A437T505_9GAMM GTP cyclohydrolase 1 OS= Pantoea dispersa OX=59814 GN=folE PE=3 SV=1
MSTLSQEAALVHEALLARGLETPLRAPVRDMDDASRKREIAGHMTQIMQLLNLDLEDDSLMETPHRIAKMYVDEIFSGLDYANFPKITVIENKMKVDEMVTVRDITLTSTCEHHFVIIDGKATVAYIPKDKVIGLSKINRIVQFFAQRPQVQERLTQQVLVALQTLLGTNNVAVSIDAVHYCVKARGVKDATSATTTTSLGGLFKSSQNTRQEFLRAVRHS

SEQ ID NO: 12166 - protein, 221 aa, Pantoea eucalypti; identical to SEQ ID NO: 12155
  misc_feature (1)..(221): tr|A0A506PHP4|A0A506PHP4_9GAMM GTP cyclohydrolase 1 OS= Pantoea eucalypti OX=470933 GN=folE PE=3 SV=1

SEQ ID NO: 12167 - protein, 221 aa, Pantoea latae
  misc_feature (1)..(221): tr|A0A1V9DFC9|A0A1V9DFC9_9GAMM GTP cyclohydrolase 1 OS= Pantoea latae OX=1964541 GN=folE PE=3 SV=1
MSTLSQEAILVHEALLARGLETPLRAPTREMDDETRKRLIAGHMTEVMQLLNLDLEDDSLMETPHRIAKMYVDEVFSGLDYANFPKITVIENKMKVDEMVTVRDITLTSTCEHHFVIIDGKATVAYIPKEKVIGLSKINRIVQFFAQRPQVQERLTQQVLVALQTLLGTNNVAVSIDAVHYCVKARGVKDATSATTTTSLGGLFKSSQNTRQEFLRAVRHI

SEQ ID NO: 12168 - protein, 221 aa, Pantoea rodasii
  misc_feature (1)..(221): tr|A0A2M9WG29|A0A2M9WG29_9GAMM GTP cyclohydrolase 1 OS= Pantoea rodasii OX=1076549 GN=folE PE=3 SV=1
MSTLSQEAALVHEALLARGLETPLRAPVREMDDETRKHEIAGHMTQIMQLLNLDLEDDSLMETPHRIAKMYVDEIFSGLDYANFPKITVIENKMKVDEMVTVRDITLTSTCEHHFVIIDGKATVAYIPKEKVIGLSKINRIVQFFAQRPQVQERLTQQVLVALQTLLGTNNVAVSIDAVHYCVKARGVKDATSATTTTSLGGLFKSSQNTRQEFLRAVRHS

SEQ ID NO: 12169 - protein, 221 aa, Pantoea rodasii
  misc_feature (1)..(221): tr|A0A0B1R0Y0|A0A0B1R0Y0_9GAMM GTP cyclohydrolase 1 OS= Pantoea rodasii OX=1076549 GN=folE PE=3 SV=1
MSTLSQEAALVHEALLARGLETPLRAPVREMDDEARKREIAGHMTQIMQLLNLDLEDDSLMETPHRIAKMYVDEIFSGLDYANFPKITVIENKMKVDEMVTVRDITLTSTCEHHFVIIDGKATVAYIPKEKVIGLSKINRIVQFFAQRPQVQERLTQQVLVALQTLLGTNNVAVSIDAVHYCVKARGVKDATSATTTTSLGGLFKSSQNTRQEFLRAVRHS

SEQ ID NO: 12170 - protein, 221 aa, Pantoea rwandensis
  misc_feature (1)..(221): tr|A0A1X1CQZ9|A0A1X1CQZ9_9GAMM GTP cyclohydrolase 1 OS= Pantoea rwandensis OX=1076550 GN=folE PE=3 SV=1
MSTLSQEAALVHEALLARGLETPLRAPVREMDDETRKREIAGHMTQIMQLLNLDLEDDSLMETPHRIAKMYVDEIFSGLDYANFPKITVIENKMKVDEMVTVRDITLTSTCEHHFVIIDGKATVAYIPKDKVIGLSKINRIVQFFAQRPQVQERLTQQVLVALQTLLGTNNVAVSIDAVHYCVKARGVKDATSATTTTSLGGLFKSSQNTRQEFLRAVRHS

SEQ ID NO: 12171 - protein, 222 aa, Pantoea sesami; identical to SEQ ID NO: 7843
  misc_feature (1)..(222): tr|A0A1M5V206|A0A1M5V206_9GAMM GTP cyclohydrolase 1 OS= Pantoea sesami OX=1881110 GN=folE PE=3 SV=1

SEQ ID NO: 12172 - protein, 221 aa, Pantoea sp.
  misc_feature (1)..(221): tr|A0A2S5KFR1|A0A2S5KFR1_9GAMM GTP cyclohydrolase 1 OS= Pantoea sp. ICBG 1758 OX=2071682 GN=folE PE=3 SV=1
MSTLSQEAALVHEALLARGLETPLRAPVREMDSETRKREIAGHMTQIMQLLNLDLEDDSLMETPHRIAKMYVDEIFSGLDYANFPKITVIENKMKVDEMVTVRDITLTSTCEHHFVIIDGKATVAYIPKDKVIGLSKINRIVQFFAQRPQVQERLTQQVLVALQTLLGTTNVAVSIDAVHYCVKARGVKDATSATTTTSLGGLFKSSQNTRQEFLRAVRHI

SEQ ID NO: 12173 - protein, 221 aa, Pantoea sp.
  misc_feature (1)..(221): tr|A0A443IF42|A0A443IF42_9GAMM GTP cyclohydrolase 1 OS= Pantoea sp. LMG 27579 OX=1490476 GN=folE PE=3 SV=1
MTTLSQEAALVHEALLARGLETPLRSPAREIDDETRKRLIAGHMTEIMQLLNLDLEDDSLAETPHRIAKMYVNEVFSGLDYANFPKITVIENKMKVDEMVTVRDITLTSTCEHHFVIIDGKATVAYIPKDKVIGLSKINRIVQFFASRPQVQERLTQQILLALQTLLGTNNVAVSIDAVHYCVKARGIRDATSATTTTSLGGLFKSSQNTRQEFLRAVRHS

SEQ ID NO: 12174 - protein, 221 aa, Pantoea stewartii
  misc_feature (1)..(221): tr|H3REQ3|H3REQ3_PANSE GTP cyclohydrolase 1 OS=Pantoea stewartii subsp. stewartii DC283 OX=660596 GN=folE PE=3 SV=1
MSTLSQEAALVHEALLARGLETPLRAPTREMDDETRKSLIAGHMTEIMQLLNLDLEDDSLMETPHRIAKMYVDEVFSGLDYANFPKITLIENKMKVDEMVTVRDITLTSTCEHHFVIIDGKATVAYIPKDKVIGLSKINRIVQFFAQRPQVQERLTQQVLLALQTLLGTNNVAVSIDAVHYCVKARGVKDATSATTTTSLGGLFKSSQNTRQEFLRAVRHS

SEQ ID NO: 12175 - protein, 221 aa, Pantoea vagans
  misc_feature (1)..(221): tr|E1SJ73|E1SJ73_PANVC GTP cyclohydrolase 1 OS=Pantoea vagans (strain C9-1) OX=712898 GN=folE PE=3 SV=1
MSTLSQEAALVHEALLARGLETPLRAPTRDIDKETRKSLIAGHMTEIMQLLNLDLEDDSLMETPHRIAKMYVDEVFSGLDYANFPKITVIENKMKVDEMVTVRDITLTSTCEHHFVIIDGKATVAYIPKEKVIGLSKINRIVQFFAQRPQVQERLTQQVLVALQTLLGTNNVAVSIDAVHYCVKARGVKDATSATTTTSLGGLFKSSQNTRQEFLRAVRHS

SEQ ID NO: 12176 - protein, 221 aa, Pantoea vagans; identical to SEQ ID NO: 12155
  misc_feature (1)..(221): tr|A0A501SIK2|A0A501SIK2_9GAMM GTP cyclohydrolase 1 OS= Pantoea vagans OX=470934 GN=folE PE=3 SV=1

SEQ ID NO: 12177 - protein, 221 aa, Pantoea wallisii
  misc_feature (1)..(221): tr|A0A1X1D8J3|A0A1X1D8J3_9GAMM GTP cyclohydrolase 1 OS= Pantoea wallisii OX=1076551 GN=folE PE=3 SV=1
MSTLSQEAALVHEALLARGLETPLRAPVREMDDESRKREIAGHMTQIMQLLNLDLEDDSLMETPHRIAKMYVDEIFSGLDYANFPKITVIENKMKVDEMVTVRDITLTSTCEHHFVIIDGKATVAYIPKDKVIGLSKINRIVQFFAQRPQVQERLTQQVLVALQTLLGTTNVAVSIDAVHYCVKARGVKDATSATTTTSLGGLFKSSQNTRQEFLRAVRHS

SEQ ID NO: 12178 - protein, 197 aa, Parabacteroides acidifaciens
  misc_feature (1)..(197): tr|A0A3D8HAR9|A0A3D8HAR9_9BACT GTP cyclohydrolase 1 OS= Parabacteroides acidifaciens OX=2290935 GN=folE PE=3 SV =1
MSEEVNAKTLQAREELAGHYKSIISLLGEDVDREGLLKTPERVAKAMQFLTKGYQEDPAAVLRGAMFKEEDYKQMVIVKDIDFFSLCEHHMLPFFGKAHVAYIPKKYITGLSKIPRVVDIFARRLQIQERLTMQIKECIQETLDPLGVMVVIEAQHMCMQMRGVEKQNSLTTTSDFTGFFQQAKTREEFMNLIKHNR

SEQ ID NO: 12179 - protein, 195 aa, Parabacteroides chartae; identical to SEQ ID NO: 10185
  misc_feature (1)..(195): tr|A0A1T5A2A0|A0A1T5A2A0_9BACT GTP cyclohydrolase 1 OS= Parabacteroides chartae OX=1037355 GN=folE PE=3 SV=1

SEQ ID NO: 12180 - protein, 198 aa, Parabacteroides chinchillae
  misc_feature (1)..(198): tr|A0A1H5XIQ2|A0A1H5XIQ2_9BACT GTP cyclohydrolase 1 OS= Parabacteroides chinchillae OX=871327 GN=folE PE=3 SV=1
MVLKQSEEEKSRVQGELAVHYNAILSLLGEDPKREGLLKTPFRVAKAMQFLTKGYSEDPEAVLRSAMFQEEDYKQMVIVKDIDFFSLCEHHMLPFFGKAHIAYIPKKYITGLSKIPRVVDIFARRLQIQERLTMQIKDCIQKTLDPLGVMVVIEAQHMCMQMRGVEKQNSLTTTSDFTGFFQQAKTREEFMNLIKHNR

SEQ ID NO: 12181 - protein, 196 aa, Parabacteroides distasonis
  misc_feature (1)..(196): sp|A6LFE8|GCH1_PARD8 GTP cyclohydrolase 1 OS=Parabacter oides distasonis (strain ATCC 8503 / DSM 20701 / CIP 10 4284 / JCM 5825 / NCTC 11152) OX=435591 GN=folE PE=3 SV =1
MSEVNEETLRAREALAGHYKEVLGLLGEDVEREGLLKTPERVAKAMQFLTKGYHEDPEAVLRSAMFQEEDYKQMVIVKDIDFFSLCEHHMLPFFGKAHVAYIPKKYITGLSKIPRVVDIFARRLQIQERMTMQIKDCIQRTLDPLGVMVVIEAQHMCMQMRGVEKQNSLTTTSDFTGFFQQAKTREEFMNLIKHNR

SEQ ID NO: 12182 - protein, 197 aa, Parabacteroides distasonis
  misc_feature (1)..(197): tr|A0A3L7ZW46|A0A3L7ZW46_9BACT GTP cyclohydrolase 1 OS= Parabacteroides distasonis OX=823 GN=folE PE=3 SV=1
MMSEVNEETLRAREVLAGHYKEVLGLLGEDAGREGLLKTPERVAKAMQFLTKGYHEDPEAVLRSAMFQEEDYKQMVIVKDIDFFSLCEHHMLPFFGKAHVAYIPKKYITGLSKIPRVVDIFARRLQIQERMTMQIKDCIQRTLDPLGVMVVIEAQHMCMQMRGVEKQNSLTTTSDFTGFFQQAKTREEFMNLIKHNR

SEQ ID NO: 12183 - protein, 208 aa, Parabacteroides goldsteinii
  misc_feature (1)..(208): tr|A0A0F5JIP6|A0A0F5JIP6_9BACT GTP cyclohydrolase 1 OS= Parabacteroides goldsteinii DSM 19448 = WAL 12034 OX=92 7665 GN=folE PE=3 SV=1
MSPWLTRIIIEMTKEIDDKTLAAREELAGHYKQILGLLGEDAEREGLIKTPERVAKAMQFLTKGYNEDPAKVLASAMFQEEDYKQMVIVKDIDFFSLCEHHMLPFFGKAHVAYIPKKYITGLSKIPRVVDIFARRLQIQERLTMQIKDCIQQTLDPLGVMVVIEAQHMCMQMRGVEKQNSLTTTSDFTGFFQQAKTREEFMNLIKNNR

SEQ ID NO: 12184 - protein, 197 aa, Parabacteroides goldsteinii
  misc_feature (1)..(197): tr|S0GM23|S0GM23_9BACT GTP cyclohydrolase 1 OS=Parabact eroides goldsteinii dnLKV18 OX=1235789 GN=folE PE=3 SV= 1
MTKEIDDKTLAAREELAGHYKQILGLLGEDAEREGLIKTPERVAKAMQFLTKGYNEDPAKVLASAMFQEEDYKQMVIVKDIDFFSLCEHHMLPFFGKAHVAYIPKKYITGLSKIPRVVDIFARRLQIQERLTMQIKDCIQQTLDPLGVMVVIEAQHMCMQMRGVEKQNSLTTTSDFTGFFQQAKTREEFMNLIKNNR

SEQ ID NO: 12185 - protein, 197 aa, Parabacteroides gordonii
  misc_feature (1)..(197): tr|A0A0F5JFU2|A0A0F5JFU2_9BACT GTP cyclohydrolase 1 OS= Parabacteroides gordonii MS-1 = DSM 23371 OX=1203610 GN =folE PE=3 SV=1
MIEEINDKTLAAREELAGHYKGILNLLGEDAEREGLLKTPERVAKAMQFLTKGYNEDPAKVLASAMFQEEDYKQMVIVKDIDFFSLCEHHMLPFFGKAHVAYIPKKYITGLSKIPRVVDIFARRLQIQERLTMQIKDCIQQTLDPLGVMVVIEAQHMCMQMRGVEKQNSLTTTSDFTGFFQQAKTREEFMNLIKNNR

SEQ ID NO: 12186 - protein, 197 aa, Parabacteroides johnsonii
  misc_feature (1)..(197): tr|B7BH38|B7BH38_9BACT GTP cyclohydrolase 1 OS=Parabact eroides johnsonii DSM 18315 OX=537006 GN=folE PE=3 SV=1
MSEEINEKTLLAREELAGHYKSIINLLGEEVDREGLLKTPERVAKAMQFLTKGYREDPAAVLRGAMFKEEDYKQMVIVKDIDFFSLCEHHMLPFFGKAHVAYIPKKYITGLSKIPRVVDIFARRLQIQERLTMQIKDCIQETLDPLGVMVVIEAQHMCMQMRGVEKQNSLTTTSDFTGFFQQAKTREEFMNLIKHNR

SEQ ID NO: 12187 - protein, 197 aa, Parabacteroides johnsonii; identical to SEQ ID NO: 12186
  misc_feature (1)..(197): tr|K5ZXY2|K5ZXY2_9BACT GTP cyclohydrolase 1 OS=Parabact eroides johnsonii CL02T12C29 OX=999419 GN=folE PE=3 SV= 1

SEQ ID NO: 12188 - protein, 197 aa, Parabacteroides merdae
  misc_feature (1)..(197): tr|A7AIA5|A7AIA5_9BACT GTP cyclohydrolase 1 OS=Parabact eroides merdae ATCC 43184 OX=411477 GN=folE PE=3 SV=1
MSEEVNEKTLLAREELAGHYKSIINLLGEDVDREGLLKTPERVAKAMQFLTKGYHEDPAAVLRGAMFKEEDYKQMVIVKDIDFFSLCEHHMLPFFGKAHVAYIPKKYITGLSKIPRVVDIFARRLQIQERLTMQIKDCIQETLDPLGVMVVIEAQHMCMQMRGVEKQNSLTTTSDFTGFFQQAKTREEFMNLIKHNR

SEQ ID NO: 12189 - protein, 197 aa, Parabacteroides merdae; identical to SEQ ID NO: 12188
  misc_feature (1)..(197): tr|A0A351E170|A0A351E170_9BACT GTP cyclohydrolase 1 OS= Parabacteroides merdae OX=46503 GN=folE PE=3 SV=1

SEQ ID NO: 12190 - protein, 196 aa, Parabacteroides sp.; identical to SEQ ID NO: 12181
  misc_feature (1)..(196): tr|A0A3E4P8E6|A0A3E4P8E6_9BACT GTP cyclohydrolase 1 OS= Parabacteroides sp. 20_3 OX=469591 GN=folE PE=3 SV=1

SEQ ID NO: 12191 - protein, 196 aa, Parabacteroides sp.
  misc_feature (1)..(196): tr|C7XDX8|C7XDX8_9BACT GTP cyclohydrolase 1 OS=Parabact eroides sp. D13 OX=563193 GN=folE PE=3 SV=1
MSEVNEETLRAREALAGHYKEVLGLLGEDAGREGLLKTPERVAKAMQFLTKGYHEDPEAVLRSAMFQEEDYKQMVIVKDIDFFSLCEHHMLPFFGKAHVAYIPKKYITGLSKIPRVVDIFARRLQIQERMTMQIKDCIQRTLDPLGVMVVIEAQHMCMQMRGVEKQNSLTTTSDFTGFFQQAKTREEFMNLIKHNR

SEQ ID NO: 12192 - protein, 268 aa, Paraburkholderia aromaticivorans
  misc_feature (1)..(268): tr|A0A248VV70|A0A248VV70_9BURK GTP cyclohydrolase FolE2 OS=Paraburkholderia aromaticivorans OX=2026199 GN=folE 2 PE=3 SV=1
MNQMNPAFVMPDVQSTPDTRQIPIQRVGVKAVRHPLTVRTQGGEVQPTVGTWNLDVHLPADQKGTHMSRFVALLEENKAPLEPATFRTMLAAMLEKLEAEAGRIEVSFPYFVSKTAPVSGVQSLLDYEVTLTGETRNGATRLFMQVQVPVTSLCPCSKKISQYGAHNQRSHVTINAELAGDVAVEELIRVAEEEASCELWGLLKRPDEKFVTERAYENPKFVEDLVRDVAQRLNADERIVAYVLEAENFESIHNHSAYAVIERDKRAG

SEQ ID NO: 12193 - protein, 212 aa, Paraburkholderia aromaticivorans
  misc_feature (1)..(212): tr|A0A248VS21|A0A248VS21_9BURK GTP cyclohydrolase 1 OS= Paraburkholderia aromaticivorans OX=2026199 GN=folE PE= 3 SV=1
MTSSKAKKKQPIAATERPSREEAEAAVRVLLRWAGDDPAREGLIDTPARVVRSYEEFYAGYQVDPREILARTFSEVDGYDEMIVLKDIRFESYCEHHMVPIIGRAHVAYLPQHRVVGISKLARLVDAFAKRLQIQEKMTVQIADTLNEVLQPAGVGVILEAAHQCMSTRGVHKAGVTMVTSRMLGTFRTDPSTRREFLSIVGNPGVVAVANT

SEQ ID NO: 12194 - protein, 212 aa, Paraburkholderia aspalathi
  misc_feature (1)..(212): tr|A0A1I7ES33|A0A1I7ES33_9BURK GTP cyclohydrolase 1 OS= Paraburkholderia aspalathi OX=1324617 GN=folE PE=3 SV=1
MDVHSVNDSDDFPGHHLPAIGIQRVRAFDATAFEKSVRDMLEASGLDIGATHISRTAQRVRELWQKRLLDGYDINPAEALGSGFADVRSDMVIIRGIAVHGVCPHHLLPFRGVAHVAYLPGGSLHGFGRIARMIDAISHRYTYQEWITSEIANTLIIHGHALGAACLIKAEHLCLLLGEDRRGDERVITQCYAGEFEQNIQARTEFLRAIEH

SEQ ID NO: 12195 - protein, 268 aa, Paraburkholderia aspalathi
  misc_feature (1)..(268): tr|A0A1I7D0G5|A0A1I7D0G5_9BURK GTP cyclohydrolase FolE2 OS=Paraburkholderia aspalathi OX=1324617 GN=folE2 PE=3 SV=1
MNQMNPAFVMPDVQSTPDTRQIPIQRVGVKAVRHPLTVRTQSGEAQPSVGTWNLDVHLPADQKGTHMSRFVALLEENKAPLEAATFRTMLAAMLEKLEAEAGRIEVSFPYFVNKTAPVSGVQSLLDYEVTLTGETRNGATRLFLKVLVPVTSLCPCSKKISQYGAHNQRSHVTINAELVGDVAVEELVRIAEEEASCELWGMLKRPDEKFVTERAYENPKFVEDLVRDVAQRLNADERIVAYVLEAENFESIHNHSAYAVIERDKRVA

SEQ ID NO: 12196 - protein, 238 aa, Paraburkholderia azotifigens
  misc_feature (1)..(238): tr|A0A5C6VKH6|A0A5C6VKH6_9BURK GTP cyclohydrolase 1 OS= Paraburkholderia azotifigens OX=2057004 GN=folE PE=3 SV =1
MHIPVGHRAGKHGTMARRAMRVLLELERRMTTKKTTPTDTPGRPSREEAEEAVRTLLRWAGDNPQREGLLDTPARVVRAYEEFFAGYNVEPREILARTFSEVDGYDEMIVLKDIRFESYCEHHMVPIIGRAHVAYLPEHRVVGISKLARLVDAFAKRLQIQEKMTVQIADTLNEVLQPKGVGVILEASHQCMSTRGVHKAGVEMVTSRMLGTFRSDASTRREFLSIVNSPTSVSVANT

SEQ ID NO: 12197 - protein, 268 aa, Paraburkholderia azotifigens
  misc_feature (1)..(268): tr|A0A5C6VE85|A0A5C6VE85_9BURK GTP cyclohydrolase FolE2 OS=Paraburkholderia azotifigens OX=2057004 GN=folE2 PE =3 SV=1
MNQMNPAFVMPDVQSTLDTRQIPIQRVGVKAVRHPLTVRTPDGSVQPSVGTWNLDVHLPAEVKGTHMSRFVALLEENKAPLDSSVFRAMLASMLEKLEAPAGRIEVSFPYFVNKTAPVSGVQSLLDYEVTLMADARDGATRLFLKVLVPVTSLCPCSKKISQYGAHNQRSHVTINAELIDDVAVEDLIRIAEEEASCELWGLLKRPDEKFVTERAYENPKFVEDLVRDVAQRLNADQRIIAYVLEAENFESIHNHSAYAVVERDKRSV

SEQ ID NO: 12198 - protein, 268 aa, Paraburkholderia bryophila
  misc_feature (1)..(268): tr|A0A329C6J2|A0A329C6J2_9BURK GTP cyclohydrolase FolE2 OS=Paraburkholderia bryophila OX=420952 GN=folE2 PE=3 SV=1
MNQMNPAFVMPDVQSTPDTRQIPIQRVGVKAVRHPLTVRTQGGDIQPTVGTWNLDVHLPADQKGTHMSRFVALLEENKAPLESATFRTMLAAMLEKLEAEAGRIEVSFPYFVNKTAPVSGVQSLLDYEVTLTGETRNGATRLFLKVLVPVTSLCPCSKKISQYGAHNQRSHVTINAELAGDVAVEELVRVAEEEASCELWGLLKRPDEKFVTERAYENPKFVEDLVRDVAQRLNADERIVAYVLEAENFESIHNHSAYAVIERDKRTV

SEQ ID NO: 12199 - protein, 212 aa, Paraburkholderia bryophila
  misc_feature (1)..(212): tr|A0A329CLQ2|A0A329CLQ2_9BURK GTP cyclohydrolase 1 OS= Paraburkholderia bryophila OX=420952 GN=folE PE=3 SV=1
MTSSKTEKTQPAANADRPSREEAEAAVRVLLRWAGDDPAREGLIDTPARVVRSYEEFYAGYQVDPREILARTFSEVDGYDEMIVLKDIRFESYCEHHMVPIIGRAHVAYLPQHRVVGISKLARLVDAFAKRLQIQEKMTVQIADTLNEVLQPAGVGVILEAAHQCMSTRGVHKAGVTMVTSRMLGTFRSDPSTRREFLSIVGNPGVVAVANT

SEQ ID NO: 12200 - protein, 269 aa, Paraburkholderia caballeronis
  misc_feature (1)..(269): tr|A0A1H7KXK6|A0A1H7KXK6_9BURK GTP cyclohydrolase FolE2 OS=Paraburkholderia caballeronis OX=416943 GN=folE2 PE =3 SV=1
MNQMNPAFVMPDVQSSVDTRQIPIQRVGVKAVRHPLTVRTATGDAQPTVGTWNLDVHLPADQKGTHMSRFVALLEAHRAPLDPAAFRTMLTAMLVKLESQAGRIEVSFPYFVKKVAPVSGVESLLDYEVTLTGDARDGATRLWLKVLVPVTSLCPCSKKISQYGAHNQRSHVTINAELADDLPVEDLIRIAEEEASCELWGLLKRPDEKFVTERAYENPKFVEDLVRDIAVRLNADARVAAYVLEAENFESIHNHSAYAVIERDKRVAV

SEQ ID NO: 12201 - protein, 218 aa, Paraburkholderia caballeronis
  misc_feature (1)..(218): tr|A0A1H7P2S3|A0A1H7P2S3_9BURK GTP cyclohydrolase 1 OS= Paraburkholderia caballeronis OX=416943 GN=folE PE=3 SV =1
MSDKKTADKAKKAKTQISEPAGRPSRTEAEDAVRVLLRWAGDDPTREGLIDTPARVARAFEEFFAGYQLDPREILSRTFSEVDGYDEMIVLKDIRFESYCEHHMVPIIGRAHVAYLPEHRVVGISKLARLVDAFAKRLQIQEKMTAQIADTLNDILQPKGVGVILEASHQCMSTRGVHKAGVEMVTSRMLGTFRTDPSTRREFLAIVGNQASASLSNT

SEQ ID NO: 12202 - protein, 268 aa, Paraburkholderia caffeinilytica
  misc_feature (1)..(268): tr|A0A346BBB6|A0A346BBB6_9BURK GTP cyclohydrolase FolE2 OS=Paraburkholderia caffeinilytica OX=1761016 GN=folE2 PE=3 SV=1
MNQMNPAFVMPDVQSTPDTRQIPIQRVGVKAVRHPLTVRTQGGEVQPSVGTWNLDVHLPADQKGTHMSRFVALLEENKAPLEAATFRTMLAAMLEKLEAEAGRIEVSFPYFMNKTAPVSGVQSLLDYEVTLTGETRNGATRLFLKVLVPVTSLCPCSKKISQYGAHNQRSHVTINAELVGDVAVEELVRIAEEEASCELWGLLKRPDEKFVTERAYENPKFVEDLVRDVAQRLNADERVVAYVLEAENFESIHNHSAYAVIERDKRVA

SEQ ID NO: 12203 - protein, 212 aa, Paraburkholderia caffeinilytica
  misc_feature (1)..(212): tr|A0A346B6S3|A0A346B6S3_9BURK GTP cyclohydrolase 1 OS= Paraburkholderia caffeinilytica OX=1761016 GN=folE PE=3 SV=1
MASSKAKKTKPGAAAERPSREEAEAAVRVLLRWAGDNPEREGLIDTPSRVVRSYEEFYAGYQIDPREILARTFSEVDGYDEMIVLKDIRFESYCEHHMVPIIGRAHVAYLPGHRVVGISKLARLVDAFAKRLQIQEKMTVQIADTLNDVLQPAGVGVILEAAHQCMSTRGVHKAGVTMVTSRMLGTFRTDPSTRREFLSIVGNPGVVAIPNT

SEQ ID NO: 12204 - protein, 268 aa, Paraburkholderia caledonica
  misc_feature (1)..(268): tr|A0A2Z5MKC2|A0A2Z5MKC2_9BURK GTP cyclohydrolase FolE2 OS=Paraburkholderia caledonica OX=134536 GN=folE2 PE=3 SV=1
MNQMNPAFVMPDVQSTPDTRQIPIQRVGVKAVRHPLMVRTPGGEAQPTVGTWNLDVHLPAEQKGTHMSRFVALLEENKAPLEPATFRKMLAAMLTKLEAEAGRIEVSFPYFVNKTAPVSGVQSLLDYEVTLTGDTRNGETRLFLKVLVPVTSLCPCSKKISQYGAHNQRSHVTINAELAGEVAVEDLIRIAEEEASCELWGLLKRPDEKFVTERAYENPKFVEDLVRDVAQRLNADERIVAYVLEAENFESIHNHSAYAVIERDKRLV

SEQ ID NO: 12205 - protein, 212 aa, Paraburkholderia caledonica
  misc_feature (1)..(212): tr|A0A2Z5MK57|A0A2Z5MK57_9BURK GTP cyclohydrolase 1 OS= Paraburkholderia caledonica OX=134536 GN=folE PE=3 SV=1
MTSSKTEQTTPAATNGRPSREEAEAAVRVLLRWAGDDPQREGLLDTPARVVRSYEEFYAGYQVDPREILARTFSEVDGYDEMIVLKDIRFESYCEHHMVPIIGRAHVAYLPQHRVVGISKLARLVDAFAKRLQIQEKMTVQIADTLNDVLQPAGVGVILEAAHQCMSTRGVHKAGVTMVTSRMLGTFRTDPSTRREFLSIVGNPGAVAVPNT

SEQ ID NO: 12206 - protein, 209 aa, Paraburkholderia caribensis
  misc_feature (1)..(209): tr|A0A0P0RGE4|A0A0P0RGE4_9BURK GTP cyclohydrolase 1 OS= Paraburkholderia caribensis MBA4 OX=1323664 GN=folE PE= 3 SV=1
MNTKNTTSADAPGRPSRDEAEEAVRVLLRWAGDNPQREGLLDTPARVVRAYEEFFAGYEVDPREILARTFSEVDGYDEMIVLKDIRFESYCEHHMVPIIGRAHVAYLPEHRVVGISKLARLVDAFAKRLQIQEKMTVQIADTLNEVLQPKGVGVILEASHQCMSTRGVHKAGVEMVTSRMLGTFRTDPSTRREFLSIVHGPTSVSVANT

SEQ ID NO: 12207 - protein, 265 aa, Paraburkholderia caribensis
  misc_feature (1)..(265): tr|A0A142Z4Y3|A0A142Z4Y3_9BURK GTP cyclohydrolase FolE2 OS=Paraburkholderia caribensis OX=75105 GN=folE2 PE=3 SV=1
MNQMNPAFVMPDVQSTVDTRQIPIQRVGVKAVRHPLTVRTPDGSVQPTIGTWNLDVHLPAEVKGTHMSRFVALLEENKTPLDSAAFRAMLASMLEKLEAPAGRIEVSFPYFVNKTAPVSGVQSLLDYEVTLTGDSRDGATRLFLKVLVPVTSLCPCSKKISQYGAHNQRSHVTIDAELVDDVPVEDLIRIAEEEASCELWGLLKRPDEKFVTERAYENPKFVEDLVRDVAQRLNADKRIVAYVLEAENFESIHNHSAYAVIEKRA

SEQ ID NO: 12208 - protein, 268 aa, Paraburkholderia diazotrophica
  misc_feature (1)..(268): tr|A0A1H7DCD1|A0A1H7DCD1_9BURK GTP cyclohydrolase FolE2 OS=Paraburkholderia diazotrophica OX=667676 GN=folE2 P E=3 SV=1
MNQMNPAFVMPDVQSTVDTRQIPIQRVGVKAVRHPLTVRTPDGNVQPTVGTWNLDVHLPAEVKGTHMSRFVALLEENKAPLDASAFRAMLASMLDKLEAPAGRIQVSFPYFVNKTAPVSGVQSLLDYEVTLTADSRNGATRLFLKVLVPVTSLCPCSKKISEYGAHNQRSHVTIDAELVDDMPVEDLIRIAEDEASCELWGLLKRPDEKFVTERAYENPKFVEDLVRDVATRLNEDRRIVAYVLEAENFESIHNHSAYAVIENDKRKA

SEQ ID NO: 12209 - protein, 211 aa, Paraburkholderia diazotrophica
  misc_feature (1)..(211): tr|A0A1H7CK82|A0A1H7CK82_9BURK GTP cyclohydrolase 1 OS= Paraburkholderia diazotrophica OX=667676 GN=folE PE=3 S V=1
MNKRDTEIGAEEASVRPTRNQAEEAVRTLIRWAGDDPEREGLIQTPARVARAYREFFSGYESDPMQILATTFSEVDGYDEMVVLKDIRFESYCEHHMVPIIGRAHVAYLPEHRVVGISKLARLVDVYAKRLQIQEKMTVQIADALNTVLQPKGVAVILEAAHQCMSTRGVHKPGASLVTSRMLGAFRDDPSTRREFLSIVGHSTIMPLPNS

SEQ ID NO: 12210 - protein, 268 aa, Paraburkholderia dipogonis
  misc_feature (1)..(268): tr|A0A4Y8MS54|A0A4Y8MS54_9BURK GTP cyclohydrolase FolE2 OS=Paraburkholderia dipogonis OX=1211383 GN=folE2 PE=3 SV=1
MNQMNPAFVMPDVQSTPDTRQIPIQRVGVKAVRHPLTVRTQSGEVQPTVGTWNLDVHLPADQKGTHMSRFVALLEENKAPLEPATFRIMLAAMLEKLEAEAGRIEVSFPYFVNKTAPVSGVQSLLDYEVTLTGETRNGATRLFLQVLVPVTSLCPCSKKISQYGAHNQRSHVTINAELAGDVAVEELIRIAEEEASCELWGLLKRPDEKFVTERAYENPKFVEDLVRDVAQRLNADERIVAYVLEAENFESIHNHSAYAVIERDKRVA

SEQ ID NO: 12211 - protein, 212 aa, Paraburkholderia dipogonis
  misc_feature (1)..(212): tr|A0A4Y8MQ01|A0A4Y8MQ01_9BURK GTP cyclohydrolase 1 OS= Paraburkholderia dipogonis OX=1211383 GN=folE PE=3 SV=1
MTSSKAKKTKSITATERPSREEAEAAVRVLLRWAGDDPAREGLIDTPARVVRSYEEFYAGYQVDPREILARTFSEVDGYDEMIVLKDIRFESYCEHHMVPIIGRAHVAYLPEHRVVGISKLARLVDAFAKRLQIQEKMTVQIADTLNEVLQPAGVGVILEAAHQCMSTRGVHKAGVTMVTSRMLGTFRTDPSTRREFLSIVGNPGVVAVANT

SEQ ID NO: 12212 - protein, 268 aa, Paraburkholderia eburnea
  misc_feature (1)..(268): tr|A0A2S4MJ26|A0A2S4MJ26_9BURK GTP cyclohydrolase FolE2 OS=Paraburkholderia eburnea OX=1189126 GN=folE2 PE=3 S V=1
MNQMNPAFVMPDVQSSVDTRQIPIQRVGVKGVRHPLTVKTLAGDVQPSVGTWNLDVHLPADQKGTHMSRFVALLEENKTPLEPATFRAMLAAMLLKLESQAGRIEVSFPYFVKKVAPVSGVESLLDYEVTLTGDVRDGVTRLFLKVLVPVTSLCPCSKKISQYGAHNQRSHVTIDVEFDGDLPVEELILIAEQEASCELWGLLKRPDEKFVTERAYENPKFVEDLVRDVAVRLNADARVIAYTLEAENFESIHNHSAYAVIEHDKRVA

SEQ ID NO: 12213 - protein, 231 aa, Paraburkholderia eburnea
  misc_feature (1)..(231): tr|A0A2S4MBH2|A0A2S4MBH2_9BURK GTP cyclohydrolase 1 OS= Paraburkholderia eburnea OX=1189126 GN=folE PE=3 SV=1
MSDEKNAEKTKKRKSKASVQANSGIDTATTPASVARPSREEAEDAVRVLLRWAGDDPSREGLLDTPGRVVRAYEEFFAGYEHDPREILSRTFSEVDGYDEMIVLKDIRFESYCEHHMVPIIGRAHVAYLPEHRVVGISKLARLVDAFAKRLQIQEKMTAQIADTLNEVLQPKGVGVILEAAHQCMSTRGVHKAGVTMVTSRMLGTFRSDPSTRREFLAIVGSPGVMSVPNT

SEQ ID NO: 12214 - protein, 269 aa, Paraburkholderia endofungorum
  misc_feature (1)..(269): tr|A0A2P5K6P1|A0A2P5K6P1_9BURK GTP cyclohydrolase FolE2 OS=Paraburkholderia endofungorum OX=417203 GN=folE2 PE =3 SV=1
MNQMNPAFLMPDVQSTPDTRQIPIQRVGIRAVRHPLTVRTAQGDVQPTVGSWNLNVHLPAEQKGTHMSRFIALLDQAQTPLDTAHFRAMLATMLEKLEATAGRIEVTFPYFIRKTAPVSGVQSLLDYEVTLSVDARDGATRLFTKVLVPVTSLCPCSKKISQYGAHNQRSHVTIAAELADDVPVEDLVRMAEEEASCELWGLLKRPDEKFVTERAYDNPKFVEDLVRDVAQRLNADPRIVAYVLEAENFESIHNHSAYALIEHDKRLSG

SEQ ID NO: 12215 - protein, 268 aa, Paraburkholderia fungorum
  misc_feature (1)..(268): tr|A0A2N8Q750|A0A2N8Q750_9BURK GTP cyclohydrolase FolE2 OS=Paraburkholderia fungorum OX=134537 GN=folE2 PE=3 S V=1
MNQMNPAFVMPDVQSTPDTRQIPIQRVGVKAVRHPLTVRTQGGEVQPSVGTWNLDVHLPADQKGTHMSRFVALLEENKAPLEAATFRTMLAAMLERLEAEAGRIEVSFPYFVNKTAPVSGVQSLLDYEVTLTGETRNGATRLFLKVLVPVTSLCPCSKKISQYGAHNQRSHVTINAELAGDVAVEELVRIAEEEASCELWGLLKRPDEKFVTERAYENPKFVEDLVRDVAQRLNADERIVAYVLEAENFESIHNHSAYAVIERDKRVA

SEQ ID NO: 12216 - protein, 211 aa, Paraburkholderia fungorum
  misc_feature (1)..(211): tr|A0A1H1IND4|A0A1H1IND4_9BURK GTP cyclohydrolase 1 OS= Paraburkholderia fungorum OX=134537 GN=folE PE=3 SV=1
MTSSKAKKKTQPAAERPSRDEAEAAVRVLLRWAGDDPAREGLIDTPARVVRSYEEFYAGYQVDPREILARTFSEVDGYDEMIVLKDIRFESYCEHHMVPIIGRAHVAYLPQHRVVGISKLARLVDAFAKRLQIQEKMTVQIADTLNDVLQPAGVGVILEAAHQCMSTRGVHKAGVTMVTSRMLGTFRTDPSTRREFLSIVGNPGVVAVANT

SEQ ID NO: 12217 - protein, 212 aa, Paraburkholderia ginsengiterrae
  misc_feature (1)..(212): tr|A0A1A9N5R3|A0A1A9N5R3_9BURK GTP cyclohydrolase 1 OS= Paraburkholderia ginsengiterrae OX=1462993 GN=folE PE=3 SV=1
MTSSKAKKTKPVAAAERPSREEAEAAVRVLLRWAGDDPAREGLLDTPARVVRSYEEFYAGYQVDPREILARTFSEVDGYDEMIVLKDIRFESYCEHHMVPIIGRAHVAYLPEHRVVGISKLARLVDAFAKRLQIQEKMTVQIADTLNEVLQPAGVGVILEAAHQCMSTRGVHKAGVTMVTSRMLGTFRTDPSTRREFLSIVGNPGVVSVANT

SEQ ID NO: 12218 - protein, 268 aa, Paraburkholderia ginsengiterrae
  misc_feature (1)..(268): tr|A0A1A9NH70|A0A1A9NH70_9BURK GTP cyclohydrolase FolE2 OS=Paraburkholderia ginsengiterrae OX=1462993 GN=folE2 PE=3 SV=1
MNQMNPAFVMPDVQSTPDTRQIPIQRVGVKAVRHPLTVRTQGGEVQPSVGTWNLDVHLPAEQKGTHMSRFVALLEENKAPLEPATFRTMLAAMLEKLEAEAGRIEVSFPYFVNKTAPVSGVQSLLDYEVTLTGEIRNGATRLFLKVLVPVTSLCPCSKKISQYGAHNQRSHVTINAELAGEIAVEELIRIAEEEASCELWGMLKRPDEKFVTERAYENPKFVEDLVRDVAQRLNADERVVAYVLEAENFESIHNHSAYAVIERDKRVA

SEQ ID NO: 12219 - protein, 268 aa, Paraburkholderia graminis
  misc_feature (1)..(268): tr|B1FVF1|B1FVF1_PARG4 GTP cyclohydrolase FolE2 OS=Para burkholderia graminis (strain ATCC 700544 / DSM 17151 / LMG 18924 / NCIMB 13744 / C4D1M) OX=396598 GN=folE2 PE =3 SV=1
MNQMNPAFVMPDVQSTPDTRQIPIQRVGVKAVRHPLTVRTQSGDAQPTVGTWNLDVHLPADQKGTHMSRFVALLEENKAPLEPATFRTMLAAMLQKLEAEAGRIEVSFPYFVNKTAPVSGVQSLLDYEVTLTGDTRNGETRLFLKVLVPVTSLCPCSKKISQYGAHNQRSHVTINAELAGEVAVEDLIRIAEEEASCELWGLLKRPDEKFVTERAYENPKFVEDLVRDVAQRLNADERIVAYVLEAENFESIHNHSAYAVIERAKRVV

SEQ ID NO: 12220 - protein, 216 aa, Paraburkholderia graminis
  misc_feature (1)..(216): tr|B1G118|B1G118_PARG4 GTP cyclohydrolase 1 OS=Paraburk holderia graminis (strain ATCC 700544 / DSM 17151 / LMG 18924 / NCIMB 13744 / C4D1M) OX=396598 GN=folE PE=3 SV =1
MTSSKTEQTTATNATEAANGRPSREEAEAAVRVLLRWAGDNPEREGLIDTPARVVRSYEEFYAGYQIDPREILARTFSEVDGYDEMIVLKDIRFESYCEHHMVPIIGRAHVAYLPGHRVVGISKLARLVDAFAKRLQIQEKMTVQIADTLNDVLQPEGVGVILEASHQCMSTRGVHKAGVTMVTSRMLGTFRTDPSTRREFLSIVGNPGAVAVHNT

SEQ ID NO: 12221 - protein, 265 aa, Paraburkholderia hospita
  misc_feature (1)..(265): tr|A0A244DVZ8|A0A244DVZ8_9BURK GTP cyclohydrolase FolE2 OS=Paraburkholderia hospita OX=169430 GN=folE2 PE=3 SV =1
MNQMNPAFVMPDVQSTVDTRQIPIQRVGVKAVRHPLTVRTPDGSVQPTIGTWNLDVHLPAEVKGTHMSRFVALLEENKTPLDSAAFRAMLAAMLEKLEAPAGRIEVSFPYFVNKTAPVSGVQSLLDYEVTLTADSRDGATRLFLKVLVPVTSLCPCSKKISQYGAHNQRSHVTINAELIEDVPVEDLIRIAEEEASCELWGLLKRPDEKFVTERAYENPKFVEDLVRDVAQRLNADKRIVAYVLEAENFESIHNHSAYAVIEKRA

SEQ ID NO: 12222 - protein, 209 aa, Paraburkholderia hospita
  misc_feature (1)..(209): tr|A0A244DER2|A0A244DER2_9BURK GTP cyclohydrolase 1 OS= Paraburkholderia hospita OX=169430 GN=folE PE=3 SV=1
MNTKNTTSADAPGRPSRDEAEEAVRVLLRWAGDNPQREGLLDTPARVVRAYEEFFAGYDVDPREILARTFSEVDGYDEMIVLKDIRFESYCEHHMVPIIGRAHVAYLPEHRVVGISKLARLVDAFAKRLQIQEKMTVQIADTLNEVLQPKGVGVILEASHQCMSTRGVHKAGVEMVTSRMLGTFRTDPSTRREFLSIVHGPTSVSVANT

SEQ ID NO: 12223 - protein, 268 aa, Paraburkholderia insulsa
  misc_feature (1)..(268): tr|A0A2T1B2Z0|A0A2T1B2Z0_9BURK GTP cyclohydrolase FolE2 OS=Paraburkholderia insulsa OX=1441714 GN=folE2 PE=3 S V=1
MNQMNPAFVMPDVQSTPDTRQIPIQRVGVKAVRHPLTVRTQGGEVQPSVGTWNLDVHLPADQKGTHMSRFVALLEENKAPLEAATFRTMLAAMLERLEAEAGRIEVSFPYFVNKTAPVSGVQSLLDYEVTLTGETRNGATRLFLKVLVPVTSLCPCSKKISQYGAHNQRSHVTINAEVAGDVAVEELVRIAEEEASCELWGLLKRPDEKFVTERAYENPKFVEDLVRDVAQRLNADERIVAYVLEAENFESIHNHSAYAVIERDKRVA

SEQ ID NO: 12224 - protein, 268 aa, Paraburkholderia megapolitana
  misc_feature (1)..(268): tr|A0A1I3LU15|A0A1I3LU15_9BURK GTP cyclohydrolase FolE2 OS=Paraburkholderia megapolitana OX=420953 GN=folE2 PE =3 SV=1
MNQMNPAFVMPDVQSTLDTRQIPIQRVGVKAVRHPVTVRTQTGEAQPTVGTWNLDVHLPADQKGTHMSRFVALLEENRVPLDTTAFRTMLASMLEKLEAEAGRIEVSFPYFVSKVAPVSGVQSLLDYEVTLTGETRHGVTRVFLKVLVPVTSLCPCSKKISQYGAHNQRSHVTIDAELAGDVAVEELIRIAEEEASCELWGLLKRPDEKFVTERAYENPKFVEDLVRDVAQRLNADARIVAYVLEAENFESIHNHSAYALIEHDKRVR

SEQ ID NO: 12225 - protein, 220 aa, Paraburkholderia megapolitana
  misc_feature (1)..(220): tr|A0A1I3PY36|A0A1I3PY36_9BURK GTP cyclohydrolase 1 OS= Paraburkholderia megapolitana OX=420953 GN=folE PE=3 SV =1
MNSKAGKVRAIRTTAKAKPAETPVRPTREEAEAAVRTLLRWAGDDPQREGLLDTPARVVRSYEEFFAGYSVDPRDVLARTFSEVDGYDEMIVLKDIRFESYCEHHMVPIIGRAHVAYLPQHRVVGISKLARLVDAFAKRLQIQEKMTAQIADTLNEVLQPRGVGVILEASHQCMSTRGVHKAGVAMVTSRMLGAFRSDASTRREFLAIVNGPPSVGIANT

SEQ ID NO: 12226 - protein, 212 aa, Paraburkholderia monticola
  misc_feature (1)..(212): tr|A0A149PJ57|A0A149PJ57_9BURK GTP cyclohydrolase 1 OS= Paraburkholderia monticola OX=1399968 GN=folE PE=3 SV=1
MSSSKAKKTKPAAAAERPSREEAEAAVRVMLRWAGDDPSREGLIDTPARVVRAYEEFFAGYQVDPRDILARTFSEVDGYDEMIVLKDIRFESYCEHHMVPIIGRAHVAYLPNHRVVGISKLARLVDAFAKRLQIQEKMTVQIADTLNDVLQPAGVGVILEAAHQCMSTRGVHKAGVTMVTSRMLGTFRTDPSTRREFLAIVGNPGVVAVPNT

SEQ ID NO: 12227 - protein, 268 aa, Paraburkholderia monticola
  misc_feature (1)..(268): tr|A0A149PQ94|A0A149PQ94_9BURK GTP cyclohydrolase FolE2 OS=Paraburkholderia monticola OX=1399968 GN=folE2 PE=3 SV=1
MNQMNPAFVMPDVQSTPDTRQIPIQRVGVKGVRHPLTVRTQGGEVQPTVGTWNLDVHLPAEQKGTHMSRFVALLEENKAPLEPAAFRTMLAAMLEKLEAEAGRIEVSFPYFVNKTAPVSGVQSLLDYEVTLAGETRNGATRLFLKVLVPVTSLCPCSKKISQYGAHNQRSHVTIDAELSGDVAVEELILIAEEEASCELWGLLKRPDEKFVTERAYENPKFVEDLVRDVAQRLNADERVVAYVLEAENFESIHNHSAYAVIERDKRIA

SEQ ID NO: 12228 - protein, 211 aa, Paraburkholderia phenazinium
  misc_feature (1)..(211): tr|A0A1N6JAL4|A0A1N6JAL4_9BURK GTP cyclohydrolase 1 OS= Paraburkholderia phenazinium OX=60549 GN=folE PE=3 SV=1
MSSKAKKTKQSEALGRPTRDEAEAAVRVLLRWAGDDPQREGLLDTPARVVRSYEEFFAGYSVDPREILARTFSEVDGYDEMIVLKDIRFESYCEHHMVPIIGRAHVAYLPGHRVVGISKLARLVDAFAKRLQIQEKMTVQIADTLNEVLQPEGVGVILEASHQCMSTRGVHKAGVTMVTSRMLGTFRTDPSTRREFLSIVGNPGVVAVANT

SEQ ID NO: 12229 - protein, 213 aa, Paraburkholderia phenazinium
  misc_feature (1)..(213): tr|A0A4R7QI37|A0A4R7QI37_9BURK GTP cyclohydrolase 1 OS= Paraburkholderia phenazinium OX=60549 GN=folE PE=3 SV=1
MTSKSKAKKTKQSEALGRPTREEAEDAVRVLLRWAGDDPQREGLLDTPARVVRSYEEFFAGYSVDPRELLARTFSEVDGYDEMIVLKDIRFESYCEHHMVPIIGRAHVAYLPGRRVVGISKLARLVDAFAKRLQIQEKMTVQIADTLNEVLQPEGVGVILEAAHQCMSTRGVHKAGVTMVTSRMLGTFRTDPSTRREFLSIVGHPGIVAVSNT

SEQ ID NO: 12230 - protein, 268 aa, Paraburkholderia phenoliruptrix
  misc_feature (1)..(268): tr|K0DS56|K0DS56_9BURK GTP cyclohydrolase FolE2 OS=Para burkholderia phenoliruptrix BR3459a OX=1229205 GN=folE2 PE=3 SV=1
MNQMNPAFVMPDVQSTPDTRQIPIQRVGVKAVRHPLTVRTSSGDVQPTVGTWNLDVHLPADQKGTHMSRFVALLEENKAPLEPATFRAMLAAMLEKLEAEAGRIEVSFPYFVNKTAPVSGVQSLLDYEVTLSGETRNGATRLFLKVMVPVTSLCPCSKKISQYGAHNQRSHVTINAELAGEIAVEDLIRIAEEEASCELWGLLKRPDEKFVTERAYENPKFVEDLVRDVAQRLNADERIVAYVLEAENFESIHNHSAYAVIERDKRVV

SEQ ID NO: 12231 - protein, 212 aa, Paraburkholderia phenoliruptrix
  misc_feature (1)..(212): tr|K0DQD5|K0DQD5_9BURK GTP cyclohydrolase 1 OS=Paraburk holderia phenoliruptrix BR3459a OX=1229205 GN=folE PE=3 SV=1
MTSSKRENTPPAAADGRPSREEAEAAVRVLLRWAGDNPEREGLVDTPARVVRAYEEFFAGYQVDPRDILARTFSEVDGYDEMIVLKDIRFESYCEHHMVPIIGRAHVAYLPGHRVVGISKLARLVDAFAKRLQIQEKMTVQIADTLNEVLQPAGVGVILEAAHQCMSTRGVHKAGVTMVTSRMLGTFRTDPSTRREFLSIVGNPGAVAVPNT

SEQ ID NO: 12232 - protein, 268 aa, Paraburkholderia phymatum
  misc_feature (1)..(268): sp|B2JP67|GCH4_PARP8 GTP cyclohydrolase FolE2 OS=Parabu rkholderia phymatum (strain DSM 17167 / CIP 108236 / LM G 21445 / STM815) OX=391038 GN=folE2 PE=3 SV=1
MNQMNPAFVMPDVQSTVDTRQIPIQRVGVKAVRHPLTVRTPDGSAQPTVGTWNLDVHLPAEVKGTHMSRFVALLEENKAPLDSSAFRALLTSMLEKLEAPAGRIEVSFPYFVNKTAPVSGVQSLLDYEVSLMGDSRDGATRLFLKVLVPVTSLCPCSKKISQYGAHNQRSHVTINAELIDDVPVEDLIRIAEEEASCELWGLLKRPDEKFVTERAYENPKFVEDLVRDVAQRLNDDHRIVAYVLEAENFESIHNHSAYAVIESDKRLR

SEQ ID NO: 12233 - protein, 209 aa, Paraburkholderia phymatum
  misc_feature (1)..(209): tr|B2JQM7|B2JQM7_PARP8 GTP cyclohydrolase 1 OS=Paraburk holderia phymatum (strain DSM 17167 / CIP 108236 / LMG 21445 / STM815) OX=391038 GN=folE PE=3 SV=1
MTTKKTIPTDAPGRPSREEAEEAVRTLLRWAGDNPQREGLLDTPARVVRAYEEFFAGYNVEPRDILARTFSEVDGYDEMIVLKDIRFESYCEHHMVPIIGRAHVAYLPEHRVVGISKLARLVDAFAKRLQIQEKMTVQIADTLNEVLQPKGVGVILEASHQCMSTRGVHKAGVEMVTSRMLGTFRSDPSTRREFLSIVNSPTSVSVANT

SEQ ID NO: 12234 - protein, 212 aa, Paraburkholderia phytofirmans
  misc_feature (1)..(212): tr|B2TF16|B2TF16_PARPJ GTP cyclohydrolase 1 OS=Paraburk holderia phytofirmans (strain DSM 17436 / LMG 22146 / P sJN) OX=398527 GN=folE PE=3 SV=1
MTSSKAKKTKPITATERPSREEAEAAVRVLLRWAGDDPAREGLIDTPARVVRSYEEFYAGYQVDPREILARTFSEVDGYDEMIVLKDIRFESYCEHHMVPIIGRAHVAYLPQHRVVGISKLARLVDAFAKRLQIQEKMTVQIADTLNEVLQPAGVGVILEAAHQCMSTRGVHKAGVTMVTSRMLGTFRTDPSTRREFLSIVGNPGVVAVANT

SEQ ID NO: 12235 - protein, 268 aa, Paraburkholderia phytofirmans
  misc_feature (1)..(268): tr|B2T9H2|B2T9H2_PARPJ GTP cyclohydrolase FolE2 OS=Para burkholderia phytofirmans (strain DSM 17436 / LMG 22146 / PsJN) OX=398527 GN=folE2 PE=3 SV=1
MNQMNPAFVMPDVQSTPDTRQIPIQRVGVKAVRHPLTVRTQSGEVQPTVGTWNLDVHLPADQKGTHMSRFVALLEENKAPLEPATFRTMLAAMLEKLEAEAGRIEVSFPYFVNKTAPVSGVQSLLDYEVTLTGETRNGATRLFLQVLVPVTSLCPCSKKISQYGAHNQRSHVTINTELAGDVAVEELIRIAEEEASCELWGLLKRPDEKFVTERAYENPKFVEDLVRDVAQRLNADERVVAYVLEAENFESIHNHSAYAVIERDKRAA

SEQ ID NO: 12236 - protein, 268 aa, Paraburkholderia piptadeniae
  misc_feature (1)..(268): tr|A0A1N7S6E7|A0A1N7S6E7_9BURK GTP cyclohydrolase FolE2 OS=Paraburkholderia piptadeniae OX=1701573 GN=folE PE= 3 SV=1
MNQMNPAFVMPDVQSTLDTRQIPIQRVGVKAVRHPLTVRTPDGNVQPTIGTWNLDVHLPADVKGTHMSRFVALLEENNAPLDASAFRAMLASMLEKLEAPAGRIQVSFPYFVNKTAPVSGVQSLLDYEVTLTADARNGATRLFLKVMVPVTSLCPCSKKISEYGAHNQRSHVTIDAELVDDMPVEDLIRIAEDEASCELWGLLKRPDEKFVTERAYENPKFVEDLVRDVATRLNADRRIIAYVLEAENFESIHNHSAYAVIENDKRTS

SEQ ID NO: 12237 - protein, 209 aa, Paraburkholderia piptadeniae
  misc_feature (1)..(209): tr|A0A1N7SMR3|A0A1N7SMR3_9BURK GTP cyclohydrolase 1 OS= Paraburkholderia piptadeniae OX=1701573 GN=folE PE=3 SV =1
MTTKTNTPADTPNRPSRDEAEEAVRVLLRWAGDDPRREGLIDTPSRVVRAYEEFFAGYDVEPRDILARTFSEVDGYDEMIVLKDIRFESYCEHHMVPIIGRAHVAYLPEHRVVGISKLARLVDAFAKRLQIQEKMTVQIADTLNEVLQPKGVGVILEASHQCMSTRGVHKAGVEMVTSRMLGTFRSDPSTRREFLSIVNSPTSMSVANT

SEQ ID NO: 12238 - protein, 269 aa, Paraburkholderia rhizosphaerae
  misc_feature (1)..(269): tr|A0A4R8LZ38|A0A4R8LZ38_9BURK GTP cyclohydrolase FolE2 OS=Paraburkholderia rhizosphaerae OX=480658 GN=folE2 P E=3 SV=1
MNQMNPAFVMPDVQSTIDTRQIPIQRVGVKAVRYPLTVRTQGRADQPTIGTWNLDVHLPADQKGTHMSRFVALLEEQTGPLDASTLRTMLAAMLEKLEAHAGRIEVSFPYFVNKTAPVSGVQSLLDYEVTLAGELRDGATRVFLKVLVPVTSLCPCSKKISQYGAHNQRSHVTINAELAGDIAIEDLIRIAEEEASCELWGLLKRPDEKFVTERAYENPKFVEDLVRDVAQRLNADERIAAYVLEAENFESIHNHSAYAVIENDKRAAR

SEQ ID NO: 12239 - protein, 218 aa, Paraburkholderia rhizosphaerae
  misc_feature (1)..(218): tr|A0A4R8LXA1|A0A4R8LXA1_9BURK GTP cyclohydrolase 1 OS= Paraburkholderia rhizosphaerae OX=480658 GN=BX592_10518 6 PE=3 SV=1
MSYPGHQYGRNDAPCVPSAGGIARVRPFDAAAFETAVTAMLTAAGVDVESEHLRLSAQCVRELWQQRLLDGYDVDSADALGNGFADARRDVVIMRGITVHGMCPHHLLPFRGVAHIAYLPGGRLYGFGGLTRLVDAVCHRFVYQEWATDAIANALVAHGHARGAACVIEAEQLCQLIGEVRRGDERVVTQSFAGEFSKNSAARAEFLRVIGTSGTSGA

SEQ ID NO: 12240 - protein, 281 aa, Paraburkholderia rhizoxinica
  misc_feature (1)..(281): tr|E5APH1|E5APH1_PARRH GTP cyclohydrolase FolE2 OS=Para burkholderia rhizoxinica (strain DSM 19002 / CIP 109453 / HKI 454) OX=882378 GN=folE2 PE=3 SV=1
MNRGVRRCQGMPMNQMNPAFVMPDVQSTPDTRQIPIQRVGIRAVRHPLTVRTAQGDAQPTVGSWNLNVLLPAEQKGTHMSRFIALLDQAQTPLDIAHFRAMLATMLEKLEATAGRIEVTFPYFIRKTAPVSGVQSLLDYEVTLSADACDGTTRLFTKVLVPVTSLCPCSKKISQYGAHNQRSHVTISAELVDDVPVEDLVRMAEEEASCELWGLLKRPDEKFVTERAYDNPKFVEDLVRDVAQRLNADPRIVAYVLEAENFESIHNHSAYALIEHDKRCSD

SEQ ID NO: 12241 - protein, 211 aa, Paraburkholderia rhynchosiae
  misc_feature (1)..(211): tr|A0A2N7WAB9|A0A2N7WAB9_9BURK GTP cyclohydrolase 1 OS= Paraburkholderia rhynchosiae OX=487049 GN=folE PE=3 SV= 1
MTSKTEQTTPADTTGRPSREEAEAAVRVLLRWAGDDPQREGLMDTPARVVRSYEEFFAGYQVDPREILARTFSEVDGYDEMIVLKDIRFESYCEHHMVPIIGRAHVAYLPGHRVVGISKLARLVDAFAKRLQIQEKMTVQIADTLNDVLQPAGVGVILEAAHQCMSTRGVHKAGVTMVTSRMLGTFRTDPSTRREFLSIVGNPGAVAVSNT

SEQ ID NO: 12242 - protein, 268 aa, Paraburkholderia rhynchosiae
  misc_feature (1)..(268): tr|A0A2N7WAI1|A0A2N7WAI1_9BURK GTP cyclohydrolase FolE2 OS=Paraburkholderia rhynchosiae OX=487049 GN=folE2 PE= 3 SV=1
MNQMNPAFVMPDVQSTPDTRQIPIQRVGVKAVRHPLTVRTQSGDAQPTIGTWNLDVHLPADQKGTHMSRFVALLEENKAPLEPATFRTMLAAMLDKLEAEAGRIEVSFPYFVNKTAPVSGVQSLLDYEVTLTGETRNGAARLFVKVLVPVTSLCPCSKKISQYGAHNQRSHVTINAELAGDVAVEELICIAEEEASCELWGLLKRPDEKFVTERAYENPKFVEDLVRDVAQRLNADERIVAYLLEAENFESIHNHSAYAVIERDKRVV

SEQ ID NO: 12243 - protein, 268 aa, Paraburkholderia ribeironis
  misc_feature (1)..(268): tr|A0A1N7SH32|A0A1N7SH32_9BURK GTP cyclohydrolase FolE2 OS=Paraburkholderia ribeironis OX=1247936 GN=folE2 PE= 3 SV=1
MNQMNPAFMMPDVQSTPDSRQIPIQRVGVRGVRHPLTVRTQGGDVQPTVGTWNLDVHLPADQKGTHMSRFVALLEENKAPLEPVTFRTLLAAMLEKLEAEAGRIEVSFPYFVSKIAPVSGVQSLLDYEVTLTGDARHGATRLFLKVLVPVTSLCPCSKEISQYGAHNQRSHVTINAELAGDVAVEELVRIAEEQASCELWGLLKRPDEKFVTERAYENPKFVEDLVRDVAQRLNADERIVAYVLEAENFESIHNHSAYAVIERDKRVG

SEQ ID NO: 12244 - protein, 212 aa, Paraburkholderia ribeironis
  misc_feature (1)..(212): tr|A0A1N7SCL2|A0A1N7SCL2_9BURK GTP cyclohydrolase 1 OS= Paraburkholderia ribeironis OX=1247936 GN=folE PE=3 SV= 1
MTSSKAKKTKPAAAAQRPSRDEAEAAVRVLLRWAGDDPQREGLLDTPGRVVRSYEEFYAGYQVDPREILARTFSEVDGYDEMIVLKDIRFESYCEHHMVPIIGRAHVAYLPAHRVVGISKLARLVDAFAKRLQIQEKMTVQIADTLNDVLQPVGVGVILEAAHQCMSTRGVHKTGVTMVTSRMLGTFRSDPSTRREFLAIVGNPGVVSVANT

SEQ ID NO: 12245 - protein, 216 aa, Paraburkholderia sacchari
  misc_feature (1)..(216): tr|A0A0A6QB24|A0A0A6QB24_9BURK GTP cyclohydrolase 1 OS= Paraburkholderia sacchari OX=159450 GN=folE PE=3 SV=1
MSDAKKTEENTPKEPKTGAGRPSREQAEDAVRVLLRWAGDDPAREGLIDTPARVVRAYEEFFAGYDHDPREILSRTFSEVDGYDEMIVLKDIRFESYCEHHMVPIIGRAHVAYLPEHRVVGISKLARLVDAFAKRLQIQEKMTAQIADTLNEVLQPKGVGVILEAAHQCMSTRGVHKAGVTMVTSRMLGTFRSDPSTRREFLAIVGNPGVMSVPNT

SEQ ID NO: 12246 - protein, 266 aa, Paraburkholderia sacchari
  misc_feature (1)..(266): tr|A0A0A6Q7J6|A0A0A6Q7J6_9BURK GTP cyclohydrolase FolE2 OS=Paraburkholderia sacchari OX=159450 GN=folE2 PE=3 S V=1
MNQMNPAFVMPDVQSSVDTRQIPIQRVGVKGVRHPLTVKTGAGDVQPSVGTWNLDVHLPADQKGTHMSRFVALLEENKAPLEAATFRAMLAAMVEKLESQAGRIEVSFPYFVKKVAPVSGVESLLDYEVTLAGEVRNGETRLFLKVLVPVTSLCPCSKKISQYGAHNQRSHVTIDAELAGDLPVEDLIRIAEEEASCELWGLLKRPDEKFVTERAYENPKFVEDLVRDVAVRLNADARVMAYTLEAENFESIHNHSAYAVIEHDKR

SEQ ID NO: 12247 - protein, 269 aa, Paraburkholderia sartisoli
  misc_feature (1)..(269): tr|A0A1H4HEK8|A0A1H4HEK8_9BURK GTP cyclohydrolase FolE2 OS=Paraburkholderia sartisoli OX=83784 GN=folE2 PE=3 S V=1
MNQMNPAFVMPDVQSTVDTRQIAIQRVGVKAVRHPLTVRTPRGDAQPTIGTWSLDVHLPAEVKGTHMSRFVALLEESRAPLDTAAFRAMLATMLEKLEAEAGRIEVSFPYFVNKTAPVSGVESLLDYDVTLTGDTRNGMTRLFLKVLVPVTSLCPCSKKISQYGAHNQRSHVTINVELADDVPVEDLIRIAEEEASCELWGLLKRPDEKFVTERAYENPKFVEDLVRDVAQRLNADSRIVAYVLEAENFESIHNHSAYALIENDKRTVR

SEQ ID NO: 12248 - protein, 208 aa, Paraburkholderia sartisoli
  misc_feature (1)..(208): tr|A0A1H4HRT0|A0A1H4HRT0_9BURK GTP cyclohydrolase 1 OS= Paraburkholderia sartisoli OX=83784 GN=folE PE=3 SV=1
MTRTTKAEEAPIRPTREEAEAAVRVLLRWAGDDPAREGLLDTPSRVVRSYEEFFAGYTVDPKELLARTFSEVDGYDEMIVLKDIRFESYCEHHMVPIIGRAHVAYLPEHRVVGISKLARLVDAFAKRLQIQEKMTVQIADTLNEVLQPKGVGVILEASHQCMSTRGVHKAGVAMVTSRMLGTFRSDPSTRREFLSIVGNASTVSVANT

SEQ ID NO: 12249 - protein, 212 aa, Paraburkholderia sediminicola
  misc_feature (1)..(212): tr|A0A419TKT6|A0A419TKT6_9BURK GTP cyclohydrolase 1 OS= Paraburkholderia sediminicola OX=458836 GN=folE PE=3 SV =1
MASSKAKKTKPAAAVDRPSREEAEAAVRVLLRWAGDNPEREGLLDTPSRVVRSYEEFYAGYQVDPREILARTFSEVDGYDEMIVLKDIRFESYCEHHMVPIIGRAHVAYLPGHRVVGISKLARLVDAFAKRLQIQEKMTVQIADTLNDVLQPAGVGVILEAAHQCMSTRGVHKAGVTMVTSRMLGTFRTDPSTRREFLSIVGNPGVVAVANT

SEQ ID NO: 12250 - protein, 268 aa, Paraburkholderia sediminicola; identical to SEQ ID NO: 5890
  misc_feature (1)..(268): tr|A0A419TGI5|A0A419TGI5_9BURK GTP cyclohydrolase FolE2 OS=Paraburkholderia sediminicola OX=458836 GN=folE2 PE =3 SV=1

SEQ ID NO: 12251 - protein, 268 aa, Paraburkholderia silvatlantica
  misc_feature (1)..(268): tr|A0A2U1A7H7|A0A2U1A7H7_9BURK GTP cyclohydrolase FolE2 OS=Paraburkholderia silvatlantica OX=321895 GN=folE2 P E=3 SV=1
MNQMNPAFVMPDVQSSVDTRQIVIQRVGVKAVRHPLTVKTGAGDVQPSVGTWNLDVHLPADQKGTHMSRFVALLEEHKAPLEPATFRAMLAAMLAKLESQAGRIEVRFPYFVKKVAPVSGVESLLDYEVTLTGDVRNGQTRLFLEVLVPVTSLCPCSKKISQYGAHNQRSHVTMNVEFEGDLPVEDLIRIAEEEASCELWGLLKRPDEKFVTERAYENPKFVEDLVRDVAVRLNADARVLAYTLEAENFESIHNHSAYAVIEHDKRAA

SEQ ID NO: 12252 - protein, 229 aa, Paraburkholderia silvatlantica
  misc_feature (1)..(229): tr|A0A2U1ACY0|A0A2U1ACY0_9BURK GTP cyclohydrolase 1 OS= Paraburkholderia silvatlantica OX=321895 GN=folE PE=3 S V=1
MSEEKKAGKSRQGASQAAKPRKSATNATVQTAARPSRAEAEDAVRVLLRWAGDDPAREGLLDTPARVTRAYEEFFAGYQVDPREILSRTFSEVDGYDEMIVLKDIRFESYCEHHMVPIIGRAHVAYLPEHRVVGISKLARLVDAFAKRLQIQEKMTAQIADTLNEILQPKGVGVILEAAHQCMSTRGVHKAGVEMVTSRMLGTFRTDPSTRREFLAIVGNPGAMSVSNT

SEQ ID NO: 12253 - protein, 268 aa, Paraburkholderia sp.
  misc_feature (1)..(268): tr|A0A2S8RL33|A0A2S8RL33_9BURK GTP cyclohydrolase FolE2 OS=Paraburkholderia sp. BL21I4N1 OX=1938801 GN=folE2 P E=3 SV=1
MNQMNPAFVMPDVQSTPDTRQIPIQRVGVKAVRHPLTVRTQGGDVQPTIGTWNLDVHLPADQKGTHMSRFVALLEENKAPLESATFRAMLAAMLEKLEAEAGRIEVSFPYFVNKTAPVSGVQSLLDYEVTLTGETRNGATRLFLKVLVPVTSLCPCSKKISQYGAHNQRSHVTINAELAGDVAVEELVRIAEEEASCELWGLLKRPDEKFVTERAYENPKFVEDLVRDVAQRLNADERIVAYVLEAENFESIHNHSAYAVIERDKRAV

SEQ ID NO: 12254 - protein, 219 aa, Paraburkholderia sp.
  misc_feature (1)..(219): tr|A0A372K9C4|A0A372K9C4_9BURK GTP cyclohydrolase 1 OS= Paraburkholderia sp. DHOC27 OX=2303330 GN=folE PE=3 SV= 1
MISKAKKTKQNDAASRSAAPAIQRPSREEAEDAVRVLLRWAGDDPTREGLLDTPARVVRSYEEFFAGYAVDPREILARTFSEVDGYDEMIVLKDIRFESYCEHHMVPIIGRAHVAYLPKHRVVGISKLARLVDAFAKRLQIQEKMTVQIADTLNEVLQPEGVGVILEAAHQCMSTRGVHKAGVSMVTSRMLGTFRTDPSTRREFLSIVGNPGVVAVSNV

SEQ ID NO: 12255 - protein, 268 aa, Paraburkholderia sprentiae
  misc_feature (1)..(268): tr|A0A1I9YNG0|A0A1I9YNG0_9BURK GTP cyclohydrolase FolE2 OS=Paraburkholderia sprentiae WSM5005 OX=754502 GN=fol E2 PE=3 SV=1
MNQMNPAFVMPDVQSTPDTRQIPIQRVGVKGVRHPLTVRTQGGEVQPTVGTWNLDVHLPAEQKGTHMSRFVALLEENKAPLELATFRTMLEAMLEKLEAEAGRIEVSFPYFVNKTAPVSGVQSLLDYEVTLTGETRQGAMRLFLKVLVPVTSLCPCSKKISQYGAHNQRSHVTIDAELNGDVAVEELIRIAEEEASCELWGLLKRPDEKFVTERAYENPKFVEDLVRDVAQRLNADERIVAYVLEAENFESIHNHSAYALIERDKRLA

SEQ ID NO: 12256 - protein, 213 aa, Paraburkholderia sprentiae
  misc_feature (1)..(213): tr|A0A1I9YQ19|A0A1I9YQ19_9BURK GTP cyclohydrolase 1 OS= Paraburkholderia sprentiae WSM5005 OX=754502 GN=folE PE =3 SV=1
MTSSKTNKTDPVAAAVERPSREEAEAAVRVLLRWAGDDPQREGLIDTPARVTRAYEEFFAGYQVDPREILARTFSEVDGYDEMIVLKDIRFESYCEHHMVPIIGRAHVAYLPNHRVVGISKLARLVDAFAKRLQIQEKMTVQIADTLNDVLQPAGVGVILEAAHQCMSTRGVHKAGVTMVTSRMLGTFRTDPSTRREFLSIVGNPGVVTVPNS

SEQ ID NO: 12257 - protein, 268 aa, Paraburkholderia susongensis
  misc_feature (1)..(268): tr|A0A1X7M3L2|A0A1X7M3L2_9BURK GTP cyclohydrolase FolE2 OS=Paraburkholderia susongensis OX=1515439 GN=folE2 PE =3 SV=1
MNQMNPAFVMPDVQSTPDTRQIPIQRVGVKGVRHPLTVRTQGGEVQPTVGTWNLDVHLPAEQKGTHMSRFVALLEENKAPLEPPAFRTMLAAMLEKLEAEAGRIEVSFPYFVNKTAPVSGVQSLLDYEVTLTGETRNGATRLFLKVLVPVTSLCPCSKKISQYGAHNQRSHVTIDAELAGDIAVEELIRIAEEEASCELWGLLKRPDEKFVTERAYENPKFVEDLVRDVAQRLDADERVAAYVLEAENFESIHNHSAYAVIERDKRAG

SEQ ID NO: 12258 - protein, 213 aa, Paraburkholderia susongensis
  misc_feature (1)..(213): tr|A0A1X7LD34|A0A1X7LD34_9BURK GTP cyclohydrolase 1 OS= Paraburkholderia susongensis OX=1515439 GN=folE PE=3 SV =1
MTSSKAENNTPPAAVVERPSREEAEAAVRVLLRWAGDDPQREGLLDTPARVTRAYEEFFAGYQTDPRDILARTFSEVDGYDEMIVLKDIRFESYCEHHMVPIIGRAHVAYLPQHRVVGISKLARLVDAFAKRLQIQEKMTVQIADTLNEVLQPAGVGVILEAAHQCMSTRGVHKAGVTMVTSRMLGTFRTDPSTRREFLSIVGSPEGMAVPNT

SEQ ID NO: 12259 - protein, 265 aa, Paraburkholderia terrae
  misc_feature (1)..(265): tr|A0A2I8EUW3|A0A2I8EUW3_9BURK GTP cyclohydrolase FolE2 OS=Paraburkholderia terrae OX=311230 GN=folE2 PE=3 SV= 1
MNQMNPAFVMPDVQSTVDTRQIPIQRVGVKAVRHPLTVRTPDGSVQPTIGTWNLDVHLPAEVKGTHMSRFVALLEENKTPLDSAAFRAMLASMLEKLEAPAGRIEVSFPYFVNKTAPVSGVQSLLDYEVTLTADSRDGATRLFLKVLVPVTSLCPCSKKISQYGAHNQRSHVTIDAELIDDVPVEDLIRIAEEEASCELWGLLKRPDEKFVTERAYENPKFVEDLVRDVAQRLNADKRIVGYVLEAENFESIHNHSAYAVIEKRG

SEQ ID NO: 12260 - protein, 209 aa, Paraburkholderia terrae; identical to SEQ ID NO: 12222
  misc_feature (1)..(209): tr|I5CPF3|I5CPF3_9BURK GTP cyclohydrolase 1 OS=Paraburk holderia terrae BS001 OX=1171375 GN=folE PE=3 SV=1

SEQ ID NO: 12261 - protein, 212 aa, Paraburkholderia terricola
  misc_feature (1)..(212): tr|A0A1M6SQM3|A0A1M6SQM3_9BURK GTP cyclohydrolase 1 OS= Paraburkholderia terricola OX=169427 GN=folE PE=3 SV=1
MTSSKTKKIKPAAATGRPSREEAEAAVRVLLRWAGDDPEREGLADTPGRVVRAYEEFFAGYQVDPREILARTFSEVDGYDEMIVLKDIRFESYCEHHMVPIIGRAHVAYLPVHRVVGISKLARLVDAFAKRLQIQEKMTVQIADTLNDVLQPAGVGVILEAAHQCMSTRGVHKAGVTMVTSRMIGTFRTDPSTRREFLAIVGNPGVVAVANT

SEQ ID NO: 12262 - protein, 268 aa, Paraburkholderia terricola
  misc_feature (1)..(268): tr|A0A1M6N9L2|A0A1M6N9L2_9BURK GTP cyclohydrolase FolE2 OS=Paraburkholderia terricola OX=169427 GN=folE2 PE=3 SV=1
MNQMNPAFVMPDVQSTPDTRQIPIQRVGVKAVRHPLTVRTQDGEVQPTVGMWNLDVHLPADQKGTHMSRFVALLEENKAPLEAATFRTLLAAMLEKLEAEAGRIEVSFPYFVNKTAPVSGVQSLLDYEVTLTGEIRNGATRLFIKVLVPVTSLCPCSKKISQYGAHNQRSHVTINAELAGEVAVEDLIRIAEEEASCELWGLLKRPDEKFVTERAYENPKFVEDLVRDVAQRLNADERIVAYVLEAENFESIHNHSAYAVIERDKRVP

SEQ ID NO: 12263 - protein, 220 aa, Paraburkholderia tropica
  misc_feature (1)..(220): tr|A0A1H7DZX9|A0A1H7DZX9_9BURK GTP cyclohydrolase 1 OS= Paraburkholderia tropica OX=92647 GN=folE PE=3 SV=1
MSDTKNTEKKGKKRPSKDAVEIAARPSRSEAEDAVRVLLRWAGDDPAREGLIDTPSRVVRAYEEFFAGYQLDPREILSRTFSEVDGYDEMIVLKDIRFESYCEHHMVPIIGRAHVAYLPEHRVVGISKLARLVDAFAKRLQIQEKMTAQIADTLNDVLQPKGVGVILEAAHQCMSTRGVHKAGVSMVTSRMLGTFRTDPSTRREFLAIVGNPGAMSVANT

SEQ ID NO: 12264 - protein, 269 aa, Paraburkholderia tropica
  misc_feature (1)..(269): tr|A0A1A5XEL3|A0A1A5XEL3_9BURK GTP cyclohydrolase FolE2 OS=Paraburkholderia tropica OX=92647 GN=folE2 PE=3 SV= 1
MNQMNPAFVMPDVQSSVDTRQIPIQRVGVKGVRHPLTVKTAAGDVQPSVGTWNLDVHLPADQKGTHMSRFVALLEENKQPLEPSTFRAMLTAMIAKLESQAGRIEVSFPYFVKKVAPVSGVESLLDYEVTLTGDVRDGVTRLFLQVLVPVTSLCPCSKKISQYGAHNQRSHVTMNVEFDGELAVEELIVIAEQEASCELWGLLKRPDEKFVTERAYENPKFVEDLVRDVAVRLNADARVIAYTLEAENFESIHNHSAYAVIEHDKRVSA

SEQ ID NO: 12265 - protein, 212 aa, Paraburkholderia tuberum
  misc_feature (1)..(212): tr|A0A1H1JEU3|A0A1H1JEU3_9BURK GTP cyclohydrolase 1 OS= Paraburkholderia tuberum OX=157910 GN=folE PE=3 SV=1
MTSSKAKKTKPVVAAERPSREEAEAAVRVLLRWAGDDPQREGLIDTPARVTRAYDEFFVGYQVDPRDILARTFSEVDGYDEMIVLKDIRFESYCEHHMVPIIGRAHVAYLPNHRVVGISKLARLVDAFAKRLQIQEKMTVQIADTLNEVLQPAGVGVILEAAHQCMSTRGVHKAGVTMVTSRMLGTFRTDPSTRREFLAIVGNPGVVAMPNA

SEQ ID NO: 12266 - protein, 211 aa, Paraburkholderia tuberum
  misc_feature (1)..(211): tr|A0A1H1JU73|A0A1H1JU73_9BURK GTP cyclohydrolase 1 OS= Paraburkholderia tuberum OX=157910 GN=folE PE=3 SV=1
MNKRDNQIGAEEVSIRPTPDEAEQAVRTLIRWAGDDPEREGLIQTPARVARAYREFFSGYDSDPMQILATTFSEVDGYDEMVVLKDIRFESYCEHHMVPINGRAHVAYLPEHRVVGISKLARLVDIYAKRLQIQEKMTVQIADALNTVLQPKGVAVILEAAHQCMSTRGVHKPGASLVTSRMLGAFRDDPSTRREFLSIVGHSTIAPLPNS

SEQ ID NO: 12267 - protein, 220 aa, Paraburkholderia unamae
  misc_feature (1)..(220): tr|A0A328XAI2|A0A328XAI2_9BURK GTP cyclohydrolase 1 OS= Paraburkholderia unamae OX=219649 GN=folE PE=3 SV=1
MSEIKKAGKAKQRKSQTSQDVRASRPSRDEAEDAVRVLLRWAGDDPSREGLIDTPARVVRAYEEFFAGYDVDPRDILSRTFSEVDGYDEMIVLKDIRFESYCEHHMVPIIGRAHVAYLPEHRVVGISKLARLVDAFAKRLQIQEKMTAQIADTLNEVLQPKGVGVILEAAHQCMSTRGVHKAGVSMVTSRMLGTFRTDPSTRREFLAIVGNPGAMSVANT

SEQ ID NO: 12268 - protein, 269 aa, Paraburkholderia unamae
  misc_feature (1)..(269): tr|A0A328Y4P4|A0A328Y4P4_9BURK GTP cyclohydrolase FolE2 OS=Paraburkholderia unamae OX=219649 GN=folE2 PE=3 SV= 1
MNQMNPAFVMPDVQSSVDTRQIVIQRVGVKAVRHPLTVKTGAGDVQPSVGMWNLDVHLPADQKGTHMSRFVALLEENKAPLEPATFRAMLAAMLAKLESQAGRIEVTFPYFVKKVAPVSGVESLLDYEVTLKGDVRNGQTRLFLKVLVPVTSLCPCSKKISQYGAHNQRSHVTMDVEFEGDLPVEHLIRIAEEEASCELWGLLKRPDEKFVTERAYENPKFVEDLVRDVAVRLNADARVIAYTLEAENFESIHNHSAYAVIDHDKRVAG

SEQ ID NO: 12269 - protein, 268 aa, Paraburkholderia xenovorans
  misc_feature (1)..(268): sp|Q13RX0|GCH4_PARXL GTP cyclohydrolase FolE2 OS=Parabu rkholderia xenovorans (strain LB400) OX=266265 GN=folE2 PE=3 SV=1
MNQMNPAFVMPDVQSTPDTRQIPIQRVGVKAVRHPLTVRTQGGEVQPTVGTWNLDVHLPADQKGTHMSRFVALLEENKAPLEPATFRTMLAAMLEKLEAEAGRIEVSFPYFVNKTAPVSGVQSLLDYEVTLTGETRNGATRLFLRVRVPVTSLCPCSKKISQYGAHNQRSHVTINAELAGDVAVEELIRIAEEEASCELWGLLKRPDEKFVTERAYENPKFVEDLVRDVAQRLNADERIVAYVLEAENFESIHNHSAYAVIERDKRAG

SEQ ID NO: 12270 - protein, 212 aa, Paraburkholderia xenovorans
  misc_feature (1)..(212): tr|Q13KS7|Q13KS7_PARXL GTP cyclohydrolase 1 OS=Paraburk holderia xenovorans (strain LB400) OX=266265 GN=folE PE =3 SV=1
MTSSKAKKTRLITTAERPSREEAEAAVRVLLRWAGDDPAREGLIDTPARVVRSYEEFYAGYQVDPREILARTFSEVDGYDEMIVLKDIRFESYCEHHMVPIIGRAHVAYLPEHRVVGISKLARLVDAFAKRLQIQEKMTVQIADTLNEVLQPAGVGVILEAAHQCMSTRGVHKAGVTMVTSRMLGTFRTDPSTRREFLSIVGNPGVVAVSNT

SEQ ID NO: 12271 - protein, 257 aa, Paracandidimonas soli
  misc_feature (1)..(257): tr|A0A4R3VC96|A0A4R3VC96_9BURK GTP cyclohydrolase FolE2 OS=Paracandidimonas soli OX=1917182 GN=folE2 PE=3 SV=1
MPDVQSSTDLRHIPIERVGIRGVRHPMLVAGGDGQPLPTIGQWELTVALPAHEKGTHMSRFVALLEKSRTTALTPALFCDLAREMLPLLNAQKGDITVHFPYFINKTAPMSGVTSLMDYELTWVARAAENGVAFELSVLVPVTSLCPCSKAISEYGAHNQRSHVTVTVALDDLSSLDIDGLIRSIEKEGSSELWGLLKRTDEKYVTERAYENPKFVEDLVRDVAGQVRKLPGLTSYRVQAENFESIHNHSAYAVVEG

SEQ ID NO: 12272 - protein, 238 aa, Parachlamydia acanthamoebae
  misc_feature (1)..(238): tr|A0A0C1E4G2|A0A0C1E4G2_9BACT GTP cyclohydrolase 1 OS= Parachlamydia acanthamoebae OX=83552 GN=folE_2 PE=3 SV= 1
MTKSKKNKPQLSHEEFEVSQAVAKRAAITRYPSPIKAKKNPMSKQEKIAFIADKFRDIMLALDLDLTDGSLARTPERVARMYVEEVFSGLDLNEFPRVSFIEDQYQHDERANMVLVKVKFHSFCEHHFVPMFGTAHVAYIPNGKLIGLSKIPRIVRFFARRPQVQERLGAQIADSLCTLMDTQDVAVSISAQHFCVIARGIEDENSHTITNVLRGAFDTHEALKNEFFEGVNRKYIQT

SEQ ID NO: 12273 - protein, 240 aa, Parachlamydia acanthamoebae
  misc_feature (1)..(240): tr|A0A0C1C5A6|A0A0C1C5A6_9BACT GTP cyclohydrolase 1 OS= Parachlamydia acanthamoebae OX=83552 GN=folE PE=3 SV=1
MLCRSLFIRRYKMLELEEKVLSNPFATSHINDSGDEIPYPWNDNHLTDDEKIKNIEYYFEKILLTLGMDVEDDSIRKTPYRYAKMLVKELFPGLNRNNFPKITTQENKFNYRNMLLESHISIHSMCEHHFVPILGYCHIAYIPNDRVIGLSKLNRVAHYFARRPQVQERLTRQIKECLSSLLNTPDVAVVIDASHLCVKMRGVQDADCFTRTYDMGGLFEEDTYRNEFFGAIPKHSEIKL

SEQ ID NO: 12274 - protein, 248 aa, Parachlamydia sp.
  misc_feature (1)..(248): tr|A0A2H9SQX9|A0A2H9SQX9_9BACT GTP cyclohydrolase 1 OS= Parachlamydia sp. OX=2052048 GN=folE PE=3 SV=1
MQNTKQTFNLAANKLATKYVSSSQEILVSEEVSKLAALTHYPSPISSAKCKMSKEEKIAFIADKFRDIMIALDLDLNDHSLARTPERVAKMYVEEVFSGLDASQFPRVSFIEDHYQHENKANIVLVKVKFHSFCEHHFVPMFGTAHVAYIPNGKLIGLSKIPRIVRFFARRPQVQERLTAQIADSLCTLLDTPDVAVSISAQHFCVIARGIEDENSHTITNVLRGGFDTNEVLTREFFEGVNRKYVHV

SEQ ID NO: 12275 - protein, 190 aa, Paraclostridium benzoelyticum
  misc_feature (1)..(190): tr|A0A0M3DKW5|A0A0M3DKW5_9FIRM GTP cyclohydrolase 1 OS= Paraclostridium benzoelyticum OX=1629550 GN=folE PE=3 S V=1
MHNVDKKKIENAVRDILEAIGEDPNREGLLDTPSRVAKMYEEIFSGIHKDPRDHLKILFQSEEHEELVLVKDIPFYSCCEHHLVPFFGKAHVAYLPKDGRLTGLSKLARVIEDLAKRPQLQERITKDTADIIMKELKPYGVIVVVEAEHMCMTMRGVKKPGSKTITSAVRGIFEKNIAARAEAMSLINMR

SEQ ID NO: 12276 - protein, 190 aa, Paraclostridium bifermentans
  misc_feature (1)..(190): tr|A0A1X2JK84|A0A1X2JK84_PARBF GTP cyclohydrolase 1 OS= Paraclostridium bifermentans OX=1490 GN=folE PE=3 SV=1
MHNVDKKKIENAVRDILEAIGEDSNREGLIDTPSRVAKMYEEIFSGIHKDPRDHLKILFQSEEHEELVLVKDIPFYSCCEHHLVPFFGKAHVAYLPKDGRLTGLSKLARVIEDLAKRPQLQERITKDTADIIMEELKPYGVIVVVEAEHMCMTMRGVKKPGSKTITSAVRGIFEKNIAARAEAMSLINMR

SEQ ID NO: 12277 - protein, 190 aa, Paraclostridium bifermentans
  misc_feature (1)..(190): tr|T4W1X9|T4W1X9_PARBF GTP cyclohydrolase 1 OS=Paraclos tridium bifermentans ATCC 19299 OX=1233170 GN=folE PE=3 SV=1
MHNVDKKKIENAVRDILEAIGEDPNREGLLDTPSRVAKMYEEIFSGIHKDPRDHLKILFQSEEHEELVLVKDIPFYSCCEHHLVPFFGKAHVAYLPKDGRLTGLSKLARVIEDLAKRPQLQERITKDTADIIMEELKPYGVIVVVEAEHMCMTMRGVKKPGSKTITSAVRGIFEKNIAARAEAMSLINMR

SEQ ID NO: 12278 - protein, 320 aa, Paracoccus aestuarii
  misc_feature (1)..(320): tr|A0A419A1M6|A0A419A1M6_9RHOB GTP cyclohydrolase FolE2 OS=Paracoccus aestuarii OX=453842 GN=folE2 PE=3 SV=1
MTEIRPLSPAYPALARSYDDQFRVDPAYKAGLPDLQNGPASLIVGARAAIQHVGISNFRLPIRYLTREGGEIALETSVTGTVSLEADRKGINMSRIMRSFYGHSESAFSLTVLEAALDDYKTDLDALDARIQMRFSYPMRVDSLRSGLSGWQYYDIALEVIEQGGRRLRVMHVDYVYSSTCPCSLELSEHARQTRGRLATPHSQRSVARLSLVMEGPDRIWFEDVIDLCRRAVPTETQVMVKREDEQAFAELNAAHPIFVEDAVRAFAGQLLADARIGDFRVIASHQESLHSHDAVSLLTSGPTFAQASLDPATFAGLRA

SEQ ID NO: 12279 - protein, 320 aa, Paracoccus alcaliphilus
  misc_feature (1)..(320): tr|A0A1H8KZV9|A0A1H8KZV9_9RHOB GTP cyclohydrolase FolE2 OS=Paracoccus alcaliphilus OX=34002 GN=folE2 PE=3 SV=1
MTEARPLVPAYPALIREYDADFQVDPAYKDDLPDLQNGPASLIVGARAPIQHVGISNFRLPIRYQTRDGGELTLETSVTGTVSLEADRKGINMSRIMRSFYGHSEHLFSLKVLEAALDDYKSDLDAFDARIQMRFSYPIRVDSLRSGLSGWQYYDIAQEVLEHQGHRLRIMHFDYVYSSTCPCSLELSEHAREVRGRLATPHSQRSVARISAVMLGPEKVWFEDMVDMCRRAVPTETQVMVKREDEQAFAELNASNPIFVEDAVRAFAKELQEDSRIGDFRVIASHQESLHSHDAVSLLTEGPTFVQSSLDPMTFAGLRA

SEQ ID NO: 12280 - protein, 321 aa, Paracoccus aminophilus
  misc_feature (1)..(321): tr|S5YS68|S5YS68_PARAH GTP cyclohydrolase FolE2 OS=Para coccus aminophilus JCM 7686 OX=1367847 GN=folE2 PE=3 SV =1
MTHVRPVNTSQPVYSRTYPADFKVDEAYKATLPDLQNGPASLIVGANAPIQHVGISNFRLPIRYLKRDGGEITLETSVTGTVSLEADRKGINMSRIMRSFYAHANKDFSLAVISEALDDYKSDLDSFDARIQMRFSYPMEVGSLRSGLSGWQYYDIALELIEQGGERLRIMHFDYVYSSTCPCSLELSEHARNTRGQLATPHSQRSIARISAVMLPEDGKLWFEDMVAICRAAVPTETQVMVKREDEQAFAELNAANPIFVEDAVRAFADQLLKDPRIGDFRVIASHQESLHSHDAVSLLTSGPTFAQSSLDPTTFSALRA

SEQ ID NO: 12281 - protein, 326 aa, Paracoccus aminovorans
  misc_feature (1)..(326): tr|A0A1I3AKE5|A0A1I3AKE5_9RHOB GTP cyclohydrolase FolE2 OS=Paracoccus aminovorans OX=34004 GN=folE2 PE=3 SV=1
MTEARPVATDRAYPALKREYPADFRVDDSYKASLPDLQNGPASLIVGARTAIQHVGISNFRLPMRYQTRADSSHPTGEITLETSVTGTVSLEADRKGINMSRIMRSFYAHAEKQFSMRVLQAALDDYKSDLDSLDARIQMRLSYPMRVDSLRSGLAGWQYYDVALELVERGGDRLRIMHFDYVYSSTCPCSLELSEHARQIRGQLATPHSQRSVARISAVMHGDTLWFEDMVELCRRAVATETQVMVKREDEQAFAELNAANPIFVEDAVRAFAAELLAEPRIGDFRVVASHQESLHSHDAVSVLTEGATFAHASLDPALFAGLRA

SEQ ID NO: 12282 - protein, 321 aa, Paracoccus bengalensis
  misc_feature (1)..(321): tr|A0A3D9XQX9|A0A3D9XQX9_9RHOB GTP cyclohydrolase FolE2 OS=Paracoccus bengalensis OX=302403 GN=folE2 PE=3 SV=1
MTDARPVATERAYPALSREYPADFRVDDSYKASLPDLQNGPASLIVGARAPIQHVGISNFRLPIRYLTQEGGEIALETSVTGTVSLEADRKGINMSRIMRSFYAHAEKQFSMGVLEAALEDYKSDLGSFDARIMMRLSYPMRVESLRSGLSGWQYYDIALELAERAGQRLRIMHFDYVYSSTCPCSLELSEHARQMRGQLATPHSQRSVARISAVMQGDTLWFEDMVALCRRAVATETQVMVKREDEQAFAELNAANPIFVEDAVRAFAAELMAEPRIGDFRVVASHQESLHSHDAVSVLTRGETFAHASLDPAIFAGLRA

SEQ ID NO: 12283 - protein, 321 aa, Paracoccus denitrificans
  misc_feature (1)..(321): sp|A1BA17|GCH4_PARDP GTP cyclohydrolase FolE2 OS=Paraco ccus denitrificans (strain Pd 1222) OX=318586 GN=folE2 PE=3 SV=1
MTEARPVATERAYPALSREYPADFRVDDSYKASLPDLQNGPASLIVGARAPIQHVGISNFRLPIRYQTQEGGEIALETSVTGTVSLEADRKGINMSRIMRSFYAHAEKQFSMGVLEAALEDYKSDLGSFDARIMMRLSYPMRVESLRSGLSGWQYYDIALELSERAGQRLRIMHFDYVYSSTCPCSLELAEHARQMRGQLATPHSQRSIARISVVMQGDTLWFEDMVTLCRRAVATETQVMVKREDEQAFAELNAANPIFVEDAVRAFAAELMAEPRIGDFRVVASHQESLHSHDAVSVLTQGETFAHASLDPAIFAGLRA

SEQ ID NO: 12284 - protein, 325 aa, Paracoccus denitrificans
  misc_feature (1)..(325): tr|A0A533I9E4|A0A533I9E4_PARDE GTP cyclohydrolase FolE2 OS=Paracoccus denitrificans OX=266 GN=folE2 PE=3 SV=1
MEPTVNTPRPPTVYPALSREYDADFRVDPQYKASLPDLQNGPASLIVGANVLIQHVGISNFRLPIRYQTRDGGEITLETSVTGTVSLEADRKGINMSRIMRSFYAHADKAFSLDVLQAALDDYKDDLDSMDARIQMRFSYPTKVDSLRSGLSGWQYYDIALELIEHKGQRRRIMHVDYVYSSTCPCSLELSEHARESRGRLATPHSQRSVARISVEMTGHDRLWFEDMIELCRRAVPTETQVMVKREDEQAFAELNASNPIFVEDAVRSFAEQLIAEPRVSDFRVIASHQESLHSHDAVSMLVNGPTFAQDSLDPTTFASLLHRG

SEQ ID NO: 12285 - protein, 355 aa, Paracoccus gahaiensis
  misc_feature (1)..(355): tr|A0A4U0R4N6|A0A4U0R4N6_9RHOB GTP cyclohydrolase FolE2 OS=Paracoccus gahaiensis OX=1706839 GN=folE2 PE=3 SV=1
MNVLSPDKPTLEEAEAALAVLQRYGALSRAHDPIAMPVSLALQAYPDFSRTYPEVFRGDAAYRSSLPDLQNGPSSLIVGAQAVIQHVGISNFRLPIRYRLRDGGDIVLETSVTGTVSLEAEKKGINMSRIMRSFYVHAERDFSLEVIEHTLNDYKHDLESFDARIQMRFSFPARVESLRSGLAGWQYYDIALELADAGGQRKKIMHLDYVYSSTCPCSLELSEHARKTRSQLATPHSQRSVARLSIEMTGEQLWFEDLISLARKAVPTETQTMVKREDEQAFAELNAANPMFVEDAARSFCAELQADPRVGDFRIVASHQESLHSHDAVSVLTEGPTFSQLSLDPRLFSTLYHIG

SEQ ID NO: 12286 - protein, 325 aa, Paracoccus gahaiensis
  misc_feature (1)..(325): tr|A0A4U0R6W4|A0A4U0R6W4_9RHOB GTP cyclohydrolase FolE2 OS=Paracoccus gahaiensis OX=1706839 GN=folE2 PE=3 SV=1
MTEIRPLTPAYPALARDYDAGFRVDPAYKDGLPDLQNGPASLIVGARAAIQHVGISNFRLPIRYLTRDDAQGAGGEITLETSVTGTVSLEADRKGINMSRIMRSFYVHSDTQFSLSVLEAALDDYKTDLDALDARIQMRFSYPMRVDSLRSGLSGWQYYDIALEVIEAAGTRLRVMHLDYVYSSTCPCSLELSEHARQTRGRLATPHSQRSIARISLVMEGPDRLWFEDAIELCRRAVPTETQVMVKREDEQAFAELNAAHPIFVEDAVRAFAAQLIADPRIGDFRVVASHRESLHSHDAVSLLTGGATFAQASLDPGTFAGLTV

SEQ ID NO: 12287 - protein, 320 aa, Paracoccus haeundaensis
  misc_feature (1)..(320): tr|A0A5C4R5I3|A0A5C4R5I3_9RHOB GTP cyclohydrolase FolE2 OS=Paracoccus haeundaensis OX=225362 GN=folE2 PE=3 SV= 1
MTEIRPLTPAYPALARSYDAEFRVDPAYKDSLPDLQNGPASLIVGARTAIQHVGISNFRLPIRYLVRDGGEITLETSVTGTVSLEADRKGINMSRIMRSFYGHADHAFSLSVLEAALDDYKTDLDALDARIQMRFSYPVRVDSLRSGLSGWQYYDIALEVIDVAGARLRVMHVDYVYSSTCPCSLELSEHARQTRGRLATPHSQRSVARISLVMDGPERIWFEDVIALCRAAVPTETQVMVKREDEQAFAELNAANPIFVEDAVRAFAGQLIADPRVGDFRVVASHQESLHSHDAVSLLTSGPTFAQASLDPATFAGLRA

SEQ ID NO: 12288 - protein, 325 aa, Paracoccus halophilus
  misc_feature (1)..(325): tr|A0A099F1I1|A0A099F1I1_9RHOB GTP cyclohydrolase FolE2 OS=Paracoccus halophilus OX=376733 GN=folE2 PE=3 SV=1
MTDSRPVATERAYPALSREYPEDFRVDAGYRASLPDLQNGPASLIVGAHAPIQHVGISNFRLPIRYQTRPGPDGGGEITLETSVTGTVSLEADRKGINMSRIMRSFYAHAEKRFSMGVLEAALDDYKSDLDSLDARIQMRLSYPMRVESLRSSLSGWQYYDIALELAERAGQRLQIMHFDYVYSSTCPCSLELSEHARQMRGQMATPHSQRSIARISAVTQGDTLWFEDMVELCRRAVPTETQVMVKREDEQAFAELNAANPIFVEDAVRAFAAQLMAEPRLGDFRIIASHQESLHSHDAVSVLTRGETFAQASLNPAIFAGLRA

SEQ ID NO: 12289 - protein, 320 aa, Paracoccus hibiscisoli
  misc_feature (1)..(320): tr|A0A4U0QNT0|A0A4U0QNT0_9RHOB GTP cyclohydrolase FolE2 OS=Paracoccus hibiscisoli OX=2023261 GN=folE2 PE=3 SV= 1
MTEIRPLTPAYPALARSYDADFRVDGAYKDSLPDLQNGPASLIVGARTAIQHVGISNFRLPIRYLVRDGGEITLETSVTGTVSLEADRKGINMSRIMRSFYGHADHAFSLSVLEAALDDYKTDLDALDARIQMRFSYPVRVDSLRSGLSGWQYYDIALEVIEQAGTRLRVMHVDYVYSSTCPCSLELSEHARQTRGRLATPHSQRSVARISLVMDGPERIWFEDVIALCRAAVPTETQVMVKREDEQAFAELNAANPIFVEDAVRAFAGQLLADPRVGDFRVVASHQESLHSHDAVSLLTSGPTFAQASLDPATFAGLRA

SEQ ID NO: 12290 - protein, 320 aa, Paracoccus homiensis
  misc_feature (1)..(320): tr|A0A1I0GGN7|A0A1I0GGN7_9RHOB GTP cyclohydrolase FolE2 OS=Paracoccus homiensis OX=364199 GN=folE2 PE=3 SV=1
MTDARPMIPSYPALVREYDADFRVTDDYKADLPDLQNGPASLIVGARAPIQHVGISNFRLPIRYQTSDGGELVLETSVTGTVSLEADRKGINMSRIMRSFYGHSDHLFSLKVLEAALDDYKADLDAFDARIQMRFSYPIRVDSLRSGLSGWQYYDIALEVVEQAGQRLRIMHFDYVYSSTCPCSLELSEHARESRARLATPHSQRSIARISVVMDGPDKLWFEDMVDICRRAVPTETQVMVKREDEQAFAELNAANPIFVEDAVRAFAQGLQDDPRIGDFRVVASHQESLHSHDAVSLLTQGTTFAQSSLDPMTFAGLRA

SEQ ID NO: 12291 - protein, 321 aa, Paracoccus isoporae
  misc_feature (1)..(321): tr|A0A1G7C956|A0A1G7C956_9RHOB GTP cyclohydrolase FolE2 OS=Paracoccus isoporae OX=591205 GN=folE2 PE=3 SV=1
MNTPRPPALYPALSREYDADFKVDPQYKAGLPDLQNGPASLIVGANVLIQHVGISNFRLPIRYRMRDKGEITLETSVTGTVSLEADRKGINMSRIMRSFYAHADKEFSMAVMETALDDYKDDLDSMDARIQMRLSYPMRVDSLRSGLSGWQYYDIAQELIEHGGQRRRILHLDYVYSSTCPCSLELSEHARESRARLATPHSQRSVARLSVVMEGRERLWFEDLIALCRRAVPTETQVMVKREDEQAFAELNAANPIFVEDAVRSFAEQLIAEPRVGDFRIIASHQESLHSHDAVSMLVNGETFAQDSLDPTAFASLLHRG

SEQ ID NO: 12292 - protein, 321 aa, Paracoccus laeviglucosivorans
  misc_feature (1)..(321): tr|A0A521CUH5|A0A521CUH5_9RHOB GTP cyclohydrolase FolE2 OS=Paracoccus laeviglucosivorans OX=1197861 GN=folE2 P E=3 SV=1
MTEARPVATERAYPALSREYPADFRVDDSYKASLPDLQNGPASLIVGARAPIQHVGISNFRLPLRYRMPDGGDITLETSVTGTVSLDADRKGINMSRIMRSFYAHAEKQFSMGVLEAALEDYKTDLDSFDARIQMRISYPMRVESLRSGLTGWQYYDIALELVERAGQRLRIMHFDYVYSSTCPCSLELSEHARQMRGQLATPHSQRSIARISVVMQGDTLWFEDMVELCRRAVATETQVMVKREDEQAFAELNAANPIFVEDAVRAFAEQLLAEPRIGDFRVVASHQESLHSHDAVSVMTQGETFAHASLDPAIFAGLRA

SEQ ID NO: 12293 - protein, 343 aa, Paracoccus laeviglucosivorans
  misc_feature (1)..(343): tr|A0A521FL56|A0A521FL56_9RHOB GTP cyclohydrolase FolE2 OS=Paracoccus laeviglucosivorans OX=1197861 GN=folE2 P E=3 SV=1
MSFEDMTALSGSLSRETGEEKPAKTGSKESYPDLKRVYDPGFRVGENYRATLPDLQNGPASLIVGANTRIEHVGISNFRLPIGYKLRAGGSIMLETSVTGTVSLEANQKGINMSRIMRSFYDYAENQFSFEVMAAAIDAYKKDLGSFDARLMMRFSFPAQVTSLRSGLKGWQYYEIALELVETAGTRRKIIHLDYVYSSTCPCSLELSEHARRERGQLATPHSQRSVARISVVLNDGVDDPLWFEDLIEMARFAVPTETQVMVKREDEQAFAELNAANPIFVEDAVRAFAAPLIADPRVGDFRVVASHQESLHSHDAVAVLSEGTTFIGQSLDPRMFGSLIHS

SEQ ID NO: 12294 - protein, 321 aa, Paracoccus lutimaris
  misc_feature (1)..(321): tr|A0A368Z907|A0A368Z907_9RHOB GTP cyclohydrolase FolE2 OS=Paracoccus lutimaris OX=1490030 GN=folE2 PE=3 SV=1
MTESRPIATQRAYPALSREYPSDFRVDDAYKAGLPDLQNGPASLIVGARAPIQHVGISNFRLPIRYQTREGGEMTLETGVTGTVSLEADRKGINMSRIMRSFYAHAEKRFSMGVLEAALDDYKSDLDSLDARIQMRLSYPMRVDSLRSGLSGWQYYDIALELVEQAGQRLRIMHVDYVYSSTCPCSLELSEHARQMRGQLATPHSQRSIARISMVTQGDTLWFEEVIALCRRAVPTETQVMVKREDEQAFAELNAANPIFVEDAVRAFAAELMAEPRIGDFRVIASHQESLHSHDAVSVLTDGPTFAQASLDPAIFAGLRA

SEQ ID NO: 12295 - protein, 326 aa, Paracoccus mutanolyticus
  misc_feature (1)..(326): tr|A0A2Z4PDL9|A0A2Z4PDL9_9RHOB GTP cyclohydrolase FolE2 OS=Paracoccus mutanolyticus OX=1499308 GN=folE2 PE=3 S V=1
MTEARPLFPGPLATERAYPALKRDYPADFRVDASYKASLPDLQNGPASLIVGARAAIQHVGISNFRLPIRYQTKEGGEVTLETSVTGTVSLESDRKGINMSRIMRSFYAHAEKRFSMGVLEAALQDYKSDLDSIDARIQMRLSYPMRVDSLRSGLTGWQYYDIALELAERAGQRLKIMHFDYVYSSTCPCSLELSEHARQMRGQLATPHSQRSIARISAVTQGETLWFEDMVALCRRAVATETQVMVKREDEQAFAELNAANPIFVEDAVRAFAAELLAEPRIGDFRVVASHQESLHSHDAVSVLTQGETFAQVSLDPSIFAGLRA

SEQ ID NO: 12296 - protein, 321 aa, Paracoccus pantotrophus
  misc_feature (1)..(321): tr|A0A1K1U6F3|A0A1K1U6F3_PARPN GTP cyclohydrolase FolE2 OS=Paracoccus pantotrophus OX=82367 GN=folE2 PE=3 SV=1
MTDARPVATERAYPALSREYPADFRVDDSYKASLPDLQNGPASLIVGARAPIQHVGISNFRLPIRYLTQEGGEIALETSVTGTVSLEADRKGINMSRIMRSFYAHAEKQFSMGVLEAALEDYKSDLGSFDARIMMRLSYPMRVESLRSGLSGWQYYDIALELAERAGQRLRIMHFDYVYSSTCPCSLELSEHARQMRGQLATPHSQRSVARISVVMQGDTLWFEDMVALCRRAVATETQVMVKREDEQAFAELNAANPIFVEDAVRAFAAELMAEPRIGDFRVVASHQESLHSHDAVSVLTRGETFAHASLDPAIFAGLRA

SEQ ID NO: 12297 - protein, 321 aa, Paracoccus pantotrophus
  misc_feature (1)..(321): tr|A0A454NLA4|A0A454NLA4_PARPN GTP cyclohydrolase FolE2 OS=Paracoccus pantotrophus OX=82367 GN=folE2 PE=3 SV=1
MTEARPVATERAYPALSREYPADFRVDDSYKASLPDLQNGPASLIVGARAPIQHVGISNFRLPIRYQTQEGGEIALETSVTGTVSLEADRKGINMSRIMRSFYAHAEKQFSMGVLEAALEDYKSDLGSFDARIMMRLSYPMRVESLRSGLSGWQYYDIALELAERAGQRLRIMHFDYVYSSTCPCSLELSEHARQMRGQLATPHSQRSVARISAVMQGDTLWFEDMVALCRRAVATETQVMVKREDEQAFAELNAANPIFVEDAVRAFAAELMAEPRIADFRVVASHQESLHSHDAVSVLTQGETFAHASLDPAIFAGLRA

SEQ ID NO: 12298 - protein, 320 aa, Paracoccus saliphilus
  misc_feature (1)..(320): tr|A0A1N7LF76|A0A1N7LF76_9RHOB GTP cyclohydrolase FolE2 OS=Paracoccus saliphilus OX=405559 GN=folE2 PE=3 SV=1
MTEARPMVPAYPALSRDYDAEFRVDDAYKASLPDLQNGPASLIVGARAPIQHVGISNFRLPIRYQTRDGGEIALETSVTGTVSLEADRKGINMSRIMRSFYGHADHLFSVKVLEAALDDYKADLEAFDARIQMCFSYPIRVDSLRSGLSGWQYYDISQEVIEHQGQRLRVMHFDYVYSSTCPCSLELSEHAREARGRLATPHSQRSIARISLVMNGPEKIWFEDIVDLCRRAVPTETQVMVKREDEQAFAELNAANPIFVEDAVRAFAKELQAEPRIGDFRIIASHQESLHSHDAVSLLVDGPTFAQSSLDPMTFAGLRA

SEQ ID NO: 12299 - protein, 320 aa, Paracoccus sediminis
  misc_feature (1)..(320): tr|A0A238VVH2|A0A238VVH2_9RHOB GTP cyclohydrolase FolE2 OS=Paracoccus sediminis OX=1214787 GN=folE2 PE=3 SV=1
MTEARPMIPAYPALARSYDAGFRADDAYKAGLPDLQNGPASLIVGARAPIQHVGISNFRLPIRYQTRDGGEITLETSVTGTVSLEADRKGINMSRIMRSFYVHSEHAFSLRVLESALDDYQADLDAYDARIQMRFSYPIRVDSLRSGLSGWQYYDIAMEVLDLHGQRLRIMHFDYVYSSTCPCSLELSEHARETRSRLATPHSQRSIARISVVMDGPEKIWFEDVVELCRRAVPTETQVMVKREDEQAFAELNAANPIFVEDAVRAFAGELLSDPRFGDFRVVASHQESLHSHDAVSLLVSGPTFAQSSLDPMTFAGLRA

SEQ ID NO: 12300 - protein, 320 aa, Paracoccus seriniphilus
  misc_feature (1)..(320): tr|A0A239Q2Z7|A0A239Q2Z7_9RHOB GTP cyclohydrolase FolE2 OS=Paracoccus seriniphilus OX=184748 GN=folE2 PE=3 SV= 1
MTDARPLVPAYPALVREYDAEFRVDDDYRAGLPDLQNGPASLIVGARAPIQHVGISNFRLPIRYQTRAGGEVALETSVTGTVSLDADRKGINMSRIMRSFYGHSDHLFSLSVLEAALDDYKADLDAFDARIQMRFSYPVRVESLRSGLSGWQYYDIAQEVIERKGERLRIMHFDYVYSSTCPCSLELSEHARESRSRLATPHSQRSIARISLVMAGPEKVWFEDLVDLCRRAVPTETQVMVKREDEQAFAELNASNPIFVEDAVRAFAKELQGDPRIGDFRVVASHQESLHSHDAVSLLVDGPTFAQSSLDPMTFESLRV

SEQ ID NO: 12301 - protein, 325 aa, Paracoccus siganidrum
  misc_feature (1)..(325): tr|A0A419A7B7|A0A419A7B7_9RHOB GTP cyclohydrolase FolE2 OS=Paracoccus siganidrum OX=1276757 GN=folE2 PE=3 SV=1
MTEARPMVPAYPALVREYDADFRAGPDYKAGLPDLQNGPASLIVGARAPIQHVGISNFRLPIRYQTRPDSLHGGGEIQLETSVTGTVSLEADRKGINMSRIMRSFYGHSEHLFSVKVLEAALDDYKADLDAFDARIQMRFSYPIRVESLRSGLSGWQYYDIAQEVLEHRGQRLRIMHFDYVYSSTCPCSLELAEHARETRSRLATPHSQRSIARISAVMKGPEKFWFEDLVDMCRRAVPTETQVMVKREDEQAFAELNASNPIFVEDAVRAFAKQLQDDPRIGDFRVVASHQESLHSHDAVSLLVEGPTFAQSSLDPMTFAGLRA

SEQ ID NO: 12302 - protein, 320 aa, Paracoccus sp.
  misc_feature (1)..(320): tr|A0A3A3DI98|A0A3A3DI98_9RHOB GTP cyclohydrolase FolE2 OS=Paracoccus sp. JM45 OX=2283626 GN=folE2 PE=3 SV=1
MTQARPLTPAYPALIRKYDADFQVDEAYKADLPDLQNGPASLIIGARAPIQHVGISNFRLPIRYQTRDGGEIVLETSVTGTVSLEADRKGINMSRIMRSFYGHSEHLFSLSVLEAALEDYKSHLDALDARIQMRFSYPMRVDSLRSGLSGWQYYDIALEVIEHQGQRLRVMHVDYVYSSTCPCSLELSEHARETRGRLATPHSQRSVARISLVMEGAEKIWFEDMIDLCRRAVPTETQVMVKREDEQAFAELNAANPIFVEDAVRAFAGQLMADPRIGDFRVIASHQESLHSHDAVSLLTSGSTFAQESLDPTTFAALKV

SEQ ID NO: 12303 - protein, 320 aa, Paracoccus sp.
  misc_feature (1)..(320): tr|A0A2K9EK30|A0A2K9EK30_9RHOB GTP cyclohydrolase FolE2 OS=Paracoccus sp. BM15 OX=1529068 GN=folE2 PE=3 SV=1
MTENRPMIPAYPALARDYDADFKVDVDYKAGLPDLQNGPASLIVGAHKPIQHVGISNFRLPIRYERRDGGDMTLETSVTGTVSLEADRKGINMSRIMRSFYEHAEKQFSLKVLEAALNDYQTDLDALDARILMRLSYPVRVDSLRSGLSGWQYYDIALEVAEQAGQRLRIVHFDYVYSSTCPCSLELSEHAREDRGRLATPHSQRSIARISVVMKGPEKIWFEDIVDLCRRAVPTETQVMVKREDEQAFAELNASNPIFVEDAVRAFAQQLMTDDRFGDFRIVASHQESLHSHDAVSVLTDGPTFAQHSLDPSLFAELRV

SEQ ID NO: 12304 - protein, 321 aa, Paracoccus sulfuroxidans
  misc_feature (1)..(321): tr|A0A562NI01|A0A562NI01_9RHOB GTP cyclohydrolase FolE2 OS=Paracoccus sulfuroxidans OX=384678 GN=folE2 PE=3 SV =1
MTESRAIQTAGSYPALSRTYPADFTVDAAYKESLPDLQNGPASLIVGARTAIQHVGISNFRLPIRYLTRSGGEITLETSVTGSVSLEADRKGINMSRIMRSFYAHADKRFSMGVLAAALDDYKSDLDSLDARIQMRLSYPIQVDSLRSGLSGWQYYDIALELVEQAGHRLRIMHFDYVYSSTCPCSLELAEHARQVRGQLATPHSQRSIARISAVMQGDTLWFEDMVELCRRAVSTETQVMVKREDEQAFAELNAANPIFVEDAVRAFAEQLLSEPRIGDFRVVASHQESLHSHDAVSLLTSGLTFEQVSLDPMAFAGLRA

SEQ ID NO: 12305 - protein, 321 aa, Paracoccus thiocyanatus
  misc_feature (1)..(321): tr|A0A1N6UHS2|A0A1N6UHS2_9RHOB GTP cyclohydrolase FolE2 OS=Paracoccus thiocyanatus OX=34006 GN=folE2 PE=3 SV=1
MTEASPIATERACPALNREYPADFRVDDAYKASLPDLQNGPASLIVGARAPIQHVGISNFRLPIRYQAPQGGEITLETSVTGTVSLEADRKGINMSRIMRSFYAHAEKRFSMGVLEAALEDYKSDLGSVDARIMMRLSYPMRVESLRSGLSGWQYYDIALELAEQAGRRLRIMHFDYVYSSTCPCSLELAEHARQMRGQLATPHSQRSVARLSVVMQGDTLWFEDMVALCRRAVATETQVMVKREDEQAFAELNAANPIFVEDAVRAFAAELMGEPRVGDFRVVASHQESLHSHDAVSVMTRGETFAHANLDPAIFAGLRA

SEQ ID NO: 12306 - protein, 344 aa, Paracoccus tibetensis
  misc_feature (1)..(344): tr|A0A1G5DP82|A0A1G5DP82_9RHOB GTP cyclohydrolase FolE2 OS=Paracoccus tibetensis OX=336292 GN=folE2 PE=3 SV=1
MSMGLELSPHREQGETTVNVPGAVATQKPEQHRDYPIFSRKYDASFAADAAYRSGLPDLQNGPASLIVGAQAPIQHVGISNFRLPIRHLLRNGGEVVLETSITGTVSLSAEKKGINMSRIMRSFYVHAEKSTSLEVIEHALRDYKQDLESFDARIQMRFSFPLQTRSLRSGLTGWQYYDVALELVDLRGQRKKMVHLDYVYSSTCPCSLELSEHARQTRGQLATPHSQRSTARLSILAGEDLWIEDFIDLARLAVPTETQVMVKREDEQAFAELNAANPLFVEDAARSFCAALQSDHRIRDFRIVASHQESLHSHDAVSILTRGATFDQASLDPKFFSTLIKAA

SEQ ID NO: 12307 - protein, 320 aa, Paracoccus tibetensis
  misc_feature (1)..(320): tr|A0A1G5J0Q3|A0A1G5J0Q3_9RHOB GTP cyclohydrolase FolE2 OS=Paracoccus tibetensis OX=336292 GN=folE2 PE=3 SV=1
MTEIRPLTPAYPALARDYDRSFRVTDDYKAGLPDLQNGPASLIVGARAPIQHVGISNFRLPIRYLMRDGGEITLETSVTGTVSLEADRKGINMSRIMRSFYNHSEHAFSLSVLEAALQDYKIDLGSLDARIQMRFSYPMRVESLRSGLSGWQYYDITLEVAEHQGQHLRNMHIDYVYSSTCPCSLELSEHARQTRGRLATPHSQRSVARISLVMAGPERLWFEDVIELCRRAVPTETQVMVKREDEQAFAELNAANPIFVEDAVRAFAAELQAEPRVGDFRVVASHQESLHSHDAVSLLTSGTTFAQASLDPATFMGLRA

SEQ ID NO: 12308 - protein, 321 aa, Paracoccus versutus; identical to SEQ ID NO: 12296
  misc_feature (1)..(321): tr|A0A099FH56|A0A099FH56_PARVE GTP cyclohydrolase FolE2 OS=Paracoccus versutus OX=34007 GN=folE2 PE=3 SV=1

SEQ ID NO: 12309 - protein, 326 aa, Paracoccus yeei; identical to SEQ ID NO: 12295
  misc_feature (1)..(326): tr|A0A1V0GU49|A0A1V0GU49_9RHOB GTP cyclohydrolase FolE2 OS=Paracoccus yeei OX=147645 GN=folE2 PE=3 SV=1

SEQ ID NO: 12310 - protein, 320 aa, Paracoccus zhejiangensis
  misc_feature (1)..(320): tr|A0A2H5F3C8|A0A2H5F3C8_9RHOB GTP cyclohydrolase FolE2 OS=Paracoccus zhejiangensis OX=1077935 GN=folE2 PE=3 S V=1
MTENRPLIPAYPALARDYDAGFTVDAAYKASLPDLQNGPASLIVGAHKPIQHVGISNFRLPIRYQRRDGGEITLETSVTGTVSLEAGRKGINMSRIMRSFYAHSEKQFSLKVLEAALDDYQADLDALDARILMRLSYPVRVDSLRSGLWGWQYYDISQEVVEQRGHRLRIMHFDYVYSSTCPCSLELSEHARETRARLATPHSQRSIARISVVMNGPEKIWFEDMVDLCRRAVPTETQVMVKREDEQAFAELNASNPIFVEDAVRAFAQQLMDDPRYGDFRVVASHQESLHSHDAVSVLTDGPTFEQHSLDPALFARLRA

SEQ ID NO: 12311 - protein, 214 aa, Paracraurococcus sp.
  misc_feature (1)..(214): tr|A0A4R4DRK9|A0A4R4DRK9_9PROT GTP cyclohydrolase 1 OS= Paracraurococcus sp. NE82 OX=2527868 GN=folE PE=3 SV=1
MNIQTPPSQIRPDTATLEGRPTRAEAEAAVRTLLRWTGDDPDREGLVDTPARVVRAYEEFFAGYETDPVELLARSFEETDGYDEMVVLRDIRLESHCEHHVVPILGRAHIAYLPAGRVVGISKLARVLEVYAKRLQIQEKLTAQVANCINDVLRPKGVAVVIEAAHQCMTTRGIHKPGVSMVTSRMLGAFRDDPSTRREFLAMISGRGGSGFEG

SEQ ID NO: 12312 - protein, 202 aa, Paracraurococcus sp.
  misc_feature (1)..(202): tr|A0A4R4DES7|A0A4R4DES7_9PROT GTP cyclohydrolase 1 OS= Paracraurococcus sp. NE82 OX=2527868 GN=folE PE=3 SV=1
MPATPLAETPMPVARPSRAEAEAAVRTLLAWAGDDPSREGLLDTPARVAKAYEEFFAGYRIDPVSVLERTFAETEGYDEIVLLKDIRLESYCEHHMVPIIGVAHVAYLPEHRVVGISKLARVVEAYAKRLQIQEKLTAQIANTIEAVLRPRGVAVIIESEHQCMTTRGVHQHGASMVTSRMLGAFRDDPNTRRELLALLGKG

SEQ ID NO: 12313 - protein, 187 aa, Paraeggerthella hongkongensis
  misc_feature (1)..(187): tr|A0A369LI76|A0A369LI76_9ACTN GTP cyclohydrolase 1 OS= Paraeggerthella hongkongensis OX=230658 GN=folE PE=3 SV =1
MDRAKIEQGVRLILEGMGEDPDREGLLKTPERVAKMYEEVFSGLTEDPSEHFETTFDEHHEEMILVRDIPFYSMCEHHLVPFFGLAHVAYIPAADGRICGLSKLARLVDVFAKRPQVQERLTSQIADTLIEELHPQGVIVVLEAEHMCMSMRGVKKPGTKTMTSAVRGAFEKSQATRAEALSLIFAR

SEQ ID NO: 12314 - protein, 189 aa, Paraeggerthella hongkongensis
  misc_feature (1)..(189): tr|A0A3N0BGR4|A0A3N0BGR4_9ACTN GTP cyclohydrolase 1 OS= Paraeggerthella hongkongensis OX=230658 GN=folE PE=3 SV =1
MDRAKIEQGVRLILEGMGEDPDREGLVKTPERVAKMYEEVFSGLAEDPSEHFETTFDEHHEEMILVRDIPFYSMCEHHLVPFFGLAHVAYIPAADGRICGLSKLARLVDVFAKRPQVQERLTSQVADTLIEELHPQGVIVVLEAEHMCMSMRGVKKPGTRTMTSAVRGAFEKSQATRAEAMSLIFARRD

SEQ ID NO: 12315 - protein, 205 aa, Parafilimonas terrae
  misc_feature (1)..(205): tr|A0A1I5TBP6|A0A1I5TBP6_9BACT GTP cyclohydrolase 1 OS= Parafilimonas terrae OX=1465490 GN=folE PE=3 SV=1
MHYSIEDNLVKEEKISLTASEQISIIEHHFREIMLALGLDMRDDSLKDTPLRVAKMYVNEAFMGLNPLNEPSVTLFENKFKYNEIILEKDIPLYSYCEHHFVPIIGKVHIAYISKGEVIGLSKLNRITHYFSKRPQVQERLTIQIAEHLKSVMNIEDVAVIIRAEHLCVASRGINDKGCATITHSFHGQFLQDSRSNQLYAMLTV

SEQ ID NO: 12316 - protein, 198 aa, Parafilimonas terrae
  misc_feature (1)..(198): tr|A0A1I5SB45|A0A1I5SB45_9BACT GTP cyclohydrolase 1 OS= Parafilimonas terrae OX=1465490 GN=folE PE=3 SV=1
MLYEKKIYYDEEAINSLKESYANIIGSIGEDVQREGLLKTPERIAKAMLYNTQGYNQDAVAILNSAKFHENISEMIVVKDIELYSMCEHHMLPFFGKAHIAYIPNGYITGLSKIARVVDVFSRRLQVQERLTTQILDAIKEALNPLGVAVVIEAKHLCMMMRGVQKQNSVTTTSAFFGEFEKYPTRNEFLKLIAADLD

SEQ ID NO: 12317 - protein, 188 aa, Parageobacillus caldoxylosilyticus
  misc_feature (1)..(188): tr|A0A023DG17|A0A023DG17_9BACI GTP cyclohydrolase 1 OS= Parageobacillus caldoxylosilyticus NBRC 107762 OX=12205 94 GN=folE PE=3 SV=1
MSHVNYEQIEYAVRLILEAIGEDPNREGLIDTPKRVARMYAEVFAGLHEDPKEHFQTVFNENHEELVLVKDIPFYSMCEHHLVPFFGVAHIAYIPREGKVTGLSKLARAVEAVARRPQLQERITATVADSIVEALDPHGVMVVVEAEHMCMTMRGVKKPGAKTVTTAVRGVFETDQNARAEVLSLIKA

SEQ ID NO: 12318 - protein, 188 aa, Parageobacillus caldoxylosilyticus
  misc_feature (1)..(188): tr|A0A150LC15|A0A150LC15_9BACI GTP cyclohydrolase 1 OS= Parageobacillus caldoxylosilyticus OX=81408 GN=folE PE= 3 SV=1
MSHVNYEQIEYAVRLILEAIGEDPNREGLIDTPKRVARMYAEVFAGLHEDPKEHFQTVFSEDHEELVLVKDIPFYSMCEHHLVPFFGVAHVAYIPREGKVTGLSKLARAVEAVARRPQLQERITATVADSIVEALDPHGVMVVVEAEHMCMTMRGIKKPGAKTVTTAVRGVFETDQNARAEVLSLIKS

SEQ ID NO: 12319 - protein, 188 aa, Parageobacillus genomosp.
  misc_feature (1)..(188): tr|A0A023CKD8|A0A023CKD8_9BACI GTP cyclohydrolase 1 OS= Parageobacillus genomosp. 1 OX=1295642 GN=folE PE=3 SV= 1
MSHVNYEQIEYAVRLILEAIGEDPNREGLIDTPKRVARMYAEVFAGLHEDPKEHFQTVFSEDHEELVLVKDIPFYSMCEHHLVPFFGVAHVAYIPREGKVTGLSKLARAVEAVARRPQLQERITATVADSIVEALDPHGVMVVVEAEHMCMTMRGVKKPGAKTVTTAVRGVFATDQNARAEVLSLIKA

SEQ ID NO: 12320 - protein, 188 aa, Parageobacillus thermantarcticus
  misc_feature (1)..(188): tr|A0A1I0T3G7|A0A1I0T3G7_9BACI GTP cyclohydrolase 1 OS= Parageobacillus thermantarcticus OX=186116 GN=folE PE=3 SV=1
MSHVNYEQIEYAVRLILEAIGEDPNREGLVDTPKRVAKMYEEVFSGLHEDPKQYFQTVFNEKHEELVLVKDIPFYSMCEHHLVPFFGVAHVAYIPRGGKVTGLSKLARAVEAVARRPQLQERITATVADSIMETLDPYGVMVVVEAEHMCMTMRGVKKPGAKTVTTAVRGLFETDQAARAEVLSLIKG

SEQ ID NO: 12321 - protein, 188 aa, Parageobacillus thermoglucosidasius
  misc_feature (1)..(188): tr|A0A1B7KXK1|A0A1B7KXK1_PARTM GTP cyclohydrolase 1 OS= Parageobacillus thermoglucosidasius OX=1426 GN=folE PE= 3 SV=1
MSHVNYEQIEYAVRLILEAIGEDPNREGLVDTPKRVAKMYAEVFSGLHEDPKQYFQTVFNEDHEELVLVKDIPFYSMCEHHLVPFFGVAHVAYIPRGGKVTGLSKLARAVEAVARRPQLQERITATVADSIMETLDPYGVMVVVEAEHMCMTMRGVKKPGAKTVTTAVRGSFETDQTARAEVLSLIKG

SEQ ID NO: 12322 - protein, 188 aa, Parageobacillus thermoglucosidasius; identical to SEQ ID NO: 8506
  misc_feature (1)..(188): tr|A0A1Y3PKG2|A0A1Y3PKG2_PARTM GTP cyclohydrolase 1 OS= Parageobacillus thermoglucosidasius OX=1426 GN=folE PE= 3 SV=1

SEQ ID NO: 12323 - protein, 188 aa, Parageobacillus toebii; identical to SEQ ID NO: 8500
  misc_feature (1)..(188): tr|A0A150N4X0|A0A150N4X0_9BACI GTP cyclohydrolase 1 OS= Parageobacillus toebii OX=153151 GN=folE PE=3 SV=1

SEQ ID NO: 12324 - protein, 188 aa, Parageobacillus toebii; identical to SEQ ID NO: 8500
  misc_feature (1)..(188): tr|A0A3M0FCY3|A0A3M0FCY3_9BACI GTP cyclohydrolase 1 OS= Parageobacillus toebii NBRC 107807 OX=1223503 GN=folE P E=3 SV=1

SEQ ID NO: 12325 - protein, 184 aa, Paraglaciecola agarilytica
  misc_feature (1)..(184): tr|K6W8J1|K6W8J1_9ALTE GTP cyclohydrolase 1 OS=Paraglac iecola agarilytica NO2 OX=1125747 GN=folE PE=3 SV=1
MSEDLTQHYSQILSILGEDTQRGGLVDTPKRAAKAMQFLTDGYEKNLDDVVNGAIFEADTDEMVVIQNIEYYSLCEHHILPFIGQCHIAYLPKGKVLGLSKFARIVDMYARRLQIQEGLTKQIADAIQEVTGAAGVGVIMEGKHMCMMMRGVQKQNSSMVTSVMLGGMRNSDATRNEFLRLIGK

SEQ ID NO: 12326 - protein, 184 aa, Paraglaciecola arctica
  misc_feature (1)..(184): tr|K6YV67|K6YV67_9ALTE GTP cyclohydrolase 1 OS=Paraglac iecola arctica BSs20135 OX=493475 GN=folE PE=3 SV=1
MSDKLADHYSGILSILGEDVSRGGLVDTPKRAAKAMQFLTDGYEKDLDGVVNGAIFEADTDEMVIIQDIEFYSLCEHHILPFIGRCHIAYLPNGKVLGLSKFARIVDMYSRRLQIQEGLTKQIADAVQLVTGATGVGVIMEGKHMCMMMRGVQKQNSSMITSVMLGSMRTSDATRNEFLRLIGK

SEQ ID NO: 12327 - protein, 184 aa, Paraglaciecola hydrolytica
  misc_feature (1)..(184): tr|A0A136A1Y6|A0A136A1Y6_9ALTE GTP cyclohydrolase 1 OS= Paraglaciecola hydrolytica OX=1799789 GN=folE PE=3 SV=1
MSDKLAAHYSEILTILGEDVSRNGLLDTPNRAAKAMQFLTDGYATDLDTVVNGAIFEADSDEMVIVQDIEFYSLCEHHILPFIGRCHIAYIPQGRVLGLSKFARIVDMYARRLQIQEGLTKQIADAVQQVTGALGVGVVMEGKHMCMMMRGVQKQNSSMITSVMLGSFRRSQATRDEFLRLIGK

SEQ ID NO: 12328 - protein, 184 aa, Paraglaciecola mesophila
  misc_feature (1)..(184): tr|K6Z2I4|K6Z2I4_9ALTE GTP cyclohydrolase 1 OS=Paraglac iecola mesophila KMM 241 OX=1128912 GN=folE2 PE=3 SV=1
MSDDLTQHYSQILSILGEDTQRGGLVDTPKRAAKAMQFLTDGYEKNLSDVVNGAIFEADTDEMVVIQNIEYYSLCEHHILPFIGQCHIAYLPQGKVLGLSKFARIVDMYARRLQIQEGLTKQIADAIQEVTGAAGVGVIMEGKHMCMMMRGVQKQNSSMVTSVMLGAMRKSDATRNEFLRLIGK

SEQ ID NO: 12329 - protein, 305 aa, Paraglaciecola polaris
  misc_feature (1)..(305): tr|K7AI90|K7AI90_9ALTE GTP cyclohydrolase FolE2 OS=Para glaciecola polaris LMG 21857 OX=1129793 GN=folE2 PE=3 S V=1
MSANLPDVTSSANALTAAPLKWVGMEGIAVPIQVPLASHVTAYVSAKTDIFVSLDKSDAKGIHMSRLFIKLNDILGVELLSGASLTRLLNELIASQEGLSQCAKISVDFELTLHKKALLSNEFGYQSYPISIAKQQVNEKMLTVLSLTIPYSSTCPCSSALSQQAVSDAISERFTDDTIVKSELTQWITSQHGAVATPHSQRSYAYIKLTIDGEELPNLPQLIAELEAVIGTPVQTAVKREDEQAFAKLNAQNLMFCEDAARRLKHAFEIKKDVLDYWFKVEHQESLHAHNAVAIDFKGASVSEQ

SEQ ID NO: 12330 - protein, 184 aa, Paraglaciecola polaris
  misc_feature (1)..(184): tr|K6YSE3|K6YSE3_9ALTE GTP cyclohydrolase 1 OS=Paraglac iecola polaris LMG 21857 OX=1129793 GN=folE2 PE=3 SV=1
MSDDLTHHYSQILSILGEDTKRGGLVDTPKRAAKAMQFLTNGYQKNLSDVVNGAIFEADTDEMVVIQNIEYYSLCEHHILPFIGQCHIAYLPKGKVLGLSKFARIVDMYARRLQIQEGLTKQIADAVQEVTGAAGVGVIMEGKHMCMTMRGVQKQNSSMVTSVMLGAMRKSDATRNEFLRLIGK

SEQ ID NO: 12331 - protein, 184 aa, Paraglaciecola psychrophila
  misc_feature (1)..(184): tr|K6Z2U2|K6Z2U2_9ALTE GTP cyclohydrolase 1 OS=Paraglac iecola psychrophila 170 OX=1129794 GN=folE PE=3 SV=1
MSDKLAGHYSDILSILGEDVSRGGLVDTPQRAAKAMQFLTDGYQKDLDGVVNGAIFEADTDEMVIIQDIEFYSLCEHHILPFIGRCHIAYLPNGKVLGLSKFARIVDMFARRLQIQEGLTKQIADAVQKVTGATGVGVIMEGKHMCMMMRGVQKQNSSMITSVMLGSMRTSDATRNEFLRLIGK

SEQ ID NO: 12332 - protein, 300 aa, Paraglaciecola psychrophila
  misc_feature (1)..(300): tr|K7A6H1|K7A6H1_9ALTE GTP cyclohydrolase FolE2 OS=Para glaciecola psychrophila 170 OX=1129794 GN=folE2 PE=3 SV =1
MLMNTLPDITSELKAETSSPLQWVGMEEIAVPISVRLSSKKLQTIPAKANVFVSLDTPDAKGIHMSRLHKTINKLAELECNKDNVEHLLNSLIESQLGISHQSKIELTFDLILNKPALLSDESGYQSYPVTLKAEKSDQGLNCQFSITIPYSSTCPCSASLARQLYASAIDEEFPGLAIDKATLMQWVQSQSGSIATPHSQRSYAYLHFALGNNDWPDLSWFIFELEKAIGTPVQTAVKRSDEQAFAKLNAENLMFCEDAARRIKSALEQASFVNDYWFKVEHQESLHAHNAVVIDQKQK

SEQ ID NO: 12333 - protein, 184 aa, Paraglaciecola sp.
  misc_feature (1)..(184): tr|A0A2N1DEB4|A0A2N1DEB4_9ALTE GTP cyclohydrolase 1 OS= Paraglaciecola sp. MB-3u-78 OX=2058332 GN=folE PE=3 SV= 1
MSDKLAGHYTDILSILGEDVSRGGLVDTPKRAAKAMQFLTDGYQKDLDGVVNGAIFEADTDEMVIIQDIEFYSLCEHHILPFIGRCHIAYLPNGKVLGLSKFARIVDMYARRLQIQEGLTKQIADAVQKVTGATGVGVIMEGKHMCMMMRGVQKQNSSMITSVMLGSMRTSDATRNEFLRLIGK

SEQ ID NO: 12334 - protein, 226 aa, Parahaliea aestuarii
  misc_feature (1)..(226): tr|A0A5C8ZXG0|A0A5C8ZXG0_9GAMM GTP cyclohydrolase 1 OS= Parahaliea aestuarii OX=1852021 GN=folE PE=3 SV=1
MDAVVANYPTHHRDAISDDARRVRNALLERGLETPLIDNGLNREEKFQRISDAFTEITRTLGLDLTDDSLCDTPDRIAKMYVDEIFAGLDYGEFPKVAVIDNKMQVEEMVLIDDIDLVSTCEHHFVTIDGSARVAYIPGERIIGLSKINRIVRFFAQRPQVQERLTQQVLVALQTLLETEDVAITINATHYCVKARGVMDSNSSTRTTALGGAFKSIPSTRAEFLR

SEQ ID NO: 12335 - protein, 182 aa, Parahaliea aestuarii
  misc_feature (1)..(182): tr|A0A5C9A4H0|A0A5C9A4H0_9GAMM GTP cyclohydrolase 1 OS= Parahaliea aestuarii OX=1852021 GN=folE PE=3 SV=1
MEDNWARIIEAIGEDLERPGLVDTPKRAAKAFEFLTRGYQQSVEDVVNNALFPSDSSEMVLVQDVELYSLCEHHLLPFIGKCHVAYIPTGKVLGLSKVARLVDVFARRLQIQESLTMQIAETIMDVTGAEGVGVIIEAQHMCMMMRGVEKQNSVMKTSAMLGCFRSSQKTREEFLSLLQLRR

SEQ ID NO: 12336 - protein, 275 aa, Paralcaligenes ureilyticus
  misc_feature (1)..(275): tr|A0A4R3M175|A0A4R3M175_9BURK GTP cyclohydrolase FolE2 OS=Paralcaligenes ureilyticus OX=627131 GN=folE2 PE=3 SV=1
MRAPDVVTMNSLIEPAVAMPDVQSTVDTRHIAIQRVGVRGVRHPMLVAGPDGQAIPTVAVWELTVALPPEEKGTHMSRFVALLEQYRAVPMTPALFCEMARSMLPLLHAQKGDITASFPYFLNKLAPVSGVASLMDYEIKWVARVGADALEFELSVLVPVTSLCPCSKAISEYGAHNQRSHVTVNVVLDGTAPIDIEALIRSIEAQASSELWGLLKRVDEKFVTEQAYENPKFVEDLVRDVAAQVKQLAGLQRFRIEAENFESIHNHSAYAVVEG

SEQ ID NO: 12337 - protein, 265 aa, Paralcaligenes ureilyticus
  misc_feature (1)..(265): tr|A0A4R3M8D3|A0A4R3M8D3_9BURK GTP cyclohydrolase FolE2 OS=Paralcaligenes ureilyticus OX=627131 GN=folE2 PE=3 SV=1
MNSPLDLPVALPDVQSSPDGRHLVIQRVGIRGARYPMQVVADDGSAQGTIADWTLTVELPAAEKGTHMSRFMALLEQYRAVAMTPAVFRTMTRDMLRLLHAQRGDITAQFPYFINKSAPVSGVNSLLDYDVQWTARAREEQVDFEMTLKIPVTSLCPCSKAISKYGAHNQRSHVTIFVALGGDLDMNQLIGLVEQEGSCELWGLLKRPDEKYVTEYAYNNPKFVEDLVRDVAVRLEDCPAIARYRVEAENFESIHNHSAYAVIEG

SEQ ID NO: 12338 - protein, 308 aa, Paraliobacillus ryukyuensis
  misc_feature (1)..(308): tr|A0A366EGW2|A0A366EGW2_9BACI GTP cyclohydrolase FolE2 OS=Paraliobacillus ryukyuensis OX=200904 GN=folE2 PE=3 SV=1
MGINTNGKKQLPNKQERHKLFGSVEPGKKTKPTDKEAMADLQNSQNNYLFDLDAVGISNVKYPVKVSSQLQPTTQSSIGEFSFSSSVAKDSKGTNMSRFTEQLHAYLIDGNFDVSLSNLKEFTKELAARLKRNDAFLEVTFPWFFERKGPASDLSGFNHADAYIRINYDKELGYDIITGITGTITTLCPCSKEISEYSAHNQRGKVSMEIGLADSFDENKIDWKQALLEAAESNASARIHPVLKRPDEKMVTEQAYENPRFVEDMVRLVAADLYEMEFVQAFHVVCQNEESIHLHDAIASITYDKSEE

SEQ ID NO: 12339 - protein, 309 aa, Paraliobacillus sp.
  misc_feature (1)..(309): tr|A0A0U1KNM1|A0A0U1KNM1_9BACI GTP cyclohydrolase FolE2 OS=Paraliobacillus sp. PM-2 OX=1462524 GN=folE2 PE=3 S V=1
MMGIGISRKIKLPSKYERHKLFGSVEPGPKVKPTEKGVMADLQNTQNDFLFDLDAVGIANVKYPVKINSDLNPSLQTSVGEFSFSSTVSKNSKGTNMSRFTEQLHAYLSDGSFDLSISNLKVFTKELAERLKRNDAFLEVSFSWFFERKSPSAAFSGLNHADAYIQINYNKDFGYDIITGLTGTITTLCPCSKEISEYSAHNQRGKMTMEIELNKDFDESVVDWKTFLLEAAESNASARIYPVLKRPDEKMVTEQAYENPRFVEDMVRLVAADLYEQDFVQAFHVICRNEESIHLHDAIASITYDKTNE

SEQ ID NO: 12340 - protein, 188 aa, Paramaledivibacter caminithermalis
  misc_feature (1)..(188): tr|A0A1M6NPU2|A0A1M6NPU2_9CLOT GTP cyclohydrolase 1 OS= Paramaledivibacter caminithermalis DSM 15212 OX=1121301 GN=folE PE=3 SV=1
MDKERIKKAVREILEAIGENPDREGLKDTPRRIADMYEEIFEGLNEDPGKHLEIYFQDEKHEELVLVKDIPFYSTCEHHFAPFFGKAHVGYLPKGGKLTGLSKLARVVETVARRPQLQERLTATIAETLMEKLNPHGVIVVVEAEHMCMTMRGIKKPGSKTVTSAVRGLFNKDAKARAEAMALINFGR

SEQ ID NO: 12341 - protein, 195 aa, Paramaledivibacter caminithermalis
  misc_feature (1)..(195): tr|A0A1M6R0C6|A0A1M6R0C6_9CLOT GTP cyclohydrolase 1 OS= Paramaledivibacter caminithermalis DSM 15212 OX=1121301 GN=folE PE=3 SV=1
MAINKEKIMEYIRGILIEIGEDIEREGLIDTPKRVADMYEEIFEGIRLTNDDIANMFKVTFDNDLDIVDKYDDMVLLKNIKIFSYCEHHLALMYNMSINIAYIPKDRVIGLSKMARIAEMVGKRLQLQERIGSDIAEILERIINTNDIAVIIKAEHACIAARGIKKTNSETITTTLRGKFNEDRGLLNNLMMLVK

SEQ ID NO: 12342 - protein, 208 aa, Paramesorhizobium deserti
  misc_feature (1)..(208): tr|A0A135HW67|A0A135HW67_9RHIZ GTP cyclohydrolase 1 OS= Paramesorhizobium deserti OX=1494590 GN=folE PE=3 SV=1
MDAILNLRESSARQGKKTVTRPTQQEAEAAVRTLLLWAGDNPDREGLLETPKRVVKSYKELFSGYEESPEEVLGTTFEEVAGYADPVLVKDINFHSHCEHHMLPIIGKAHIAYLPAGRVVGLSKIARLVDIFGRRLQTQESITAQIADAMDTILQPRGVAVMIEADHMCMAMRGIRKQGSTTITTTFKGTYHEDVNEQVRFMTMVRHG

SEQ ID NO: 12343 - protein, 182 aa, Paramuribaculum intestinale
  misc_feature (1)..(182): tr|A0A2V1IRD3|A0A2V1IRD3_9BACT GTP cyclohydrolase 1 OS= Paramuribaculum intestinale OX=2094151 GN=folE PE=3 SV= 1
MARLAECYRQIIEIIGEDPSREGLLRTPARAAKALWYATGGYRRSLQQTVGDAVFECQQREMVIVRDIEYHSLCEHHILPFYGHVSVGYLPKGKILGLSKLARIVDLYARRLQVQERLTDEICKAVARVLPTDGVMVSITGEHLCMKMRGVEKQDSATVTVATSGRFADDPALRAEFMASIR

SEQ ID NO: 12344 - protein, 205 aa, Paraoerskovia marina
  misc_feature (1)..(205): tr|A0A1H1PYJ0|A0A1H1PYJ0_9CELL GTP cyclohydrolase 1 OS= Paraoerskovia marina OX=545619 GN=folE PE=3 SV=1
MGETPDVGADLPGPDVVPPYDEDRARAAVRELLLAVGEDPDREGLVETPDRVARAYREIFAGLRQEPADVLTTTFDIGHQEMVLVKDIEVYSTCEHHLVPFHGVAHVGYIPSADGRITGLSKLARLVEVYARRPQVQERLTTQIADALVEHLDPRGVIVVIECEHLCMAMRGVRKPGARTVTSAVRGQMRDGTTRAEAMSLVLGR

SEQ ID NO: 12345 - protein, 210 aa, Parapedobacter composti
  misc_feature (1)..(210): tr|A0A1I1IZ60|A0A1I1IZ60_9SPHI GTP cyclohydrolase 1 OS= Parapedobacter composti OX=623281 GN=folE PE=3 SV=1
MEEHFSLNEEEIDGYVKIDRYNPEKVARIAAHYADILALLGEDPSRQGLLKTPERVAKALQFLTHGYDLDAAEILRSAMFEEEYSQMVVVKDIEVYSMCEHHMLPFFGKAHVAYIPNGHIVGLSKIPRVVDIFARRLQVQERLTNEIRDCIQQTLQPAGVAVVIECKHLCMCMRGVQKQNSVTTTSAFTGEFAHERTRSEFLRLITASLD

SEQ ID NO: 12346 - protein, 210 aa, Parapedobacter indicus
  misc_feature (1)..(210): tr|A0A1I3TAE6|A0A1I3TAE6_9SPHI GTP cyclohydrolase 1 OS= Parapedobacter indicus OX=1477437 GN=folE PE=3 SV=1
METNFPLNEEEIDGYVKIDRYNPEKIARIASHYTEILELLGEDPSRQGLLKTPERVAKALQYLTHGYDLDAAAILRGAMFEEEYSQMVVVKDIEVYSMCEHHMLPFFGKAHVAYIPNGHIVGLSKIPRVIDIFARRLQVQERLTNEIRDCIQNTLNPVGVAVVIECKHLCMCMRGVQKQNSVTTTSAFTGEFAHERTRNEFLRLITASLD

SEQ ID NO: 12347 - protein, 219 aa, Parapedobacter koreensis
  misc_feature (1)..(219): tr|A0A1H7IDK3|A0A1H7IDK3_9SPHI GTP cyclohydrolase 1 OS= Parapedobacter koreensis OX=332977 GN=folE PE=3 SV=1
MQEETEQLLVDEMGDAHIMTSIDTPLRPDAFDKPDEEKIANIARHFAAIMEELGLDLTDDSLRGTPHRVAKMYVRELFRGLDPANRPNLSVFENKYGYGRMLVEKDIDVSSACEHHFLPIIGRAHVGYIAGEKVIGLSKINRIVEYYSRRPQVQERLTLQVFNELKRALSTENVIVVVEAEHLCVSARGIRDPHSRTTTLEYGGLFADQKLRDEFLRMV

SEQ ID NO: 12348 - protein, 210 aa, Parapedobacter koreensis
  misc_feature (1)..(210): tr|A0A1H7T9D2|A0A1H7T9D2_9SPHI GTP cyclohydrolase 1 OS= Parapedobacter koreensis OX=332977 GN=folE PE=3 SV=1
MENNFPLNEEEIDGYVKIDRYNPEKIARIAGHYAEILELLGEDPSRAGLVKTPERVAKALQFLTHGYDLDAATVLRGAMFEEEYSQMVVVKDIEVYSMCEHHMLPFFGKAHVAYIPNGHIVGLSKIPRVVDIFARRLQVQERLTNEIRDCIHETLQPVGVAVVIECKHLCMCMRGVQKQNSVTTTSAFTGEFVHERTRHEFLRLITASLD

SEQ ID NO: 12349 - protein, 218 aa, Parapedobacter luteus
  misc_feature (1)..(218): tr|A0A1T5CVS5|A0A1T5CVS5_9SPHI GTP cyclohydrolase 1 OS= Parapedobacter luteus OX=623280 GN=folE PE=3 SV=1
MQNIPEQLLDDLGDAHVMTSIETPLRPDAFDKTDGEKIATIARHFAAIMEALGLDLTDDSLKGTPRRVAKMYVKELFRGLNPANKPDLSVFDNKYGYGRMLVEKDIDVSSACEHHFLPMIGRAHVGYIADKQVIGLSKINRIVEYYARRPQVQERLTLQVFNELKQALGTESVIVVINAEHLCVSARGVRDRGSRTTTLEYGGAFSDKELREEFLRMT

SEQ ID NO: 12350 - protein, 210 aa, Parapedobacter luteus
  misc_feature (1)..(210): tr|A0A1T5F8Z4|A0A1T5F8Z4_9SPHI GTP cyclohydrolase 1 OS= Parapedobacter luteus OX=623280 GN=folE PE=3 SV=1
MENNFPLNEEEIDGYVKIDRYNPEKVARIAAHYAEILELLGEDPSRSGLVKTPERVAKALQFLTHGYDLDAATVLRSAMFEEEYSQMVVVKDIEVYSMCEHHMLPFFGKAHVAYIPNGHIVGLSKIPRVVDIFARRLQVQERLTNEIRDCIHKTLQPAGVAVVVECKHLCMCMRGVQKQNSVTTTSAFTGEFVHERTRNEFLRLITASLG

SEQ ID NO: 12351 - protein, 210 aa, Parapedobacter sp.
  misc_feature (1)..(210): tr|A0A3N7JDZ4|A0A3N7JDZ4_9SPHI GTP cyclohydrolase 1 OS= Parapedobacter sp. OX=1958893 GN=folE PE=3 SV=1
METNFPLNEEEIDGYVKIDRYNPEKIARIAGHYTEILELLGEDPSRQGLLKTPERVAKALQYLTHGYDLDAAEILRGAMFEEEYSQMVVVKDIEVYSMCEHHMLPFFGKAHVAYIPNGHIVGLSKIPRVVDIFARRLQVQERLTNEIRDCIQDTLNPVGVAVVIECKHLCMCMRGVQKQNSVTTTSAFTGEFAHERTRNEFLRLITASLD

SEQ ID NO: 12352 - protein, 180 aa, Paraperlucidibaca baekdonensis
  misc_feature (1)..(180): tr|A0A3E0H0K8|A0A3E0H0K8_9GAMM GTP cyclohydrolase 1 OS= Paraperlucidibaca baekdonensis OX=748120 GN=folE PE=3 S V=1
MENAYADIIRAVGEDLGRPGLLDTPKRAAKAFKYLCKGYEEDLDTLVNGAVFPSDNDQMVLVKDIELYSLCEHHLLPFIGKVHVAYIPSGQVLGLSKVARIADMYARRLQIQENLTKQIADAIQQVTNARGVAVTIEAKHMCMMMRGVEKQNSVMKTSIMLGMFRENPQTRNEYLALINS

SEQ ID NO: 12353 - protein, 218 aa, Paraphotobacterium marinum
  misc_feature (1)..(218): tr|A0A220VEU3|A0A220VEU3_9GAMM GTP cyclohydrolase 1 OS= Paraphotobacterium marinum OX=1755811 GN=folE PE=3 SV=1
MINFTKEAMRVRDALIEKGIETPLQQNDSMSSEKTKNSIEYHVNEILKLLQLDLSDDSLKDTPKRIAKMYVEEIFSGLDYSNFPKITLIDNKMNCDEMVRVNKISLTSTCEHHFVVIDGYATVAYIPRKKIIGLSKINRVVRFFSQRPQVQERMTQQILVALQTLLESDDVAVKIDATHYCVKSRGVLDSTSSTTTTALGGIFKSNAATRYEFLNQSN

SEQ ID NO: 12354 - protein, 195 aa, Paraprevotella clara
  misc_feature (1)..(195): tr|G5SMP4|G5SMP4_9BACT GTP cyclohydrolase 1 OS=Paraprev otella clara YIT 11840 OX=762968 GN=folE PE=3 SV=1
MERQVYNETVQRELETHYKAVLALLGEDTEREGLQKTPYRVAKAMQTLTRGYAEDPKEILNSAKFKEDYRHMVIVKDIDFFSLCEHHMLPFYGKAHVAYIPNGYITGLSKIARVVDCFSHRLQVQERMTLQIRDCIQEALDPLGVMVVVEARHMCMQMRGVEKQNSVTTTSDFTGAFNQAKTREEFLNLIHRDSL

SEQ ID NO: 12355 - protein, 195 aa, Paraprevotella clara; identical to SEQ ID NO: 12354
  misc_feature (1)..(195): tr|R5N9G0|R5N9G0_9BACT GTP cyclohydrolase 1 OS=Paraprev otella clara CAG:116 OX=1263095 GN=folE PE=3 SV=1

SEQ ID NO: 12356 - protein, 195 aa, Paraprevotella xylaniphila
  misc_feature (1)..(195): tr|F3QTS9|F3QTS9_9BACT GTP cyclohydrolase 1 OS=Paraprev otella xylaniphila YIT 11841 OX=762982 GN=folE PE=3 SV= 1
MECQVYNETVQRELETHYKAVLALLGEDTEREGLQKTPYRVAKAMQTLTRGYAEDPKEILNSAKFKEDYRHMVIVKDIDFFSLCEHHMLPFYGKAHVAYIPNGYITGLSKIARVVDSFSHRLQVQERMTLQIRDCIQEALNPLGVMVVVEARHMCMQMRGVEKQNSVTTTSDFTGAFNQAKTREEFLNLIHRDSL

SEQ ID NO: 12357 - protein, 308 aa, Pararheinheimera mesophila
  misc_feature (1)..(308): tr|A0A3P3QQ65|A0A3P3QQ65_9GAMM GTP cyclohydrolase FolE2 OS=Pararheinheimera mesophila OX=1547515 GN=folE2 PE=3 SV=1
MPTTMPDVANHSSATTEGVLEWVGMSNIELPLMLSVAGEAPRQVSAKVEAFVNLKDPKAKGIHMSRLYLLLDQLSIESSLSFASLSELLHGFISSHEELSTHAFVKFDFELHLRRKALITEKQGWKAYPVTITGQLKEGKLGVEMKVDVPYSSTCPCSAALARQLIQDAFVAKFAGHAQVNAEQVKDWLGTTQGIVATPHSQRSVAEIKVQLNHKVTDFPVIALIDAIEDALQTPVQAAVKRADEQEFARLNGQNLMFCEDAARRLKHALNQLSEFDDFWLRVNHYESLHAHDAVAVTVKGIANGYHA

SEQ ID NO: 12358 - protein, 214 aa, Pararheinheimera mesophila
  misc_feature (1)..(214): tr|A0A3P3QC49|A0A3P3QC49_9GAMM GTP cyclohydrolase 1 OS= Pararheinheimera mesophila OX=1547515 GN=folE PE=3 SV=1
MLTESALVVRSALEAAGLETPMLDNGLSNEQKKQRLTELMTQVVHTLGLDLTDDSLAETPARIAKMYVDEVFSGLDYRTFPKISMIDNKMRAEEMVKVQNISFTSTCEHHFVTIDGTATVAYIPGQKIIGLSKLNRIVKFFAQRPQVQERLTQQIQVALQALLGVKDVAVSIDAVHYCVKSRGVMDTSSSTKTMALGGTFKTDAATRAEFLSKF

SEQ ID NO: 12359 - protein, 214 aa, Pararheinheimera tangshanensis
  misc_feature (1)..(214): tr|A0A5C8LSK1|A0A5C8LSK1_9GAMM GTP cyclohydrolase 1 OS= Pararheinheimera tangshanensis OX=400153 GN=folE PE=3 S V=1
MLTESALVVRGALEAAGLETPMLDNGLSNEQKKQRLTELMTQVVHTLGLDLTDDSLAETPARIAKMYVDEVFSGLDYSTFPKISMIDNKMRAEEMVKVQNISFTSTCEHHFVTIDGTATVAYIPGKKIIGLSKLNRIVKFFAQRPQVQERLTQQIQVSLQALLGVKDVAVSIDAVHYCVKSRGVMDTSSSTKTMALGGAFKTDPATRSEFLSKF

SEQ ID NO: 12360 - protein, 308 aa, Pararheinheimera tangshanensis
  misc_feature (1)..(308): tr|A0A5C8LVB8|A0A5C8LVB8_9GAMM GTP cyclohydrolase FolE2 OS=Pararheinheimera tangshanensis OX=400153 GN=folE2 P E=3 SV=1
MPTTMPDVANHSSATTEGVLEWVGMSNIELPLMFSVAGEAPRQVSAKVEAFVNLKDPKAKGIHMSRLYLLLDQLSTESSLSFASLSELLHGFISSHEELSTHAFVKFDFELHLRRKALITEKQGWKAYPVTITGQLKDGKLGVEMKVDVPYSSTCPCSAALARQLIQEAFVAKFAGHAQVNAEQVKDWLGTTQGIVATPHSQRSIAEIKVQLNHKVTDFPVIALIDAIEDALQTPVQAAVKRADEQEFARLNGQNLMFCEDAARRLKHSLNQLSEFDDFWLRVNHYESLHAHDAVAVTVKGIANGYHA

SEQ ID NO: 12361 - protein, 205 aa, Pararhizobium polonicum
  misc_feature (1)..(205): tr|A0A1C7P624|A0A1C7P624_9RHIZ GTP cyclohydrolase 1 OS= Pararhizobium polonicum OX=1612624 GN=folE PE=3 SV=1
MDAIVKNFPALPATDGRPSQKEAEDAVRVLLRWAGDDPQREGLLDTPARVAKAYKELFSGYDLAAEDVLGRTFEEVGGYDDIVLVKDIPFFSHCEHHMVPIIGKAHIAYLPNGKVLGLSKIARVVDIYGRRLQTQETMTAQIAKAIDDTLQPRGVAVMIEAEHMCMAMRGVQKQGSTTLTTTFTGAFKTEPAEQARFMTMLRGFK

SEQ ID NO: 12362 - protein, 207 aa, Pararhizobium sp.
  misc_feature (1)..(207): tr|A0A506U9X6|A0A506U9X6_9RHIZ GTP cyclohydrolase 1 OS= Pararhizobium sp. BGMRC6574 OX=2590452 GN=folE PE=3 SV= 1
MDARVEPFPEPAAADRRPSRAEAEEAVRTLLRWTGDDPTREGLRDTPRRVVDSYRELFAGYDQDAAEILGRTFEEVSGYDDIVLVKDIPFFSHCEHHMVPIIGKAHVAYLPDERVLGLSKIARVVEIFARRLQTQEALTAQITDAIDETLGPRGVAVMIEAEHLCMSMRGVRKQGSLTTTSRFTGAFKDHAQNQAHFFALLRGRDAA

SEQ ID NO: 12363 - protein, 366 aa, Pararhodobacter aggregans
  misc_feature (1)..(366): tr|A0A2T7UJI7|A0A2T7UJI7_9RHOB GTP cyclohydrolase FolE2 OS=Pararhodobacter aggregans OX=404875 GN=folE2 PE=3 S V=1
MNIQQPIGNREPSRTEAEAALDTLRAWADRASDDEIAGLDPRLLRLIPGLPDPAYPVMSREYPAHFVPDESYKRTMPDLQNGPASLIRGANRPIQHVGISNFRLPVRFRTREGGDVTLQASVTGTVSLEADKKGINMSRIMRSFYQHAEKQFSVWVIAAALDDYKADLESFDARIQMRFSFPMKVESLRSGLMGWQYYDIALELVDQAGVRRQFLHLDYVYSSTCPCSLELSEHARAGRGQLATPHSQRSVARLSVEVLPGKVLWFEDLIDLCRRAVPTETQVMVKREDEQAFAELNAANPIFVEDAARLFCEVLEDDARIGDFRVVASHQESLHSHDAVSVLTRGETFASASLDPRLFSTLIHAG

SEQ ID NO: 12364 - protein, 373 aa, Pararhodobacter sp.
  misc_feature (1)..(373): tr|A0A2T8HYV3|A0A2T8HYV3_9RHOB GTP cyclohydrolase FolE2 OS=Pararhodobacter sp. AM505 OX=2172121 GN=folE2 PE=3 SV=1
MNIQKPAADFEPDTAQAEAALDVLRAFAARASDAQLAAMDPALRRLLPGEPDPAYPEFRRDYPAEFEADTAYKRTMPDLQNGPSSLIKGARTAIQHVGISNFRLPIRFMTRDGGGDSAEHGDVTLQASITGTVSLEAEKKGINMSRIMRSFYVHAEKRFSSQVVEAALDDYKNDLESFDARIQMRFSFPLKVNSLRSGLTGWQYYDIALELVDTGGVRRQFIHLDYVYSSTCPCSLELSEHARAGRGQLATPHSQRSVARISVEVLPGKVLWFEDLIDACRSAVPTETQVMVKREDEQAFAELNAANPIFVEDAARLFCEALEGDARIGDFRVVASHQESLHSHDAVSVLTRGAAFEAQSLDPKLFSTLIHIG

SEQ ID NO: 12365 - protein, 366 aa, Pararhodobacter sp.
  misc_feature (1)..(366): tr|A0A2U2C7W7|A0A2U2C7W7_9RHOB GTP cyclohydrolase FolE2 OS=Pararhodobacter sp. CIC4N-9 OX=2184063 GN=folE2 PE= 3 SV=1
MNIHMPLDERDPTQSEAEAALDTLRAWANRASDEDISALDPRLRRLIPGLPDPAYPDLSATYPADFAPDEAYKRSMPDLQNGPASLIRGARAPIQHVGISNFRLPVRFRNREGGDTTLQASVTGTVSLDADKKGINMSRIMRSFYQHAEKLFSVKVIEAALDDYKADLESFDARIQMRFSFPMKVDSLRSGLSGWQYYDIALELVDQGGVRRQFLHLDYVYSSTCPCSLELSEHARSGRGQLATPHSQRSVARISVEVVAGQVLWFEDLIDLCRRAVPTETQVMVKREDEQAFAELNAANPIFVEDAARLFCEAMRSDSRIGDFRVVASHQESLHSHDAVSVLTQGPTFQSESLDPKLFSTLIHVG

SEQ ID NO: 12366 - protein, 243 aa, Pararhodospirillum oryzae
  misc_feature (1)..(243): tr|A0A512H8Y2|A0A512H8Y2_9PROT GTP cyclohydrolase 1 OS= Pararhodospirillum oryzae OX=478448 GN=folE PE=3 SV=1
MPFPVACRRDRQKEPLPVSISTTHREEPAAVFDSLKGGSLSKPTHPIHRPSREEAEEAVRTLLRWAGDDPNREGLFDTPARVVRAYEEFFEGYRADPEEILRRTFEEVEGYDEMVLLRDIRLESHCEHHMVPILGKAHIAYLPNRRVVGISKLARVAEAYAKRLQIQEKMTAQIANAINDVLEPKGVAVVIEAAHQCMTTRGVRKPGVTMVTSRMLGAFRQDSDTRREFLHLIGQGRDPSLGA

SEQ ID NO: 12367 - protein, 225 aa, Pararhodospirillum photometricum
  misc_feature (1)..(225): tr|H6SSA0|H6SSA0_PARPM GTP cyclohydrolase 1 OS=Pararhod ospirillum photometricum DSM 122 OX=1150469 GN=folE PE= 3 SV=1
MTSIIDRGEPRVVLDPLEGGALSKPSYPTHKPSRQEAEEAVRVLLRWAGDDPNREGLFDTPARVVRAYEEFFEGYGADPEEILRRTFEEVEGYDEMVLLRDIRLESHCEHHMVPIIGKVHIAYLPNRRVVGISKLARVAEAYAKRLQIQETMTAQIANAINTVLEPKGVAVVVEAAHQCMTTRGIRKPGVTMVTSRMLGAFRDNSDTRREFLHLIGQVRDASLGA

SEQ ID NO: 12368 - protein, 184 aa, Parasaccharibacter apium
  misc_feature (1)..(184): tr|A0A2C6IAU9|A0A2C6IAU9_9PROT GTP cyclohydrolase 1 OS= Parasaccharibacter apium OX=1510841 GN=folE PE=3 SV=1
MERIAGGVRELLLAIGEDPSREGLRDTPERVAKMYLEVFSGLYEDPRDHLKKQFSADHHSGMVLVKDIRFHSTCEHHLLPVIGRAHVAYLPEGGRLTGLSKLARVVEGYARRPQLQERLTDQIVQALVEILEPKAVLVMIEAEHMCMSLRGVRSPGATTVTTGSYGLWAEDAQARQEVMGLMRD

SEQ ID NO: 12369 - protein, 213 aa, Parasaccharibacter apium
  misc_feature (1)..(213): tr|A0A2S4PD98|A0A2S4PD98_9PROT GTP cyclohydrolase 1 OS= Parasaccharibacter apium OX=1510841 GN=folE PE=3 SV=1
MSANETGIPGKQAPTPEGAAGAITRPEDAISRIAGGVRELLLAIGEDPSREGLRDTPDRVAKMYLEIFSGLYEDPRDHLKKQFSADQHGGMVLVKDIRFQSTCEHHLLPVLGRAHVAYLPEGGRLTGLSKLARVVEGYARRPQLQERLTDQIVQAMVEVLEPKAVLVVVEAEHMCMSLRGVRSPGATTVTTGSYGLWADDAQARQEVMALMRD

SEQ ID NO: 12370 - protein, 217 aa, Parascardovia denticolens
  misc_feature (1)..(217): tr|E6K0Y9|E6K0Y9_PARDN GTP cyclohydrolase 1 OS=Parascar dovia denticolens DSM 10105 = JCM 12538 OX=864564 GN=fo lE PE=3 SV=1
MMTMSETTEGIESSRSPRPPYPSCPSRPFDADGVKRAVRLYLQSIGEDPDREGLKDTPDRIARASQEIFSGMSQNPRDVLGARFNVATEDLVVVRDIEFYSVCEHHLLPFHGLAHIGYIPDKNRVVGLSKLARLVQVFAHRPQIQERMTQQIADALMDELGAKGAIVITDCEHMCMSMRGVKESQARTVTSAVRGYLRQSDTRAEALRLILDAPQLR

SEQ ID NO: 12371 - protein, 214 aa, Parascardovia denticolens
  misc_feature (1)..(214): tr|I8J8I1|I8J8I1_PARDN GTP cyclohydrolase 1 OS=Parascar dovia denticolens IPLA 20019 OX=1193128 GN=folE PE=3 SV =1
MSETTEGIESSRSPRPPYPSCPSRPFDADGVKRAVRLYLQSIGEDPDREGLKDTPDRIARASQEIFSGMSQNPRDVLGARFNVATEDLVVVRDIEFYSVCEHHLLPFHGLAHIGYIPDKNRVVGLSKLARLVQVFAHRPQIQERMTQQIADALMDELGAKGAIVITDCEHMCMSMRGVKESQARTVTSAVRGYLRQSDTRAEALRLILDAPQLR

SEQ ID NO: 12372 - protein, 224 aa, Parashewanella curva
  misc_feature (1)..(224): tr|A0A3L8PVW9|A0A3L8PVW9_9GAMM GTP cyclohydrolase 1 OS= Parashewanella curva OX=2338552 GN=folE PE=3 SV=1
MTIQAVTINTPTLSDAASKVQQALIERGLETPMRDNTLSPEQQKDKIEHHMREILNTLALDLTDDSLADTPKRIAKMYVNEVFSGLDYSNFPKITVIENKMNVDEMIKVKDISLTSTCEHHLVTIDGVATVAYLPRKKIIGLSKINRIVRFFAQRPQVQERLTQQVLVALQTLLDTDNVAVKIDAVHYCVKARGVMDATSETSTSALGGIFKSDPSTRSEFLSR

SEQ ID NO: 12373 - protein, 225 aa, Parashewanella spongiae
  misc_feature (1)..(225): tr|A0A3A6U0B4|A0A3A6U0B4_9GAMM GTP cyclohydrolase 1 OS= Parashewanella spongiae OX=342950 GN=folE PE=3 SV=1
MTIQAVTLNQPLLSDAALKVQQALIEKGLETPMLPNTLSSEQRKEKIEHHMREILSLMALDLNDDSLADTPRRVAKMYIDEIFSGLDYCNFPKITMIDNKMNVEEMIKVQDISLTSTCEHHLVTIDGVATVAYLPRKKIIGLSKINRIVRFFAQRPQVQERLNQQVLIALQTLLETNDVAVKMDAVHYCVKSRGIMDATSSTTTSALGGIFKSDPATRAEFLMRK

SEQ ID NO: 12374 - protein, 205 aa, Parasphingopyxis lamellibrachiae
  misc_feature (1)..(205): tr|A0A3D9FE16|A0A3D9FE16_9SPHN GTP cyclohydrolase 1 OS= Parasphingopyxis lamellibrachiae OX=680125 GN=folE PE=3 SV=1
MSDFDHAIDGDLDPLPGKIAVPDDVQEAIRTLIRWSGDDPTREGLIDTPQRVGRAWKEYCQGYEEDPSVHLSRTFEEVGGYDELVLLKDIPFQSHCEHHMAPIIGTASIAYMPKERVVGISKLARVLNGYARRLQVQERMTAEIAQCIWDHLQPSGVAVVICASHSCMTARGVRTPGVRMMTSRLLGCFLDDDRSRKEVLSLMGY

SEQ ID NO: 12375 - protein, 187 aa, Parasporobacterium paucivorans
  misc_feature (1)..(187): tr|A0A1M6FWB7|A0A1M6FWB7_9FIRM GTP cyclohydrolase 1 OS= Parasporobacterium paucivorans DSM 15970 OX=1122934 GN= folE PE=3 SV=1
MDKDRIEKAVREILYAVGENPDREGLIDTPRRIAKMYEEIFSGIDQDPAKHLEIYFQEEKYEELVLIKDIPFYSVCEHHLVPFFGKAHVGYLPKDGKLTGLSKLARVVETVAKRPQLQERLTASVADAIQNTLEPYGVIVVVEAEHMCMTMRGVKKPGSKTITSAVRGVFASDAKARAEVLSIINMK

SEQ ID NO: 12376 - protein, 268 aa, Parasutterella excrementihominis
  misc_feature (1)..(268): tr|R5EGZ5|R5EGZ5_9BURK GTP cyclohydrolase FolE2 OS=Para sutterella excrementihominis CAG:233 OX=1263099 GN=folE 2 PE=3 SV=1
MTDNKLMVLPDVQSSADRRNIPIRRVGVKGIRTPILVKSQSGAQHTVADVEMYVSLPADKKGTHMSRFWTLLGGINKPFAPQMMVEVMQEMLASLKSDGGYIRLAFPFFMEKSAPVSHLQSTMDYDVVLTAECADGKITVTQEVIAPVTSLCPCSKEISKYGAHNQRSHVSITAELETNFPIEKQIEMIESCASCQVWGLLKRSDEKYVTEHAYENPKFVEDLVRDVAIRCQDEPAILAFTVEAENFESIHNHSAFASLHFDKRQTAE

SEQ ID NO: 12377 - protein, 268 aa, Parasutterella excrementihominis; identical to SEQ ID NO: 12376
  misc_feature (1)..(268): tr|F3QP33|F3QP33_9BURK GTP cyclohydrolase FolE2 OS=Para sutterella excrementihominis YIT 11859 OX=762966 GN=fol E2 PE=3 SV=1

SEQ ID NO: 12378 - protein, 187 aa, Parcubacteria group; identical to SEQ ID NO: 6283
  misc_feature (1)..(187): tr|A0A0G0S7X9|A0A0G0S7X9_9BACT GTP cyclohydrolase 1 OS= Parcubacteria group bacterium GW2011_GWA2_40_37 OX=1618 817 GN=folE PE=3 SV=1

SEQ ID NO: 12379 - protein, 195 aa, Parcubacteria group
  misc_feature (1)..(195): tr|A0A0G1H3B3|A0A0G1H3B3_9BACT GTP cyclohydrolase 1 OS= Parcubacteria group bacterium GW2011_GWA2_43_17 OX=1618 827 GN=folE PE=3 SV=1
MNKIKKTSVDAERIKRAVKEILLAVGEDVSREGLIDTPDRVARMYVELLSGMSDSPDVYFESAFTENYDEIVLLRNIPFYSICEHHLMPFIGKAHVAYLPKGKVLGVSKLARIVDSYAHRLQLQERFTSQIADSLMSGIKPMGVVVVIEASHSCMTIRGIKKPGAVMVTSTVRGLFRSDQRARSEVMSLLHDNHI

SEQ ID NO: 12380 - protein, 251 aa, Parendozoicomonas haliclonae
  misc_feature (1)..(251): tr|A0A1X7AFA6|A0A1X7AFA6_9GAMM Putative GTP cyclohydrol ase 1 type 2 OS=Parendozoicomonas haliclonae OX=1960125 GN=EHSB41UT_00694 PE=4 SV=1
MKLKDLVKVLNDELQPEQFKDYCPNGLQVEGKPEVFKLATGVTACEELIEQAIAWGADAILVHHGFFWKNERDEIVGMKKRRLQKLLTHDISLLGYHLPLDAHETMGNNATLAALLDITTTGPLDPAEKRPVGNIGEITASLSLEQFAEHIEKKLNRKPLVISGGDHPVKSVAWCTGGAQGFISLAVNAGVDVYISGEISESTVHTAREEGVHYISAGHHATEKGGVQAFGEWLQKQHGIEHRFFDIPNPV

SEQ ID NO: 12381 - protein, 190 aa, Parendozoicomonas haliclonae
  misc_feature (1)..(190): tr|A0A1X7AFU4|A0A1X7AFU4_9GAMM GTP cyclohydrolase 1 OS= Parendozoicomonas haliclonae OX=1960125 GN=folE PE=3 SV =1
MSQNSSMTPDISEHYKAILEGLGEDPQRDGLKDTPKRAAKAMAYLTRGYQQDLGDIVNGAVFESDNDEMVVVRDIELYSLCEHHLLPFIGKAHVAYLPNGKVLGLSKFARIVDMFARRLQIQENMTLEIAKAIEEVTGARGVAVVIEAKHMCMMMRGVEKQNSSMTTSVMRGDFRDSLPTREEFLRYISK

SEQ ID NO: 12382 - protein, 195 aa, Parolsenella catena
  misc_feature (1)..(195): tr|A0A3G9K746|A0A3G9K746_9ACTN GTP cyclohydrolase 1 OS= Parolsenella catena OX=2003188 GN=folE PE=3 SV=1
MENENLGVDRPRVEAAVRELLIGIGEDPDRPGLVGTPDRVARACEELFGGIADDPARHLRKQFHEPGNEELVVVRDIPFHSMCEHHLLPFIGRAHVAYIPRDGRITGLSKIARCVAGYAARPQLQERLTAQVADAMVDELDPLGVLVVIEAEHTCMTMRGIRAAGAMTVTSAVRGSLRSDARSREEALSLLHVSA

SEQ ID NO: 12383 - protein, 188 aa, Parvibacter caecicola
  misc_feature (1)..(188): tr|A0A3N0A8J0|A0A3N0A8J0_9ACTN GTP cyclohydrolase 1 OS= Parvibacter caecicola OX=747645 GN=folE PE=3 SV=1
MDNAKIEEGVRLILEGVGEDPNREGLLDTPARVARMYNEVFAGLEENPAKHFQVTFDEHHDGIVLVRDIPFYSMCEHHLVPFFGTAHVAYLPSEEGRLCGISKLARLVDVFAKRPQVQERLTAQVADTLMEQLNPRGVAVVMEAEHMCMSMRGVKKPGSKTTTSVVRGLFESDPAVKAEVMSLIFRPV

SEQ ID NO: 12384 - protein, 188 aa, Parvibacter caecicola
  misc_feature (1)..(188): tr|A0A4T9TA84|A0A4T9TA84_9ACTN GTP cyclohydrolase 1 OS= Parvibacter caecicola OX=747645 GN=folE PE=3 SV=1
MDNAKIEEGVRLILEGVGEDPNREGLLDTPARVARMYNEVFAGLEENPAKHFQVTFDEHHDGIVLVRDIPFYSMCEHHLVPFFGTAHVAYLPSEEGRLCGISKLARLVDVFAKRPQVQERLTAQVADTLMEQLNPRGVAVVMEAEHMCMSMRGVKKPGSKTTTSVVRGLFESDPVVKAEVMSLIFRPV

SEQ ID NO: 12385 - protein, 222 aa, Parvibaculum lavamentivorans
  misc_feature (1)..(222): tr|A7HWI9|A7HWI9_PARL1 GTP cyclohydrolase 1 OS=Parvibac ulum lavamentivorans (strain DS-1 / DSM 13023 / NCIMB 1 3966) OX=402881 GN=folE PE=3 SV=1
MAGKPLDEIGRMDMNAAVDGLRAQPDDERLTQVEKPSREAAEAAVRTLIAWAGDNPQREGLIDTPGRVVRAYEEFFEGYNEDPYKELTRTFEEVEGYNDMVMLRDINIESHCEHHMVAILGKAHVAYVPTKKVVGISKLARVIEIYSKRLQTQETMTAQIAETINAALQPQGVAILIEAKHQCMTTRGIKKPDVATITTQFTGVFRDDPRMESRFMQMIRGY

SEQ ID NO: 12386 - protein, 207 aa, Parvibaculum sp.
  misc_feature (1)..(207): tr|A0A2D8XCT7|A0A2D8XCT7_9RHIZ GTP cyclohydrolase 1 OS= Parvibaculum sp. OX=2024848 GN=folE PE=3 SV=1
MNSVVEDVLENIKKSDNPDRPSRKEAEAAVRTLISWAGDDPAREGLIETPKRVVKAYEEFFAGYDEDPDQVLGKTFEEVEGYDDMVMLRDIDLESHCEHHMVAILGKAHIAYVPTSKVVGISKLARVIEIYAKRLQTQETMTAQVADTINRVLAPKGVAILIEAKHQCMTTRGIKKPDVATITTQFTGVFKEDPNMERRFLSMIRGY

SEQ ID NO: 12387 - protein, 209 aa, Parvibaculum sp.
  misc_feature (1)..(209): tr|A0A2E1EEN9|A0A2E1EEN9_9RHIZ GTP cyclohydrolase 1 OS= Parvibaculum sp. OX=2024848 GN=folE PE=3 SV=1
MNAAVDGLRAQTGNERLAEVKKPSREEAEAAVRTLIAWAGDNPDREGLIDTPGRVVRAYEEFFEGYEIDPYKELTRTFEEVEGYQDMVMLRDINIESHCEHHMVAILGRAHIAYVPTKKVVGISKLARVIEIYARRLQTQETMTAQIADTINAALQPQGVAILIEAKHQCMTTRGIKKPDVATITTQFTGVFRDDPRMEARFMQMIRGY

SEQ ID NO: 12388 - protein, 255 aa, Parvibium lacunae
  misc_feature (1)..(255): tr|A0A368L8E2|A0A368L8E2_9BURK GTP cyclohydrolase FolE2 OS=Parvibium lacunae OX=1888893 GN=folE2 PE=3 SV=1
MPDVQGFADERHLAIQRVGVKGVRHPLQIRTANGQVQPTVAIWNLYVHLPDTQKGTHMSRFLALLEERSAPLDVNEFAELLQVMLVRLEAHSGHVEATFPYFIKKIAPVSGVSSLLDYEVSLLGTVTQGNVELALRVLVPVTSLCPCSKKISDYGAHNQRSHVTVTAHLANTNLSIEELVRLVEDEASCELFGLLKRPDEKWVTERAYDNPKFVEDLVRDVAGRLKADSRISKFVVEAENFESIHNHSAYALIEG

SEQ ID NO: 12389 - protein, 264 aa, Parvibium lacunae
  misc_feature (1)..(264): tr|A0A368L0Q2|A0A368L0Q2_9BURK GTP cyclohydrolase FolE2 OS=Parvibium lacunae OX=1888893 GN=folE2 PE=3 SV=1
MNAPEKLFLPDVQNHLDTRNLVIQRVGVKSIVHPVQLRTAAGVQPSVAHIDMYVRLPAEVKGTHMSRFLEVLQEQHDPLSYDTLQTLMRAMLLKLDATCGYIEMRFPYFIQKTAPVSGVASLLDYQVTLRAEVVPSQPGVVQISQQVLVPVTSLCPCSKKISDYGAHNQRSHVTINLQLNAPLAIEEQVRIAEDAASCELWGLLKRPDEKWVTERAYDNPKFVEDLVRDIALKLQQDARVQRFTVESENFESIHNHSAYALIEG

SEQ ID NO: 12390 - protein, 192 aa, Parvularcula bermudensis
  misc_feature (1)..(192): tr|E0TCM3|E0TCM3_PARBH GTP cyclohydrolase 1 OS=Parvular cula bermudensis (strain ATCC BAA-594 / HTCC2503 / KCTC 12087) OX=314260 GN=folE PE=3 SV=1
MTKANRPSRADAEEAVRTILSYIGEDPQREGLIDTPKRFIGAYDDWFKGYSEDPEEFLSRTFEEVEGYDDIVLLRNIRVESHCEHHVAPIIGTAHVGYLPSDRVVGLSKIARVVDAYSKRLQSQETLTNQIAGALDRVLQPRGVAVIIDAEHQCISTRGIHKDDISCVTRSFTGDFKADPRMEDRFYRLIGG

SEQ ID NO: 12391 - protein, 203 aa, Parvularcula bermudensis
  misc_feature (1)..(203): tr|E0TBN0|E0TBN0_PARBH GTP cyclohydrolase 1 OS=Parvular cula bermudensis (strain ATCC BAA-594 / HTCC2503 / KCTC 12087) OX=314260 GN=folE PE=3 SV=1
MSVIAYERSPHARDHDRPSREAAEEAVRTLIKWAGDDPGREGLIDTPARVARAFEDWFSGYGEDAEAVLSRTFEEVEGYDDIVLMRDIRLESYCEHHMAPIIGKAHIAYLPDGKVVGISKLARLVDIFGKRLQVQEKMTAQIADTLERVLKPKGVAIMVEAEHQCMSTRGVHKHGVDTMTTRFTGVFKDDPALESRFFKLIGR

SEQ ID NO: 12392 - protein, 167 aa, Parvularcula sp.
  misc_feature (1)..(167): tr|A0A355C1I1|A0A355C1I1_9PROT GTP cyclohydrolase 1 (Fr agment) OS=Parvularcula sp. OX=1979207 GN=folE PE=3 SV= 1
DDPAREGLIDTPKRVVKAYEEWFGGYDEDAEAILARTFDEVEGYDDIVLVRDIRLESTCEHHMAPIVGKAHIAYLPSARVVGLSKLARLVDVFGKRLQVQEKLTAQIAAALQSALEPRGVAVMIEAEHHCMSTRGVRRHGADTVTTRFTGAFQADMALQDRFLRLVK

SEQ ID NO: 12393 - protein, 196 aa, Parvularcula sp.
  misc_feature (1)..(196): tr|A0A357L8R4|A0A357L8R4_9PROT GTP cyclohydrolase 1 OS= Parvularcula sp. OX=1979207 GN=folE PE=3 SV=1
MVKVPKRSGDPRVRAEAAVRELIRWAGDDPDREGLVETPQRVVDAWREYFRGYAEDPDAYLKRTFEQVGGYDEIVLLRDIPFHSHCEHHMAPIIGKAHVGYMPRARVVGISKLARVVHAYARRLQVQERMTAEIADCIERVLEPLGTAVVIEATHACMTCRGVETPGVIMTTSRMIGLFRDDPRSRAEVLKLMGFC

SEQ ID NO: 12394 - protein, 204 aa, Parvularculaceae bacterium
  misc_feature (1)..(204): tr|A0A520R5Z6|A0A520R5Z6_9PROT GTP cyclohydrolase 1 OS= Parvularculaceae bacterium OX=2510335 GN=folE PE=3 SV=1
MSAETIQLAQTVTKPRPDRTEAEEAVRTLLSYFGEDPTREGLVDTPKRFVDAFAEFLGGYTQNPTDILGRTFEEVDGYDDIVLMKNIRLESHCEHHIVPIIGEAHVAYLPSDRVVGISKIARVVDAFAHRLVSQETLTEQIADAIDYALKPRGVAVLIDAQHYCISTRGVHKPDVACVTQKMTGAFKDDPQMEERFFRLIQGQR

SEQ ID NO: 12395 - protein, 189 aa, Parvularculaceae bacterium
  misc_feature (1)..(189): tr|A0A520R9X6|A0A520R9X6_9PROT GTP cyclohydrolase 1 OS= Parvularculaceae bacterium OX=2510335 GN=folE PE=3 SV=1
MTKPTRAEAEEAVRTLIKWAGDDPTREGLVDTPKRVAKAYEEWFTGYDEDPEEILERTFEEVDGYDDIVLLRNIRLESYCEHHIAPIIGTAHVAYLPSERVVGISKLARLVDAYAKRLQVQETLTAQIASAIEKVLQPRGVAVVIAAEHQCMSTRGVHKNGVDTVTTRFTGEFRDNPALEERFLRLTQS

SEQ ID NO: 12396 - protein, 217 aa, Pasteurella aerogenes
  misc_feature (1)..(217): tr|A0A448JZX1|A0A448JZX1_PASAE GTP cyclohydrolase 1 OS= Pasteurella aerogenes OX=749 GN=folE PE=3 SV=1
MDSILPEAKKVRNALIAKGIETPMIAPQQSKDERRAGIEQHMREVMKLIGLDLDDDSLEETPARLAKMFIDEIFSGLDYANFPKITNIENRMKVSEMVLVNDITLTSTCEHHFVTIDGVVSVAYYPKKWVIGLSKINRVVSFFAQRPQVQERLTEQILLAFQTILETEDVAVYVKATHFCVKCRGIKDTNSYTVTSAFGGVFLDDRETRKEFLTLIR

SEQ ID NO: 12397 - protein, 218 aa, Pasteurella bettyae
  misc_feature (1)..(218): tr|I3DIA3|I3DIA3_9PAST GTP cyclohydrolase 1 OS=Pasteure lla bettyae CCUG 2042 OX=1095749 GN=folE PE=3 SV=1
MTIISAEAEKVRNALIEKGIETPMIALTQTKDERRTHIEKHMREVMQLIGLDLTDDSLEETPVRLAKMFVDEIFSGLDYVNFPKITNIENRMKVSEMVLVNDITLTSTCEHHFVTIDGLVSVAYYPKKWVIGLSKINRVVKFFAQRPQVQERLTEQILLAFQTILETEDVAVYMKATHFCVKCRGIEDSNSYTVTSAFGGVFLQDRETRKEFLTLINK

SEQ ID NO: 12398 - protein, 218 aa, Pasteurella caecimuris
  misc_feature (1)..(218): tr|A0A4S2EC11|A0A4S2EC11_9PAST GTP cyclohydrolase 1 OS= Pasteurella caecimuris OX=1796644 GN=folE PE=3 SV=1
MSNISQDALNVRDALVAKGIETPMITPNPNKDERRSGIASHMREVMKLIGLDLGDDSLEETPNRLAKMFVDEIFSGMDYANFPKMTKIKNQMKVSEMVQVNDITLTSTCEHHFVTIDGNVAVAYYPKDWVIGLSKINRIVAFFAQRPQVQERLTEQLLTAFQTILETDDVAVYVKATHFCVKARGVKDTNSYTVTSAYGGVFLEDRETRKEFLASIQK

SEQ ID NO: 12399 - protein, 218 aa, Pasteurella canis
  misc_feature (1)..(218): tr|A0A379ETN1|A0A379ETN1_9PAST GTP cyclohydrolase 1 OS= Pasteurella canis OX=753 GN=folE PE=3 SV=1
MNKISPEAEKVRNALLSKGIETPMIVPTQPKDERRVGIENHMREVMKLIGLDLRDDSLEETPVRLAKMFVDEIFSGMDYANFPKITNIENRMKVSEMVLVNDVTLTSTCEHHFVTIDGMVSVAYYPKKWVIGLSKINRIVSFFAQRPQVQERLTEQILLAFQTILETEDVAVYVKATHFCVKCRGIKDTNSYTVTSAFGGVFLDDRETRKEFLTLINK

SEQ ID NO: 12400 - protein, 218 aa, Pasteurella dagmatis
  misc_feature (1)..(218): tr|C9PQD1|C9PQD1_9PAST GTP cyclohydrolase 1 OS=Pasteure lla dagmatis ATCC 43325 OX=667128 GN=folE PE=3 SV=1
MNKISPEAEKVRNALLSKGIETPMIRLEQDKESRRVGIENHMREVMKLIGLDLRDDSLEETPVRLAKMFVDEIFSGLDYANFPKITNIENRMKVSEMVLVNDVTLTSTCEHHFVTIDGMVSVAYYPKKWVIGLSKINRIVSFFAQRPQVQERLTEQILLAFQTILETEDVAVYVKATHFCVKCRGIKDTNSYTVTSAFGGVFLDDRETRKEFLTLINK

SEQ ID NO: 12401 - protein, 217 aa, Pasteurella langaaensis
  misc_feature (1)..(217): tr|A0A2U0SPY8|A0A2U0SPY8_9PAST GTP cyclohydrolase 1 OS= Pasteurella langaaensis DSM 22999 OX=1122935 GN=folE PE =3 SV=1
MTISAEAKKVRDALVEKGIETPMLHLQESKDSRRNAIEQKMREVMELIGLDLRDDSLEETPVRLAKMYVDEIFSGLDYANFPKITNIENRMKVSEMVLVNDVTLTSTCEHHFVTIDGLVSVAYYPKNWVIGLSKINRVVQFFAQRPQVQERLTEQILLAFQTILETDDVAVYMKATHFCVKCRGIKDTNSYTVTSAFGGVFLEDRETRKEFLSLINK

SEQ ID NO: 12402 - protein, 217 aa, [Pasteurella] mairii
  misc_feature (1)..(217): tr|A0A379B3I9|A0A379B3I9_9PAST GTP cyclohydrolase 1 OS= [Pasteurella] mairii OX=757 GN=folE PE=3 SV=1
MDSILPEAKKVREALIAKGIETPMIAPQQSKDERRAGIEQHMREVMKLIGLDLRDDSLEETPARLAKMFIDEIFSGLDYANFPKITNIENRMKVSEMVLVNDVTLTSTCEHHFVTIDGMVSVAYYPKKWVIGLSKINRVVSFFAQRPQVQERLTEQILLAFQTILETEDVAVYVKATHFCVKCRGIKDTNSYTVTSAFGGVFLDDRETRKEFLTLIR

SEQ ID NO: 12403 - protein, 218 aa, Pasteurella multocida
  misc_feature (1)..(218): sp|P57865|GCH1_PASMU GTP cyclohydrolase 1 OS=Pasteurell a multocida (strain Pm70) OX=272843 GN=folE PE=3 SV=1
MNKISPEAEKVRNALLSKGIETPMITPEQDRDTRRAGIEQHMREVMKLIGLDLRDDSLEETPVRLAKMFVDEIFSGLDYANFPKITNIENRMKVSEMVLVNDVTLTSTCEHHFVTIDGMVSVAYYPKKWVIGLSKINRIVAFFAQRPQVQERLTEQILLAFQTILETDDVAVYVKATHFCVKCRGIKDTNSYTVTSAFGGVFLDDRETRKEFLTLINK

SEQ ID NO: 12404 - protein, 218 aa, Pasteurella multocida; identical to SEQ ID NO: 12403
  misc_feature (1)..(218): tr|A0A1D7R1S2|A0A1D7R1S2_PASMD GTP cyclohydrolase 1 OS= Pasteurella multocida OX=747 GN=folE PE=3 SV=1

SEQ ID NO: 12405 - protein, 218 aa, Pasteurella skyensis
  misc_feature (1)..(218): tr|A0A1H8A6C2|A0A1H8A6C2_9PAST GTP cyclohydrolase 1 OS= Pasteurella skyensis OX=97481 GN=folE PE=3 SV=1
MNTTSFEADNVRNALLKKGIETPMVSLQQDKETRKVAIQQHFRSILELLGMNLNDDSLEETPQRLAKMYIDEIFSGLDYDTFPKITKIKNQMNVSEMVLVDEITLTSTCEHHFVTIDGTVAVAYYPKDWIIGLSKINRVVQFFAQRPQVQERFTEQILTAFQTILDTDDVAVYVKATHFCVKCRGIKDTNSKTITSAFGGVFLQDRNTRTEFLTLIQK

SEQ ID NO: 12406 - protein, 218 aa, Pasteurella sp.
  misc_feature (1)..(218): tr|A0A4Y9GY13|A0A4Y9GY13_9PAST GTP cyclohydrolase 1 OS= Pasteurella sp. WM03 OX=2558280 GN=folE PE=3 SV=1
MSEISPDALSVRNALREKGIETPMIDLSKNKDERRIGIAKHMNEVMKLIGLDLADDSLEETPHRLAKMFIDEIFSGMDYANFPKMTKIKNQMKVSEMVQVNDITLTSTCEHHFVTIDGKVCVAYYPKDWVIGLSKINRIVSFFAQRPQVQERLTEQLLTAFQTILETDDVAVYVKATHFCVKARGIKDTHSYTVTSAYGGVFLEDRDTRKEFLATVQK

SEQ ID NO: 12407 - protein, 218 aa, Pasteurella testudinis
  misc_feature (1)..(218): tr|A0A1W1UZZ3|A0A1W1UZZ3_9PAST GTP cyclohydrolase 1 OS= Pasteurella testudinis DSM 23072 OX=1122938 GN=folE PE= 3 SV=1
MSNISVEAAKVRDALIAKGIETPMKSVGLSLEHRRKEIEKHMREVLQLIGLDLTDDSIEETPVRMAKMYLDEIFTGMDYANFPKITNIRNRMKVSEMVLVNDVTLTSTCEHHFVTIDGKVSVAYYPKDWVIGLSKINRVVAFLAQRPQVQERLTEQVLTALQTILQTDDVAVYVKATHFCVKCRGIKDTNSYTVTSAFGGVFLEDRETRKEFLSLISK

SEQ ID NO: 12408 - protein, 218 aa, Pasteurellaceae bacterium
  misc_feature (1)..(218): tr|A0A5C4Q940|A0A5C4Q940_9PAST GTP cyclohydrolase 1 OS= Pasteurellaceae bacterium BK431 OX=2585026 GN=folE PE=3 SV=1
MSNISAEAARVRDALIAKGIETPMKSVALSLNERRKQIESHMREVIQLIGLDLSDDSIEETPGRMAKMYLDEIFTGMDYANFPKITTIRNRMKVSEMVLVNDITLTSTCEHHFVTIDGQVSVAYYPKDWVIGLSKINRVVSFLAQRPQVQERLTEQVLTALQAILQTDDVAVYVKATHFCVKCRGIKDTNSYTVTSAFGGVFLEDRETRKEFLGLISK

SEQ ID NO: 12409 - protein, 229 aa, Pasteurellaceae bacterium; identical to SEQ ID NO: 10238
  misc_feature (1)..(229): tr|A0A3Q8GIP0|A0A3Q8GIP0_9PAST GTP cyclohydrolase 1 OS= Pasteurellaceae bacterium 12565 OX=2093222 GN=folE PE=3 SV=1

SEQ ID NO: 12410 - protein, 224 aa, Patescibacteria group
  misc_feature (1)..(224): tr|A0A521Z7A9|A0A521Z7A9_9BACT GTP cyclohydrolase 1 OS= Patescibacteria group bacterium OX=2052139 GN=folE PE=3 SV=1
MTDRSTALFRPRAAPARRLSTARFSSHNGTGVVKTPVPQPNNARTTLMKDENIIKKLLQNIGEDPEREGLVKTPVRYLDFIRQATSPKPIDFTTFDAENYDEMIVQKQIRFYSLCEHHLLPFFGTGVIAYVPNKRIVGLSKLARTLDHHSKRLQNQERITTQVADELEAVLKPKGVAVILSARHMCMEMRGVCQPEAVTTTSRLTGVFKSRPETRTELLRLASI

SEQ ID NO: 12411 - protein, 182 aa, Patescibacteria group
  misc_feature (1)..(182): tr|A0A522BCH3|A0A522BCH3_9BACT GTP cyclohydrolase 1 OS= Patescibacteria group bacterium OX=2052139 GN=folE PE=3 SV=1
MAVRDIQKNIRAIIEALDDDPDREGLLDTPRRYEAFLEEFLSPDEFKPTVFTNEGYSEMIVERNITFYSMCEHHLLPFFGTATVAYIPGDKIIGLSKLARTVDHFSRRLQNQERVTTQIADFLQKELSPKGVGVVLNARHLCMEMRGIKKPGAITTTSCVYGLFRSNDATRSEFLSLARAAE

SEQ ID NO: 12412 - protein, 339 aa, Patulibacter medicamentivorans
  misc_feature (1)..(339): tr|H0E9P3|H0E9P3_9ACTN GTP cyclohydrolase I OS=Patuliba cter medicamentivorans OX=1097667 GN=PAI11_35630 PE=3 S V=1
MPSTTTHSALDVQNQRPTVHVALSRVGVAGVEKLIRVGRPGEEVPYLATLETVVDLGPHQKGAHMSRFEEVVNGAMADVVVGGEPVLRAEDLARQVAVAIRDRQGARRAEVRITARYPEDRPAPVSGIPTQEIFTLHGIAVATDAGTRTVTGVTAQGMTACPCAQEHLRDSSTTRLRAAGFDDAQIEAILEAVPVATHNQRGLGTLYLGRINEDPTRRDATVDIDARAMVRVVEQSMSSEIYELMKRSDEGSVVEKAHRNPRFVEDCVREMLRGVVEGFGGLADEAFVLARQENLETIHQHDVVAERYGTLGELRAELVGGVEPSSHTSLREWLDAAGR

SEQ ID NO: 12413 - protein, 207 aa, Patulibacter medicamentivorans
  misc_feature (1)..(207): tr|H0E3X7|H0E3X7_9ACTN GTP cyclohydrolase 1 OS=Patuliba cter medicamentivorans OX=1097667 GN=folE PE=3 SV=1
MSGSQDLAALPARGERTEEGIDLARAERATAELLRALGADPAGDEEALRQTPRRVAAAFGQLLTPRPFDATTFPNDEGYDELVVVHDIPFRSLCMHHLLPFHGVAHVGYVPGERIVGLSKLARVVEWFSSGLQTQERLTAQVADWLQDELAPVGVGVALEAEHLCMTLRGVGARGAATTTLARRGAIRDDPDVGAEFRARVADRGGR

SEQ ID NO: 12414 - protein, 264 aa, Paucibacter aquatile
  misc_feature (1)..(264): tr|A0A2N8L3T0|A0A2N8L3T0_9BURK GTP cyclohydrolase FolE2 OS=Paucibacter aquatile OX=2070761 GN=folE2 PE=3 SV=1
MNQVTSALHIPDTQSERDERHLVIQRVGVKDVRYPLQIQVGTQAQPTVGTWTLDVSLPAEKKGTHMSRFVAWLDALQAPLDAASLRELHGQMLAKLEAFEGRIEVAFSFFIRKRAPVSGIESLLDYQGRLISETRAGQTTVWAEVAVPVKSLCPCSKEISDYGAHNQRSLVTVRAEIGAQPVSWQELVRFAEESASSEIWPLLKRSDEKWITEHAYENPKFVEDLVRDVALRLNADPRIGRYTVDVENFESIHNHSAYARIERL

SEQ ID NO: 12415 - protein, 264 aa, Paucibacter sp.
  misc_feature (1)..(264): tr|A0A3N7DM99|A0A3N7DM99_9BURK GTP cyclohydrolase FolE2 OS=Paucibacter sp. KBW04 OX=2153361 GN=folE2 PE=3 SV=1
MNQVTAALHIPDTQSERDERHLVIQRVGVKDVRYPLQVLIGQQAQGSVGQWTLDVSLPAEKKGTHMSRFVAWLDALNAPLDANGLRELHGQMLAKLEAVDGRIEVRFPFFIRKRAPISGIESLLDYQGALISETRAGITTVWAEVAVPVKSLCPCSKEISDYGAHNQRSLVTIRAEMAEQAPSWQELVRFAEESASSEIWPLLKRSDEKWITEHAYENPKFVEDLVRDVALRLNADARIGRYTVDVENFESIHNHSAYARIERA

SEQ ID NO: 12416 - protein, 265 aa, Paucibacter sp.
  misc_feature (1)..(265): tr|A0A0U2UHV2|A0A0U2UHV2_9BURK GTP cyclohydrolase FolE2 OS=Paucibacter sp. KCTC 42545 OX=1768242 GN=folE2 PE=3 SV=1
MNQVTSALHIPDTQSERDERHLMIQRVGVKDVRYPLQVLVGKQAQPTVGTWTLDVALPAEKKGTHMSRFVAWLDALKAPLEPASLRELHGQMLSKLEAQEGRIEVRFAFFIRKRAPVSGIESLLDYQGALISETRAGVTSVWAEVAVPVKSLCPCSKEISDYGAHNQRSLVTIRAEMAEAAAVSWQELVRFAEESASSEIWPLLKRSDEKWITEHAYENPKFVEDLVRDVALRLNADARIGRYTVDVENFESIHNHSAYARIERA

SEQ ID NO: 12417 - protein, 264 aa, Paucibacter toxinivorans
  misc_feature (1)..(264): tr|A0A4R6QGT5|A0A4R6QGT5_9BURK GTP cyclohydrolase FolE2 OS=Paucibacter toxinivorans OX=270368 GN=folE2 PE=3 SV =1
MNQITDLLHIPDTQSERDERHLVIQRVGIKDVRYPMQIRVAGKSQPTVGQWTLDVALPAEKKGTHMSRLIAWLDSLNRPLDAATLKTELALMLDKLHASEGRIEARFPFFIRKRAPVSGVESLLDYQGAWIAETRGGRTAIWAEVAVPVKSLCPCSKEISDYGAHNQRSLVTVKVELIGEEIPWNQLVRFAEESASSEIWPLLKRPDEKWVTERAYENPKFVEDLVRDVALRLNADARIGRYNVDVENFESIHNHSAYAHIERN

SEQ ID NO: 12418 - protein, 271 aa, Paucimonas lemoignei
  misc_feature (1)..(271): tr|A0A4R3HPZ9|A0A4R3HPZ9_PAULE GTP cyclohydrolase FolE2 OS=Paucimonas lemoignei OX=29443 GN=folE2 PE=3 SV=1
MNSRDPNLTSMPDVQSTPDTRRLAIQRVGVKGVRYPVTIKTSSGVQPTVGIWNMYVQLPEEQKGTHMSRFIALLEGNRAPFDIAYFSSLMRKMVKLLEAESGRIELSFPYFINKTAPVSGVESLMDYEVGLTGEIRGDDVEVTLKVMVPVTSLCPCSKKISAYGAHNQRSHITVNAVLAGDILVDQLIAKIEEQASCELFGLLKRPDEKYVTERAYENPKFVEDLVRDVAGMLNADSRIAAYTLEAENFESIHNHSAYALIEHDKRKQGAA

SEQ ID NO: 12419 - protein, 186 aa, Paucimonas lemoignei
  misc_feature (1)..(186): tr|A0A2X4CYZ7|A0A2X4CYZ7_PAULE GTP cyclohydrolase 1 OS= Paucimonas lemoignei OX=29443 GN=folE_2 PE=3 SV=1
MTPSLAEHYRDIIVGLGENPEREGLLDTPTRAATAMKYLCNGYTMSLEDVVNGALFESKNDEMVIVRDIELYSLCEHHMLPFIGKAHVAYIPTGRVLGLSKVARVVDMFARRLQIQENLTKQIADAIQHITDAAGVAVVIEAKHMCMMMRGVEKQNSVMTSSVMLGAFRESSSTRHEFLQLIGRLG

SEQ ID NO: 12420 - protein, 261 aa, Pectinatus cerevisiiphilus
  misc_feature (1)..(261): tr|A0A4R3K2I0|A0A4R3K2I0_9FIRM GTP cyclohydrolase FolE2 OS=Pectinatus cerevisiiphilus OX=86956 GN=folE2 PE=3 S V=1
MKDVQSMGDTRGIAIQSVGISKAWLPFLAAAEKGQPQNVTAMVEKFTVDLPKEYKGTHMSRFMEILHEYANKPLNFIAINELLREALRKLAAKSAHITINFKYFIEKAAPVSKRQSLLDVDCVFSGDKIENKPLVFTMAVAVPVTSLCPCSKEISDYGAHNQRSIIKAAVKFSKPNGLTIERLANIIEAQASSSVYSILKREDEKYVTEAAYENPKFVEDMLRDLVLSMRKLKEIDYFSIECENFESIHNHNAYAAHEEYV

SEQ ID NO: 12421 - protein, 220 aa, Pectobacterium actinidiae
  misc_feature (1)..(220): tr|A0A1V2R592|A0A1V2R592_9GAMM GTP cyclohydrolase 1 OS= Pectobacterium actinidiae OX=1507808 GN=folE PE=3 SV=1
MSSLSKEAVMVHEALLSRGLETPLRGALLDRDTRKQRIAEHMTEIMNLLSLDLGDDSLAETPTRIAKMYVDEIFSGLDYANFPKITIIENKMKVDEMVTVRDITLTSTCEHHFVTIDGKATVAYIPKDGVIGLSKLNRIVQFFSQRPQVQERLTQQILVALQTLLGTSNVAVSIDAVHYCVKARGIRDATSATTTTSLGGLFKSSQNTRQEFLRAVRHHN

SEQ ID NO: 12422 - protein, 220 aa, Pectobacterium aquaticum
  misc_feature (1)..(220): tr|A0A3R8UQA3|A0A3R8UQA3_9GAMM GTP cyclohydrolase 1 OS= Pectobacterium aquaticum OX=2204145 GN=folE PE=3 SV=1
MSSLSKEAVMVHEALLARGLETPLRGALLDRDTRKQRIAEHMTEIMNLLSLDLSDDSLAETPTRIAKMYVDEIFSGLDYANFPKITIIENKMKVDEMVTVRDITLTSTCEHHFVTIDGKATVAYIPKEGVIGLSKLNRIVQFFSQRPQVQERLTQQILVALQTLLGTNNVAVSIDAVHYCVKARGIRDATSATTTTSLGGLFKSSQNTRQEFLRAVRHHN

SEQ ID NO: 12423 - protein, 220 aa, Pectobacterium atrosepticum
  misc_feature (1)..(220): sp|Q6D3N3|GCH1_PECAS GTP cyclohydrolase 1 OS=Pectobacte rium atrosepticum (strain SCRI 1043 / ATCC BAA-672) OX= 218491 GN=folE PE=3 SV=1
MSSLSKEAVMVHEALLARGLETPLRGALLDRDTRKQRIAEHMTEIMNLLSLDLGDDSLAETPTRIAKMYVDEIFSGLDYANFPKITIIENKMKVDEMVTVRDITLTSTCEHHFVMIDGKATVAYIPKDGVIGLSKLNRIVQFFSQRPQVQERLTQQILVALQTLLGTNNVAVSIDAVHYCVKARGIRDATSATTTTSLGGLFKSSQNTRQEFLRAVRHHN

SEQ ID NO: 12424 - protein, 220 aa, Pectobacterium betavasculorum
  misc_feature (1)..(220): tr|A0A093SAA7|A0A093SAA7_9GAMM GTP cyclohydrolase 1 OS= Pectobacterium betavasculorum OX=55207 GN=folE PE=3 SV= 1
MSSLSKEAVMVHEALLARGLETPLRGALLERDTRKQRIAEHMTEIMNLLSLDLGDDSLAETPTRIAKMYVDEIFSGLDYANFPKITIIENKMKVDEMVTVRDITLTSTCEHHFVTIDGKATVAYIPKDGVIGLSKLNRIVQFFSQRPQVQERLTQQILIALQTLLGTNNVAVSIDAVHYCVKARGIRDATSATTTTSLGGLFKSSQNTRQEFLRAVRHHN

SEQ ID NO: 12425 - protein, 220 aa, Pectobacterium brasiliense
  misc_feature (1)..(220): tr|A0A0M2F1D2|A0A0M2F1D2_9GAMM GTP cyclohydrolase 1 OS= Pectobacterium brasiliense OX=180957 GN=folE PE=3 SV=1
MSSLSKEAVMVHEALLARGLETPLRGALLDRDTRKQRIAEHMTEIMNLLSLDLSDDSLAETPTRIAKMYVDEIFSGLDYANFPKITIIENKMKVDEMVTVRDITLTSTCEHHFVTIDGKATVAYIPKDGVIGLSKLNRIVQFFSQRPQVQERLTQQILIALQTLLGTNNVAVSIDAVHYCVKARGIRDATSATTTTSLGGLFKSSQNTRQEFLRAVRHHN

SEQ ID NO: 12426 - protein, 220 aa, Pectobacterium brasiliense
  misc_feature (1)..(220): tr|A0A086E8L6|A0A086E8L6_9GAMM GTP cyclohydrolase 1 OS= Pectobacterium brasiliense OX=180957 GN=folE PE=3 SV=1
MSSLSKEAVMVHEALLARGLETPLRGALLDRDTRKQRIAEHMTEIMNLLSLDLSDDSLAETPTRIAKMYVDEIFSGLDYANFPKITIIENKMKVDEMVTVRDITLTSTCEHHFVTIDGKATVAYIPKDGVIGLSKLNRIVQFFSQRPQVQERLTQQILVALQTLLGTNNVAVSIDAVHYCVKARGIRDATSATTTTSLGGLFKSSQNTRQEFLRAVRHHN

SEQ ID NO: 12427 - protein, 220 aa, Pectobacterium carotovorum; identical to SEQ ID NO: 12426
  misc_feature (1)..(220): sp|C6DEM6|GCH1_PECCP GTP cyclohydrolase 1 OS=Pectobacte rium carotovorum subsp. carotovorum (strain PC1) OX=561 230 GN=folE PE=3 SV=1

SEQ ID NO: 12428 - protein, 220 aa, Pectobacterium carotovorum; identical to SEQ ID NO: 12421
  misc_feature (1)..(220): tr|A0A518VLH8|A0A518VLH8_PECCC GTP cyclohydrolase 1 OS= Pectobacterium carotovorum subsp. carotovorum OX=555 GN =folE PE=3 SV=1

SEQ ID NO: 12429 - protein, 220 aa, Pectobacterium odoriferum
  misc_feature (1)..(220): tr|A0A094S530|A0A094S530_9GAMM GTP cyclohydrolase 1 OS= Pectobacterium odoriferum OX=78398 GN=folE PE=3 SV=1
MSSLSKEAVMVHEALLSRGLETPLRGALLERDTRKQRIAEHMTEIMNLLSLDLGDDSLAETPTRIAKMYVDEIFSGLDYANFPKITIIENKMKVDEMVTVRDITLTSTCEHHFVTIDGKATVAYIPKDGVIGLSKLNRIVQFFSQRPQVQERLTQQILVALQTLLGTNNVAVSIDAVHYCVKARGIRDATSATTTTSLGGLFKSSQNTRQEFLRAVRHHN

SEQ ID NO: 12430 - protein, 220 aa, Pectobacterium parmentieri
  misc_feature (1)..(220): tr|A0A0H3I1P6|A0A0H3I1P6_PECPM GTP cyclohydrolase 1 OS= Pectobacterium parmentieri OX=1905730 GN=folE PE=3 SV=1
MSLLSKEAVMVHEALLARGLETPLRGALLDRDTRKQRIAEHMTEIMNLLSLDLSDDSLAETPTRIAKMYVDEIFSGLDYANFPKITIIENKMKVDEMVTVRDITLTSTCEHHFVTIDGKATVAYIPKDGVIGLSKLNRIVQFFSQRPQVQERLTQQILVALQTLLGTNNVAVSIDAVHYCVKARGIRDATSATTTTSLGGLFKSSQNTRQEFLRAVRHHN

SEQ ID NO: 12431 - protein, 220 aa, Pectobacterium peruviense; identical to SEQ ID NO: 12423
  misc_feature (1)..(220): tr|A0A0J5XP14|A0A0J5XP14_9GAMM GTP cyclohydrolase 1 OS= Pectobacterium peruviense OX=2066479 GN=folE PE=3 SV=1

SEQ ID NO: 12432 - protein, 220 aa, Pectobacterium polaris
  misc_feature (1)..(220): tr|A0A093SBL2|A0A093SBL2_9GAMM GTP cyclohydrolase 1 OS= Pectobacterium polaris OX=2042057 GN=folE PE=3 SV=1
MSSLSKEAVMVHEALLARGLETPLRGALLDRDTRKQRIAEHMTEIMNLLSLDLSDDSLVETPTRIAKMYVDEIFSGLDYANFPKITIIENKMKVDEMVTVRDITLTSTCEHHFVTIDGKATVAYIPKDGVIGLSKLNRIVQFFSQRPQVQERLTQQILVALQTLLGTNNVAVSIDAVHYCVKARGIRDATSATTTTSLGGLFKSSQNTRQEFLRAVRHHN

SEQ ID NO: 12433 - protein, 220 aa, Pectobacterium polaris; identical to SEQ ID NO: 12426
  misc_feature (1)..(220): tr|A0A249QFC2|A0A249QFC2_9GAMM GTP cyclohydrolase 1 OS= Pectobacterium polaris OX=2042057 GN=folE PE=3 SV=1

SEQ ID NO: 12434 - protein, 220 aa, Pectobacterium polonicum; identical to SEQ ID NO: 12426
  misc_feature (1)..(220): tr|A0A4U7KG57|A0A4U7KG57_9GAMM GTP cyclohydrolase 1 OS= Pectobacterium polonicum OX=2485124 GN=folE PE=3 SV=1

SEQ ID NO: 12435 - protein, 220 aa, Pectobacterium punjabense; identical to SEQ ID NO: 12426
  misc_feature (1)..(220): tr|A0A2T3VVW6|A0A2T3VVW6_9GAMM GTP cyclohydrolase 1 OS= Pectobacterium punjabense OX=2108399 GN=folE PE=3 SV=1

SEQ ID NO: 12436 - protein, 220 aa, Pectobacterium wasabiae; identical to SEQ ID NO: 12426
  misc_feature (1)..(220): tr|A0A1D7Z5D0|A0A1D7Z5D0_9GAMM GTP cyclohydrolase 1 OS= Pectobacterium wasabiae CFBP 3304 OX=1175631 GN=folE PE =3 SV=1

SEQ ID NO: 12437 - protein, 190 aa, Pediococcus acidilactici
  misc_feature (1)..(190): tr|A0A1L6HAV2|A0A1L6HAV2_PEDAC GTP cyclohydrolase 1 OS= Pediococcus acidilactici OX=1254 GN=folE PE=3 SV=1
MNLPKIEKAVSDLLEGIGEDPQREGLVETPKRVAKAYAEIFAGLNHQATDFTDYKIFHVDEEPEMVLVQKIPFYSVCEHHLLPFFGNVNVAYVPKDGKVIGISKIPRLVDFVVKRPGMQEKVTTQISTELANILDPQGVAVTVSARHLCMEMRGINQSNLFTYTSKMTGVFKTDQALRANFFQQVGQQNA

SEQ ID NO: 12438 - protein, 197 aa, Pediococcus acidilactici
  misc_feature (1)..(197): tr|A0A410LBB8|A0A410LBB8_PEDAC GTP cyclohydrolase 1 OS= Pediococcus acidilactici OX=1254 GN=folE PE=3 SV=1
MIQEVKTLNLPKIEKAVSDLLEGIGEDPQREGLVETPKRVAKAYAELFAGLNHQATDFTDYKIFHVDEEPEMVLVQKIPFYSVCEHHLLPFFGNVNVAYVPKDGKVIGISKIPRLVDFVVKRPGMQEKVTTQISTELANILDPQGVAVTVSARHLCMEMRGINQSNLFTYTSKMTGVFKTDQALRANFFQQVGQQNA

SEQ ID NO: 12439 - protein, 189 aa, Pediococcus cellicola
  misc_feature (1)..(189): tr|A0A0R2ISX3|A0A0R2ISX3_9LACO GTP cyclohydrolase 1 OS= Pediococcus cellicola OX=319652 GN=folE PE=3 SV=1
MNKENSDKIENAVHNIIEAIGDDPNRQSIQETPARVASAYAEIFSETGKKHFHDYKIFNVAENAGMVLVQDIPFYSMCEHHLLPFFGTVNVAYVPQNGKIIGLSKIPRLVDFAAHRPSVQENITVLIANELQRILNPKGIAVSISARHMCMEMRGINKSGLFTYTNKFLGQFSTDQELKNEFLQQTHQR

SEQ ID NO: 12440 - protein, 181 aa, Pediococcus claussenii
  misc_feature (1)..(181): tr|G8PDL5|G8PDL5_PEDCP GTP cyclohydrolase 1 OS=Pediococ cus claussenii (strain ATCC BAA-344 / DSM 14800 / JCM 1 8046 / KCTC 3811 / P06) OX=701521 GN=folE PE=3 SV=1
MNNSEIEKATASILKAIGDDPERSSVKETPKRVAKAFNEIFAHTNDQQFNDFKLFDIDDDDQTVVVRNIPFYSMCEHHLLPFFGTVDVAYVPNNGKIIGLSKIPRLVDFVAKRPNVQENMTSMLITEMNRILNPKGVAVKITARHMCMEMRGINKQGEETTTTKFQGIFKSDSIMRSEFLN

SEQ ID NO: 12441 - protein, 189 aa, Pediococcus damnosus
  misc_feature (1)..(189): tr|A0A0R2HM88|A0A0R2HM88_9LACO GTP cyclohydrolase 1 OS= Pediococcus damnosus OX=51663 GN=folE PE=3 SV=1
MNEKNKTKIKNAVTDIIQAIGDDPERASIQETPARVATAYEEIFSATGKKHFEDYKIFNVDENADMVVVQDIPFYSMCEHHLLPFFGTVNVAYIPQNGKIIGLSKIPRLVNFVARRPSVQENITVMIADELQRILNPKGVAVSISARHLCMEMRGINKSGLSTYTNKFSGVFSDDHELKNEFLQQTRQK

SEQ ID NO: 12442 - protein, 189 aa, Pediococcus ethanolidurans
  misc_feature (1)..(189): tr|A0A0R2K4M6|A0A0R2K4M6_9LACO GTP cyclohydrolase 1 OS= Pediococcus ethanolidurans OX=319653 GN=folE PE=3 SV=1
MIEKDKTKIENAVHNIIEAIGDDPKRTSIQKTPARVASAYEEIFAETGKQHFEDYKIFNVAENAGMVLVQDIPFYSMCEHHLLPFFGTVNVAYVPQNGKIIGLSKIPRLVDFAARRPSVQENITVMIADELQRILKPKGVAVSISARHMCMEMRGINKSGLFTYTNKFLGNFSEDHELKNEFLQQTHQR

SEQ ID NO: 12443 - protein, 189 aa, Pediococcus inopinatus
  misc_feature (1)..(189): tr|A0A0R2ILM6|A0A0R2ILM6_9LACO GTP cyclohydrolase 1 OS= Pediococcus inopinatus OX=114090 GN=folE PE=3 SV=1
MNEKNKTKIENAVTDIIEAIGDDPKRASIQETPARVATAYSEIFSETGNAHFTDYKIFDVDENADMVVVQDIPFYSMCEHHLLPFFGTVNVAYVPQDGKIIGLSKIPRLVNFVARRPSVQENITVMINDELQRILKPKGVAVSISARHLCMEMRGINKSGLSTYTTKFSGVFKEDHELKNEFLQQTRQK

SEQ ID NO: 12444 - protein, 189 aa, Pediococcus parvulus
  misc_feature (1)..(189): tr|A0A176TGE7|A0A176TGE7_9LACO GTP cyclohydrolase 1 OS= Pediococcus parvulus OX=54062 GN=folE PE=3 SV=1
MIEKNKKKIENAVHDIIEAIGDDPKRPSIQETPARVATAYEEIFAETGKQHFEDYKIFNVAENAGMVLVQDIPFYSMCEHHILPFFGTVNVAYVPQNGKIIGLSKIPRLVDFASHRPSVQENITVMIADELQRILNPKGVAVSISARHMCMEMRGINKSGLFTYTNKFLGTFADDHELKNEFLQQTHQR

SEQ ID NO: 12445 - protein, 215 aa, Pediococcus pentosaceus; identical to SEQ ID NO: 9977
  misc_feature (1)..(215): tr|A0A1Y0VRE6|A0A1Y0VRE6_PEDPE GTP cyclohydrolase 1 OS= Pediococcus pentosaceus OX=1255 GN=gch1 PE=3 SV=1

SEQ ID NO: 12446 - protein, 190 aa, Pediococcus stilesii
  misc_feature (1)..(190): tr|A0A0R2KSB8|A0A0R2KSB8_9LACO GTP cyclohydrolase 1 OS= Pediococcus stilesii OX=331679 GN=folE PE=3 SV=1
MELEQKLTKVYEIEHSLQTLMTLCGQQDGIPDLNETPFRVIKAFLEYTVGYRENPTEHLEKTFDISQNDPIIVKDIEFYSMCEHHFAPFFGVAHVSYIPDKKVTGLSKIARVVEGYARRFQVQERLTNQIADAVQSVLKPKGVIVAIEAKHLCVSSRGVKKEEAKTFTVVSHGVYSDNPQLRSEFMMAIK

SEQ ID NO: 12447 - protein, 199 aa, Pediococcus stilesii
  misc_feature (1)..(199): tr|A0A0R2KZP1|A0A0R2KZP1_9LACO GTP cyclohydrolase 1 OS= Pediococcus stilesii OX=331679 GN=folE PE=3 SV=1
MNIRWGRRNLNREKIKQAVRDLLEAIGEDTQREGLLETPERVTKAYAEIFSGLNHQPEDFTDYKIFHVEDDPEMVIVQRIPFYSVCEHHLLPFFGYANVAYVPKDGRVIGISKIPRLVEFASKRPGMQEKVTAQIASELTRILEPNGVAVSISARHMCMEMRGINRTNLFTYTSKFTGRFKTDAELKQDFLRQTENKIV

SEQ ID NO: 12448 - protein, 210 aa, Pedobacter africanus
  misc_feature (1)..(210): tr|A0A1W2B660|A0A1W2B660_9SPHI GTP cyclohydrolase 1 OS= Pedobacter africanus OX=151894 GN=folE PE=3 SV=1
MDNHTNHLDDEDNGYIKIDRYNEGKIAAVADHYKDILGQLGENPEREGLIKTPERVAKALQYLTHGYDVDPAGILRSAMFKEDYSQMVVVKDIEVFSMCEHHMLPFFGKAHVAYIPNGHIVGLSKIPRIVDAFARRLQVQERLTNEIRDCIQDTLMPAGVAVVIECKHLCMAMRGIQKQNSVTTTSAFTGEFAKDKTRAEFLRLITANLH

SEQ ID NO: 12449 - protein, 211 aa, Pedobacter alluvionis
  misc_feature (1)..(211): tr|A0A497Y160|A0A497Y160_9SPHI GTP cyclohydrolase 1 OS= Pedobacter alluvionis OX=475253 GN=folE PE=3 SV=1
MSNKDVLKGESRDGYVKIDRYNEDKIEAVATHYKDILGQLGENPEREGLLKTPERVAKALQYLTHGYDLKPDEILRSAMFEEDYSQMVVVKDIEVYSMCEHHMLPFFGKAHIAYIPNGHIVGLSKIPRVVDAFARRLQVQERLTNEIRDCIQNTLSPMGVAVVIECKHLCMSMRGVQKQNSVTTTSAFTGTFLSNDKTRAEFLRLITASLD

SEQ ID NO: 12450 - protein, 215 aa, Pedobacter alluvionis
  misc_feature (1)..(215): tr|A0A497Y9P5|A0A497Y9P5_9SPHI GTP cyclohydrolase 1 OS= Pedobacter alluvionis OX=475253 GN=folE PE=3 SV=1
MPEQNLADYEIDSVHFSTPLKANAFEMDDETKISMISDHFTSILNILGLDLNDDSLKNTPDRIAKMYVKEIFSGLNPANKPVATLFENRYGYSEMLVEKNIAVFSNCEHHFVPITGKAHVAYISKGKVIGLSKLNRIVQYYSKRPQVQERLTIQIAREIKRVMGTDDVAVMIDASHHCVSSRGIQDAGSSTVTSSFSGKFRDAETRNEFLKYIGQ

SEQ ID NO: 12451 - protein, 211 aa, Pedobacter antarcticus
  misc_feature (1)..(211): tr|A0A081PLZ4|A0A081PLZ4_9SPHI GTP cyclohydrolase 1 OS= Pedobacter antarcticus 4BY OX=1358423 GN=folE PE=3 SV=1
MEDHTIDNFGEENEGYIKIDRYNTVKTRSISNHYTDILSQLGENPQREGLIKTPERVAKALQYLTHGYDLDPAKILRSAMFKEDYSQMVVVKDIEVYSMCEHHMLPFFGKAHIAYIPNGHIVGLSKIPRIVDAFARRLQVQERLTNEIRDCIQETLQPAGVAVVIECQHMCMAMRGIQKQNSVTTTSAFTGEFAHDRTRAEFLRLITANLH

SEQ ID NO: 12452 - protein, 211 aa, Pedobacter antarcticus; identical to SEQ ID NO: 12451
  misc_feature (1)..(211): tr|A0A1I2J0T5|A0A1I2J0T5_9SPHI GTP cyclohydrolase 1 OS= Pedobacter antarcticus OX=34086 GN=folE PE=3 SV=1

SEQ ID NO: 12453 - protein, 212 aa, Pedobacter bauzanensis
  misc_feature (1)..(212): tr|A0A4R1LVW8|A0A4R1LVW8_9SPHI GTP cyclohydrolase 1 OS= Pedobacter bauzanensis OX=653929 GN=folE PE=3 SV=1
MNKSDKPPFDPELLDGYVKIDHYNGDAVNRIADHYGDILKALGENPAREGLLKTPERVAKSLQYLTHGYDIDPAEILRSAMFKEEYSQMVVVKDIEVYSLCEHHMLPFFGKAHIAYIPDGHIVGLSKIPRVVDAFARRLQVQERLTNEIRDCIHDTLKPLGVAVVIECKHLCMSMRGVQKQNSVTTTSAFTGEFAKERTRNEFLRLITASLD

SEQ ID NO: 12454 - protein, 211 aa, Pedobacter borealis
  misc_feature (1)..(211): tr|A0A4R8P809|A0A4R8P809_9SPHI GTP cyclohydrolase 1 OS= Pedobacter borealis OX=475254 GN=folE PE=3 SV=1
MSSKDILKGESRDGYVKIDRYNENKIEAVASHYKDILSQLGENPEREGLLKTPERVAKALQYLTHGYDLKPDEILRSAMFEEDYSQMVVVKDIEVYSMCEHHMLPFFGKAHIAYIPNGHIVGLSKIPRVVDAFARRLQVQERLTNEIRDCIQNTLSPMGVAVVMECRHLCMSMRGVQKQNSVTTTSAFTGTFLSNDKTRAEFLRLITASLD

SEQ ID NO: 12455 - protein, 226 aa, Pedobacter caeni
  misc_feature (1)..(226): tr|A0A1M5J9N1|A0A1M5J9N1_9SPHI GTP cyclohydrolase 1 OS= Pedobacter caeni OX=288992 GN=folE PE=3 SV=1
MEDLLAAYEAEGEAHFSANTQTPLRADAFSKTDEEKITAISLHFAAIMEELGLDLTDDSLRGTPHRVAKMYVKELFSGLNPANKPRISIFENKYGYRDMLIEQDIEFISACEHHFLPMPGKAHIAYIPNGKVIGLSKINRIVKYYAKRPQVQERLSKQIYQELQEALGTADIIVVITAHHMCVSMRGVEDQSSKTTTLSYGGKFEEKDRRKEFFQVLNLGTNRMVK

SEQ ID NO: 12456 - protein, 212 aa, Pedobacter caeni
  misc_feature (1)..(212): tr|A0A1M5P510|A0A1M5P510_9SPHI GTP cyclohydrolase 1 OS= Pedobacter caeni OX=288992 GN=folE PE=3 SV=1
MNNHTDHLDDNETENGYIKIDRYNEGKIASVAHHYSDILTQLGEDPSREGLIKTPERVAKALQYLTHGYDLDPAAILKGAMFKEDYSQMVVVKDIEVFSMCEHHMLPFFGKAHVAYIPNGHIVGLSKIPRIVDAFARRLQVQERLTNEIRDCIQETLNPAGVAVVIECKHLCMAMRGIQKQNSVTTTSAFTGEFAKDKTRAEFLRLITANLH

SEQ ID NO: 12457 - protein, 210 aa, Pedobacter chitinilyticus
  misc_feature (1)..(210): tr|A0A443YRA7|A0A443YRA7_9SPHI GTP cyclohydrolase 1 OS= Pedobacter chitinilyticus OX=2233776 GN=folE PE=3 SV=1
MAHEHDHEEELLGYQKIERYDEDKINGVAVHYKDILERLGEDPEREGLVKTPERVAKALQYLTHGYDIKPEQILKSAMFKEDYSQMVVVKDIEVFSMCEHHMLPFFGKAHIAYIPNGHIVGLSKIPRVVDAFARRLQVQERLTNEIRDCIQNTLSPAGVAVVIECKHLCMAMRGVQKQNSVTTTSAFTGEFMKNDKTRAEFLRLITASLD

SEQ ID NO: 12458 - protein, 211 aa, Pedobacter cryoconitis
  misc_feature (1)..(211): tr|A0A327S0R1|A0A327S0R1_9SPHI GTP cyclohydrolase 1 OS= Pedobacter cryoconitis OX=188932 GN=folE PE=3 SV=1
MENNTLDAFDEENEGYVKIDRYNTAKTVSISSHYTDILTQLGEDPQREGLLKTPERVAKSLQYLTHGYDIKPAEILRSAMFKEDYSQMVVVKDIEVYSMCEHHMLPFFGKAHVAYIPNGHIVGLSKIPRVVDAFARRLQVQERLTNEIRDCIQETLNPAGVAVVIECQHLCMAMRGIQKQNSVTTTSAFTGEFAKDKTRAEFLRLITARLH

SEQ ID NO: 12459 - protein, 211 aa, Pedobacter cryoconitis
  misc_feature (1)..(211): tr|A0A127VIR7|A0A127VIR7_9SPHI GTP cyclohydrolase 1 OS= Pedobacter cryoconitis OX=188932 GN=folE PE=3 SV=1
MENNTQDAFDEENEGYVKIDRYNTAKTASISSHYTDILTQLGEDPQREGLLKTPERVAKSLQYLTHGYAIKPAEILRSAMFKEDYSQMVVVKDIEVYSMCEHHMLPFFGKAHIAYIPNGHIVGLSKIPRVVDAFARRLQVQERLTNEIRDCIQETLNPAGVAVVIECQHLCMAMRGIQKQNSVTTTSAFTGEFAKDKTRAEFLRLITARLH

SEQ ID NO: 12460 - protein, 211 aa, Pedobacter duraquae
  misc_feature (1)..(211): tr|A0A4R6IGF6|A0A4R6IGF6_9SPHI GTP cyclohydrolase 1 OS= Pedobacter duraquae OX=425511 GN=folE PE=3 SV=1
MDKHTQDFTEEENEGYIKIDRYNQEKIGAIAAHYKDILVQIGEDPEREGLLKTPERVAKALQYLTHGYDTKPDEILRSAMFKEDYSQMVVVKDIEVYSMCEHHMLPFFGKAHIAYIPNGHIVGLSKIPRVVDAFARRLQVQERLTNEIRDCIQETLNPAGVAVVIECRHLCMSMRGVQKQNSVTTTSAFTGQFAKDTTRAEFLRLITASLH

SEQ ID NO: 12461 - protein, 209 aa, Pedobacter ginsengisoli
  misc_feature (1)..(209): tr|A0A2D1U989|A0A2D1U989_9SPHI GTP cyclohydrolase 1 OS= Pedobacter ginsengisoli OX=363852 GN=folE PE=3 SV=1
MNHTDHLDETEDGYIKIDRYNEGKINAVASHYKDILGQLGENPEREGLVKTPERVAKALQYLTHGYDLNPAEILRGAMFKEDYSQMVVVKDIEVFSMCEHHMLPFFGKAHVAYIPNGHIVGLSKIPRIVDAFARRLQVQERLTNEIRDCIQETLQPAGVAVVIECKHLCMAMRGIQKQNSVTTTSAFTGEFAKDKTRAEFLRLITANLH

SEQ ID NO: 12462 - protein, 104 aa, Pedobacter ginsengisoli
  misc_feature (1)..(104): tr|A0A2D1U201|A0A2D1U201_9SPHI GTP cyclohydrolase 1 OS= Pedobacter ginsengisoli OX=363852 GN=CPT03_03650 PE=3 S V=1
MIGKVHVAYIPDKQVIGLSKINRLVQYYAKRPQVQERLTIQISEALKEVLQHDDVVVVIEADHLCAASRGIKDTNSATQTAHYSGQFENKAVKQEFLVHIYNKR

SEQ ID NO: 12463 - protein, 211 aa, Pedobacter ginsenosidimutans
  misc_feature (1)..(211): tr|A0A0T5VMP9|A0A0T5VMP9_9SPHI GTP cyclohydrolase 1 OS= Pedobacter ginsenosidimutans OX=687842 GN=folE PE=3 SV= 1
MSDKDVLKGESRDGYVKIDRYNEDKIEAVATHYKDILGQLGENPEREGLLKTPERVAKALQYLTHGYDLKPDEILKGAMFEEDYSQMVVVKDIEVYSMCEHHMLPFFGKAHIAYIPNGHIVGLSKIPRVVDAFARRLQVQERLTNEIRDCIQNTLNPMGVAVVMECRHLCMSMRGVQKQNSVTTTSAFTGTFLSNDKTRAEFLRLITASLD

SEQ ID NO: 12464 - protein, 237 aa, Pedobacter glucosidilyticus
  misc_feature (1)..(237): tr|A0A0B8XRJ4|A0A0B8XRJ4_9SPHI GTP cyclohydrolase 1 OS= Pedobacter glucosidilyticus OX=1122941 GN=folE_1 PE=3 S V=1
MLHFLKLKETMLSTQLKPLKKDLLTHFEELGDEHIGTSYDTPLRDDAFDLDDDVKIDQIAHHFKHIMDILGLDLTDDSLRGTPQRVAKMYVKEIFKGLNPANKPDMKLFDNKYQYNQMLVEKNITLYSNCEHHFVPIIGRAHVAYISNGKVIGLSKLNRIVQYYAQRPQVQERLTMQIANELKQALGTEDVAVVIDATHLCVSSRGIKDVQSSTVTAEYGGKFLDIDTRNEFLKHIG

SEQ ID NO: 12465 - protein, 211 aa, Pedobacter glucosidilyticus
  misc_feature (1)..(211): tr|A0A0B8XM51|A0A0B8XM51_9SPHI GTP cyclohydrolase 1 OS= Pedobacter glucosidilyticus OX=1122941 GN=folE_2 PE=3 S V=1
MSLDNQHDDFTEENGYAKIDRYNSKKINKIAAKYAEILSEIGENPQREGLLKTPERVAKALQFLTHGYDLDAAEVLRSAMFQEDYSQMVIVKDIEVYSMCEHHMLPFFGKAHIAYIPNGHIVGLSKIPRVVDIFARRLQVQERLTNEIRDCIQDTLKPAGVAVVMECKHMCMSMRGIQKQNSVTTTSAFTGQFIIEKTRSEFLRLIAANLA

SEQ ID NO: 12466 - protein, 211 aa, Pedobacter hartonius
  misc_feature (1)..(211): tr|A0A1H4HI46|A0A1H4HI46_9SPHI GTP cyclohydrolase 1 OS= Pedobacter hartonius OX=425514 GN=folE PE=3 SV=1
MENHTQDPFDEENDGYIKVDRYNKTKIESISSHYTDILSTIGEDPSREGLLKTPERVAKSLQYLTHGYDLDPAEILRSAMFREDYSQMVVVKDIEVYSMCEHHMLPFFGKAHIAYIPNGHIVGLSKIPRVVDAFARRLQVQERLTNEIRDCIQETLNPAGVAVVIECQHLCMAMRGIQKQNSVTTTSAFTGGFASDKTRAEFLRLITAKLH

SEQ ID NO: 12467 - protein, 210 aa, Pedobacter heparinus
  misc_feature (1)..(210): tr|C6XWQ1|C6XWQ1_PEDHD GTP cyclohydrolase 1 OS=Pedobact er heparinus (strain ATCC 13125 / DSM 2366 / CIP 104194 / JCM 7457 / NBRC 12017 / NCIMB 9290 / NRRL B-14731 / HIM 762-3) OX=485917 GN=folE PE=3 SV=1
MDNHTNHLDEEDNGYIKIDRYNEGKIAAVAHHYKDILGQLGEDPNREGLIKTPERVAKALQYLTHGYDLNPAEILRSAMFKEDYSQMVVVKDIEVFSMCEHHMLPFFGKAHIAYIPNGHIVGLSKIPRIVDAFARRLQVQERLTNEIRDCIQDTLMPAGVAVVIECKHLCMAMRGIQKQNSVTTTSAFTGEFAKDKTRAEFLRLITANLH

SEQ ID NO: 12468 - protein, 211 aa, Pedobacter insulae
  misc_feature (1)..(211): tr|A0A1I2SX51|A0A1I2SX51_9SPHI GTP cyclohydrolase 1 OS= Pedobacter insulae OX=414048 GN=folE PE=3 SV=1
MKNDKYDHDDEVLGYQKIDRYDDEKISSVAHHYRDILGKLGENPEREGLLKTPERVAKALQYLTHGYDIRPDEILRSAMFKEDYSQMVVVKDIEVFSMCEHHMLPFFGKAHIAYIPNGHIVGLSKIPRVVDAFARRLQVQERLTDEIRDCLQDTLLPAGVAVVVECKHLCMAMRGVQKQNSVTTTSAFTGEFLKNDKTRAEFLRLITADLH

SEQ ID NO: 12469 - protein, 210 aa, Pedobacter jejuensis
  misc_feature (1)..(210): tr|A0A3N0BQ25|A0A3N0BQ25_9SPHI GTP cyclohydrolase 1 OS= Pedobacter jejuensis OX=1268550 GN=folE PE=3 SV=1
MGKDILKGESRDGYVKIDRYNESKIEAVATHYKDILSQLGEDPEREGLLKTPERVAKALQYLTHGYDLKPDEILKSAMFEEDYSQMVVVKDIEVYSMCEHHMLPFFGKAHIAYIPNGHIVGLSKIPRVVDAFARRLQVQERLTNEIRDCIQNTLQPKGVAVVIECRHLCMAMRGVQKQNSVTTTSAFTGSFLSNDKTRAEFLRLITASLD

SEQ ID NO: 12470 - protein, 217 aa, Pedobacter jejuensis
  misc_feature (1)..(217): tr|A0A3N0BSV8|A0A3N0BSV8_9SPHI GTP cyclohydrolase 1 OS= Pedobacter jejuensis OX=1268550 GN=folE PE=3 SV=1
MNMPERDIAEYQIEAEEYFRTPLKSNAFEMNDETKIALISEHFTSILNILGLDLTDDSLKGTPGRIAKMYVKEIFSGLNPDNKPIPTLFENNYRYNEMLVEKNIAVFSNCEHHFVPITGKAHVAYISKGKVIGLSKLNRIVQYYCSRPQVQERLTIQIAEEIKRVMGTDDVAVMIDANHHCVSSRGIRDIGSSTITTSFNGKFKDADTKNEFLKYIA

SEQ ID NO: 12471 - protein, 211 aa, Pedobacter kyonggii
  misc_feature (1)..(211): tr|A0A4Q9HCG0|A0A4Q9HCG0_9SPHI GTP cyclohydrolase 1 OS= Pedobacter kyonggii OX=1926871 GN=folE PE=3 SV=1
MSNKDVLKGESRDGYVKIDRYNEDKIEAVATHYKDILGQLGENPEREGLLKTPERVAKALQYLTHGYDLKPDEILKGAMFEEDYSQMVVVKDIEVYSMCEHHMLPFFGKAHIAYIPNGHIVGLSKIPRVVDAFARRLQVQERLTNEIRDCIQNTLNPMGVAVVMECRHLCMSMRGVQKQNSVTTTSAFTGTFLSNDKTRAEFLRLITASLD

SEQ ID NO: 12472 - protein, 211 aa, Pedobacter kyungheensis
  misc_feature (1)..(211): tr|A0A0C1D6P1|A0A0C1D6P1_9SPHI GTP cyclohydrolase 1 OS= Pedobacter kyungheensis OX=1069985 GN=folE PE=3 SV=1
MSDKDVLKGESIDGYVKIDRYNDDKIEAVATHYKDILGQLGENPEREGLLKTPERVAKALQYLTHGYDLKPDEILKSAMFEEDYSQMVVVKDIEVYSMCEHHMLPFFGKAHIAYIPNGHIVGLSKIPRVVDAFARRLQVQERLTNEIRDCIQNTLNPMGVAVVMECRHLCMAMRGVQKQNSVTTTSAFTGTFLSNDKTRAEFLRLITASLD

SEQ ID NO: 12473 - protein, 211 aa, Pedobacter lusitanus
  misc_feature (1)..(211): tr|A0A0D0GG51|A0A0D0GG51_9SPHI GTP cyclohydrolase 1 OS= Pedobacter lusitanus OX=1503925 GN=folE PE=3 SV=1
MENNTLDAFDEENEGYVKIDRYNTAKTVSISSHYTDILTQLGEDPQREGLLKTPERVAKALQYLTHGYDIKPDEILRSAMFKEDYSQMVVVKDIEVYSMCEHHMLPFFGKAHVAYIPNGHIVGLSKIPRVVDAFARRLQVQERLTNEIRDCIQDTLDPAGVAVVIECQHLCMAMRGIQKQNSVTTTSAFTGEFAKDKTRAEFLRLITARLH

SEQ ID NO: 12474 - protein, 217 aa, Pedobacter luteus
  misc_feature (1)..(217): tr|A0A1T5DVY8|A0A1T5DVY8_9SPHI GTP cyclohydrolase 1 OS= Pedobacter luteus OX=572036 GN=folE PE=3 SV=1
MDHKLKTMDQKQDINEEQIDGYVKIDRYDQARIDRIASHYEAILADLGEDPSREGLLKTPERVAKALQYLTHGYDSKPDEILRSAMFKEDYSQMVVVKDIEVFSMCEHHMLPFFGKAHIAYIPNGYIVGLSKIPRVVDSFARRLQVQERLTNEIRDCIQDTLNPAGVAVVIECKHLCMSMRGVQKQNSVTTTSAFTGEFANETTRGEFLKLITSNLS

SEQ ID NO: 12475 - protein, 207 aa, Pedobacter metabolipauper
  misc_feature (1)..(207): tr|A0A4R6SYY5|A0A4R6SYY5_9SPHI GTP cyclohydrolase 1 OS= Pedobacter metabolipauper OX=425513 GN=folE PE=3 SV=1
MNDHLDEEEISYTKIDRYNDSKIASVANHYKDILGQLGEDPEREGLLKTPERVAKALQYLTHGYDLNPSEILRSAMFKEDYSQMVVVKDIEVYSMCEHHMLPFFGKAHIAYIPNGHIVGLSKIPRVVDAFARRLQVQERLTNEIRDCIQETLNPVGVAVVIECRHLCMAMRGIQKQNSVTTTSAFTGEFAKDKTRAEFLRLITANLH

SEQ ID NO: 12476 - protein, 211 aa, Pedobacter nutrimenti
  misc_feature (1)..(211): tr|A0A318UJW2|A0A318UJW2_9SPHI GTP cyclohydrolase 1 OS= Pedobacter nutrimenti OX=1241337 GN=folE PE=3 SV=1
MDNQTQKFTEEENEGYIKIDRYNEGKIASIATHYKDILEQLGENPAREGLLKTPERVAKALQYLTHGYDTKPEEILRSAMFKEDYSQMVVVKDIEVFSMCEHHMLPFFGKAHIAYIPNGHIVGLSKIPRVVDAFARRLQVQERLTNEIRDCIQETLNPAGVAVVMECKHLCMAMRGIQKQNSVTTTSAFTGEFAKDKTRAEFLRLITASLH

SEQ ID NO: 12477 - protein, 211 aa, Pedobacter nyackensis
  misc_feature (1)..(211): tr|A0A1W2E6M0|A0A1W2E6M0_9SPHI GTP cyclohydrolase 1 OS= Pedobacter nyackensis OX=475255 GN=folE PE=3 SV=1
MDNHTNYLDEEEDNGYIKIDRYNESKIASVAHHYKDILGQLGEDPSREGLIKTPERVAKALQYLTHGYDLNPAEILRSAMFKEDYSQMVVVKDIEVFSMCEHHMLPFFGKAHVAYIPNGHIVGLSKIPRIVDAFARRLQVQERLTNEIRDCIQDTLMPAGVAVVIECKHLCMAMRGIQKQNSVTTTSAFTGEFAKDKTRAEFLRLITANLH

SEQ ID NO: 12478 - protein, 204 aa, Pedobacter psychrophilus
  misc_feature (1)..(204): tr|A0A179DEW2|A0A179DEW2_9SPHI GTP cyclohydrolase 1 OS= Pedobacter psychrophilus OX=1826909 GN=folE PE=3 SV=1
MSDKSNNGYQKIDRYDEKVIGEIAGNYKNILASIGEDPNREGLLKTPERVAKALQFLTHGYDLDASEILKSAMFKEDYSQMVIVKDIEVYSMCEHHMLPFFGKAHIAYIPNGHIVGLSKLPRVVDVFARRLQVQERLTNEIRDCIQDTLKPAGVAVVIECKHMCMSMRGIQKQNSVTTTSAFTGEFDHDKTRSEFLRLITANLS

SEQ ID NO: 12479 - protein, 226 aa, Pedobacter psychrophilus
  misc_feature (1)..(226): tr|A0A179DMJ6|A0A179DMJ6_9SPHI GTP cyclohydrolase 1 OS= Pedobacter psychrophilus OX=1826909 GN=folE PE=3 SV=1
MLNTPLNTYPQEDILIDAIGDDHVGTAYDTPLREDAFKLDDATKVEMIEKHFKSIMEIMGLDLTDDSLKGTPKRVAKMYIKEIFSGLNPANKPEVKLFDNKYQYNQMLVEKNITLFSNCEHHFVPIIGKAHVAYISSGKVIGLSKLNRIVQYYSQRPQVQERLNIQIANELKKVLNTEDVAVVIEADHLCVSSRGIRDTGSSTVTSEYGGKFLDYETRNEFLKYIA

SEQ ID NO: 12480 - protein, 211 aa, Pedobacter psychrotolerans
  misc_feature (1)..(211): tr|A0A4R2HFV2|A0A4R2HFV2_9SPHI GTP cyclohydrolase 1 OS= Pedobacter psychrotolerans OX=1843235 GN=folE PE=3 SV=1
MSTKEALNGESRDGYVKIDRYNDEKIEAVAAHYKDILSQLGEDPEREGLVKTPERVAKALQYLTHGYDIKPDEILKSAMFKEDYSQMVVVKDIEVYSMCEHHMLPFFGKAHIAYIPNGHIVGLSKIPRVVDAFSRRLQVQERLTNEIRDCIQNTLSPMGVAVVMECKHLCMSMRGVQKQNSVTTTSAFTGTFLSNDKTRAEFLRLITASLD

SEQ ID NO: 12481 - protein, 211 aa, Pedobacter rhizosphaerae
  misc_feature (1)..(211): tr|A0A1H9J8U7|A0A1H9J8U7_9SPHI GTP cyclohydrolase 1 OS= Pedobacter rhizosphaerae OX=390241 GN=folE PE=3 SV=1
MENKDVLREESIDGYVKIDRYNDLKISAVADHYKDILGQLGENPEREGLLKTPERVAKALQYLTHGYDLKPDEILRSAMFEEDYSQMVVVKDIEVYSMCEHHMLPFFGKAHIAYIPNGHIVGLSKIPRVVDAFARRLQVQERLTNEIRDCIQNTLNPQGVAVVMECRHLCMAMRGVQKQNSVTTTSAFTGSFLSNDKTRAEFLRLITASLD

SEQ ID NO: 12482 - protein, 210 aa, Pedobacter ruber
  misc_feature (1)..(210): tr|A0A1G9PZK5|A0A1G9PZK5_9SPHI GTP cyclohydrolase 1 OS= Pedobacter ruber OX=990371 GN=folE PE=3 SV=1
MDVKNNSAEEKIDGYTKIDHYDPAKIERIASHYKAILAELGEDPSREGLIQTPIRVAKALQFLTHGYDTKPEDILRSAMFKEDYSQMVVVKDIEVFSMCEHHMLPFFGKAHVAYIPNGYIVGLSKIPRVVDSFARRLQVQERLTNEIRDCIQNTLDAAGVAVVIECKHLCMSMRGIQKQNSVTTTSAFTGAFVNETTRSEFLRLITASLS

SEQ ID NO: 12483 - protein, 228 aa, Pedobacter ruber
  misc_feature (1)..(228): tr|A0A1G9UXE3|A0A1G9UXE3_9SPHI GTP cyclohydrolase 1 OS= Pedobacter ruber OX=990371 GN=folE PE=3 SV=1
MSKNSTLRNLITTEDELLDLISDEHISSSFDTPLRADAFDMDDDTKIQLISKHFTQIMDILGLDLTDDSLKDTPKRVAKMYVKEIFSGLNPKLKPKPTLFENHYKYNQMLVERNISVYSNCEHHFVPITGKAHVAYISNGKVIGLSKLNRIVQYYSQRPQVQERLTIQIANEMKLALGTEDVAVIIDAHHHCVSSRGVRDMNSSTVTAEYCGKFLLPETRNEFLKHIK

SEQ ID NO: 12484 - protein, 211 aa, Pedobacter soli
  misc_feature (1)..(211): tr|A0A1G6QWT5|A0A1G6QWT5_9SPHI GTP cyclohydrolase 1 OS= Pedobacter soli OX=390242 GN=folE PE=3 SV=1
MSDKDVLKGESIDGYVKIDRYNDDKIEAVATHYKDILGQLGENPEREGLLKTPERVAKALQYLTHGYDLKPDEILRSAMFEEDYSQMVVVKDIEVYSMCEHHMLPFFGKAHIAYIPNGHIVGLSKIPRVVDAFARRLQVQERLTNEIRDCIQNTLSPMGVAVVMECRHLCMAMRGVQKQNSVTTTSAFTGTFLSNDKTRAEFLRLITASLD

SEQ ID NO: 12485 - protein, 211 aa, Pedobacter sp.
  misc_feature (1)..(211): tr|A0A4R2ZN32|A0A4R2ZN32_9SPHI GTP cyclohydrolase 1 OS= Pedobacter sp. CF074 OX=2135714 GN=folE PE=3 SV=1
MSSKDVLKGESKDGYVKIDRYNEDKIEAVATHYKDILGQLGENPEREGLLKTPERVAKALQYLTHGYDLKPDEILRSAMFEEDYSQMVVVKDIEVYSMCEHHMLPFFGKAHIAYIPNGHIVGLSKIPRVVDAFARRLQVQERLTNEIRDCIQNTLSPMGVAVVIECKHLCMSMRGVQKQNSVTTTSAFTGTFLSNDKTRSEFLRLITASLD

SEQ ID NO: 12486 - protein, 210 aa, Pedobacter sp.
  misc_feature (1)..(210): tr|A6EK86|A6EK86_9SPHI GTP cyclohydrolase 1 OS=Pedobact er sp. BAL39 OX=391596 GN=folE PE=3 SV=1
MTNHTDHFDEQEDGYIKIDRYNEAKTASIANHYTDILSKLGENPEREGLIKTPERVAKALQYLTHGYDLNPAEILRGAMFKEDYSQMVVVKDIEVFSMCEHHMLPFFGKAHIAYIPNGHIVGLSKIPRVVDAFARRLQVQERLTNEIRDCIQDTLNPVGVAVVIECKHLCMAMRGIQKQNSVTTTSAFTGEFSKDKTRAEFLRLITANLH

SEQ ID NO: 12487 - protein, 212 aa, Pedobacter steynii
  misc_feature (1)..(212): tr|A0A1D7QDJ7|A0A1D7QDJ7_9SPHI GTP cyclohydrolase 1 OS= Pedobacter steynii OX=430522 GN=folE PE=3 SV=1
MNNHTDHLDENETENGYIKIDRYNEGKIASVAHHYSDILTQLGEDPSREGLIKTPERVAKALQYLTHGYDLDPAAILKGAMFKEDYSQMVVVKDIEVFSMCEHHMLPFFGKAHVAYIPNGHIVGLSKIPRIVDAFARRLQVQERLTNEIRDCIQETLNPAGVAVVIECKHLCMAMRGIQKQNSVTTTSAFTGEFAKDKTRAEFLRLITANLH

SEQ ID NO: 12488 - protein, 211 aa, Pedobacter steynii
  misc_feature (1)..(211): tr|A0A1H0LX45|A0A1H0LX45_9SPHI GTP cyclohydrolase 1 OS= Pedobacter steynii OX=430522 GN=folE PE=3 SV=1
MNNNHTDHPDETENGYIKIDRYNEGKIASVANHYSDILTQLGEDPSREGLIKTPERVAKALQYLTHGYDLDPAAILKGAMFKEDYSQMVVVKDIEVFSMCEHHMLPFFGKAHVAYIPNGHIVGLSKIPRIVDAFARRLQVQERLTNEIRDCIQETLNPAGVAVVIECKHLCMAMRGIQKQNSVTTTSAFTGEFAKDKTRAEFLRLITANLH

SEQ ID NO: 12489 - protein, 211 aa, Pedobacter suwonensis; identical to SEQ ID NO: 12454
  misc_feature (1)..(211): tr|A0A1I0TCM4|A0A1I0TCM4_9SPHI GTP cyclohydrolase 1 OS= Pedobacter suwonensis OX=332999 GN=folE PE=3 SV=1

SEQ ID NO: 12490 - protein, 211 aa, Pedobacter terrae
  misc_feature (1)..(211): tr|A0A1G7XXU3|A0A1G7XXU3_9SPHI GTP cyclohydrolase 1 OS= Pedobacter terrae OX=405671 GN=folE PE=3 SV=1
MSNKDVLKGESRDGYVKIDRYNEDKIEAVAAHYKDILGQLGENPAREGLLKTPERVAKALQYLTHGYDLKPDEILKSAMFEEDYSQMVVVKDIEVYSMCEHHMLPFFGKAHIAYIPNGHIVGLSKIPRVVDAFARRLQVQERLTNEIRDCIQNTLSPMGVAVVMECRHLCMSMRGVQKQNSVTTTSAFTGTFLSNDKTRSEFLRLITASLD

SEQ ID NO: 12491 - protein, 211 aa, Pedobacter terrae
  misc_feature (1)..(211): tr|A0A561GJ15|A0A561GJ15_9SPHI GTP cyclohydrolase 1 OS= Pedobacter terrae OX=405671 GN=folE PE=3 SV=1
MSNKDVLKGESRDGYVKIDRYNEDKIEAVATHYKDILGQLGENPEREGLLKTPERVAKALQYLTHGYDLKPDEILRSAMFEEDYSQMVVVKDIEVYSMCEHHMLPFFGKAHIAYIPNGHIVGLSKIPRVVDAFARRLQVQERLTNEIRDCIQNTLSPMGVAVVIECRHLCMSMRGVQKQNSVTTTSAFTGTFLSNDKTRAEFLRLITASLD

SEQ ID NO: 12492 - protein, 213 aa, Pedobacter tournemirensis
  misc_feature (1)..(213): tr|A0A543GRS4|A0A543GRS4_9SPHI GTP cyclohydrolase 1 OS= Pedobacter tournemirensis OX=699437 GN=folE PE=3 SV=1
MKEKEINHMAEENELDGYVKIDRYNAVKIERIASHYSEILSDLGEDPSRDGLLKTPERVAKALQFLTHGYDLKPHEILKSAMFKEEYSQMVVVKDIEVYSMCEHHLLPFFGKAHVAYIPNGHIVGLSKIPRVVEAYARRLQVQERLTNEIRDCIQETLQPMGVAVVIECKHLCMSMRGIQKQNSVTTTSAFTGAFANERTRAEFLRLITASLD

SEQ ID NO: 12493 - protein, 205 aa, Pedobacter tournemirensis
  misc_feature (1)..(205): tr|A0A4Q0MFK3|A0A4Q0MFK3_9SPHI GTP cyclohydrolase 1 OS= Pedobacter tournemirensis OX=699437 GN=folE PE=3 SV=1
MAEENELDGYVKIDRYNAVKIERIASHYSEILSDLGEDPSRDGLLKTPERVAKALQFLTHGYDLKPHEILKSAMFKEEYSQMVVVKDIEVYSMCEHHLLPFFGKAHVAYIPNGHIVGLSKIPRVVEAYARRLQVQERLTNEIRDCIQETLQPMGVAVVIECKHLCMSMRGIQKQNSVTTTSAFTGAFANERTRAEFLRLITASLD

SEQ ID NO: 12494 - protein, 211 aa, Pedobacter westerhofensis
  misc_feature (1)..(211): tr|A0A521CFI6|A0A521CFI6_9SPHI GTP cyclohydrolase 1 OS= Pedobacter westerhofensis OX=425512 GN=folE PE=3 SV=1
MENHIQDPFDEDNDGYIKVDRYNASKITSIANHYTEILSTIGEDPSREGLLKTPERVAKSLQYLTHGYDLDPAEILRSAMFKEDYSQMVVVKDIEVYSMCEHHMLPFFGKAHIAYIPNGHIVGLSKIPRVVDAFARRLQVQERLTNEIRDCIQETLNPAGVAVVIECQHLCMAMRGIQKQNSVTTTSAFTGGFASDKTRAEFLRLITAKLH

SEQ ID NO: 12495 - protein, 211 aa, Pedobacter xixiisoli
  misc_feature (1)..(211): tr|A0A286AEE0|A0A286AEE0_9SPHI GTP cyclohydrolase 1 OS= Pedobacter xixiisoli OX=1476464 GN=folE PE=3 SV=1
MAHNHDHDDEELLGYQKIERYDDDKINSVAVHYKDILERLGENPEREGLLKTPERVAKALQYLTHGYDIKPEEILRSAMFKEDYSQMVVVKDIEVFSMCEHHMLPFFGKAHIAYIPNGHIVGLSKIPRVVDAFARRLQVQERLTNEIRDCIQDTLNPAGVAVVMECKHLCMAMRGVQKQNSVTTTSAFTGGFLNNDKTRAEFLRLITANLH

SEQ ID NO: 12496 - protein, 210 aa, Pedobacter yonginense
  misc_feature (1)..(210): tr|A0A317EMK2|A0A317EMK2_9SPHI GTP cyclohydrolase 1 OS= Pedobacter yonginense OX=651869 GN=folE PE=3 SV=1
MEKDYLNEESRDGYVKIDRYNESKIEAVATHYKDILSQLGENPEREGLLKTPERVAKALQYLTHGYDLKPDEILKSAMFEEDYSQMVVVKDIEVYSMCEHHMLPFFGKAHIAYIPNGHIVGLSKIPRVVDAFARRLQVQERLTNEIRDCIQNTLNPMGVAVVMECRHLCMAMRGVQKQNSVTTTSAFTGTFLSNDKTRAEFLRLITASLD

SEQ ID NO: 12497 - protein, 226 aa, Pedobacter yonginense
  misc_feature (1)..(226): tr|A0A317ESS1|A0A317ESS1_9SPHI GTP cyclohydrolase 1 OS= Pedobacter yonginense OX=651869 GN=folE PE=3 SV=1
MINHSSLQETNSIEEQSISELRAVKPNLDTPLKSDKNKMDDDKKIERIAEHFGHIMEILGLDLNDDSLKDTPKRVAKMYVKEIFSGLNPANMPTPTLFENPYKYNQMLVERNISVFSNCEHHFVPIVGKAHVAYISSGQVIGLSKLNRIVQYCAQRPQVQERLTIQIAAMLKEVLNTEDVAVVIDAHHHCVSSRGIRDAGSSTVTAEYSGKFLSAETKNEFLKYIG

SEQ ID NO: 12498 - protein, 212 aa, Pedobacter yulinensis
  misc_feature (1)..(212): tr|A0A2T3HNI0|A0A2T3HNI0_9SPHI GTP cyclohydrolase 1 OS= Pedobacter yulinensis OX=2126353 GN=folE PE=3 SV=1
MANEKHYLPEESIDGYVKIDRYNDDKIRALSSHYKDILANLGENPEREGLIKTPERVAKALQYLTHGYDLKPDEILRSAMFQEDYSQMVVVKDVEVFSMCEHHMLPFFGKAHIAYIPNGHIVGLSKIPRVVDAFARRLQVQERLTNEIRDCIQKTLNPTGVAVVIECKHLCMSMRGVQKQNSVTTTSAFTGEFINNDKTRAEFLRLITASLD

SEQ ID NO: 12499 - protein, 317 aa, Pedosphaera parvula
  misc_feature (1)..(317): tr|B9XR80|B9XR80_PEDPL GTP cyclohydrolase FolE2 OS=Pedo sphaera parvula (strain Ellin514) OX=320771 GN=folE2 PE =3 SV=1
MKKQVAEGFGVEGLRWIMGKNGQIWNDLQNGVGLLLWMMPDGPITMSKSERMVDLKPNHVAKMQDKQNERDHRELRIDKVGVRGLRFPIQIRDKAHVLQNTVATIGMYVDLPKEFKGTHMSRFIEVLNAHGNVVHVENITEILHAMQKKLHADTAHLEMEFPFFLTKKAPVSGMEGLMDYTARFDATASGKEIDFVLTVMAAVTTLCPCSKAISQYSAHNQRGTVTVKIRSKQAIWIEDLIALVESCASSELYSLLKRQDEKAVTERAYENPVFVEDLVRNVALKLNAHQDVTWYKVEAENYESIHNHNAYACIEKG

SEQ ID NO: 12500 - protein, 264 aa, Pedosphaera sp.
  misc_feature (1)..(264): tr|A0A2A2R436|A0A2A2R436_9BACT GTP cyclohydrolase FolE2 OS=Pedosphaera sp. Tous-C6FEB OX=1982324 GN=folE2 PE=3 SV=1
MSDTPTKAALHDVQSGRDHRELRIDKVGVRGLRFPIQIRDKAHSHQNTIATIAMCVDLPKEFKGTHMSRFIEVLNAHGSIVHVENIEEILHAMQIKLHAATAHLEMEFPFFLTKKAPVTGMAGVMDYTARFSATATGKEIDFVLTVIVGVTTLCPCSKAISKYGAHNQRGNVTVSIRSDKVVWIEDLIALIEASASSELYSLLKREDEKAVTERAYENPVFVEDLVRNVALKLNTRADVTWYQVEAENYESIHNHNAYACIEKG

SEQ ID NO: 12501 - protein, 275 aa, Pedosphaera sp.
  misc_feature (1)..(275): tr|A0A2G4I4E7|A0A2G4I4E7_9BACT GTP cyclohydrolase FolE2 OS=Pedosphaera sp. OX=2024890 GN=folE2 PE=3 SV=1
MIEANDTTVAVTRDSHAKPALHDAQSGHDHRELRIDKVGVRGLRFPVQIRDKAHSHQNTIATISMCVDLPKEFKGTHMSRFIEVLNAHGSIVHVENIEDILHAMQVRLDAATAHLEMEFPFFLTKKAPVTGMEGVMDYTARFAAAACGKEIDFVLTVIVGVTTLCPCSKAISKHGAHNQRGNVTVSIRSDKVVWIEDLIALVEASASSELYSLLKRPDEKAVTERAYENPVFVEDLVRNVALKLNALTDVTWYKVEAENFESIHNHNAYACIEKG

SEQ ID NO: 12502 - protein, 363 aa, Pelagibaca abyssi
  misc_feature (1)..(363): tr|A0A1P8UX20|A0A1P8UX20_9RHOB GTP cyclohydrolase FolE2 OS=Pelagibaca abyssi OX=1250539 GN=folE2 PE=3 SV=1
MNVFTPEIDRKPSQEEAAAALALLRRYTDKAQDAEIAALDPALAVLRDGVAYPDLSRDYPEGFTVDAAYRATLPDLQNGPASLIRGENRAIQHVGISNFRLPIRYRTRDNGELMLETSVTGTVSLDADKKGINMSRIMRSFYAHAEKTFSFEVIEAALDDYKTDLESFDARIEMRFSFPVKVESLRSGLQGYQYYDIALELVETAGVRRKILHLDYVYSSTCPCSLELSEHARRARGQLATPHSQRSVARISVEMKEGGCLWFEDLIGLCRKAVPTETQVMVKREDEQAFAELNAANPIFVEDAARLFAEQLQADPRIGDFRVLASHQESLHSHDAVSVLTEGTTFANDSLDPRLFSTLIHAG

SEQ ID NO: 12503 - protein, 200 aa, Pelagibacter sp.
  misc_feature (1)..(200): tr|F2I2C6|F2I2C6_PELSM GTP cyclohydrolase 1 OS=Pelagiba cter sp. (strain IMCC9063) OX=1002672 GN=folE PE=3 SV=1
MKNVTDIKDKILEKISKDEAEKAIKTILKFVGENPDREGLVETPKRVIKAFQEYFGGYLINPDDYLEKTFGDVEGYDDMVIQKNITIHSHCEHHMAPIIGTVHVAYVPSEKVVGLSKLARVVDAYARRLQTQERLTMQIANSIYKGLKSHGSAVSIDAEHQCMTTRGVRKEGATTITNYFTGVFRDSQNLQKRFLSYIKD

SEQ ID NO: 12504 - protein, 202 aa, Pelagibacter ubique
  misc_feature (1)..(202): sp|Q4FL89|GCH1_PELUB GTP cyclohydrolase 1 OS=Pelagibact er ubique (strain HTCC1062) OX=335992 GN=folE PE=3 SV=1
MKLVEDTDSKILDTKKVSDKEAEEAFKTILTWMGEDPSREGLLETPKRVVKAFKEYFGGYTEDAEKILEKTFGDVEGYDDMVVEKNISVSSHCEHHMAPIVGTAHVAYIPNERVVGLSKLARVVEVFSKRLQTQERLTMQVAQALMTSLDAKGVAVTIDAAHQCMTMRGIKKENATTVTNYFLGEFKKDLSVQNRYLRFISK

SEQ ID NO: 12505 - protein, 202 aa, Pelagibacteraceae bacterium
  misc_feature (1)..(202): tr|A0A3R7SIP3|A0A3R7SIP3_9PROT GTP cyclohydrolase 1 OS= Pelagibacteraceae bacterium TMED195 OX=1986631 GN=folE PE=3 SV=1
MTSVITKKNFQPTLDKSISREEAEKAVETLIKWAGDDPSREGLRETPKRVVNAFNEFFSGYNESPESYLSKTFEDVQGYEDIVMLKDISFHSHCEHHMVPIIGKVHLAYIPTKNVVGISKLARVVDIFAKRLQTQETMTQQIANCIEKSLKPKGVAVYIEALHQCMTTRGVQKPNVSTITSCFLGEFKTDKSIGQRFTDFIK

SEQ ID NO: 12506 - protein, 234 aa, Pelagibacteraceae bacterium
  misc_feature (1)..(234): tr|A0A1Z9PY56|A0A1Z9PY56_9PROT GTP cyclohydrolase 1 OS= Pelagibacteraceae bacterium TMED237 OX=1986815 GN=folE PE=3 SV=1
MSKDLSVIKKNSDIDKYNQDGDNHFSSNLDSTLLDKAFELSDKEKINIIQEHFRSIMIAMGLDLSDDSLKGTPYRVAKMYVKEIFKGLDPDKKPQAMLFENKFEYGKMLLEKNISFYSFCEHHFLPFYGTAHVGYISSGKVVGLSKIHRIVNYFSKRPQVQERLTVQIFKELKNVLGTEDVAILLEASHLCVSSRGIKDITSTTVTMESGGIFKDDEKWSDFLSIVVPDKVKNK

SEQ ID NO: 12507 - protein, 204 aa, Pelagibacterales bacterium
  misc_feature (1)..(204): tr|A0A2A5V3G7|A0A2A5V3G7_9PROT GTP cyclohydrolase 1 OS= Pelagibacterales bacterium MED-G44 OX=1986252 GN=folE P E=3 SV=1
MKLVKDTNIDNQIKKISDKEAEDAFKTILAWMGEDPNREGLLETPKRVVKAFKEYFKGYKEDPHQILDKTFGDVEGYDDMVVQKNISVQSHCEHHMAPIIGKAHVAYIPKERVVGLSKLARVVEVFSKRLQTQERLTMQIANTLMESLDAKGVAVTIDSTHQCMTMRGIKKEQATTVTNYYLGQFKDDLSYQNRYLRFISIAKD

SEQ ID NO: 12508 - protein, 203 aa, Pelagibacterales bacterium
  misc_feature (1)..(203): tr|A0A2E4WFI6|A0A2E4WFI6_9PROT GTP cyclohydrolase 1 OS= Pelagibacterales bacterium OX=2026776 GN=folE PE=3 SV=1
MIKDEIKENKRVVKNKKPTREEAMQAVRTMLAWAGDNPDREGLLETPLRVVKAYEEFFAGYKENSDAILNKTFEEVAGYDEMVIIKNVRLESHCEHHMVPILGKAHVAYIPNKRVVGISKLARVVDVYAKRLQTQETMTAQIAESIQRVLQPKGVGVVIDAGHQCMTTRGVHKPTATTITSQMLGVFRTDYRTRSEFMNLINN

SEQ ID NO: 12509 - protein, 219 aa, Pelagibacterium halotolerans
  misc_feature (1)..(219): tr|G4RDH1|G4RDH1_PELHB GTP cyclohydrolase 1 OS=Pelagiba cterium halotolerans (strain DSM 22347 / JCM 15775 / CG MCC 1.7692 / B2) OX=1082931 GN=folE PE=3 SV=1
MRPSIFKGTPFMDMNVKPKPAQTALDRVIERPTREEAEAAVRTLIAWAGDNPDREGLLDTPRRVADAYREFFAGYEEDARAVLETTFTEVGGYDDIVLVRDIPFHSHCEHHMVPFVGKAHIAYLPHDGVVGLSKLARVTDVFAKRLQTQENLTAQIIEAINEAINPRGAAVMLEAEHMCMSMRGIKKHGSSTVTHRFTGVFAEDRQEQDRFFALIRAGR

SEQ ID NO: 12510 - protein, 209 aa, Pelagibacterium luteolum
  misc_feature (1)..(209): tr|A0A1G7XH62|A0A1G7XH62_9RHIZ GTP cyclohydrolase 1 OS= Pelagibacterium luteolum OX=440168 GN=folE PE=3 SV=1
MDMNVKPKPVAQTALERVIQRPSREEAEAAVRTLIAWAGDNPNREGLIDTPRRVVDSYREFYSGYDEDAAKILETTFSEVGGYDDIVLVRDIPFNSHCEHHMVPFVGKAHIAYLPHDGVVGLSKLARVTDVFAKRLQTQENLTAQIIEAINEAINPRGAAVMLEAEHMCMSMRGVRKHGSSTITHRFTGVLAEDRQEQDRFFALIRAGR

SEQ ID NO: 12511 - protein, 208 aa, Pelagibacterium sp.
  misc_feature (1)..(208): tr|A0A1E4E027|A0A1E4E027_9RHIZ GTP cyclohydrolase 1 OS= Pelagibacterium sp. SCN 63-126 OX=1660123 GN=folE PE=3 SV=1
MDAPVKPLKPATTSQVALPRPTKEEAEAAVRTLIAWAGDDPNREGLLDTPARVAKAYGELFAGYGQDAAAVLSKTFKEVGGYDDLVLVRDIPFYAHCEHHMVPFYGKAHIAYLPHDGVVGLSKLARLVEVFARRLQTQETMTAQIIDAINENLGPRGAAVMLEAEHMCMTMRGIKAHDVKTVTHRFTGVFAEDRVEQDRFFAMVAGRR

SEQ ID NO: 12512 - protein, 269 aa, Pelagibacterium sp.; identical to SEQ ID NO: 10703
  misc_feature (1)..(269): tr|A0A2E7FVS4|A0A2E7FVS4_9RHIZ GTP cyclohydrolase FolE2 OS=Pelagibacterium sp. OX=1967288 GN=folE2 PE=3 SV=1

SEQ ID NO: 12513 - protein, 184 aa, Pelagibaculum spongiae
  misc_feature (1)..(184): tr|A0A2V1H244|A0A2V1H244_9GAMM GTP cyclohydrolase 1 OS= Pelagibaculum spongiae OX=2080658 GN=folE PE=3 SV=1
MTDQIADHYLKILSAIGEDTTRDGLKDTPQRAAKAFKYLTKGYDQSLDEVVNGAIFESDNDEMVIVRDIELYSMCEHHLLPFIGKAHVAYIPTGKVIGLSKIARIVDMFARRLQIQEQLTKQIADSIMSVTGARGVGVIVEAKHMCMMMRGVEKQNSSMTTSMMTGLFRTDPRTRSEFLKLTNR

SEQ ID NO: 12514 - protein, 366 aa, Pelagicola litoralis
  misc_feature (1)..(366): tr|A0A4U7N6V7|A0A4U7N6V7_9RHOB GTP cyclohydrolase FolE2 OS=Pelagicola litoralis OX=420403 GN=folE2 PE=3 SV=1
MNIQTNKPQTQPSKDDAIEALAKLRAWAVQATPEEIAALEPAVARLLPDQPLGNYPALTRTYPDDFVADEAYRASLPDLQNGPASLIRGEKQQIQHVGISNFRLPIRFHARDGADMTLETSVTGTVSLDAEKKGINMSRIMRSFYKHAEKTFSFEVMEAALADYVTDLESLDARIQMRFSYPMRIPSLRSGLAGYQYYDIALEKVQVNGELHKVMHLDYVYSSTCPCSLELSEHARQSRGQLATPHSQRSVARISVQVRQDELLWFEDLIDMARKAVPTETQVMVKREDEQAFAELNAANPIFVEDAARLFCEQLKANPRVGDFRVIASHQESLHSHDAVSILTDGPFFAASSLDPKLFNTLFHIG

SEQ ID NO: 12515 - protein, 366 aa, Pelagicola litorisediminis
  misc_feature (1)..(366): tr|A0A1Y5S2V8|A0A1Y5S2V8_9RHOB GTP cyclohydrolase FolE2 OS=Pelagicola litorisediminis OX=1312363 GN=folE2 PE=3 SV=1
MNIRPSDVKQLPDREEAKTALALLRQWAETATPEEVADLDPAIARLLPSGVVSNYPMLSREYPEGFTTDEGYRATLPDLQNGPSSLIRGAKQHLQHVGISNFRLPIRFHTRDDGDLTLETSVTGTVSLEAGKKGINMSRIMRSFYKHAAKTFSFEVVEAALDDYITDLDSIDARLQMRFSYPAKVQSLRSGLEGYQYYDIALELVESGGLRRKFMHLDYVYSSTCPCSLELSEHARQARGQLATPHSQRSVARISVEVKGGDCLWFEDLIDMARQAVPTETQVMVKREDEQAFAELNAANPIFVEDAARLFCKQLLADPRIGDFRIVASHQESLHSHDAVSVLTEGATFAADSLDPKLFNTLFHVG

SEQ ID NO: 12516 - protein, 366 aa, Pelagicola sp.
  misc_feature (1)..(366): tr|A0A2U2CWN3|A0A2U2CWN3_9RHOB GTP cyclohydrolase FolE2 OS=Pelagicola sp. LXJ1103 OX=2175247 GN=folE2 PE=3 SV= 1
MNHHNMDLHKMPDRDDAQSALDVLRRWAADASPEEVADLEPAIARLIPGGAVSNYPSLSRKYPDEFEADAAYRATMPDLQNGPTSLIRGSKQQLQHVGISNFRLPIRFHTRDGSDLTLETSVTGTVSLEAEKKGINMSRIMRSFYKHAEKTFSFEVIEAALDDYISDLDTVDARIQMRFSYPAKVKSLRSGLEGYQYYDIALELVETDGVRRKFMHLDYVYSSTCPCSLELSEHARQTRGQLATPHSQRSVARISVEVTEGEVLWFEDLIEHARAAVPTETQVMVKREDEQAFAELNAANPIFVEDAARLFCERLLSDARIGDFRVIASHQESLHSHDAVSILVEGDTFSAQSIDPKLFGTLIHVG

SEQ ID NO: 12517 - protein, 358 aa, Pelagimonas varians
  misc_feature (1)..(358): tr|A0A238KX26|A0A238KX26_9RHOB GTP cyclohydrolase FolE2 OS=Pelagimonas varians OX=696760 GN=folE2 PE=3 SV=1
MNKGAKPMNIQVDIAQKPSREEAEQALALLRNYAGSEAALAELTGAYPDLHNIYPDNFIVDPAYKDTLPDLQNGPASLIRGAQRVIQHVGISNFRLPIPYHTRDNGDLTLETSVTGTVSLEADKKGINMSRIMRSFYTHAEKTFSFEVMEAALDDYKTDLDSFDARIQMRFSFPMKVQSLRSGLTGFQYYDIALELVETAGTRREIVHLDYVYSSTCPCSLELSEHARQTRGQLATPHSQRSVARVSVEVLPGKCLWFEDLIDMCRRAVPTETQVMVKREDEQAFAELNAANPIFVEDAARLFAQVLEDDARVGDFRVVASHQESLHSHDAVSVLTEGTLFADQSLDPKLFSTLFHVG

SEQ ID NO: 12518 - protein, 303 aa, Pelagirhabdus alkalitolerans
  misc_feature (1)..(303): tr|A0A1G6H6C1|A0A1G6H6C1_9BACI GTP cyclohydrolase FolE2 OS=Pelagirhabdus alkalitolerans OX=1612202 GN=folE2 PE =3 SV=1
MYKKTLPSKPLRHKLFGSVQPGEKTKPTKKSEMPDLQNSNDDFLFDLDAVGITNVKHPIQINSQMKPLNQTSIATFSFSSSLKQDSKGTNMSRFTEELDHQAQSGTLTTDLSDLKDFAKKLTKRLKAEDLHMNITVPWFFERSAPDSNRSGLNHADLTIDIDYTLPNQFTIEVGLSATITTLCPCSKEISEYSAHNQRGVVTTSVQLNADFNEETIDWKKELLDAAESNASAIIHPVLKRPDEKMVTETAYENPRFVEDMVRLVAADLYEMDYVDQFKVKCQNEESIHLHDAIASVTYDKRGS

SEQ ID NO: 12519 - protein, 366 aa, Pelagivirga sediminicola
  misc_feature (1)..(366): tr|A0A2T7G6E4|A0A2T7G6E4_9RHOB GTP cyclohydrolase FolE2 OS=Pelagivirga sediminicola OX=2170575 GN=folE2 PE=3 S V=1
MTHQPSDIQTPPERGEAQDALALLRRWAAQATPEEVADLDPAISRLLPRGEVANYPALARAYPEDFDADDAYRATMPDLQNGPSSLIKGSRQQLQHVGISNFRLPIRFHTRDGADLTLETSVTGTVSLEANKKGINMSRIMRSFYKHAERTFSFEVMADALDDYISDLGSVDARIQMRFSYPARIKSLRSGLEGYQYYNIALELVETDGVRRKFMHLDYVYSSTCPCSLELSEHARQARGQLATPHSQRSVARISVEVTCDDCLWFEDLIEIARSAVPTETQVMVKREDEQAFAELNAANPIFVEDAARLFCEALLADGRIGDFRIVASHQESLHSHDAVSVLTEGDTFAAQSLDPRLFATLFHVG

SEQ ID NO: 12520 - protein, 265 aa, Pelistega indica
  misc_feature (1)..(265): tr|V8FYF1|V8FYF1_9BURK GTP cyclohydrolase FolE2 OS=Peli stega indica OX=1414851 GN=folE2 PE=3 SV=1
MSENFSNLAVMPDVQSSYDPRQIAIQRVGIRKVKSPLLIKQEAEQVQASVGEWTLTVYLPESEKGTHMSRFVSLLANYRQTAMDVSVFKQMANEMLTLLNAEKGDITVTFPYFINKKAPVSGVESLMDYQVTWQANASKESIEFVMTVVVPVMSLCPCSKAISAYGAHNQRSHITVEVVSEQIYSMDDVIKLIEKQASSELWGLLKRHDEKYVTEYSYDNPKFVEDLIRDVAVAIKTLPGIQRYKIEAENFESIHNHSAYAVIEG

SEQ ID NO: 12521 - protein, 260 aa, Pelobacter acetylenicus
  misc_feature (1)..(260): tr|A0A1L3GJX9|A0A1L3GJX9_PELAE GTP cyclohydrolase FolE2 OS=Pelobacter acetylenicus OX=29542 GN=folE2 PE=3 SV=1
MRDMQMERDTRNVAIDKVGVKDIHYPIVVMDKNRDQQHTVARINMYVDLPHHFKGTHMSRFVEILNRYRGEITMRNMGELLQAMKDRLNASCAHIEMDFPYFIEKQAPVSKALSLMEYRCCLRGTLAETKDFVLAVEVPLTALCPCSKEISARGAHNQRSSVRVEVRMNKFIWIEDLISWVEECGSAPVYALLKREDEKAVTEQAYDNPMFVEDIVRAVTLRLKATPEITWFRVECENFESIHNHSAYAMVEFPPRCEEG

SEQ ID NO: 12522 - protein, 266 aa, Pelobacter carbinolicus
  misc_feature (1)..(266): sp|Q3A091|GCH4_PELCD GTP cyclohydrolase FolE2 OS=Peloba cter carbinolicus (strain DSM 2380 / NBRC 103641 / GraB d1) OX=338963 GN=folE2 PE=3 SV=2
MRDMQMERDTRNIAIDKVGVKDIRYPIVVMDKNKDQQHTVARINMYVDLPHHFKGTHMSRFVEILNQYRGEITMRNMGELLQEMKNRLDASCAHLKMDFPYFIEKQAPVSKARSLMEYRCRLRGTLDKQKDFVLGVEVPLTALCPCSREISERGAHNQRSAVKVEVRMSKFIWIEDLISWIEECGSAPVYALLKREDEKAVTEQAYDNPMFVEDIVRAVTLKLKSAPEITWFRVECENFESIHNHSAYAMVEFPPRTEDAEPAPAP

SEQ ID NO: 12523 - protein, 257 aa, Pelobacter propionicus
  misc_feature (1)..(257): sp|A1AU47|GCH4_PELPD GTP cyclohydrolase FolE2 OS=Peloba cter propionicus (strain DSM 2379 / NBRC 103807 / OttBd 1) OX=338966 GN=folE2 PE=3 SV=2
MPDMQKRPDHRRIPISKVGVKDISYPIVVMDKNRSLQHTVARVNMYVDLPHQFKGTHMSRFVEILNRHREQIALDKLETILEEMKARLGSASAHLEIQFPYFIDKRAPVSGARSLMEYSCEFSASLTDTLDFVLGVRVPLTSLCPCSRELAIHGAHNQRSIMTVRVRYRDFIWIEDLVELIEQCGSSPLYSLLKRVDEKYVTEQAYENPRFVEDMVREAYSRLAGMENITWFSVETENFESIHNHSAYAAVELDRRG

SEQ ID NO: 12524 - protein, 270 aa, Pelobacter sp.
  misc_feature (1)..(270): tr|A0A1L3GPV4|A0A1L3GPV4_9DELT GTP cyclohydrolase FolE2 OS=Pelobacter sp. SFB93 OX=1842532 GN=folE2 PE=3 SV=1
MNTMRDMQMERDTRNIPIDKVGVKDVNYPIVVMDKNKDQQHTVARINMYVDLPHHFKGTHMSRFIEILNQYRGEITMRNMGSILQDMKDRLEASCAHLEMEFPYFIEKEAPVSKARSLMEYRCRLSGTLDDHKDFVLGVEVPMTSLCPCSKEISERGAHNQRSAVRVEIRSDKFVWIEDLISWIEDCGSAPVYSLLKREDEKAVTEQAYDNPMFVEDIVRAVTEKLKSVESILWFRVECENFESIHNHSAYALVEHPSAYPVPLDTPDEN

SEQ ID NO: 12525 - protein, 204 aa, Pelobium manganitolerans
  misc_feature (1)..(204): tr|A0A419SAI1|A0A419SAI1_9SPHI GTP cyclohydrolase 1 OS= Pelobium manganitolerans OX=1842495 GN=folE PE=3 SV=1
MSEQQETGYQKIDRYNTEVISDIAGHYKQILSDIGEDPNREGIVKTPERAAKALQFLTHGYDLDAAEILKSAMFKEEYSQMVIVKDIEVYSLCEHHLLPFFGKAHIAYIPAGHIVGLSKIPRVVDVFARRLQVQERLTNEIRDCIQNTLNPAGVAVVIECKHMCMSMRGIQKQNSVTTTSAFTGAFSNDKTRSEFLRLISADLA

SEQ ID NO: 12526 - protein, 220 aa, Pelobium manganitolerans
  misc_feature (1)..(220): tr|A0A419S2I7|A0A419S2I7_9SPHI GTP cyclohydrolase 1 OS= Pelobium manganitolerans OX=1842495 GN=folE PE=3 SV=1
MKIYAEKIDKCGEDHFSANIDTPLRPGAFLMDDEEKIEAIAKNFKNIMEILGLDLTDDSLKNTPHRVAKMYVKEVFKGLNPANKPSISMFNNNYQYRQMLVEKNITLYSYCEHHFVPIIGKVHVAYISSGEVIGLSKINRLVQYYANRPQVQERLTQQIANGLKEALNTPHVAVMVDAEHLCVASRGIKDTASSTVTFHFSGDFQEKDVRAEFLATVNAK

SEQ ID NO: 12527 - protein, 216 aa, Pelodictyon luteolum
  misc_feature (1)..(216): tr|Q3B4V2|Q3B4V2_PELLD GTP cyclohydrolase 1 OS=Pelodict yon luteolum (strain DSM 273 / 2530) OX=319225 GN=folE PE=3 SV=1
MHTPIKTPLFTGRGTCCDDDEYPLDPQELCPEAHAALSASVSTMLESVGEDPMREGLLKTPERVARSLAFLTRGYRQDPEEMLKKAVFTESYDEMVLVRDIDIFSMCEHHMLPFFGKAHVAYIPDGKIVGLSKLARVVEVFARRLQVQERLTQQIRDAIQDVLNPKGVGVVIEAKHMCMVMRGVEKLNSVTTTSAMSGQFITSESTRGEFLRLIRQ

SEQ ID NO: 12528 - protein, 231 aa, Pelodictyon luteolum
  misc_feature (1)..(231): tr|A0A165LTF3|A0A165LTF3_PELLU GTP cyclohydrolase 1 OS= Pelodictyon luteolum OX=1100 GN=folE PE=3 SV=1
MKQEKTASATSENNPMHTPINTPLFTGRGTCCDDDEYPLDPQELCPEAHAALSASVSTMLESVGEDPMREGLLKTPERVARSLAFLTRGYRQDPEEMLKKAVFTESYDEMVLVRDIDIFSMCEHHMLPFFGKAHVAYIPDGKIVGLSKLARVVEVFARRLQVQERLTQQIRDAIQDVLNPKGVGVVIEAKHMCMVMRGVEKLNSVTTTSAMSGQFITSESTRGEFLRLIRQ

SEQ ID NO: 12529 - protein, 218 aa, Pelodictyon phaeoclathratiforme
  misc_feature (1)..(218): tr|B4SBX8|B4SBX8_PELPB GTP cyclohydrolase 1 OS=Pelodict yon phaeoclathratiforme (strain DSM 5477 / BU-1) OX=324 925 GN=folE PE=3 SV=1
MPSAISESNPLPSGRRSCYDDDDCMAEHVQNDPMIINGISSAVSAMLEGIGEDPQREGLLKTPERVAKSLRFLTKGYREDPEELLKKAVFTEAYDEMVLVRDIDLFSMCEHHMLPFFGKAHVAYIPDGKIVGLSKLARVVEVFARRLQVQERLTQQIRDAIQNVLNPKGVAVVIEAKHLCMVMRGVEKINSVTTTSAMSGQFITSQSTRSEFLRLIKP

SEQ ID NO: 12530 - protein, 217 aa, Pelolinea submarina
  misc_feature (1)..(217): tr|A0A347ZTU0|A0A347ZTU0_9CHLR GTP cyclohydrolase 1 OS= Pelolinea submarina OX=913107 GN=folE PE=3 SV=1
MNDKKLENCEDSPVYEAAELFCDSEIDFQAIEKSVKEILSAVGEDPEREGLLATPGRVARAYGELLEGYRTDPIKLVNNATFTANYDDMVIVRDIEFYSLCEHHMLPFIGRAHVAYMPKGQVIGLSKIPRIVDMFSRRLQIQERMTRQIADFLNTLLEPRGVAVVVEAVHLCGMIRGVRKHDSRMTTSSMLGAFRNNEATRMEFLDNISRGAKPLEF

SEQ ID NO: 12531 - protein, 262 aa, Pelosinus fermentans
  misc_feature (1)..(262): tr|I9B035|I9B035_9FIRM GTP cyclohydrolase FolE2 OS=Pelo sinus fermentans B4 OX=1149862 GN=folE2 PE=3 SV=1
MKDVQNISDNRGIAIQNVGVSDVRLPFLIKTKADSLQSVLATISLTVNLPKEYKGTHMSRFIEILSEWSQKPVSYREMELILMDTVNKLDAEHAQMDIYFKYFIEKTAPISGFKSMLDVDCLFSAQLTKGKPLDFILGVDVPFTSLCPCSKEISAYGAHNQRGLMKVKIKNTDGQFIWIEDLVALMEAEGSCPIYPLLKREDEKYVTEHAYENAKFVEDVLRDLVLSLRQQKSIRWFEVQCENYESIHNHSAYAKHVEHLKA

SEQ ID NO: 12532 - protein, 262 aa, Pelosinus fermentans
  misc_feature (1)..(262): tr|I8TZB8|I8TZB8_9FIRM GTP cyclohydrolase FolE2 OS=Pelo sinus fermentans JBW45 OX=1192197 GN=folE2 PE=3 SV=1
MKDVQNISDDRGIAIQNVGVSDVRLPFLIKTKADSLQSVLATISLTVNLPKEYKGTHMSRFIEILSEWSQKPVSYREMELILMDTVNKLDAEHAQMDIYFKYFIEKTAPISGLKSMLDVDCLFSAQLTKGKPLDFILGVDVPFTSLCPCSKEISAYGAHNQRGLMKVKIKNTNGQFIWIEDLVALMEAEGSCPIYPLLKREDEKYVTEHAYENAKFVEDVLRDLVLSLRQQKSIRWFEVQCENYESIHNHSAYAKHVEHLKA

SEQ ID NO: 12533 - protein, 262 aa, Pelosinus propionicus
  misc_feature (1)..(262): tr|A0A1I4H9X7|A0A1I4H9X7_9FIRM GTP cyclohydrolase FolE2 OS=Pelosinus propionicus DSM 13327 OX=1123291 GN=folE2 PE=3 SV=1
MKDVQNISDDRGIAIQNVGVSDVRLPFLIKTKAESLQSVLATISLTVDLPKEYKGTHMSRFIEILSEWSQKPVSYREMELILMDTINKLDAEHAQMDIKFKYFIEKIAPISKLRSMLDVDCLFSAQLTKGKSLDFILGVNVPFTSLCPCSKEISRYGAHNQRGLMKVKIKNVDGQFIWIEDLVALMEAEGSCPIYPLLKREDEKYVTEHAYENAKFVEDVLRDLVLSLRQQKSIRWFEVQCENYESIHNHSAYAKHVENLSS

SEQ ID NO: 12534 - protein, 262 aa, Pelosinus sp.
  misc_feature (1)..(262): tr|A0A075KCH3|A0A075KCH3_9FIRM GTP cyclohydrolase FolE2 OS=Pelosinus sp. UFO1 OX=484770 GN=folE2 PE=3 SV=1
MKDVQNISDDRGIAIQNVGVSGVHLPFLIKTKTDSFQSVLATINLTVDLPKEYKGTHMSRFIEILSEWSQKPISSREMESILIDTLNKLDAEYAQMEIHFKYFIDKVAPISGLKSMLDVDCSFSAKLTKGRPLDFTLGVAVPFTSLCPCSKEISKYGAHNQRGLMKVKIKYTSGKFIWIEDLVALMEAQGSCPIYPLLKREDEKYVTEHAYENAKFVEDILRDLVLALRQQKFISWFEIQCENYESIHNHSAYAKHVEHVNN

SEQ ID NO: 12535 - protein, 214 aa, Pelotomaculum propionicicum
  misc_feature (1)..(214): tr|A0A4Y7RNU6|A0A4Y7RNU6_9FIRM GTP cyclohydrolase 1 OS= Pelotomaculum propionicicum OX=258475 GN=folE PE=3 SV=1
MQLADIQVKECPQVDHRIRHSAKGEIERVFDDAKIEHAVRMILEAIGEDPDREGLQETPARVARMYREIFYGLAEDPELHLAKTFSEDHDEMVIVKDIPLYSVCEHHLLPFYGKAHVAYIPRKGNVTGLSKLARVVDGFARRPQLQERLTSQIADSIMKRLKAHGVLVVIEAEHMCMTFRGVKKPGSKTVTSAVRGVLHKHQATRAEAFALIKD

SEQ ID NO: 12536 - protein, 186 aa, Pelotomaculum schinkii
  misc_feature (1)..(186): tr|A0A4Y7RD48|A0A4Y7RD48_9FIRM GTP cyclohydrolase 1 OS= Pelotomaculum schinkii OX=78350 GN=folE PE=3 SV=1
MVDQDKIKKAVRMILEAIGEDPEREGLTETPDRVARMYNEIFSGLWEDPESHLEKIFSEQHEEMIIVKDIPLYSMCEHHLLPFYGKAHVAYIPKDGKVTGLSKLARVVEGYAKRPQLQERLTSQIADSIMNRLNAQGALVVVEAEHMCMTFRGVKKPGSKTVTSAVRGLFRRNKATRAEAFALIKS

SEQ ID NO: 12537 - protein, 186 aa, Pelotomaculum sp.; identical to SEQ ID NO: 12536
  misc_feature (1)..(186): tr|A0A4Y7S2A8|A0A4Y7S2A8_9FIRM GTP cyclohydrolase 1 OS= Pelotomaculum sp. FP OX=261474 GN=folE PE=3 SV=1

SEQ ID NO: 12538 - protein, 186 aa, Pelotomaculum sp.
  misc_feature (1)..(186): tr|A0A1V5BR56|A0A1V5BR56_9FIRM GTP cyclohydrolase 1 OS= Pelotomaculum sp. PtaU1.Bin065 OX=1811696 GN=folE PE=3 SV=1
MYDRQKIEAAVRMIIEAIGEDPEREGLRETPARVARMYEEIFSGLWEEPDAHLEKKFSGDHEEMVIVKDIPLYSMCEHHLLPFYGKAHVAYIPRKGNVTGLSKLARLVEGFARRPQLQERLTSQIADSIMKRLNAQGALVVIEAEHMCMTFRGVKKPGSKTVTSAVRGIFQKSEATRAEAFSLVKD

SEQ ID NO: 12539 - protein, 188 aa, Pelotomaculum thermopropionicum
  misc_feature (1)..(188): sp|A5D2D8|GCH1_PELTS GTP cyclohydrolase 1 OS=Pelotomacu lum thermopropionicum (strain DSM 13744 / JCM 10971 / S I) OX=370438 GN=folE PE=3 SV=1
MFDQHKIEKAVRLILEAIGENPEREGLKGTPARVARMYEEIFSGLQEDPEEHLQKIFSEEHEEMVIVKDIPLYSICEHHLLPFYGKAHVAYIPRKGKVTGLSKLARVVEGFAKRPQLQERLTSQIADTIMRRLNPIGVLVVIEAEHMCMTFRGVKKPGSKTVTSAVRGLFRKNVATRAEAFSLIKGQA

SEQ ID NO: 12540 - protein, 186 aa, Pelotomaculum thermopropionicum
  misc_feature (1)..(186): tr|A0A101HVV4|A0A101HVV4_9FIRM GTP cyclohydrolase 1 OS= Pelotomaculum thermopropionicum OX=110500 GN=folE PE=3 SV=1
MIDHEKIKKAVTMILEAIGENPEREGLIETPARVARMYEEIFSGLQEEPEGFLQKIFYEHHEEMILVKDIPLYSMCEHHLLPFYGKAHVAYIPREGKVTGLSKLARVVEGYAKRPQLQERLTSQIADTIMHRLNAKGVIVVLEAEHMCMTFRGVKKPGSKTVTSAVRGLFRKSEATRAEAFSLIKG

SEQ ID NO: 12541 - protein, 185 aa, Peptoclostridium acidaminophilum
  misc_feature (1)..(185): tr|W8T5I5|W8T5I5_PEPAC GTP cyclohydrolase 1 OS=Peptoclo stridium acidaminophilum DSM 3953 OX=1286171 GN=folE PE =3 SV=1
MDKEKIKRAFRDIIEAIGEDPDREGLRDTPDRVARMYEEIFVGLNEDPRDYLDVYFEEEKYEEIVLVKDIPFHSVCEHHFVPFFGKAHVAYIPKGGRLTGLSKLARVVDVVAKRPQLQERISQTVADIIMEKLQPYGVVVVIEAEHMCMTMRGVKKPGSTTVTSAIRGIFKNDTAARAEIMSLIK

SEQ ID NO: 12542 - protein, 186 aa, Peptoclostridium acidaminophilum
  misc_feature (1)..(186): tr|Q5XZD5|Q5XZD5_PEPAC GTP cyclohydrolase 1 OS=Peptoclo stridium acidaminophilum OX=1731 GN=folE PE=3 SV=1
MDKEKIQKSVRDIIEAIGEDPDREGLEDTPDRMAKMYEENIFVGLNEDPKRIFGCKIPREEKYEEIVLVKDIPFHSVCEHHFVPFFGKAHVAYIPKGGRLTGLSKLARVVDVVAKRPQLQERISQTVLDIIMKLQPYGVVVVIEAEHMCMTMRGVKKPGSTTVTSAIRGIFKNDTAARAEIMSLIK

SEQ ID NO: 12543 - protein, 187 aa, Peptoclostridium litorale
  misc_feature (1)..(187): tr|A0A069RJI7|A0A069RJI7_PEPLI GTP cyclohydrolase 1 OS= Peptoclostridium litorale DSM 5388 OX=1121324 GN=folE P E=3 SV=1
MDRERINKAVIEIIKAVGEDPEREGLKGTPDRIARMYEEIFCGLNEDPKDHLEVYFEEESYEEIVLVKDIPFYSVCEHHFVPFFGKAHVAYIPKGGRLTGLSKLARVVESVAKRPQLQERITQTVADAIVEKLAPYGVVVVIEAEHMCMTMRGVKKPGSKTVTSAIRGIFKNDTAARAEVMSLINQK

SEQ ID NO: 12544 - protein, 194 aa, Peptoclostridium sp.
  misc_feature (1)..(194): tr|A0A416QGK9|A0A416QGK9_9FIRM GTP cyclohydrolase 1 OS= Peptoclostridium sp. AF21-18 OX=2292243 GN=folE PE=3 SV =1
MELKEGKMDKEKIKRAVRDILEAIGEDPDREGLKETPDRVARMYEEIFCGIFQDPREHLKVTFPEESHEEMVIVKDIPFYSCCEHHLVPFFGKAHVVYIPKGGRLTGLSKLARVVETIAKRPQLQERIAKETADIIMEELRPYGVMVVIEAEHMCMTMRGVKKPGSKTVTSAVRGVFAKDIATRTEAMNLILMK

SEQ ID NO: 12545 - protein, 194 aa, Peptococcaceae bacterium
  misc_feature (1)..(194): tr|A0A3B8NPX3|A0A3B8NPX3_9FIRM GTP cyclohydrolase 1 OS= Peptococcaceae bacterium OX=2052179 GN=folE PE=3 SV=1
MSEQQKRKIDRQKIIEGVRLLLEGIGEDPNREGLRRTPERIAKMYEEIFCGLQYDPKEELNVFFSEKHDEMILVKDIPIYSICEHHLLPFYGKAHVAYIPRQGKITGLSKLARVVEGFAKRPQLQERLTSQIADTIMEALDPLGVMVVIEAEHMCMTMRGVKKAGSKTITSAVRGIFKSNEATRAEAFSLIKGS

SEQ ID NO: 12546 - protein, 188 aa, Peptococcaceae bacterium
  misc_feature (1)..(188): tr|A0A0J1FIT3|A0A0J1FIT3_9FIRM GTP cyclohydrolase 1 OS= Peptococcaceae bacterium CEB3 OX=999898 GN=folE PE=3 SV =1
MDMAKIEEAVRMILEGIGEDPDREGLVDTPKRVARMYEEVFAGLGEDPSEHLKVQFSEDHEEMVIVKDIPLYSMCEHHLIPFYGFAHVAYIPRKGKITGLSKLARVVEGYAKRPQLQERLTSQIADSIMKMLEPRGVLVVIEAEHMCMTMRGVKKPGSKTLTSAVRGIFKSSEVTRAEGFALIHGNRP

SEQ ID NO: 12547 - protein, 185 aa, Peptococcus niger
  misc_feature (1)..(185): tr|A0A1G6XBF4|A0A1G6XBF4_PEPNI GTP cyclohydrolase 1 OS= Peptococcus niger OX=2741 GN=folE PE=3 SV=1
MINQEKAEQAVRDLLVALGEDADRDGLVETPKRVASMYAELLAGRDTDPSVHLSKRFPVEHSGLLLEKDIPFYSLCEHHLLPFYGVAHIAYLPGKEVVGLSKLARTVESFARRLQLQEQMGEQIADAMMAELATTGVMVVITAEHLCMTMRGVKKPGSKTTTIATRGCFTDDLARQDQVLALIAR

SEQ ID NO: 12548 - protein, 184 aa, Peptoniphilus asaccharolyticus
  misc_feature (1)..(184): tr|A0A1W1ULT6|A0A1W1ULT6_PEPAS GTP cyclohydrolase 1 OS= Peptoniphilus asaccharolyticus DSM 20463 OX=573058 GN=f olE PE=3 SV=1
MDKNKIEKAVTMILEAIGEDPTREGLVETPQRVARMYEEIFSGLNQTAEKHLSKTFELVENNMVIEKDIPFYSMCEHHLLPFWGKAHIAYIPNGRVAGLSKLARTVELYAKKPQLQERLTMEIADALMEFLSSEGALVVVEAEHMCMNMRGVKKPGTSTMTSVARGKFETDLNLKNEAYRLMGL

SEQ ID NO: 12549 - protein, 184 aa, Peptoniphilus grossensis
  misc_feature (1)..(184): tr|A0A1U7M063|A0A1U7M063_9FIRM GTP cyclohydrolase 1 OS= Peptoniphilus grossensis OX=1465756 GN=folE PE=3 SV=1
MDKQKIEKAVEMIIEAIGEDKNREGLIETPARIARMYEEIFAGIGKTAEEHLSKTFEITEDNIVVVKDINFFSMCEHHFLPFYGKAHIAYIPDQKVAGLSKIARTVETYAKKPQLQERLSIEIADAMMKYLEAKGVLVVIEAEHMCMNMRGVKKPGSKTVTSVSRGVFETDEKQKQEAFRLIKF

SEQ ID NO: 12550 - protein, 184 aa, Peptoniphilus harei
  misc_feature (1)..(184): tr|E4KWX0|E4KWX0_9FIRM GTP cyclohydrolase 1 OS=Peptonip hilus harei ACS-146-V-Sch2b OX=908338 GN=folE PE=3 SV=1
MDKQKIEQAVEMIIEAIGEDKNREGLLETPARVARMYEEIFAGLGKTAEEHLSKTFEITEDNIVVVKDIDFYSMCEHHFLPFYGKAHIAYIPNEKVAGLSKLARTVETYAKKPQLQERLSIEIADAMMKYLEPKGVLVVIEAEHMCMNMRGVKKPGSKTVTSVARGVLETDEKQKQEAFRLIEF

SEQ ID NO: 12551 - protein, 184 aa, Peptoniphilus harei; identical to SEQ ID NO: 12550
  misc_feature (1)..(184): tr|A0A133PQF3|A0A133PQF3_9FIRM GTP cyclohydrolase 1 OS= Peptoniphilus harei OX=54005 GN=folE PE=3 SV=1

SEQ ID NO: 12552 - protein, 201 aa, Peptoniphilus indolicus
  misc_feature (1)..(201): tr|G4D6V9|G4D6V9_9FIRM GTP cyclohydrolase 1 OS=Peptonip hilus indolicus ATCC 29427 OX=997350 GN=folE PE=3 SV=1
MLEYAGIKVYINVNKNIKEVIMDKNKIETAVTMILEAIGEDPTREGLVETPQRVARMYEEIFGGINQTAEKHLSKTFELVDKNMVIEKDIPFYSMCEHHLLPFWGKAHIAYIPNGRVAGLSKLARTVELYAKKPQLQERLTMEIADALMEFLSSEGALVVIEAEHMCMNMRGVKKPGTSTMTSVARGKFETDLNLKMKLID

SEQ ID NO: 12553 - protein, 205 aa, Peptoniphilus indolicus
  misc_feature (1)..(205): tr|A0A379D8T3|A0A379D8T3_9FIRM GTP cyclohydrolase 1 OS= Peptoniphilus indolicus OX=33030 GN=folE PE=3 SV=1
MLEYAGIKVYINVNKNIKEVIMDKNKIETAVTMILEAIGEDPTREGLVETPQRVARMYEEIFGGINQTAEKHLSKTFELVDKNMVIEKDIPFYSMCEHHLLPFWGKAHIAYIPNGRVAGLSKLARTVELYAKKPQLQERLTMEIADALMEFLSSEGALVVIEAEHMCMNMRGVKKPGTSTMTSVARGKFETDLNLKNEAYRLMGL

SEQ ID NO: 12554 - protein, 187 aa, Peptoniphilus sp.
  misc_feature (1)..(187): tr|D7N6W8|D7N6W8_9FIRM GTP cyclohydrolase 1 OS=Peptonip hilus sp. oral taxon 386 str. F0131 OX=575609 GN=folE P E=3 SV=1
MIKIDNKKIEKAVTMILEAIGEDPSREGLVETPQRVARMYEEIFSGLGQTAENHLSKTFELVDGNMVIEKDITFYSMCEHHLLPFWGKVHIAYMPNGRVAGLSKLARTVDVYAKKPQLQERLNLEIANAIMEYLNAQGVLVVVEAEHMCMNMRGVKRPGTKTVTSISRGILETDLNLRNEAYRLMNL

SEQ ID NO: 12555 - protein, 184 aa, Peptoniphilus sp.
  misc_feature (1)..(184): tr|A0A134AUJ4|A0A134AUJ4_9FIRM GTP cyclohydrolase 1 OS= Peptoniphilus sp. DNF00840 OX=1477000 GN=folE PE=3 SV=1
MDKQKIEKAVEMIIEAIGEDKNREGLLETPARVARMYEEIFAGLGKTAEEHLSKTFEITEDNIVVVKDIDFYSMCEHHFLPFYGKAHIAYIPNEKVAGLSKLARTVETYAKKPQLQERLSIEIADAMMKYLEPKGVLVVIEAEHMCMNMRGVKKPGSKTVTSVARGVLETDEKQKQEAFRLIEF

SEQ ID NO: 12556 - protein, 196 aa, Peptostreptococcaceae bacterium
  misc_feature (1)..(196): tr|A0A544QYQ8|A0A544QYQ8_9FIRM GTP cyclohydrolase 1 OS= Peptostreptococcaceae bacterium ZHW00191 OX=2518162 GN= folE PE=3 SV=1
MACTEVKKSVDKEKIKKAVREILEAIGEDPDREGLINTPDRVARMYEEIFCGMFQDPKEHLKVTFESEKYEEMVVVKDIPFYSCCEHHLVPFFGKAHVVYIPKDGRLTGLSKLARVVETIAKRPQLQERIAKDTADTIMSELKPYGVMVVIEAEHMCMTMRGVKKPGSKTVTSAVRGVFEKNMAVKSEAMSLIMMK

SEQ ID NO: 12557 - protein, 261 aa, Peptostreptococcaceae bacterium
  misc_feature (1)..(261): tr|U2JUW6|U2JUW6_9FIRM GTP cyclohydrolase FolE2 OS=Pept ostreptococcaceae bacterium oral taxon 113 str. W5053 O X=1321784 GN=folE2 PE=3 SV=1
MNKMKDVQAQKDFRNVYLNQVGIKNFRTPLILMDPKNATQHTVATASLSVDLNHDIRGTHMSRFVEIMNEVHVLHPHETRSLLTDLIQKMEAESAFLTLDFPYFIDKKAPVSGISSRLDIDCTISARLTQNSFRFSLTVGVPVTTLCPCSKEISDYGAHNQRALAKITVETNDLIWIEDLADMAERNASCAIYPLLKRVDEKKVTEYAYENPRFVEDMTRDIYNELKQMENLSYFKVEVESIESIHNHNAFACAYSGEEKK

SEQ ID NO: 12558 - protein, 184 aa, Peptostreptococcus anaerobius
  misc_feature (1)..(184): tr|R5IZ73|R5IZ73_9FIRM GTP cyclohydrolase 1 OS=Peptostr eptococcus anaerobius CAG:621 OX=1263100 GN=folE PE=3 S V=1
MIDIDKAQKAVRDLLIAIGEDPDREGLVDTPKRVAKMYKEVLAGYDDDPSEYLSRVFKADDADWVLEKDIHFYSMCEHHMLPFFGKVHIAYIPNGKVTGLSKLARLVEVYARRLQLQEQMTVQIADALVKELSPLGVVVIVEAEHMCMTMRGIKKPGTITVTQATRGRFKEDHNLLMSIRELIK

SEQ ID NO: 12559 - protein, 184 aa, Peptostreptococcus anaerobius; identical to SEQ ID NO: 12558
  misc_feature (1)..(184): tr|D3MT17|D3MT17_9FIRM GTP cyclohydrolase 1 OS=Peptostr eptococcus anaerobius 653-L OX=596329 GN=folE PE=3 SV=1

SEQ ID NO: 12560 - protein, 185 aa, Peptostreptococcus sp.
  misc_feature (1)..(185): tr|A0A1I2D1Y9|A0A1I2D1Y9_9FIRM GTP cyclohydrolase 1 OS= Peptostreptococcus sp. D1 OX=72304 GN=folE PE=3 SV=1
MVDFDKAEKAVRLLLEAIGEDPDREGLVETPRRVAKMYEEVLQGYCDDAKAHLSKVFNSERSDIVLEKDITFYSMCEHHLLPFFGKVHIAYIPSDKVVGLSKLGRLVDVFARRLQLQEQMTVQIADSIVEELSPQGVMVIVEGEHTCMTMRGVKKIGSKTITVATRGKFEKNSDLRNTVLGMVKE

SEQ ID NO: 12561 - protein, 184 aa, Perlucidibaca sp.
  misc_feature (1)..(184): tr|A0A2P6ASK5|A0A2P6ASK5_9GAMM GTP cyclohydrolase 1 OS= Perlucidibaca sp. HR-E OX=2094561 GN=folE PE=3 SV=1
MDRTMDTAYADIIRAVGEDLDRPGLLDTPKRAAKAFKYLCKGYEEDLDVIVNNAIFPSDNDQMVLVKDIELYSLCEHHLLPFIGKVHVAYIPSGKVLGLSKVARIADMYARRLQIQENLTKQIADAIQRVTDAKGVAVTIEAKHMCMMMRGVEKQNSVMKTSIMLGAFRDNAQTRNEFLALIRD

SEQ ID NO: 12562 - protein, 187 aa, Permianibacter aggregans
  misc_feature (1)..(187): tr|A0A4R6UXM2|A0A4R6UXM2_9GAMM GTP cyclohydrolase 1 OS= Permianibacter aggregans OX=1510150 GN=folE PE=3 SV=1
MTDTTAKIAAHYTEILGLLGENVQREGLRDTPMRAAKAMQFLTRGYSQSLDEIVNNAIFESESDEMVIVQDIELYSMCEHHLLPFIGKVHVAYLPSGKVLGLSKIARITDMFARRMQIQETMTKQIAEAVMQVTNAKGVAVVVEAKHLCMMMRGVEKQNSVMTTSVMLGYFRKSQATRNEFLKLIRR

SEQ ID NO: 12563 - protein, 535 aa, Persephonella hydrogeniphila
  misc_feature (1)..(535): tr|A0A285N0H8|A0A285N0H8_9AQUI GTP cyclohydrolase 1 OS= Persephonella hydrogeniphila OX=198703 GN=folE PE=3 SV= 1
MSIDREKLRKSVRLFLEAIGEDPDREGLKDTPDRIVRLWEEFKSHENFNMTVFEDVGDYNEMVVVKDIQFYSLCEHHLLPFFGKAHIAYIPDKKVCGLSKLVRVVNKFAYRPQVQERLTAEIAEFLEKELNPKGVAVVLEAEHLCYSSDTEILTDKGWKLFKDLEPEDKVAQVNPETLKVSFVKPASYIKYPFKGMMINFKNKSVDLLVSPDHKMLYSSEWIFYKSKNKRWLSKPAYQIKDLSKIIIPQAGIMEGKEIEFFELEEEYEVSNSSVITKTKKKVKIKGDTFIKLLAIYLAEGSFYIENGKYYKVRIVQKEGEKAEKIREILEELPFKYFSIKRKNGTIEFVINSKVLTKYMKRFGKSEDKFIPEEIFSASQRQKKLFLEYFILGDGYKKPDGKTFHFVSKSKKLIDGIQAIYATLGIATTVYDHKYKDGKVYYRLEIRKDKKGRDKYYSMVREVKDVPYNDYIYSVTVPEGYIMVRRNGKIAISGNCMSMRGVKNPSSYTVTSKLTGVFMENEKTRNEFLNLIYNGK

SEQ ID NO: 12564 - protein, 185 aa, Persephonella marina
  misc_feature (1)..(185): sp|C0QPU5|GCH1_PERMH GTP cyclohydrolase 1 OS=Persephone lla marina (strain DSM 14350 / EX-H1) OX=123214 GN=folE PE=3 SV=1
MSIDREKLKRSIRLFLEAIGEDPDREGLKETPDRIVRLWEEFKSYENFNMTVFEDIGDYNEMVVVRDIQFYSFCEHHLLPFFGKAHIAYIPEKKVCGLSKLVRVVNKFAYRPQVQERLTAQIAEFLEKELSPKGVAVVLEAEHLCMSMRGVKNPTSYTITSKLTGAFMEDEKTRNEFLNLIHNGR

SEQ ID NO: 12565 - protein, 187 aa, Persephonella sp.
  misc_feature (1)..(187): tr|A0A432RZI8|A0A432RZI8_9AQUI GTP cyclohydrolase 1 OS= Persephonella sp. OX=2060922 GN=folE PE=3 SV=1
MSIDREKLKKSVRLFLEAIGEDPDREGLRDTPDRIVRLWEEFKNYENFNMTVFEDIGSYDEMVIVKDIRFYSLCEHHLLPFFGRAHIAYIPEKKVCGLSKLVRVVNKFAYRPQVQERLTSEIAEFLEKELKPKGVAVVLEAEHLCLSMRGVKNPSSYTITSKLTGLFKENEKTRKEFLQLINKDRIL

SEQ ID NO: 12566 - protein, 187 aa, Persephonella sp.
  misc_feature (1)..(187): tr|A0A432S6C9|A0A432S6C9_9AQUI GTP cyclohydrolase 1 OS= Persephonella sp. OX=2060922 GN=folE PE=3 SV=1
MSIDREKLKKSIRLFLEAIGENPDREGLKDTPDRIVRLWEEFKSYENFNMTVFEDIGEYDEMVIVKDIQFYSLCEHHLLPFFGKAHIAYIPDKKVCGLSKLVRIVNKFSYRPQVQERLTAEIAEFLEKELKPKGVAVVLEAEHLCLSMRGVKNPSSYTITSKLTGLFKENEKTRKEFLQLINRDRII

SEQ ID NO: 12567 - protein, 190 aa, Petrimonas mucosa
  misc_feature (1)..(190): tr|A0A1G4GAJ1|A0A1G4GAJ1_9PORP GTP cyclohydrolase 1 OS= Petrimonas mucosa OX=1642646 GN=folE PE=3 SV=1
MLPEQSEERRSIIADHMREVITLLGEDVARDGLVKTPDRVAKAMQYLTKGYHQDPEEILRSALFRENYRQMVIVKDIDLFSMCEHHLLPFFGKAHVAYIPNGYITGLSKIARVVDVFARRLQVQERLTTQIKECIQKTLNPMGVMVVIEAQHMCMQMRGVEKQNSITTTSDFTGVFQVQKTREEFISLIR

SEQ ID NO: 12568 - protein, 190 aa, Petrimonas sp.
  misc_feature (1)..(190): tr|A0A3G9E3V4|A0A3G9E3V4_9PORP GTP cyclohydrolase 1 OS= Petrimonas sp. IBARAKI OX=1978337 GN=folE PE=3 SV=1
MSPEETEDRKSIIADHMKEVITLLGEDVARDGLIKTPDRVAKAMQHLTRGYYQDPEEILRSALFRENYRQMVIVKDIDLFSLCEHHLLPFFGKAHVAYIPDGYITGLSKIARVVDVFARRLQVQERLTTQIKECIQKTLNPMGVMVVIEAQHMCMQMRGVEKQNSITTTSDFTGVFKEQKTREEFIALIK

SEQ ID NO: 12569 - protein, 195 aa, Petrocella atlantisensis
  misc_feature (1)..(195): tr|A0A3P7NUD4|A0A3P7NUD4_9FIRM GTP cyclohydrolase 1 OS= Petrocella atlantisensis OX=2173034 GN=folE PE=3 SV=1
MIDKKAIEDHIRGILIALGDDPNREGLRDTPTRVANMYAEVFEGMAYTNDELIEKLGVTFDEEEIYDNSKQDMVLMKDIQLFSYCEHHLALMYNMKVAVAYIPNKRVIGLSKIARIADMVGKRLQLQERIGADIAYIMRKVTDTEDVAIIIEGEHSCMTTRGIKKPNTKTITTTLSGRFEENMEIYQKLMALYKV

SEQ ID NO: 12570 - protein, 367 aa, Phaeobacter gallaeciensis
  misc_feature (1)..(367): tr|V9WCS0|V9WCS0_9RHOB GTP cyclohydrolase FolE2 OS=Phae obacter gallaeciensis DSM 26640 OX=1423144 GN=folE2 PE= 3 SV=1
MNSHSRNLTKAPDRADAEEALDLLRQWASAATETEIAQLNPAVARLLPDAPVGNYPDLSRHYPEGFEADISYRATLPDLQNGPSSLIRGAHEQIQHVGISNFRLPIRFHTRDNGDLTLETSVTGTVSLDADKKGINMSRIMRSFYKHAERTFSFEVMEAALDDYLTDLESLDARLQMRFSFPVKVESLRSGLSGYQYYDIALEIVDHDGERTKIIHLDYVYSSTCPCSLELSEHARSSRGQLATPHSQRSVARISLVQEPGASMLWFEDVIDHCRRAVPTETQVMVKREDEQAFAELNAANPIFVEDAARLFCEALQSDPRIGDFRVVASHQESLHSHDAISVLTQGQTFAARSIDPKMFATLIHQG

SEQ ID NO: 12571 - protein, 367 aa, Phaeobacter gallaeciensis
  misc_feature (1)..(367): tr|A0A1B0ZNJ7|A0A1B0ZNJ7_9RHOB GTP cyclohydrolase FolE2 OS=Phaeobacter gallaeciensis OX=60890 GN=folE2 PE=3 SV =1
MNIHMRGVDETPDRTEAEAALETLRQWAATATQTEIAQLDPAVARLLPERAVQNYPDLSRNYPEDFVADEGYRATLPDLQNGPSSLIRGANEQIQHVGISNFRLPIRFHTRDNGDLTLETSVTGTVSLEADKKGINMSRIMRSFYKHAEKTFSFEVIEAALEDYLSDLGSMDARIQMRFSFPVKIDSLRSGLSGYQYYDIALELVDRDGVRNKIVHLDYVYSSTCPCSLELSEHARQSRGQLATPHSQRSVARLSVQIDPEAPCLWFEDLIDHCRRAVPTETQVMVKREDEQAFAELNAANPIFVEDAARLFCEALQSDPRIGDFRVVASHQESLHSHDAVSVLTQGPLFAETSLDPGLFSTLIHRG

SEQ ID NO: 12572 - protein, 367 aa, Phaeobacter inhibens
  misc_feature (1)..(367): tr|A0A135IJB1|A0A135IJB1_9RHOB GTP cyclohydrolase FolE2 OS=Phaeobacter inhibens OX=221822 GN=folE2 PE=3 SV=1
MNSHSRNLTKAPDRADAEDALDLLRKWASTATETEIAQLNPAVARLLPNSPVGNYPDLSRHYPDEFEADSSYRATLPDLQNGPSSLIRGAHEQIQHVGISNFRLPIRFHTRDNGDLTLETSVTGTVSLDADKKGINMSRIMRSFYKHAERTFSFEVMEAALDDYLTDLESLDARLQMRFSFPVKIESLRSGLSGYQYYDIALEIVDHDGERTKIIHLDYVYSSTCPCSLELSEHARSARGQLATPHSQRSVARISLVQEPGAPVLWFEDVIDHCRRAVPTETQVMVKREDEQAFAELNAANPIFVEDAARLFCEALQSDLRIGDFRVVASHQESLHSHDAISVLTQGPTFAARSIDPKMFATLIHQG

SEQ ID NO: 12573 - protein, 367 aa, Phaeobacter inhibens
  misc_feature (1)..(367): tr|I7EP23|I7EP23_PHAIB GTP cyclohydrolase FolE2 OS=Phae obacter inhibens (strain ATCC 700781 / DSM 17395 / CIP 105210 / JCM 21319 / NBRC 16654 / NCIMB 13546 / BS107) OX=391619 GN=folE2 PE=3 SV=1
MNSHSRNLTKAPDRADAEDALDLLRKWASTATETEIAQLNPAVARLLPNSPVGNYPDLSRHYPEEFEADSSYRATLPDLQNGPSSLIRGAHEQIQHVGISNFRLPIRFHTRDNGDLTLETSVTGTVSLDADKKGINMSRIMRSFYKHAERTFSFEVMEAALDDYLTDLESLDARLQMRFSFPVKIESLRSGLSGYQYYDIALEIVDHDGERTKIIHLDYVYSSTCPCSLELSEHARSARGQLATPHSQRSVARISLVQEPGAPVLWFEDVIDHCRRAVPTETQVMVKREDEQAFAELNAANPIFVEDAARLFCEALQSDPRIGDFRVVASHQESLHSHDAISVLTQGPTFAARSIDPKMFATLIHQG

SEQ ID NO: 12574 - protein, 367 aa, Phaeobacter italicus
  misc_feature (1)..(367): tr|A0A0H5D9U3|A0A0H5D9U3_9RHOB GTP cyclohydrolase FolE2 OS=Phaeobacter italicus OX=481446 GN=folE2 PE=3 SV=1
MNSHTRNLSKAPDRADAEQALDLLRQWASTATETEIAQLNPAVARLLPNAPLGNYPDLSRNYPDGFEADAAYRATLPDLQNGPSSLIRGAHEQIQHVGISNFRLPIRVHTRDNGDLTLETSVTGTVSLEADKKGINMSRIMRSFYKHAERTFSFEVMEAALDDYLSDLESYDARLMMRFSFPMKVESLRSGLAGYQYYDIALELVDHGGQRTKILHLDYVYSSTCPCSLELSEHARSARGQLATPHSQRSVARISLVVEGDTPCLWFEDVIEHCRRAVPTETQVMVKREDEQAFAELNAANPIFVEDAARLFCEALQSDPRIGDFRVIASHQESLHSHDAISVLTQGDTFAAQSIDPKLFATLIHQG

SEQ ID NO: 12575 - protein, 367 aa, Phaeobacter piscinae
  misc_feature (1)..(367): tr|A0A291G1Q4|A0A291G1Q4_9RHOB GTP cyclohydrolase FolE2 OS=Phaeobacter piscinae OX=1580596 GN=folE2 PE=3 SV=1
MNSHSRNLTKAPDRADAEEALDLLRQWASAATETEIAQLNPAVARLLPDASAGNYPDLSRHYPEGFVADSSYRATLPDLQNGPSSLIRGAHEQIQHVGISNFRLPIRFHTRDNGDLTLETSVTGTVSLDADKKGINMSRIMRSFYKHAERTFSFEVMEAALDDYLTDLESLDARLQMRFSFPVKVESLRSGLSGYQYYDIALEIVDHDGERTKIIHLDYVYSSTCPCSLELSEHARSSRGQLATPHSQRSVARISLVQEPGAPVLWFEDAIDHCRRAVPTETQVMVKREDEQAFAELNAANPIFVEDAARLFCEALQSDPRIGDFRVVASHQESLHSHDAISVLTQGQTFAARSIDPKMFATLIHQG

SEQ ID NO: 12576 - protein, 367 aa, Phaeobacter piscinae
  misc_feature (1)..(367): tr|A0A291FQB0|A0A291FQB0_9RHOB GTP cyclohydrolase FolE2 OS=Phaeobacter piscinae OX=1580596 GN=folE2 PE=3 SV=1
MNSHSRNLTKAPDRADAEEALDLLRQWASAATETEISQLNPAVARLLPDAPAGNYPDLSRHYPEGFVADSSYRATLPDLQNGPSSLIRGAHEQIQHVGISNFRLPIRFHTRDNGDLTLETSVTGTVSLDADKKGINMSRIMRSFYKHAERTFSFEVMEAALDDYLTDLESLDARLQMRFSFPVKVESLRSGLSGYQYYDIALEIVDHDGERTKIIHLDYVYSSTCPCSLELSEHARSSRGQLATPHSQRSVARISLVQEPGAPVLWFEDVIDHCRRAVPTETQVMVKREDEQAFAELNAANPIFVEDAARLFCEALQSDPRIGDFRVVASHQESLHSHDAISVLTQGQTFAARSIDPKMFATLIHQG

SEQ ID NO: 12577 - protein, 367 aa, Phaeobacter porticola
  misc_feature (1)..(367): tr|A0A1L3I679|A0A1L3I679_9RHOB GTP cyclohydrolase FolE2 OS=Phaeobacter porticola OX=1844006 GN=folE2 PE=3 SV=1
MNSHSRSMTKAPDRADAEEALDLLRQWASAATETEIAQLNPAVARLLPDAPAGNYPDLSRHYPEGFVADSNYRATLPDLQNGPSSLIRGAHEQIQHVGISNFRLPIRFHTRDNGDLTLETSVTGTVSLEADKKGINMSRIMRSFYKHAERTFSFEVMEAALDDYLTDLESVDARLQMRFSFPVKIESLRSGLSGYQYYDIALEIVDHDGERTKIIHLDYVYSSTCPCSLELSEHARSSRGQLATPHSQRSVARISLVQEPGAPVLWFEDVIDHCRCAVPTETQVMVKREDEQAFAELNAANPIFVEDAARLFCEALQSDPRVGDFRVVASHQESLHSHDAISVLTQGATFATRSIDPKLFSTLIHQG

SEQ ID NO: 12578 - protein, 367 aa, Phaeobacter sp.
  misc_feature (1)..(367): tr|A0A0N7M3C6|A0A0N7M3C6_9RHOB GTP cyclohydrolase FolE2 OS=Phaeobacter sp. CECT 5382 OX=1712645 GN=folE2 PE=3 SV=1
MNIPTRDLSEAPDRQDAEAALALLRQWADAATPTEVAQLDPAVARLLPDREVGNYPDLSRDYPQDFKSDETYRATLPDLQNGPASLIRGAKEQIQHVGISNFRLPIRFHTRDDGDLTLETSITGSVSLEAGKKGINMSRIMRSFYKHAEKTFSFEVMEAALSDYLTDLDSMDARIQMRFSFPVRIESLRSGLSGYQYYDIALELVQAQGQRHKIMHLDYVYSSTCPCSLELSEHARQSRGQLATPHSQRSVARISVSVDPKAECLWFEDLIGHCRKAVPTETQVMVKREDEQAFAELNAANPIFVEDAARLFCEALQNDGRISDFRIVASHQESLHSHDAISILTQGPLFSNTSLDPRLFSTLIHQG

SEQ ID NO: 12579 - protein, 366 aa, Phaeobacter sp.
  misc_feature (1)..(366): tr|A0A0P1I2P0|A0A0P1I2P0_9RHOB GTP cyclohydrolase FolE2 OS=Phaeobacter sp. CECT 7735 OX=1715693 GN=folE2 PE=3 SV=1
MNIHSPETSEINDRLEAKRALAALRAWASKATPTEIAELDPAIARLLPDQPLANYPDLSREYPSDFEITPEYHASLPDLQNGPSSLIRGEKQLIQHVGISNFRLPIKFHIREGDDITLQTSVTGTVSLDAEKKGINMSRIMRSFYRHAEKTFSFEVMEAALADYVTDLESLDARLQMRFSYPMRIDSLRSGLSGYQYYDIALEKVQQNGVLHKIIHLDFVYSSTCPCSLELSEHARQSRGQLATPHSQRSVARISVEVVEGDCLWFEDLIEMARAAVPTETQVMVKREDEQAFAELNAANPIFVEDAARLFCEQLKADPRIGDFRVIASHQESLHSHDAVSVLTDGPLFASTSLDPKLFNTLFHVG

SEQ ID NO: 12580 - protein, 241 aa, Phaeodactylibacter luteus
  misc_feature (1)..(241): tr|A0A5C6RMD7|A0A5C6RMD7_9BACT GTP cyclohydrolase 1 OS= Phaeodactylibacter luteus OX=1564516 GN=folE PE=3 SV=1
MINSKYQGNGNGAVVNGHARSNGHAYIHDMGDAHAASSAETPLRPDAFDLSDEEKMEEISRHFRAIMETLGLDLTDDSLNGTPRRVAKMFVKEIFGGLHPDAKPSISLFENKFGYRQMLVEKGIRVQSFCEHHFLPITGKCHVAYIANGQVIGLSKLNRIVEYYARRPQVQERLTVQIANELKKVLRTEDIAVYIDASHMCVEMRGIKHTHCSTVTTEYGGKFLNENTRNEFLQAIKGELK

SEQ ID NO: 12581 - protein, 198 aa, Phaeodactylibacter luteus
  misc_feature (1)..(198): tr|A0A5C6RK75|A0A5C6RK75_9BACT GTP cyclohydrolase 1 OS= Phaeodactylibacter luteus OX=1564516 GN=folE PE=3 SV=1
MSYTKQENYDGAATEELTSFYGQMLARLGEDPSREGLLKTPERAAKAMQFLTQGYHQDAEEILTSAMFREDYSEMVLVKDIELYSMCEHHMLPFFGKAHVAYIPNGQIVGLSKIPRVIDVFARRLQVQERLTDQILHCIQNTLQPLGVAVVIEARHMCMMMRGVQKQNSVTTTSAFTGEFQRAETRGEFLTLVGANLH

SEQ ID NO: 12582 - protein, 198 aa, Phaeodactylibacter xiamenensis
  misc_feature (1)..(198): tr|A0A098S4T4|A0A098S4T4_9BACT GTP cyclohydrolase 1 OS= Phaeodactylibacter xiamenensis OX=1524460 GN=folE PE=3 SV=1
MSFHKSEEYDQATTEALTGLYQAAIGQLGEDVSREGLVKTPERAAKAMQFLTQGYEQDAEQILKSAMFREEYSEMVLVKDIELYSLCEHHLLPFFGKAHVAYIPNGYIVGLSKIPRVIDVFARRLQVQERLTDQILHCIHETLNPLGVAVVIEARHMCMMMRGVQKQNSVTTTSAFTGEFQRAETRAEFLNLVSADLH

SEQ ID NO: 12583 - protein, 213 aa, Phaeodactylibacter xiamenensis
  misc_feature (1)..(213): tr|A0A098S1Z3|A0A098S1Z3_9BACT GTP cyclohydrolase 1 OS= Phaeodactylibacter xiamenensis OX=1524460 GN=folE PE=3 SV=1
MVEELGDMHGATSVDTPMRADAFDRSDEEKMEIISQHFREIMETLGLDLNDDSLNGTPRRVAKMFVKEIFGGLNPESKPAISLFENKFGYRQMLVEKGIQVQSFCEHHFLPIYGKCHIAYIANGKVIGLSKLNRIVEHFARRPQVQERLTVQIAAELKRVLKTEDVAVYMDAKHMCVEMRGIKHTQCSTVTTEYGGRFLNENVRAEFLKTIKD

SEQ ID NO: 12584 - protein, 207 aa, Phaeospirillum fulvum
  misc_feature (1)..(207): tr|A0A1H6GWH6|A0A1H6GWH6_PHAFV GTP cyclohydrolase 1 OS= Phaeospirillum fulvum OX=1082 GN=folE PE=3 SV=1
MNATTVSIRPERPWSEDRPNRAEAESAVRTLIRWAGDDPDREGLVDTPSRVVRSYEEFFAGYEADPVDILARTFEETDGYDEMVMLRGIRLESHCEHHMVPILGVAHVAYLPDRRVVGISKLARVVEAFSRRLQIQEKLTAQIANAIEEVLQPKGVAVVIDAQHQCMTTRGVHKTGVSMVTSRMIGAFRTDPALRREFLSLTNAHSN

SEQ ID NO: 12585 - protein, 212 aa, Phaeospirillum fulvum
  misc_feature (1)..(212): tr|S9S8N5|S9S8N5_PHAFV GTP cyclohydrolase 1 OS=Phaeospi rillum fulvum MGU-K5 OX=1316936 GN=folE PE=3 SV=1
MTADDTPRRPLSGVVPTVSNRPSRTEAEAAVRTLIRWAGDDPEREGLVGTPDRVARAYEEFFSGYEQDPVDILHRTFEETDGYDEVVLLRDIRLESHCEHHMVPIIGVAHVAYLPDRRVVGISKLARVVEVYARRLQIQEKLTAQIANTINEVLQPKGVAVVIEAAHQCMTTRGVRKAGVTMVTSRMLGVFRDDSETRREFMALIQSRRGLG

SEQ ID NO: 12586 - protein, 213 aa, Phaeospirillum molischianum
  misc_feature (1)..(213): tr|H8FTS4|H8FTS4_PHAMO GTP cyclohydrolase 1 OS=Phaeospi rillum molischianum DSM 120 OX=1150626 GN=folE PE=3 SV= 1
MTADDIPPRPLSGACPVVSDRPSRAEAEAAVRTLIRWAGDDPAREGLVGTPDRVVRAYEEFFSGYEQDPVDILHRTFEETDGYDEVVLLRDIRLESHCEHHMVPIIGVAHVAYLPDRRVVGISKLARVVEVYARRLQIQEKLTAQIANTINEVLQPKGVAVVIEAAHQCMTTRGVRKAGVTMVTSRMLGVFRDDSETRREFMALIHNRCGSGS

SEQ ID NO: 12587 - protein, 205 aa, Phaeospirillum molischianum
  misc_feature (1)..(205): tr|H8FTK6|H8FTK6_PHAMO GTP cyclohydrolase 1 OS=Phaeospi rillum molischianum DSM 120 OX=1150626 GN=folE PE=3 SV= 1
MNATTVSIRPDRPWSEDRPSRTEAESAVRTLIRWAGDDPAREGLIDTPSRVVRSYEEFFAGYEADPVDILARTFEETDGYDEMVMLRGIRLESHCEHHMVPILGVAHVAYLPDRRVVGISKLARVVEAFSRRLQIQEKLTAQIANAIEEVLQPKGVAVVIDAQHQCMTTRGVHKTGVSMVTSRMIGAFRTDQALRREFLSLTNGH

SEQ ID NO: 12588 - protein, 259 aa, Phascolarctobacterium faecium
  misc_feature (1)..(259): tr|A0A3G9H5S6|A0A3G9H5S6_9FIRM GTP cyclohydrolase FolE2 OS=Phascolarctobacterium faecium OX=33025 GN=folE2 PE= 3 SV=1
MKDVQGELDRRNIPLKHVGIKDLRWPIALKDKEKGTQNTVATVSLAVDLPHDLRGTHMSRFVECLQTLGPVTLGSLENILDHLKDRLQAEKAFLQLNFPYFIYKTAPVSGQRAPLDIDCVYTAEKDEQFSLRISAKIPIQTLCPCSKEISAYGAHNQRALAKLEIRSAEMVWLEELAAIADAGASAPVYGLLKRPDEKFVTEQAYDNPRFVEDAVREIALRLEADKRIIWYKATVESIESIHNHNAFACVEKGWKDVEI

SEQ ID NO: 12589 - protein, 264 aa, Phascolarctobacterium faecium
  misc_feature (1)..(264): tr|A0A3G9H957|A0A3G9H957_9FIRM GTP cyclohydrolase 1 typ e 2 OS=Phascolarctobacterium faecium OX=33025 GN=PFJ308 94_02021 PE=4 SV=1
MEATVNDIIKVMDGIAPPNLAEPWDNVGLLVGRSSNTVKKLMVALDVSPEVVEQAVEHKVQMLVTHHPVIFDPIKKMTDRSWQHKLLLDCAENKIAVYSAHTSLDSVLGGVNDVLAEKIGLLHTEVLVPAAGGEAGLGRVGCLHEPMTLQEFSEKIKTVLKLDNIIAGDAGRRVSKVAVCGGAGAEFIDEALAAGADTFVTGDVKYHTAQNAVYSGLNIIDATHQGTELPMINTLADRIALRLTSGGFNAQVLVAKESKILQYL

SEQ ID NO: 12590 - protein, 259 aa, Phascolarctobacterium sp.
  misc_feature (1)..(259): tr|R6IJS9|R6IJS9_9FIRM GTP cyclohydrolase FolE2 OS=Phas colarctobacterium sp. CAG:207 OX=1262914 GN=folE2 PE=3 SV=1
MKDVQGELDRRNIPLKHVGIKDLRWPIALKDKEKGTQNTVATVSLAVDLPHDLRGTHMSRFVECLQTLGPVTLGSLENILDHLKDRLQAEKAFLQLNFPYFIYKTAPVSGQRAPLDIDCVYTAEKDEQFSLRISAEIPIQTLCPCSKEISAYGAHNQRALAKLEIRSAEMVWLEELAAIADAGASAPVYGLLKRPDEKFVTEQAYDNPRFVEDAVREIALRLEADKRIIWYKATVESIESIHNHNAFACVEKGWKDVEI

SEQ ID NO: 12591 - protein, 256 aa, Phascolarctobacterium sp.
  misc_feature (1)..(256): tr|A0A316S298|A0A316S298_9FIRM GTP cyclohydrolase FolE2 OS=Phascolarctobacterium sp. OX=2049039 GN=folE2 PE=3 SV=1
MKDVQSQTDMRRIPLKHVGIKNLRWPVILKDKEQGEQHSVATISLAVDLPHEIRGTHMSRFVECMQTVGAISPTGLEEVLDNLKTHLQAEKAFIRMEFPYFIYKTSPVTGQRAPMDLNCVLTAEKQDEFKLRIMAEVPVQTLCPCSKEISDYGAHNQRALARIEIEADGLVWIEELAEMADAGASAPVYSLLKRPDEKFVTEKAYDNPRFVEDAVREIALRLEADKRIKWYEVTVESIESIHNHNAFACVEKGWQA

SEQ ID NO: 12592 - protein, 261 aa, Phascolarctobacterium succinatutens
  misc_feature (1)..(261): tr|E8LD20|E8LD20_9FIRM GTP cyclohydrolase FolE2 OS=Phas colarctobacterium succinatutens YIT 12067 OX=626939 GN= folE2 PE=3 SV=1
MNDVKDVQSEKDLRNIPLKHVGIKGLRWPIELRDKARGTQHSVAEVTLAVDLPHDMRGTHMSRFVECLRTLGPVGLADVEAILDQLKQHLQAERAFIELKFPYFVTKKAPVSGMEAPMDIDCVYKAEKGEKLRWRITAVVPVQTLCPCSKEISEYGAHNQRAWAKLEVEAQEMVWLEELVEYAEASASTPLYGLLKRPDEKYVTEHAYENPRFVEDAVREVALRLEADKRITWYRAEVESMESIHNHNAFAVVEKGENECY

SEQ ID NO: 12593 - protein, 258 aa, Phascolarctobacterium succinatutens
  misc_feature (1)..(258): tr|R6WVI3|R6WVI3_9FIRM GTP cyclohydrolase FolE2 OS=Phas colarctobacterium succinatutens CAG:287 OX=1263101 GN=f olE2 PE=3 SV=1
MKDVQSEKDLRNIPLKHVGIKGLRWPIELRDKERGTQHSVAEVTLAVDLPHDMRGTHMSRFVECLRTLGPVGLADVEAILDQLKQHLQAERAFIELKFPYFVTKKAPVSGMEAPMDIDCVYKAEKGEKLRWRITAVVPVQTLCPCSKEISEYGAHNQRAWAKLEVEAQEMVWLEELVEYAEASASTPLYGLLKRPDEKYVTEHAYENPRFVEDAVREVALRLEADKRITWYRAEVESMESIHNHNAFAVVEKGENECY

SEQ ID NO: 12594 - protein, 196 aa, Phenylobacterium deserti
  misc_feature (1)..(196): tr|A0A328AQU2|A0A328AQU2_9CAUL GTP cyclohydrolase 1 OS= Phenylobacterium deserti OX=1914756 GN=folE PE=3 SV=1
MSENKSRPTQADAEAAVRTLIEWAGDDPNREGLLETPKRVAKAYRELFAGYDVDPREYLARTFDEVGGYDELVVLKDIPVVSMCEHHMLPFLGKAHVGYLPRNRVVGISKLARVVHGFARRMQIQEKLTAQVAEAIQDILQPKGVGVVIVSEHSCMTMRGVNTPGTRLTTSHLLGEVRDDSRTRQEFFELVRSGDR

SEQ ID NO: 12595 - protein, 208 aa, Phenylobacterium deserti
  misc_feature (1)..(208): tr|A0A328AS03|A0A328AS03_9CAUL GTP cyclohydrolase 1 OS= Phenylobacterium deserti OX=1914756 GN=folE PE=3 SV=1
MDSVIRPRKLVPAADLEPVQRPTREEAMEAVRTLIAWAGDDPRREGVLDTPKRVVDAYAEWFEGYQADPAKELSRTFEDVQGYDDIVMLRDIEVESHCEHHMAPFLGKAYVAYMPTNRVVGISKLAKVVEIFARRLQTQETMTQQIADAITDSLRPAGVAVLIDAAHQCMTTRGVHHRHVSTITTQFTGVFKTDPTLRQRFLDFVNRK

SEQ ID NO: 12596 - protein, 208 aa, Phenylobacterium hankyongense
  misc_feature (1)..(208): tr|A0A328B062|A0A328B062_9CAUL GTP cyclohydrolase 1 OS= Phenylobacterium hankyongense OX=1813876 GN=folE PE=3 S V=1
MDAIRDRTLVSSTDLDLEAVKRPSREEAMEAVRTLIAWAGDDPRREGVIDTPKRVVDAYAEWFEGYGLDPAKELSRTFEDVQGYDDIVMLRDIEVESHCEHHMAPFLGKAFVAYMPTNRVVGISKLAKVVEIFARRLQTQETMTQQIADAITDSLRPAGVAVMIDATHQCMTTRGVHHRHVSTLTTQFTGVFKTDPTLRQRFLDFAKR

SEQ ID NO: 12597 - protein, 197 aa, Phenylobacterium hankyongense
  misc_feature (1)..(197): tr|A0A328AVP2|A0A328AVP2_9CAUL GTP cyclohydrolase 1 OS= Phenylobacterium hankyongense OX=1813876 GN=folE PE=3 S V=1
MSNTPKSPPTQDDAEAAVRTLIEWAGDDPDREGLLDTPARVARAYKELFSGYDTDPRAYLERTFSEVGGYDELVVLKDIRVVSFCEHHMLPFLGKAHVGYLPSHRVVGISKLARVVHGFARRLQIQEKLTAEIAEAIHDILQPKGVGVVIVSEHSCMTMRGVNTPGSRLTTSHLLGEVRDDPRTRQEFFELVRNGEH

SEQ ID NO: 12598 - protein, 268 aa, Phenylobacterium kunshanense
  misc_feature (1)..(268): tr|A0A328BLN5|A0A328BLN5_9CAUL GTP cyclohydrolase FolE2 OS=Phenylobacterium kunshanense OX=1445034 GN=folE2 PE =3 SV=1
MNAFTPTELPDVQASPDRRGQPIQRVGVRGVTHPVTLLTEQGPCPTVAEVEMYVALPAEQKGTHMSRFVALLQDVRHPLDTVGVSALMSDMLTLLEADGGYLSIAAPVFLTKQAPVSGIPSLMDYRMALRAEHVSGRTTVTLSITAPVTSLCPCSKTISRYGAHNQRSHITIAATLADGVRMLPDDLIRIAENAASCELWGLLKRADEKFVTERAYENPKFVEDLVRDVAARLADDPRVRRYEVSSENFESIHNHSAYAWMDGAGAAA

SEQ ID NO: 12599 - protein, 210 aa, Phenylobacterium kunshanense
  misc_feature (1)..(210): tr|A0A328BM47|A0A328BM47_9CAUL GTP cyclohydrolase 1 OS= Phenylobacterium kunshanense OX=1445034 GN=folE PE=3 SV =1
MDAPARDRTLIGSEDGSLEPITRPTREEAMEAVRTLIAWAGDDPRREGVIDTPKRVVDAYAEWFEGYRLDPAKELSRTFEDVQGYDDIVMLRDIEVESHCEHHMAPFLGKAYVAYMPTNRVVGISKLAKVVEIFARRLQTQETMTQQIADAITDSLRPAGVAVLIDAAHQCMTTRGVHHRHVSTITTQFTGVFKTDPTLRQRFLDFVNRK

SEQ ID NO: 12600 - protein, 208 aa, Phenylobacterium sp.
  misc_feature (1)..(208): tr|A0A2D7ZMU4|A0A2D7ZMU4_9CAUL GTP cyclohydrolase 1 OS= Phenylobacterium sp. OX=1871053 GN=folE PE=3 SV=1
MDAPTRDLNLNGPAGLEPIARPTREEAMAAVRTLIAWAGDDPRREGVIDTPKRVVDAYADWFEGYGADPAKELSRTFEDVQGYDDIVMLREIEVESHCEHHMAPFLGKAYVAYMPTNRVVGISKLARVVEIYAKRLQTQETMTQQIADAITDSLRPAGVAVLIDAQHQCMTTRGVHHRHVSTITTQFTGVFKTDNSLRQRFLDFVNKR

SEQ ID NO: 12601 - protein, 196 aa, Phenylobacterium sp.
  misc_feature (1)..(196): tr|A0A1E4GZ40|A0A1E4GZ40_9CAUL GTP cyclohydrolase 1 OS= Phenylobacterium sp. SCN 70-31 OX=1660129 GN=folE PE=3 SV=1
MAEDKTGKPTEADALAAVRTLIEWAGDDPDREGLLDTPRRVVKAYGELFAGYGTDPRAYLERTFEEVGGYDELVLLKDIRVVSFCEHHMLPFLGRAHVGYLPNDRVVGISKLARVVHGFARRLQIQEKLTAEIAEAIQEVLKPKGVGVVIVSEHSCMTMRGVNTPGSKLTTSTLLGDVRDDPRTRQEFFDLVRNGD

SEQ ID NO: 12602 - protein, 197 aa, Phenylobacterium zucineum
  misc_feature (1)..(197): tr|B4RA23|B4RA23_PHEZH GTP cyclohydrolase 1 OS=Phenylob acterium zucineum (strain HLK1) OX=450851 GN=folE PE=3 SV=1
MSMSDEKRRPSEAEALAAVRTLIEWAGDDPDREGLLDTPRRVVKSYKELFAGYETDPREYLQRTFDEVGGYDELVILKDIRVVSFCEHHMLPFLGKAHVGYLPRNRVVGISKLARVVHGFARRLQIQEKLTAEIAEAIQDILQPKGVGVVIVSEHSCMTMRGVNTPGSRLTTSHLLGEVRDDPRTRTEFFELVRNGA

SEQ ID NO: 12603 - protein, 260 aa, Phenylobacterium zucineum
  misc_feature (1)..(260): tr|B4RI97|B4RI97_PHEZH GTP cyclohydrolase 1 OS=Phenylob acterium zucineum (strain HLK1) OX=450851 GN=folE PE=3 SV=1
MFALEHGFLSWSFLEMSGDFFLPDPAHSKPDRSSVVEDQFEPRNLHDPRRLKPDDDTSVGQDLPPTAKNVLRPTQAEAEQAVRVLLRWAGDDPDREGLIETPARVARSYREILGGYDTDPRSYLERVFEEIGGYDELVVLRDIPIASFCEHHMLPFTGKAHIGYLPSHRVVGISKLARVVHGFARRLQIQEKLTAQIAETIQEVLQPKGVGVVIISEHSCMTMRGVNTPGSRLITSHLLGAVRDDPRTREEFLALIHSGS

SEQ ID NO: 12604 - protein, 218 aa, Phocoenobacter uteri
  misc_feature (1)..(218): tr|A0A379CCC9|A0A379CCC9_9PAST GTP cyclohydrolase 1 OS= Phocoenobacter uteri OX=146806 GN=folE PE=3 SV=1
MNTTTFEADNVRNALLEKGIETPMLTPTKNKENRKAEIQQHFQAIMELLGMDLRDDSLEETPHRLAKMYVDEIFSGLDYDTFPKITKIKNQMKVSEMVLVDEITFTSTCEHHFVTIDGSVAVAYYPKDWVIGLSKINRVVQFFAQRPQVQERFTEQVLTAFQTILNTDDVAVFVKATHFCVKCRGVKDTQSKTITSAFGGLFLQDRETRKEFLTLIKK

SEQ ID NO: 12605 - protein, 186 aa, Phorcysia thermohydrogeniphila
  misc_feature (1)..(186): tr|A0A4R1GLA3|A0A4R1GLA3_9BACT GTP cyclohydrolase 1 OS= Phorcysia thermohydrogeniphila OX=936138 GN=folE PE=3 S V=1
MAFDRERIERAVREILIAIGEDPEREGLKDTPKRVAKMYEEILAGYHDSPDNHLVLFSEKYDEMIIVKDIPIYSLCEHHMLPFFGKAHVAYIPGDNKVTGLSKLARIVDVYSKRLQLQERMTEQIADAIMEKLKAKGVMVIIEAQHLCMIMRGVKKPGSYTVTSAVKGVMRNEPTRMEALFLIKGR

SEQ ID NO: 12606 - protein, 233 aa, Phormidesmis priestleyi
  misc_feature (1)..(233): tr|A0A2T1DG69|A0A2T1DG69_9CYAN GTP cyclohydrolase 1 OS= Phormidesmis priestleyi ULC007 OX=1920490 GN=folE PE=3 SV=1
MTTASPNGLNTSDLSPAKVANIEPRPDRNTLNGQEAKLHSPSEISQEEMMAAVRTMLLGVGEDPDREGLLKTPKRVAEAMRFLTSGYDTSLEELVNGAIFDEGHNEMVLVRDINAFSLCEHHMLPFMGRVHVAYIPNQKVVGLSKLARIVEMYSRRLQVQERLTRQIAEAVKEILEPRGVAVVMEASHMCMVMRGVQKPGSWTVTSAMVGVFQEDQKTREEFLNLIRHQPSFW

SEQ ID NO: 12607 - protein, 281 aa, Phormidesmis priestleyi
  misc_feature (1)..(281): tr|A0A0P7ZQA4|A0A0P7ZQA4_9CYAN GTP cyclohydrolase 1 OS= Phormidesmis priestleyi Ana OX=1666911 GN=folE PE=3 SV= 1
MTISDEMQSPIGGQSQGQSQGQSQGKNQSQNQSQNQSQNQGLVEGADLTTRVLDGESNGKSPHKPKSRPDRETKHSQGVPRQPSAIDPTQDNGPMMEAVRTMLLSVGEDPEREGLLKTPHRVAEAMRFLTQGYSQSLETIVNDAIFDEGHNEMVLVRDINFFSLCEHHMLPFMGRAHVAYIPNQRVVGLSKLARIVEMYARRLQVQERLNRQIAEAVQEILDPLGVAVVMEASHMCMAMRGVQKPGSWTVTSAMVGVFDEDAKTREEFLSLIRHQPGFANY

SEQ ID NO: 12608 - protein, 236 aa, Phormidium ambiguum
  misc_feature (1)..(236): tr|A0A1U7IE61|A0A1U7IE61_9CYAN GTP cyclohydrolase 1 OS= Phormidium ambiguum IAM M-71 OX=454136 GN=folE PE=3 SV= 1
MTIASSNGSNGSQSRSVNTNSTLNVPSRPDRNTLNGREAQLHTPSEEDNQAMMDAVRTMLLGVGEDPEREGLLKTPKRVAEAMRFLTSGYNQSLEELVNNAIFDEGHNEMVLVRDINFFSLCEHHMLPFMGRAHVAYIPNEKVVGLSKLARIVEMYSRRLQVQERLTRQVAEAIQTILEPKGVAVVMEASHMCMVMRGVQKPGSWTVTSAMVGVFQEEQKTREEFLNLIRHQPAFF

SEQ ID NO: 12609 - protein, 224 aa, Phormidium sp.
  misc_feature (1)..(224): tr|A0A522XB53|A0A522XB53_9CYAN GTP cyclohydrolase 1 OS= Phormidium sp. SL48-SHIP OX=2518363 GN=folE PE=3 SV=1
MTLDSSNNLATNGQSVPASISSVSRSIPPATRARVSQTEMEQAVRTLLIGLGEDPDREGLKDTPKRVVKALQFLTQGYEQSLEELINGAVFHEDTNEMVLIRDIDIFSSCEHHILPIIGRVHVAYIPNGRVIGLSKIARICEMHARRLQVQERLTASIAETLQSVLQPQGVAVVVEATHMCMVMRGVQKPGSWTVSSAMRGIFAEDARTRQEFMSLIRHNPAFH

SEQ ID NO: 12610 - protein, 216 aa, Phormidium sp.
  misc_feature (1)..(216): tr|A0A0N8KPZ3|A0A0N8KPZ3_9CYAN GTP cyclohydrolase 1 OS= Phormidium sp. OSCR OX=1666905 GN=folE PE=3 SV=1
MTLSNSSELIGTDRLEKQLETNGHKTVSDQEMRNSIRTLLTELGEDPDREGLRDTPKRVSKAWQFLTSGYNQSLEELLNGAIFNENSHEMVLVRDITLFSTCEHHMLPIIGHAHVAYIPNGKVIGLSKIARICEMFARRLQVQERLTGQIADALQEVLKPQGVAVVIEATHMCMVMRGVQKPGSWTTTSAMRGVFVDDARTRQEFMGLIRHSPQFH

SEQ ID NO: 12611 - protein, 235 aa, Phormidium tenue
  misc_feature (1)..(235): tr|A0A1U7JAN4|A0A1U7JAN4_9CYAN GTP cyclohydrolase 1 OS= Phormidium tenue NIES-30 OX=549789 GN=folE PE=3 SV=1
MTIASSNSLNDKTTNGAGLKGKAPEIRPDRTHSYREEAEQYPIPETSQEDMSDAVRTMLLSVGEDPEREGLLKTPKRVAEAMRFLTSGYQQSLEELVNGAIFDEGHNEMVLVRDINLFSLCEHHMLPFMGRAHVAYIPNQRVVGLSKLARIVEMYSRRLQVQERLNRQIAEAVQEILDPKGVAVVVEASHMCMVMRGVQKPGSWTVTSAMLGVFQEDSKTREEFLSLIRHQPSFF

SEQ ID NO: 12612 - protein, 224 aa, Phormidium willei
  misc_feature (1)..(224): tr|A0A168W0J1|A0A168W0J1_9CYAN GTP cyclohydrolase 1 OS= Phormidium willei BDU 130791 OX=399101 GN=folE PE=3 SV= 1
MTLDSSNNLATNGQSVPASISSVSRSIPPATRARVSQTEMEQAVRTLLIGLGEDPDREGLKDTPKRVVKALQFLTQGYNQSLEELINGAVFHEDTNEMVLIRDIDIFSSCEHHILPIIGRVHVAYIPNGRVIGLSKIARICEMHARRLQVQERLTASIAETLQSVLQPQGVAVVVEATHMCMVMRGVQKPGSWTVSSAMRGVFAEDARTRQEFMSLIRHNPAFH

SEQ ID NO: 12613 - protein, 216 aa, Phormidium willei
  misc_feature (1)..(216): tr|A0A168VT90|A0A168VT90_9CYAN GTP cyclohydrolase 1 OS= Phormidium willei BDU 130791 OX=399101 GN=folE PE=3 SV= 1
MTLSNSSELIGTDRLEKQLETNGHVTVSDQEMRHSIRTLLTELGEDPDREGLRDTPKRVSKAWQFLTSGYDQSLEELLNGAIFNENSHEMVLVRDITLFSTCEHHMLPIIGHAHVAYIPNGKVIGLSKIARICEMFARRLQVQERLTGQIADALQEVLKPQGVAVVIEATHMCMVMRGVQKPGSWTTTSAMRGVFADDARTRQEFMGLIRHSPQFH

SEQ ID NO: 12614 - protein, 38 aa, Photobacterium angustum
  misc_feature (1)..(38): tr|Q1ZPZ7|Q1ZPZ7_PHOAS GTP cyclohydrolase I OS=Photobac terium angustum (strain S14 / CCUG 15956) OX=314292 GN= folE PE=4 SV=1
MGGVIISIWRYSAYVFSAGERKQACFIAFQPVPVGGKE

SEQ ID NO: 12615 - protein, 217 aa, Photobacterium angustum
  misc_feature (1)..(217): tr|A0A2T3QAU8|A0A2T3QAU8_PHOAN GTP cyclohydrolase 1 OS= Photobacterium angustum OX=661 GN=folE PE=3 SV=1
MTALSESAVLVRDALAARGLETPMVEQNVSREEKKEKIEYHMREILSLLALDLTDDSLVETPHRIAKMYVDEVFSGLDYINFPKITVIENKMKCDEMVRVKDITLTSTCEHHLVTIDGKATVAYIPRGKIIGLSKINRIVRFFAQRPQVQERLTQQVLVALQTLLESDDVAVTIDATHYCVKARGVMDATSVTTTTALGGIFKKNSATRAEFLNGIR

SEQ ID NO: 12616 - protein, 217 aa, Photobacterium aphoticum
  misc_feature (1)..(217): tr|A0A090QNB3|A0A090QNB3_9GAMM GTP cyclohydrolase 1 OS= Photobacterium aphoticum OX=754436 GN=folE PE=3 SV=1
MTAFSESAQKVRQALIDRGLETPMTDKVVSREEKKEKIEYHMREILELLSLDLSDDSLVETPHRIAKMYVDEVFSGLDYANFPKITVIENKMNCDEMVRVKDITLTSTCEHHLVTIDGKATVAYIPRGKIIGLSKINRIVRFFAQRPQVQERMTQQILVALQTLLESEDVAITIDATHYCVKARGVMDATSVTTTTALGGIFKRNPATRAEFLHGVR

SEQ ID NO: 12617 - protein, 217 aa, Photobacterium aquae
  misc_feature (1)..(217): tr|A0A0J1H664|A0A0J1H664_9GAMM GTP cyclohydrolase 1 OS= Photobacterium aquae OX=1195763 GN=folE PE=3 SV=1
MTTYSESALKVRQALADRGLETPMTEQSISREEKKEKIEHHMREILELLSLDLTDDSLVETPHRIAKMYVDEIFSGLDYANFPKITVIENKMNCDEMVRVKDITLTSTCEHHLVTIDGKATVAYIPRGKIIGLSKINRIVRFFAQRPQVQERMTQQILVALQTLLESEDVAVTIDATHYCVKARGVMDATSETTTTALGGIFKRNPATRAEFLHGIR

SEQ ID NO: 12618 - protein, 217 aa, Photobacterium aquimaris
  misc_feature (1)..(217): tr|A0A2T3ILH2|A0A2T3ILH2_9GAMM GTP cyclohydrolase 1 OS= Photobacterium aquimaris OX=512643 GN=folE PE=3 SV=1
MTALSVSAIQVRDALAARGLETPMTADVVSREEKKEKIEYHMREVLSLLALDLTDDSLVETPHRIAKMYVDEIFSGLDYTNFPKITVIENKMNCDEMVRVKDITLTSTCEHHLVTIDGQATIAYIPRGKIIGLSKINRIVRFFSQRPQVQERLTQQVLVALQTLLESEDVAVTIDATHYCVKSRGVMDATSVTTTTALGGIFKRNPATRAEFFNGIR

SEQ ID NO: 12619 - protein, 217 aa, Photobacterium aquimaris
  misc_feature (1)..(217): tr|A0A2T3HTI8|A0A2T3HTI8_9GAMM GTP cyclohydrolase 1 OS= Photobacterium aquimaris OX=512643 GN=folE PE=3 SV=1
MTALSVSAIQVRDALAARGLETPMTADVISREEKKEKIEYHMREVLSLLALDLTDDSLVETPHRIAKMYVDEIFSGLDYTNFPKITVIENKMNCDEMVRVKDITLTSTCEHHLVTIDGKATIAYIPRGKIIGLSKINRIVRFFSQRPQVQERLTQQVLVALQTLLESEDVAVTIDATHYCVKSRGVMDATSVTTTTALGGIFKRNPATRAEFFNGIR

SEQ ID NO: 12620 - protein, 217 aa, Photobacterium carnosum
  misc_feature (1)..(217): tr|A0A2N4USL2|A0A2N4USL2_9GAMM GTP cyclohydrolase 1 OS= Photobacterium carnosum OX=2023717 GN=folE PE=3 SV=1
MTALSVSAIQVRDALAARDLETPMTADVVSREEKKEKIEYHMREILSLLALDLTDDSLVETPHRIAKMYVDEIFSGLDYTNFPKITVIENKMHCDEMVRVKDITLTSTCEHHLITIDGKATVAYIPRSKIIGLSKINRIVRFFSQRPQVQERLTQQILVALQTLLESEDVAVTIDATHYCVKSRGVMDATSVTTTTALGGIFKRNPATRAEFLSGIR

SEQ ID NO: 12621 - protein, 217 aa, Photobacterium damsela
  misc_feature (1)..(217): tr|A0A1Q9H516|A0A1Q9H516_PHODP GTP cyclohydrolase 1 OS= Photobacterium damsela subsp. piscicida OX=38294 GN=fol E PE=3 SV=1
MTTLSESALKVREALAARGLETPMTDLVVERNEKKEKIEHHMREILNLLSLDLTDDSLQETPHRIAKMYVDEIFSGLDYANFPKITVIENKMNCDEMVRVKDITLTSTCEHHLVTIDGKATVAYIPRGKIIGLSKINRIVRFFAQRPQVQERLTQQVLVALQTLLESEDVAVRIDATHYCVKSRGVMDATSETTTTALGGIFKRNPATRAEFLHGVC

SEQ ID NO: 12622 - protein, 217 aa, Photobacterium damselae; identical to SEQ ID NO: 12621
  misc_feature (1)..(217): tr|D0Z1Y6|D0Z1Y6_PHODD GTP cyclohydrolase 1 OS=Photobac terium damselae subsp. damselae CIP 102761 OX=675817 GN =folE PE=3 SV=1

SEQ ID NO: 12623 - protein, 217 aa, Photobacterium damselae; identical to SEQ ID NO: 12621
  misc_feature (1)..(217): tr|A0A2T3QP75|A0A2T3QP75_9GAMM GTP cyclohydrolase 1 OS= Photobacterium damselae OX=38293 GN=folE PE=3 SV=1

SEQ ID NO: 12624 - protein, 217 aa, Photobacterium frigidiphilum
  misc_feature (1)..(217): tr|A0A2T3JHD5|A0A2T3JHD5_9GAMM GTP cyclohydrolase 1 OS= Photobacterium frigidiphilum OX=264736 GN=folE PE=3 SV= 1
MTALSESALMVRAALEERGLETPMTSKVVSREEKKEKIEYHMREILELLSLDLTDDSLMETPHRIAKMYVDEVFSGLDYANFPKITVIENKMKCDEMVRVKGITLTSTCEHHLVTIDGKATVAYIPRGKIIGLSKINRIVRFFAQRPQVQERMTQQILVALQTLLESDDVAVTIDATHYCVKARGVMDATSETTTTALGGIFKRIPATRAEFFHGIR

SEQ ID NO: 12625 - protein, 212 aa, Photobacterium gaetbulicola
  misc_feature (1)..(212): tr|A0A0B9GE91|A0A0B9GE91_9GAMM GTP cyclohydrolase 1 OS= Photobacterium gaetbulicola OX=1295392 GN=folE PE=3 SV= 1
MMNIEAKRVKQALIQQGLETPMLPNEMTPDQKYDRIKGLLTEVIGVLGLDLTDDSLARTPHRIAKMYVNEIFSGLDYENFPDICVIENKMRVDEMVKVSDISLTSTCEHHFVTIDGVAKVAYLPDSKVIGLSKINRIVRFFAQRPQVQERLTQQILVAIQTLTETQNVAVTIEATHYCVKSRGVMDVNSCTTTTALGGQFKTDPQTRAEFLQ

SEQ ID NO: 12626 - protein, 217 aa, Photobacterium gaetbulicola
  misc_feature (1)..(217): tr|A0A0C5WZN6|A0A0C5WZN6_9GAMM GTP cyclohydrolase 1 OS= Photobacterium gaetbulicola Gung47 OX=658445 GN=folE PE =3 SV=1
MTAFSESALKVRQALVERGLETPMTDKVVSREEKKEKIEYHMREILELLSLDLTDDSLVETPHRIAKMYVDEVFSGLDYANFPKITVIENKMKCDEMVRVKDITLTSTCEHHLVTIDGTATVAYIPRGKIIGLSKINRIVRFFAQRPQVQERMTQQILVALQTLLESDDVAVTMDATHYCVKARGVMDATSTTTTTALGGIFKRNPATRAEFLHGLR

SEQ ID NO: 12627 - protein, 217 aa, Photobacterium galatheae
  misc_feature (1)..(217): tr|A0A066RUE2|A0A066RUE2_9GAMM GTP cyclohydrolase 1 OS= Photobacterium galatheae OX=1654360 GN=folE PE=3 SV=1
MTALSESALKVRQALESRGLETPMTNKVVDSAEKKERIEYHVREILELMSLDLTDDSLMDTPKRIAKMYVDEIFSGLDYANFPKITVIDNKMNCDELVRVKDITMTSTCEHHLVTIDGKATVAYIPRGKIIGLSKINRIVRFFAQRPQVQERLTQQILVALQTLLESDDVAVRIDAVHYCVKARGVMDQTSETTTTALGGIFKRNPATRAEFLHGLR

SEQ ID NO: 12628 - protein, 210 aa, Photobacterium galatheae
  misc_feature (1)..(210): tr|A0A066RK43|A0A066RK43_9GAMM GTP cyclohydrolase 1 OS= Photobacterium galatheae OX=1654360 GN=folE PE=3 SV=1
MDAPTPAILKKPSVYAPKNGVDKERIERAVREILYAIGDDPQREGLLDTPKRVAKAYEEMFSGLASDPFEVLGTVFHENYRDIVMVRNIEVSSFCEHHLLPFRGTASIGYLPAKEGGVVGLSKLARLVEVFARRPQVQERLTTQIADALEAALDAEGVIVEIECEHSCMSFRGVKKSGSTTVTSTLRGVFRDDPQQQAMVLNLLRGGNKS

SEQ ID NO: 12629 - protein, 217 aa, Photobacterium ganghwense
  misc_feature (1)..(217): tr|A0A0J1HA55|A0A0J1HA55_9GAMM GTP cyclohydrolase 1 OS= Photobacterium ganghwense OX=320778 GN=folE PE=3 SV=1
MTAYSESALKVRQALIDRGLETPMTDKVVSREEKKERIEYHMREILELLSLDLTDDSLVETPHRIAKMYVDEVFSGLDYANFPKITVIENKMNCDEMVRVKDITLTSTCEHHLVTIDGKATVAYIPRGKIIGLSKINRIVRFFAQRPQVQERMTQQILVALQTLLESDDVAVTMDATHYCVKARGVMDATSVTTTTALGGIFKRNPATRAEFLHGVR

SEQ ID NO: 12630 - protein, 217 aa, Photobacterium halotolerans
  misc_feature (1)..(217): tr|A0A0F5VAQ5|A0A0F5VAQ5_9GAMM GTP cyclohydrolase 1 OS= Photobacterium halotolerans OX=265726 GN=folE PE=3 SV=1
MTTLSESALKVRQALETRGLETPMTTELVGNAEKKERIEFHMREILGLLSLDLTDDSLMDTPKRIAKMYVDEIFSGLDYANFPKITVIDNKMNCDEMVRVKDITLTSTCEHHLVTIDGKATVAYIPRGKIIGLSKINRIVRFFAQRPQVQERMTQQILVALQTLLESDDVAVRIDATHYCVKARGVMDQTSETTTTALGGIFKRIPATRAEFLHGLR

SEQ ID NO: 12631 - protein, 217 aa, Photobacterium iliopiscarium; identical to SEQ ID NO: 12620
  misc_feature (1)..(217): tr|A0A0D8PNF0|A0A0D8PNF0_9GAMM GTP cyclohydrolase 1 OS= Photobacterium iliopiscarium OX=56192 GN=folE PE=3 SV=1

SEQ ID NO: 12632 - protein, 217 aa, Photobacterium indicum; identical to SEQ ID NO: 12624
  misc_feature (1)..(217): tr|A0A2T3L2J5|A0A2T3L2J5_9GAMM GTP cyclohydrolase 1 OS= Photobacterium indicum OX=81447 GN=folE PE=3 SV=1

SEQ ID NO: 12633 - protein, 217 aa, Photobacterium jeanii
  misc_feature (1)..(217): tr|A0A178KKW8|A0A178KKW8_9GAMM GTP cyclohydrolase 1 OS= Photobacterium jeanii OX=858640 GN=folE PE=3 SV=1
MTVMSESAQLVRDALVARGLETPMTDKVVSREEKKEKIEYHMREILELLSLDLSDDSLTETPHRIAKMYVDEVFSGLDYTNFPKITVIENKMKCDEMVRVKDITLTSTCEHHLVTIDGKATVAYIPRGKIIGLSKINRIVRFFAQRPQVQERLTQQILVALQTLLESDDVAVTIDATHYCVKARGVMDATSETTTTALGGIFKKNPATRAEFLHGIR

SEQ ID NO: 12634 - protein, 217 aa, Photobacterium kishitanii
  misc_feature (1)..(217): tr|A0A2T3R1Q7|A0A2T3R1Q7_9GAMM GTP cyclohydrolase 1 OS= Photobacterium kishitanii OX=318456 GN=folE PE=3 SV=1
MTALSVSAIQVRDALAARGLETPMTADVVSREEKKEKIEYHMREVLSLLALDLTDDSLVETPHRIAKMYVDEIFSGLDYTNFPKITVIENKMNCDEMVRVKDITLTSTCEHHLVTIDGKATIAYIPRGKIIGLSKINRIVRFFSQRPQVQERLTQQVLVALQTLLESEDVAVTIDATHYCVKSRGVMDATSVTTTTALGGIFKRNPATRAEFLSGIR

SEQ ID NO: 12635 - protein, 217 aa, Photobacterium leiognathi
  misc_feature (1)..(217): tr|A0A0U1P6D9|A0A0U1P6D9_PHOLE GTP cyclohydrolase 1 OS= Photobacterium leiognathi lrivu.4.1 OX=1248232 GN=folE PE=3 SV=1
MTALSESAVLVRDALAARGLETPMVEQVVSREEKKEKIEYHMREILSLLALDLTDDSLVETPHRIAKMYVDEVFSGLDYANFPKITVIENKMNCDEMVRVKDITLTSTCEHHLVTIDGKATVAYIPRGKIIGLSKINRIVRFFAQRPQVQERLTQQVLVALQTLLESDDVAVTIDATHYCVKARGVMDATSVTTTTALGGIFKKNPATRAEFLNGIR

SEQ ID NO: 12636 - protein, 217 aa, Photobacterium leiognathi
  misc_feature (1)..(217): tr|A0A2T3MHI3|A0A2T3MHI3_PHOLE GTP cyclohydrolase 1 OS= Photobacterium leiognathi OX=553611 GN=folE PE=3 SV=1
MTALSESAVLVRDALAARGLETPMVEQDVSREEKKEKIEYHMREILSLLALDLTDDSLVETPHRIAKMYVDEVFSGLDYANFPKITVIENKMNCDEMVRVKDITLTSTCEHHLVTIDGKATVAYIPRGKIIGLSKINRIVRFFAQRPQVQERLTQQVLVALQTLLESDDVAVTIDATHYCVKARGVMDATSVTTTTALGGIFKKNSATRAEFLNGIR

SEQ ID NO: 12637 - protein, 217 aa, Photobacterium lipolyticum
  misc_feature (1)..(217): tr|A0A2T3N1C1|A0A2T3N1C1_9GAMM GTP cyclohydrolase 1 OS= Photobacterium lipolyticum OX=266810 GN=folE PE=3 SV=1
MAVLSESALKVRAALEARGLETPMTDKAVSREEKKEKIEYHVREILELLSLDLTDDSLMETPHRVAKMYVDEVFSGLDYANFPKITVIENKMNCDEMVRVKDITLTSTCEHHLVTIDGKATVAYIPRSKIIGLSKINRIVRFFGQRPQVQERMTQQILVALQTLLESDDVAITIDATHYCVKARGVMDATSVTTTTALGGIFKRNPATRAEFLNGIR

SEQ ID NO: 12638 - protein, 217 aa, Photobacterium lutimaris
  misc_feature (1)..(217): tr|A0A2T3ILU5|A0A2T3ILU5_9GAMM GTP cyclohydrolase 1 OS= Photobacterium lutimaris OX=388278 GN=folE PE=3 SV=1
MTAFSESALMVRQALVERGLETPMTDRVVSREEKKEKIEYHMREILELLSLDLTDDSLVETPHRIAKMYVDELFSGLDYANFPKITVIENKMKCDEMVRVKDITLTSTCEHHLVTIDGTATVAYIPRGKIIGLSKINRIVRFFAQRPQVQERMTQQILVALQTLLESDDVAVTMDATHYCVKARGVMDATSVTTTTALGGIFKRNPATRAEFLHGLR

SEQ ID NO: 12639 - protein, 217 aa, Photobacterium marinum
  misc_feature (1)..(217): tr|L8JI15|L8JI15_9GAMM GTP cyclohydrolase 1 OS=Photobac terium marinum OX=1056511 GN=folE PE=3 SV=1
MTALSESALKVRNALQERGLETPMTDKVMSRDEKKERIEYHMREVLELLSLDLTDDSLVETPHRIAKMYVDEVFSGLDYANFPKITVIENKMNCDEMVRVKDITLTSTCEHHLVTIDGKATVAYIPRGKIIGLSKINRIVRFFAQRPQVQERMTQQILVALQTLLESEDVAITMDATHYCVKARGVMDATSSTTTTALGGIFKRNPATRAEFLNGLR

SEQ ID NO: 12640 - protein, 217 aa, Photobacterium phosphoreum
  misc_feature (1)..(217): tr|A0A2T3PPE0|A0A2T3PPE0_PHOPO GTP cyclohydrolase 1 OS= Photobacterium phosphoreum OX=659 GN=folE PE=3 SV=1
MTALSVSAIQVRDALAARGLETPMTADVVSREEKKEKIEYHMREILSLLALDLTDDSLVETPHRIAKMYVDEIFSGLDYTNFPKITVIENKMNCDEMVRVKDITLTSTCEHHLVTIDGKATVAYIPRGKIIGLSKINRIVRFFSQRPQVQERLTQQILVALQTLLESEDVAVTIDATHYCVKSRGVMDATSVTTTTALGGIFKRNPATRAEFLSGIR

SEQ ID NO: 12641 - protein, 217 aa, Photobacterium phosphoreum
  misc_feature (1)..(217): tr|A0A2T3PXQ8|A0A2T3PXQ8_PHOPO GTP cyclohydrolase 1 OS= Photobacterium phosphoreum OX=659 GN=folE PE=3 SV=1
MTALSVSAIQVRDALAARGLETPMTADVISREEKKEKIEYHMREILSLLALDLTDDSLVETPHRIAKMYVDEIFSGLDYTNFPKITVIENKMNCDEMVRVKDITLTSTCEHHLVTIDGKATVAYIPRGKIIGLSKINRIVRFFSQRPQVQERLTQQILVALQTLLESEDVAVTIDATHYCVKSRGVMDATSVTTTTALGGIFKRNPATRAEFLSGIR

SEQ ID NO: 12642 - protein, 252 aa, Photobacterium piscicola
  misc_feature (1)..(252): tr|A0A1T5HZ92|A0A1T5HZ92_9GAMM Putative GTP cyclohydrol ase 1 type 2 OS=Photobacterium piscicola OX=1378299 GN= CZ809_01569 PE=4 SV=1
MNNLKLEALLNDFLSPQLMKDYCPNGLQVEGKTEVNKVITGVTACQALIDRAIAEHADAILVHHGFFWKGEAAEIRGMKYRRIKALIENGINLYAYHLPLDVHSQVGNNVQLAQRLGLDISGGLEINNPRSIAIYGELDTPLTGEEFAARIAMALQREPLHIGDNAPALIKKVGWCTGGGQDYIELAVEQGCDAFISGEVSERTTHIARELGIHYFAAGHHATERYGVKALGEWLAKEHGCDVEFIDINNPV

SEQ ID NO: 12643 - protein, 217 aa, Photobacterium piscicola
  misc_feature (1)..(217): tr|A0A1T5HZY8|A0A1T5HZY8_9GAMM GTP cyclohydrolase 1 OS= Photobacterium piscicola OX=1378299 GN=folE PE=3 SV=1
MTALSVSAVQVRDALAARDLETPMTADVVSREEKKEKIEYHMREILSLLALDLTDDSLVETPHRIAKMYVDEIFSGLDYTNFPKITVIENKMNCDEMVRVKDITLTSTCEHHLITIDGKATVAYIPRGKIIGLSKINRIVRFFSQRPQVQERLTQQILVALQTLLESEDVAVTIDATHYCVKSRGVMDATSVTTTTALGGIFKRNPATRAEFLSGIR

SEQ ID NO: 12644 - protein, 217 aa, Photobacterium profundum; identical to SEQ ID NO: 12624
  misc_feature (1)..(217): sp|Q6LQL4|GCH1_PHOPR GTP cyclohydrolase 1 OS=Photobacte rium profundum (strain SS9) OX=298386 GN=folE PE=3 SV=1

SEQ ID NO: 12645 - protein, 217 aa, Photobacterium profundum; identical to SEQ ID NO: 12624
  misc_feature (1)..(217): tr|Q1Z948|Q1Z948_9GAMM GTP cyclohydrolase 1 OS=Photobac terium profundum 3TCK OX=314280 GN=folE PE=3 SV=1

SEQ ID NO: 12646 - protein, 217 aa, Photobacterium proteolyticum
  misc_feature (1)..(217): tr|A0A1Q9GBN9|A0A1Q9GBN9_9GAMM GTP cyclohydrolase 1 OS= Photobacterium proteolyticum OX=1903952 GN=folE PE=3 SV =1
MTALSESALKVRQALVERGLETPMTDKVVSREEKKERIEYHMREILELLSLDLSDDSLMETPQRIAKMYVDEVFSGLDYANFPKITVIENKMNCDEMVRVKDITLTSTCEHHLVTIDGKATVAYIPRGKIIGLSKINRIVRFFAQRPQVQERMTQQILVALQTLLESDDVAITMDATHYCVKARGVMDATSSTTTTALGGIFKRNPATRAEFLNGLR

SEQ ID NO: 12647 - protein, 212 aa, Photobacterium rosenbergii
  misc_feature (1)..(212): tr|A0A2T3NG66|A0A2T3NG66_9GAMM GTP cyclohydrolase 1 OS= Photobacterium rosenbergii OX=294936 GN=folE PE=3 SV=1
MMNIEAKLVKQALIQQGLETPMLPNEMNPEQKYERIKGLLTEVIGVLGLDLRDDSLARTPHRIAKMYVNEVFSGLDYDNFPNICVIENKMRVDEMVKVSDISLTSTCEHHFVTIDGIAKVAYLPESKVIGLSKINRIVRFFAQRPQVQERLTQQILVAVQTLTETENVAVTIEATHYCVKSRGVMDVNSKTTTTALGGQFKTNPQTRAEFLQ

SEQ ID NO: 12648 - protein, 217 aa, Photobacterium rosenbergii
  misc_feature (1)..(217): tr|A0A2T3NFV8|A0A2T3NFV8_9GAMM GTP cyclohydrolase 1 OS= Photobacterium rosenbergii OX=294936 GN=folE PE=3 SV=1
MTALSESALKVRQALVERGLETPMTDKVVSREEKKEKIEYHMREILELLSLDLTDDSLIETPHRIAKMYVDEVFSGLDYANFPKITVIENKMNCDEMVRVKDITLTSTCEHHLVTIDGTATVAYIPRGKIIGLSKINRIVRFFAQRPQVQERMTQQILVALQTLLESDDVAVTMDATHYCVKARGVMDATSTTTTTALGGIFKRNPATRAEFLNGLR

SEQ ID NO: 12649 - protein, 217 aa, Photobacterium sanctipauli
  misc_feature (1)..(217): tr|A0A2T3NPN0|A0A2T3NPN0_9GAMM GTP cyclohydrolase 1 OS= Photobacterium sanctipauli OX=1342794 GN=folE PE=3 SV=1
MTALSESALKVRQALVDRGLETPMTDKQVSREEKKEKIEYHMREILELLSLDLTDDSLVETPHRIAKMYVDEVFSGLDYANFPKITVIENKMNCDEMVRVKDITLTSTCEHHLVTIDGKATVAYIPRGKIIGLSKINRIVRFFAQRPQVQERMTQQILVALQTLLESDDVAVTMDATHYCVKARGVMDATSVTTTTALGGIFKRNPATRAEFLHGVR

SEQ ID NO: 12650 - protein, 217 aa, Photobacterium sanguinicancri
  misc_feature (1)..(217): tr|A0A264T7I1|A0A264T7I1_9GAMM GTP cyclohydrolase 1 OS= Photobacterium sanguinicancri OX=875932 GN=folE PE=3 SV =1
MTALSESALLVRDALAARGLETPMTEKKVSREEKKEKIEFHMREILELLSLDLSDDSLMETPHRIAKMYVDEVFSGLDYANFPKITVIENKMKCDEMVRVKNITLTSTCEHHLVTIDGKATVAYIPRGKIIGLSKINRIVRFFAQRPQVQERLTQQILVALQTLLESDDVAVTIDATHYCVKSRGVMDATSETTTTALGGIFKKNPATRAEFLNGIR

SEQ ID NO: 12651 - protein, 217 aa, Photobacterium sanguinicancri
  misc_feature (1)..(217): tr|A0A135ZJZ6|A0A135ZJZ6_9GAMM GTP cyclohydrolase 1 OS= Photobacterium sanguinicancri OX=875932 GN=folE PE=3 SV =1
MTALSESALLVRDALAARGLETPMTEKKVSREEKKEKIEFHLREILELLSLDLSDDSLMETPHRIAKMYVDEVFSGLDYANFPKITVIENKMKCDEMVRVKNITLTSTCEHHLVTIDGKATVAYIPRGKIIGLSKINRIVRFFAQRPQVQERLTQQILVALQTLLESDDVAVTIDATHYCVKSRGVMDATSETTTTALSGIFKKNPATRAEFLHGIR

SEQ ID NO: 12652 - protein, 230 aa, Photobacterium sp.
  misc_feature (1)..(230): tr|A0A1Y6M8R0|A0A1Y6M8R0_9GAMM GTP cyclohydrolase 1 OS= Photobacterium sp. CECT 9192 OX=2006083 GN=folE PE=3 SV =1
MSFLFYLGQLEEEMTALSVSAIQVRDALAARGLETPMTADVVSREEKKEKIEYHMREVLSLLALDLTDDSLVETPHRIAKMYVDEIFSGLDYSNFPKITVIENKMNCDEMVRVKDITLTSTCEHHLVTIDGQATIAYIPRGKIIGLSKINRIVRFFSQRPQVQERLTQQVLVALQTLLESEDVAVTIDATHYCVKSRGVMDATSVTTTTALGGIFKRNPATRAEFFNGIR

SEQ ID NO: 12653 - protein, 230 aa, Photobacterium sp.
  misc_feature (1)..(230): tr|A0A1Y6M8K0|A0A1Y6M8K0_9GAMM GTP cyclohydrolase 1 OS= Photobacterium sp. CECT 9190 OX=2006084 GN=folE PE=3 SV =1
MSFLFYLGQLEEEMTALSVSAIQVRDALAARGLETPMTADVISREEKKEKIEYHMREVLSLLALDLTDDSLVETPHRIAKMYVDEIFSGLDYTNFPKITVIENKMNCDEMVRVKDITLTSTCEHHLVTIDGKATIAYIPRGKIIGLSKINRIVRFFSQRPQVQERLTQQVLVALQTLLESEDVAVTIDATHYCVKSRGVMDATSVTTTTALGGIFKRNPATRAEFFNGIR

SEQ ID NO: 12654 - protein, 217 aa, Photobacterium swingsii
  misc_feature (1)..(217): tr|A0A0J8Y4B4|A0A0J8Y4B4_9GAMM GTP cyclohydrolase 1 OS= Photobacterium swingsii OX=680026 GN=folE PE=3 SV=1
MTALSESALLVRDALAARGLETPMTEKAVSREEKKEKIEFHMREILELLSLDLSDDSLMETPHRIAKMYVDEVFSGLDYANFPKITVIENKMKCDEMVRVKNITLTSTCEHHLVTIDGKATVAYIPRGKIIGLSKINRIVRFFAQRPQVQERLTQQILVALQTLLESDDVAVTIDATHYCVKSRGVMDATSETTTTALGGIFKKNPATRAEFLHGIR

SEQ ID NO: 12655 - protein, 217 aa, Photobacterium toruni
  misc_feature (1)..(217): tr|A0A1T4T3S3|A0A1T4T3S3_9GAMM GTP cyclohydrolase 1 OS= Photobacterium toruni OX=1935446 GN=folE PE=3 SV=1
MTALSVSAIQVRDALAARDLETPMTADVVSRDEKKEKIEYHMREILSLLALDLTDDSLVETPHRIAKMYVDEIFSGLDYTNFPKITVIENKMNCDEMVRVKDITLTSTCEHHLITIDGKATVAYIPRGKIIGLSKINRIVRFFSQRPQVQERLTQQILVALQTLLESEDVAVTIDATHYCVKSRGVMDATSVTTTTALGGIFKRNPATRAEFLSGIR

SEQ ID NO: 12656 - protein, 252 aa, Photobacterium toruni
  misc_feature (1)..(252): tr|A0A1T4KMS9|A0A1T4KMS9_9GAMM Putative GTP cyclohydrol ase 1 type 2 OS=Photobacterium toruni OX=1935446 GN=CZ8 14_00223 PE=4 SV=1
MNNLKLEALLNDFLSPQLIKDYCPNGLQVEGKAEITKVITGVTACQALIDRAITEHADAILVHHGFFWKGEAAEIRGMKYRRIKALIENGINLYAYHLPLDVHMQVGNNVQLAQRLGLDIIGGLEINNPRSIAIYGELDTALSGDEFAARIAMALQREPLHIGDNAPALIKKVGWCSGGGQDYIELAVSQGCDAFISGEVSERTTHIARELGIHYFAAGHHATERYGVKALGEWLAKEQGFSVEFIDINNPV

SEQ ID NO: 12657 - protein, 222 aa, Photorhabdus asymbiotica
  misc_feature (1)..(222): tr|C7BR32|C7BR32_PHOAA GTP cyclohydrolase 1 OS=Photorha bdus asymbiotica subsp. asymbiotica (strain ATCC 43949 / 3105-77) OX=553480 GN=folE PE=3 SV=1
MEKIMSSLSKEAELVHSALEARGLETPLRGQTLAPEVRKVRIEEHMTEIMKLLNLDLSDDSLADTPGRIAKMYVDEIFSGLDYSNFPKITLIENKMKVDEMVTVRDITLTSTCEHHFVTIDGKATVAYIPKDKVIGLSKINRIVQFFSQRPQVQERLTQQILIALQTLLGTNNVAVSIDAVHYCVKARGIRDATSTTTTTSLGGLFKSSQNTRQEFLRTTRH

SEQ ID NO: 12658 - protein, 248 aa, Photorhabdus australis
  misc_feature (1)..(248): tr|A0A1C0U1I6|A0A1C0U1I6_9GAMM Putative GTP cyclohydrol ase 1 type 2 OS=Photorhabdus australis OX=286156 GN=ybg I PE=4 SV=1
MMHNIELESVINEELHIREFQDYAPNGLQVEGRAHIQRVVTGVTACQALLDEAVRYQADAVIVHHGYFWKNEPVVIRNMKRHRLKTLLSNDINLYGYHLPLDAHSLLGNNAQLAHKIGAKVVGLIDTFVPHGEFEQPMTPAELATRIELALGRKALHVGDNAPAEIRTLAWCTGGGQSFIQQAAEFGVDAFITGEASEQTVHIAREMGLHFYAAGHHATERYGIKALGEWLADNYGLDVTFIDIPNPV

SEQ ID NO: 12659 - protein, 219 aa, Photorhabdus australis
  misc_feature (1)..(219): tr|A0A1C0U1T4|A0A1C0U1T4_9GAMM GTP cyclohydrolase 1 OS= Photorhabdus australis OX=286156 GN=folE PE=3 SV=1
MSSLSKEAELVHSALEARGLETPLRGQTLAPEVRKVRIEEHMTEIMKLLNLDLSDDSLSDTPGRIAKMYVDEIFSGLDYSNFPKITLIENKMKVDEMVTVRDITLTSTCEHHFVTIDGKATVAYIPKDKVIGLSKINRIVQFFSQRPQVQERLTQQILIALQTLLGTNNVAVSIDAVHYCVKARGIRDATSTTTTTSLGGLFKSSQNTRQEFLRTTRHS

SEQ ID NO: 12660 - protein, 219 aa, Photorhabdus bodei
  misc_feature (1)..(219): tr|A0A329X984|A0A329X984_9GAMM GTP cyclohydrolase 1 OS= Photorhabdus bodei OX=2029681 GN=folE PE=3 SV=1
MSSLSKEAELVHSALEARGLETPLRGQALAPEVRKARIEEHMTEVMKLLNLDLRDDSLAETPGRIAKMYVDEIFSGLDYSNFPKITLIENKMKVDEMVTVRDITLTSTCEHHFVTIDGKATVAYIPKDKVIGLSKINRIVQFFSQRPQVQERLTQQILIALQTLLGTNNVAVSIDAVHYCVKARGIRDATSTTTTTSLGGLFKSSQNTRQEFLRTIRHV

SEQ ID NO: 12661 - protein, 218 aa, Photorhabdus heterorhabditis
  misc_feature (1)..(218): tr|A0A0M9D0V3|A0A0M9D0V3_9GAMM GTP cyclohydrolase 1 OS= Photorhabdus heterorhabditis OX=880156 GN=folE PE=3 SV= 1
MSSLSKEAELVHSALEARGLETPLRGQALAPEVRKVRIEEHMTEIMKLLNLDLSDDSLAETPSRIAKMYVDEIFSGLDYSNFPKITLIENKMKVDEMVTVRDITLTSTCEHHFVTIDGKATVAYIPKDKVIGLSKINRIVQFFSQRPQVQERLTQQILIALQTLLGTNNVAVSIDAVHYCVKARGIRDATSTTTTTSLGGLFKSSQNTRQEFLRTTRH

SEQ ID NO: 12662 - protein, 219 aa, Photorhabdus khanii
  misc_feature (1)..(219): tr|W3V2P2|W3V2P2_9GAMM GTP cyclohydrolase 1 OS=Photorha bdus khanii NC19 OX=1004151 GN=folE PE=3 SV=1
MSSLSKEAELVHSALEARGLETPLRGQALAPEVRKERIEEHMTEIMKLLNLDLNDDSLAETPNRIAKMYVDEIFSGLDYSNFPKITLIENKMKVDEMVTVRDITLTSTCEHHFVTIDGKATVSYIPKDKVIGLSKINRIVQFFSQRPQVQERLTQQILIALQILLGTNNVAVSIDAVHYCVKARGVRDATSTTTTTSLGGLFKSSQNTRQEFLRTTRHL

SEQ ID NO: 12663 - protein, 219 aa, Photorhabdus laumondii
  misc_feature (1)..(219): sp|Q7N6K7|GCH1_PHOLL GTP cyclohydrolase 1 OS=Photorhabd us laumondii subsp. laumondii (strain DSM 15139 / CIP 1 05565 / TT01) OX=243265 GN=folE PE=3 SV=1
MSSLSKEAELVHSALETRGLETPLRGQALVPEVRKARIEEHMTEVMKLLNLDLRDDSLAETPGRIAKMYVDEIFSGLDYSNFPKITLIENKMKVDEMVTVRDITLTSTCEHHFVTIDGKATVAYIPKDKVIGLSKINRIVQFFSQRPQVQERLTQQILIALQTLLGTNNVAVSIDAVHYCVKARGIRDATSTTTTTSLGGLFKSSQNTRQEFLRTTRHV

SEQ ID NO: 12664 - protein, 219 aa, Photorhabdus laumondii
  misc_feature (1)..(219): tr|A0A329VKH6|A0A329VKH6_9GAMM GTP cyclohydrolase 1 OS= Photorhabdus laumondii subsp. clarkei OX=2029685 GN=fol E PE=3 SV=1
MSSLSKEAELVHSALEARGLETPLRGQALVPEVRKARIEEHMTEVMKLLNLDLRDDSLVETPGRIAKMYVDEIFSGLDYSNFPKITLIENKMKVDEMVTVRDITLTSTCEHHFVTIDGKATVAYIPKDKVIGLSKINRIVQFFSQRPQVQERLTQQILIALQTLLGTNNVAVSIDAVHYCVKARGIRDATSTTTTTSLGGLFKSSQNTRQEFLRTTRHV

SEQ ID NO: 12665 - protein, 219 aa, Photorhabdus luminescens
  misc_feature (1)..(219): tr|A0A5C4RKQ3|A0A5C4RKQ3_PHOLU GTP cyclohydrolase 1 OS= Photorhabdus luminescens subsp. sonorensis OX=1173677 G N=folE PE=3 SV=1
MSSLSKEAELVHSALEARGLETPLRGQALAPEVRKARIEEHMTEIMKLLNLDLRDDSLAETPSRIAKMYVDEIFSGLDYSNFPKITLIENKMRVDEMVTVRDITLTSTCEHHFVTIDGKATVAYIPKDKVIGLSKINRIVQFFSQRPQVQERLTQQILIALQTLLGTNNVAVSIDAVHYCVKARGIRDATSTTTTTSLGGLFKSSQNTRQEFLRTTRHV

SEQ ID NO: 12666 - protein, 219 aa, Photorhabdus luminescens
  misc_feature (1)..(219): tr|A0A1G5QYR5|A0A1G5QYR5_PHOLU GTP cyclohydrolase 1 OS= Photorhabdus luminescens OX=29488 GN=folE PE=3 SV=1
MSSLSKEAELVHSALEARGLETPLRGQALVPEVRKARIEEHMTEIMKLLNLDLRDDSLAETPSRIAKMYVDEIFSGLDYSNFPKITLIENKMRVDEMVTVRDITLTSTCEHHFVTIDGKATVAYIPKDKVIGLSKINRIVQFFSQRPQVQERLTQQILIALQTLLGTNNVAVSIDAVHYCVKARGIRDATSTTTTTSLGGLFKSSQNTRQEFLRTTRHV

SEQ ID NO: 12667 - protein, 243 aa, Photorhabdus namnaonensis
  misc_feature (1)..(243): tr|A0A1B8YE34|A0A1B8YE34_9GAMM GTP cyclohydrolase 1 OS= Photorhabdus namnaonensis OX=1851568 GN=folE_2 PE=4 SV= 1
MKPFSDNNEVPTVEPGDLEITTHGFADGISMQLAKKRALHGPNETLTKTELNLIIDKAAISFGEFLTALGVDWQNDPNSKDTPRRVAKAYVLDLWKGRYKPMGPITTFPADNYDGIVFDGWIALDSMCSHHHQAIRGYVHVAYIPSQYGRVLGLSKLNRIVEHFGRRGLIQERLTATIHNAVNQVCERNQGVAVLIDASHNCVSCRGVRHQKSRMKTQMFSGVFADTDSPAKQDFYELIRGTA

SEQ ID NO: 12668 - protein, 219 aa, Photorhabdus namnaonensis
  misc_feature (1)..(219): tr|A0A1B8YEQ6|A0A1B8YEQ6_9GAMM GTP cyclohydrolase 1 OS= Photorhabdus namnaonensis OX=1851568 GN=folE_1 PE=3 SV= 1
MSSLSKEAELVHSALEARGLETPLRGQALVPEVRKARIEEHMTEIMKLLNLDLRDDSLAETPGRIAKMYVDEIFSGLDYSNFPKITLIENKMKVDEMVTVRDITLTSTCEHHFVTIDGKATVAYIPKDKVIGLSKINRIVQFFSQRPQVQERLTQQILIALQTLLGTNNVAVSIDAVHYCVKARGIRDATSTTTTTSLGGLFKSSQNTRQEFLRTTRHV

SEQ ID NO: 12669 - protein, 219 aa, Photorhabdus sp.; identical to SEQ ID NO: 12666
  misc_feature (1)..(219): tr|A0A4R4JIY8|A0A4R4JIY8_9GAMM GTP cyclohydrolase 1 OS= Photorhabdus sp. MEX47-22 OX=2100167 GN=folE PE=3 SV=1

SEQ ID NO: 12670 - protein, 219 aa, Photorhabdus sp.
  misc_feature (1)..(219): tr|A0A4R4K7U5|A0A4R4K7U5_9GAMM GTP cyclohydrolase 1 OS= Photorhabdus sp. MEX20-17 OX=2100166 GN=folE PE=3 SV=1
MSSLSKEAELVHSALEARGLETPLRGQALAPEVRKERIEEHMTEIMKLLNLDLNDDSLAETPNRIAKMYVDEIFSGLDYSNFPKITLIENKMKVDEMVTVRDITLTSTCEHHFVTIDGKATVSYIPKDKVIGLSKINRIVQFFSQRPQVQERLTQQILIALQTLLGTNNVAVSIDAVHYCVKARGIRDATSTTTTTSLGGLFKSSQNTRQEFLRTTRHL

SEQ ID NO: 12671 - protein, 219 aa, Photorhabdus temperata
  misc_feature (1)..(219): tr|T0QHE5|T0QHE5_PHOTE GTP cyclohydrolase 1 OS=Photorha bdus temperata subsp. temperata M1021 OX=1221520 GN=fol E PE=3 SV=1
MSSLSKEAELVHSALEARGLETPLRGQALMPEVRKVRIEEHMTEIMKLLNLDLNDDSLAETPSRIAKMYVDEIFSGLDYSNFPKITLIENKMKVDEMVTVRDITLTSTCEHHFVTIDGKATVSYIPKDKVIGLSKINRIVQFFSQRPQVQERLTQQILIALQTLLGTNNVAVSIDAVHYCVKARGIRDATSTTTTTSLGGLFKSSQNTRQEFLRTTRHL

SEQ ID NO: 12672 - protein, 219 aa, Photorhabdus temperata; identical to SEQ ID NO: 12671
  misc_feature (1)..(219): tr|A0A081S073|A0A081S073_PHOTE GTP cyclohydrolase 1 OS= Photorhabdus temperata subsp. temperata Meg1 OX=1393735 GN=folE PE=3 SV=1

SEQ ID NO: 12673 - protein, 219 aa, Photorhabdus thracensis
  misc_feature (1)..(219): tr|A0A0F7LRD2|A0A0F7LRD2_9GAMM GTP cyclohydrolase 1 OS= Photorhabdus thracensis OX=230089 GN=folE PE=3 SV=1
MSSLSKEAELVHSALEARGLETPLRGQALTPEVRKVRIEEHMTEIMKLLNLDLNDDSLAETPSRIAKMYVDEIFSGLDYSNFPKITLIENKMKVDEMVTVHDITLTSTCEHHFVTIDGKATVSYIPKDKVIGLSKINRIVQFFSQRPQVQERLTQQILIALQTLLGTNNVAVSIDAVHYCVKARGIRDVTSTTTTTSLGGLFKSSQNTRQEFLRTTRHL

SEQ ID NO: 12674 - protein, 209 aa, Phreatobacter cathodiphilus
  misc_feature (1)..(209): tr|A0A2S0N8W3|A0A2S0N8W3_9PROT GTP cyclohydrolase 1 OS= Phreatobacter cathodiphilus OX=1868589 GN=folE PE=3 SV= 1
MDAVVTSLPLQKGSEAPRRRRPTREEAEAAVRTLIEWVGDDPDREGLVATPRRMVKAWEDLFRGYGQSAAKELGTVFEEVGGYGDVVLVRDIPFFSHCEHHIVPISGRAHIAYYPREGVVGLSKLAKVVDIYARRLQTQENMTAEIVGAIEESLKPRGLAVLVEAEHMCMSMRGVQKQGVSTITTGFTGLFKDDASEQARFMQMIRGFR

SEQ ID NO: 12675 - protein, 210 aa, Phreatobacter oligotrophus
  misc_feature (1)..(210): tr|A0A2T4ZIJ7|A0A2T4ZIJ7_9PROT GTP cyclohydrolase 1 OS= Phreatobacter oligotrophus OX=1122261 GN=folE PE=3 SV=1
MDAVVTSLPMAKGLESPRRRRPSREEAEAAVRTLIEWVGDNPPDREGLVDTPRRMVKAWEDLFRGYGQSAAKELGTVFEEVGGYGDVVLVRDIPFFSHCEHHIVPIMGRAHIAYYPREGVVGLSKLAKVVDIYARRLQTQENMTAEIVGAIEESLKPRGLAVLVEAEHMCMSMRGVQKQGVSTITTGFTGLFKDDASEQARFMQMIRGFR

SEQ ID NO: 12676 - protein, 210 aa, Phreatobacter sp.
  misc_feature (1)..(210): tr|A0A4D7QI40|A0A4D7QI40_9PROT GTP cyclohydrolase 1 OS= Phreatobacter sp. NMCR1094 OX=2570229 GN=folE PE=3 SV=1
MDAVVTTLPVGKGSDVKHRRRPSREEAEAAVRTLIEWVGDDPDREGLVDTPRRMAKAWEDLFRGYGQSAEKELGTVFEEVGGYGDIVLVRDIPFFSHCEHHIVPIMGRAHIAYYPREGVVGLSKLAKVVDIFARRLQTQENMTAEISNVIEETLRPRGLAVLVEAEHMCMSMRGVQKQGVSTVTTGFTGLFKDDATEQVRFMTMVRGFRS

SEQ ID NO: 12677 - protein, 210 aa, Phreatobacter stygius
  misc_feature (1)..(210): tr|A0A4D7BBL6|A0A4D7BBL6_9PROT GTP cyclohydrolase 1 OS= Phreatobacter stygius OX=1940610 GN=folE PE=3 SV=1
MDAVVTTLPVHKGPEAKRHRRPTREEAEAAVRTLIEWVGEDPDREGLLDTPRRMVKSWEDLFRGYGQSAADELGTVFEEVGGYGDVVLVRDIPFFSHCEHHIVPIQGKAHIAYYPRDGVVGLSKLARVVDIFARRLQTQENMTAEIVGAIEESLRPRGIAVLVEAEHMCMSMRGVQKQGVSTITTGFTGLFKADATEQVRFMTMIRGFGG

SEQ ID NO: 12678 - protein, 197 aa, Phycicoccus bigeumensis
  misc_feature (1)..(197): tr|A0A502CT07|A0A502CT07_9MICO GTP cyclohydrolase 1 OS= Phycicoccus bigeumensis OX=433644 GN=folE PE=3 SV=1
MASEAKPHVVDQPRAEAAVRELLIAIGEDPDREGLVETPARVARAYGEFFAGLSLDAGEVLSKTFRIDHEEMILVRDIEVYSMCEHHLVPFHGVAHVGYIPARDGRVTGLSKLARLVEMYARRPQVQERLTTQVADSLVTHLGAQGVMVIVECEHLCMSMRGIRKPGSRTITSAVRGQLRDPATRAEAMALLLGGKR

SEQ ID NO: 12679 - protein, 207 aa, Phycicoccus cremeus
  misc_feature (1)..(207): tr|A0A1H9WDA2|A0A1H9WDA2_9MICO GTP cyclohydrolase 1 OS= Phycicoccus cremeus OX=587636 GN=folE PE=3 SV=1
MSTPTRTEAEGDAVGARNDIDFARAEAAVRELLIAVGEDPDREGLVDTPARVARAYAETFAGLRMTPEEVLSATFSIEHQEMIIVRDIEVYSTCEHHLVPFHGVAHVGYIPARDGRVTGLSKIARLVEVFARRPQVQERLTTQVADALVEHLEAQGVIVVVECEHLCMSMRGVRKPGSRTITSAVRGQLRDAATRAEAMSLLLGGKR

SEQ ID NO: 12680 - protein, 218 aa, Phycicoccus cremeus
  misc_feature (1)..(218): tr|A0A1H9VMN0|A0A1H9VMN0_9MICO GTP cyclohydrolase 1 OS= Phycicoccus cremeus OX=587636 GN=folE PE=3 SV=1
MVTTSISGTAAAAGAEPAHPLEKAARGIRAGRPRPHRAPETAVSGARLLLSGLGIDLEGESLRRTPERMAAALAELLTPRPFELTTFPNDGGYDELIVARGIPMRSLCEHHMLPFVGTAHIGYLPGERILGLSKLARVLEHFSHRPQVQERLTTQVAGWLQEQLEPAGVGVVIEAEHLCMTLRGVQAPGTTTITSSLLGTLRDDGRSHAEFLALTYRR

SEQ ID NO: 12681 - protein, 197 aa, Phycicoccus dokdonensis
  misc_feature (1)..(197): tr|A0A1H0UT94|A0A1H0UT94_9MICO GTP cyclohydrolase 1 OS= Phycicoccus dokdonensis OX=443156 GN=folE PE=3 SV=1
MAADHSQHEVDQARAEAAVRELLIAIGEDPDRDGLVETPARVARAYGEFFAGLRLDAADVLSKTFEIDHEEMILVRDIEVYSMCEHHLVPFHGVAHVGYIPAKDGRVTGLSKLARLVEMYARRPQVQERLTTQVADALCTHVGAQGVIVVVECEHLCMSMRGIRKPGSRTITSAVRGQLRDPATRAEAMALLLGGKR

SEQ ID NO: 12682 - protein, 216 aa, Phycicoccus sp.
  misc_feature (1)..(216): tr|A0A3S3Q6X2|A0A3S3Q6X2_9MICO GTP cyclohydrolase 1 OS= Phycicoccus sp. CMS6Z-2 OX=2502783 GN=folE PE=3 SV=1
MGVSSPEADLDLAPAATATSTGAATRPPVDVPRAQAAVREFLLAIGEDPDRDGLRDTPARVAKAAHELYAGLWQDPAEVLSATFPIEHEELVIVRDIPMYSTCEHHLLPFHGVAHIGYIPGEDGRVTGLSKLGRLVEVYARRPQVQEQITTQVADALVTHLGVQGAIVVIEAEHLCMSMRGVQKPGSRTITSAVRGQLRDPATRAEAMSLLLAGSR

SEQ ID NO: 12683 - protein, 197 aa, Phycicoccus sp.
  misc_feature (1)..(197): tr|A0A0Q9SPK0|A0A0Q9SPK0_9MICO GTP cyclohydrolase 1 OS= Phycicoccus sp. Soil802 OX=1736414 GN=folE PE=3 SV=1
MPTERGRHVVDQARAEAAVRELLIAIGEDPDRDGLTETPARVARAYGEFFAGLSLDAAEVLSKTFEIDHEEMILVRDIEVYSMCEHHLVPFHGVAHVGYIPAKDGRVTGLSKIARLVEMYARRPQVQERLTTQVADALCTHLGAQGVIVIVECEHLCMSMRGIRKPGSRTITSAVRGQLRDAATRAEAMALLLGGKR

SEQ ID NO: 12684 - protein, 284 aa, Phycisphaera mikurensis
  misc_feature (1)..(284): tr|I0IHI4|I0IHI4_PHYMF GTP cyclohydrolase FolE2 OS=Phyc isphaera mikurensis (strain NBRC 102666 / KCTC 22515 / FYK2301M01) OX=1142394 GN=folE2 PE=3 SV=1
MLSSPLVDVQGKSDGRRVPIDRVGVKNVRYPISLATPAGGAHAGPRQHTIARIDMYVSLPHHQKGTHMSRFLEVLNEHHDGLPSHDVMNLCRAIRERLEAEDAHLRLEFPYFIDKRAPVTGQPGKLDIEVVLEAHASGSEPGPDAPIGPASPGFTMTVRVPATSLCPCSKEISAYGAHNQRCEMEASVRFFPGKRMWIEDLFAIVEGCASTQVFSTLKRPDEKFVTEAAYDNPKFVEDIVRDLAMAMEADDRVSWYRVGSENFESIHSHNAYAQLEHAKSAEPQ

SEQ ID NO: 12685 - protein, 269 aa, Phycisphaera sp.
  misc_feature (1)..(269): tr|A0A2G1ZR01|A0A2G1ZR01_9BACT GTP cyclohydrolase FolE2 OS=Phycisphaera sp. OX=2030824 GN=folE2 PE=3 SV=1
MQTSSDSNSIADVQGYEDGRHVAIDKVGVKNIIYPMILKTRDGKTQDTIAKINMYVSLPHHQKGTHMSRFLEVLNDHRSEPLTPDRIPEVTAAIRERLNAETAHFEASFTYFMCKPAPVTGMRGLMDYEVTFACEVNGSPETSSFVIGVAVPATSLCPCSKEISEYGAHNQRCRISAKVKFDGTLWIEDLVEVLEGAASSPVYAVLKRPDEKFVTEAAYDNPKFVEDIIRDLALALDKDERIKWYEIDSENFESIHSHNAYAQITRSRG

SEQ ID NO: 12686 - protein, 185 aa, Phycisphaera sp.
  misc_feature (1)..(185): tr|A0A3R7ST50|A0A3R7ST50_9BACT GTP cyclohydrolase 1 OS= Phycisphaera sp. TMED9 OX=1986611 GN=folE PE=3 SV=1
MAQIKSLLGYIGEDPEREGLIDTPKRVVKAMNEHYWGYRADPFEPLQKTFGEVENYDELVLLQNMEIQSHCEHHMVPFVGKAHVAYIPNGRVVGLSKLARVVEIFSKRLQVQEKLTAQIANTIQEALQPQGVAVIIQARHFCMCYRGVKQSNAWTTTSKLHGVFLEDPAARMELLTLIGSNPGRD

SEQ ID NO: 12687 - protein, 221 aa, Phycisphaeraceae bacterium
  misc_feature (1)..(221): tr|A0A1Z9Q8Z0|A0A1Z9Q8Z0_9BACT GTP cyclohydrolase 1 OS= Phycisphaeraceae bacterium TMED231 OX=1986831 GN=folE P E=3 SV=1
  misc_feature (83)..(83): Xaa can be any naturally occurring amino acid
MEAATIFDPSLHRRSSVLEPRPYTEFDPESDASIEAMAHVKSLLGFIGDDPEREGLVETPKRVIKAMNEHYWGYRADPFEPLXKTFSEVENYDELVLLQNMEIQSHCEHHMVPFVGKAHVAYIPRGRVVGLSKLARVVEVFSKRLQVQEKLTAQIANTIQEALNPQGVAVIIQARHFCMCYRGVKQSNAWTTTSKLHGVFLEDSAARMELLTLIGSNPGRD

SEQ ID NO: 12688 - protein, 279 aa, Phycisphaeraceae bacterium
  misc_feature (1)..(279): tr|A0A520Q6Z7|A0A520Q6Z7_9BACT GTP cyclohydrolase FolE2 OS=Phycisphaeraceae bacterium OX=2026777 GN=folE2 PE=3 SV=1
MATTTTEINLPDIQATPDQRATAIAAVGIRGLELPLQLDAGDGRLQTTLGTWDLAVGLAQGVRGTHMSRFVELASRFSADDALPVSRETLEDFSADLLDRLEAEDGRVRIKGRFLLRRSSPVTEIDLPVPFDFAWKLRARRVERKIQTKLVTEVGVLATSLCPCSREISTYGAHNQRARVRIGVTGPVSLSELVEVAESSASCTVFPLLKRPDEKAFTETAYERPRFVEDLVREVATGLRAIPGVGRFKIKAVNEESIHAHDAWAIVKGCGDDPTSQLA

SEQ ID NO: 12689 - protein, 224 aa, Phycisphaerae bacterium
  misc_feature (1)..(224): tr|A0A5C5W634|A0A5C5W634_9BACT GTP cyclohydrolase 1 OS= Phycisphaerae bacterium RAS1 OX=2528034 GN=folE PE=3 SV =1
MKSKLESKSRFHASASTAPSGDGDAPRGVALSQPAPAPVDQPRIERAVREILLAIGEDPQREGLRKTPARVARMYAELFSGLQEDPERHLEATFDEGHHEMVVLREVAFNSMCEHHLMPFEGHAHIAYIPGGRVLGLSKLARIVDAYSRRPQVQERLTSQIADLLAHKLQVKGCAVVLEAVHTCMTCRGVKKSGSVMVTSALRGLMQTNQSTRSEALSLLHRRA

SEQ ID NO: 12690 - protein, 188 aa, Phycisphaerae bacterium
  misc_feature (1)..(188): tr|A0A0S8HLJ0|A0A0S8HLJ0_9BACT GTP cyclohydrolase 1 OS= Phycisphaerae bacterium SM23_33 OX=1703412 GN=folE PE=3 SV=1
MNEERVAELVRELLIELGDDPDRDGLRRTPIRVAKAMAFLTQGYRTDPKAIARDAVFESHANNMIIARDIEVYSLCEHHILPFYGRCHIGYIARDKLVGVSKLARIVDCHARRLQIQERLTAQIAQEVMEAVNAAGVGVVMECRHLCMMMRGVEKQNSIMITSSVLGCFHDDAATRGEFLDLIGRPAV

SEQ ID NO: 12691 - protein, 190 aa, Phycisphaerales bacterium
  misc_feature (1)..(190): tr|A0A353P054|A0A353P054_9BACT GTP cyclohydrolase 1 OS= Phycisphaerales bacterium OX=2052180 GN=folE PE=3 SV=1
MAKKKVDIGKIEKAVTDILLAIGEDINREGLKLTPKRVAGMYAELLAGESEDPTQYIKSVFNEKCDEIILLRDIPFYSVCEHHMMPFIGKAHVAYLPQDCVLGVSKLARVVDCFARRLQIQERLTSQIADFLIEHINPQGVAVVIEASHSCMTIRGIKKPGSTMVTSALRGIFKKDPRSRAEVLSLMHNA

SEQ ID NO: 12692 - protein, 210 aa, Phycisphaerales bacterium
  misc_feature (1)..(210): tr|A0A3B8V8E6|A0A3B8V8E6_9BACT GTP cyclohydrolase 1 OS= Phycisphaerales bacterium OX=2052180 GN=folE PE=3 SV=1
MIHDARTCREIEATTDSDDRSTPSFDQPRIEAAVREILLAIGENPDREGLLDTPSRVARAYGEMFGGLDQSPAAHLARQFPQDGSDPVMVTDIPFTSMCEHHLLPFTGVAHIAYQPQHGRVVGLSKLARTVQILARRPQQQERLTQQVREAIEEHLDPAGVLVMLEATHSCMQIRGAKAHGASMKTRSVGGRWERDAATRREIQEMMVGK

SEQ ID NO: 12693 - protein, 213 aa, Phyllobacteriaceae bacterium
  misc_feature (1)..(213): tr|A0A2E1XW08|A0A2E1XW08_9RHIZ GTP cyclohydrolase 1 OS= Phyllobacteriaceae bacterium OX=1871068 GN=folE PE=3 SV =1
MDAIATNISSLTETTMESPAIERPSREEAEAAVRTLLRWVGDNPDREGLVDTPARVVKAYEEMFSGYAANPSEELGRTFEEVAGYDDLVLVRDIHFHSHCEHHMVPIIGRAHVAYLPDGKVLGLSKIARLVHVFARRLQTQEAMTAQIATSIQDVLNPRGVAVMIEAEHMCMAMRGIRQQGSTTTTSTFTGAFRDNPEEQVRFFTLARDMGRR

SEQ ID NO: 12694 - protein, 201 aa, Phyllobacteriaceae bacterium; identical to SEQ ID NO: 11936
  misc_feature (1)..(201): tr|A0A3A8ACS0|A0A3A8ACS0_9RHIZ GTP cyclohydrolase 1 OS= Phyllobacteriaceae bacterium StC1 OX=2184161 GN=folE PE =3 SV=1

SEQ ID NO: 12695 - protein, 208 aa, Phyllobacterium bourgognense
  misc_feature (1)..(208): tr|A0A368YZF4|A0A368YZF4_9RHIZ GTP cyclohydrolase 1 OS= Phyllobacterium bourgognense OX=314236 GN=folE PE=3 SV= 1
MDAIIKVLQSAAAKQDNNRRPTQEEAEAAVRTLLLWAGDNPDREGLLDTPQRVANTYKELFSGYAQDPADVLGRTFEEVAGYEDMILIQDIPFFSHCEHHMVPIIGKAHVAYLPDGEKVVGLSKIARVVDMFAHRLQTQESMTAQIANAIQESLRPRGVAVMIEAEHMCMAMRGIRKAGSTTTTTTFTGSFKTEINEQVRFMTLVRGR

SEQ ID NO: 12696 - protein, 208 aa, Phyllobacterium brassicacearum
  misc_feature (1)..(208): tr|A0A2P7BMS1|A0A2P7BMS1_9RHIZ GTP cyclohydrolase 1 OS= Phyllobacterium brassicacearum OX=314235 GN=folE PE=3 S V=1
MDAVIKNLQSAAVKQDNKRRPTQAEAEAAVRTLLLWAGDDPDREGLLDTPERVAKAYRELFSGYSQDPADVLGRTFEEIAGYEDIVLIQDIPFFSHCEHHMVPIIGKAHVAYLPDGEKVVGLSKIARVVDIYAHRLQTQEAMTAQIANAIQESLQPRGVAVMIEAEHMCMSMRGIRKSGSMTTTTTFTGTYKTDVNEQVRFMTLVRGR

SEQ ID NO: 12697 - protein, 208 aa, Phyllobacterium endophyticum
  misc_feature (1)..(208): tr|A0A2P7AV30|A0A2P7AV30_9RHIZ GTP cyclohydrolase 1 OS= Phyllobacterium endophyticum OX=1149773 GN=folE PE=3 SV =1
MDAIIKVLQSSTGKQDITRRPTQEEAEAAVRTLLLWAGDNPDREGLLDTPQRVANTYKELFSGYAQDPADVLGRTFEEVAGYEDMILIQDIPFFSHCEHHMVPIIGKAHVAYLPDGEKVVGLSKIARVVDIFAHRLQTQESMTAQIAAAIQDSLRPRGVAVMIEAEHMCMAMRGIRKSGSVTTTTTFTGSFKTEVNEQVRFMTLVRGR

SEQ ID NO: 12698 - protein, 208 aa, Phyllobacterium leguminum
  misc_feature (1)..(208): tr|A0A318T2M4|A0A318T2M4_9RHIZ GTP cyclohydrolase 1 OS= Phyllobacterium leguminum OX=314237 GN=folE PE=3 SV=1
MDAILNLRENAARQGEKTLTRPTREEAEAAVRTLLLWAGENPDREGLLDTPKRVAKSYGELFSGYNESPEEVLGTTFEEVSGYNDPVLVKDIPFFSHCEHHMVPIIGKAHIAYLPDDRVVGLSKIGRLVDVFGRRLQTQESITAQIADAMDTILHPRGVAVMIEAEHLCMSMRGVKKQGSTTITTTFRGTYRDDANAQARFMTMIRLG

SEQ ID NO: 12699 - protein, 208 aa, Phyllobacterium myrsinacearum
  misc_feature (1)..(208): tr|A0A2S9JZL9|A0A2S9JZL9_9RHIZ GTP cyclohydrolase 1 OS= Phyllobacterium myrsinacearum OX=28101 GN=folE PE=3 SV= 1
MDAVIKSLQSPTGNQNNLRRPTQEEAEAAVRTLLLWAGDNPDREGLLDTPQRVAKAYKELFSGYHEDPEEVLGRTFEEVAGYDDIVFIKDIPFFSHCEHHMVPIIGKAHVAYLPDGEKVVGLSKIARVVHIYARRLQTQESMTAQIANAIQGALRPRGVAVMIEAEHMCMAMRGIRVSGSTTTTTTFTGAFKSDVNEQVRFMTLLKGR

SEQ ID NO: 12700 - protein, 207 aa, Phyllobacterium salinisoli
  misc_feature (1)..(207): tr|A0A368K567|A0A368K567_9RHIZ GTP cyclohydrolase 1 OS= Phyllobacterium salinisoli OX=1899321 GN=folE PE=3 SV=1
MDAILNLRGTLARPAKSVVRPTQKEAEAAVRTLLLWAGDDPDREGLLDTPKRVVKSYKELFSGYNESPEEVLGTTFEEVSGFNDAVLVKDIEFHSHCEHHMLPVVGKAHIAYLPDGKVVGLSKIARLVDIFARRLQTQESITAQIADAMDTILRPRGVAVMIEADHMCMSMRGIRKQGSTTITTTFRGAYQEDINEQVRFMTMVRHG

SEQ ID NO: 12701 - protein, 208 aa, Phyllobacterium sophorae
  misc_feature (1)..(208): tr|A0A2P7B9L9|A0A2P7B9L9_9RHIZ GTP cyclohydrolase 1 OS= Phyllobacterium sophorae OX=1520277 GN=folE PE=3 SV=1
MDAVIKNLQSAAVKQNNTRRPTQEEAEAAVRTLLLWAGDNPDREGLLDTPERVAKAYKELFSGYTQEPADVLGRTFEEIAGYEDIVLIQDIPFFSHCEHHMVPIIGKAHVAYLPDGEKVVGLSKIARVVDIYAHRLQTQEAMTAQIANAIQDSLQPRGVAVMIEAEHMCMSMRGIRKSGSTTTTTTFTGAYKTDVNEQVRFMTLVKGR

SEQ ID NO: 12702 - protein, 208 aa, Phyllobacterium sp.
  misc_feature (1)..(208): tr|A0A1H0VBI3|A0A1H0VBI3_9RHIZ GTP cyclohydrolase 1 OS= Phyllobacterium sp. OV277 OX=1882772 GN=folE PE=3 SV=1
MDAVIKSLQSTTVNQNNLRRPTQEEAEAAVRTLLLWAGDNPDREGLLDTPQRVAKAYKELFSGYDESPDDVLGRTFEEVAGYDDIVFIKDIPFFSHCEHHMVPIIGKAHVAYLPDGEKVVGLSKIARVVHMFARRLQTQESMTAQIANAIQDSLRPRGVAVMIEAEHMCMAMRGIRVSGSTTTTTTFTGAFKADVNEQVRFMTLLKGR

SEQ ID NO: 12703 - protein, 208 aa, Phyllobacterium sp.
  misc_feature (1)..(208): tr|J3HSV9|J3HSV9_9RHIZ GTP cyclohydrolase 1 OS=Phylloba cterium sp. YR531 OX=1144343 GN=folE PE=3 SV=1
MDAVVKNLQSATAKQNNVRRPTQEEAEAAVRTLLLWAGDNPDREGLLDTPERVVKSYKELFSGYALDPADVLGRTFEEVAGYEDMVLIQDIPFFSHCEHHMVPIIGKAHVAYLPDGEKVVGLSKIARVVDIFAHRLQTQESMTAQIASSIQDSLRPRGVAVMIEAEHMCMAMRGIRKSGSLTTTTTFTGSFRNEVNDQVRFMTMVRGR

SEQ ID NO: 12704 - protein, 208 aa, Phyllobacterium zundukense
  misc_feature (1)..(208): tr|A0A2N9W4D7|A0A2N9W4D7_9RHIZ GTP cyclohydrolase 1 OS= Phyllobacterium zundukense OX=1867719 GN=folE PE=3 SV=1
MDAVIKNLQSAAVKQNNTRRPTQEEAEAAVRTLLLWAGDDPEREGLLDTPERVVKAYKELFSGYSQNPADVLGRTFEEIAGYEDIVLIQDIPFFSHCEHHMVPIIGKAHVAYLPDGEKVVGLSKIARVVDIYAHRLQTQEAMTAQIANAIQDSLQPRGVAVMIEAEHMCMSMRGIRKSGSTTTTTTFTGAYKIDVNEQVRFMTLVKGR

SEQ ID NO: 12705 - protein, 200 aa, Phytoactinopolyspora sp.
  misc_feature (1)..(200): tr|A0A329QGR1|A0A329QGR1_9ACTN GTP cyclohydrolase 1 OS= Phytoactinopolyspora sp. YIM 96934 OX=1981511 GN=folE P E=3 SV=1
MTKPARPANSTAGAFDHERVEAAVRELLVAIGEDPEREGLAETPQRVARAYAEMFSGLREDPAQALTTTFELGHDEMILVKDIEITSTCEHHLVPFYGHAHIGYVPGNDGRIAGLSKLARLVDVFAKRPQVQERLTTQVADSLVDLMKPTGVIVVIEAEHLCMTMRGVRKPGSKTVTSAVRGQLRDPATRSEAMSLIIGR

SEQ ID NO: 12706 - protein, 221 aa, Phytobacter diazotrophicus; identical to SEQ ID NO: 8737
  misc_feature (1)..(221): tr|A0A4R4B3V3|A0A4R4B3V3_9GAMM GTP cyclohydrolase 1 OS= Phytobacter diazotrophicus OX=395631 GN=folE PE=3 SV=1

SEQ ID NO: 12707 - protein, 221 aa, Phytobacter ursingii; identical to SEQ ID NO: 8737
  misc_feature (1)..(221): tr|A0A0G3Q7D0|A0A0G3Q7D0_9GAMM GTP cyclohydrolase 1 OS= Phytobacter ursingii OX=1972431 GN=folE PE=3 SV=1

SEQ ID NO: 12708 - protein, 249 aa, Phytobacter ursingii
  misc_feature (1)..(249): tr|A0A508UD33|A0A508UD33_9GAMM Putative GTP cyclohydrol ase 1 type 2 OS=Phytobacter ursingii OX=1972431 GN=ybgI PE=4 SV=1
MKNTELEKLINEKLNSAAFSDYGPNGLQVEGRETVKKIITGVTASQALLDEAVRQEADAVIVHHGYFWKNEPAIIRGMKRNRLKTLLANDINLYGWHLPLDAHPELGNNVQLASLLGITVMGTVDGDELLPWGELSMPVPGPELASWIEARLGRRPLWSGDTGPELIKRVAWCTGGGQGFIDNAARFGVDAFITGEVSEQTIHSAREQNLHFYAAGHHATERGGIRALSEWLNENTDLDVTFIDIPNPA

SEQ ID NO: 12709 - protein, 313 aa, Pigmentiphaga aceris
  misc_feature (1)..(313): tr|A0A5C0B4P2|A0A5C0B4P2_9BURK GTP cyclohydrolase FolE2 OS=Pigmentiphaga aceris OX=1940612 GN=folE2 PE=3 SV=1
MIQPLPDVATTESPAVALPLDWVGMDGIDLPIQLGGMRIPASVDVAVDLPRADVKGIHMSRLHRLLNEVAEHRELTPELLAMLLQDMVDSHADCGTTAARAVWRIKLLRARPALVTPGLSGWQAYPVTLTAQWRDGAMSLRLGVEVTYSSTCPCSAALSRQVLQDAFLRDFAGGTNLSPQAVAAWLAEHGSLATPHSQRSVAQVSVDVLGVVEDAVGSHDDDPLEMGRAASDALGIETLIARIEAALGTAVQTAVKRADEQAFAQRNGQNLMYVEDATRRILASLDGAYQHVHVSVRHLESLHPHDAVASGWA

SEQ ID NO: 12710 - protein, 187 aa, Pigmentiphaga aceris
  misc_feature (1)..(187): tr|A0A5C0AZH2|A0A5C0AZH2_9BURK GTP cyclohydrolase 1 OS= Pigmentiphaga aceris OX=1940612 GN=folE PE=3 SV=1
MSTTEFNENDWRRLLETLGEDPSRPGLVETPSRVAKAWQHWTSGYGQEPAEILKVFEDGAEEYNELIMVRNIPVYSHCEHHLAPFFGTATIGYTPNGRIVGLSKLTRLMDCFAKRLQVQERLTIQVANALMEHLQPKSVGVMIRCRHMCMESRGIRTPGEETVTSALLGELQTNLALRTEFLSLARG

SEQ ID NO: 12711 - protein, 181 aa, Pigmentiphaga kullae
  misc_feature (1)..(181): tr|A0A4Q7N8Q0|A0A4Q7N8Q0_9BURK GTP cyclohydrolase 1 OS= Pigmentiphaga kullae OX=151784 GN=folE PE=3 SV=1
MSLEQNYTSILEQLGEDPGREGLRDTPKRAAKAMKYLCQGYTQNLDEIVNGALFSSDTNEMVLVKNIELYSLCEHHLLPFIGKAHVAYLPNGKVLGLSKVARIVDMYARRLQIQENLCLQIAEAVQEVTDALGVAVVIEAQHMCMMMRGVEKQNSSMVSSVMLGAFRENPSTRAEFLELIR

SEQ ID NO: 12712 - protein, 181 aa, Pigmentiphaga sp.
  misc_feature (1)..(181): tr|A0A208XK51|A0A208XK51_9BURK GTP cyclohydrolase 1 OS= Pigmentiphaga sp. NML080357 OX=2008675 GN=folE PE=3 SV= 1
MSLEQHYTSILEKLGEDPHREGLRDTPKRAAKAMKYLCQGYSQNLDEIVNGALFSSDTNEMVLVKNIELYSLCEHHLLPFIGKAHVAYLPNGRVLGLSKVARIVDMYARRLQIQENLCLQIAEAVQQVTDALGVAVVIEAQHMCMMMRGVEKQNSSMVSSVMLGAFRENPSTRAEFLELIR

SEQ ID NO: 12713 - protein, 181 aa, Pigmentiphaga sp.; identical to SEQ ID NO: 12711
  misc_feature (1)..(181): tr|A0A3G8GPC5|A0A3G8GPC5_9BURK GTP cyclohydrolase 1 OS= Pigmentiphaga sp. H8 OX=2488560 GN=folE PE=3 SV=1

SEQ ID NO: 12714 - protein, 201 aa, Pimelobacter sp.
  misc_feature (1)..(201): tr|A0A2E0MUE1|A0A2E0MUE1_PIMSR GTP cyclohydrolase 1 OS= Pimelobacter sp. (strain R48) OX=51662 GN=folE PE=3 SV= 1
MALPEQDVATVPDFDHERAAAAVRELLHAIGEDPDREGLRETPDRVARAYAELTAGLRERPEDVLTTTFDLGHEEMVLVRDIELWSMCEHHLVPFTGVAHVGYIPAASGKITGLSKLARLVDVYAKRPQVQERLTTQVAEALMRILDARGVIVVIEAEHLCMTMRGVRKAGARTITSAVRGVMLTSSSTRAEAMALIHHHR

SEQ ID NO: 12715 - protein, 221 aa, Pirellula sp.
  misc_feature (1)..(221): tr|A0A142Y4V3|A0A142Y4V3_9PLAN GTP cyclohydrolase 1 OS= Pirellula sp. SH-Sr6A OX=1632865 GN=folE PE=3 SV=1
MISKPTHPVLDQGEESVAIPLRSSKSHNETKSPVDHKRIERAVREILIAVGEDPDREGLLETPARVARMYAEVFAGLHKDPRVHLSRVFTEGYDEIVLLKDIDFHSMCEHHLLPFHGRAHVGYLPNGKVVGLSKMARVVDEVARKPQVQERMTETIADMMEQELGARGVVVMIEASHSCMTMRGIKKSGGMCVTSAMRGVFRENLSSRAEILGLIMNQRHG

SEQ ID NO: 12716 - protein, 260 aa, Pirellula sp.
  misc_feature (1)..(260): tr|A0A142Y240|A0A142Y240_9PLAN GTP cyclohydrolase 1 typ e 2 OS=Pirellula sp. SH-Sr6A OX=1632865 GN=VN12_12050 P E=4 SV=1
MTNLNEVLDFLDCIAPLRTAEDWDNVGLLLGDPKDKVGKVMTCLTITDSVLQEAVGMGIDLLVTHHPLPFKPLQRITSSTTTGRLLLDAARNRIAIYSPHTAWDNADEGINAQLANMVELTQVQPMVRRMVAGTPIGSGRKGAFTEPASMEEIRERLSRHLPEMQWRCTHESNHSIRSMGIMCGGGGSLIAAAKSEGCEALLTGEATYHQCLEAEASGIALLLIGHFASEAFAMKKLATMIAASFPDLLVQASAMERSTF

SEQ ID NO: 12717 - protein, 191 aa, Pirellula staleyi
  misc_feature (1)..(191): tr|D2R3Q5|D2R3Q5_PIRSD GTP cyclohydrolase 1 OS=Pirellul a staleyi (strain ATCC 27377 / DSM 6068 / ICPB 4128) OX =530564 GN=folE PE=3 SV=1
MKSPVDLQRIERAVREILAAVGEDPDREGLLETPARVARMYAEMFSGLKLDPREHTRKFFTEQYDEVVLVRDISFCSMCEHHLLPFIGHAHVAYIPNGKVIGLSKIARVVEVISRRPQVQERMTEDIANLLVDELHAKGVAVVVEASHSCMTIRGVRKPGSSMVTSAMKGLFRSNLSTRAEVMQLIYGSKR

SEQ ID NO: 12718 - protein, 307 aa, Piscibacillus halophilus
  misc_feature (1)..(307): tr|A0A1H9IHD9|A0A1H9IHD9_9BACI GTP cyclohydrolase FolE2 OS=Piscibacillus halophilus OX=571933 GN=folE2 PE=3 SV =1
MNEIKTKKQLPSKEERHKLFGSVEPGPRTKPEEKSKMPDLQNTKKDFLFELDAVGVQNVKHPIVVPSTLNPKEQSTIGNFYFASTISQDSKGTNMSRFTEQLNVYHANGFKVDIKTLKQFVKELQGRLKQKDAELSVEFPWFFEREAPYTGKSGMNHAEAWIKVNYHHENGYDVKVGLKGKITTLCPCSKEISEYSAHNQRGNVIIEVTLDPDYDETNIDWKEVLLEATESNASARIHPVLKRPDEKMVTEQAYENPRFVEDMVRLVSSDLYELDFVKQFHVKCVNEESIHLHDAIASITYDKRKEK

SEQ ID NO: 12719 - protein, 273 aa, Piscirickettsia litoralis
  misc_feature (1)..(273): tr|A0A1E3G9K2|A0A1E3G9K2_9GAMM GTP cyclohydrolase FolE2 OS=Piscirickettsia litoralis OX=1891921 GN=folE2 PE=3 SV=1
MRNDMPTASIADIQSSEDPRNIPINHVGIRQVRHPIQVSDRSNTVLGTVGTFNMYVDLPAHVKGTHMSRFVALLHESETAYSVQNFNSLALEMAERLQAQKGRIEMQFAYFRKKTAPISQQQSYLDYEVTFLGKANNGKASTHLKVVVPVTSLCPCSKAISKYGAHNQRSHITVEIETCDLVWIDDLIELVEAQASSELYGLIKRADEKYVTETAYENPKFVEDLVRDVAEQLNNDKRITAYKVESENFESIHNHSAYAVIEQRKEEASSTSI

SEQ ID NO: 12720 - protein, 271 aa, Piscirickettsia salmonis
  misc_feature (1)..(271): tr|A0A0K2L4W7|A0A0K2L4W7_PISSA GTP cyclohydrolase FolE2 OS=Piscirickettsia salmonis OX=1238 GN=folE2 PE=3 SV=1
MPTSSIADIQNLEDPRNIPINHVGIRQVRHPIQISDRSHAVLGTVGTFKMYVDLPAHIKGTHMSRFIALLHEHEQTAYSVQNFNQLTLAMTERLQAQKGLIEMQFTYFRKKTAPISQQQSYLDYEVTFLGKADGNNAQTNLRVVIPVTSLCPCSKAISKYGAHNQRSHITVEIETCDLVWVDDLIELAEAQASSELYGLIKRADEKYVTETAYENPKFVEDLVRDVAEQLNHDQRISAYKVESENFESIHNHSAYAVIEQRKKPNTDSRRF

SEQ ID NO: 12721 - protein, 252 aa, Piscirickettsia salmonis
  misc_feature (1)..(252): tr|A0A0K2DUX5|A0A0K2DUX5_PISSA Nif3-like dinuclear meta l center hexameric protein OS=Piscirickettsia salmonis OX=1238 GN=KW89_659 PE=4 SV=1
MIGLFELVDYLNDLLEVKLFKDYAPNGLQVEGKKQIKRLITGVTATQALIDAAIDEHADAILVHHGFFWKSESPCVTGIKYQRLKKLLENDISLIAYHLPLDGHEKYGNNVMLAERLGLEITGSLPVSMKPAIGNIGQLKKAMQIEAFSGLLHQHLLREPIVVRAGDHAIKTVAWCTGAAESFIEAAATLQADAYVTGEISEPVVHLARELGVHFFAAGHHATERYGVQALGQHVQNHYGIEHLFIDIDSPA

SEQ ID NO: 12722 - protein, 182 aa, Piscirickettsiaceae bacterium
  misc_feature (1)..(182): tr|A0A2A4SPU0|A0A2A4SPU0_9GAMM GTP cyclohydrolase 1 OS= Piscirickettsiaceae bacterium OX=2030828 GN=folE PE=3 S V=1
MEDLYKKIILEIGEDVERQGLVDTPKRAAKAMTFLTSGYQKNIHDVVNGAVFNSAADDMVIVQNIELYSMCEHHLLPFIGKCHVAYLPSGKVLGLSKVARIVDMFARRLQIQEQLTTQIADSILEVTGAKGVAVVVEAKHLCMMMRGVEKQNSLMTTSSMLGQFRKNAETRAEFLSLLKMSS

SEQ ID NO: 12723 - protein, 316 aa, Piscirickettsiaceae bacterium
  misc_feature (1)..(316): tr|A0A2M7M914|A0A2M7M914_9GAMM GTP cyclohydrolase FolE2 OS=Piscirickettsiaceae bacterium CG_4_10_14_3_um_filte r_44_349 OX=1974075 GN=folE2 PE=3 SV=1
MTKHMPDIACQPHQAPQGKLNWVGMSGIELPILIEQAHQKTLTLSSQAQAYVSLDDPLSKGIHMSRLYLLLDEMGSNAPLTPKRILTLLNTFIDSHQGLSQNAFVEFKFDYYERRQSLKTDNSGWKHYPCTLRGQLRNGQYDCEISISVPYSSTCPCSAALSRQLIQEAFQQQFSDQTLDFQQIIDWLGTPEGICATPHSQRSYAQIKLKVTADHALNLSNVINQIEDAVKTPVQSTVKRQDEQEFARLNATNLMFCEDAARRLQSKLESCSDYIDYWVRVNHLESLHPHNAVAIVTKNVPSGYSDEPNFMDAFEH

SEQ ID NO: 12724 - protein, 185 aa, Pistricoccus aurantiacus
  misc_feature (1)..(185): tr|A0A5B8T039|A0A5B8T039_9GAMM GTP cyclohydrolase 1 OS= Pistricoccus aurantiacus OX=1883414 GN=folE PE=3 SV=1
MTEQLAEHYRQIISALGEDPDREGLRDTPKRAAKAMQFLTHGYEQSLETLINGAIFESNTDEMVLVKDIELYSMCEHHLLPFIGKCHIAYMPRGRVLGLSKFARIVDMYARRMQIQEKLTREIAEAVLRVTQARGVAVVIEARHLCMMMRGVEKQNSSMTSSVMLGAFRDNQSTRQEFLTLVRSN

SEQ ID NO: 12725 - protein, 197 aa, Planctomicrobium piriforme
  misc_feature (1)..(197): tr|A0A1I3G749|A0A1I3G749_9PLAN GTP cyclohydrolase 1 OS= Planctomicrobium piriforme OX=1576369 GN=folE PE=3 SV=1
MSEETASQGKPVDQPRIERAVREILAAIGEDPDRNGLLETPARVARMYAELFSGLHLDPARHLKKTFEETYDELVLIRDITFNSMCEHHLLPFIGTAHVGYIPKGSVVGISKLARIVEEISHRPQVQERMTEQIADLLVQELDPKGAIVVIEAEHSCMTIRGVRKPGAMTITSAVRGLFRKNESSRAEAMSLINGHR

SEQ ID NO: 12726 - protein, 196 aa, Planctomyces sp.
  misc_feature (1)..(196): tr|A0A142YE19|A0A142YE19_9PLAN GTP cyclohydrolase 1 OS= Planctomyces sp. SH-PL62 OX=1636152 GN=folE PE=3 SV=1
MSESTPHHPFDLDRIRRAVREILLAVGEDPNREGLLETPDRVARMYAEVFQGLHQDPRIHLRKAFTHKCDEMVLIRDIRFVSFCEHHLLPVIGQAHVAYIPNGKVVGLSKIPRVIDVLAKRPQLQERLTEEVADLLMRELDARGVAVVIEASHSCMTIRGVQKPDSSFVTSAVRGGFKDDSATRAEVMSLIFGSRR

SEQ ID NO: 12727 - protein, 289 aa, Planctomyces sp.
  misc_feature (1)..(289): tr|A0A142WXA2|A0A142WXA2_9PLAN Putative GTP cyclohydrol ase 1 type 2 OS=Planctomyces sp. SH-PL14 OX=1632864 GN= VT03_15475 PE=4 SV=1
MSLREADYNQEGVALLATRIGRSRMRRVQDIMTFLEQFAPLQLAESWDNVGLLLGDRERTVSRVMTCLTLTPDVAEEAVDDKAQLIICHHPILFRAVKRLTSDTDEGRMLLQLMESRIAVYSPHTAFDSAAEGINASIAAGLKLEEVRPLRPHAIDPEGAVGGGRCGRLAMPIALRELIARAKKLLSAPAAKVVGDLNYPVQSVAIACGSGAEFLPDAVRAGCDVLITGEARFHACLEARSGPTALVLLGHYATERPGVERLAVQIAEKFAKITCWPSRKETDPVRWVG

SEQ ID NO: 12728 - protein, 217 aa, Planctomycetaceae bacterium
  misc_feature (1)..(217): tr|A0A1Z8MU34|A0A1Z8MU34_9PLAN GTP cyclohydrolase 1 OS= Planctomycetaceae bacterium TMED10 OX=1986833 GN=folE P E=3 SV=1
  misc_feature (208)..(208): Xaa can be any naturally occurring amino acid
MSISKEADQPMEGSLMGELDDREAGPSVGGVDHARIERAVREILWAVGENPDREGLVETPARVARMYAEVFSGLHEDPRPHLQKFFTETYDDIVLVRDISFNSFCEHHLCPFGGKAHIGYVPSGKVVGLSKLARVVEIVARRPQVQERMTETVADLLEDELDARGVAVVIEATHTCMTLRGVRKPGSLCVTSSMKGLFRQNASSRAEXMSLIYTNRR

SEQ ID NO: 12729 - protein, 229 aa, Planctomycetaceae bacterium
  misc_feature (1)..(229): tr|A0A350C7W6|A0A350C7W6_9PLAN GTP cyclohydrolase 1 OS= Planctomycetaceae bacterium OX=2026779 GN=folE PE=3 SV= 1
MTMSIAVREMTVGDSWGDDHEQMEELSSRRATESREKTDSKVDHQAIRQAVRMILKAVGEDPDREGLLETPRRVAKMYEEMFAGLHLDPGRHLSVTFEETYDEIVLVKNIEFTSMCEHHLLPFRGVAHVAYIPNGRVTGLSKLARLVEEVARRPQVQERMTKTIADLLEERLGTSAVGVVVQAEHSCMSMRGVRKQGSMTVTSAMRGTFSRNAASRAELLSLIHGNSGR

SEQ ID NO: 12730 - protein, 190 aa, Planctomycetales bacterium
  misc_feature (1)..(190): tr|A0A1W9TB69|A0A1W9TB69_9BACT GTP cyclohydrolase 1 OS= Planctomycetales bacterium 4572_13 OX=1971638 GN=folE P E=3 SV=1
MKEVDLERIEKAVLEILEAVGEDPTREGLKDTPARVGRMYAELLEGMRHDPSEHLSSIFHETYDEIVLLRDIPFYSICEHHLMPFIGKAHLAYLPDGKVLGVSKLARIVDAFARRLQVQERLTDQIADFLMTNLKPKGVAVILEASHSCMTIRGIKKPGSMMVTSALRGIFKKDPRSRSEVLTLMHVDRA

SEQ ID NO: 12731 - protein, 195 aa, Planctomycetales bacterium
  misc_feature (1)..(195): tr|A0A1V4QWE5|A0A1V4QWE5_9BACT GTP cyclohydrolase 1 OS= Planctomycetales bacterium 4484_113 OX=1956161 GN=folE PE=3 SV=1
MSTKAIDRKRIERAVREILLAIGEDPEREGLRETPRRVAEMYEDILGGVREDGYELIRASLFTEKHSELVLLRGISFFSICEHHLLPFMGVAHIAYIAKGQIVGLSTILRAFSQLCRQPQIQERLTWQMADMMYDTLKPHGVAVVLEARHLCMELIGVKKPGTIVTTSALRGIFHKNEGSRQELFKLIQGRDKVV

SEQ ID NO: 12732 - protein, 280 aa, Planctomycetes bacterium
  misc_feature (1)..(280): tr|A0A5C6EME7|A0A5C6EME7_9BACT GTP cyclohydrolase 1 typ e 2 OS=Planctomycetes bacterium Poly59 OX=2528013 GN=Po ly59_41400 PE=4 SV=1
MATLDAVCTIMARVAPLRLAESWDNVGLLAGDRAAKVEKIMACLTITPDVVDEAIAQNADLIVVHHPLPFKPMAKITTDSIPGAMLWKLIGAKIAIYSAHTAFDSATGGVNQMWAEALGLDRIRPLVELPIAAGTKQVGSSIVAVSSGQTVEGSGRYGRLPSPVTLESLASMAGEVSGGPRPRLVGAADQSVQAVAFACGSGGSFLAAAKRRGCHALVTGEATFHTCLEARSMGIGLVLLGHFHSERFAMERLSEALAAELPDLTVWASRDECDPLQQAD

SEQ ID NO: 12733 - protein, 187 aa, Planctomycetes bacterium
  misc_feature (1)..(187): tr|A0A1G2ZUZ0|A0A1G2ZUZ0_9BACT GTP cyclohydrolase 1 OS= Planctomycetes bacterium RBG_16_41_13 OX=1801966 GN=fol E PE=3 SV=1
MIDKEKIQAAIRLFIEGIGEDPNREGLQETPERVAEMCEEIFAGIGQDSHSVIKVLKSEKYDEIVLLKDIPFYSMCEHHLLPFSGVAHVAYIPQGNRVTGISKLARVVNIEARRPQVQERLTTDIAESIMKALKPKGVLTIIEAEHLCMTMRGIKKPGTKVLTSVVRGIFRDNPATRAEVMALIKGH

SEQ ID NO: 12734 - protein, 114 aa, Planctomycetia bacterium
  misc_feature (1)..(114): tr|A0A257TWE8|A0A257TWE8_9BACT GTP cyclohydrolase 1 OS= Planctomycetia bacterium 21-64-5 OX=1970542 GN=B7Z73_07 575 PE=3 SV=1
MCEHHMLPFLGEAHIGYLPAGKVIGLSKLARVVEMVARRPQVQERMTETIADLLVDELEAKGVAVVIEATHTCMTIRGIRKPGSLCVTSAMRGVFRSHLSSRSEIMNLIYGDRR

SEQ ID NO: 12735 - protein, 206 aa, Planctomycetia bacterium
  misc_feature (1)..(206): tr|A0A3D3KKF5|A0A3D3KKF5_9BACT GTP cyclohydrolase 1 OS= Planctomycetia bacterium OX=2052181 GN=folE PE=3 SV=1
  misc_feature (179)..(179): Xaa can be any naturally occurring amino acid
MDQEKIIKAMRLFLEGIGEDPDRPGLQETPKRVADMCKEIFGGLGVDAGKEIKVLQATGHDEIVLLKDLPFYSVCEHHVLPFIGTAHVAYIPQSGRITGISKLARVVELHAKKLQVQERLTTDIADSIMNALRPKGVLVVIQAEHLCMTMRGVKKAGSKVQTSVVRGIFRENPATRAEXRVSLRAKRSNPRLVCRCPIYGAIIMAR

SEQ ID NO: 12736 - protein, 247 aa, Planctopirus ephydatiae
  misc_feature (1)..(247): tr|A0A518GMT5|A0A518GMT5_9PLAN GTP cyclohydrolase 1 OS= Planctopirus ephydatiae OX=2528019 GN=folE PE=3 SV=1
MIMADEYSDDDGDCIHGKATLPHGSGSAIDVLGDSSQTQLLTSCHSSALPPSPRETRAEPDLPRIQRAVREILSAIGENPDREGLQETPARVARMFAELTAGLRCDPARHLERVFPEQYDELVLVKDISFNSMCEHHLLPFMGVAHIGYLPRGKVVGLSKLARIVDEISHQPQVQERMTQQIADLMQSVLDPKGVIVVLEATHTCMTIRGIRKPGSLTITSAVRGLFKTNQASRAEVMSLMQQRRSV

SEQ ID NO: 12737 - protein, 222 aa, Planctopirus hydrillae
  misc_feature (1)..(222): tr|A0A1C3E619|A0A1C3E619_9PLAN GTP cyclohydrolase 1 OS= Planctopirus hydrillae OX=1841610 GN=folE PE=3 SV=1
MPHGSGSAIDVLGDSGQTQLVTSGHSSALPPSPRETRAEPDLPRIQRAVREILSAIGENPDREGLQETPARVARMFAELTAGLRCDPARHLERVFPEQYDELVLVKDISFNSMCEHHLLPFMGVAHIGYLPRGKVVGLSKLARIVDEISHQPQVQERMTQQIADLMQSVLDPKGVIVVLEATHTCMTIRGIRKPGSLTITSAVRGLFKTNQASRAEVMSLMK

SEQ ID NO: 12738 - protein, 227 aa, Planctopirus limnophila
  misc_feature (1)..(227): tr|D5SRR0|D5SRR0_PLAL2 GTP cyclohydrolase 1 OS=Planctop irus limnophila (strain ATCC 43296 / DSM 3776 / IFAM 10 08 / 290) OX=521674 GN=folE PE=3 SV=1
MPHGSNSAIDVLGDNSQTQLLTSSHSSALPPSPREMRAEPDLPRIQRAVREILSAIGENPDREGLQETPARVARMFAELTAGLRCDPARHLERVFPEQYDELVLVKDISFNSMCEHHLLPFMGVAHIGYLPRGKVVGLSKLARIVDEISHQPQVQERMTQQIADLMQSVLDPKGVIVVLEATHTCMTIRGIRKPGSLTITSAVRGLFKTNQASRAEVMSLMQQRRSV

SEQ ID NO: 12739 - protein, 188 aa, Planifilum fimeticola
  misc_feature (1)..(188): tr|A0A2T0LDF9|A0A2T0LDF9_9BACL GTP cyclohydrolase 1 OS= Planifilum fimeticola OX=201975 GN=folE PE=3 SV=1
MGVDHAKIEQAVRMILEAVGEDPDREGLVETPARVARMYEEIFSGLGQDPRDHFTVIFSEDHEELVLVKDIPFFSVCEHHLVPFFGKAHVGYIPRGGRVTGLSKLARAVEAVARRPQLQERITSTVADAIMERLEPHGVVVVVEAEHMCMTMRGVKKPGSKTVTSAVRGVFSQDAAARAEAFSLIGYR

SEQ ID NO: 12740 - protein, 188 aa, Planifilum fulgidum
  misc_feature (1)..(188): tr|A0A1I2L826|A0A1I2L826_9BACL GTP cyclohydrolase 1 OS= Planifilum fulgidum OX=201973 GN=folE PE=3 SV=1
MGVDHAKIEQAVRMILEAVGEDPDREGLVETPARVARMYEEIFSGLGQDPRDYFSVIFSEDHEELVLVKDIPFFSVCEHHLVPFFGKAHVGYIPRGGRVTGLSKLARAVEAVARRPQLQERITSTVADAIMERLEPHGVVVVVEAEHMCMTMRGVKKPGSKTVTSAVRGIFSRDAAARAEAFSLIGYR

SEQ ID NO: 12741 - protein, 367 aa, Planktomarina sp.
  misc_feature (1)..(367): tr|A0A2E0AF94|A0A2E0AF94_9RHOB GTP cyclohydrolase FolE2 OS=Planktomarina sp. OX=2024851 GN=folE2 PE=3 SV=1
MNIHSKDIDEVPSRLNAEQALKVLKSWSNRPGRDKIDDLDISIQNFFNGSLRNGYPDFVRSYPEDFAVDQAYKDGLPDLQNGPSSSIRGALQQIQHVGVSNFRLPVSFQTRDNGTLQLETSVTGTVSLDAGKKGINMSRIMRTFYRYAEETFSFDVIERALDDYKTDLESFDARIQMRFSFPVLVKSLRSELTGYQYYDLTLELVEINGDRQKIVHLDYVYSSTCPCSLELSEHARSERGQLASPHSQRSVARISVVIQPNQGCLWFEDLIDLCRRAVPTETQVMVKREDEQAFAELNAANPIFVEDAARLFCEQLQVEPRVGDFRVIASHQESLHSHDAISVLTDGVTFSQKSLDPGTFESLFHTG

SEQ ID NO: 12742 - protein, 363 aa, Planktotalea frisia
  misc_feature (1)..(363): tr|A0A1L9NYW7|A0A1L9NYW7_9RHOB GTP cyclohydrolase FolE2 OS=Planktotalea frisia OX=696762 GN=folE2 PE=3 SV=1
MNIQTPVADEIATREEAQAALVALMSWARGASTQELNAIDPKLRALIGSNEYPDLINDYPENFVVDPAYKATLPDLQNGPSSLIRGSQQLIQHVGISNFPLPIRFHTKHGNDLTLETSVTGTVSLDADKKGINMSRIMRTFYRRAEETFSFDVIEAALDDYKSDLESFDARLQMRFSFPVKIESLRSGLSGYQYYDISMELAEQNGVRQKFMHVDYVYSSTCPCSLELSEHARRTRGQLATPHSQRSVARISVELIGKSILWFEDLIDHCRKAVPTETQVMVKREDEQAFAELNAANPIFVEDAARLFCEQLLKDERIGDFRVVASHQESLHSHDAVSILTEGPSFAATSIDPKLFSTLFHVG

SEQ ID NO: 12743 - protein, 236 aa, Planktothricoides sp.
  misc_feature (1)..(236): tr|A0A0M1JRI7|A0A0M1JRI7_9CYAN GTP cyclohydrolase 1 OS= Planktothricoides sp. SR001 OX=1705388 GN=folE PE=3 SV= 1
MTIASSHGSNLRFDLSDSLNGDRRIQTRPDRNLANGSNPNLHPPTDEDYERMVGAVKDILLSVGEDPQREGLLKTPKRVAESMRFLTSGYSQSLEELVNGAIFDEGHNEMVLVRDINFFSLCEHHMLPFMGKAHVAYIPNQKVVGLSKLARIVEMFSRRLQVQERLNRQVAEAIQEILEPRGVAVVMEASHMCMVMRGVQKPGSWTVTSAMLGIFSEDQKTREEFLNLIRHQPAFF

SEQ ID NO: 12744 - protein, 229 aa, Planktothrix agardhii
  misc_feature (1)..(229): tr|A0A2Z6CDF6|A0A2Z6CDF6_PLAAG GTP cyclohydrolase 1 OS= Planktothrix agardhii NIES-204 OX=282423 GN=folE PE=3 S V=1
MTISTNTNGVKNEDTTGFSIRPDRTLSYSQSTPSQLCTEVSDEEMMGAVRTMLLGVGEDPEREGLLKTPKRVAEAMRFLTSGYSQSLEDLVNGAIFDEGHEEMVLVRDITFFSMCEHHMLPFMGRAHVAYIPNQKVIGLSKLARIVEMYSRRLQVQERLTRQIAEAVQSVLEPQGVAIVMEATHMCMAMRGVQKPGSWTVTSAMVGVFQDEQKTREEFLNLIRHQPSFF

SEQ ID NO: 12745 - protein, 212 aa, Planktothrix agardhii
  misc_feature (1)..(212): tr|A0A073CM09|A0A073CM09_PLAAG GTP cyclohydrolase 1 OS= Planktothrix agardhii NIVA-CYA 126/8 OX=388467 GN=folE PE=3 SV=1
MTSELKFPLIDSSISVKTQGEPVVSEAEMIQAVRTLLLGLGENPDREGLLDTPKRVVKALKFLTQGYNQSLDELLNGAVFTENTDEMVLVRDIDIFSSCEHHILPIIGRAHVAYIPNGKVIGLSKIARICEMYGRRLQVQERLTAQIADALQGLLKPQGVAVVIEATHMCMVMRGVQKPGSWTVTSAMRGAFSEDPKTRQEFMSLIQHKSNF

SEQ ID NO: 12746 - protein, 229 aa, Planktothrix rubescens; identical to SEQ ID NO: 12744
  misc_feature (1)..(229): tr|A0A1J1L639|A0A1J1L639_PLARU GTP cyclohydrolase 1 OS= Planktothrix rubescens OX=59512 GN=folE PE=3 SV=1

SEQ ID NO: 12747 - protein, 212 aa, Planktothrix rubescens
  misc_feature (1)..(212): tr|A0A1J1L3L5|A0A1J1L3L5_PLARU GTP cyclohydrolase 1 OS= Planktothrix rubescens OX=59512 GN=folE PE=3 SV=1
MTSELTFPFIDSSISVKTQGEPVVSEAEMIQAVRTLLLGLGENPDREGLLDTPKRVVKALKFLTQGYNQSLDELLNGAVFTENTDEMVLVRDIDIFSSCEHHILPIIGRAHVAYIPNGKVIGLSKIARICEMYGRRLQVQERLTAQIADALQGLLKPQGVAVVIEATHMCMVMRGVQKPGSWTVTSAMRGAFSEDPKTRQEFMSLIQHKSNF

SEQ ID NO: 12748 - protein, 229 aa, Planktothrix sp.
  misc_feature (1)..(229): tr|A0A1T4ZC89|A0A1T4ZC89_9CYAN GTP cyclohydrolase 1 OS= Planktothrix sp. PCC 11201 OX=1729650 GN=folE PE=3 SV=1
MTISSNTNGLKNEDKTGFSIRPDRTLSYSQSTHSQLDSEVSDEEMMNAVRTMLLGVGEDPEREGLLKTPKRVAEAMRFLTSGYNQSLEDLVNGAIFDEGHEEMVLVRDITFFSMCEHHMLPFMGRAHVAYIPNQKVIGLSKLARIVEMYSRRLQVQERLTRQIAESIQTVLEPQGVAVVMEATHMCMAMRGVQKPGSWTVTSAMVGVFQDEQKTREEFLNLIRHQPAFF

SEQ ID NO: 12749 - protein, 151 aa, Planktothrix sp.
  misc_feature (1)..(151): tr|A0A354WFA6|A0A354WFA6_9CYAN GTP cyclohydrolase 1 (Fr agment) OS=Planktothrix sp. UBA10369 OX=2055760 GN=DDZ6 0_13255 PE=3 SV=1
MTSELKFPLIDSSISVKTQGEPVVSEAEMIQAVRTLLLGLGENPDREGLLDTPKRVVKALKFLTQGYNQSLDELLNGAVFTENTDEMVLVRDIDIFSSCEHHILPIIGRAHVAYIPNGKVIGLSKIARICEMYGRRLQVQERLTAQIADAL

SEQ ID NO: 12750 - protein, 239 aa, Planktothrix tepida
  misc_feature (1)..(239): tr|A0A1J1LF19|A0A1J1LF19_9CYAN GTP cyclohydrolase 1 OS= Planktothrix tepida PCC 9214 OX=671072 GN=folE PE=3 SV= 1
MTISPSTNGVKNLEISITEAKNEDTSGFPIRPDRTLSHGHSTHSQPCTEVSDEQMMDAVRTMLLGVGEDPEREGLLKTPKRVAEAMRFLTSGYNQSLEDLVNGAIFDEGHEEMVLVRDITFFSMCEHHMLPFMGRAHVAYIPNQKVIGLSKLARIVEMYSRRLQVQERLTRQIAEAIKTILEPQGVAVVMEATHMCMAMRGVQKPGSWTVTSAMVGLFQDEQKTREEFLNLIRHQPAFF

SEQ ID NO: 12751 - protein, 303 aa, Planococcus antarcticus
  misc_feature (1)..(303): tr|A0A1C7DE92|A0A1C7DE92_9BACL GTP cyclohydrolase FolE2 OS=Planococcus antarcticus DSM 14505 OX=1185653 GN=fol E2 PE=3 SV=1
MEGVKKVKFPSKAERLVLFGSKPPGPRNKPVEKEEMKDLQNQSGKYLFPIQAVGVSNVKYPIGISSSLDPAKQQALATFSLTASLSSSMKGTNMSRFIEQLEETRVAGELTADFESLTELSRKLAWRLNQQEVCVRVEFPLLFARKGPSTHLEGLNHAQATMEVNKVESSTRKKAILTCAVTTLCPCSKEISEYSAHNQRGYITMEIELNERYTEGWDWKADLLEAAESNASALIHPVLKRPDEKMVTENAYENPRFVEDMVRLVAADLYEIDYIDRFRVECRNEESIHLHDAYAELTVSKNT

SEQ ID NO: 12752 - protein, 194 aa, Planococcus antarcticus
  misc_feature (1)..(194): tr|A0A1C7DGY1|A0A1C7DGY1_9BACL GTP cyclohydrolase 1 OS= Planococcus antarcticus DSM 14505 OX=1185653 GN=folE PE =3 SV=1
MIDVKAQKVDLDKIEQAVLMILEAVGEDVNREGLKDTPKRVAKMYAEVFAGLKEDPREYFKTIFHEGHEELVLVKDIPFYSMCEHHLVPFFGKAHIAYIPRDGIVTGLSKLARAVETVAKRPQLQERITSTIADSLMETLNPHGVYVMIEAEHMCMTMRGIKKPGSKTVTAVSRGVFETDDVKRSEVITYINMN

SEQ ID NO: 12753 - protein, 194 aa, Planococcus citreus
  misc_feature (1)..(194): tr|A0A497YHQ4|A0A497YHQ4_9BACL GTP cyclohydrolase 1 OS= Planococcus citreus OX=1373 GN=folE PE=3 SV=1
MIDMKSHNVDLDKIEQAVGMILEAVGEDVGREGLQDTPKRVAKMYAEVFAGLKEDPKEYFRTVFHENHEELVLVKDIPFYSMCEHHLVPFFGKAHIAYIPRDGVVTGLSKLARAVETVAKRPQLQERITSTIADSMMETLNPHGVYVMVEAEHMCMTMRGIKKPGSKTVTAVSRGILETDDIKRSEVITYINMD

SEQ ID NO: 12754 - protein, 175 aa, Planococcus donghaensis
  misc_feature (1)..(175): tr|A0A1C7ELV9|A0A1C7ELV9_9BACL GTP cyclohydrolase 1 OS= Planococcus donghaensis OX=414778 GN=folE PE=3 SV=1
MILEAVGEDVSREGLQDTPKRVAKMYAEVFSGLKEDPKEYFKTVFHEGHEELVLVKDIPFYSMCEHHLVPFFGKAHIAYIPRDGVVTGLSKLARAVETVSKRPQLQERITSSIAESLMETLNPHGVYVMVEAEHMCMTMRGIKKPGAKTVTAVSRGILETDAVKRSEVITYINMN

SEQ ID NO: 12755 - protein, 194 aa, Planococcus donghaensis
  misc_feature (1)..(194): tr|E7RHC9|E7RHC9_9BACL GTP cyclohydrolase 1 OS=Planococ cus donghaensis MPA1U2 OX=933115 GN=folE PE=3 SV=1
MIDVKAQKVDLDKIEQAVSMILEAVGEDISREGLQDTPKRVAKMYAEVFSGLKEDPKEYFKTVFHEGHEELVLVKDIPFYSMCEHHLVPFFGKAHIAYIPRDGVVTGLSKLARAVETVSKRPQLQERITSSIAESLMETLNPHGVYVMVEAEHMCMTMRGIKKPGAKTVTAVSRGILETDAVKRSEVITYINMN

SEQ ID NO: 12756 - protein, 175 aa, Planococcus halocryophilus
  misc_feature (1)..(175): tr|A0A1C7DW37|A0A1C7DW37_9BACL GTP cyclohydrolase 1 OS= Planococcus halocryophilus OX=1215089 GN=folE PE=3 SV=1
MILEAVGEDTSREGLQDTPKRVAKMYAEVFSGLKEDPKEYFKTVFHEGHEELVLVKDIPFYSMCEHHLVPFFGKAHIAYIPRDGVVTGLSKLARAVETVSKRPQLQERITSSIAESLMETLNPHGVYVMVEAEHMCMTMRGIKKPGAKTVTAVSRGILETDAVKRSEVITYINMN

SEQ ID NO: 12757 - protein, 204 aa, Planococcus halotolerans
  misc_feature (1)..(204): tr|A0A365L2N3|A0A365L2N3_9BACL GTP cyclohydrolase 1 OS= Planococcus halotolerans OX=2233542 GN=folE PE=3 SV=1
MNSSFTGGTIVTDTELQNVDLEKIEKAVSMILEAVGEDISREGLLDTPKRVAKMYAEVFSGLKEDPKEYFKTVFHEGHEELVLVKDIPFYSMCEHHLVPFFGKAHIAYIPRDGVVTGLSKLARAVETVAKRPQLQERITSTIADSMMETLNPHGVFVMVEAEHMCMTMRGVKKPGATTVTAVARGILETDAIKRSEVITYINKN

SEQ ID NO: 12758 - protein, 194 aa, Planococcus kocurii
  misc_feature (1)..(194): tr|A0A0U2NAE6|A0A0U2NAE6_9BACL GTP cyclohydrolase 1 OS= Planococcus kocurii OX=1374 GN=folE PE=3 SV=1
MIDVKAQKVDLAKIEKAVSMILEAVGEDVDREGLADTPKRVAKMYAEVFSGLKEDPKEYFKTVFHEGHEELVLVKDIPFYSMCEHHLVPFFGKAHIAYIPRDGIVTGLSKLARAVETVSKRPQLQERITSTIADSLMETLNPHGVYVMVEAEHMCMTMRGIKKPGAKTVTAVSRGVLETDTIKRSEVITYINMN

SEQ ID NO: 12759 - protein, 194 aa, Planococcus maitriensis
  misc_feature (1)..(194): tr|A0A365KBX8|A0A365KBX8_9BACL GTP cyclohydrolase 1 OS= Planococcus maitriensis OX=221799 GN=folE PE=3 SV=1
MIDIKSHNVDLDKIEQAVGMILEAVGEDVGREGLQDTPKRVAKMYAEVFAGLKEDPKEYFRTVFHENHEELVLVKDIPFYSMCEHHLVPFFGKAHIAYIPRDGVVTGLSKLARAVETVAKRPQLQERITSTIADSMMETLNPHGVYVMVEAEHMCMTMRGIKKPGSKTVTAVARGLLETDDIKRSEVITYINMD

SEQ ID NO: 12760 - protein, 191 aa, Planococcus maritimus
  misc_feature (1)..(191): tr|A0A150WBD4|A0A150WBD4_PLAMR GTP cyclohydrolase 1 OS= Planococcus maritimus OX=192421 GN=folE PE=3 SV=1
MKSHNVDLEKIEQAVGMILEAVGEDVGREGLQDTPKRVAKMYAEVFAGLKEDPKEYFRTVFHENHEELVLVKDIPFYSMCEHHLVPFFGKAHIAYIPRDGVVTGLSKLARAVETVAKRPQLQERITSTIADSMMETLNPHGVYVMVEAEHMCMTMRGIKKPGSKTVTAVARGVLETDDIKRSEVITYINMD

SEQ ID NO: 12761 - protein, 194 aa, Planococcus massiliensis
  misc_feature (1)..(194): tr|A0A098ELC6|A0A098ELC6_9BACL GTP cyclohydrolase 1 OS= Planococcus massiliensis OX=1499687 GN=folE PE=3 SV=1
MIDLDSQKVDLDKIEKAVTMILEAVGEDPGREGLLDTPKRVAKMYAEIFSGLKEDPKEYFKTVFHEGHEELVLVKDIPFYSTCEHHLVPFFGKAHIAYIPRDGVVTGLSKLARAVETVAKRPQLQERITSTVADSLMETLNPHGVYVMIEAEHMCMTMRGIKKPGAKTVTAVSRGIFEADDVKRAEVMTYINMN

SEQ ID NO: 12762 - protein, 191 aa, Planococcus plakortidis
  misc_feature (1)..(191): tr|A0A1C7ED52|A0A1C7ED52_9BACL GTP cyclohydrolase 1 OS= Planococcus plakortidis OX=1038856 GN=folE PE=3 SV=1
MKSHNVDLDKIEQAVGMILEAVGEDVGREGLQDTPKRVAKMYAEVFAGLKEDPKEYFRTVFHENHEELVLVKDIPFYSMCEHHLVPFFGKAHIAYIPRDGVVTGLSKLARAVETVAKRPQLQERITSTIADSMMETLNPHGVYVMVEAEHMCMTMRGIKKPGSKTVTAVSRGLLETDDIKRSEVITYINMD

SEQ ID NO: 12763 - protein, 191 aa, Planococcus rifietoensis
  misc_feature (1)..(191): tr|A0A0U2ZCC7|A0A0U2ZCC7_9BACL GTP cyclohydrolase 1 OS= Planococcus rifietoensis OX=200991 GN=folE PE=3 SV=1
MKSHNVDLDKIEQAVGMILEAVGEDVGREGLQDTPKRVAKMYAEVFAGLKEDPKEYFRTVFHENHEELVLVKDIPFYSMCEHHLVPFFGKAHIAYIPRDGVVTGLSKLARAVETVAKRPQLQERITSTIADSMMETLNPHGVYVMVEAEHMCMTMRGIKKPGSKTVTAVSRGVLETDDIKRSEVITYINMN

SEQ ID NO: 12764 - protein, 191 aa, Planococcus salinus
  misc_feature (1)..(191): tr|A0A3M8PAN1|A0A3M8PAN1_9BACL GTP cyclohydrolase 1 OS= Planococcus salinus OX=1848460 GN=folE PE=3 SV=1
MIKKEVDLEKIELAVSMILEAVGENPGREGLLDTPKRVAKMYAEIFSGLQEDPREYFQTVFHEGHEELVLVKDIPFFSTCEHHLVPFFGKVHIAYIPRDGVVTGLSKLARAVETVSKRPQLQERITSTLADSLMETLNPHGVYVMVEAEHMCMTMRGVKKPGAKTVTAVSRGMLEHDDVKRSEVITYINMN

SEQ ID NO: 12765 - protein, 194 aa, Planococcus sp.
  misc_feature (1)..(194): tr|A0A5C5T347|A0A5C5T347_9BACL GTP cyclohydrolase 1 OS= Planococcus sp. CPCC 101016 OX=2599617 GN=folE PE=3 SV= 1
MIDVKAQKVDLDKIEQAVSMILEAVGEDVSREGLQDTPKRVAKMYAEVFSGLKEDPREYFKTVFHEGHEELVLVKDIPFYSMCEHHLVPFFGKAHIAYIPRDGVVTGLSKLARAVETVAKRPQLQERITSTIADSLMETLNPHGVYVMIEAEHMCMTMRGIKKPGSKTVTAVSRGILETDDIKRSEVITYINMN

SEQ ID NO: 12766 - protein, 194 aa, Planococcus sp.; identical to SEQ ID NO: 12758
  misc_feature (1)..(194): tr|A0A5B0CUW5|A0A5B0CUW5_9BACL GTP cyclohydrolase 1 OS= Planococcus sp. ANT_H30 OX=2597347 GN=folE PE=3 SV=1

SEQ ID NO: 12767 - protein, 194 aa, Planococcus versutus
  misc_feature (1)..(194): tr|A0A1B1S4H4|A0A1B1S4H4_9BACL GTP cyclohydrolase 1 OS= Planococcus versutus OX=1302659 GN=folE PE=3 SV=1
MIDVNAQKVDLDKIEQAVSMILEAVGEDVNREGLKDTPKRVAKMYAEVFSGLKEDPKEYFKTVFHEGHEELVLVKDIPFYSMCEHHLVPFFGKAHIAYIPRGGVVTGLSKLARAVETVAKRPQLQERITSSVADSLMDTLNPHGVYVMIEAEHMCMTMRGIKKPGAKTVTAVSRGVLETDAVKRSEIITYINMN

SEQ ID NO: 12768 - protein, 194 aa, Planomicrobium glaciei
  misc_feature (1)..(194): tr|A0A1G8A6G9|A0A1G8A6G9_9BACL GTP cyclohydrolase 1 OS= Planomicrobium glaciei OX=459472 GN=folE PE=3 SV=1
MIDIDSKKVDLDKIEKAVAMILEAVGEDPGREGLLDTPKRVAKMYAEIFSGLKEDPKDYFSTVFHEGHEEMVLVKDIPFYSTCEHHLVPFFGKAHIAYIPRDGVVTGLSKLARAVETVAKRPQLQERITSTLADSLMETLNPHGVFVMVEAEHMCMTMRGIKKPGAKTITAVSRGVLETDDIKRSEIITYINMK

SEQ ID NO: 12769 - protein, 194 aa, Planomicrobium soli
  misc_feature (1)..(194): tr|A0A2P8H710|A0A2P8H710_9BACL GTP cyclohydrolase 1 OS= Planomicrobium soli OX=1176648 GN=folE PE=3 SV=1
MTDMELQNVDLEKIEKAVTMILEAVGEDINREGILDTPKRVAKMYAEVFSGLHEDPKEFFKTVFHEGHEELVLVKDIPFYSMCEHHLVPFFGKAHVAYIPRDGVVTGLSKLARAVETVARRPQLQERITSTIADSLVDTLNPHGVFVMVEAEHLCMTMRGIKKPGAKTVTAVSRGVFEEDAIKRSEVISYIKMD

SEQ ID NO: 12770 - protein, 189 aa, Planomicrobium sp.
  misc_feature (1)..(189): tr|A0A2I0FIR9|A0A2I0FIR9_9BACL GTP cyclohydrolase 1 OS= Planomicrobium sp. MB-3u-38 OX=2058318 GN=folE PE=3 SV= 1
MQNVDLEKIEEAVSMILEAVGEDVTREGLHDTPKRVAKMYAEVFSGLKENPKEYFKTVFHEGHEELVLVKDIPFYSMCEHHLVPFFGKAHIAYIPRDGVVTGLSKLARAVETVAKRPQLQERITSTIADSMMETLNPHGVFVMVEAEHMCMTMRGIKKPGATTVTAVARGILETDAIKRSEVITYITKN

SEQ ID NO: 12771 - protein, 189 aa, Planomicrobium sp.
  misc_feature (1)..(189): tr|A0A5C5USB1|A0A5C5USB1_9BACL GTP cyclohydrolase 1 OS= Planomicrobium sp. CPCC 101110 OX=2599619 GN=folE PE=3 SV=1
MQNVDLNKIEKAVAMILEAVGEDVEREGIRDTPKRVAKMYAEVFSGLHEDPKEFFKTVFHEGHEELVLVKDIPFYSMCEHHLVPFFGKAHVAYIPRDGVVTGLSKLARAVETVAKRPQLQERITSTIADSLVDTLNPHGVFVMVEAEHLCMTMRGIKKPGAKTVTAVSRGVFEEDAIKRSEIISYIKMG

SEQ ID NO: 12772 - protein, 195 aa, Planomonospora sphaerica
  misc_feature (1)..(195): tr|A0A171DIP8|A0A171DIP8_9ACTN GTP cyclohydrolase 1 OS= Planomonospora sphaerica OX=161355 GN=folE PE=3 SV=1
MDAETDINRLAAEEAFRSFLAAFGMKDNEEIMDNTPRRVVEAYAELFTPKAFAPTVFHNEEHYDELVLVRSIPLRSVCEHHFLPFVGTAHVAYLPDEEVIGLSKLARVVETYSRRPQRQERLTVQVAQWLEDTLRPRGVGVLITARHSCMTLRGARADNASTVTSAFRGTLTTESRYRADFFSLLHLGERAAETR

SEQ ID NO: 12773 - protein, 194 aa, Planomonospora sphaerica
  misc_feature (1)..(194): tr|A0A161LRN1|A0A161LRN1_9ACTN GTP cyclohydrolase 1 OS= Planomonospora sphaerica OX=161355 GN=folE PE=3 SV=1
MEPPLPLQVDHARIERAVREILIAIGEDPDRDGLLETPARVARAYAEQFAGLGQTPEDVLTKVFDVDHDEMILVRDIEVYSTCEHHLVPFHGVAHVGYIPNDKGQVTGLSKLARLVDVYARRPQVQERMTSQVADALMRVLEPRGVIVVIECEHLCMTMRGVRKPGAKTTTSAVRGSFRDSEKTRAEAMALILR

SEQ ID NO: 12774 - protein, 224 aa, Plantactinospora sp.
  misc_feature (1)..(224): tr|A0A2R4FFJ1|A0A2R4FFJ1_9ACTN GTP cyclohydrolase 1 OS= Plantactinospora sp. BB1 OX=2071627 GN=folE PE=3 SV=1
MSASATEPDGDDELDYLAARLVNGKLGGGPVEDAVDLARIEKAVREILIAVGEDPDRDGLVQTPARVARAYAELFAGLRVDPAQVLSTTFEANHEELILVRDIDVMSLCEHHLLPFRGSAHIGYIPGENGRITGLSKLARLVEVYARRPQVQERLTSQIADLLMTKLEPRGVIVVLECEHMCMAMRGIQKSGAKTITSAVRGALQRDAKSRAEAMALIHASRAA

SEQ ID NO: 12775 - protein, 198 aa, Plantactinospora sp.
  misc_feature (1)..(198): tr|A0A4Q7WD06|A0A4Q7WD06_9ACTN GTP cyclohydrolase 1 OS= Plantactinospora sp. CNZ321 OX=2512141 GN=folE PE=3 SV= 1
MSVVPIRVAHDRPRRDIAAASRAAATFLTALGVDIDKEGLAETPARMARAYAELLTPRAFQLTTFANDGGYDELVLARSIPIRSVCEHHLLPFLGVAHVGYLPGERILGLSKLARVVELFAHGPQVQERLTKQIADWLARQLRPKGVGVVIDAEHLCMTLRGVQAVGASTVTSTLLGALRDDARSRTEFFTLARLGTG

SEQ ID NO: 12776 - protein, 220 aa, Plantibacter cousiniae
  misc_feature (1)..(220): tr|A0A1T5J6R1|A0A1T5J6R1_9MICO GTP cyclohydrolase 1 OS= Plantibacter cousiniae OX=199709 GN=folE PE=3 SV=1
MTHGEHTADDAVAAAQAEPDQGSASRSSVDRERIAAAVLEILEAIGEDPSRDGLADTPTRVADAYAEFFGGVGQDAGVHLARPIPIEEGATSDVVLVRDIAFRSVCEHHLLPFLGTAHIAYLPDELVIGLGALPKLVDTLASRPQVQERLSEQIADTLVERLAPRGVLVVLQAAHGCVSMRGSRQLTSTTVTIASRGALADPAARAELMVLIGASADQAG

SEQ ID NO: 12777 - protein, 220 aa, Plantibacter flavus
  misc_feature (1)..(220): tr|A0A3N2BZY2|A0A3N2BZY2_9MICO GTP cyclohydrolase 1 OS= Plantibacter flavus OX=150123 GN=folE PE=3 SV=1
MTHGEHTADDAVAAAQAESDQGSASRSSVDRERIAAAVLEILEAIGEDPSRDGLADTPTRVADAYAEFFGGVGQDAGVHLARPIPIEEGATSDVVLVRDIAFRSVCEHHLLPFLGTAHIAYLPDELVIGLGALPKLVDTLASRPQVQERLSEQIADTLVERLAPRGVLVVLQAAHGCVSMRGSRQLTSTTVTIASRGALADPAARAELMVLIGASADQAG

SEQ ID NO: 12778 - protein, 192 aa, Plantibacter flavus
  misc_feature (1)..(192): tr|A0A1S7BE99|A0A1S7BE99_9MICO GTP cyclohydrolase 1 OS= Plantibacter flavus OX=150123 GN=folE PE=3 SV=1
MDRERIAAAVLEILEAIGEDPSRDGLSDTPSRVADAYAEFFGGVGQDAGVHLARPIPIEEGATSDVVLVRDIAFRSVCEHHLLPFLGTAHIAYLPDELVIGLGALPKLVDTLASRPQVQERLSEQIADTLVERLAPRGVLVVLQAAHGCVSMRGSRQLTSTTVTIASRGALADPAARAELMVLIGASADQAG

SEQ ID NO: 12779 - protein, 220 aa, Plantibacter sp.
  misc_feature (1)..(220): tr|A0A495BE63|A0A495BE63_9MICO GTP cyclohydrolase 1 OS= Plantibacter sp. YR521 OX=2135468 GN=folE PE=3 SV=1
MTDGEHTADDAVAAAQAEPDQGSASRSSVDRERIAAAVLEILEAIGEDPSRDGLADTPTRVADAYAEFFGGVGQDAGVHLARPIPIEEGATSDVVLVRDIAFRSVCEHHLLPFLGTAHIAYLPDELVIGLGALPKLVDTLASRPQVQERLSEQIADTLVERLAPRGVLVVLQAAHGCVSMRGSRQATSTTVTIASRGALADPAARAELMVLIGASADQAG

SEQ ID NO: 12780 - protein, 220 aa, Plantibacter sp.
  misc_feature (1)..(220): tr|A0A1Y6FIE0|A0A1Y6FIE0_9MICO GTP cyclohydrolase 1 OS= Plantibacter sp. VKM Ac-1784 OX=199708 GN=folE PE=3 SV= 1
MTHGEHTADDAVAAAQAEPDQGSASRSSVDRERIAAAVLEILEAIGEDPSRDGLADTPTRVADAYAEFFGGVGQDAGVHLSRPIPIEEGATSDVVLVRDIAFRSVCEHHLLPFLGTAHIAYLPDELVIGLGALPKLVDTLASRPQVQERLSEQIADTLVERLAPRGVLVVLQAAHGCVSMRGSRQLTSTTVTIASRGALADPAARAELMVLIGASADQAG

SEQ ID NO: 12781 - protein, 274 aa, Plasticicumulans acidivorans
  misc_feature (1)..(274): tr|A0A317MSM7|A0A317MSM7_9GAMM GTP cyclohydrolase FolE2 OS=Plasticicumulans acidivorans OX=886464 GN=folE2 PE= 3 SV=1
MSKPTSAVSTPELNPIPDVQNSADTRRIPINKVGIKDIRHPIRVRDRSAGEQHTIATFNMYVNLPHNFKGTHMSRFVEIINGREREISVASFGEMLAAMTARLEAGTGHIEMSFPYFVNKTAPVSGVNSLLDYAVTLIGELRDGVATTTVKVLVPVTSLCPCSKEISRYGAHNQRSHVTVTARLRRFVWVEEIIDLVEAEASCQLYGLLKRPDEKYVTEHAYENPKFVEDMVRDIAARLNRDERIGAYTVESENFESIHNHSAYALIECDKDAA

SEQ ID NO: 12782 - protein, 275 aa, Plasticicumulans lactativorans
  misc_feature (1)..(275): tr|A0A4R2LGI2|A0A4R2LGI2_9GAMM GTP cyclohydrolase FolE2 OS=Plasticicumulans lactativorans OX=1133106 GN=folE2 PE=3 SV=1
MTKPNPIVVDTVTAIPDVQSSADTRRIPINKVGIKDIRHPVKVKDRTGREQHTIANFNMYVDLPHNFKGTHMSRFVAILNSHEDEITVESFKIMLAEMTERLEAGTGHIEMSFPYFVNKAAPVSGVRSLLDYEVSFIGMISEGKTSMNVKVVVPVTSLCPCSKEISRYGAHNQRSHVTVNARVRGFVWIEELIDLVENEASCQLYGLLKRPDEKYVTERAYENPKFVEDMVRDIAAHLNADERIEAYAVESENFESIHNHSAYALIEHDKTTHPA

SEQ ID NO: 12783 - protein, 221 aa, Plautia stali
  misc_feature (1)..(221): tr|U3TXG1|U3TXG1_9ENTR GTP cyclohydrolase 1 OS=Plautia stali symbiont OX=891974 GN=folE PE=3 SV=1
MSTLSQKAALVHEALLARGLETPLRAPVRDMDDASRKREIAGHMTQIMQLLNLDLEDDSLMETPHRIAKMFVDEIFSGLDYANFPKITVIENKMKVDEMVTVRDITLTSTCEHHFVIIDGKVTVAYIPKDKVIGLSKINRIVQFFAQRPQVQERLTQQVLVALQTLLGTNNVAVSIDAVHYCVKARGVKDATSATTTTSLGGLFKSSQNTRQEFLRAVRHS

SEQ ID NO: 12784 - protein, 184 aa, Pleionea mediterranea
  misc_feature (1)..(184): tr|A0A316FK28|A0A316FK28_9GAMM GTP cyclohydrolase 1 OS= Pleionea mediterranea OX=523701 GN=folE PE=3 SV=1
MTEQLAEHYKEILTGLGEDLTRDGLKDTPMRAAKAMKFLTRGYTQSLDEVVNNAIFESDNDEMVIVKDIELYSLCEHHLLPFIGKCQVAYIPTGKVIGLSKIARIVDMFARRLQIQENLTKQIADAVMEVTQAAGVAVIIDAKHMCMMMRGVEKQNSVMTTSVMLGQFRKSQATRTEFLNLVRS

SEQ ID NO: 12785 - protein, 204 aa, Pleomorphomonas carboxyditropha
  misc_feature (1)..(204): tr|A0A2G9X236|A0A2G9X236_9RHIZ GTP cyclohydrolase 1 OS= Pleomorphomonas carboxyditropha OX=2023338 GN=folE PE=3 SV=1
MDDAIFTAGARTTRRPSREEAEAAVRTLIAYAGEDPEREGLRDTPKRVVKAYAELFSGYSQTDEEVLDRIFTEVAGYEELILVRDIPFYSHCEHHMVPFIGKAHIAYYPTTGVVGLSKLARIVEMYARRLQTQETMTAQVSNAIEKVLKPRGTAVLIEAEHLCMAMRGVQKPGASTVTARFTGCFKTDPTEQARFMMMLRGEGK

SEQ ID NO: 12786 - protein, 204 aa, Pleomorphomonas diazotrophica
  misc_feature (1)..(204): tr|A0A1I4QVL5|A0A1I4QVL5_9RHIZ GTP cyclohydrolase 1 OS= Pleomorphomonas diazotrophica OX=1166257 GN=folE PE=3 S V=1
MDDAIFTAGARKTRRPSREEAEAAVRTLIAYAGEDPDREGLLDTPKRVVKAYAELFSGYGQTDEEVLDRIFSEVAGYEELILVRDIPFYSHCEHHMVPFIGKAHIAYYPTTGVVGLSKLARIVEMYARRLQTQETMTAQVSNAIDKVLKPRGAAVLIEAEHLCMAMRGVQKPGASTVTARFTGCFKTDPTEQARFMMMVRGEGK

SEQ ID NO: 12787 - protein, 204 aa, Pleomorphomonas sp.
  misc_feature (1)..(204): tr|A0A4R8FPP2|A0A4R8FPP2_9RHIZ GTP cyclohydrolase 1 OS= Pleomorphomonas sp. CF100 OX=2135722 GN=folE PE=3 SV=1
MDDAIFTASARQARRPSREEAEAAVRTLIAYAGEDPEREGLRDTPKRVVKAYAELFSGYGQTDEEVLDRIFTEVAGYEELILVRDIPFYSHCEHHMVPFIGKAHIAYYPTTGVVGLSKLARIVEMYARRLQTQETMTAQVSNAIEKVLKPRGAAVLIEAEHLCMTMRGVQKPGASTVTARFTGCFKTDPTEQARFMMMVRGEGK

SEQ ID NO: 12788 - protein, 211 aa, Pleomorphomonas sp.; identical to SEQ ID NO: 11873
  misc_feature (1)..(211): tr|A0A2Z6HVP7|A0A2Z6HVP7_9RHIZ GTP cyclohydrolase 1 OS= Pleomorphomonas sp. SM30 OX=1885025 GN=folE PE=3 SV=1

SEQ ID NO: 12789 - protein, 218 aa, Plesiomonas shigelloides
  misc_feature (1)..(218): tr|R8AVT9|R8AVT9_PLESH GTP cyclohydrolase 1 OS=Plesiomo nas shigelloides 302-73 OX=1315976 GN=folE PE=3 SV=1
MSSLTEEAIKVRAALEMHGLETPMQQSGLDKNTRKAQIQHHMTEVMRLLELDLGDDSLCETPRRIAKMYMDEIFSGLDYANFPKITTIENKMHVDEMVTVRDIHLTSTCEHHFVTIDGVAHVAYIPKDKVIGLSKLNRIVLFFAQRPQVQERLTQQILVALQTLLETDDVAVSLDAVHYCVKARGIRDSSSSTLTMGLGGVFKTEASRRQEFLSSARR

SEQ ID NO: 12790 - protein, 218 aa, Plesiomonas shigelloides; identical to SEQ ID NO: 12789
  misc_feature (1)..(218): tr|A0A1A9AX34|A0A1A9AX34_PLESH GTP cyclohydrolase 1 OS= Plesiomonas shigelloides OX=703 GN=folE PE=3 SV=1

SEQ ID NO: 12791 - protein, 241 aa, Pleurocapsa sp.
  misc_feature (1)..(241): tr|A0A2T1CVF5|A0A2T1CVF5_9CYAN GTP cyclohydrolase 1 OS= Pleurocapsa sp. CCALA 161 OX=2107688 GN=folE PE=3 SV=1
MTTVSSNGYNRSESFGNNSQPLQSSLLDQVASRPDRNTHNGQAAQIKATSEAAKEQMMSAVYTMLESVGEDPEREGLLKTPKRVAEAMEFLTSGYNQSLDDLVNGAIFDEGHNEMVLVRDINFFSLCEHHMLPFMGRAHVAYIPNQKVVGLSKLARIVEMYARRLQVQERLTRQIAEAVQEVLEPQGVAVVMEASHMCMSMRGVQKPGSWTVTSAMIGVFQDEQKTREEFLNLIRHQPNFG

SEQ ID NO: 12792 - protein, 233 aa, Pleurocapsa sp.
  misc_feature (1)..(233): tr|A0A2T1CLE3|A0A2T1CLE3_9CYAN GTP cyclohydrolase 1 OS= Pleurocapsa sp. CCALA 161 OX=2107688 GN=folE PE=3 SV=1
MTLAKSEPNQIDNINQQLPKLTTTQQHEHLTHLRKPQMTCPPPVSEEEMRQAVRTLLLGLGEDPDREGLRDTPKRVVKALKFLTSGYHQSLDELLNGAVFQENADEMVLVRDIDLFSSCEHHILPILGRAHVAYIPDGKVIGLSKIARICEMYGRRLQVQERLTAQIADALQGLLQPKGVAVVVEASHMCMVMRGVQKPSSWTSTSAVRGVFADDAKTRQEFMSLIRHNPAFR

SEQ ID NO: 12793 - protein, 93 aa, Pluralibacter gergoviae
  misc_feature (1)..(93): tr|A0A0J5NLR9|A0A0J5NLR9_PLUGE GTP cyclohydrolase (Frag ment) OS=Pluralibacter gergoviae OX=61647 GN=folE PE=4 SV=1
MKSMSLEATLVQEALILKGLETPLRKTDVLRKDKRSELIAGYMTKVMELLQLDLTDDSLRGTPGRIADMFINEVFSGLDYANFPKITLMENKM

SEQ ID NO: 12794 - protein, 221 aa, Pluralibacter gergoviae
  misc_feature (1)..(221): tr|A0A089R211|A0A089R211_PLUGE GTP cyclohydrolase 1 OS= Pluralibacter gergoviae OX=61647 GN=folE PE=3 SV=1
MPSLSKEAALVHEALVARGLETPLRPPVNLDNEARKRLIAGHMTEIMQLLNLDLSDDSLMETPHRIAKMYVDEIFSGLDYANFPKITVIENKMKVDEMVTVRDITLTSTCEHHFVTIDGKATVAYIPKDSVIGLSKINRIVQFFAQRPQVQERLTQQVLTALQTLLGTNNVAVSIDAVHYCVKARGIRDATSATTTTSLGGLFKSSQNTRQEFLRAVRHHG

SEQ ID NO: 12795 - protein, 179 aa, Pokkaliibacter plantistimulans
  misc_feature (1)..(179): tr|A0A318C7T8|A0A318C7T8_9GAMM GTP cyclohydrolase 1 OS= Pokkaliibacter plantistimulans OX=1635171 GN=folE PE=3 SV=1
MEQAFAHIITSIGENLGREGLRDTPKRAAKAMSYLTRGYQQDLQEIVNNALFPSENSEMVIVRNIELYSLCEHHMLPFIGKAHVAYIPKGKVLGLSKVARIVDMFARRLQIQENLTKEIAEAVFQVTEAAGVGVVIEAQHMCMMMRGVEKQNASMTTSMMLGNFRTDERTRNEFLSLIR

SEQ ID NO: 12796 - protein, 185 aa, Pokkaliibacter plantistimulans
  misc_feature (1)..(185): tr|A0A318CA49|A0A318CA49_9GAMM GTP cyclohydrolase 1 OS= Pokkaliibacter plantistimulans OX=1635171 GN=folE PE=3 SV=1
MDTELALHYRAILEQLGEDPGREGLRDTPKRAAKAMEFLTRGYQTELDTIINGAIFSSDNDEMVIVRDIELYSLCEHHLLPFIGKAHVAYIPQGKVLGLSKIARIVDMFARRLQIQENLTKQIADCIQTVTQAAGVAVSIEAKHLCMMMRGVEKQNSVMNTSVMLGSFRTNQASRNEFLQLIRGN

SEQ ID NO: 12797 - protein, 229 aa, Polaribacter atrinae
  misc_feature (1)..(229): tr|A0A176TB04|A0A176TB04_9FLAO GTP cyclohydrolase 1 OS= Polaribacter atrinae OX=1333662 GN=folE PE=3 SV=1
MFEFSSKMNDERIEEIGENHVGTSAKTPLRADAFDITDEEKIERIQESVKDILTTLGLDLTDDSLQGTPKRVAKSFVNELFMGLNPKNMPKASTFDNNYNYGEMLVERNIVVYSTCEHHLLPIIGRAHVAYISDGKVIGLSKMNRIVEYFSKRPQVQERLTMQVVQAMQEALGVQDVACVIDAKHLCVNSRGIKDIESSTVTAEFGGKFKEKETKREFLEYLKMNTSFE

SEQ ID NO: 12798 - protein, 229 aa, Polaribacter butkevichii
  misc_feature (1)..(229): tr|A0A2P6CER5|A0A2P6CER5_9FLAO GTP cyclohydrolase 1 OS= Polaribacter butkevichii OX=218490 GN=folE PE=3 SV=1
MFELSSKMNDERIEEIGENHVGTSAKTPLRADAFDISDEEKIERIQESVKDILTTLGMDLTDDSLQGTPRRVAKSFVNELFMGLNPKNMPKASTFDNNYNYGEMLVERNIVVYSTCEHHLLPIIGRAHVAYISDGKVIGLSKMNRIVEYFSKRPQVQERLTMQIVQAMQEALGVEDVACVIDAKHLCVNSRGIKDIESSTVTAEFGGKFKQKETKREFLEYLKMKTSFE

SEQ ID NO: 12799 - protein, 222 aa, Polaribacter dokdonensis
  misc_feature (1)..(222): tr|A0A0M9CGU1|A0A0M9CGU1_9FLAO GTP cyclohydrolase 1 OS= Polaribacter dokdonensis DSW-5 OX=1300348 GN=folE PE=3 SV=1
MNEDRIEEIGENHVGTSAKTPLRADAFDISDDEKIKRIEESVKDILNTLGMDLTDDSLQGTPKRVAKAFVNEIFMGLNPKNKPKASTFDNNYNYGEMLVEKNIVVYSTCEHHLLPIIGRAHVAYISDGKVIGLSKMNRIVEYFAKRPQVQERLTMQVVQAMQEALGTEDVACVIDAKHLCVNSRGIKDIESSTVTAEFGGKFKNKETKREFLDYLKLETDFD

SEQ ID NO: 12800 - protein, 232 aa, Polaribacter dokdonensis
  misc_feature (1)..(232): tr|A0A0M9CDS3|A0A0M9CDS3_9FLAO GTP cyclohydrolase 1 OS= Polaribacter dokdonensis DSW-5 OX=1300348 GN=folE PE=3 SV=1
MITDVILKEKQTDQKLNGFSFEEVGDDHLFTGLETPMKKDAFKLSDNEKKEKIAILFEEIMDVMGLDLTDDSLQGTPKRVAKMYIDEIFSGLNPANKPKVALFDNKYQYNQMLVEKNITFYSNCEHHFVPIIGKAHVAYISSGKVIGLSKLNRIVQYYAKRPQVQERLTNQIAEDLKGILGTEDVAVIIDAKHLCVSSRGIKDDTSSTVTSYFGGKFNNQEKIAELQNTLNY

SEQ ID NO: 12801 - protein, 229 aa, Polaribacter filamentus
  misc_feature (1)..(229): tr|A0A2S7KWT3|A0A2S7KWT3_9FLAO GTP cyclohydrolase 1 OS= Polaribacter filamentus OX=53483 GN=folE PE=3 SV=1
MFELSSKMNDERINEIGENHVGTSAQNPIRPDAFDISDEEKIKKIEESVKDILNTLGMDLTDDSLQGTPKRVAKAFVNELFMGLNPKNMPKPSTFENNYSYGEMLVEKNIVVYSTCEHHLLPIIGRAHVAYISDGKVIGLSKMNRIVEYFSKRPQVQERLTMQVVQAMQEALGTQDVACVIDAKHLCVNSRGIKDIESSTITAEFGGKFKEKDTKREFLDYLKMNTKFD

SEQ ID NO: 12802 - protein, 230 aa, Polaribacter filamentus
  misc_feature (1)..(230): tr|A0A2S7KZ42|A0A2S7KZ42_9FLAO GTP cyclohydrolase 1 OS= Polaribacter filamentus OX=53483 GN=folE PE=3 SV=1
MITDKLMKRETQGFNSLSFDEIGDDHLFTGLETPMKPNAFDISDEVKKEKIAHLFSQIMDVMGLDLTDDSLQGTPKRVAKMYIDEIFSGLNPANKPKVALFNNKYQYNQMLVEKNITFYSNCEHHFVPIIGKAHVAYISSGKVIGLSKINRIVQYYAKRPQVQERLTNQITEELKAILETENVAVIIDAKHLCVSSRGVKDDTSSTVTSYFGGVFNTPEKIAELQNTLNY

SEQ ID NO: 12803 - protein, 232 aa, Polaribacter gangjinensis
  misc_feature (1)..(232): tr|A0A2S7WB72|A0A2S7WB72_9FLAO GTP cyclohydrolase 1 OS= Polaribacter gangjinensis OX=574710 GN=folE PE=3 SV=1
MITEVVLKEKETEQKFNGFSFEEIGDDHLYTGIETPMKPNAFDISDEEKKKKITSLFAEIMDVMGLDLTDDSLRGTPNRVAKMYIDEIFSGLNPANKPKIALFDNKYQYNQMLVEKNITFYSNCEHHFVPIIGKAHVAYISSGKVIGLSKLNRIVQYFAKRPQVQERLTNQIAEELKAVLQTENVAVIIDAKHLCVSSRGIKDDTSATVTSYFGGAFNTPEKIAELQNTLNY

SEQ ID NO: 12804 - protein, 229 aa, Polaribacter gangjinensis
  misc_feature (1)..(229): tr|A0A2S7W9F7|A0A2S7W9F7_9FLAO GTP cyclohydrolase 1 OS= Polaribacter gangjinensis OX=574710 GN=folE PE=3 SV=1
MFELQTNMNDETINEIGENHIGTSATTPLRADAFVLSDQEKIDRIQESVKDILLTLGMDLTDDSLQGTPKRVAKAFVNELFMGLNPKNKPKPSTFQNNYNYGEMLVEKNIVVYSTCEHHLLPIIGRAHVAYISNGKVIGLSKMNRIVEYFAKRPQVQERLTMQVVQAMQEALGTQDVACVIDAKHLCVNSRGIKDIESSTVTAEFGGKFKEKETKREFLDYIKFDTKFE

SEQ ID NO: 12805 - protein, 229 aa, Polaribacter glomeratus
  misc_feature (1)..(229): tr|A0A2S7WWX8|A0A2S7WWX8_9FLAO GTP cyclohydrolase 1 OS= Polaribacter glomeratus OX=102 GN=folE PE=3 SV=1
MFELSSKMNDERINEIGENHVGTSAQNPIRPDAFDISDEQKIKKIEESVRDILNTLGMDLTDDSLQGTPKRVAKAFVNEIFMGLNPKNMPKPSTFENNYSYGEMLVEKNIVVYSTCEHHLLPIIGRAHVAYISDGKVIGLSKMNRIVEYFSKRPQVQERLTMQVVQAMQEALGTQDVACVIDAKHLCVNSRGIKDIESSTVTAEFGGKFKEKDTKREFLDYLKMNTKFD

SEQ ID NO: 12806 - protein, 230 aa, Polaribacter glomeratus
  misc_feature (1)..(230): tr|A0A2S7WU71|A0A2S7WU71_9FLAO GTP cyclohydrolase 1 OS= Polaribacter glomeratus OX=102 GN=folE PE=3 SV=1
MITETLTGEKKQTFNSLSFDEIGDDHLFTGLETPMKPNAFDISDDVKKEKIAALFTQIMDVMGLDLTDDSLQGTPKRVAKMYIDEIFSGLNPANKPKVALFDNKYKYNQMLVEKNITFYSNCEHHFVPIMGKAHVAYISSGKVIGLSKLNRIVQYYAKRPQVQERLTNQIAEELKAILETDNVAVIIDAKHLCVSSRGVKDDTSSTVTSYFGGVFNTSEKIAELQNTLNY

SEQ ID NO: 12807 - protein, 228 aa, Polaribacter irgensii
  misc_feature (1)..(228): tr|A4C1U8|A4C1U8_9FLAO GTP cyclohydrolase 1 OS=Polariba cter irgensii 23-P OX=313594 GN=folE PE=3 SV=1
MFELNSKMNDDRIDELGENHVATSAKNPIRSDAFDISNEEKIAKIEKSVQDILHTLGMDLTDDSIQGTPKRVAKAFINEMFMGLDPKNMPKASTFDNNYNYGEMLVEKNIVVYSTCEHHLLPIIGRAHVAYISSGKVIGLSKMNRIVEYYSKRPQVQERLTMQIVQAMQEALGTKDVACVIDAKHLCVNSRGIKDIESSTVTSEFGGKFKEKETKKEFLQYLQMPTIF

SEQ ID NO: 12808 - protein, 207 aa, Polaribacter irgensii
  misc_feature (1)..(207): tr|A4C0M2|A4C0M2_9FLAO GTP cyclohydrolase I OS=Polariba cter irgensii 23-P OX=313594 GN=folE PE=4 SV=1
MKTINPFKNLQLLAILFSVITIIGCSNDDDIAPEEENEIEVITDVTLIFTNTADVNDVIRASAQDPDGTGIQELQILGAITLAADTEYTLTYEILNKLDPADSEDIGDEILEEDNEHQFFFSFTVNVFANPIGNGNIDAAADPINYNDEDENGNPVGLSSTWTTSSTASSGALFTVRLQHQPDVKTATSGSNDGDTDFALTFDLNIQ

SEQ ID NO: 12809 - protein, 222 aa, Polaribacter porphyrae
  misc_feature (1)..(222): tr|A0A2S7WK10|A0A2S7WK10_9FLAO GTP cyclohydrolase 1 OS= Polaribacter porphyrae OX=1137780 GN=folE PE=3 SV=1
MNDERIEELGEDHVGTSAKTPLRADAFAISDEEKISRIQESVKDILQTLGMDLTDDSLQGTPKRVAKAFVNEIFMGLNPKNKPKASTFDNNYNYGEMLVEKNIVVYSTCEHHLLPIIGRAHVAYISDGKVIGLSKMNRIVEYFAKRPQVQERLTMQVVQAMQEALGTQNVACVIDAKHLCVNSRGIKDIESSTVTAEFGGKFKETETKREFLDYLKMDTDFD

SEQ ID NO: 12810 - protein, 217 aa, Polaribacter porphyrae
  misc_feature (1)..(217): tr|A0A2S7WLR8|A0A2S7WLR8_9FLAO GTP cyclohydrolase 1 OS= Polaribacter porphyrae OX=1137780 GN=folE PE=3 SV=1
MDKKSIEILGDNHISTSVETPLRSDAFDKSDVEKITAIQYHFKMIMQELGLDLTDDSLAGTPYRFAKMYVKELFYGLKPDNKPKLSVFENKYGYNKVLIEQNINIDSSCEHHFLPITGKAHIGYIPKDKVIGLSKINRLVDYYAHRPQVQERLSLQILKDLQHILKTEDVIVVINAKHLCVSSRGIKDKNSFTTTIEYGGCFNNDLKRKEFLDIVKG

SEQ ID NO: 12811 - protein, 232 aa, Polaribacter reichenbachii
  misc_feature (1)..(232): tr|A0A1B8U4Q1|A0A1B8U4Q1_9FLAO GTP cyclohydrolase 1 OS= Polaribacter reichenbachii OX=996801 GN=folE PE=3 SV=1
MITEVVLKEKQTDQKLNGFSFEQIGDDHLYTGLETPIKKDAFLLSNDEKKEKIADLFSEIMDVMGLDLTDDSLQGTPKRVAKMYIDEIFSGLNPANKPKVALFDNKYQYNQMLVEKNITFYSNCEHHFVPIIGKAHVAYISSGKVIGLSKLNRIVQYYAKRPQVQERLTNQIAEELKNILETEDVAVIIDAKHLCVSSRGIKDDTSSTVTSYFGGKFNNQDKILELQNTLKY

SEQ ID NO: 12812 - protein, 229 aa, Polaribacter reichenbachii
  misc_feature (1)..(229): tr|A0A1B8TQ07|A0A1B8TQ07_9FLAO GTP cyclohydrolase 1 OS= Polaribacter reichenbachii OX=996801 GN=folE PE=3 SV=1
MFELSSKMNDERIKEIGENHIGTSAKTPLRDDAFDITNEEKINRIQESVKDILNTLGMDLTDDSLQGTPKRVAKAFVNEIFMGLDPKNMPKPSTFDNNYNYGEMLVEKNIVVYSTCEHHLLPIIGRAHVAYISDGKVIGLSKMNRIVEYFSKRPQVQERLTMQVVQAMQEALGTDNVACVIDAKHLCVNSRGIKDIESSTVTAEFGGKFKESETKREFLDYLKMNTDFD

SEQ ID NO: 12813 - protein, 229 aa, Polaribacter sejongensis
  misc_feature (1)..(229): tr|A0A2K8VP26|A0A2K8VP26_9FLAO GTP cyclohydrolase 1 OS= Polaribacter sejongensis OX=985043 GN=folE PE=3 SV=1
MFELSSKMNDERIEEIGENHVGTSAKTPLRADAFDITDEEKIERIQQSVKDILTTLGLDLTDDSLQGTPKRVAKSFVNELFMGLNPKNLPKASTFDNNYNYGEMLVERNIVVYSTCEHHLLPIIGRAHVAYISDGKVIGLSKMNRIVEYFSKRPQVQERLTMQVVQAMQEALGVEDVACVIDAKHLCVNSRGIKDIESSTVTAEFGGKFKEKETKREFLEYLKMNTSFE

SEQ ID NO: 12814 - protein, 221 aa, Polaribacter sejongensis
  misc_feature (1)..(221): tr|A0A2K8VQC5|A0A2K8VQC5_9FLAO GTP cyclohydrolase 1 OS= Polaribacter sejongensis OX=985043 GN=folE PE=3 SV=1
MKNKKEIEIVGDNHFSSSIRTPLRADAFDKSDEEKIENIQYHFKKIMEEMGLDLTDDSLSGTPYRVAKMYVKELFYGLNPVNKPKLSTFENKYGYNKMLVEQNITIDSACEHHFLPIIGYANVAYIPKDKVIGLSKINRLVDYYARRPQVQERLVLQILNDLQTILGTKDVIVSVTAKHLCVSSRGIKDQSSFTTTLEYGGCFTEVEKRNDFLKIIAQEKI

SEQ ID NO: 12815 - protein, 229 aa, Polaribacter sp.
  misc_feature (1)..(229): tr|A0A1Y0M7N8|A0A1Y0M7N8_9FLAO GTP cyclohydrolase 1 OS= Polaribacter sp. SA4-10 OX=754397 GN=folE PE=3 SV=1
MFELSSKMNDERSEEIGEDHVGTSAKTPLRADAFDISDEEKINRIQESVKDILTTLGMDLTDDSLQGTPKRVAKSFVNELFMGLNPKNMPKASTFDNNYNYGEMLVEKNIVVYSTCEHHLLPIIGRAHVAYISDGKVIGLSKMNRIVEYFAKRPQVQERLTMQVVQAMQEALGTQDVACVIDAKHLCVNSRGIKDIESSTVTAEFGGKFKEKDRKREFLDYLKMETNFD

SEQ ID NO: 12816 - protein, 232 aa, Polaribacter sp.
  misc_feature (1)..(232): tr|A0A5C6Y532|A0A5C6Y532_9FLAO GTP cyclohydrolase 1 OS= Polaribacter sp. IC066 OX=57032 GN=folE PE=3 SV=1
MITDLQSNGQQIIKKKSSFSVDSSSDDHFSAGLKTPMKPSAFNISEEEKKEKISILFEEIMDVMGLDITDDSLKGTPSRVAKMYVDEIFSGLNPANKPEITLFENSYQYNQMLVEKNITVYSTCEHHFVPIIGKAHVAYISSGKVIGLSKLNRIVQYFAKRPQVQERLTNQIAEELKLVLKTEDVAVIIDAKHLCVSSRGIKDDTSSTTTSYFGGEFKKQSKIAELQNTLKY

SEQ ID NO: 12817 - protein, 228 aa, Polaribacter vadi
  misc_feature (1)..(228): tr|A0A1B8U0U7|A0A1B8U0U7_9FLAO GTP cyclohydrolase 1 OS= Polaribacter vadi OX=1774273 GN=folE PE=3 SV=1
MFELDSKMNDERIEELGENHVGTSAKTPLRADAFDISDEEKISRIQESVKDILFTLGMDLEDDSIQGTPKRVAKAFVNELFMGLNPKNKPVPSTFDNNYSYGEMLVEKNIVVYSTCEHHLLPIIGRAHVAYISDGKVIGLSKMNRIVEYFAKRPQVQERLTMQVVQAMQEALGTKDVACVIDAKHLCVNSRGIKDIESSTVTAEFGGKFKEKDTKNEFLNYIKMDTNF

SEQ ID NO: 12818 - protein, 240 aa, Polaromonas naphthalenivorans
  misc_feature (1)..(240): tr|A1VKQ1|A1VKQ1_POLNA GTP cyclohydrolase I OS=Polaromo nas naphthalenivorans (strain CJ2) OX=365044 GN=Pnap_09 12 PE=4 SV=1
MLMKTTPPSQDLTDEGTPVSVKIRERLVMARKRFHANDNIAEFIEPGEMEKLLDEVEIKMQGVLDSMVIDTVGDHNTGNTARRVAKMYLKEVFNGRYVTAPTITEFPNAEHLNELMIVGPITVRSACSHHFCPVIGKIWIGVLPNEHTNVIGLSKYARLAEWVMGRPQIQEEAVVQLADLIMEKTQPDGLAIVMEASHYCMAWRGVKDMDSKMINSVMRGVFLKDSTLRREFLALIPRKG

SEQ ID NO: 12819 - protein, 240 aa, Polaromonas sp.
  misc_feature (1)..(240): tr|Q12F67|Q12F67_POLSJ GTP cyclohydrolase I OS=Polaromo nas sp. (strain JS666 / ATCC BAA-500) OX=296591 GN=Bpro _0869 PE=4 SV=1
MLMKSTTHPQGSTDEGTPVSVKIRERLHQARKRFHANDNIAAFIEPGELEKLLDEVEVKMQTVLDSLVIDTAGDHNTNNTARRVAKMYLNEVFKGRYVQPPTITEFPNAEHLNELMIVGPITVRSACSHHFCPVIGKIWIGVMPNEHTNVIGLSKYARLAEWVMGRPQIQEEAVVQLADLIMEKTQPDGLAIVMEASHYCMAWRGVKDMDSKMINSVMRGVFLKDPNLRREFLALIPQKG

SEQ ID NO: 12820 - protein, 203 aa, Polaromonas sp.
  misc_feature (1)..(203): tr|A0A068YZ53|A0A068YZ53_9BURK GTP cyclohydrolase 1 OS= Polaromonas sp. CG9_12 OX=1504672 GN=folE PE=3 SV=1
MTAPRPELAEVEAAVRTLLRWAGDDPGREGLMDTPRRVARAYGEFFSGYGADPIATLAALAATFEEAGDYDDMVLVRNIRLESHCEHHLVPIIGWAHIAYLPDKRVVGLSKLARVVDLYARRLQIQERLTSQIAQTLADVLQPRGVAVMIEAEHMCMTTRGVYKPGSTTVTQRLLGVFRTDAHLRREALAAISHATPSGAFQV

SEQ ID NO: 12821 - protein, 272 aa, [Polyangium] brachysporum
  misc_feature (1)..(272): tr|A0A0G3BF93|A0A0G3BF93_9BURK GTP cyclohydrolase FolE2 OS=[Polyangium] brachysporum OX=413882 GN=folE2 PE=3 S V=1
MNDMTDLKSLISAAEVAMPDVQSSRDERRLAIQRVGVKDVRYPIQLRVGGQVQHGVATWDLDVALPADQKGTHMSRFVAWLNEHHLHPIEAATLRQDLVSMLTLLHADEGRIEARFSFFILKTAPVSGVQSLLDYQGKWIAESRGGQVTVWAEVVVPVKSLCPCSKEISEFGAHNQRSHVTIRAELLGDVDWRELVRFAEESASSEIWPLLKRTDEKWITERAYENPKFVEDLVRDVALRVNAEPRVGRYRVEVENFESIHNHSAFAVIERT

SEQ ID NO: 12822 - protein, 180 aa, Polycyclovorans sp.
  misc_feature (1)..(180): tr|A0A2E2J8L5|A0A2E2J8L5_9GAMM GTP cyclohydrolase 1 OS= Polycyclovorans sp. OX=2024852 GN=folE PE=3 SV=1
MEDQFRAILSAIGEDPLREGLLNTPQRAAKAMTFLTKGYQESLEEIVNGAIFETDNQEMVIVRDIEFYSMCEHHILPFFGRAHVAYLPAGKVIGLSKIPRIVDMFGRRLQIQEQLTQQIGECIQGATEARGVAVVIEAKHLCAMMRGVEKQHSQMITSMMLGAFRDDPRTRAEFLGLIRN

SEQ ID NO: 12823 - protein, 207 aa, Polymorphobacter sp.
  misc_feature (1)..(207): tr|A0A4Y9EM34|A0A4Y9EM34_9SPHN GTP cyclohydrolase 1 OS= Polymorphobacter sp. DJ1R-1 OX=2511025 GN=folE PE=3 SV= 1
MDHDHDNDSELPAHVHAHFPIPQERAEEAVRELLRWAGDDPEREGLIDTPARVARAFREYYRGYLEDPGTHLSRTFGEVGGYDEIVLLRDIPFQSHCEHHMAPIIGKAHIAYLPKDRVVGISKLARVLHGYARRLQVQERLTAEVADCIQLHLEPRGVAVVIEATHACMSARGVLTSGVTMTTSRMMGVFREDERSRKEVLALMGLG

SEQ ID NO: 12824 - protein, 211 aa, Polymorphum gilvum
  misc_feature (1)..(211): tr|F2J526|F2J526_POLGS GTP cyclohydrolase 1 OS=Polymorp hum gilvum (strain LMG 25793 / CGMCC 1.9160 / SL003B-26 A1) OX=991905 GN=folE PE=3 SV=1
MDAILKPVGNKAVRKAPHEVARPSREEAEAAVRTLLAWIGDDPEREGLLDTPKRVVKAYTEVLGGYFEDPEEHLQRTFEDVGGYDELIMVRDIPFHSFCEHHMLPFIGTAHIAYYPSGGVVGLSKLARVVDIYARRLQTQEHLTAQIVSAIDSHLAPRGLAVMLEAEHQCMTMRGVQKQGVSTITTQFTGVFQDDPSEQVRFITLVRGGSR

SEQ ID NO: 12825 - protein, 275 aa, Polynucleobacter aenigmaticus
  misc_feature (1)..(275): tr|A0A254Q1Y2|A0A254Q1Y2_9BURK GTP cyclohydrolase FolE2 OS=Polynucleobacter aenigmaticus OX=1743164 GN=folE2 P E=3 SV=1
MNDINTAFLKPQTMPDVQSSHDERALPIEQVGIRGLRHPLTIRTKTGVMPAVGNFEMDVALPAHVKGTHMSRFIALLQKYNEPIDSASVVSMVREMLPLLDATEGRIQFTYTHFVKKAAPVSGVESLMDYEVTWMAKAKQNAMGSIDVELNLRALVPVMSLCPCSKEISEYGAHNQRSHVTMSVELDSQTKMTVEDLVAAAESQASSELWGLLKRPDEKWVTERAYDNPKFVEDLVRDVAGQLKDDQRILSLVVEAENFESIHNHSAYAKISLAK

SEQ ID NO: 12826 - protein, 272 aa, Polynucleobacter asymbioticus
  misc_feature (1)..(272): sp|A4SZK2|GCH4_POLAQ GTP cyclohydrolase FolE2 OS=Polynu cleobacter asymbioticus (strain DSM 18221 / CIP 109841 / QLW-P1DMWA-1) OX=312153 GN=folE2 PE=3 SV=2
MNPAFLKASAMPDVQSSRDERALPIEQVGIRGVRHPLMIRSNTGNFPSVGNFEMDVALPAHVKGTHMSRFMALLQKQDEAIDSTTVVALVRDMLPLLDAKEGHVQFTYTHFVKKAAPVSGVESLMDYEVTWMATAKQNDAGSVEVELGLRAQVPVMSLCPCSKEISEFGAHNQRSHVTMTVVLDTQTKMTVEDLVSAAEREASSELWGLLKRPDEKWVTERSYSNPKFVEDLVRDVAGRLKADTRIQSFVVDAENFESIHNHSAFARISHKK

SEQ ID NO: 12827 - protein, 262 aa, Polynucleobacter asymbioticus
  misc_feature (1)..(262): tr|A4SVK2|A4SVK2_POLAQ GTP cyclohydrolase I OS=Polynucl eobacter asymbioticus (strain DSM 18221 / CIP 109841 / QLW-P1DMWA-1) OX=312153 GN=Pnuc_0295 PE=4 SV=1
MVTKNTKTPAKTQTKAVAKKLSVKKMTPQKIQSKNDDAGLPLSVMIRRRIEAQNARFHANDNISAFIKPGELEGLVDEVAEKMQAVLESLVIDTNSDHNTKNTSRRVAKMYVQEVFNGRYVEQPTLTKFPNVSRLNELMIVGPITIRSACSHHLCPIMGRIWIGVLPSKESALIGLSKYSRLTEWVMCRPQIQEEAVVELADMLEKKIKPIGVAIVMDADHFCMQWRGVKDRDSKMVNSVMRGAFLKDSNLRREFLSLLDKR

SEQ ID NO: 12828 - protein, 275 aa, Polynucleobacter campilacus
  misc_feature (1)..(275): tr|A0A254Q3X2|A0A254Q3X2_9BURK GTP cyclohydrolase FolE2 OS=Polynucleobacter campilacus OX=1743163 GN=folE2 PE= 3 SV=1
MNDMNPAFLKASAMPDVQSTLDERALPIEQVGIRGVRHPLTIRSASGDFPSVGQFEMDVALPAHVKGTHMSRFMALLQKQEMAVDSTTVVAMVCDMLPLLDAKEGHVQFTYTHFVKKAAPVSGVESLMDYEVTWMATAKQNPAGKLDIELGLRAQVPVMSLCPCSKEISEFGAHNQRSHVTMDVVLDSQTKMTVEDLITAAESEASSELWGLLKRPDEKWVTEHSYSNPKFVEDLVRDVAGNLKADQRIRSFVVEAENFESIHNHSAFARISHKK

SEQ ID NO: 12829 - protein, 267 aa, Polynucleobacter cosmopolitanus
  misc_feature (1)..(267): tr|A0A229FUZ5|A0A229FUZ5_9BURK GTP cyclohydrolase FolE2 OS=Polynucleobacter cosmopolitanus OX=351345 GN=folE2 PE=3 SV=1
MNAPEKIFLPDVQASHDERNIVIQKVGIKSVRHPVQIKTKAGSQASVAMIDMTVKLPSDVKGTHMSRFLEVLQNQHAPLEFDSVKSLMSTMLERLEATEGHIDMKMPLFLNKVAPVSGVESLLDYDLHIKAAFEKGALRYTLQVQVPVTSLCPCSKKISEYGAHNQRSHIVIAAEITENMDAEDLIKIAEQAASCELWGLLKRPDEKYVTEKAYDNPKFVEDLVRDIAVALDHSDKVVAYEVSSENFESIHNHSAYAWLAKDKRHTH

SEQ ID NO: 12830 - protein, 273 aa, Polynucleobacter cosmopolitanus
  misc_feature (1)..(273): tr|A0A229FUC8|A0A229FUC8_9BURK GTP cyclohydrolase FolE2 OS=Polynucleobacter cosmopolitanus OX=351345 GN=folE2 PE=3 SV=1
MNDINTSFLKTSAMADVQSSVDHRNIVINRVGIRGVRHPIQVTTESGVQPSVAMIDLDVLLPADKKGTHMSRFIALLQDSHAPLNAHEMRSMIGKMLPLLEAQAGQISLKYTHFINKTAPISGVQSLLDYDVTWVANAKNLNGQVEVDLKLQAVVPVTSLCPCSKEISEYGAHNQRSHVTMNVTLQKDIDLSIEDLVRIAEAEASCELWGLLKRPDEKFVTERAYDNPKFVEDLVRDVAGRLKADERIKSFVVEAENFESIHNHSAYALIQSD

SEQ ID NO: 12831 - protein, 259 aa, Polynucleobacter duraquae
  misc_feature (1)..(259): tr|A0A0E3ZIR0|A0A0E3ZIR0_9BURK GTP cyclohydrolase I OS= Polynucleobacter duraquae OX=1835254 GN=CL55_00003040 P E=4 SV=1
MPTKKIPAKTVAKSPAKKVSTVNSAKKVAAQKSDVGAPLSVVIRRRIEAQKARFHANDNISKFIQPGELEGLVDEVAEKMQAVLESLVIDTDSDHNTKNTSQRVAKMFVKEVFNGRYIEQPTLTKFPNVSRLNELMIIGPITVRSACSHHLCPIMGRIWIGVLPSKESALIGLSKYSRLTEWVMCRPQIQEEAVVELADMLEKKIKPIGVAIVMDADHFCMQWRGVKDRDSKMVNSVMRGAFLKDSNLRREFLSLLEKR

SEQ ID NO: 12832 - protein, 227 aa, Polynucleobacter duraquae
  misc_feature (1)..(227): tr|A0A0E3ZJ85|A0A0E3ZJ85_9BURK GTP cyclohydrolase I OS= Polynucleobacter duraquae OX=1835254 GN=CL55_00006090 P E=4 SV=1
MNDGIPLSEVIRKRIKAKKARFHANDNISAFIQAGELDALVEEVSEKMQAVLESLVIDTQSDHNTKNTSRRVAKMFINEVFNGRYVEQPSLTKFPNVSQLNELMIIGPITVRSACSHHLCPIMGRVWIGILPDKNSALIGLSKYSRLTEWVMCRPQIQEEAVVELADMIEKKVKPTGVAIVMDADHFCMQWRGVKDPDSKMINSVMRGSFLKDSNLRREFLSLISRN

SEQ ID NO: 12833 - protein, 275 aa, Polynucleobacter hirudinilacicola
  misc_feature (1)..(275): tr|A0A210RW84|A0A210RW84_9BURK GTP cyclohydrolase FolE2 OS=Polynucleobacter hirudinilacicola OX=1743166 GN=fol E2 PE=3 SV=1
MNDMNPAFLKASAMPDVQSTLDERALPIEQVGIRGVRHPLTIRSASGDFPSVGQFEMDVALPAHVKGTHMSRFMALLQKQAMAIDSTTVVAMVRDMLPLLDAKEGHVQFTYTHFVKKAAPVSGVESLMDYEVTWMARAKQNPAGKLDVELGLRAQVPVMSLCPCSKEISEFGAHNQRSHVTMDVMLDSQTKMTVEDLITAAESEASSELWGLLKRPDEKWVTEHSYSNPKFVEDLVRDVAGNLKADERIRSFVVEAENFESIHNHSAFARISHKK

SEQ ID NO: 12834 - protein, 278 aa, Polynucleobacter meluiroseus
  misc_feature (1)..(278): tr|A0A240DXV6|A0A240DXV6_9BURK GTP cyclohydrolase FolE2 OS=Polynucleobacter meluiroseus OX=1938814 GN=folE2 PE =3 SV=1
MNDINPSFLQSQAMPDVQSAHDERALPIEQVGIRGLRHPLTIRTRSGILPAVGNFEMDVALPAHVKGTHMSRFIALLQKQEEAIDSASVVSMVREMLPLLNAKEGRIQFTYTHFVKKAAPVSGVESLMDYEVTWTAKAKQGVQDAQDAIDVELNLRAVVPVMSLCPCSKEISEYGAHNQRSHITMSVSLDPRTKMTVEDLVAAAESQASSELWGLLKRPDEKWVTEHAYDNPKFVEDLVRDVAGQLQQDQRVLSLEVEAENFESIHNHSAFARISLTK

SEQ ID NO: 12835 - protein, 275 aa, Polynucleobacter necessarius
  misc_feature (1)..(275): tr|B1XVZ3|B1XVZ3_POLNS GTP cyclohydrolase FolE2 OS=Poly nucleobacter necessarius subsp. necessarius (strain STI R1) OX=452638 GN=folE2 PE=3 SV=1
MNDMNPAFLKSSAMPDVQSTRDERALPIEQVGIRGVRHPLTIRSKTGNFPSVGTFEMDVALPAHVKGTHMSRFMALLQKQDIVVDSTSVVAMAREMLPLLDAKEGHVQFTYTHFVKKAAPVSGVESLMDYKVTWMATVKQNANGNADVELGLRAQVPVMSLCPCSKEISAFGAHNQRSHVTMSVVLDVETKMTVEDLVAAAESEASSELWGLLKRPDEKWVTERSYSNPKFVEDLVRDVAGNLKADQRIRSFVVEAENFESIHNHSAFARISLQK

SEQ ID NO: 12836 - protein, 275 aa, Polynucleobacter paneuropaeus
  misc_feature (1)..(275): tr|A0A2Z4JNQ3|A0A2Z4JNQ3_9BURK GTP cyclohydrolase FolE2 OS=Polynucleobacter paneuropaeus OX=2527775 GN=folE2 P E=3 SV=1
MNDLNAAFLKPQSMPDVQSTRDERALAIEQVGIRGVRHPLTVRSKAGSFPSVGTFEMNVALPAHVKGTHMSRFIALLQKQEAAVDSTTAVTLVREMLPLLNATEGSVQFTYTHFVKKSAPVSGVESLMDYEVTWTAQARQNVSGTLETQLHLRAVVPVMSLCPCSKEISEFGAHNQRSHVTMSVVLDPQTKMTVEDLVSAAESEASSELWGLLKRPDEKWVTEHSYSNPKFVEDLVRDVAGRLQQDQRIQSLVVEAENFESIHNHSAYAKISLTK

SEQ ID NO: 12837 - protein, 275 aa, Polynucleobacter paneuropaeus
  misc_feature (1)..(275): tr|A0A2Z4JVB8|A0A2Z4JVB8_9BURK GTP cyclohydrolase FolE2 OS=Polynucleobacter paneuropaeus OX=2527775 GN=folE2 P E=3 SV=1
MNDLNAAFLKPQSMPDVQSTRDERALAIEQVGIRGVRHPLTVRSKAGSFPSVGTFEMNVALPAHVKGTHMSRFIALLQKQEAAVDSTTAVTLVREMLPLLNATEGSVQFTYTHFVKKSAPVSGVESLMDYEVTWTAQARQNVSGTLEAQLHLRAVVPVMSLCPCSKEISEFGAHNQRSHVTMSVVLDPQTKMTVEDLVSAAESEASSELWGLLKRPDEKWVTEHSYSNPKFVEDLVRDVAGRLQQDQRIQSLVVEAENFESIHNHSAYAKISLTK

SEQ ID NO: 12838 - protein, 275 aa, Polynucleobacter sp.
  misc_feature (1)..(275): tr|A0A258XCU8|A0A258XCU8_9BURK GTP cyclohydrolase FolE2 OS=Polynucleobacter sp. 16-46-70 OX=1970421 GN=folE2 P E=3 SV=1
MNDINTAFLKPQTMPDVQSSHDERALPIEQVGIRGLRHPLVIRTKSGDMPAVGNFEMDVALPAHVKGTHMSRFIALLQKHQEPVDSTSIVAMVREMLPLLNATEGRIQFTYTHFVKKAAPVSGVESLMDYEVTWTAIAKQSAAGSIGVELNLRALVPVMSLCPCSKEISEYGAHNQRSHVTMSVSLDPHTKMTVEDLVTAAEGQASSELWGLLKRPDEKWVTERAYDNPKFVEDLVRDVAGQLKGDQRILSLVVEAENFESIHNHSAYAKISLTK

SEQ ID NO: 12839 - protein, 275 aa, Polynucleobacter sp.
  misc_feature (1)..(275): tr|A0A1G3CSY9|A0A1G3CSY9_9BURK GTP cyclohydrolase FolE2 OS=Polynucleobacter sp. GWA2_45_21 OX=1801989 GN=folE2 PE=3 SV=1
MNDINTAFLKPQTMPDIQSSHDERALPIEQVGIRGLRHPLSIRTQTGVMPAVGNFEMDVALPAHVKGTHMSRFIALLQKHNEPIDSASVVAMVREMLPLLNATEGRIQFTYTHFVKKAAPVSGVESLMDYEVTWTAKAKQNAAGAIDVELNLRALVPVMSLCPCSKEISEYGAHNQRSHVTMSVELDPQTKMTVEDLVAAAESQASSELWGLLKRPDEKWVTERAYDNPKFVEDLVRDVAGQLKDDDRILSLVVEAENFESIHNHSAYAKISLAK

SEQ ID NO: 12840 - protein, 275 aa, Polynucleobacter sphagniphilus
  misc_feature (1)..(275): tr|A0A1R0HDR1|A0A1R0HDR1_9BURK GTP cyclohydrolase FolE2 OS=Polynucleobacter sphagniphilus OX=1743169 GN=folE2 PE=3 SV=1
MNDINTAFLQTHAMPDVQSSHDERALPIEQVGIRGLRHPLMIRTKAGTFPAVGNFEMDVALPANVKGTHMSRFVALLQKQTEAIDSEVVVKMVREMLPLLNATEGRIQFSYTHFVKKAAPVSSVESLMDYEVTWIAKGKLLATGNVDVELNLRALVPVMSLCPCSKEISEYGAHNQRSHVTMSVALDSQTKMTVEDLVQAAESQASSELWGMLKRPDEKWVTERAYDNPKFVEDLVRDVAGQLKKDERILSLVVEAENFESIHNHSAYAKISLSK

SEQ ID NO: 12841 - protein, 267 aa, Polynucleobacter victoriensis
  misc_feature (1)..(267): tr|A0A212TDX6|A0A212TDX6_9BURK GTP cyclohydrolase FolE2 OS=Polynucleobacter victoriensis OX=2049319 GN=folE2 P E=3 SV=1
MNAPENIFLPDVQASLDERNIVIQKVGIKSVRHPVTLQTQTGTQPSVAMIDMTVMLPSNVKGTHMSRFLEVLQNHHEPLNLASVKTMMVNMLNRLEAEEGHLDLKMPLFLKKVAPVSGVESLLDYDLHIKAAFKDGGLKYTLQVQVPVTSLCPCSKKISEYGAHNQRSHIVIAAELTEDMAAEDLIKIAEQAASCELWGLLKRPDEKYVTERAYDNPKFVEDLVRDIAVALEQERKVIAYEVSSENFESIHNHSAYAWLSNDKRNRH

SEQ ID NO: 12842 - protein, 273 aa, Polynucleobacter victoriensis
  misc_feature (1)..(273): tr|A0A212THE0|A0A212THE0_9BURK GTP cyclohydrolase FolE2 OS=Polynucleobacter victoriensis OX=2049319 GN=folE2 P E=3 SV=1
MNDLNTSFLKTSEMPDVQSSIDHRNIAIDRVGIRGVRHPIQVKTEAGVQPSVAMIDLDVLLPGDKKGTHMSRFMALLQDHDAPLDAAQMRLMVTKMLPLLEADAGQISLKYTHFINKTAPISGVQSLLDYDVTWIAFAKKVNGDTQVELRLQAVVPVTSLCPCSKEIAEYGAHNQRSHVTMNVALQSEADLTIESLVKIAEAEASCELWGLLKRPDEKYVTEKAYDNPKFVEDLVRDVASRLKADNRIKSFVVEAENFESIHNHSAYALIQSN

SEQ ID NO: 12843 - protein, 275 aa, Polynucleobacter wuianus
  misc_feature (1)..(275): tr|A0A191UGZ8|A0A191UGZ8_9BURK GTP cyclohydrolase FolE2 OS=Polynucleobacter wuianus OX=1743168 GN=folE2 PE=3 S V=1
MNDMNPAFLKASAMPDVQSTLDERALPIEQVGIRGVRHPLTIRSATGNFPSVGTFEMDVALPAHVKGTHMSRFMALLQKQEHAVDSTTVVALVQEMLPLLDAKEGHVQFTYTHFVKKAAPVSGVESLMDYEVTWMATAKQNTAGNTDVELGLRAQVPVMSLCPCSKEISEFGAHNQRSHVTMTVALDSKTQMTVEDLVAAAESEASSELWGLLKRPDEKWVTEHSYSNPKFVEDLVRDVAGNLKADQRIRSFVVEAENFESIHNHSAFARISHKK

SEQ ID NO: 12844 - protein, 367 aa, Pontibaca methylaminivorans
  misc_feature (1)..(367): tr|A0A1R3WHM4|A0A1R3WHM4_9RHOB GTP cyclohydrolase FolE2 OS=Pontibaca methylaminivorans OX=515897 GN=folE2 PE=3 SV=1
MNIQNPTLDRAPEDTEARAALELLRAWARRASAEQLAGLDPALRSLAEPDPASPYPAFSREYPADFIVDPEYRAELPDLQNGPASLILGAREQIQHVGISNFRLPIRFHRRDGADLTLETSVTGTVSLEAEKKGINMSRIMRSFYTHSERTFSFEVIEGALDDYKSDLESLDARIQMRFSFPVKMTSLRSGLEGYQYYDIALELVESDGQRQKIMHLDYVYSSTCPCSLELSEHARSARGQLATPHSQRSVARVSVALVPDGPCMWFEDLIEACRRAVPTETQVMVKREDEQAFAELNAANPIFVEDAVRLFCEQLQRDPRIGDFRVVASHQESLHSHDAVSMLVQGDTFASGSIDPRLFPSMFHVG

SEQ ID NO: 12845 - protein, 308 aa, Pontibacillus chungwhensis
  misc_feature (1)..(308): tr|A0A0A2VH81|A0A0A2VH81_9BACI GTP cyclohydrolase FolE2 OS=Pontibacillus chungwhensis BH030062 OX=1385513 GN=f olE2 PE=3 SV=1
MNQTNINTQKQLPSKEERHKLFGSVDPGPRTKPIEKDEMADLQNSREDFLFDLDAVGISNVKHPIRIYSSKKPEMQTTIGTFRFASSIGKGSKGTNMSRFTEQLDRYHNDGFAVDITTLKKFTKELADRLKQEDAEVEVSYPWFFERRGPFSDLAGMNHADATMKVSYHQQTGYDVEVSLTGKITTLCPCSKEISEYSAHNQRGNVTMSVRLTEDFDENDMDWKEALLEAAESNASARIHPVLKRPDEKAVTEQAYENPRFVEDIVRLVAADLYELPYVERFYVACRNEESIHLHDAIAEVTYDKTEE

SEQ ID NO: 12846 - protein, 310 aa, Pontibacillus halophilus
  misc_feature (1)..(310): tr|A0A0A5GLN0|A0A0A5GLN0_9BACI GTP cyclohydrolase FolE2 OS=Pontibacillus halophilus JSM 076056 = DSM 19796 OX= 1385510 GN=folE2 PE=3 SV=1
MNQTDLNTIKQLPSKEERHKLFGSVDPGPRTKPVEKSEMKDLQNAREDFLFDLDAVGISNVKHPIRINSTMKPEIQTTIGTFKFASSIKQGSKGTNMSRFTEQLDQYHNEGFAIDITTLKRFTKELAGRLKQKDSMVEVSYPWFFERKGPFSDLAGMNHADATIKVNYHEETGFDVEVSLTGKITTLCPCSKEISEYSAHNQRGNVTMSIELTDDFNEDEIDWKHQLLEAAESNASARIHPVLKRPDEKAVTEQAYENPRFVEDIVRLVAADLYELPFVTKFYVACRNEESIHLHDAIAEVTYDKRDETN

SEQ ID NO: 12847 - protein, 308 aa, Pontibacillus litoralis
  misc_feature (1)..(308): tr|A0A0A5G8Q6|A0A0A5G8Q6_9BACI GTP cyclohydrolase FolE2 OS=Pontibacillus litoralis JSM 072002 OX=1385512 GN=fo lE2 PE=3 SV=1
MNKTNLNPMKQLPSKEERHKLFGSVEPGPRTKPVEKNKMADLQNSKKDFLFDIDVVGISNVKHPIRIHSSLKPEIQTTIGTFRFSSSIKKGSKGTNMSRFTEQLDKYHNEGFAIDLYTLKAFTKELAERLKQEDAYVEVTFPWFFERKGPFSQLTGLNHANATLKVNYDIHTGYDIEVALQGTITTLCPCSKEISEYSAHNQRGQVTMSVKLTDDFNEQEVDWKAALLEAAESNASARIHPVLKRPDEKAVTEQAYENPRFVEDIVRLVAADLYEMPFVQSFYVACRNEESIHLHDAIAELHYDKTSE

SEQ ID NO: 12848 - protein, 308 aa, Pontibacillus marinus
  misc_feature (1)..(308): tr|A0A0A5GJZ6|A0A0A5GJZ6_9BACI GTP cyclohydrolase FolE2 OS=Pontibacillus marinus BH030004 = DSM 16465 OX=13855 11 GN=folE2 PE=3 SV=1
MNQTNINANKQLPPKHERHKMFGSVPAGPRTKPVEKEQMVDLQNTKKDFLFDLDAVGITNVKHPIKINSSMKPEIQTTIGTFRFSSSIGKGSKGTNMSRFTEQLDQYHNEGFAIDLETLKRFTKELAARLKQKDAEVEVTYPWFFERKGPFSDLAGMNHADATMKVQYHEDTGYDVEVSLKGTITTLCPCSKEISEYSAHNQRGQVTMSVKLTDDFDENQTDWKAALLEASESNASARIHPVLKRPDEKAVTEQAYENPRFVEDIVRLVAADLYELPYVEKFYVSCQNEESIHLHDAIAEVTYDKTQE

SEQ ID NO: 12849 - protein, 188 aa, Pontibacillus marinus
  misc_feature (1)..(188): tr|A0A0A5GKV4|A0A0A5GKV4_9BACI GTP cyclohydrolase 1 OS= Pontibacillus marinus BH030004 = DSM 16465 OX=1385511 G N=folE PE=3 SV=1
MKEKEGLVEKNVRSILEEIGEDPQREGLLDTPKRVAKMYKEVFEGVGVDPSVALTTTFESEGYDGMVVVRDIDYYTFCEHHLIPFFGKAHIGYMPENRIVGLSKFARLVELTAKRPQVQERMTEQIASAIHDVLSPKGVIVTVEGQHLCMCARGVKKPGTSTVTTVKRGSFKEDKSLVREFERSIATT

SEQ ID NO: 12850 - protein, 308 aa, Pontibacillus yanchengensis
  misc_feature (1)..(308): tr|A0A0A2TAC4|A0A0A2TAC4_9BACI GTP cyclohydrolase FolE2 OS=Pontibacillus yanchengensis Y32 OX=1385514 GN=folE2 PE=3 SV=1
MNKTDVNAKKQLPSKEDRHKLFGSVDPGPRTKPVEKDDMADLQNSKKDFLFDLDAVGITNVKHPIRIHSTKKPEIQTTIGTFRFSSSIGKGSKGTNMSRFTEQLDKYHNEGFAIDIYTLKKFTKELAERLKQQDASVEVTFPWFFERKGPFSDLTGMNHADATMNVTYHEELGYDIDVSLKGTITTLCPCSKEISEYSAHNQRGQVTMSVKLTDDFDEQEMDWKEALLEASESNASARIHPVLKRPDEKAVTEQAYENPRFVEDIVRLVAADLYEMPFVQSFYVACQNEESIHLHDAIAEINYDKTTE

SEQ ID NO: 12851 - protein, 222 aa, Pontibacter actiniarum
  misc_feature (1)..(222): tr|A0A1X9YXI2|A0A1X9YXI2_9BACT GTP cyclohydrolase 1 OS= Pontibacter actiniarum OX=323450 GN=folE PE=3 SV=1
MDNHDLEKEEAMDDHVMSSLETPLRADAFDLSDDEKIAIIEGHFREIMHTLGLDLTDDSLKGTPHRVAKMYVKEIFHGLHPDNKPVARRFENKYKYHKMLVERDITVYSSCEHHFVPIIGKAHVAYIPNEHVIGLSKLNRLVHYYARRPQVQERLTMQIANELKQALQTENVAVLIEADHLCVMSRGVNDVSSSTVTAEYSGLFEQEQYRSEFLGHIRGGKR

SEQ ID NO: 12852 - protein, 230 aa, Pontibacter akesuensis
  misc_feature (1)..(230): tr|A0A1I7JAU0|A0A1I7JAU0_9BACT GTP cyclohydrolase 1 OS= Pontibacter akesuensis OX=388950 GN=folE PE=3 SV=1
MKQKETLWNIMDNHDLDKEEAMDDHVMSSLDTPLRPDAFDLSDDEKIAIIEQHFHGIMHALGLDLTDDSLKGTPARVAKMYVKEIFHGLHPDNKPYARRFENKYKYNKMLVERNITVYSSCEHHFVPIIGKAHVAYIPNEHVIGLSKLNRIVHYFARRPQVQERLTMQIANELKQALKTDNVAVLIEADHLCVMSRGVNDVSSSTITAEYSGLFEQDQYRNEFLGHIRTK

SEQ ID NO: 12853 - protein, 231 aa, Pontibacter chinhatensis
  misc_feature (1)..(231): tr|A0A1I2VAU8|A0A1I2VAU8_9BACT GTP cyclohydrolase 1 OS= Pontibacter chinhatensis OX=1436961 GN=folE PE=3 SV=1
MRQNETLWNIMDNHDLENQEAMDDHVMGSLETPMRADAFDLSDDEKITIIEGHFREIMHTLGLDLKDDSLKGTPHRVAKMFVKEIFSGLHPDNKPHARRFENKYKYNKMLVERDITVYSSCEHHFVPIIGKAHVAYIPNEHVIGLSKLNRIVQYYARRPQVQERMTMQIANEMKQALQTENVAVLIEADHLCVMSRGVNDVSSSTITAEYSGLFEQESYRAEFLGHIRTKR

SEQ ID NO: 12854 - protein, 226 aa, Pontibacter diazotrophicus
  misc_feature (1)..(226): tr|A0A3D8LI29|A0A3D8LI29_9BACT GTP cyclohydrolase 1 OS= Pontibacter diazotrophicus OX=1400979 GN=folE PE=3 SV=1
MDNHNNDIDIDRDEEAMDDHVMSSLDTPLRADAFKLSNAEKVEIIKGHFHEIMHTLGLDLTDDSLKGTPLRVAKMYVNEIFSGLHPDNKPVARRFENKYKYHKMLVERDITVYSSCEHHFVPIIGKAHVAYIPNEHVIGLSKLNRIVHYYARRPQVQERMTMQIANELKQALQTENVAVMIEADHLCVMSRGVGDVSSSTITAEYSGLFDQQEYRSEFLSHIRSKH

SEQ ID NO: 12855 - protein, 221 aa, Pontibacter indicus
  misc_feature (1)..(221): tr|A0A1R3XJI3|A0A1R3XJI3_9BACT GTP cyclohydrolase 1 OS= Pontibacter indicus OX=1317125 GN=folE PE=3 SV=1
MDNQDLGHGAEEIDDHMMGSLETPLRPDAFALSDAEKIVIIERHFREIMHTMGLDLTDDSLKGTPLRVAKMYVQEIFSGLHPENKPVIRRFENKYKYKQMLVERDITVYSSCEHHFVPIIGKAHVAYMPNEHVIGLSKLNRIVQYYARRPQVQERMTMQIANELKQALQTENVAVLIEADHLCVMSRGVNDVSSSTITAEYSGLFEQDQYRNEFLNHIRQK

SEQ ID NO: 12856 - protein, 222 aa, Pontibacter korlensis
  misc_feature (1)..(222): tr|A0A0E3ZDW0|A0A0E3ZDW0_9BACT GTP cyclohydrolase 1 OS= Pontibacter korlensis OX=400092 GN=folE PE=3 SV=1
MDNHDLEKEEEMDDHMMSSLETPLRADAFDLSDDEKIAIIEGHFREIMHTLGLDLTDDSLKGTPHRVAKMYVKETFSGLHPDNKPIPRRFENKYKYDKMLVERDITVYSSCEHHFVPIIGKAHVAYIPNEHVIGLSKLNRIVHYYARRPQVQERMTMQIADALKQALRTENVAVLIEADHLCVMSRGVNDVSSSTITAEYSGLFEQENYRAEFLGHIRSSKH

SEQ ID NO: 12857 - protein, 231 aa, Pontibacter lucknowensis
  misc_feature (1)..(231): tr|A0A1N6TFD9|A0A1N6TFD9_9BACT GTP cyclohydrolase 1 OS= Pontibacter lucknowensis OX=1077936 GN=folE PE=3 SV=1
MKLNETLLNIMDNQDLGQEAEEMDDHMMSSLETPLRPDAFDLSDAEKIVIIERHFREIMHTMGLDLTDDSLKGTPLRVAKMYVQEIFSGLHPENKPVIRRFENKYKYNQMLVERDITVYSSCEHHFVPIIGKAHVAYMPNEHVIGLSKLNRIVQYYARRPQVQERMTMQIADELKQALQTENVAVLIEADHLCVMSRGVNDVSSSTITAEYSGLFEQEQYRSEFLSHIRKK

SEQ ID NO: 12858 - protein, 231 aa, Pontibacter mucosus
  misc_feature (1)..(231): tr|A0A2T5YJS7|A0A2T5YJS7_9BACT GTP cyclohydrolase 1 OS= Pontibacter mucosus OX=1649266 GN=folE PE=3 SV=1
MRQNETLWNIMDNHDLENQEAMDDHVMGSLETPLRADAFDLSDDEKITIIEGHFREIMHTLGLDLKDDSLKGTPHRVAKMFVKEIFSGLHPDNKPHARRFENKYKYNKMLVERDITVYSSCEHHFVPIIGKAHVAYIPNEHVIGLSKLNRIVQYYARRPQVQERMTMQIANEMKQALQTENVAVLIEADHLCVMSRGVNDVSSSTITAEYSGLFEQETYRSEFLGHIRTKR

SEQ ID NO: 12859 - protein, 231 aa, Pontibacter ramchanderi
  misc_feature (1)..(231): tr|A0A2N3UB24|A0A2N3UB24_9BACT GTP cyclohydrolase 1 OS= Pontibacter ramchanderi OX=1179743 GN=folE PE=3 SV=1
MKLNETLLNIMDNQDLGHEAEEMDDHMMSSLETPLRPDAFALSDAEKIVIIERHFREIMHTMGLDLTDDSLKGTPLRVAKMYVQEIFSGLHPENKPVIRRFENKYKYNQMLVERDITVYSSCEHHFVPIIGKAHVAYMPNEHVIGLSKLNRIVQYYARRPQVQERMTMQIANELKQALQTENVAVLIEADHLCVMSRGVNDVSSSTITAEYSGLFEQDQYRNEFLSHIRKK

SEQ ID NO: 12860 - protein, 221 aa, Pontibacter sp.
  misc_feature (1)..(221): tr|A0A364RJM1|A0A364RJM1_9BACT GTP cyclohydrolase 1 OS= Pontibacter sp. 2b14 OX=2080288 GN=folE PE=3 SV=1
MDNHNLPDEEETLHDHMPGSLETPLRPDAFAMPDEEKINIIASHFREIMHTLGLDLTDDSLKGTPNRVAKMYVKEIFHGLNPIHKPVARRFENKYKYNKMLVERDITLYSSCEHHFVPIIGKAHVAYIPNEHVVGLSKLNRIVQYYARRPQVQERMTMQIANELKEALMTDNVAVVIEADHLCVMSRGVNDVSSSTITAEYSGLFEQDQYRNEFLSHIRSK

SEQ ID NO: 12861 - protein, 221 aa, Pontibacter sp.
  misc_feature (1)..(221): tr|A0A5C8K9U3|A0A5C8K9U3_9BACT GTP cyclohydrolase 1 OS= Pontibacter sp. GY10130 OX=2603253 GN=folE PE=3 SV=1
MDKQDKEHDLEAMEDHLMGSLETPLRPDAFDLPDGEKIAIIAAHFEKIMHTLGLDLTDDSLKGTPLRVAKMYVEEIFSGINPANKPLIRRFENKYNYNQMLVERDITVYSSCEHHFVPIIGKAHVAYMPNEHVIGLSKLNRIVQFYARRPQVQERMTMQIANELKQALKTDNVAVLIEADHLCVMSRGVNDVSSSTITAEYSGLFEENQYRNEFLSHIRQK

SEQ ID NO: 12862 - protein, 221 aa, Pontibacter ummariensis
  misc_feature (1)..(221): tr|A0A239BBH5|A0A239BBH5_9BACT GTP cyclohydrolase 1 OS= Pontibacter ummariensis OX=1610492 GN=folE PE=3 SV=1
MDNHNIDNEEEAMDDHVMSSLETPLRADAFDLTDEEKIKIIEGHFHEIMHTLGLDLTDDSLKGTPHRVAKMYVKEIFNGLHPDNKPVARRFENKYKYHKMLVERDITIYSSCEHHFVPIIGKAHVAYIPNEHVIGLSKLNRIVQYFARRPQVQERMTMQIANELKQALKTENVAVLIEADHLCVMSRGVNDVSSSTVTAEYSGLFEQEHFRSEFLGHIRTK

SEQ ID NO: 12863 - protein, 231 aa, Pontibacter virosus
  misc_feature (1)..(231): tr|A0A2U1AZS7|A0A2U1AZS7_9BACT GTP cyclohydrolase 1 OS= Pontibacter virosus OX=1765052 GN=folE PE=3 SV=1
MKLNETLLNIMDNQELGTEAEEMDDHMMSSLETPLRPDAFALSDAEKIVIIERHFREIMHTMGLDLTDDSLKGTPLRVAKMYVQEIFSGLHPENKPVIRRFENKYKYKQMLVERDITVYSSCEHHFVPIIGKAHVAYMPNEHVIGLSKLNRIVQYYARRPQVQERMTMQIANELKQALQTDDVAVLIEADHLCVMSRGVNDVSSSTITAEYSGLFEQDQYRNEFLSHIRKK

SEQ ID NO: 12864 - protein, 204 aa, Ponticaulis sp.
  misc_feature (1)..(204): tr|A0A2E0U2W5|A0A2E0U2W5_9RHOB GTP cyclohydrolase 1 OS= Ponticaulis sp. OX=2020902 GN=folE PE=3 SV=1
MDTITTPGSFERAEPIKRPSREEAEEAVRTLLAWAGDDPRREGLLDTPKRVVKAYEEWFSGYKEDPVAYLSRTFDDVQGYDDMVMLRDIDVESHCEHHMAPFIGKAYVAYQPTAAVVGISKLARVVEIFAKRLQTQETMTAQICDAITESLAPMGCAVLIDAKHECMTTRGVHHPNVSTITTQFTGVFKTDKDKRDRFLRLAGK

SEQ ID NO: 12865 - protein, 204 aa, Ponticaulis sp.; identical to SEQ ID NO: 9150
  misc_feature (1)..(204): tr|A0A2D7KKK2|A0A2D7KKK2_9RHOB GTP cyclohydrolase 1 OS= Ponticaulis sp. OX=2020902 GN=folE PE=3 SV=1

SEQ ID NO: 12866 - protein, 194 aa, Ponticoccus gilvus
  misc_feature (1)..(194): tr|A0A4R6LMC1|A0A4R6LMC1_9ACTN GTP cyclohydrolase 1 OS= Ponticoccus gilvus OX=519423 GN=folE PE=3 SV=1
MLRSMRPFDHERVSAAVRELLLGIGEDPDRNGLRDTPDRVARAYAEMFAGMRQDPADVLGTTFDIAHDEMVLVRDIEVWSCCEHHLVPFTGVAHVGYIPAAEGRITGLSKLARLVDVYAKRPQVQERLTTQIADALVEHLSPRGVIVVIECEHLCMTMRGVRKPGAKTVTSAVRGQLRDQTTRSEAMSLIIDGR

SEQ ID NO: 12867 - protein, 366 aa, Ponticoccus marisrubri
  misc_feature (1)..(366): tr|A0A0W7WNM8|A0A0W7WNM8_9RHOB GTP cyclohydrolase FolE2 OS=Ponticoccus marisrubri OX=1685382 GN=folE2 PE=3 SV= 1
MNIHTPELDRTPSREDAEEALALLRRWAGGAQQDEVAALDPALARLVPGAVAGAYPDLSRAYPHEFSVDTDYKAGLPDLQNGPSSLIRGVPRAIQHVGISNFRLPIRYHTRDNGDLMLETSVTGTVSLEADKKGINMSRIMRSFYAHAEKTFSFGVIEAALDDYKSDLESFDARINMRFSFPVKVDSLRSGLSGYQYYDIALELVETAGVRRKIMHLDYVYSSTCPCSLELSEHARRERGQLATPHSQRSVARISVEVEEGNCLWFEDLIEMCRAAVPTETQVMVKREDEQAFAELNAANPIFVEDAARLFAERLLADQRVGDFRVVASHQESLHSHDAVSVLTEGTLFEQDSLDPRLFASLYHVG

SEQ ID NO: 12868 - protein, 203 aa, Pontimonas salivibrio
  misc_feature (1)..(203): tr|A0A2L2BN11|A0A2L2BN11_9MICO GTP cyclohydrolase 1 OS= Pontimonas salivibrio OX=1159327 GN=folE PE=3 SV=1
MDDQRLQDAVTELLEALGENPERDGLQGTPGRVSKLFQELYRGVGIDPVTVLEEARPLAEAEDQFGDFVALRGIAFSSICEHHLLPFRGTADVGYQPADKLVGLGILADVVEIAASRPQMQERLGDMVADALVRSGVAAGSVVVLRGEHGCVQHRGPKLSESETVTVATAGSFRDPAARREALLSMGSAPLADADPTLPHGSN

SEQ ID NO: 12869 - protein, 211 aa, Pontivivens insulae
  misc_feature (1)..(211): tr|A0A2R8ACY8|A0A2R8ACY8_9RHOB GTP cyclohydrolase 1 OS= Pontivivens insulae OX=1639689 GN=folE PE=3 SV=1
MNAHDPEFNTERDDAPVARPTREQAEEAVRTLLRWAGDDPEREGLLDTPKRVTKAYGDWFRGYDEDPVEMLQRTFEEVEGYDEMVVLRDIRFESYCEHHMAPIIGKAHVGYIPNGRVVGISKLARVVDAFAKRLQVQEKMNAQVAQVLMETLQPHGVAVVLEGEHHCMSTRGVHKPGVSMVTSTMLGAFRDDPATRKEFLSVIGNPTNRMS

SEQ ID NO: 12870 - protein, 206 aa, Porphyrobacter dokdonensis
  misc_feature (1)..(206): tr|A0A1A7BM21|A0A1A7BM21_9SPHN GTP cyclohydrolase 1 OS= Porphyrobacter dokdonensis DSW-74 OX=1300349 GN=folE PE =3 SV=1
MNYVCAHDDEFDPDNPLGKPDVPEHVQDAIRTLLEWAGDDPTREGLLDTPKRVGRAWLEYCEGYKEDPAIHLTRQFEEVGGYDEIVLLKDIPFQSHCEHHMAPITGKAAIAYLPNKKVVGISKLARVLHGFAHRLQIQERLTAEVAQCIWDNLEPHGVAVVIEAQHGCMTGRGVKTHGVEMVTSRILGCFMDDHRSRKEVMSLMGY

SEQ ID NO: 12871 - protein, 202 aa, Porphyrobacter mercurialis
  misc_feature (1)..(202): tr|A0A0B2C0Y0|A0A0B2C0Y0_9SPHN GTP cyclohydrolase 1 OS= Porphyrobacter mercurialis OX=1572751 GN=folE PE=3 SV=1
MSSLLGSDDEEPQGKIVVPEDVQDAVRTLIRWAGDNPEREGLRDTPRRVARAWKEYCQGYGEDPAVHLSRVFREVGGYDEIVLLKDIPFQSHCEHHMAPIIGRAAIAYLPTDRVVGISKLARVLHAYARRLQVQERLTAEVAQCIWDHLQPQGVAVVIEASHACMTARGVRTPGVAMITSKVMGTFRSDPKSRQEVLDLMGY

SEQ ID NO: 12872 - protein, 208 aa, Porphyrobacter neustonensis
  misc_feature (1)..(208): tr|A0A192D859|A0A192D859_9SPHN GTP cyclohydrolase 1 OS= Porphyrobacter neustonensis OX=1112 GN=folE PE=3 SV=1
MNYISAHDHDETFDPENPLGKPEVPEDVQNAIRTLIAWAGDDPAREGLLDTPKRVGRAWLEYCEGYREDPSIHLTRQFSEVGGYDEIVLLKDIPFQSHCEHHMAPIIGKAAIAYLPRNKVVGISKLARVLHGYARRLQIQERLTAEVAQCIWDHLDPQGVAVVIEAQHGCMTGRGVKTPGVGMITSRMLGCFLDNGSSRKEVMSLMGY

SEQ ID NO: 12873 - protein, 190 aa, Porphyrobacter sanguineus
  misc_feature (1)..(190): tr|A0A1M7RUG2|A0A1M7RUG2_9SPHN GTP cyclohydrolase 1 OS= Porphyrobacter sanguineus OX=198312 GN=folE PE=3 SV=1
MGKPDVPEHVQDAIRTLLEWAGDDPTREGLLDTPKRVGRAWLEYCEGYKEDPAIHLSRQFSEVGGYDEIVLLKDIPFQSHCEHHMAPITGKAAIAYLPNRKVVGISKLARVLHGFAHRLQIQERLTAEVAQCIWDNLEPHGVAVVIEAQHGCMTGRGVKTHGVEMVTSRILGCFLEDHRSRKEVMSLMGY

SEQ ID NO: 12874 - protein, 206 aa, Porphyrobacter sp.
  misc_feature (1)..(206): tr|A0A0N1B1B7|A0A0N1B1B7_9SPHN GTP cyclohydrolase 1 OS= Porphyrobacter sp. AAP60 OX=1523423 GN=folE PE=3 SV=1
MNYTSAHDHDFDPENPLGKPEVPDHVQDAIRTLIAWAGDDPDREGLRDTPKRVGRAWLEYCEGYKEDPAIHLSRIFEEVGGYDEIVLLKDIPFQSHCEHHMAPIIGKAAIAYLPNKKVVGISKLARVLHGYAQRLQIQERLTAEVAKCIWDNLEPHGVAVVIEAQHGCMTGRGVKTPGVGMITSRVLGCFLDDDRSRKEVMSLMGY

SEQ ID NO: 12875 - protein, 208 aa, Porphyrobacter sp.
  misc_feature (1)..(208): tr|A0A2N4WTT8|A0A2N4WTT8_9SPHN GTP cyclohydrolase 1 OS= Porphyrobacter sp. TH134 OX=2067450 GN=folE PE=3 SV=1
MNYVSAHDHDDEFDPENPLGKPEVPEHVQDAIRTLIQWAGDDPAREGLRDTPKRVGRAWLEYCEGYKEDPAIHLSRIFEEVGGYDEIVLLKDIPFQSHCEHHMAPIIGKAAIAYLPNKKVVGISKLARVLHGYAQRLQIQERLTAEVAQCIWDNLDPHGVAVVIEAQHGCMTGRGVKTPGVGMITSRILGCFLDNDSSRKEVMSLMGY

SEQ ID NO: 12876 - protein, 193 aa, Porphyromonadaceae bacterium
  misc_feature (1)..(193): tr|A0A353Q7V5|A0A353Q7V5_9PORP GTP cyclohydrolase 1 OS= Porphyromonadaceae bacterium OX=2049046 GN=folE PE=3 SV =1
MLSEELQDENGVSALADHMREIITILGEDVEREGLLKTPQRVAKAMQYLTRGYRQDPEKILRSALFKENYRQMVIVKDIDIFSLCEHHMLPFFGKAHVAYIPNEYITGLSKIARVVDVYAHRLQVQERLTTQIKECIQKTLNPMGVMVVIEAQHMCMQMRGVEKQHSVTTTSDFTGVFNQQKTREEFINLIKK

SEQ ID NO: 12877 - protein, 190 aa, Porphyromonadaceae bacterium; identical to SEQ ID NO: 12567
  misc_feature (1)..(190): tr|A0A1I7FKU2|A0A1I7FKU2_9PORP GTP cyclohydrolase 1 OS= Porphyromonadaceae bacterium KHP3R9 OX=1855398 GN=folE PE=3 SV=1

SEQ ID NO: 12878 - protein, 207 aa, Porphyromonas asaccharolytica
  misc_feature (1)..(207): tr|F4KLD2|F4KLD2_PORAD GTP cyclohydrolase 1 OS=Porphyro monas asaccharolytica (strain ATCC 25260 / DSM 20707 / BCRC 10618 / JCM 6326 / LMG 13178 / VPI 4198) OX=879243 GN=folE PE=3 SV=1
MEEPQQILHTNQNYEVNDFLPETQLERMKDHVKELLTELGEDPTREGLLKTPERVSKALHFLTKGYQEDPLAILRAATFREDYQQMVIVRDIDFYSLCEHHMLPFFGKVHVGYIPNKYITGLSKIPRIVEVFARRLQVQERLTTQIKDCIQQALSPLGVIVVIEAQHMCMQMRGVQKQNSLTTTSDFTGAFKESKTREEFFNLVRKG

SEQ ID NO: 12879 - protein, 206 aa, Porphyromonas cangingivalis
  misc_feature (1)..(206): tr|A0A1T4LM55|A0A1T4LM55_PORCN GTP cyclohydrolase 1 OS= Porphyromonas cangingivalis OX=36874 GN=folE PE=3 SV=1
MSILDTSKGYHTQKTSDEEEEKIISDLAVHYKSTINILGEDINREGLVKTPQRVAKAMRFLTQGYRQDPAAVLRSAMFREDYQQMVIVKDIDFYSMCEHHMLPFFGKAHIAYIPNKYITGLSKLPRVVDIFARRLQVQERLTTEIKDCIQDTLNPMGVMVVIEAQHMCMQMRGVQKQNSITTTSDFTGVFQDQRTREEFMSLIRSK

SEQ ID NO: 12880 - protein, 206 aa, Porphyromonas cangingivalis
  misc_feature (1)..(206): tr|A0A099WYE6|A0A099WYE6_PORCN GTP cyclohydrolase 1 OS= Porphyromonas cangingivalis OX=36874 GN=folE PE=3 SV=1
MSILDTSKGYHTQKTSDEEEEKIISDLAVHYKSTIDILGEDINREGLVKTPQRVAKAMRFLTQGYRQDPAAVLRSAMFREDYQQMVIVKDIDFYSMCEHHMLPFFGKAHIAYIPNKYITGLSKLPRVVDIFARRLQVQERLTTEIKDCIQDTLNPMGVMVVIEAQHMCMQMRGVQKQNSITTTSDFTGVFQDQRTREEFMSLIRSK

SEQ ID NO: 12881 - protein, 187 aa, Porphyromonas catoniae
  misc_feature (1)..(187): tr|L1NHG2|L1NHG2_9PORP GTP cyclohydrolase 1 OS=Porphyro monas catoniae F0037 OX=1127696 GN=folE PE=3 SV=1
MTKDEQLQYHYSQILSLLGEDPQREGLVKTPERVGKAMQFLTQGMAQSPHEILRSAMFKEDYRQMVIVKDIDFYSLCEHHMLPFFGKVHIGYIPNGYITGLSKLPRVVDVFARRLQVQERLTMQIKDCIQEALNPLGVIVVVEAQHMCMQMRGVEKQNSLTTTSDFTGAFREAKTREEFMQLIKRTH

SEQ ID NO: 12882 - protein, 187 aa, Porphyromonas catoniae; identical to SEQ ID NO: 12881
  misc_feature (1)..(187): tr|Z4WRE6|Z4WRE6_9PORP GTP cyclohydrolase 1 OS=Porphyro monas catoniae ATCC 51270 OX=887901 GN=folE PE=3 SV=1

SEQ ID NO: 12883 - protein, 200 aa, Porphyromonas circumdentaria
  misc_feature (1)..(200): tr|A0A1T4LAC3|A0A1T4LAC3_9PORP GTP cyclohydrolase 1 OS= Porphyromonas circumdentaria OX=29524 GN=folE PE=3 SV=1
MNKQSTFDPQLSPEEMREMIDLNRRIIEILGEDPNREGLIKTPERVTKSLRFLTKGYREDPEEILRSAMFREEYRQMVIVKDIDFFSLCEHHMLPFFGKAHIGYIPNKYVTGLSKIPRVVDVFARRLQVQERLTTQIKDCIQQTLNPLGTIVVIEAQHMCMQMRGVEKQNSLTTTSDFTGAFEEASTREEFMNLIGIRRY

SEQ ID NO: 12884 - protein, 247 aa, Porphyromonas crevioricanis
  misc_feature (1)..(247): tr|T1CHB1|T1CHB1_9PORP GTP cyclohydrolase 1 OS=Porphyro monas crevioricanis JCM 15906 OX=1305617 GN=folE PE=3 S V=1
MENEGRDTHSPLGRLSHPFSIKDFCFFFSQLFSEYIVGRVCRTPFAHCNRYTQIYMQNEQDLSIQEALQRHYEEVLTLLGEDRSREGLIKTPERVAKAMQFLTSGYQESPEDILLSAKFKEDYRQMVIVKDIDFFSLCEHHMLPFFGKAHVGYIPNKYITGLSKIPRVVNVFSRRLQVQERLTTQIKECIQNTLNPMGVIVVIEAQHMCMQMRGVEKQNALTTTSDFTGAFQEAKTREEFLNLIKQK

SEQ ID NO: 12885 - protein, 192 aa, Porphyromonas crevioricanis
  misc_feature (1)..(192): tr|A0A0A2FQ44|A0A0A2FQ44_9PORP GTP cyclohydrolase 1 OS= Porphyromonas crevioricanis OX=393921 GN=folE PE=3 SV=1
MQNEQDLSIQEALQRHYEEVLTLLGEDRSREGLIKTPERVAKAMQFLTSGYQESPEDILLSAKFKEDYRQMVIVKDIDFFSLCEHHMLPFFGKAHVGYIPNKYITGLSKIPRVVNVFSRRLQVQERLTTQIKECIQNTLNPMGVIVVIEAQHMCMQMRGVEKQNALTTTSDFTGAFQEAKTREEFLNLIKQK

SEQ ID NO: 12886 - protein, 200 aa, Porphyromonas endodontalis
  misc_feature (1)..(200): tr|C3JC14|C3JC14_POREA GTP cyclohydrolase 1 OS=Porphyro monas endodontalis (strain ATCC 35406 / BCRC 14492 / JC M 8526 / NCTC 13058 / HG 370) OX=553175 GN=folE PE=3 SV =1
MNRQSTFDPQLSPEEMAEMKNLQRRILELIGEDPDREGLIKTPERVAKSLRFLTKGYREDPEEILRSAMFREEYRQMVIVKDIDFFSMCEHHMLPFFGKAHVGYIPNKYITGLSKIPRVVDVFARRLQVQERLTTQIKDCIQATLNPLGTIVVIEAQHMCMQMRGVEKQNSLTTTSDFTGAFEEASTREEFMNLIRIRRN

SEQ ID NO: 12887 - protein, 193 aa, Porphyromonas gingivalis
  misc_feature (1)..(193): sp|B2RIJ1|GCH1_PORG3 GTP cyclohydrolase 1 OS=Porphyromo nas gingivalis (strain ATCC 33277 / DSM 20709 / CIP 103 683 / JCM 12257 / NCTC 11834 / 2561) OX=431947 GN=folE PE=3 SV=1
MTEIEKEEACSRLQQHYAQVLSLLGEDPKREGLLKTPLRVAKAMQFLTKGYNEDPEAILRAAMFEEDYQQMVIVKDIDFFSMCEHHMLPFFGKAHVGYIPNRYITGLSKLPRVVDVFARRLQVQERLTTQIKECIQNTLNPLGVIVVIEAQHMCMQMRGVEKQNSLTTTSDFTGAFEESTTREEFLNLIGRRR

SEQ ID NO: 12888 - protein, 193 aa, Porphyromonas gingivalis; identical to SEQ ID NO: 12887
  misc_feature (1)..(193): tr|A0A134DQ46|A0A134DQ46_PORGN GTP cyclohydrolase 1 OS= Porphyromonas gingivalis OX=837 GN=folE PE=3 SV=1

SEQ ID NO: 12889 - protein, 185 aa, Porphyromonas gingivicanis
  misc_feature (1)..(185): tr|A0A0A2G6H8|A0A0A2G6H8_9PORP GTP cyclohydrolase 1 OS= Porphyromonas gingivicanis OX=266762 GN=folE PE=3 SV=1
MREMIDLNRRIIELLGEDPAREGLVKTPERVTKSLRFLTKGYREDPEEILRSAMFREEYRQMVIVKDIDFFSLCEHHMLPFFGKAHIGYIPNKYITGLSKIPRVVDVFARRLQVQERLTTQIKDCIQQTLNPLGTIVVIEAQHMCMQMRGVEKQNSLTTTSDFTGAFEEASTREEFMNLIGIRRY

SEQ ID NO: 12890 - protein, 193 aa, Porphyromonas gulae; identical to SEQ ID NO: 12887
  misc_feature (1)..(193): tr|A0A099WQY3|A0A099WQY3_9PORP GTP cyclohydrolase 1 OS= Porphyromonas gulae OX=111105 GN=folE PE=3 SV=1

SEQ ID NO: 12891 - protein, 202 aa, Porphyromonas levii
  misc_feature (1)..(202): tr|A0A4Y8WM68|A0A4Y8WM68_9PORP GTP cyclohydrolase 1 OS= Porphyromonas levii OX=28114 GN=folE PE=3 SV=1
MSHHNNPYFTEHIDEAEENALIAELAAHNKEIIQLIGEDPEREGLLKTPERVARALRFLTQGYSQDPAAVLESAKFREDYKQMVIVKDIGFYSMCEHHMLPFFGKVHIAYIPNKYITGLSKLPRVVNILSRRLQVQERLTTQIKECIQDTLKPLGVMVVIEAQHMCMQMRGVQKEGSTTTTSDFTGVFDNIKTREEFMSLIK

SEQ ID NO: 12892 - protein, 193 aa, Porphyromonas loveana
  misc_feature (1)..(193): tr|A0A2U1FSM4|A0A2U1FSM4_9PORP GTP cyclohydrolase 1 OS= Porphyromonas loveana OX=1884669 GN=folE PE=3 SV=1
MTEIEKEEVRLRLQHHYSEVLSLLGENPEREGLLKTPLRVAKAMQFLTKGYNEDPEAILRSAMFEEDYQQMVIVKDIDFFSMCEHHMLPFFGKAHVGYIPNRHITGLSKLPRVVDVFARRLQVQERLTTQIKECIQKTLDPLGVIVVIEAQHMCMQMRGVEKQNSLTTTSDFTGAFEESTTREEFLNLIGRRR

SEQ ID NO: 12893 - protein, 195 aa, Porphyromonas macacae
  misc_feature (1)..(195): tr|A0A0A2GJA4|A0A0A2GJA4_9PORP GTP cyclohydrolase 1 OS= Porphyromonas macacae OX=28115 GN=folE PE=3 SV=1
MDKYKDLSEEERKSKLEEHYHEALLLLGEDPKREGLIKTPYRMAKAMRFLTKGYDQDPKEILRAAMFKEDYRQMVIVKDIDFYSLCEHHMLPFYGKAHVGYIPNGYITGLSKLPRVVDVFARRLQVQERLTTQIKECIEETLHPLGVIVVLEAQHMCMQMRGVQKQNSITTTSDFTGAFKEAKTREEFLDLIKQK

SEQ ID NO: 12894 - protein, 208 aa, Porphyromonas somerae
  misc_feature (1)..(208): tr|A0A134B7R1|A0A134B7R1_9PORP GTP cyclohydrolase 1 OS= Porphyromonas somerae OX=322095 GN=folE PE=3 SV=1
MPQKNSLPDPSTLTFVSESEEATEAALRHHYHEILRLLGEDPEREGLVKTPERVAKAMRFLTSGARKDPKEILRSAMFREEYRQMVIVKDIDFYSLCEHHMLPFFGKVHIGYIPNGYITGLSKLPRIVDVFARRLQVQERLTTQIKDCIQEALNPLGVIVVIEAQHMCMQMRGVEKQNSFTTTSDFTGAFREAKTREEFMQLITHSRR

SEQ ID NO: 12895 - protein, 195 aa, Porphyromonas sp.
  misc_feature (1)..(195): tr|A0A0A2DTQ1|A0A0A2DTQ1_9PORP GTP cyclohydrolase 1 OS= Porphyromonas sp. COT-239 OH1446 OX=1515613 GN=folE PE= 3 SV=1
MNQDKQQPSVQLELQEHYGQILSLLGEDPQREGLLKTPERVAKALQFLTSGYQQDPEAILRGAMFREDYRQMVIVKDIDFFSMCEHHMLPFFGKAHIGYIPNGYITGLSKLPRVVDVFARRLQVQERLTTQIKSCIQKTLNPLGVIVVIEAQHMCMQMRGVEKQNSLTTTSDFTGAFSEAKTREEFMQLIGHSRR

SEQ ID NO: 12896 - protein, 197 aa, Porphyromonas sp.
  misc_feature (1)..(197): tr|A0A073IGQ9|A0A073IGQ9_9PORP GTP cyclohydrolase 1 OS= Porphyromonas sp. 31_2 OX=658663 GN=folE PE=3 SV=1
MMSEVNEETLCAREALAGHYKEVLGLLGEDVEREGLLKTPERVAKAMQFLTKGYHEDPEAVLRSAMFQEEDYKQMVIVKDIDFFSLCEHHMLPFFGKAHVAYIPKKYITGLSKIPRVVDIFARRLQIQERMTMQIKDCIQRTLDPLGVMVVIEAQHMCMQMRGVEKQNSLTTTSDFTGFFQQAKTREEFMNLIKHNR

SEQ ID NO: 12897 - protein, 207 aa, Porphyromonas uenonis
  misc_feature (1)..(207): tr|C2MB05|C2MB05_9PORP GTP cyclohydrolase 1 OS=Porphyro monas uenonis 60-3 OX=596327 GN=folE PE=3 SV=1
MEEPQKILHTNQNYVVSDFLSESQLERMKGHVNALLTELGEDPTREGLLKTPERVSKALHFLTKGYQEDPLAILRAATFREDYQQMVIVRDIDFYSLCEHHMLPFFGKVHVGYIPNKYITGLSKIPRIVDVFARRLQVQERLTTQIKDCIQQALSPLGVIVVIEAQHMCMQMRGVQKQNSFTTTSDFTGAFKESKTREEFFNLVRKS

SEQ ID NO: 12898 - protein, 231 aa, Porticoccaceae bacterium
  misc_feature (1)..(231): tr|A0A2D8WR08|A0A2D8WR08_9GAMM GTP cyclohydrolase 1 OS= Porticoccaceae bacterium OX=2026782 GN=folE PE=3 SV=1
  misc_feature (49)..(49): Xaa can be any naturally occurring amino acid
MPSTAIARSDTDFQSNLSLEAQLVRNALIEKGLETPMSGIKLSRDEKYXRIRDAMTQVATALGLDLKDDSLQETPHRIAKMYVDEIFSGLNYESFPKISLIKNKMNTEEMIKVKAVKVISTCEHHFVTIDGLANVAYLPGKKIIGLSKINRIVSFFAQRPQVQERLTQQILVALQTLLDTRDVAVFIDATHYCVKARGIMDASSRTETSALGGLFKSDQSLRDNFLNNQRR

SEQ ID NO: 12899 - protein, 185 aa, Porticoccaceae bacterium
  misc_feature (1)..(185): tr|A0A3D3T5T2|A0A3D3T5T2_9GAMM GTP cyclohydrolase 1 OS= Porticoccaceae bacterium OX=2026782 GN=folE PE=3 SV=1
MKDQHSMKDQYAKLIESIGEDLSRPGLVDTPDRAAKAFEFLTGGYHQDLDEVVNEALFPSDSNEMVIVQDIELYSLCEHHLLPFVGKCHVAYIPNGMVLGLSKVARVVDMFARRLQIQENLATQIASTIEKVTGAQGVAVIIEAKHMCMMMRGVEKQNSIMKTSAMLGVFRSSQTTRNEFLSLIK

SEQ ID NO: 12900 - protein, 202 aa, Porticoccus sp.
  misc_feature (1)..(202): tr|A0A2D5QI60|A0A2D5QI60_9GAMM GTP cyclohydrolase 1 OS= Porticoccus sp. OX=2024853 GN=folE PE=3 SV=1
MEKDAKITNIKTSPIAPTREEAEDAVRTILSWIGENPDREGLVETPRRFIDAYAEYFNGYNINGEDVLKKTFGDVGGYNDIVLLKDIAFNSFCEHHMAPFIGKAHVAYLPSDRVVGISKLARLVDVYAHRLQTQETMTAEISNAIDQSLKPRGVAVILDAEHMCMSLRGVHKHDVSTITTRFTGEFDTNENLRERFMKLTNS

SEQ ID NO: 12901 - protein, 180 aa, Porticoccus sp.
  misc_feature (1)..(180): tr|A0A2E5C7Y7|A0A2E5C7Y7_9GAMM GTP cyclohydrolase 1 OS= Porticoccus sp. OX=2024853 GN=folE PE=3 SV=1
MTDCYSHIIESTGEKVTRAGLKDTPKRAAKAFEFMTRGYHQNLDDVINGALFPSDANEMVIVKDIELYSLCEHHLLPFIGKCHVAYIPDGKVLGLSKVARIVDMYARRLQIQETLVAQIANTIESVTGANGVAVIIEAKHMCMMMRGVEKQNSVMKTSAMLGSFRDNQATRNEFLSLINC

SEQ ID NO: 12902 - protein, 365 aa, Poseidonocella pacifica
  misc_feature (1)..(365): tr|A0A1I0V913|A0A1I0V913_9RHOB GTP cyclohydrolase FolE2 OS=Poseidonocella pacifica OX=871651 GN=folE2 PE=3 SV= 1
MNAHTKALDGEEPKREDAEAAIALLRRWAERAEEEDRAALATALAAIRPDAAAYPALRRQYPEEFDANQAYRAGLPDLQNGPASLIRGARQEIQHVGISNFRLPIRFHTRDGGDLTLETSVTGTVSLDAETKGINMSRIMRTFYQHAEETFSFEVIERAVEAYKADLGSFDARIQMRFSFPMKVQSLRSGLWGYQYYDMTMEFVEQDGVQRKFMHLDYVYSSTCPCSLELSEHARQTRGQLATPHSQRSVARISLEVLPGEILWFEDLVEMCRRAVPTETQVMVKREDEQAFAELNAANPIFVEDAARLFCEHLIGDPRIGDFRVIASHQESLHSHDAVSILTEGDTFAQPSHDPKLFATLFHVG

SEQ ID NO: 12903 - protein, 361 aa, Poseidonocella sedimentorum
  misc_feature (1)..(361): tr|A0A1I6DYG2|A0A1I6DYG2_9RHOB GTP cyclohydrolase FolE2 OS=Poseidonocella sedimentorum OX=871652 GN=folE2 PE=3 SV=1
MNLHLGELNDTPTRDDARAALDLLRRWAAKVNEGAEDPDTAQLLAAAAGYPALKSDYQGEFIPDAVYKASMPDLQNGPASLIRGARRQIQYVGISNFRLPIAFHTRGGRDLTLETSVTGSVSLDAEKKGINMSRIMRSFYKHAEKTFSFEVIEAALDDYKADLESIDARIQMRFSFPATIQSLRSGLSGYQYYDIALELVEQEGVRRKYLHLDYVYSSTCPCSLELSEHARRARGQLATPHSQRSVARISVEVLPGDCLWFEDLIDLCREAVPTETQVMVKREDEQAFAELNAANPIFVEDAARLFAEKLLSEPRIGDFRVIASHQESLHSHDAVSVLTEGETFAQKSLDPKLFSTLFHTG

SEQ ID NO: 12904 - protein, 188 aa, Pradoshia eiseniae
  misc_feature (1)..(188): tr|A0A2S7N4K5|A0A2S7N4K5_9BACI GTP cyclohydrolase 1 OS= Pradoshia eiseniae OX=2064768 GN=folE PE=3 SV=1
MHEVNKGKIEEAVTMILEALGEDPAREGIADTPKRVARMYEEVFAGLGQDPEEYFETVFGEDHEELVLVKDIPFYSMCEHHLVPFFGVAHVAYIPKGGRVTGLSKLARAVEAVSRRPQLQERITSTVADAIMNKLEPHGVMVVVEAEHMCMTMRGVKKPGSKTVTSAVRGTLATDARTRQEVLSFINK

SEQ ID NO: 12905 - protein, 188 aa, Pradoshia sp.
  misc_feature (1)..(188): tr|A0A5J6XRQ7|A0A5J6XRQ7_9BACI GTP cyclohydrolase I Fol E OS=Pradoshia sp. D12 OX=2651284 GN=folE PE=4 SV=1
MSEINRGKIEEAVTMILEALGEDPTREGLLDTPKRVAKMYEEVFSGLRQDPKEYFETVFGEDHEELVLVKDIPFYSMCEHHLVPFFGVAHVAYIPKGGRVTGLSKLARAVEAVSRRPQLQERITSTVADSIMDTLAPHGVMVVVEAEHMCMTMRGVKKPGSKTITSAVRGTLATDSISRQEVLSLINK

SEQ ID NO: 12906 - protein, 222 aa, Pragia fontium
  misc_feature (1)..(222): tr|A0A0G3CP79|A0A0G3CP79_9GAMM GTP cyclohydrolase 1 OS= Pragia fontium OX=82985 GN=folE PE=3 SV=1
MSSLSKEAILVHAALEARGLETPLRGPVLDATTRKTQIQEHMTSIMQLLNLDLSDDSLMETPKRIAKMYVDEIFSGLDYANFPKITLIENKMKVDEMVTVRDITLTSTCEHHFVTIDGKASVAYIPKDYVIGLSKINRIVQFFSQRPQVQERLTQQILLALQTLLGTTNVAVSIDATHYCVKSRGVCDATSSTSTTSLGGIFKSNPSTRQEFLRAVRYSSHL

SEQ ID NO: 12907 - protein, 222 aa, Pragia fontium
  misc_feature (1)..(222): tr|A0A379DRB3|A0A379DRB3_9GAMM GTP cyclohydrolase 1 OS= Pragia fontium OX=82985 GN=folE PE=3 SV=1
MSSLSKEAILVHAALEARGLETPLRGPVLDATTRKTQIQEHMTSIMQLLNLDLSDDSLMETPKRIAKMYVDEIFSGLDYANFPKITLIENKMKVDEMVTVRDITLTSTCEHHFVTIDGKASVAYIPKDYVIGLSKINRIVQFFSQRPQVQERLTQQILLALQTLLGTTNVAVSIDATHYCVKSRGVCDATSSTSTTSLGGIFKSNPSTRQEFLRVVRYSSHL

SEQ ID NO: 12908 - protein, 223 aa, Pragia sp.
  misc_feature (1)..(223): tr|A0A411WKJ5|A0A411WKJ5_9GAMM GTP cyclohydrolase 1 OS= Pragia sp. CF-458 OX=2498113 GN=folE PE=3 SV=1
MSSLSKEAMLVHAALEARGLETPLRGQPVDATTRKQKIEEHMTSIMQLLNLDLSDDSLAETPKRIAKMYVDEIFSGLDYANFPKITLIENKMKVDEMVTVRDITLTSTCEHHFVTIDGKATVAYIPKDYVIGLSKINRIVQFFSQRPQVQERLTQQILLALQTLLGTTNVAVSIDAIHYCVKSRGVCDATSSTSTTSIGGIFKSNPSTRQEFLRAVRHSPHHI

SEQ ID NO: 12909 - protein, 239 aa, Prauserella endophytica
  misc_feature (1)..(239): tr|A0A4U2IPS5|A0A4U2IPS5_9PSEU GTP cyclohydrolase I Fol E OS=Prauserella endophytica OX=1592324 GN=folE PE=4 SV =1
MPRSACAPGHSPEPLLTSFDRFTEPGSEAKSVTNTLDRLVPSDSQDLASPGPVDTERVADLVGQLLAAIGEDPGRVGLSDTPARVAAWWSGFFSPEPSATPTCFTEQHLSGQLVVIGGMSVWSLCEHHLLPMNLDVAVGYVPDGEVMGLSKFGRIAQQCAGRLQVQERFTRQVADEIAVVIGSTNVAVAVRGTHLCMSARGVRMEAARTTTLQASGRFESDPVLSQQFLTLATDRWRAV

SEQ ID NO: 12910 - protein, 229 aa, Prauserella marina
  misc_feature (1)..(229): tr|A0A1G6PZ12|A0A1G6PZ12_9PSEU GTP cyclohydrolase 1 OS= Prauserella marina OX=530584 GN=folE PE=3 SV=1
MDSPIASGEPVVEADLTTGEEPSENGHALLAERTPVATGRIFDQARAERAVRELLIACGEDPDRNGLVETPARVARAYREMFAGLYSDPDHVLDRTFDESHEELVLVTDIPMYSTCEHHLVPFHGVAHVGYIPNGKGKVTGLSKLARLVDLYAKRPQVQERLTSQIADALERKLKPRGVIVVIEAEHLCMAMRGIRKPGASTTTSAVRGLLKTSASSRAEALDLIKGRR

SEQ ID NO: 12911 - protein, 196 aa, Prauserella muralis
  misc_feature (1)..(196): tr|A0A2V4BBK5|A0A2V4BBK5_9PSEU GTP cyclohydrolase 1 OS= Prauserella muralis OX=588067 GN=folE PE=3 SV=1
MPVATGRMFDQARAERAVRELLLACGEDPDRDGLQETPARVARAYREMFAGLYNDPDHVLDRTFDESHEELVLVTDIPMFSTCEHHLVPFHGVAHVGYIPNSQGKVTGLSKLARLVDLYAKRPQVQERLTSQIADAIDRKLKPRGVIVVVEAEHLCMAMRGIRKPGARTTTSAVRGLLKTSASSRAEALDLIKGRR

SEQ ID NO: 12912 - protein, 221 aa, Prauserella muralis
  misc_feature (1)..(221): tr|A0A561EFZ3|A0A561EFZ3_9PSEU GTP cyclohydrolase 1 OS= Prauserella muralis OX=588067 GN=folE PE=3 SV=1
MIPTSRTVNIDSDVEGNGHGILPEDMPVATGRMFDQARAERAVRELLLACGEDPDRDGLQETPARVARAYREMFAGLYNDPDHVLDRTFDESHEELVLVTDIPMFSTCEHHLVPFHGVAHVGYIPNSQGKVTGLSKLARLVDLYAKRPQVQERLTSQIADAIDRKLKPRGVIVVVEAEHLCMAMRGIRKPGARTTTSAVRGLLKTSASSRAEALDLIKGRR

SEQ ID NO: 12913 - protein, 370 aa, Prauserella shujinwangii
  misc_feature (1)..(370): tr|A0A2T0M1T6|A0A2T0M1T6_9PSEU GTP cyclohydrolase 1 OS= Prauserella shujinwangii OX=1453103 GN=folE PE=3 SV=1
MFDQSRAENAVRELLLACGEDPDREGLRETPARVARAYRELFAGLYSEPDRVLDRTFDESHEELVLVTDIPMYSTCVPSEQTVNAVDGRKRARDVAVGDRLWTLANGNVEQTTVVGVSSHRTRELVEVTTAGGTFVVTPDHPLATPHGWMEARDVAGTHIEWTHALGERARQLVGVSGGSPRALHSGALSKADALSWHVRHGFPQDDYATDLIESEYVAVESVRPVSATGTTPYTVYSFTCAPHPTFLVAGHLTHNCEHHLVPFHGVAHVGYIPNAQGKVTGLSKLARLVDLYAKRPQVQERLTSQIADAIDRRLRPRGVIVVIEAEHLCMAMRGVRKPGARTTTSAVRGLLQSSASSRAEALDLIKGRR

SEQ ID NO: 12914 - protein, 193 aa, Prauserella sp.
  misc_feature (1)..(193): tr|A0A318LTB4|A0A318LTB4_9PSEU GTP cyclohydrolase 1 OS= Prauserella sp. YIM 121212 OX=1477506 GN=folE PE=3 SV=1
MVSPGPVDTERVADLVGQLLAAIGEDPGREGLSDTPARVAAWWRGFFSPEPSAAPTCFPEQHLSGQLVVIGGMSVWSLCEHHLLPMNLDVAIGYVPDGEVMGLSKFGRIAQQYAGRLQVQERFTRQVADEIAVVIGSTDVAVAVRGTHLCMSARGVRMEAARTTTLQARGRFESDPVLSQQFLALATDRWRVA

SEQ ID NO: 12915 - protein, 240 aa, Prauserella sp.
  misc_feature (1)..(240): tr|A0A365ZT98|A0A365ZT98_9PSEU GTP cyclohydrolase 1 OS= Prauserella sp. PE36 OX=1504709 GN=folE PE=3 SV=1
MSSPHLRAVALSGAAAADVLDPFTTPGSEAKSVTNTLDRLAPSESQDLVSPGPVDTERVADLVGQLLAAIGEDPGREGLSDTPARVAAWWRGFFSPEPSAAPTCFPEQHLSGQLVVIGGMSVWSLCEHHLLPMNLDVAIGYVPDGEVMGLSKFGRIAQQYAGRLQVQERFTRQVADEIAVVIGSTDVAVAVRGTHLCMSARGVRMEAARTTTLQARGRFESDPVLSQQFLALATDRWRVA

SEQ ID NO: 12916 - protein, 201 aa, Prevotella aff.
  misc_feature (1)..(201): tr|A0A1I0NWQ1|A0A1I0NWQ1_9BACT GTP cyclohydrolase 1 OS= Prevotella aff. ruminicola Tc2-24 OX=81582 GN=folE PE=3 SV=1
MIQNQGIDDKEIYREGLEDLAAHYKQVLSLLGEDTEREGLLKTPMRVAKAMQVLTRGYQMDAHKVLTDALFKEDYSQMVIVKDIDFFSLCEHHMLPFYGKAHVAYIPNGYITGLSKIARVVDIYAHRLQVQERMTQQIKDCIQDTLKPLGVMVVVEAKHMCMQMRGIEKQNSITTTSDFSGAFNQAKTRQEFMNLIHNNQI

SEQ ID NO: 12917 - protein, 195 aa, Prevotella amnii
  misc_feature (1)..(195): tr|A0A096D4W8|A0A096D4W8_9BACT GTP cyclohydrolase 1 OS= Prevotella amnii DNF00058 OX=1401066 GN=folE PE=3 SV=1
MAKGNEFREGLEELAFHYKKILSLLGEDPSREGLEKTPMRVAKAMQVLTRGYTQDPHKVLTDALFEEKYNQMVIVKDIDFFSMCEHHMLPFYGKAHVAYIPNGKITGLSKVARVIDIFSHRLQVQERLTEQIKDCIQDTLCPLGVMVVLEAKHMCMQMRGVEKQNAITTTSSFSGAFNQAKTREEFMTLLHGKNI

SEQ ID NO: 12918 - protein, 195 aa, Prevotella amnii
  misc_feature (1)..(195): tr|A0A134B2N2|A0A134B2N2_9BACT GTP cyclohydrolase 1 OS= Prevotella amnii OX=419005 GN=folE PE=3 SV=1
MAKGNEFREGLEELAFHYEKILSLLGEDPSREGLEKTPMRVAKAMQVLTRGYTQDPHKVLTDALFEEKYNQMVIVKDIDFFSMCEHHMLPFYGKAHVAYIPNGKITGLSKVARVIDIFSHRLQVQERLTEQIKDCIQDTLSPLGVMVVLEAKHMCMQMRGVEKQNAITTTSSFSGAFNQAKTREEFMTLLHGKNI

SEQ ID NO: 12919 - protein, 197 aa, Prevotella baroniae
  misc_feature (1)..(197): tr|U2QF85|U2QF85_9BACT GTP cyclohydrolase 1 OS=Prevotel la baroniae F0067 OX=1115809 GN=folE PE=3 SV=1
MNPETEYREGLDQLAAHYHAVLRLLGEDPGRDGLQKTPMRVAKAMQVLTRGYAQNPHKVLTDALFEEKYNQMVIVKDIDFFSMCEHHMLPFYGKVHVAYIPNGYITGLSKIARVVDIFSHRLQVQERLTQQIKDCIQDTLKPMGVMVVVEAKHMCMQMRGVEKQNSITTTSDFSGAFNQAKTREEFMNLLRGESKRI

SEQ ID NO: 12920 - protein, 193 aa, Prevotella bergensis
  misc_feature (1)..(193): tr|D1PZ83|D1PZ83_9BACT GTP cyclohydrolase 1 OS=Prevotel la bergensis DSM 17361 OX=585502 GN=folE PE=3 SV=1
MNPETEFREGLDELAVHYKEVLRLLGEDPEREGLVKTPLRMAKAMQTLTRGYHQDAHKVLTDALFKEDYNQMVIVKDIGFYSMCEHHLLPFYGKVHVAYIPNGYITGLSKIARVVDIFTHRLQVQERLTQQIKDCIQETLKPLGVMVVIEAQHLCMQMRGVEKQNSITTTSDFSGAFKQAVTRAEFMNLIHQK

SEQ ID NO: 12921 - protein, 197 aa, Prevotella bivia
  misc_feature (1)..(197): tr|A0A096AAW2|A0A096AAW2_9BACT GTP cyclohydrolase 1 OS= Prevotella bivia DNF00320 OX=1401068 GN=folE PE=3 SV=1
MTTNNEFREGLEELAAHYKEVLTLLGEDPTREGLEKTPMRVAKAMQVLTRGYTQDPHKVLTDALFEEKYNQMVIVKDIDFFSMCEHHMLPFYGKAHVAYIPDGHITGLSKVARVIDIFSHRLQVQERLTEQIKDCIQDTLQPLGVMVVLEAKHMCMQMRGVEKQNSITTTSAFSGAFNQAKTREEFMNLLRGETKRI

SEQ ID NO: 12922 - protein, 197 aa, Prevotella bivia; identical to SEQ ID NO: 12921
  misc_feature (1)..(197): tr|A0A137SUT2|A0A137SUT2_9BACT GTP cyclohydrolase 1 OS= Prevotella bivia OX=28125 GN=folE PE=3 SV=1

SEQ ID NO: 12923 - protein, 198 aa, Prevotella bryantii
  misc_feature (1)..(198): tr|D8DVS8|D8DVS8_PREBR GTP cyclohydrolase 1 OS=Prevotel la bryantii B14 OX=752555 GN=folE PE=3 SV=1
MNPETEFREGLDELANHYKEVLKLLGENPDREGLAKTPMRVAKAMQILTRGYTQDPHKVLTDALFEEEKYNQMVIVKDIDFFSMCEHHILPFYGKVHVAYIPNKYITGLSKVARVVDIFSHRLQVQERLTQQIKDCIQNTLHPQGVMVVIEAKHMCMQMRGVEKQNSITTTSAFSGAFEQAKTREEFMNLLRGESKRI

SEQ ID NO: 12924 - protein, 198 aa, Prevotella bryantii; identical to SEQ ID NO: 12923
  misc_feature (1)..(198): tr|A0A255SLW9|A0A255SLW9_PREBR GTP cyclohydrolase 1 OS= Prevotella bryantii OX=77095 GN=folE PE=3 SV=1

SEQ ID NO: 12925 - protein, 197 aa, Prevotella buccae
  misc_feature (1)..(197): tr|D3I1P7|D3I1P7_9BACT GTP cyclohydrolase 1 OS=Prevotel la buccae D17 OX=575611 GN=folE PE=3 SV=1
MNPETEYREGLDQLAAHYKEVLTLLGEDPDRDGLQKTPMRVAKAMQVLTRGYTQDPHKVLTDALFEEKYNQMVIVKDIDFFSMCEHHILPFYGKAHVAYIPNGYITGLSKIARVVDIYSHRLQVQERLTQQIKDCIQETLKPQGVMVVIEAKHMCMQMRGVEKQNSITTTSDFSGVFNSLTTRQEFMSLLRGESKRI

SEQ ID NO: 12926 - protein, 197 aa, Prevotella buccae; identical to SEQ ID NO: 12925
  misc_feature (1)..(197): tr|E6K387|E6K387_9BACT GTP cyclohydrolase 1 OS=Prevotel la buccae ATCC 33574 OX=873513 GN=folE PE=3 SV=1

SEQ ID NO: 12927 - protein, 197 aa, Prevotella buccalis
  misc_feature (1)..(197): tr|A0A2N6QT11|A0A2N6QT11_9BACT GTP cyclohydrolase 1 OS= Prevotella buccalis OX=28127 GN=folE PE=3 SV=1
MNSDTEFREGLDELASHYEKILSLLGEDPQREGLQKTPMRVAKAMQVLTRGYAQDPKQVLLDALFDEKYNQMVIVKDIDFFSMCEHHMLPFYGKVHVAYIPNGHITGLSKIARVVDIYSHRLQVQERLTQQIGDCIQSALKPLGVMVVIEAKHMCMQMRGVEKQNSITTTSAFSGAFNQAKTREEFMNLLRGESKRI

SEQ ID NO: 12928 - protein, 197 aa, Prevotella buccalis
  misc_feature (1)..(197): tr|A0A095ZJ96|A0A095ZJ96_9BACT GTP cyclohydrolase 1 OS= Prevotella buccalis DNF00853 OX=1401074 GN=folE PE=3 SV =1
MNSETEFREGLDELASHYEKILSILGEDPQRDGLQKTPMRVAKAMQVLTRGYAQDAKQVLLDALFDEKYNQMVIVKDIDFFSMCEHHMLPFYGKVHVAYIPNGHITGLSKIARVVDIYSHRLQVQERLTQQIGDCIQSALKPLGVMVVIEAKHMCMQMRGVEKQNSITTTSAFSGAFNQAKTREEFMNLLRGESKRI

SEQ ID NO: 12929 - protein, 193 aa, Prevotella colorans
  misc_feature (1)..(193): tr|A0A2U0TKD0|A0A2U0TKD0_9BACT GTP cyclohydrolase 1 OS= Prevotella colorans OX=1703337 GN=folE PE=3 SV=1
MILEPGYRKGLDELAAHYKEILKLLGEDPSREGLVKTPMRVAKAMQTLTRGYFEDAHQVLRDALFKEDYNQMVIVKDIDFYSMCEHHMLPFYGKAHVAYIPNGYITGLSKVVRVVDILSHKLQVQERLTQQIKDCIQETLQPLGVMVVIEASHMCMQMRGVEKQHSVTTTSDFCGAFNQAKTREEFMNLIRQK

SEQ ID NO: 12930 - protein, 197 aa, Prevotella copri
  misc_feature (1)..(197): tr|A0A415KY16|A0A415KY16_9BACT GTP cyclohydrolase 1 OS= Prevotella copri OX=165179 GN=folE PE=3 SV=1
MNPETEFREGLDELAEHYTEVLKLLGEDPEREGLVKTPMRVAKAMQILTRGYTQDAHKVLTDALFEEKYNQMVIVKDIDFFSMCEHHMLPFYGKVHVAYIPNGKITGLSKIARVVDIYSHRLQVQERLTQQIKDCIQETLNPQGVMVVIEAKHMCMQMRGVEKQNSITTTSDYSGVFNSLNTRQEFMNLLRGETKRI

SEQ ID NO: 12931 - protein, 197 aa, Prevotella copri
  misc_feature (1)..(197): tr|A0A3R6GJ61|A0A3R6GJ61_9BACT GTP cyclohydrolase 1 OS= Prevotella copri OX=165179 GN=folE PE=3 SV=1
MNPETEFREGLDELAEHYTEILKLLGEDPEREGLLKTPMRVAKAMQILTRGYTQDAHKVLTDALFKEKYNQMVIVKDIDFFSMCEHHMLPFYGKVHVAYIPNGKITGLSKIARVVDIYSHRLQVQERLTQQIKDCIQETLNPQGVMVVIEAKHMCMQMRGVEKQNSITTTSDYSGVFNSLNTRQEFMSLLRGETKRI

SEQ ID NO: 12932 - protein, 197 aa, Prevotella corporis
  misc_feature (1)..(197): tr|A0A133QQJ4|A0A133QQJ4_9BACT GTP cyclohydrolase 1 OS= Prevotella corporis OX=28128 GN=folE PE=3 SV=1
MNPETAFREGLDDLAAHYREVLNLLGEDPDREGLEKTPMRVAKAMQILTRGYTQDPRKVLTDALFEEKYNQMVIVKDIDFFSMCEHHMLPFYGKVHVGYIPDGHITGLSKVARVIDIFSHRLQVQERLTEQIKDCIQDTLQPLGTMVIIEAKHMCMQMRGVEKQNSITTTSAFSGAFNQAKTREEFMKLLRSESQRI

SEQ ID NO: 12933 - protein, 193 aa, Prevotella dentalis
  misc_feature (1)..(193): tr|F9D438|F9D438_PREDD GTP cyclohydrolase 1 OS=Prevotel la dentalis (strain ATCC 49559 / DSM 3688 / JCM 13448 / NCTC 12043 / ES 2772) OX=908937 GN=folE PE=3 SV=1
MNPETEFRDGLDELAAHYRQVLALLGEDTQREGLLKTPMRVAKAMQVLTRGYTQDAHKVLTDALFKEDYNQMVIVKDIDFYSMCEHHMLPFFGKTHVAYIPNGYITGLSKIARVVDIFSHRLQVQERLTQQIKDCIQDTLKPLGVMVVVEAQHMCMQMRGVEKQNSITTTSDFSGAFNQAKTREEFMNLLRQR

SEQ ID NO: 12934 - protein, 197 aa, Prevotella denticola
  misc_feature (1)..(197): tr|F2KYD7|F2KYD7_PREDF GTP cyclohydrolase 1 OS=Prevotel la denticola (strain F0289) OX=767031 GN=folE PE=3 SV=1
MTPETQFREGLDELAALYKKVLTLLGEDPEREGLEKTPMRVAKAMQVLTRGYTQDPHKVLTDALFEEKYNQMVIVKDIDFFSMCEHHMIPFYGKAHVAYIPNGHITGLSKIARVVDIFSHRLQVQERLTEQVMQCINDTLKPQGVMVVIEAKHMCMQMRGVEKQNAITTTSAYSGVFESSKTRNEFMDLLRGETKRI

SEQ ID NO: 12935 - protein, 197 aa, Prevotella denticola
  misc_feature (1)..(197): tr|A0A347B0B1|A0A347B0B1_9BACT GTP cyclohydrolase 1 OS= Prevotella denticola OX=28129 GN=folE PE=3 SV=1
MTPETQFREGLDELAAHYRKVLTLLGENPEREGLEKTPMRVAKAMQVLTRGYTQDPHKVLTDALFEEKYNQMVIVKDIDFFSMCEHHMLPFYGKAHVAYIPNGHITGLSKIARVVDIYAHRLQVQERLTEQVMQCINDTLKPQGVMVVVEAKHMCMQMRGVEKQNSITTTSAYSGVFGSSKTRNEFMDLLRGETKRI

SEQ ID NO: 12936 - protein, 197 aa, Prevotella disiens
  misc_feature (1)..(197): tr|A0A3E4QM05|A0A3E4QM05_9BACT GTP cyclohydrolase 1 OS= Prevotella disiens OX=28130 GN=folE PE=3 SV=1
MNSNIEFREGLDELAGHYRYVLQLLGENPDREGLEKTPIRVAKAMQVLTRGYTQDPHKVLTDALFAEEYNQMVIVKDIDFFSMCEHHMLPFYGKAHVAYIPNGHITGLSKVARVVDIFSHRLQVQERLTQQIKDCIQDTLHPLGTMVVVEAKHMCMQMRGIEKQNSITTTSAFSGAFNQAKTREEFMNLVHSNTMRG

SEQ ID NO: 12937 - protein, 197 aa, Prevotella disiens; identical to SEQ ID NO: 12936
  misc_feature (1)..(197): tr|A0A096CNZ8|A0A096CNZ8_9BACT GTP cyclohydrolase 1 OS= Prevotella disiens DNF00882 OX=1401075 GN=folE PE=3 SV= 1

SEQ ID NO: 12938 - protein, 197 aa, Prevotella enoeca
  misc_feature (1)..(197): tr|A0A0S2KJ61|A0A0S2KJ61_9BACT GTP cyclohydrolase 1 OS= Prevotella enoeca OX=76123 GN=folE PE=3 SV=1
MNTETEQREGLDELAAHYKRVLELLGEDPERDGLQKTPMRVAKAMQVLTRGYTQDPHKVLTDALFEEKYNQMVIVKDIDFFSMCEHHLLPFYGKAHVAYIPNGYITGLSKIARVVDIFSHRLQVQERLTQQIKDCIENTLHPLGVMVVIEAKHMCMQMRGVEKQNAITTTSDFSGAFNQAKTREEFMNLLRGESKKI

SEQ ID NO: 12939 - protein, 197 aa, Prevotella fusca; identical to SEQ ID NO: 12934
  misc_feature (1)..(197): tr|A0A0K1NIX0|A0A0K1NIX0_9BACT GTP cyclohydrolase 1 OS= Prevotella fusca JCM 17724 OX=1236517 GN=folE PE=3 SV=1

SEQ ID NO: 12940 - protein, 197 aa, Prevotella histicola
  misc_feature (1)..(197): tr|A0A095YWW9|A0A095YWW9_9BACT GTP cyclohydrolase 1 OS= Prevotella histicola JCM 15637 = DNF00424 OX=1236504 GN =folE PE=3 SV=1
MTPQTEFREGLDELAVHYKEVLKLLGEDPTREGLEKTPIRVAKAMQVLTRGYTQDPKKVLTDALFEEKYNQMVIVKDIDFFSMCEHHMLPFYGKAHVAYIPNGHITGLSKIARVVDIFSHRLQVQERLTEQIMQCINDTLKPQGVMVVIEAKHMCMQMRGVEKQNSITTTSAYSGVFESSKTRNEFMNLLRGETKRI

SEQ ID NO: 12941 - protein, 197 aa, Prevotella histicola
  misc_feature (1)..(197): tr|G6ADN4|G6ADN4_9BACT GTP cyclohydrolase 1 OS=Prevotel la histicola F0411 OX=857291 GN=folE PE=3 SV=1
MTPQAEFREGLDELAVHYKEVLKLLGEDPTREGLEKTPIRVAKAMQVLTRGYTQDPKKVLTDALFEEKYNQMVIVKDIDFFSMCEHHMLPFYGKTHVAYIPNGHITGLSKIARVVDIFSHRLQVQERLTEQIMQCINDTLKPQGVMVVIEAKHMCMQMRGVEKQNSITTTSAYSGVFESSKTRNEFMNLLRGETKRI

SEQ ID NO: 12942 - protein, 197 aa, Prevotella intermedia
  misc_feature (1)..(197): tr|A0A1P8JDN0|A0A1P8JDN0_PREIN GTP cyclohydrolase 1 OS= Prevotella intermedia ATCC 25611 = DSM 20706 OX=1122984 GN=folE PE=3 SV=1
MTSNIEFREGLDELAGHYRHVLQLLGEDPSREGLEKTPMRVAKAMQVLTRGYTQDPHKVLTDALFAEKYDQMVIVKDIDFFSMCEHHMLPFYGKAHVAYIPNGYITGLSKVARVVDIFSHRLQVQERLTQQIKDCIQDTLHPLGTMVVVEAKHMCMQMRGIEKQNSITTTSAFSGAFNQAKTREEFMNLVHSDTMRI

SEQ ID NO: 12943 - protein, 197 aa, Prevotella intermedia
  misc_feature (1)..(197): tr|A0A0D9NGP4|A0A0D9NGP4_PREIN GTP cyclohydrolase 1 OS= Prevotella intermedia ZT OX=1347790 GN=folE PE=3 SV=1
MTSNIEFREGLDDLAGHYRHVLQLLGEDPSREGLEKTPMRVAKAMQVLTRGYTQDPHKVLTDALFAEKYDQMVIVKDIDFFSMCEHHMLPFYGKAHVAYIPNGYITGLSKVARVVDIFSHRLQVQERLTQQIKDCIQDTLHPLGTMVVVEAKHMCMQMRGIEKQNSITTTSAFSGAFNQAKTREEFMNLVHSDTMRI

SEQ ID NO: 12944 - protein, 197 aa, Prevotella jejuni
  misc_feature (1)..(197): tr|A0A2K9H7G0|A0A2K9H7G0_9BACT GTP cyclohydrolase 1 OS= Prevotella jejuni OX=1177574 GN=folE PE=3 SV=1
MIPESPFREGLDELASHYKQVLTLLGEDPEREGLEKTPMRVAKAMQVLTRGYTQDPHKVLTDALFEEKYNQMVIVKDIDFFSMCEHHILPFYGKAHVAYIPKGYITGLSKIARVVDIFSHRLQVQERLTEQVMQCINDTLKPQGVMVVIEAKHMCMQMRGVEKQNSITTTSAYSGVFESSKTRNEFMDLLRGETKRI

SEQ ID NO: 12945 - protein, 193 aa, Prevotella loescheii
  misc_feature (1)..(193): tr|A0A069QGX1|A0A069QGX1_PRELO GTP cyclohydrolase 1 OS= Prevotella loescheii DSM 19665 = JCM 12249 = ATCC 15930 OX=1122985 GN=folE PE=3 SV=1
MNLEPEYREGLDQLAAHYKEVLSLLGEDPSREGLEKTPMRVAKAMQVLTRGYTQDARKVLTDALFEEKYNQMVIVKDIDFFSMCEHHMLPFFGKVHVAYIPNGYITGLSKIARVVDIFSHRLQVQERMTQQIKDCIQDTLKPLGVMVVVEAKHLCMQMRGVEKQNSITTTSDFSGAFNQAKTREEFMNLIRPK

SEQ ID NO: 12946 - protein, 213 aa, Prevotella maculosa
  misc_feature (1)..(213): tr|H1HMN3|H1HMN3_9BACT GTP cyclohydrolase 1 OS=Prevotel la maculosa OT 289 OX=999422 GN=folE PE=3 SV=1
MAQNKGQNNDTDNSTAMNPENEFRDGLDDLATHYRHILTLLGEDAQREGLEKTPMRVAKAMQILTRGYTQDPHKVLTDALFKEDYNQMVIVKDIDVFSLCEHHLLPFYGKCHVAYIPNGYITGLSKVARVVDIFSHRLQVQERLTQQIKDCIQQTLKPQGVMVVIEAKHMCMQMRGVEKQNAITTTSDFSGVFNDLTTRQEFMSLLRGESKRI

SEQ ID NO: 12947 - protein, 203 aa, Prevotella marshii
  misc_feature (1)..(203): tr|E0NUX7|E0NUX7_9BACT GTP cyclohydrolase 1 OS=Prevotel la marshii DSM 16973 = JCM 13450 OX=862515 GN=folE PE=3 SV=1
MENKNKMTTEEDFREGLDELSSHYRRILELLGEDPQREGLEKTPMRVAKAMQVLTRGYRQDPSKVLTDALFEESYNQMVIVKDIDFFSLCEHHILPFYGKVHVAYIPNGKITGLSKIARVVDIISHRLQVQERMTQQIKDCIQNTLKPLGVMVIVEAKHMCMQMRGVEKQNSITTTSDFSGAFNQAKTREEFMNLLRGETKRI

SEQ ID NO: 12948 - protein, 197 aa, Prevotella melaninogenica
  misc_feature (1)..(197): tr|A0A096AG17|A0A096AG17_9BACT GTP cyclohydrolase 1 OS= Prevotella melaninogenica DNF00666 OX=1401073 GN=folE P E=3 SV=1
MTPEIPFREGLDELASHYKQVLTLLGENPEREGLQKTPMRVAKAMQVLTRGYTQDPHKVLTDALFEEKYNQMVIVKDIDFFSMCEHHILPFYGKAHVAYIPNGYITGLSKIARVVDIFSHRLQVQERLTEQVMQCINDTLKPQGVMVVIEAKHMCMQMRGVEKQNSITTTSAYSGVFESSKTRNEFMDLLRGETKRI

SEQ ID NO: 12949 - protein, 197 aa, Prevotella melaninogenica
  misc_feature (1)..(197): tr|D3I6F5|D3I6F5_9BACT GTP cyclohydrolase 1 OS=Prevotel la melaninogenica D18 OX=575612 GN=folE PE=3 SV=1
MTPEIPFREGLDELASHYKQVLTLLGEDPEREGLQKTPMRVAKAMQVLTRGYTQDPHKVLTDALFEEKYNQMVIVKDIDFFSMCEHHILPFYGKAHVAYIPNGYITGLSKIARVVDIFSHRLQVQERLTEQVMQCINDTLKPQGVMVVIEAKHMCMQMRGVEKQNSITTTSAYSGVFESSKTRNEFMDLLRGETKRI

SEQ ID NO: 12950 - protein, 190 aa, Prevotella micans
  misc_feature (1)..(190): tr|H1Q4R7|H1Q4R7_9BACT GTP cyclohydrolase 1 OS=Prevotel la micans F0438 OX=883158 GN=folE PE=3 SV=1
MNPETELREGLDDIAAHYKEIIKLLGEDPKREGLLKTPMRVAKAMQILTRGYTQNPHKVLTDALFSEKYDQMVIVKDIDFFSMCEHHILPFYGKVHVAYIPNGYITGLSKVARVIDIFSHRLQVQERLTEQIKDCIQKTLHPLGTMVIIEANHMCMQMRGVEKQNSITTTSAFSGAFNQAKTREEFMKLL

SEQ ID NO: 12951 - protein, 197 aa, Prevotella multiformis; identical to SEQ ID NO: 12935
  misc_feature (1)..(197): tr|F0F6J0|F0F6J0_9BACT GTP cyclohydrolase 1 OS=Prevotel la multiformis DSM 16608 OX=888743 GN=folE PE=3 SV=1

SEQ ID NO: 12952 - protein, 197 aa, Prevotella multisaccharivorax
  misc_feature (1)..(197): tr|F8NC79|F8NC79_9BACT GTP cyclohydrolase 1 OS=Prevotel la multisaccharivorax DSM 17128 OX=688246 GN=folE PE=3 SV=1
MNPETEFRDGLDELATHYKAILSLLGENPDREGLVKTPMRVAKAMQILTRGYTQDPHKVLTDALFEEQYDQMVIVKDIDFFSMCEHHMLPFYGKAHIAYIPNGHITGLSKIARVIDIYSHRLQVQERLTEQVMHCINDTLKPQGVMVVIEAKHMCMQMRGVEKQNSITTTSAYSGVFESMKVREEFMSLLRGESKRI

SEQ ID NO: 12953 - protein, 197 aa, Prevotella nigrescens; identical to SEQ ID NO: 12943
  misc_feature (1)..(197): tr|A0A246EM25|A0A246EM25_9BACT GTP cyclohydrolase 1 OS= Prevotella nigrescens OX=28133 GN=folE PE=3 SV=1

SEQ ID NO: 12954 - protein, 197 aa, Prevotella nigrescens; identical to SEQ ID NO: 12943
  misc_feature (1)..(197): tr|V8CLI8|V8CLI8_9BACT GTP cyclohydrolase 1 OS=Prevotel la nigrescens CC14M OX=1073366 GN=folE PE=3 SV=1

SEQ ID NO: 12955 - protein, 199 aa, Prevotella oralis
  misc_feature (1)..(199): tr|E7RPT6|E7RPT6_9BACT GTP cyclohydrolase 1 OS=Prevotel la oralis ATCC 33269 OX=873533 GN=folE PE=3 SV=1
MIMNSETDTREGLEELAAHYKDILSLLGENPDRDGLQKTPLRMAKAMQILTRGYGQDPHRVLTDALFAETYNQMVIVKDIDFFSMCEHHLLPFYGKAHVAYIPNGYITGLSKIARVVDIYSHRLQVQERMTQQIKDCIQETLKPLGVMVVIEAKHMCMQMRGVEKQNAITTTSDFSGAFNQAKTREEFMNLLRGETKRI

SEQ ID NO: 12956 - protein, 199 aa, Prevotella oralis
  misc_feature (1)..(199): tr|V8BMN5|V8BMN5_9BACT GTP cyclohydrolase 1 OS=Prevotel la oralis CC98A OX=1073367 GN=folE PE=3 SV=1
MIMNSETDIREGLEELAAHYKDILSLLGENPDRDGLQKTPVRMAKAMQILTRGYGQDPHRVLTDALFAETYNQMVIVKDIDFFSMCEHHLLPFYGKAHVAYIPNGYITGLSKIARVVDIYSHRLQVQERMTQQIKDCIQDTLKPLGVMVVIEAKHMCMQMRGVEKQNAITTTSDFSGAFNQAKTREEFMNLLRGETKRI

SEQ ID NO: 12957 - protein, 197 aa, Prevotella oris
  misc_feature (1)..(197): tr|D1QNM2|D1QNM2_9BACT GTP cyclohydrolase 1 OS=Prevotel la oris F0302 OX=649760 GN=folE PE=3 SV=1
MNPETEFREGLDDLATHYRSVLTLLGEDVSREGLEKTPMRVAKAMQILTRGYTQDPHKVLTDALFKEDYNQMVIVKDIDVFSLCEHHMLPFYGKCHVAYIPDGYITGLSKIARVVDIFSHRLQVQERLTQQIKDCIQSTLKPQGVMVVIEAKHMCMQMRGVEKQNSITTTSDFSGVFNDLNTRQEFMSLLRGEFKRI

SEQ ID NO: 12958 - protein, 197 aa, Prevotella oris
  misc_feature (1)..(197): tr|D7NBA6|D7NBA6_9BACT GTP cyclohydrolase 1 OS=Prevotel la oris C735 OX=563008 GN=folE PE=3 SV=1
MNPETEFREGLDDLATHYRSVLTLLGEDVSREGLEKTPMRVAKAMQILTRGYTQDPHKVLTDALFKEDYNQMVIVKDIDVFSLCEHHMLPFYGKCHVAYIPDGYITGLSKIARVVDIFSHRLQVQERLTQQIKDCIQSTLKPQGVMVVIEAKHMCMQMRGVEKQNSITTTSDFSGVFNDLNTRQEFMSLLRGESKRI

SEQ ID NO: 12959 - protein, 197 aa, Prevotella oulorum
  misc_feature (1)..(197): tr|G1WBW3|G1WBW3_9BACT GTP cyclohydrolase 1 OS=Prevotel la oulorum F0390 OX=702438 GN=folE PE=3 SV=1
MNPENEFREGLTDLATHYKSILTLLGEDPQREGLEKTPMRVAKAMQVLTRGYMQDPQQVLTDALFQEDYNQMVIVKDIDVFSLCEHHLLPFYGKCHVAYIPNGYITGLSKIARVVDIFSHRLQVQERLTQQIKECIQATLRPQGVMVVIEAKHMCMQMRGVEKQNSITTTSDFSGVFNDLNTRQEFMSLLRGESKRI

SEQ ID NO: 12960 - protein, 197 aa, Prevotella oulorum; identical to SEQ ID NO: 12959
  misc_feature (1)..(197): tr|A0A1T4NHS3|A0A1T4NHS3_9BACT GTP cyclohydrolase 1 OS= Prevotella oulorum OX=28136 GN=folE PE=3 SV=1

SEQ ID NO: 12961 - protein, 197 aa, Prevotella pallens
  misc_feature (1)..(197): tr|F9DIX6|F9DIX6_9BACT GTP cyclohydrolase 1 OS=Prevotel la pallens ATCC 700821 OX=997353 GN=folE PE=3 SV=1
MKSNIEFREGLDELAGHYRHVLQLLGENPDREGLEKTPMRVAKAMQVLTRGYTQDPQKVLTDALFAEEYNQMVIVKDIDFFSMCEHHMLPFYGKAHVAYIPNGYITGLSKVARVVDIFSHRLQVQERLTQQIKDCIQDTLHPLGTMVVIEAKHMCMQMRGVEKQNSITTTSAFSGAFNQAKTREEFMNLVHSDKMRI

SEQ ID NO: 12962 - protein, 197 aa, Prevotella pallens; identical to SEQ ID NO: 12961
  misc_feature (1)..(197): tr|A0A379F0G6|A0A379F0G6_9BACT GTP cyclohydrolase 1 OS= Prevotella pallens OX=60133 GN=folE PE=3 SV=1

SEQ ID NO: 12963 - protein, 197 aa, Prevotella pleuritidis
  misc_feature (1)..(197): tr|U2LHZ5|U2LHZ5_9BACT GTP cyclohydrolase 1 OS=Prevotel la pleuritidis F0068 OX=1081904 GN=folE PE=3 SV=1
MNTETEWRDGLDELASHYERVLELLGEDPERDGLQKTPIRVAKAMQVLTRGYTQDPHKVLTDALFEEKYNQMVIVKDIDFFSMCEHHLLPFYGKAHVAYIPNGYITGLSKIARVVDIFSHRLQVQERLTQQIKDCIENTLHPLGVMVVIEAKHMCMQMRGVEKQNAITTTSDFSGAFNQAKTREEFMNLLRGESKKI

SEQ ID NO: 12964 - protein, 201 aa, Prevotella ruminicola
  misc_feature (1)..(201): tr|A0A1H4BXD1|A0A1H4BXD1_PRERU GTP cyclohydrolase 1 OS= Prevotella ruminicola OX=839 GN=folE PE=3 SV=1
MNIEIKEYDNEKYRDGIEELADHYEKILGLLGEDPTREGLEKTPMRVAKAMQVLTKGYTMDAHKILTDALFKEDYNQMVIVKDIDFFSLCEHHMLPFYGKAHVAYIPNGYITGLSKIARVVDIFAHRLQVQERMTQQIKDCIEQTLHPLGVMVVIEAKHMCMQMRGVEKQNSITTTSDFSGAFNQAKTRQEFMNLIHNNQI

SEQ ID NO: 12965 - protein, 194 aa, Prevotella ruminicola
  misc_feature (1)..(194): tr|A0A1H5RNS5|A0A1H5RNS5_PRERU GTP cyclohydrolase 1 OS= Prevotella ruminicola OX=839 GN=folE PE=3 SV=1
MIQEVYREGLEELASHYKEVLTLLGEDPTREGLEKTPMRVAKAMQTLTRGYQMDAHKVLTDALFKEDYSQMVIVKDIDFFSLCEHHMLPFYGKAHVAYIPNGYITGLSKIARVVDIFAHRLQVQERMTQQIKDCIQDTLHPLGVMVVVEAKHMCMQMRGIEKQNSITTTSDFSGAFNQAKTRQEFMNLIHNNQI

SEQ ID NO: 12966 - protein, 191 aa, Prevotella saccharolytica
  misc_feature (1)..(191): tr|L1NI72|L1NI72_9BACT GTP cyclohydrolase 1 OS=Prevotel la saccharolytica F0055 OX=1127699 GN=folE PE=3 SV=1
MNSEPEYREGLNELAEHYKQILGLLGEDAKREGLEKTPLRVAKAMQVLTRGYSQDARKVLTDALFEEKYNQMVIVKDIDFFSMCEHHLLPFYGKVHVAYIPNGYITGLSKIARVVDIFSHRLQVQERMTQQIKNCIQDTLKPLGVMVVVEAQHLCMQMRGVEKQNSITTTSDFSGAFNQAKTREEFMNLLR

SEQ ID NO: 12967 - protein, 197 aa, Prevotella salivae
  misc_feature (1)..(197): tr|E6MP34|E6MP34_9BACT GTP cyclohydrolase 1 OS=Prevotel la salivae DSM 15606 OX=888832 GN=folE PE=3 SV=1
MNPETEFREGLDDLATHYKSILTLLGEDAYREGLEKTPMRVAKAMQILTRGYSQDPHKVLTDALFKEDYNQMVIVKDIDVFSLCEHHMLPFYGKCHVAYIPNGYITGLSKVARVVDIFSHRLQVQERLTQQIKDCIQETLNPQGVMVVIEAKHMCMQMRGVEKQNSITTTSDFSGVFNDLNTRQEFMSLLRGESKRI

SEQ ID NO: 12968 - protein, 197 aa, Prevotella salivae; identical to SEQ ID NO: 12967
  misc_feature (1)..(197): tr|U2MSZ1|U2MSZ1_9BACT GTP cyclohydrolase 1 OS=Prevotel la salivae F0493 OX=1395125 GN=folE PE=3 SV=1

SEQ ID NO: 12969 - protein, 197 aa, Prevotella scopos
  misc_feature (1)..(197): tr|A0A1B1I8P1|A0A1B1I8P1_9BACT GTP cyclohydrolase 1 OS= Prevotella scopos JCM 17725 OX=1236518 GN=folE PE=3 SV= 1
MTPEIPFREGLDELASHYKQVLTLLGEDPEREGLQKTPMRVAKAMQVLTRGYTQDPHKVLTDALFEEKYNQMVIVKDIDFFSMCEHHILPFYGKVHVAYIPNGYITGLSKIARVVDIFSHRLQVQERLTEQVMQCINDTLKPQGVMVVIEAKHMCMQMRGVEKQNSITTTSAYSGVFESSKTRNEFMDLLRGETKRI

SEQ ID NO: 12970 - protein, 219 aa, Prevotella shahii
  misc_feature (1)..(219): tr|A0A318HYT8|A0A318HYT8_9BACT GTP cyclohydrolase 1 OS= Prevotella shahii DSM 15611 = JCM 12083 OX=1122991 GN=f olE PE=3 SV=1
MARKRTFQGTKRTKTSETINNATILIMNLEPEYREGLDQLAAHYKEVLALLGEDPTREGLEKTPMRVAKAMQVLTRGYTQDARKVLTDALFEEKYNQMVIVKDIDFFSMCEHHMLPFFGKVHVAYIPNGYITGLSKIARVVDIFSHRLQVQERMTQQIKDCIQDTLKPLGVMVVVEAKHLCMQMRGVEKQNSVTTTSDFSGAFNQAKTREEFMNLIRPK

SEQ ID NO: 12971 - protein, 197 aa, Prevotella sp.
  misc_feature (1)..(197): tr|A0A3R6B721|A0A3R6B721_9BACT GTP cyclohydrolase 1 OS= Prevotella sp. AM34-19LB OX=2292364 GN=folE PE=3 SV=1
MNPETEFREGLDELAGHYKEVLKLLGEDTEREGLVKTPMRVAKAMQVLTRGYYQDAHKVLTDALFEEKYDQMVIVKDIDFFSLCEHHMLPFYGKVHVAYIPNGKITGLSKIARVVDIFSHRLQVQERLTQQIKDCIQETLNPQGVMVVVEAKHMCMQMRGVEKQNSITTTSDYSGVFNSLNTRQEFMSLLRGESKRI

SEQ ID NO: 12972 - protein, 196 aa, Prevotella sp.
  misc_feature (1)..(196): tr|R7HRI5|R7HRI5_9BACT GTP cyclohydrolase 1 OS=Prevotel la sp. CAG:279 OX=1262924 GN=folE PE=3 SV=1
MDNKKQLDGLDIEKVNKIAEHYEAILSLLGEDTSREGLVKTPMRAAKAMAFLTSGYRKDADKIVKSAIFSHEGSRMVIVKDIEFHSLCEHHILPFFGKIAIGYIPDGNIVGLSKIARAVDVFARRLQVQERMTRQICDLLTRELSAKGVIVFCEATHMCMRMRGVEKECSTTQTIEYSGVFEKIEYRQEFLSMLKQ

SEQ ID NO: 12973 - protein, 196 aa, Prevotella stercorea
  misc_feature (1)..(196): tr|A0A415GE87|A0A415GE87_9BACT GTP cyclohydrolase 1 OS= Prevotella stercorea OX=363265 GN=folE PE=3 SV=1
MVTSEFREGLDGLASHYKSIINLLGEDTEREGLQKTPMRVAKAMQVLTRGYSQDPQKVLTDALFKEDYSQMVVVKDIDVFSLCEHHMLPFYGKAHVAYIPNGYITGLSKIARVVDIFSHRLQVQERLTQQIRECIEQTLHPLGVMVVIEAKHMCMQMRGVEKQSSITMTSDFSGAFEQAKTRQEFMNLINSDSHKF

SEQ ID NO: 12974 - protein, 196 aa, Prevotella stercorea
  misc_feature (1)..(196): tr|R7H6L0|R7H6L0_9BACT GTP cyclohydrolase 1 OS=Prevotel la stercorea CAG:629 OX=1263103 GN=folE PE=3 SV=1
MVTSEFREGLDDLASHYKSIINLLGEDTEREGLQKTPMRVAKAMQVLTRGYSQDPQKVLTDALFKEDYSQMVVVKDIDVFSLCEHHMLPFYGKAHVAYIPNGYITGLSKIARVVDIFSHRLQVQERLTQQIRECIEQTLHPLGVMVVIEAKHMCMQMRGVEKQSSITMTSDFSGAFEQAKTRQEFMNLINSDSHKF

SEQ ID NO: 12975 - protein, 197 aa, Prevotella timonensis
  misc_feature (1)..(197): tr|A0A2K0XM94|A0A2K0XM94_9BACT GTP cyclohydrolase 1 OS= Prevotella timonensis OX=386414 GN=folE PE=3 SV=1
MNQTNEFREGLDDLASHYQEILQLLGENPDREGLEKTPMRVAKAMQVLTRGYTQDPKRVLLDALFEEKYDQMVIVKDIDFFSLCEHHMLPFYGKAHVAYIPHGHITGLSKVARVVDIYSHRLQVQERLTQQVKDCIQEALQPLGVMVVIEAKHMCMQMRGVEKQNSITTTSAFSGAFNQAKTREEFMNLLRGESRKI

SEQ ID NO: 12976 - protein, 197 aa, Prevotella timonensis
  misc_feature (1)..(197): tr|A0A098YP60|A0A098YP60_9BACT GTP cyclohydrolase 1 OS= Prevotella timonensis S9-PR14 OX=1401062 GN=folE PE=3 S V=1
MNQTNEFREGLDELASHYQEILQLLGENPDREGLEKTPMRVAKAMQVLTRGYTQDPKRVLLDALFEEKYDQMVIVKDIDFFSLCEHHMLPFYGKAHVAYIPHGHITGLSKVARVVDIYSHRLQVQERLTQQVKDCIQEALQPLGVMVVIEAKHMCMQMRGVEKQNSITTTSAFSGAFNQAKTREEFMNLLRGESRKI

SEQ ID NO: 12977 - protein, 197 aa, Prevotella veroralis
  misc_feature (1)..(197): tr|C9MR90|C9MR90_9BACT GTP cyclohydrolase 1 OS=Prevotel la veroralis F0319 OX=649761 GN=folE PE=3 SV=1
MTPETQFRDGLDELATHYKEILKLLGENPEREGLEKTPMRVAKAMQVLTRGYTQDPHKVLTDALFEEKYNQMVIVKDIDFFSMCEHHILPFYGKAHVAYIPNGKITGLSKIARVVDIYSHRLQVQERLTEQVMQCINDTLKPQGVMVVIEAKHMCMQMRGVEKQNSITTTSAYSGVFESSKTRNEFMNLLRGETKRI

SEQ ID NO: 12978 - protein, 193 aa, Prevotellaceae bacterium
  misc_feature (1)..(193): tr|A0A239QZ59|A0A239QZ59_9BACT GTP cyclohydrolase 1 OS= Prevotellaceae bacterium MN60 OX=1945887 GN=folE PE=3 S V=1
MYPENEIFREGLDDLAGHYKEILTLLGEDPSREGLLKTPMRVAKAMQVLTRGYEMDAHQVLRDALFKEDYSQMVIVKDIDFFSLCEHHMLPFYGKVHVAYIPNGYITGLSKIARVVDIYSHRLQVQERMTLQIKECIQETLKPLGVMVVVEARHMCMQMRGVEKQNSITTTSDFCGAFNQAKTREEFMNLINR

SEQ ID NO: 12979 - protein, 194 aa, Prevotellaceae bacterium
  misc_feature (1)..(194): tr|A0A1K1MXR9|A0A1K1MXR9_9BACT GTP cyclohydrolase 1 OS= Prevotellaceae bacterium HUN156 OX=1520830 GN=folE PE=3 SV=1
MYPENEIFRDGLDDLAGHYKEILTLLGEDPSREGLEKTPMRVAKAMQVLTRGYEMDAHQVLRDALFKEDYSQMVIVKDIDFFSLCEHHMLPFYGKVHVAYIPNGYITGLSKIARVVDIFSHRLQVQERMTLQIKECIQETLKPLGVMVVVEARHMCMQMRGVEKQNSITTTSDFCGAFNQAKTREEFMNLIHNR

SEQ ID NO: 12980 - protein, 226 aa, Pricia antarctica
  misc_feature (1)..(226): tr|A0A1G7DLI3|A0A1G7DLI3_9FLAO GTP cyclohydrolase 1 OS= Pricia antarctica OX=641691 GN=folE PE=3 SV=1
MKIDNTLEKQYEEMGDDHASASEETPLRGDAFVLEDSEKIARIRGNVQEIMMTLGLDLEDDSLKGTPDRVAKMFVQEIFGGLHPDRKPKSSTFANKYKYGEMLVEKNITLYSTCEHHLLPIVGKAHIAYISNGTVVGLSKMNRIVDYFAKRPQVQERLNIQIVRELQQVLDTDDVACVIDAKHLCVNSRGIRDIESSTVTAEYGGKFKNEEVRREFLDYINLDTNF

SEQ ID NO: 12981 - protein, 199 aa, Pricia antarctica
  misc_feature (1)..(199): tr|A0A1G7BAV6|A0A1G7BAV6_9FLAO GTP cyclohydrolase 1 OS= Pricia antarctica OX=641691 GN=folE PE=3 SV=1
MSPYTNLEEYNIEIANDVKKSYSKIIDELGEDVNREGLEKTPERAAKAMMFLTQGYKQDAVEILKSAMFAESYDEMVIIKDIELYSLCEHHLLPFFGKAHVAYIPNGHIVGLSKIPRVVDVFARRLQVQERLTHDILECINNTLKPKGVAVVIEAAHMCMMMRGVQKQNSVTTTSGFRGQFEKIETRNEFLKLISSNLS

SEQ ID NO: 12982 - protein, 363 aa, Primorskyibacter insulae
  misc_feature (1)..(363): tr|A0A2R8AQG3|A0A2R8AQG3_9RHOB GTP cyclohydrolase FolE2 OS=Primorskyibacter insulae OX=1695997 GN=folE2 PE=3 S V=1
MNVYMPGIKAEPSRDEAETALDLLRQWAARASDDDIASLDPGLTALIGGAGYPDLSRNYPHNFVADAAYRATLPDLQNGPSSLIRGEKRAIQHVGISNFRLPIRYHTRDNGDLNLETSVTGTVSLEADKKGINMSRIMRSFYTHAEKTFSFYVIEHALDDYKSDLESFDARINMRFSFPMKVNSLRSGLTGYQYYDIALEVVELAGVRRRIMHLDYVYSSTCPCSLELSEHARRERGQLATPHSQRSVARISAELKDGKRLWFEDLIDMCRRAVPTETQVMVKREDEQAFAELNAANPIFVEDAARLFAEQLQADDRVGDYRVLASHQESLHSHDAVSVLTEGDLFAQDSLDPKLFSTLFHIG

SEQ ID NO: 12983 - protein, 363 aa, Primorskyibacter sedentarius
  misc_feature (1)..(363): tr|A0A4R3JNL1|A0A4R3JNL1_9RHOB GTP cyclohydrolase FolE2 OS=Primorskyibacter sedentarius OX=745311 GN=folE2 PE= 3 SV=1
MNLHLADAANDLARKEAETALATLRRWAATASEEELNSLDPDAARFLADGDYPALSNVYPADFDADAAYKTTLPDLQNGPAALIRGARRAIQHVGISNFRLPLRYHTRDNGDLTLETSVTGTVSLEADKKGINMSRIMRSFYGHAEKTFSFEVIEAALDDYKNDLESIDARIQMRFSFPMKVDSLRSGLSGYQYYDIALELIERDGVRLKVVHLDYLYSSTCPCSLELSEHARRTRGQLATPHSQRSVARLSVVVNEGKCLWFEDLIDMCRRAVPTETQVMVKREDEQAFAELNAANPIFVEDAARLFAERLIADPRVGDFRIVASHQESLHSHDAVSILTEGDTFVGKSLDPKLFNTLFHVG

SEQ ID NO: 12984 - protein, 362 aa, Primorskyibacter sp.
  misc_feature (1)..(362): tr|A0A4R6A9Z6|A0A4R6A9Z6_9RHOB GTP cyclohydrolase FolE2 OS=Primorskyibacter sp. SS33 OX=2547833 GN=folE2 PE=3 SV=1
MNLHDRDISAEMNRDDAADMLERLRGWAARASEEDLAQLDPQLRALLPGPVPSYPLFSTAYPQGFTVDAAYRAGLPDLQNGTLVRGARRHIQHVGISNFRLPLRVALRDGGEASVQASVTGSVSLAAEMKGINMSRIMRTFYRNAEDSFDLDVIERTLDAYKTDLGSFDARIMMRLSMPLRVDSLRSGLSGWQYYDLAFEVVDLDGTRKRIMHLDYVYSSTCPCSLELAEHARRTRGQLATPHSQRSVARISVELTGGELFVEDLIDHCRAAIPTETQVMVKREDEQAFAELNAANPIFVEDAVRLLAQALASDPAIGDFRVLASHQESLHSHDAVSLLTEGETFAQTSLEPGLFASLHHGG

SEQ ID NO: 12985 - protein, 246 aa, Prochlorococcus marinus
  misc_feature (1)..(246): tr|A0A0A1ZH54|A0A0A1ZH54_PROMR GTP cyclohydrolase I typ e 1 OS=Prochlorococcus marinus str. GP2 OX=59925 GN=EU9 1_0029 PE=4 SV=1
MTSTLPNDNIRNFDDQITNKLISEIIRDRIKNSGKRFSANDNIANFINPGELEILEKEVTSRVKDLLKSLVIDVENDHNTQETAERVSKMYLNEVFKGRYHEQPKVTSFPNDKNLDEIYTVGPISVRSACSHHLVPILGECWIGIKPGNKVIGLSKFARVADWVFSRPHIQEEAVMILADEIEKLCEPKGLGIIVKAQHYCMKWRGVKEPNTSMINSVVRGDFRHDLSLKQEFFELVKQQSATNNY

SEQ ID NO: 12986 - protein, 248 aa, Prochlorococcus marinus
  misc_feature (1)..(248): tr|A0A0A2A377|A0A0A2A377_PROMR GTP cyclohydrolase I typ e 1 OS=Prochlorococcus marinus str. MIT 9201 OX=93057 G N=EU95_1397 PE=4 SV=1
MTSTLPNDNIKKTFGDQISNKLISEIIRDRIKLNKKRFHANDNISDFINPGELEILQREVAEKVKDLLKSLVIDIDNDHNSQETAQRVAKMYLQEVFKGRYHKRPNVTDFPNAKKLDEIYTLGPISVRSACSHHMVPIIGDCWIGIKPGNKVIGISKFARVADWVFSRPHIQEEAVMILADEIEKLCEPKGLAILVKAKHYCMCWRGVKEPNTSMINSIVRGDFRHDTSLKQEFFELVKQQPNGLSCY

SEQ ID NO: 12987 - protein, 255 aa, Prochlorococcus sp.
  misc_feature (1)..(255): tr|A0A0A2CH50|A0A0A2CH50_9PROC GTP cyclohydrolase I typ e 1 OS=Prochlorococcus sp. MIT 0701 OX=1499502 GN=EV12_ 2089 PE=4 SV=1
MTSIIPASSKGLGNDTNASPENGQIANTSKISERIRERFIAQGVSFLANDNVSEYIQPGELQELEVEVAGRVRDLLQSLLIDVDNDHNTEETAERVARMYLNEVFKGRYQKQPKITSFPNVKQLDEIYTVGPITMRSACSHHFVPIMGNCWIGIKPGTRVIGLSKFARVADWVFSRPHIQEEAVMILADEIERLCEPQGLGIIVKAEHYCMKLRGVMEPQCTMVNSVVRGVFRHDPSLKQEFFELVRQQEATLAT

SEQ ID NO: 12988 - protein, 248 aa, Prochlorococcus sp.
  misc_feature (1)..(248): tr|A0A089PE52|A0A089PE52_9PROC GTP cyclohydrolase I typ e 1 OS=Prochlorococcus sp. MIT 0801 OX=1501269 GN=EW15_ 1950 PE=4 SV=1
MTSTAPNENVKDNLKDKISCKLVSEIIRERIKANGARFHANDNISDFIQPGELETLEREVATRVRDLLKTLLIDVDNDHNTQETAERVSRMYLNEVFKGRYHPQPKVTNFPNDRNLDEIYTLGPITVRSACSHHFVPILGDCWIGIKPGEKVIGISKFARVADWVFSRPHIQEEAVMILADEIERLCEPKGLAILVKAQHYCMKWRGVKEPETSMINSIVRGDFRHDASLKQEFFELVKQQSNFGKNY

SEQ ID NO: 12989 - protein, 234 aa, Prochlorothrix hollandica
  misc_feature (1)..(234): tr|A0A0M2PV61|A0A0M2PV61_PROHO GTP cyclohydrolase 1 OS= Prochlorothrix hollandica PCC 9006 = CALU 1027 OX=31761 9 GN=folE PE=3 SV=1
MTTASASANSASGHPAVTPPSPKVPEVRPDRASRVVTSDDPHEVSQEDMMEAVRTILLGVGEDPDREGLLKTPKRVAEAMRFLTSGYDQSLEDLVNGAIFDEGHNEMVLVRDITAFSLCEHHMLPFMGRVHVAYIPTQKVVGLSKLARIVEMYSRRLQVQERLTRQIAEAVQEILDPQGVAVVMEATHMCMVMRGVQKPGSWTVTSAMLGAFQEDQRTRDEFLSLIRHQPAFMA

SEQ ID NO: 12990 - protein, 184 aa, Prolinoborus fasciculus; identical to SEQ ID NO: 3875
  misc_feature (1)..(184): tr|A0A2U3MJ19|A0A2U3MJ19_9NEIS GTP cyclohydrolase 1 OS= Prolinoborus fasciculus OX=1056810 GN=folE PE=3 SV=1

SEQ ID NO: 12991 - protein, 105 aa, Prolinoborus fasciculus
  misc_feature (1)..(105): tr|A0A2U3MEF9|A0A2U3MEF9_9NEIS Putative GTP cyclohydrol ase 1 type 2 OS=Prolinoborus fasciculus OX=1056810 GN=P FCIP103579_0235 PE=4 SV=1
MLKLIYYVPDENLEDTKNAIFAAGAGGIGEYTNCAWQVLGTGQFKPQEGADPHIGEVGKLEQVEEWRVEILVPDEKAVDVAKALKESHPYEEPAFEFIQLLDIKV

SEQ ID NO: 12992 - protein, 208 aa, Prolixibacter denitrificans
  misc_feature (1)..(208): tr|A0A2P8CFR3|A0A2P8CFR3_9BACT GTP cyclohydrolase 1 OS= Prolixibacter denitrificans OX=1541063 GN=folE PE=3 SV= 1
MKFSLNKLDNGGYSKVEHYNTENVEKLATNYQDILGLLGEDPSREGLEKTPVRVAKAMQFLTQGYNMNPEEILSSAKFKEDYRQMVIVKDIELYSLCEHHMLPFFGKAHVAYIPNGYITGLSKIARVVEAFSRRLQVQERLTLQIKECIQNTLNPLGVAVVIEATHMCMVMRGIEKQNSVTTTSDFTGAFEKVATREEFIRLISSDLS

SEQ ID NO: 12993 - protein, 243 aa, Prolixibacteraceae bacterium
  misc_feature (1)..(243): tr|A0A3B9ZMQ9|A0A3B9ZMQ9_9BACT GTP cyclohydrolase 1 OS= Prolixibacteraceae bacterium OX=2053594 GN=folE PE=3 SV =1
MKVTGFLKTETAKPKYNGTHLPRTNNNNGHDLIGDNHFATSLETPMREDAFLLSDEQKMLLIEDKFRDIMNVLGLDLRDDSLNGTPHRVAKMFVKEIFSGLNPENKPKISVFDNKFKYCEMLVEKNINLNSTCEHHFLPIVGKAHVAYVSSGQVIGLSKINRVVDYFSRRPQVQERLTVQIANELKRILKTEDVAVVIEAKHLCVSSRGIQDESSSTISAEYGGVFKEMHRKDEFLKYLSLDL

SEQ ID NO: 12994 - protein, 169 aa, Prolixibacteraceae bacterium
  misc_feature (1)..(169): tr|A0A350YZK0|A0A350YZK0_9BACT GTP cyclohydrolase 1 (Fr agment) OS=Prolixibacteraceae bacterium OX=2053594 GN=f olE PE=3 SV=1
MEFSLQNNDGNYRRIEKHDSAKLKKLSKHYKEILDLLGEDTDREGLQKTPLRVAKAMQFLLQGYEMDPVKILESAMFKEDYRQMVIVKDIEIYSMCEHHLLPFIGKAHVAYIPNGYITGLSKIARVVDVYARRLQVQERLTSQIKDCIQSTLNPLGVAVVIEAQHLCMQ

SEQ ID NO: 12995 - protein, 207 aa, Promicromonospora sp.
  misc_feature (1)..(207): tr|A0A421AIC0|A0A421AIC0_9MICO GTP cyclohydrolase 1 OS= Promicromonospora sp. YR516 OX=2135725 GN=folE PE=3 SV= 1
MTDGSITPLSTPLRRAADVPPYDADRAEAAVRELLLAVGEDPEREGLRETPARVARAYREIFAGLRQEPEDVLTTTFDLGHEEMVLVKDIEVYSTCEHHLVPFHGVAHVGYIPNVDGRITGLSKLARLVEVYARRPQVQERMTTQIADSLVEILEPRGVLVVVQCEHLCMSMRGVRKPGSRTITSAVRGVMRDGATRAEAMSLILGK

SEQ ID NO: 12996 - protein, 207 aa, Promicromonospora sp.
  misc_feature (1)..(207): tr|A0A542K7Y8|A0A542K7Y8_9MICO GTP cyclohydrolase 1 OS= Promicromonospora sp. SLBN-65 OX=1365480 GN=folE PE=3 S V=1
MTDGSITPLSTPVRRAADVPPYDAARAEAAVRELLLAVGEDPEREGLRETPARVARAYREIFAGLRQEPEDVLTTTFDLGHEEMVLVKDIEVYSTCEHHLVPFHGVAHVGYIPNVDGRITGLSKLARLVEVYARRPQVQERMTTQIADSLVEILEPRGVLVVVQCEHLCMSMRGVRKPGSRTVTSAVRGVMRDGATRAEAMSLILGK

SEQ ID NO: 12997 - protein, 207 aa, Promicromonospora sukumoe
  misc_feature (1)..(207): tr|A0A2U1ESA5|A0A2U1ESA5_9MICO GTP cyclohydrolase 1 OS= Promicromonospora sukumoe OX=88382 GN=folE PE=3 SV=1
MTDRSITPVVTPVRRAADVPPYDAARAEAAVRELLLAVGEDPEREGLRETPARVARAYREIFAGLRQEPEDVLTTTFDLGHEEMVLVKDIEVYSTCEHHLVPFHGVAHVGYIPNVDGRITGLSKLARLVEVFARRPQVQERMTTQIADSLVEILEPRGVLVVVQCEHLCMSMRGVRKPGSRTVTSAVRGVMRDGATRAEAMSLILGK

SEQ ID NO: 12998 - protein, 207 aa, Promicromonospora thailandica
  misc_feature (1)..(207): tr|A0A397LWU6|A0A397LWU6_9MICO GTP cyclohydrolase 1 OS= Promicromonospora thailandica OX=765201 GN=folE PE=3 SV =1
MTDRSVTPVTTPARRPADIPPYDAARAEAAVREFLLAVGEDPDREGLRETPARVARAYQEIFAGLRQEAKDVLTTTFDLGHEEMVLVKDIEVYSTCEHHLVPFHGVAHVGYIPNADGRITGLSKLARLVEVYARRPQVQERMTTQIADSLVEILEPRGVLVVVECEHLCMSMRGVRKPGSRTITSAVRGVMRDGATRAEAMSLILGK

SEQ ID NO: 12999 - protein, 208 aa, Propionibacteriaceae bacterium
  misc_feature (1)..(208): tr|A0A255DZ64|A0A255DZ64_9ACTN GTP cyclohydrolase 1 OS= Propionibacteriaceae bacterium NML 160184 OX=2016506 GN =folE PE=3 SV=1
MARRAPPPTNESAVNESGFDEDRVRRGVREILAGIGEDPDRDGLRDTPARVARAYGELFAGLRQDPAEVLETTFELDHNELVLVTDIEVASMCEHHLLPFTGVAHVGYIPGDQGRVTGLSKLARLVEVYARRPQIQERLTTQVADALVDSLKPGGVIVVVDCEHLCMSMRGVHKPGARTVTSAVRGMLRRPATRAEAMSLIQHGAGGR

SEQ ID NO: 13000 - protein, 203 aa, Propionibacteriaceae bacterium
  misc_feature (1)..(203): tr|A0A367YW99|A0A367YW99_9ACTN GTP cyclohydrolase 1 OS= Propionibacteriaceae bacterium 16Sb5-5 OX=2268447 GN=fo lE PE=3 SV=1
MVERSQSTPPEPAVAPGFDHARVEAAVRELLIGIGEDPDRDGLLDTPARVARAYAEMFSGLHSNPADVLSTTFELSHDEMVLVSDIEVWSCCEHHLVPFTGRAHVGYIPGPDGRITGLSKLARLVDLYAKRPQVQERLTTQIADALVQHLSPRGVIVVIDCEHLCMTMRGVRKPGSRTVTSAVRGQLRDPATRAEAMSLIARS

SEQ ID NO: 13001 - protein, 209 aa, Propionibacterium acidifaciens
  misc_feature (1)..(209): tr|U2SD09|U2SD09_9ACTN GTP cyclohydrolase 1 OS=Propioni bacterium acidifaciens F0233 OX=553198 GN=folE PE=3 SV= 1
MTEKPSREIDNTPCLGPGARPAPGFDGARIEAAVRELLIGMGEDPDRDGLRDTPARVARAYAEVFSGIGRDPDEVLARTFDISHEEMVLVRDIEVYSTCEHHLMPFHGVAHVCYIPPRNGRVTGLSKIARLVELYARRPQVQERLTGQVADALVHTLQARGALVVVDCEHLCMTMRGVRKPGARTVTSAVRGQLRDPATRAEAMSLINS

SEQ ID NO: 13002 - protein, 201 aa, Propionibacterium acidifaciens
  misc_feature (1)..(201): tr|A0A3G5HTT4|A0A3G5HTT4_9ACTN GTP cyclohydrolase 1 OS= Propionibacterium acidifaciens OX=556499 GN=folE PE=3 S V=1
MDNTPCLGPGARPAPGFDGARIEAAVRELLIGMGEDPDRDGLRDTPARVARAYAEVFSGIGRDPDEVLARTFDISHEEMVLVRDIEVYSTCEHHLMPFHGVAHVCYIPPRNGRVTGLSKIARLVELYARRPQVQERLTGQVADALVHTLQARGALVVVDCEHLCMTMRGVRKPGARTVTSAVRGQLRDPATRAEAMSLINS

SEQ ID NO: 13003 - protein, 209 aa, Propionibacterium australiense
  misc_feature (1)..(209): tr|A0A383S5F2|A0A383S5F2_9ACTN GTP cyclohydrolase 1 OS= Propionibacterium australiense OX=119981 GN=folE PE=3 S V=1
MTENQPREIDNTPYAVPGTRLAPGFDGARVEAAVRELLIGIGEDPDRDGLRDTPARVARAYAEVFSGIGQDPGEVLARTFDISHEEMILVRDIEVYSTCEHHLMPFHGVAHVCYIPPRDGRVTGLSKIARLVELYARRPQVQERLTGQVADALMGSLNARGALVVIDCEHLCMTMRGVHKPGARTLTSAVRGLLREPATRAEAMSLINA

SEQ ID NO: 13004 - protein, 211 aa, Propionibacterium cyclohexanicum
  misc_feature (1)..(211): tr|A0A1H9RUA4|A0A1H9RUA4_9ACTN GTP cyclohydrolase 1 OS= Propionibacterium cyclohexanicum OX=64702 GN=folE PE=3 SV=1
MSGVSSTEIDNSAYLAAESPLPVGFDGARVEAAVRELLIGIGEDPDRQGLRETPARVARACAEIFSGLGKDPAQVLAKTFDISHDEMVLVRDIKFFSTCEHHLMPFFGVAHICYIPPKDGRVTGLSKLARLVELYARRPQVQERLTTEIADALVDVLRARGVMVVVECEHLCMTMRGVHTPSSRTVTSAVRGQLRDPATRAEAMGLINRSH

SEQ ID NO: 13005 - protein, 225 aa, Propionibacterium freudenreichii
  misc_feature (1)..(225): tr|D7GG63|D7GG63_PROFC GTP cyclohydrolase 1 OS=Propioni bacterium freudenreichii subsp. shermanii (strain ATCC 9614 / DSM 4902 / CIP 103027 / NCIMB 8099 / CIRM-BIA1) OX=754252 GN=folE PE=3 SV=1
MSESTRAGRSDETRETDATDHAIDNSAYEQPGLELPPGFDGKRIEAAMREVLIGIGEDPDREGLVETPARIARAYGEIFSGLGKEPDKVLARTFDISHDEMVLVRDIDVHSMCEHHLLPFHGRAHVCYIPAKDGRVTGLSKLARLVDLYARRPQVQERLTTQMANALVDQLGARGVLVVLECEHQCMTMRGVRKPGSTTVTSAVRGVLRDPATRSEAMSLIVRNR

SEQ ID NO: 13006 - protein, 233 aa, Propionibacterium freudenreichii
  misc_feature (1)..(233): tr|A0A341FB20|A0A341FB20_9ACTN GTP cyclohydrolase 1 OS= Propionibacterium freudenreichii OX=1744 GN=folE PE=3 S V=1
MPSRKGDPLSESTRAGRSDETRETDATDHAIDNSAYEQPGLELPPGFDGKRIEAAMREVLIGIGEDPDREGLVETPARIARAYGEIFSGLGKEPDKVLARTFDISHDEMVLVRDIDVHSMCEHHLLPFHGRAHVCYIPAKDGRVTGLSKLARLVDLYARRPQVQERLTTQMANALVDQLGARGVLVVLECEHQCMTMRGVRKPGSTTVTSAVRGVLRDPATRSEAMSLIVRNR

SEQ ID NO: 13007 - protein, 194 aa, [Propionibacterium] humerusii
  misc_feature (1)..(194): tr|E4HKW6|E4HKW6_9ACTN GTP cyclohydrolase 1 OS=[Propion ibacterium] humerusii HL044PA1 OX=765109 GN=folE PE=3 S V=1
MSFTKLLVDRERVAAATREFLLAIGEDPNREGLRDTPMRVAKAAEELFGGLSQDPGELLATTFDISHDEMVLVRDIELQSMCEHHLLPFIGVAHVGYIPAKDGRVTGLSKIARLVEVYARRPQVQERLTTQVADALVKHLGARGVIVVVEAEHMCMTTRGVRKPGARTVTSAVRGILRNPATRAEAMGLITAGR

SEQ ID NO: 13008 - protein, 194 aa, [Propionibacterium] humerusii; identical to SEQ ID NO: 13007
  misc_feature (1)..(194): tr|F3NX77|F3NX77_9ACTN GTP cyclohydrolase 1 OS=[Propion ibacterium] humerusii P08 OX=999892 GN=folE PE=3 SV=1

SEQ ID NO: 13009 - protein, 193 aa, [Propionibacterium] namnetense
  misc_feature (1)..(193): tr|F9NVV5|F9NVV5_9ACTN GTP cyclohydrolase 1 OS=[Propion ibacterium] namnetense SK182B-JCVI OX=1051006 GN=folE P E=3 SV=1
MSSTKLSVDRERAAAAIREFLLAIGEDPDREGLRDTPMRVAKAAEELFGGLSQDPGELLATTFDICHDEMVLVRDIELQSMCEHHLLPFIGVAHVGYIPAKNGRVTGLSKIARLVEVYARRPQVQERLTTQVANALVDHLDARGVIVVVEAEHMCMTTRGVRKPGARTVTSAVRGILRNSATRAEAMGLITGR

SEQ ID NO: 13010 - protein, 209 aa, Propionibacterium sp.
  misc_feature (1)..(209): tr|A0A375HZS0|A0A375HZS0_9ACTN GTP cyclohydrolase 1 OS= Propionibacterium sp. JV5 OX=1962131 GN=folE PE=3 SV=1
MTENEPHETDNTPYAVPGGRLAPGFDGARIEAAVRELLIGIGEDPDRDGLRDTPARVARAYAEVFSGIGQDPGDVLARTFDISHEEMILVRDIEVYSTCEHHLMPFHGVAHVCYIPPRDGRVTGLSKIARLVEIYARRPQVQERLTGQIADALMGSLHARGALVVIDCEHLCMTMRGVHKPGARTLTSAVRGLLRDPATRAEAMSLINA

SEQ ID NO: 13011 - protein, 207 aa, Propionibacterium sp.
  misc_feature (1)..(207): tr|U7J7F8|U7J7F8_9ACTN GTP cyclohydrolase 1 OS=Propioni bacterium sp. KPL2000 OX=1203629 GN=folE PE=3 SV=1
MNETPSELEIPLEPEIASECCVDVVRAQAAVREFLLAVGEDPDREGLRDTPARVARAAGELLGGLYQDPAQILATTFDMSHDELVLVRDIEVQSFCEHHLLPFVGVAHVGYIPAKDGRVTGLSKIARLVDVYARRPQVQERLTTQVADAMVEHLDARGVIVVVECEHMCITMRGVHKPGSRTVTSAVRGMLRNPATRAEAMGLIARG

SEQ ID NO: 13012 - protein, 187 aa, Propioniciclava sinopodophylli
  misc_feature (1)..(187): tr|A0A4Q9KGR8|A0A4Q9KGR8_9ACTN GTP cyclohydrolase 1 OS= Propioniciclava sinopodophylli OX=1837344 GN=folE PE=3 SV=1
MAVDQERVAAAVREILSAIGEDPDRDGLVGTPERVARAYAEMFSGLDQDPGDPLGVTFDIEHEEMVLVKDIELWSTCEHHLLPFHGVAHVAYIPSRDGKITGLSKLARLVDVFARRPQVQERLTGQIADALVHHLQPQGVMVVVEAEHQCMTMRGVRKPGSSTVTSAVRGALRNAATRAEAMGLIIG

SEQ ID NO: 13013 - protein, 187 aa, Propioniciclava tarda
  misc_feature (1)..(187): tr|A0A4V2JTH6|A0A4V2JTH6_9ACTN GTP cyclohydrolase 1 OS= Propioniciclava tarda OX=433330 GN=folE PE=3 SV=1
MAVDHDRAARAVREFLFAIGEDPDREGLRDTPGRVARAAVELFAGLDADPADLLATTFDIQHEELVLVKDIEVVSMCEHHLLPFTGVAHVAYIPAKNGHVTGLSKLARLVDVYARRPQVQERLTTQIADALVTHLRAQGVMVVVEAEHQCMTMRGVRKPGSKTVTSAVRGVMHAPATRAETMSLILG

SEQ ID NO: 13014 - protein, 186 aa, Propionicimonas paludicola
  misc_feature (1)..(186): tr|A0A2A9CUB1|A0A2A9CUB1_9ACTN GTP cyclohydrolase 1 OS= Propionicimonas paludicola OX=185243 GN=folE PE=3 SV=1
MAVDQPRVAAAIRELLIGIGEDPDRDGLVDTPARVAKAYASIFEGMDADPAQILSTTFELGHDELVLVRDIEVWSTCEHHLLPFTGKAHVGYIPSKGRITGLSKLARLVDAYAKRPQVQERLTSQVADALVEHLKPRGAIVVIECEHLCMTMRGVRKPGAKTVTSAVRGVMANPATRAEVMGLIIG

SEQ ID NO: 13015 - protein, 193 aa, Propioniferax innocua
  misc_feature (1)..(193): tr|A0A542ZCQ1|A0A542ZCQ1_9ACTN GTP cyclohydrolase 1 OS= Propioniferax innocua OX=1753 GN=folE PE=3 SV=1
MTDARRDYDHDRVAAAVREILIGIGEDPDREGLIETPDRVARAYAELFAGLRQDAAEPLATTFAVDHDEMVLVKDIEMVSCCEHHLLPFTGVAHVGYIPALNGRVTGLSKLGRLVDVYARRPQVQERLTGQVADALVDHLEARGVIVVIEAEHQCMTMRGVHKPGSRTITSAVRGQLLNAATRAEAMSLIVGR

SEQ ID NO: 13016 - protein, 204 aa, Propionimicrobium lymphophilum
  misc_feature (1)..(204): tr|S2W1Y8|S2W1Y8_9ACTN GTP cyclohydrolase 1 OS=Propioni microbium lymphophilum ACS-093-V-SCH5 OX=883161 GN=folE PE=3 SV=1
MSSNAKARRAVKRVEGGFDYSLIEHGVKEILQGIGEDPNRDGLKETPARIARACAELFAGLSQDPKELLETTFDASHDEMVLVKDIDVHSMCEHHLLPFHGFAHVAYIPPASGRVVGLSKLARLVEVFARRPQVQERLTTQIADELEHTLGAKGVLVVLECEHNCMTMRGVRKPGSKTVTSAVRGQLRNAATRAEAMSLVLGHN

SEQ ID NO: 13017 - protein, 263 aa, Propionispira arboris
  misc_feature (1)..(263): tr|A0A1H6W2F7|A0A1H6W2F7_9FIRM GTP cyclohydrolase FolE2 OS=Propionispira arboris OX=84035 GN=folE2 PE=3 SV=1
MKDVQSRFDERGIAIQKVGINDVHLPFFIKTKDSSFQSVLAKIKFTVDLPMEYKGTHMSRFLEILSEWSKKPIGSQEMNQILDEALAKLDAQSAYLKINFKYFIDKIAPVSKRQSVLDLDCSFIANKIQGDHIEFTMAVNVPFTSLCPCSKEISKYGAHNQRGLMRVKVKFGNDQQSISIEDLAAIMEQQASCPIYPLLKREDEKYVTETAYENPKFVEDILRDLVIALRQIKGVSWFSIECENYESIHNHSAYASHVEFVEQ

SEQ ID NO: 13018 - protein, 263 aa, Propionispora hippei
  misc_feature (1)..(263): tr|A0A1M6A6G2|A0A1M6A6G2_9FIRM GTP cyclohydrolase FolE2 OS=Propionispora hippei DSM 15287 OX=1123003 GN=folE2 PE=3 SV=1
MKDVQNTVDQRGIAIQKVGVSEVHLPFLIKTKAGALQSVLAKIRLSVKLHQDYRGTHMSRFIEILSEWSQKPVSSREMEAILHDTLGRLGADKAYLEIRFKYFIEKVAPVSRLKSVLDYDCLFSASLEKEQPIDFYMGVAVPFTSLCPCSKEISAYGAHNQRGLMSVKLKQESGKFIWIEDLVALMEAQGSCPVYPLLKREDEKFVTERAYDNPKFVEDVLRDLVLALRGLQGIAWFEVECENYESIHNHSAYASHTETIKRG

SEQ ID NO: 13019 - protein, 266 aa, Propionispora sp.
  misc_feature (1)..(266): tr|A0A0K8J9P7|A0A0K8J9P7_9FIRM GTP cyclohydrolase FolE2 OS=Propionispora sp. 2/2-37 OX=1677858 GN=folE2 PE=3 S V=1
MKDIQKTEDQRGIAIQKVGVSEVHLPFLIKTKSGELQSVLAKIRLTVELPQTFKGTHMSRFIEILSEWSQKPVANREMECILHDTLQRLEADKAYLEIRFKYFLQKTAPVSRLRSMLDYDCLFFANMTRGESIDIAMGVSVPFTSLCPCSKEIAAYGAHNQRGLMTVKLKQSAGRFIWIEDLVALMEAQGSCPLFPLLKREDEKYVTERAYDNPKFVEDVLRDLVLALRSIEDIEWFEVECENYESIHNHNAYASHSETVTSRPEA

SEQ ID NO: 13020 - protein, 263 aa, Propionispora vibrioides
  misc_feature (1)..(263): tr|A0A1H8PA65|A0A1H8PA65_9FIRM GTP cyclohydrolase FolE2 OS=Propionispora vibrioides OX=112903 GN=folE2 PE=3 SV =1
MKDVQNTVDQRGIAIQKVGVSEVHLPFLIKTKAGALQSVLAKIRLSVKLHQDYRGTHMSRFIEILSEWSQKPVSSREMEAILHDTLGRLGADKAYLEIRFKYFIEKVAPVSRLKSVLDYDCLFSASLEKEQPIDFYMGVAVPFTSLCPCSKEISAYGAHNQRGLMSVKLKQENGNFIWIEDLVALMEAQGSCPVYPLLKREDEKFVTERAYDNPKFVEDVLRDLVLALRGLQGIAWFEVECENYESIHNHSAYASHTETIKRG

SEQ ID NO: 13021 - protein, 277 aa, Propionivibrio dicarboxylicus
  misc_feature (1)..(277): tr|A0A1G7ZQN9|A0A1G7ZQN9_9RHOO GTP cyclohydrolase FolE2 OS=Propionivibrio dicarboxylicus OX=83767 GN=folE2 PE= 3 SV=1
MNAAQKAKDNPIADVQNLADTRQIAINRVGIKSIRHPIRVLDRSGGVQHTIAVFNMYVSLPHNFKGTHMSRFVEILNSHEREISVENFPSMLREMVKKLEAETGHIEMNFPYFINKSAPVSGVQSLIDYDVTLIGEICHGDIASTIKVVVPVTSLCPCSKKISERGAHNQRSHVTVTARILDHVWIEEIVQLVEGEASCELYGLLKRPDEKYVTERAYDNPKFVEDMVRDVAARLNAEDRIYSYVIESENFESIHNHSAYALIENTKKAPAHPNIRY

SEQ ID NO: 13022 - protein, 212 aa, Propionivibrio dicarboxylicus
  misc_feature (1)..(212): tr|A0A1G7ZGF9|A0A1G7ZGF9_9RHOO GTP cyclohydrolase 1 OS= Propionivibrio dicarboxylicus OX=83767 GN=folE PE=3 SV= 1
MPDCTDHDTAPTRTSGDEATLGIPRQQAFNAIAFERAVGDLLAACGIAPDAEHMGRTAVRVRELWQKRLLGGYDLDPAQALGDGFEDPRRDMVVVRGIAIHGVCPHHLVPFRGVAHVAYLPGGRLHGFGRIARMVDAIGHRFTYQEWLTRDIADALMRHGKARGAACLIEAEQLCLLLGEDRRGDERVVTQAFAGEFESDPQWRNEFLRACG

SEQ ID NO: 13023 - protein, 265 aa, Prosthecobacter debontii
  misc_feature (1)..(265): tr|A0A1T4X8B9|A0A1T4X8B9_9BACT GTP cyclohydrolase FolE2 OS=Prosthecobacter debontii OX=48467 GN=folE2 PE=3 SV= 1
MPSSLKDTQNERDDRKIAIDRVGVKNLRFPLRIRDRDQSQQHTVATVTMAVDLPHHYKGTHMSRFVEVLHAHGRELTVASIAAMPRELLSRLNARKAHVEMRFPYFRAKRAPVTKAEGLLDYGVVFEVNAEGDEVDYVVTVEVPVATLCPCSKAISERGAHNQRGLVTLSVRFRQPIWIEDLIELVEASASSQLYSVLKRPDEKYVTEAAYDNPVFVEDLVRSVAQKAYGHKQIKWFRVEAENFESIHNHNAWAVIESHNQPALI

SEQ ID NO: 13024 - protein, 263 aa, Prosthecobacter fusiformis
  misc_feature (1)..(263): tr|A0A4R7RZA8|A0A4R7RZA8_9BACT GTP cyclohydrolase FolE2 OS=Prosthecobacter fusiformis OX=48464 GN=folE2 PE=3 S V=1
MPNLKDTQNERDDRKIAIDRVGVKNLRFPLRIRDRDQAQQHTVATVTMAVDLPHHYKGTHMSRFVEILHAHGRELTVASIAAMPKELLSRLNARKAHVEMRFPYFRAKRAPVTKAEGLLDYGVIFAVDAEGDEIDYVVTVEVPVTTLCPCSKAISERGAHNQRGTVTLSVRFRQPVWIEDLIELVEASASSQLYSILKRPDEKFVTEAAYDNPVFVEDLVRSVAQKASAHKKIKWFRVEAENFESIHNHNAWAVIESHNEAES

SEQ ID NO: 13025 - protein, 226 aa, Prosthecochloris aestuarii
  misc_feature (1)..(226): tr|B4S768|B4S768_PROA2 GTP cyclohydrolase 1 OS=Prosthec ochloris aestuarii (strain DSM 271 / SK 413) OX=290512 GN=folE PE=3 SV=1
MKHEKTLSDTLANNRRSSYSGVSMCEDDDCLDAMTDNEPQIIETLSSAVTTILGGLGENPEREGLLKTPERVAKSLRFLTKGYRENPEELLKKAVFKESYDEMVLVKDIELFSMCEHHMLPFFGKAHVAYIPDGKIVGLSKIARVVEVYARRLQVQERLTQQIRDAIQDVLNPKGVGVIIEAKHMCMVMRGVEKQNSVTTTSAMSGEFISSPSTRSEFLRLIHNRS

SEQ ID NO: 13026 - protein, 223 aa, Prosthecochloris marina
  misc_feature (1)..(223): tr|A0A317T581|A0A317T581_9CHLB GTP cyclohydrolase 1 OS= Prosthecochloris marina OX=2017681 GN=folE PE=3 SV=1
MKQEKTPSDTLVNEPPSYSGYSSCADDECFDDIRNIDTEAISGISNAVYSMIEGIGEDPEREGLLKTPERVARAMRFLTKGYRQNPVEMLQKAVFTESYDEMVLVKDIELFSMCEHHMLPFFGKAHVAYIPNGKIVGISKLARVVEVYARRLQVQERLTQQVRDIIQDVLNPRGVGVVIEAKHMCMVMRGVEKQNSTTTTSAMSGEFLSSQSTRSEFLRLINR

SEQ ID NO: 13027 - protein, 231 aa, Prosthecochloris sp.
  misc_feature (1)..(231): tr|A0A1B1Q2X0|A0A1B1Q2X0_9CHLB GTP cyclohydrolase 1 OS= Prosthecochloris sp. CIB 2401 OX=1868325 GN=folE PE=3 S V=1
MKSESMKHAKTPSDILENNNITSYSSFTACADDECFDTMDSTENRIVEQLSGAVTTLLEGLGEDPYREGLVKTPERVAKSLRFLTKGYRQNPEELLRKAVFTESYDEMVLVKDIELFSMCEHHMLPFFGKAHVAYIPDGKIVGLSKIARVVEVYARRLQVQERLTQQIRDAIVDVLNPKGVGVVIEAKHMCMVMRGVEKQNSTTTTSAMSGEFLSSESTRSEFLRLIHNRS

SEQ ID NO: 13028 - protein, 224 aa, Prosthecochloris sp.
  misc_feature (1)..(224): tr|A0A1W6HSU5|A0A1W6HSU5_9CHLB GTP cyclohydrolase 1 OS= Prosthecochloris sp. HL-130-GSB OX=1974213 GN=folE PE=3 SV=1
MKHEKTLSDTLANNPAFSGYSVCADDDCLETEHDTEPEVIDKLSGAVTTILEGLGEDPEREGLLKTPERVAKSLRFLTKGYRQDPEELLRKAVFSESYDEMVLVKDIELFSMCEHHMLPFFGKAHVAYIPDGKIVGLSKLARVVEVYARRLQVQERLTQQIRDAIEQVLKPRGVGVVIEAKHMCMVMRGVEKQNSVTTTSAMSGEFITSESTRSEFLRLIHSRS

SEQ ID NO: 13029 - protein, 226 aa, Prosthecochloris vibrioformis
  misc_feature (1)..(226): tr|A0A5C4RYP7|A0A5C4RYP7_PROVB GTP cyclohydrolase 1 OS= Prosthecochloris vibrioformis OX=1098 GN=folE PE=3 SV=1
MKHAKTPSDILENNNITSYSSFSACADDECFDTMDSTENRIVEQLSGAVTTLLEGLGEDPYREGLVKTPERVAKSLRFLTKGYRQNPEELLRKAVFTESYDEMVLVKDIELFSMCEHHMLPFFGKAHVAYIPDGKIVGLSKIARVVEVYARRLQVQERLTQQIRDAIVDVLNPKGVGVVIEAKHMCMVMRGVEKQNSTTTTSAMSGEFLSSESTRSEFLRLIHNRS

SEQ ID NO: 13030 - protein, 212 aa, Prosthecomicrobium hirschii
  misc_feature (1)..(212): tr|A0A0P6W132|A0A0P6W132_9RHIZ GTP cyclohydrolase 1 OS= Prosthecomicrobium hirschii OX=665126 GN=folE PE=3 SV=1
MDAIVNLYRRDRDERPAPQDAAGRPSREDAEAAVRTLIRWAGDDPEREGLLDTPKRVVKAYEELFSGYRASEAEVLAKVFEEVEGYGDIVLVRDIPFHSHCEHHMVPFVGKAHIAYYPSRGVVGLSKLARVVDVFAKRLQTQETMTAQIANAIDDFLKPRGVAILVEAEHMCMSMRGVQKGGVSTLTTQFTGVFREDPTEQVRFMTLVRGLR

SEQ ID NO: 13031 - protein, 190 aa, Proteiniphilum saccharofermentans
  misc_feature (1)..(190): tr|A0A1R3T7E7|A0A1R3T7E7_9BACT GTP cyclohydrolase 1 OS= Proteiniphilum saccharofermentans OX=1642647 GN=folE PE =3 SV=1
MSSEEIEKNRAVITGHMHDILSLLGEDVAREGLVKTPERVAKAMQNLTKGYWQDPEAILRSALFKENYRQMVIVKDIDLFSLCEHHMLPFFGKAHVAYIPDGYITGLSKIARVVDVFARRLQVQERLTTQIKECIQKTLNPMGVMVVIEAQHMCMQMRGVEKQNSITTTSDFTGVFREQRTREEFIALIK

SEQ ID NO: 13032 - protein, 190 aa, Proteiniphilum sp.
  misc_feature (1)..(190): tr|A0A3M8EFR5|A0A3M8EFR5_9BACT GTP cyclohydrolase 1 OS= Proteiniphilum sp. X52 OX=2382159 GN=folE PE=3 SV=1
MSSEELEKNRLVIADHMRDILSLLGEDGNREGLMRTPERVAKAMQYLTKGYWQDPEAILRSALFRENYRQMVIVKDIDLFSLCEHHMLPFFGKAHVAYIPDGYITGLSKIARVVDVFARRLQVQERLTTQIKECIQKTLNPMGVMVVIEAQHMCMQMRGVEKQNSITTTSDFTGVFREQRTREEFIALIK

SEQ ID NO: 13033 - protein, 203 aa, Proteobacteria bacterium
  misc_feature (1)..(203): tr|A0A1Z9H8T9|A0A1Z9H8T9_9PROT GTP cyclohydrolase 1 OS= Proteobacteria bacterium TMED154 OX=1986844 GN=folE PE= 3 SV=1
  misc_feature (52)..(52): Xaa can be any naturally occurring amino acid
  misc_feature (60)..(60): Xaa can be any naturally occurring amino acid
MTHSGVANEKVKDLSSAAKSIKHKRIENAVEEILDALGLDLSNDSLRETPTXVAKMYLNXIFGGLNEDISSVLKSFENSYGYKGMVIEKNIPFQSHCEHHLLPILGRAAIAYIPEDRVLGLSKLNRILHHFARRPQVQERLTMQVADMLSETLQTDDVAVILEARHLCVEMRGVRDSGAETSTMVLRGRFEKELKEDFFRQLN

SEQ ID NO: 13034 - protein, 204 aa, Proteobacteria bacterium
  misc_feature (1)..(204): tr|A0A1W9I9S8|A0A1W9I9S8_9PROT GTP cyclohydrolase 1 OS= Proteobacteria bacterium HN_bin10 OX=1827386 GN=folE PE =3 SV=1
MSEILKWRSPTEAQAKRPSRDAAMEAVKTLIAWAGDDPEREGLKDTPKRVVDAYREWFGGYDENPADELSRVFEEVGGYDDIVMLKNIDVESHCEHHMAPFLGKAFVAYLPTESVVGISKIARVVEIFAKRLQTQETMTAQIAEAMNDTLKPRGVAVLIDAEHQCMSTRGVHHKDVTTVTTQFTGAFKDDAELRARFLKLAGYG

SEQ ID NO: 13035 - protein, 219 aa, Proteus hauseri
  misc_feature (1)..(219): tr|A0A410XBU5|A0A410XBU5_PROHU GTP cyclohydrolase 1 OS= Proteus hauseri OX=183417 GN=folE PE=3 SV=1
MSSLSKEAQWVHAALVERGLETPLREPNLSSSESKQQIEHHMTEVMKLLNLDLSDDSLAETPRRIAKMYVDEIFSGLNYLNFPKITLIENKMQVDEMVTVRDITLTSTCEHHFVTIDGKAIVAYIPKDKVIGLSKINRIVQFFAQRPQVQERLTQQILIALQTLLGTKNVAVSIDAVHYCVKARGIRDATSATTTTSLGGLFKSSQNTRQEFLRAVRHL

SEQ ID NO: 13036 - protein, 219 aa, Proteus hauseri
  misc_feature (1)..(219): tr|V6MLQ3|V6MLQ3_PROHU GTP cyclohydrolase 1 OS=Proteus hauseri ZMd44 OX=1312367 GN=folE PE=3 SV=1
MSSLSKEAQWVHAALVERGLETPLREPKLSPSESKQQIEHHMTEVMKLLNLDLSDDSLAETPRRIAKMYVDEIFSGLDYHNFPKITLIENKMQVDEMVTVRDITLTSTCEHHFVTIDGKAIVAYIPKDKVIGLSKINRIVQFFAQRPQVQERLTQQILIALQTLLGTKNVAVSIDAVHYCVKARGIRDATSATTTTSLGGLFKSSQNTRQEFLRAVRHL

SEQ ID NO: 13037 - protein, 78 aa, Proteus mirabilis
  misc_feature (1)..(78): tr|A0A379FH62|A0A379FH62_PROMI GTP cyclohydrolase I OS= Proteus mirabilis OX=584 GN=folE_1 PE=4 SV=1
MVTVRDITLTSTCEHHFVTIDGKATVAYIPKDKVIGLSKINRIVQFFAQRPPSARAFNATNIDCLTNAIGDEKRCCLY

SEQ ID NO: 13038 - protein, 220 aa, Proteus mirabilis
  misc_feature (1)..(220): tr|A0A1Z1SX11|A0A1Z1SX11_PROMI GTP cyclohydrolase 1 OS= Proteus mirabilis OX=584 GN=folE PE=3 SV=1
MSSTLSKEAQWVHAALVERGLETPLREPKLSPSESKQQIKHHMTEVMKLLNLDLSDDSLAETPHRIAKMYVDEIFSGLDYHNFPKITLIENKMQVDEMVTVRDITLTSTCEHHFVTIDGKATVAYIPKDKVIGLSKINRIVQFFAQRPQVQERLTQQILIALQTLLGTKNVAVSIDAVHYCVKARGIRDATSATTTTSLGGLFKSSQNTRQEFLRAVRHL

SEQ ID NO: 13039 - protein, 219 aa, Proteus penneri
  misc_feature (1)..(219): tr|A0A379EJQ1|A0A379EJQ1_9GAMM GTP cyclohydrolase 1 OS= Proteus penneri OX=102862 GN=folE PE=3 SV=1
MSSLSKEAQWVHAALVERGLETPLRESKLSPSESKQQIEHHMTEVMKLLNLDLSDDSLAETPRRIAKMYVDEIFSGLDYHNFPKITLIENKMQVDEMVTVRDITLTSTCEHHFVTIDGKAIVAYIPKDKVIGLSKINRIVQFFAQRPQVQERLTQQILIALQTLLGTKNVAVSIDAVHYCVKARGIRDATSATTTTSLGGLFKSSQNTRQEFLRAVRHL

SEQ ID NO: 13040 - protein, 136 aa, Proteus penneri
  misc_feature (1)..(136): tr|C0B1V7|C0B1V7_9GAMM GTP cyclohydrolase 1 OS=Proteus penneri ATCC 35198 OX=471881 GN=PROPEN_04758 PE=3 SV=1
MSSLSKEAQWVHAALVERGLETPLRESKLSPSESKQQIEHHMTEVMKLLNLDLSDDSLAETPRRIAKMYVDEIFSGLDYHNFPKITLIENKMQVDEMVTVRDITLTSTCEHHFVTIDGKAIVAYIPKDKVIGLSKN

SEQ ID NO: 13041 - protein, 219 aa, Proteus sp.
  misc_feature (1)..(219): tr|A0A3D2BJR7|A0A3D2BJR7_9GAMM GTP cyclohydrolase 1 OS= Proteus sp. OX=229037 GN=folE PE=3 SV=1
MSSLSKEAQWVHAALVERGLETPLREPNLSPSESKQQIEHHMTEVMKLLNLDLSDDSLAETPRRIAKMYVDEIFSGLNYLNFPKITLIENKMQVDEMVTVRDITLTSTCEHHFVTIDGKAIVAYIPKDKVIGLSKINRIVQFFAQRPQVQERLTQQILIALQTLLGTKNVAVSIDAVHYCVKARGIRDATSATTTTSLGGLFKSSQNTRQEFLRAVRHL

SEQ ID NO: 13042 - protein, 222 aa, Proteus sp.; identical to SEQ ID NO: 9383
  misc_feature (1)..(222): tr|A0A1F2HGN3|A0A1F2HGN3_9GAMM GTP cyclohydrolase 1 OS= Proteus sp. HMSC10D02 OX=1581079 GN=folE PE=3 SV=1

SEQ ID NO: 13043 - protein, 219 aa, Proteus vulgaris; identical to SEQ ID NO: 13039
  misc_feature (1)..(219): tr|A0A094UBB2|A0A094UBB2_PROVU GTP cyclohydrolase 1 OS= Proteus vulgaris OX=585 GN=folE PE=3 SV=1

SEQ ID NO: 13044 - protein, 219 aa, Proteus vulgaris; identical to SEQ ID NO: 13036
  misc_feature (1)..(219): tr|A0A292CBP4|A0A292CBP4_PROVU GTP cyclohydrolase 1 OS= Proteus vulgaris OX=585 GN=folE PE=3 SV=1

SEQ ID NO: 13045 - protein, 224 aa, Protochlamydia amoebophila
  misc_feature (1)..(224): tr|Q6ME26|Q6ME26_PARUW GTP cyclohydrolase 1 OS=Protochl amydia amoebophila (strain UWE25) OX=264201 GN=folE PE= 3 SV=1
MTKKEFPQKKIPPSITNFPSPIRRHQKRLSDQDKIKLIAEHFKAIMETLELDVEDESLARTPERVAKMYVNEIFSGLDEENFPEISFFKDEIHHEHKANMVFVKVGFTSFCEHHFVPMSGFAYVAYIPTNQLIGLSKIPRLVRYFAKRPQLQERLTAQIADSLALLLNTEHVAVSLTAIHSCVQARGIQDECSHTITNVLRGQFGADGNLRREFFEGINRRVFE

SEQ ID NO: 13046 - protein, 219 aa, Providencia alcalifaciens
  misc_feature (1)..(219): tr|A0A3N2A7U9|A0A3N2A7U9_9GAMM GTP cyclohydrolase 1 OS= Providencia alcalifaciens OX=126385 GN=folE PE=3 SV=1
MSSLSKEAELVHAALEARGLETPLRIQPKSGDERKKLIEGHMTEIMTLLNLDLTDDSLADTPRRIAKMYVDEIFSGLDYANFPKITLIENKMKVDEMVTVRDITLTSTCEHHFVTIDGKATVAYIPKDKVIGLSKINRIVQFFSQRPQVQERLTQQILVALQTLLGTTNVAVCIDAVHYCVKARGIRDATSATTTTSLGGLFKSSQNTRQEFLRAVRHL

SEQ ID NO: 13047 - protein, 219 aa, Providencia alcalifaciens
  misc_feature (1)..(219): tr|A0A4R3NRU4|A0A4R3NRU4_9GAMM GTP cyclohydrolase 1 OS= Providencia alcalifaciens OX=126385 GN=folE PE=3 SV=1
MSSLSKEAELVHAALEARGLETPLRIQPKSGEDRKQLIEGHMTEIMKLLNLDLTDDSLADTPRRIAKMYVDEIFSGLDYANFPKITLIENKMNVDEMVTVRDITLTSTCEHHFVTIDGKAIVAYIPKDKVIGLSKINRIVQFFSQRPQVQERLTQQILVALQTLLGTMNVAVSIDAVHYCVKARGIRDATSATTTTSLGGLFKSSQNTRQEFLRAVRHL

SEQ ID NO: 13048 - protein, 219 aa, Providencia burhodogranariea
  misc_feature (1)..(219): tr|K8WP42|K8WP42_9GAMM GTP cyclohydrolase 1 OS=Providen cia burhodogranariea DSM 19968 OX=1141662 GN=folE PE=3 SV=1
MSSLSKEAELVHAALEARGLETPLRIQPKSGEERKQLIEGHMTEIMKLLNLDLTDDSLADTPKRIAKMYVDEIFSGLNYANFPKITVIENKMNVDEMVTVRDITLTSTCEHHFVTIDGKATVAYIPKDKVIGLSKINRIVQFFSQRPQVQERLTQQILVALQTLLGTNNVAVSIDAVHYCVKARGIRDATSATTTTSLGGLFKSSQNTRQEFLRAVRHQ

SEQ ID NO: 13049 - protein, 219 aa, Providencia heimbachae
  misc_feature (1)..(219): tr|A0A4D7JFC0|A0A4D7JFC0_9GAMM GTP cyclohydrolase 1 OS= Providencia heimbachae OX=333962 GN=folE PE=3 SV=1
MSSLSKEAELVHAALEARGLETPLRIQPKSGEDRKQLIEGHMTEIMKLLNLDLTDDSLADTPRRIAKMYVDEIFSGLDYANFPKITLIENKMKVDEMVTVRDITLTSTCEHHFVTIDGKAIVAYIPKDKVIGLSKINRIVQFFSQRPQVQERLTQQILLALQTLLGTNNVAVSIDAVHYCVKARGIRDATSATTTTSLGGLFKSSQNTRQEFLRAVRHN

SEQ ID NO: 13050 - protein, 219 aa, Providencia heimbachae; identical to SEQ ID NO: 13049
  misc_feature (1)..(219): tr|A0A1B7JZN3|A0A1B7JZN3_9GAMM GTP cyclohydrolase 1 OS= Providencia heimbachae ATCC 35613 OX=1354272 GN=folE PE =3 SV=1

SEQ ID NO: 13051 - protein, 219 aa, Providencia rettgeri
  misc_feature (1)..(219): tr|A0A1J0E4V3|A0A1J0E4V3_PRORE GTP cyclohydrolase 1 OS= Providencia rettgeri OX=587 GN=folE PE=3 SV=1
MPSLSKEAELVHAALEARGLETPLRIQPKSGEERKQLIEGHMTEIMKLLNLDLSDDSLADTPRRIAKMYVDEIFSGLDYTNFPKITLIENKMKVDEMVTVRDITLTSTCEHHFVTIDGKATVAYIPKDKVIGLSKINRIVQFFSQRPQVQERLTQQILVALQTLLGTTNVAVSIDAVHYCVKARGIRDATSATTTTSLGGLFKSSQNTRQEFLRAVRHL

SEQ ID NO: 13052 - protein, 219 aa, Providencia rettgeri; identical to SEQ ID NO: 13046
  misc_feature (1)..(219): tr|A0A264VPK7|A0A264VPK7_PRORE GTP cyclohydrolase 1 OS= Providencia rettgeri OX=587 GN=folE PE=3 SV=1

SEQ ID NO: 13053 - protein, 219 aa, Providencia rustigianii
  misc_feature (1)..(219): tr|D1NXG4|D1NXG4_9GAMM GTP cyclohydrolase 1 OS=Providen cia rustigianii DSM 4541 OX=500637 GN=folE PE=3 SV=1
MSSLSKEAELVHAALEARGLETPLRIQPKSGEDRKQLIEGHMTEIMKLLNLDLSDDSLADTPRRIAKMYVDEIFSGLDYANFPKITVIENKMKVDEMVTVRDITLTSTCEHHFVTIDGKATVAYIPKDTVIGLSKINRIVQFFSQRPQVQERLTQQILVALQTLLGTTNVAVSIDAVHYCVKARGVRDATSATTTTSLGGLFKSSQNTRQEFLRAVRHL

SEQ ID NO: 13054 - protein, 219 aa, Providencia rustigianii; identical to SEQ ID NO: 13053
  misc_feature (1)..(219): tr|A0A379G1R7|A0A379G1R7_9GAMM GTP cyclohydrolase 1 OS= Providencia rustigianii OX=158850 GN=folE PE=3 SV=1

SEQ ID NO: 13055 - protein, 219 aa, Providencia sneebia
  misc_feature (1)..(219): tr|K8WCN9|K8WCN9_9GAMM GTP cyclohydrolase 1 OS=Providen cia sneebia DSM 19967 OX=1141660 GN=folE PE=3 SV=1
MSSLSKEAELVHAALEARGLETPLRIQPKLDNERKQLIEEHMTEVMKLLNLDLTDDSLADTPKRIAKMYVDEIFSGLDYANFPKITLIENKMSVDEMVTVRDITLTSTCEHHFVTIDGKATVAYIPKDKVIGLSKINRIVQFFSQRPQVQERLTQQILVALQTLLGTMNVAVSIDAVHYCVKARGIRDATSATTTTSLGGLFKSSQNTRQEFLRAVRHQ

SEQ ID NO: 13056 - protein, 219 aa, Providencia sp.; identical to SEQ ID NO: 13046
  misc_feature (1)..(219): tr|A0A345LW31|A0A345LW31_9GAMM GTP cyclohydrolase 1 OS= Providencia sp. WCHPHu000369 OX=2027290 GN=folE PE=3 SV =1

SEQ ID NO: 13057 - protein, 219 aa, Providencia sp.
  misc_feature (1)..(219): tr|A0A356D2J5|A0A356D2J5_PROSP GTP cyclohydrolase 1 OS= Providencia sp. OX=589 GN=folE PE=3 SV=1
MSSLSKEAELVHAALEARGLETPLRIQPKLGEERKQLIEGHMAEVMKLLNLDLTDDSLADTPRRIAKMYVDEIFSGLDYANFPKITLIENKMKVDEMVTVRDITLTSTCEHHFVTIDGKAIVAYIPKDKVIGLSKINRIVQFFSQRPQVQERLTQQILVALQTLLGTNNVAVSIDAVHYCVKARGIRDATSATTTTSLGGLFKSSQNTRQEFLRAVRHN

SEQ ID NO: 13058 - protein, 219 aa, Providencia stuartii
  misc_feature (1)..(219): tr|A0A140NQA6|A0A140NQA6_PROSM GTP cyclohydrolase 1 OS= Providencia stuartii (strain MRSN 2154) OX=1157951 GN=f olE PE=3 SV=1
MSSLSKEAELVHAALEARGLETPLRIQPKSGEERKQLIEGHMTEIMKLLNLDLTDDSLADTPKRIAKMYVDEIFSGLDYANFPKITVIENKMKVDEMVTVRDITLTSTCEHHFVTIDGKATVAYIPKDKVIGLSKINRIVQFFSQRPQVQERLTQQILVALQTLLDTNNVAVSIDAVHYCVKARGIRDATSATTTTSLGGLFKSSQNTRQEFLRAVRHL

SEQ ID NO: 13059 - protein, 219 aa, Providencia stuartii; identical to SEQ ID NO: 13058
  misc_feature (1)..(219): tr|A0A379GYK6|A0A379GYK6_PROST GTP cyclohydrolase 1 OS= Providencia stuartii OX=588 GN=folE PE=3 SV=1

SEQ ID NO: 13060 - protein, 210 aa, Unknown
  misc_feature (1)..(210): tr|A0A368EJX4|A0A368EJX4_9PROT GTP cyclohydrolase 1 OS= PS1 clade bacterium OX=2175152 GN=folE PE=3 SV=1
MDVRVDDSKTTNDVVNERDVKVAKPSRETAEEAVRTLIAWAGDNPEREGLIDTPKRVVNAYQEFFAGYEEDPEEVLGRTFEDVEGYDDMVMLRDIDLESHCEHHMVAILGKVHIAYMPVERVVGISKLARVIEIFAKRLQTQETMTAQIVDCIQRVLEPAGVALLVDAKHQCMTTRGIKKPDVATITTRFTGVFANDPRMEARFLAMINN

SEQ ID NO: 13061 - protein, 210 aa, Unknown
  misc_feature (1)..(210): tr|A0A368E1I2|A0A368E1I2_9PROT GTP cyclohydrolase 1 OS= PS1 clade bacterium OX=2175152 GN=folE PE=3 SV=1
MDVRVDDSKNVNDVVNERDVKVAKPSRETAEEAVRTLIAWAGDNPEREGLIDTPKRVVNAYQEFFAGYEEDPEEVLGRTFEDVEGYDDMVMLRDIDLESHCEHHMVAILGKVHIAYMPVERVVGISKLARVIEIYAKRLQTQETMTAQIVDCIQRVLEPAGVALLVDAKHQCMTTRGIKKPDVATITTRFTGVFANDPRMEARFLAMINN

SEQ ID NO: 13062 - protein, 361 aa, Pseudaestuariivita atlantica
  misc_feature (1)..(361): tr|A0A0L1JUZ0|A0A0L1JUZ0_9RHOB GTP cyclohydrolase FolE2 OS=Pseudaestuariivita atlantica OX=1317121 GN=folE2 PE =3 SV=1
MNIHTPGISKSPDRKEAEEALSILRRWAQTATETDLDSLTPDMKALAQVAAPFERVYPDTFAVDTAYKSSLPDLQNGPSSLIRGAKRMIQHVGISNFRLPIRYQTRDNGDVQLETSVTGTVSLEAEKKGINMSRIMRTFYGHAEKTFSFGVIEAALDDYKTDLESFDARIQMRCSFPMKVESLRSGLSGYQYYDIALELIEVEGVRRKVVHLDYVYSSTCPCSLELSEHARATRNQLATPHSQRSVARISVEVTGEECLWFEDLIDLCRNAIPTETQVMVKREDEQAFAELNAANPIFVEDAARLFALSLQGDSRIGDFRVVASHQESLHSHDAVSVLTEGPTFAADSLDPTLFKSLYHVG

SEQ ID NO: 13063 - protein, 209 aa, Pseudaminobacter manganicus
  misc_feature (1)..(209): tr|A0A1V8RRG0|A0A1V8RRG0_9RHIZ GTP cyclohydrolase 1 OS= Pseudaminobacter manganicus OX=1873176 GN=folE PE=3 SV= 1
MDAVVKKFVPQVPHQPGVERPSQAEVEAAVRTLIRWTGDNPEREGLLDTPKRVAKAYREMFGGYDMDPVEDLGRTFEETAGYDGIVIVKDIDFHSHCEHHMVPIIGKAHVGYLPDGKVVGLSKIIRVVEIFARRLQTQETMTAQIASTIQNVLKPRGVAVLIEAEHMCIAMRGIRKQGSTTLTSSFTGAFEDSPEEQARFMAMVRNGGK

SEQ ID NO: 13064 - protein, 211 aa, Pseudaminobacter salicylatoxidans
  misc_feature (1)..(211): tr|A0A316C820|A0A316C820_PSESE GTP cyclohydrolase 1 OS= Pseudaminobacter salicylatoxidans OX=93369 GN=folE PE=3 SV=1
MDAVLKKPMPKSDYLDKPSTNRPDQAEVESAVRTLLRWTGDDPDREGLIDTPKRVAKAFLEMFNGYDMCPAEELGRTFEEVAGYDDLVLVRDIQFHSHCEHHMVPIIGTAHVGYLPEGKVVGLSKIARVVDIFAHRLQTQEAMTAQIANVIQDVLNPRGVAVMIEAEHMCMAMRGIRKQGSTTLTSTFTGVFKDSPEEQLRFLTMVRHGNK

SEQ ID NO: 13065 - protein, 214 aa, Pseudaminobacter sp.
  misc_feature (1)..(214): tr|A0A432VBA8|A0A432VBA8_9RHIZ GTP cyclohydrolase 1 OS= Pseudaminobacter sp. CB3 OX=1851146 GN=folE PE=3 SV=1
MDAVIKKLMPKADYMEKPATDRPSQAEVEAAVRTLLRWTGDNPDREGLVDTPKRVAKAFREMFSGYDMCPSEELGRTFEEVAGYDDLVLIKDINFHSHCEHHMVPIIGKAHVGYLPDGKVVGLSKIARVVDIFAHRLQTQEAMTAQIANVIQDVLNPRGVAVMIEAEHMCMAMRGIRKQGSTTLTSTFTGAFKDSPEEQIRFLTMVRSGSAHGF

SEQ ID NO: 13066 - protein, 255 aa, Pseudanabaena biceps
  misc_feature (1)..(255): tr|L8MX05|L8MX05_9CYAN GTP cyclohydrolase I OS=Pseudana baena biceps PCC 7429 OX=927668 GN=Pse7429DRAFT_2230 PE =4 SV=1
MTISISRPVSNTSENDSKTAKVRESLSTRKAISQIIRERVIAAGDPFFANDSIAHHISDTEREELKKEIEGKLQGVFDSLIIDTANDHNTKETARRVAKMYVDEVFKGRYHPMPKVTDFPNAKELDEIYTLGPITVRSACSHHFVPIVGQAWIGIVPSDRVIGISKFNRIVDWVMSRPHIQEEAAIMVADTIENLIKPKGLAFVIKAQHMCMTWRGVKEPETKMVNSIVRGSFRHDPHMKKEFFDLIRAHGFGDS

SEQ ID NO: 13067 - protein, 286 aa, Pseudanabaena sp.
  misc_feature (1)..(286): tr|K9SPB4|K9SPB4_9CYAN GTP cyclohydrolase I OS=Pseudana baena sp. PCC 7367 OX=82654 GN=Pse7367_3566 PE=4 SV=1
MSQVRVPEAFQNENKYKYCITLIIKSKNLKMTTSYRQSKFINPDQDPNRDLTSFTAKENGSVGKPISKVIRERLKSLGVKYFANDSIAEYISDGEREELKLEIEDKLQGLFDALVIDTDNDHNTHETAFRMAKMYVDEVFKGRYHPMPKVTDFPNAKALDEIYVLGPISVRSACSHHFVPIIGHAWLGIVPSDRVIGISKFNRIVDWVLSRPHIQEEAAVMVADTIERLIQPRGLAFVIKAQHMCMSWRGVKEPETQMTNSIVRGTFREDPTAKKEFFDLIRGHGF

SEQ ID NO: 13068 - protein, 233 aa, Pseudarcicella hirudinis
  misc_feature (1)..(233): tr|A0A1I5N2A0|A0A1I5N2A0_9BACT GTP cyclohydrolase 1 OS= Pseudarcicella hirudinis OX=1079859 GN=folE PE=3 SV=1
MKPNEILLNTLLVDKDKIMFSDEEIGDEHIGTSVDTPLREDAFQLSDEEKIAKIELHFKEIMETLGLDLRDDSLKGTPKRVAKMYVQEIFSGLDPKNKPAIALFDNKYKYDEMLVEKNITFYSNCEHHFVPIIGKAHVAYISSGKVIGLSKLNRIVQYFAKRPQVQERLTMQIARELQEVLQTENIAVLIDAKHLCVSSRGIKDDTSTTVTSYYGGKFQEDATRQEFLKYLNL

SEQ ID NO: 13069 - protein, 234 aa, Pseudarcicella sp.
  misc_feature (1)..(234): tr|A0A2S2DVS9|A0A2S2DVS9_9BACT GTP cyclohydrolase 1 OS= Pseudarcicella sp. HME7025 OX=2183547 GN=gch1 PE=3 SV=1
MKQKEILLNSLLIDTENFHFTDDEIGDNHIATSIETPMRSDAFDLSDADKIKKIEGHFKEIMLTLGLDLTDDSLKGTPKRVAKMYVEEIFSGLNPKNEPQVALFENKFGYNEMLIEKNISFYSNCEHHFVPIVGKTHIAYISSGKVIGLSKLNRIVQYYAKRPQVQERLTMQIAKHLQKVLETEHVAIYIDAKHLCVSSRGVKDDATSTITSFYGGKFQEEATKKEFLGSIQSI

SEQ ID NO: 13070 - protein, 214 aa, Pseudarthrobacter chlorophenolicus
  misc_feature (1)..(214): tr|B8H9T1|B8H9T1_PSECP GTP cyclohydrolase 1 OS=Pseudart hrobacter chlorophenolicus (strain ATCC 700700 / DSM 12 829 / CIP 107037 / JCM 12360 / KCTC 9906 / NCIMB 13794 / A6) OX=452863 GN=folE PE=3 SV=1
MTSFDDDAVSASAAYPAEDGSAHAPHHKVDRPRIEAAVREILLAIGEDPDRGGLIDTPKRVAKAYAEVFAGLHQDPADVLSTTFELDHEELVLVKDIPFYSTCEHHLVPFHGVAHVGYIPSHDGRVTGLSKLARLVDIYARRPQVQERLTTEIVEALVRHLKPRGAIVVVECEHMCMSMRGIRKPGAKTVTSAVRGQLHDPATRAEAMSLILGR

SEQ ID NO: 13071 - protein, 214 aa, Pseudarthrobacter equi
  misc_feature (1)..(214): tr|A0A1H1U4S6|A0A1H1U4S6_9MICC GTP cyclohydrolase 1 OS= Pseudarthrobacter equi OX=728066 GN=folE PE=3 SV=1
MTSFDDDAVSASAAYPAEDGSTHSPHHKVDRPRIEAAVREILLAIGEDPDRGGLIDTPKRVAKAYAEVFAGLHHDPADVLSTTFELDHEELVLVKDIPFYSTCEHHLVPFHGVAHVGYIPSHDGKVTGLSKLARLVDIYARRPQVQERLTTEIVEALVLHLKPRGAIVVVECEHMCMSMRGIRKPGAKTVTSAVRGQLHDPATRAEAMSLILGR

SEQ ID NO: 13072 - protein, 214 aa, Pseudarthrobacter phenanthrenivorans
  misc_feature (1)..(214): tr|F0M7V5|F0M7V5_PSEPM GTP cyclohydrolase 1 OS=Pseudart hrobacter phenanthrenivorans (strain DSM 18606 / JCM 16 027 / LMG 23796 / Sphe3) OX=930171 GN=folE PE=3 SV=1
MTHFDDDDVPASAGYPAEGGADHSKHQKVDRPRIEAAVREILLAIGEDPDRGGLVDTPKRVAKAYAEVFAGLHHDPADVLSTTFDLDHEELVLVKDIPFYSTCEHHLVPFHGVAHVGYIPSHDGKVTGLSKLARLVDIYARRPQVQERLTTEIVEAMVRYLKPRGAIVVVECEHMCMSMRGIRKPGAKTVTSAVRGQLHDPATRAEAMSLILGR

SEQ ID NO: 13073 - protein, 214 aa, Pseudarthrobacter phenanthrenivorans
  misc_feature (1)..(214): tr|A0A0B4DJ85|A0A0B4DJ85_9MICC GTP cyclohydrolase 1 OS= Pseudarthrobacter phenanthrenivorans OX=361575 GN=folE PE=3 SV=1
MTSFDDDDVPASAGHLAEAGAHPSKTEKVDKPRIEAAVREILLAIGEDPDRGGLLDTPKRVAKAYAEMFAGLHHDPADVLSTTFDLDHEELVLVKDIPFYSTCEHHLVPFHGVAHVGYIPSHDGKVTGLSKLARLVDIYARRPQVQERLTTEIVEALVSHLKPRGAIVVVECEHMCMSMRGIRKPGAKTVTSAVRGQLHDPATRAEAMSLILGR

SEQ ID NO: 13074 - protein, 186 aa, Pseudarthrobacter siccitolerans
  misc_feature (1)..(186): tr|A0A024H858|A0A024H858_9MICC GTP cyclohydrolase 1 OS= Pseudarthrobacter siccitolerans OX=861266 GN=folE PE=3 SV=1
MDRPRIEAAVREILLAIGEDPDRGGLVDTPKRVAKAYAEVFAGLHHDPADVLSTTFDLDHEELVLVKDIPFYSTCEHHLVPFHGVAHVGYIPSHEGKVTGLSKLARLVDIYARRPQVQERLTTEIVEAMVRHLKPRGAIVVVECEHMCMSMRGIRKPGAKTVTSAVRGQLHDPATRAEAMSLILGR

SEQ ID NO: 13075 - protein, 214 aa, Pseudarthrobacter sp.
  misc_feature (1)..(214): tr|A0A365D734|A0A365D734_9MICC GTP cyclohydrolase 1 OS= Pseudarthrobacter sp. AG30 OX=2249742 GN=folE PE=3 SV=1
MTSFDDDDVSASADHLAAGGHRSSKHERVDRPRIEAAVREILLAIGEDPDRGGLVDTPKRVAKAYAEVFAGLHHDPAEVLSTTFDLDHEELVLVKDIPFYSTCEHHLVPFHGVAHVGYIPSHDGKVTGLSKLARLVDIYARRPQVQERLTTEIVEAMVRYLKPRGAIVVVECEHMCMSMRGIRKPGAKTVTSAVRGQLHDPATRAEAMSLILGR

SEQ ID NO: 13076 - protein, 214 aa, Pseudarthrobacter sp.
  misc_feature (1)..(214): tr|A0A3P5WEN9|A0A3P5WEN9_9MICC GTP cyclohydrolase 1 OS= Pseudarthrobacter sp. T11b OX=2483813 GN=folE PE=3 SV=1
MTSFDDDDAYPLSAFPADGGPAGQPGNKVDRPRIEAAVREILLAIGEDPDRGGLLDTPKRVAKAYAEVFAGLHQDPADVLSTTFDLDHEELVLVKDIPFYSTCEHHLVPFHGVAHVGYIPSHEGKVTGLSKLARLVDIYARRPQVQERLTTEIVEALVRHLKPRGAIVVVECEHMCMSMRGVRKPGAKTVTSAVRGQLHDPATRAEAMSLILGR

SEQ ID NO: 13077 - protein, 200 aa, Pseudarthrobacter sulfonivorans
  misc_feature (1)..(200): tr|A0A0U3GQ79|A0A0U3GQ79_9MICC GTP cyclohydrolase 1 OS= Pseudarthrobacter sulfonivorans OX=121292 GN=folE PE=3 SV=1
MSSVLTTEATVTQGVDGPRVERAVREYLLAIGEDPERPGLVDTPARVARAAAEMFGGLHEDPLAVLDRTFDLGHGEMVIVKDIPFYSTCEHHLVPFHGVAHVGYIPSAEGLVTGLSKLARLVDVFARRPQVQERLTTQVVDALVTSLRPLGAIVVIECEHLCMSMRGVRKPGAKTITSAVRGELRLPAARAEALSLIHGR

SEQ ID NO: 13078 - protein, 213 aa, Pseudarthrobacter sulfonivorans
  misc_feature (1)..(213): tr|A0A0U3QNT2|A0A0U3QNT2_9MICC GTP cyclohydrolase 1 OS= Pseudarthrobacter sulfonivorans OX=121292 GN=folE PE=3 SV=1
MTHFDDDAPASAGHPAEDGSHHKKHEKVDRPRIEAAVREILLAIGEDPDRGGLLDTPRRVAKAYAEVFSGLHLDPADVLSTKFDLDHEELVLVKDIPFYSTCEHHLVPFHGVAHVGYIPSHDGKVTGLSKLARLVDIYARRPQVQERLTTQIVEAMVSHLKPRGAIVVVECEHMCMSMRGVRKPGAKTVTSAVRGQLHDPATRAEAMSLILGR

SEQ ID NO: 13079 - protein, 221 aa, Pseudescherichia vulneris
  misc_feature (1)..(221): tr|A0A090UXZ9|A0A090UXZ9_PSEVU GTP cyclohydrolase 1 OS= Pseudescherichia vulneris NBRC 102420 OX=1115515 GN=fol E PE=3 SV=1
MPSLSKEAALVHEALVAHGLETPLRPPVDLDNETRKRLIAGHMTEIMQLLNLDLSDDSLMETPHRIAKMYVDEIFSGLDYANFPKITVIENKMKVDEMVTVRDITLTSTCEHHFVTIDGKATVAYIPKDAVIGLSKINRIVQFFAQRPQVQERLTQQILIALQTLLGTNNVAVSIDAVHYCVKARGIRDATSATTTTSLGGLFKSSQNTRQEFLRAVRHHN

SEQ ID NO: 13080 - protein, 304 aa, Pseudidiomarina sp.
  misc_feature (1)..(304): tr|A0A443Z856|A0A443Z856_9GAMM GTP cyclohydrolase FolE2 OS=Pseudidiomarina sp. R04H25 OX=2487740 GN=folE2 PE=3 SV=1
MPDIANQTRAQTEGTLDWVGMSNIEMPLVVGAAQEPERPVSAHVDAFVNLTDPKAKGIHMSRLYLLLEDLSNNDVLSHHSLSKLLHDFIDSHDGLADQAYVKFSFDYHLRRKSLISKKQGWKAYPVTVTGRYDNGKLNLELGVEVPYSSTCPCSAALARQLIQEAFANQFGTDSEVDAEMVHRWLGTTQGIVATPHSQRSIAQVNVIMGEGVSELPIIGLIDTIEDALKTPVQAAVKREDEQEFARLNGQNLMFCEDAARRLQHALNVQKQFSDFWIRVNHYESLHAHDAVSITTKGVPGGFKA

SEQ ID NO: 13081 - protein, 184 aa, Pseudoalteromonadaceae bacterium
  misc_feature (1)..(184): tr|A0A2E9SWZ1|A0A2E9SWZ1_9GAMM GTP cyclohydrolase 1 OS= Pseudoalteromonadaceae bacterium OX=2026783 GN=folE PE= 3 SV=1
MHDDLKKSYHEIISAVGEDPQREGLLDTPKRAAKAMEYLTKGYRQTLDEITNNAVFTSDADDMVLVQDIELYSMCEHHLLPFVGRCHIAYIPNGKVLGLSKFARIVDMYARRFQIQEQLTHQIAKAVEEVTGAKGVGVIVEAKHMCMMMRGVEKQNSSMRTSVMLGNFRADPKTRNEFLQLVRG

SEQ ID NO: 13082 - protein, 306 aa, Pseudoalteromonadaceae bacterium
  misc_feature (1)..(306): tr|A0A2D7MXJ4|A0A2D7MXJ4_9GAMM GTP cyclohydrolase FolE2 OS=Pseudoalteromonadaceae bacterium OX=2026783 GN=folE 2 PE=3 SV=1
MQTNMPDIADTAPALQTGKLDWVGMGEIELPFIFESKDLAPVTVNAKARAFVNLHKEDAKGIHMSRLFLALDLLSTEQQVNPQTLAQALDTFITSHEGLSDKAQIEFKFELPLRRKSLLSGKAGWKSYPITLTSTIENSVISYELSVDVTYSSTCPCSAALARQLIQNAFSEKFNQETLNQKDVLAWLGTTQGIVATPHSQRSIANVKVKLDNTISEFDVVNLIDTLEAELKTPVQAAVKREDEQEFARLNGQNLMFCEDAARKIKAVLENDNFSDYWLQINHYESLHAHDAVAIAVKGIEGGYKA

SEQ ID NO: 13083 - protein, 184 aa, Pseudoalteromonas agarivorans
  misc_feature (1)..(184): tr|A0A290RN01|A0A290RN01_9GAMM GTP cyclohydrolase 1 OS= Pseudoalteromonas agarivorans DSM 14585 OX=1312369 GN=f olE PE=3 SV=1
MHDDLKQSYQNIITAVGEDAGREGLLDTPKRAAKAMEYLTKGYRQTLDEITNNAVFSSDADDMVLVQDIELYSMCEHHLLPFIGRCHIAYIPDGKVLGLSKFARIVDMFARRFQIQEQLTHQIAKAVEEVTGAKGVGVIVEAKHMCMMMRGVEKQNSSMRTSVMLGNFRSDSKTRNEFLQLIKG

SEQ ID NO: 13084 - protein, 184 aa, Pseudoalteromonas agarivorans; identical to SEQ ID NO: 13083
  misc_feature (1)..(184): tr|N6W2J7|N6W2J7_9GAMM GTP cyclohydrolase 1 OS=Pseudoal teromonas agarivorans S816 OX=1307437 GN=folE PE=3 SV=1

SEQ ID NO: 13085 - protein, 184 aa, Pseudoalteromonas aliena
  misc_feature (1)..(184): tr|A0A1Q2GXW1|A0A1Q2GXW1_9GAMM GTP cyclohydrolase 1 OS= Pseudoalteromonas aliena OX=247523 GN=folE PE=3 SV=1
MHNELKESYQKIITAVGEDVNREGLLDTPKRAAKAMEYLTQGYRQTLDEITNKAVFTSDADDMVLVQDIELYSMCEHHLLPFIGRCHIAYIPNGKVLGLSKFARIVDMFSRRFQIQEQLTHQIAKAVEEVTGAKGVGVIVEAKHMCMMMRGVEKQNSSMRTSVMLGNFRSDPKTRNEFLQLIKG

SEQ ID NO: 13086 - protein, 306 aa, Pseudoalteromonas aliena
  misc_feature (1)..(306): tr|A0A1Q2GYX9|A0A1Q2GYX9_9GAMM GTP cyclohydrolase FolE2 OS=Pseudoalteromonas aliena OX=247523 GN=folE2 PE=3 SV =1
MQTNMPDIADTAPALQTGKLDWVGMAEIELPFIFESRDLAPVTVNAKARAFVNLHKEDAKGIHMSRLYLALDVLSTEQQVNPQTLANTLNTFISSHENLSDKAQIEFKFELPLRRKSLLSGKVGWKSYPVTLISTIEHNIISYELTVDVTYSSTCPCSAALARQLIQNAFNEKFDQDTLSQKDVHEWLGTTQGIVATPHSQRSIANVKVKLNNDINEFDVVNLINTLENELKTPVQAAVKREDEQEFARLNGQNLMFCEDAARKIKASLEASNYADYWLQINHYESLHAHDAVAIAVKGIENGYKA

SEQ ID NO: 13087 - protein, 184 aa, Pseudoalteromonas amylolytica
  misc_feature (1)..(184): tr|A0A1S1MZ90|A0A1S1MZ90_9GAMM GTP cyclohydrolase 1 OS= Pseudoalteromonas amylolytica OX=1859457 GN=folE PE=3 S V=1
MHDNLKDSYKQIIEAVGEDSNREGLLETPKRAAKAMEYLTKGYRETLEDITNNAVFTSDADDMVLIQDIELYSMCEHHLLPFVGRCHIAYIPDGKVLGLSKFARIVDMFSRRFQIQEQLTHQIAKAVEQVTQAKGVGVIVEAKHMCMMMRGVEKQNSQMRTSVMLGNFREDPKTRNEFMQLVKN

SEQ ID NO: 13088 - protein, 306 aa, Pseudoalteromonas amylolytica
  misc_feature (1)..(306): tr|A0A1S1MTV0|A0A1S1MTV0_9GAMM GTP cyclohydrolase FolE2 OS=Pseudoalteromonas amylolytica OX=1859457 GN=folE2 P E=3 SV=1
MQTIMPDIADTAEALQTGTLNWVGMGNIELPLLFASKGLNDITVTAKADAFVNLQNEQAKGIHMSRLFLALDTLSCEQTLTPQTLKQVLDSFVSSHQGLSNAAKVVLTFELPLRRSSLLSQKQGWKSYPVTVTGTVQGGQFQLEVALDVTYSSTCPCSAALARQLIQQAFSEQFSKQSLSFDQVHQWLGSTEGIVATPHSQRSIANIKVKLASDSQEFDILALINSVEHELKTPVQAAVKREDEQEFARLNGQNLMFCEDAARKLKALFEASHYLDYYIKINHYESLHAHDAVAYAVKGLSHGYQV

SEQ ID NO: 13089 - protein, 184 aa, Pseudoalteromonas arctica
  misc_feature (1)..(184): tr|A0A290S7Z0|A0A290S7Z0_9GAMM GTP cyclohydrolase 1 OS= Pseudoalteromonas arctica A 37-1-2 OX=1117313 GN=folE P E=3 SV=1
MHNELKESYEKIITAVGEDANREGLLDTPKRAAKAMEYLTQGYRQTLDEITNKAVFTSDADDMVLVQDIELYSMCEHHLLPFIGRCHIAYIPNGKVLGLSKFARIVDMFSRRFQIQEQLTHQIAKAVEEVTGAKGVGVIVEAKHMCMMMRGVEKQNSSMRTSVMLGNFRSDPKTRNEFLQLIKG

SEQ ID NO: 13090 - protein, 306 aa, Pseudoalteromonas arctica
  misc_feature (1)..(306): tr|A0A290S817|A0A290S817_9GAMM GTP cyclohydrolase FolE2 OS=Pseudoalteromonas arctica A 37-1-2 OX=1117313 GN=fo lE PE=3 SV=1
MQTNMPDIADTAPALQTGKLDWVGMGEIELPFIFESRDLSPVTVNAKACAFVNLHKEDAKGIHMSRLFLALDLLSTEQQVNPQTIAQALDTFITSHEGLSNKAQIEFKFELPLRRKSLLSGKAGWKSYPVVLTSTIENNIISYELTVDVTYSSTCPCSAALARQLIQNAFNEKFNQETLSQKDVHEWLGTTQGIVATPHSQRSIANVKVKLDSNIQEFDVVTLINTLEAELKTPVQAAVKREDEQEFARLNGQNLMFCEDAARKIKALLETDNYSDYWLQINHYESLHAHDAVAIAVKGIEGGYKA

SEQ ID NO: 13091 - protein, 184 aa, Pseudoalteromonas atlantica
  misc_feature (1)..(184): sp|Q15YG1|GCH1_PSEA6 GTP cyclohydrolase 1 OS=Pseudoalte romonas atlantica (strain T6c / ATCC BAA-1087) OX=34261 0 GN=folE PE=3 SV=1
MSDDLTQHYSQILSILGEDTQRGGLVDTPKRAAKAMQFLTDGYEKNLNDVVNGAIFEADTDEMVVIQNIEYYSLCEHHILPFIGQCHIAYLPQGKVLGLSKFARIVDMYARRLQIQEGLTKQIADAIQEVTGAAGVGVIMEGKHMCMMMRGVQKQNSSMVTSVMLGAMRKSDATRNEFLRLIGK

SEQ ID NO: 13092 - protein, 306 aa, Pseudoalteromonas atlantica; identical to SEQ ID NO: 13082
  misc_feature (1)..(306): tr|A0A510ZMI6|A0A510ZMI6_PSEAF GTP cyclohydrolase FolE2 OS=Pseudoalteromonas atlantica OX=288 GN=folE2 PE=3 SV =1

SEQ ID NO: 13093 - protein, 306 aa, Pseudoalteromonas byunsanensis
  misc_feature (1)..(306): tr|A0A1S1N309|A0A1S1N309_9GAMM GTP cyclohydrolase FolE2 OS=Pseudoalteromonas byunsanensis OX=327939 GN=folE2 P E=3 SV=1
MQTIMPDIADTAEALQTGTLNWVGMGDIELPLLFASKGLNDITVTAKADAFVNLQNEQAKGIHMSRLFLALDTLSCEQTLTPKTLKQVLDSFVSSHQGLSNAAKVVLTFELPLRRTSLLSQKQGWKSYPVTITGTLQDDQFQLELAVDVTYSSTCPCSAALARQLIQQAFSEQFSQHSLTFDEVHQWLGSTEGIVATPHSQRSIANIKVKLAPDSQEFDILAVINSVEHELKTPVQAAVKREDEQEFARLNGQNLMFCEDAARKLKALFEASHYLDYYIKINHYESLHAHDAVAYAVKGLPHGYQV

SEQ ID NO: 13094 - protein, 184 aa, Pseudoalteromonas byunsanensis
  misc_feature (1)..(184): tr|A0A1S1NEF7|A0A1S1NEF7_9GAMM GTP cyclohydrolase 1 OS= Pseudoalteromonas byunsanensis OX=327939 GN=folE PE=3 S V=1
MHDNLKDSYKQIIEAVGEDSNREGLLETPKRAAKAMEYLTKGYRETLEDITNNAVFTSDADDMVLIQDIELYSMCEHHLLPFVGRCHIAYIPNGKVLGLSKFARIVDMFARRFQIQEQLTHQIAKAVEQVTQAKGVGVIVEAKHMCMMMRGVEKQNSQMRTSVMLGNFREDPKTRNEFMQLVKN

SEQ ID NO: 13095 - protein, 306 aa, Pseudoalteromonas carrageenovora
  misc_feature (1)..(306): tr|A0A2K4XC85|A0A2K4XC85_PSEVC GTP cyclohydrolase FolE2 OS=Pseudoalteromonas carrageenovora IAM 12662 OX=13148 68 GN=folE PE=3 SV=1
MQTNMPDIADTAPALQTGKLDWVGMGEIELPFIFESKDLAPVTVNAKARAFVNLHKEDAKGIHMSRLFLALDLLSTEQQVNPQTIAQALDTFITSHEGLSDKAQIEFKFELPLRRKSLLSGKAGWKSYPITLTSTIENNVISYELTVDVTYSSTCPCSAALARQLIQNAFNEKFNQETLSQKDVHEWLGTTQGIVATPHSQRSIANVKVKLDSSCDEFDVVNLINTLEAELKTPVQAAVKREDEQEFARLNGQNLMFCEDAARKIKAVLENDNFSDYWLQINHYESLHAHDAVAIAVKGVSGGYKA

SEQ ID NO: 13096 - protein, 184 aa, Pseudoalteromonas carrageenovora
  misc_feature (1)..(184): tr|A0A2K4XDN7|A0A2K4XDN7_PSEVC GTP cyclohydrolase 1 OS= Pseudoalteromonas carrageenovora IAM 12662 OX=1314868 G N=folE PE=3 SV=1
MHDELKQSYQNIITAVGEDANREGLLDTPKRAAKAMEYLTKGYRQTLDEITNNAVFTSDADDMVLVQDIELYSMCEHHLLPFIGRCHIAYIPDGKVLGLSKFARIVDMFARRFQIQEQLTHQIAKAVEEVTGAKGVGVIVEAKHMCMMMRGVEKQNSSMRTSVMLGNFRSDSKTRNEFLQLIKG

SEQ ID NO: 13097 - protein, 306 aa, Pseudoalteromonas citrea
  misc_feature (1)..(306): tr|U1JK53|U1JK53_9GAMM GTP cyclohydrolase FolE2 OS=Pseu doalteromonas citrea DSM 8771 OX=1117314 GN=folE2 PE=3 SV=1
MQTTMPDIAHSADALQTGKLDWVGMGNIELPLLFASKGLSDTHVTAKADAFVNLQKEDAKGIHMSRLFLALDTLSCEQSLTPKTLTQVLDSFISSHQELSNAAKVSITFELPLRRPSLLSKKQGWKSYPITITAILEDGVALIELGVDVTYSSTCPCSAALARQLIQNAFAEKFQQATVDKEQVHAWLGTTEGILATPHSQRSIANIKVLLPADCEEFDILALINQVEDELKTPVQAAVKREDEQEFARLNGQNLMFCEDAARKLKALFEKTSYQDFYIKINHYESLHAHDAVAYAVKGIASGYKA

SEQ ID NO: 13098 - protein, 184 aa, Pseudoalteromonas citrea
  misc_feature (1)..(184): tr|U1KLU4|U1KLU4_9GAMM GTP cyclohydrolase 1 OS=Pseudoal teromonas citrea DSM 8771 OX=1117314 GN=folE PE=3 SV=1
MHEELKNSYHQIIEAVGEDSNREGLLDTPKRAAKAMEYLTKGYRETLDEITNNAVFTSDADDMVLIQDIELYSMCEHHLLPFVGRCHIAYIPNGKVLGLSKFARIVDMYARRFQIQEQLTHQIAKAVEEVTGAKGVGVIVEAKHMCMMMRGVEKQNSKMRTSVMLGNFREDPKTRNEFLQLVKN

SEQ ID NO: 13099 - protein, 184 aa, Pseudoalteromonas denitrificans
  misc_feature (1)..(184): tr|A0A1I1MGJ6|A0A1I1MGJ6_9GAMM GTP cyclohydrolase 1 OS= Pseudoalteromonas denitrificans DSM 6059 OX=1123010 GN= folE PE=3 SV=1
MHEELENSYQQIIKSVGEDPAREGLLDTPKRAAKAMSYLTQGYNQTLEGITNNAVFTSDADDMVMIQDIELYSMCEHHLLPFVGRCHIAYIPNGKVLGLSKFARIVDMFARRFQIQEQMTHQIAKAVEEVTGAKGVGVIVEAQHMCMMMRGVEKQNSKMRTSVMLGNFREDAKTRNEFLQLLKS

SEQ ID NO: 13100 - protein, 303 aa, Pseudoalteromonas denitrificans
  misc_feature (1)..(303): tr|A0A1I1STY2|A0A1I1STY2_9GAMM GTP cyclohydrolase FolE2 OS=Pseudoalteromonas denitrificans DSM 6059 OX=1123010 GN=folE2 PE=3 SV=1
MNKNLPDITSGLNAFTELPLRWVGMEAIAIPLQIPISENQTITTNAKADVFVSLDKQDAKGIHMSRLYLKLKHTLTAHSLNGQVLSQLLNDLITSQQGLSESAKINLQFDLTLYKKALLSDEFGYQSYPITLTREYTYGKTITELSLTIPYSSTCPCSAALSRQALSDVIEQRFNDGYINKQELMHWISSEQSSVATPHSQRSYAYLKLKLNNKNLPNLPSLITEFEQVIGTPVQTAVKRADEQAFAKLNAENLMFCEDAARRLKQSLETNNNFIGYWFKVEHQESLHAHNAVVIDYNEQPYE

SEQ ID NO: 13101 - protein, 184 aa, Pseudoalteromonas distincta; identical to SEQ ID NO: 13089
  misc_feature (1)..(184): tr|F3BNS6|F3BNS6_9GAMM GTP cyclohydrolase 1 OS=Pseudoal teromonas distincta OX=77608 GN=folE PE=3 SV=1

SEQ ID NO: 13102 - protein, 306 aa, Pseudoalteromonas distincta
  misc_feature (1)..(306): tr|F3BP49|F3BP49_9GAMM GTP cyclohydrolase FolE2 OS=Pseu doalteromonas distincta OX=77608 GN=folE2 PE=3 SV=1
MQTNMPDIADTAPALQTGKLDWVGMGEIELPFIFESRDLSPVTVNAKARAFVNLHKEDAKGIHMSRLFLALDLLSTEQQVNPQTIAQALDTFITSHEGLSDKAQIEFKFELPLRRKSLLSGKAGWKSYPVVLTSTIENNVISYELTVDVTYSSTCPCSAALARQLIQNAFNEKFNQETLSQKDVHEWLGTTQGIVATPHSQRSIANVKVKLDSNIQEFDVVTLINTLEAELKTPVQAAVKREDEQEFARLNGQNLMFCEDAARKIKALLEANNYSDYWLQINHYESLHAHDAVAIAVKGIKGGYKA

SEQ ID NO: 13103 - protein, 184 aa, Pseudoalteromonas elyakovii; identical to SEQ ID NO: 13089
  misc_feature (1)..(184): tr|A0A558HTX0|A0A558HTX0_9GAMM GTP cyclohydrolase 1 OS= Pseudoalteromonas elyakovii OX=81037 GN=folE PE=3 SV=1

SEQ ID NO: 13104 - protein, 306 aa, Pseudoalteromonas elyakovii
  misc_feature (1)..(306): tr|A0A558I0B2|A0A558I0B2_9GAMM GTP cyclohydrolase FolE2 OS=Pseudoalteromonas elyakovii OX=81037 GN=folE2 PE=3 SV=1
MQTNMPDIADTAPALQTGKLDWVGMGEIELPFIFESRDLSPVTVNAKARAFVNLHKEDAKGIHMSRLFLALDLLSTEQQVNPQTIAQALDTFITSHEGLSNKAQIEFKFELPLRRKSLLSGKAGWKSYPVVLTSTIENNVISYELTVDVTYSSTCPCSAALARQLIQNAFNEKFNQETLSQKDVHEWLGTTQGIVATPHSQRSIANVKVKLDSNIQEFDVVTLINTLEAELKTPVQAAVKREDEQEFARLNGQNLMFCEDAARKIKALLEANHYSDYWLQINHYESLHAHDAVAIAVKGIKGGYKA

SEQ ID NO: 13105 - protein, 306 aa, Pseudoalteromonas espejiana
  misc_feature (1)..(306): tr|A0A510Y299|A0A510Y299_9GAMM GTP cyclohydrolase FolE2 OS=Pseudoalteromonas espejiana OX=28107 GN=folE2 PE=3 SV=1
MQTNMPDIADTAPALQTGKLDWVGMGEIELPFIFESKDLAPVNVNAKARAFVNLHKEDAKGIHMSRLFLALDLLSTEQQVNPQTLAQALDTFITSHKGLSDKAQIEFKFELPLRRKSLLSGKAGWKSYPITLTSTIENNVISYELCVDVTYSSTCPCSAALARQLIQNAFSEKFSQETLNQKDVLEWLGTTQGIVATPHSQRSIANVKVKLDSNTQEFDVVNLINTLEAELKTPVQAAVKREDEQEFARLNGQNLMFCEDAARKIKAVLERDNFSDYWLQINHYESLHAHDAVAIAVKGIEGGYKA

SEQ ID NO: 13106 - protein, 184 aa, Pseudoalteromonas espejiana; identical to SEQ ID NO: 13096
  misc_feature (1)..(184): tr|A0A510XXV4|A0A510XXV4_9GAMM GTP cyclohydrolase 1 OS= Pseudoalteromonas espejiana OX=28107 GN=folE2 PE=3 SV=1

SEQ ID NO: 13107 - protein, 306 aa, Pseudoalteromonas fuliginea
  misc_feature (1)..(306): tr|A0A063KMW9|A0A063KMW9_9GAMM GTP cyclohydrolase FolE2 OS=Pseudoalteromonas fuliginea OX=1872678 GN=folE2 PE= 3 SV=1
MQTNMPDIADTAPALQTGKLDWVGMGEIELPFIFESRDLAPVTVNAKARAFVNLHKEEAKGIHMSRLFLALDMLSTEQQVNPQTIAQALDTFITSHEGLSDKAQIEFKFELPLRRKSLLSGKTGWKSYPITLTSTLENNNIHYELTVDVTYSSTCPCSAALARQLIQNAFSEKFNQETLSQKDVHEWLGTTQGIVATPHSQRSIANVKVKLNSKTDEFDVVNLINMLEEELKTPVQAAVKREDEQEFARLNGQNLMFCEDAARKIKALLEHNNYADYWLQINHYESLHAHDAVAIAVKGLTNGYQA

SEQ ID NO: 13108 - protein, 306 aa, Pseudoalteromonas fuliginea
  misc_feature (1)..(306): tr|A0A5B0U8F6|A0A5B0U8F6_9GAMM GTP cyclohydrolase FolE2 OS=Pseudoalteromonas fuliginea OX=1872678 GN=folE2 PE= 3 SV=1
MQTNMPDIADTAPALQTGKLDWVGMGEIELPFIFESRNLAPVTVNAKARAFVNLHKEEAKGIHMSRLFLALDMLSTEQQVNPQTIAQALDTFITSHEGLSDKAQIEFKFELPLRRKSLLSGKTGWKSYPITLTSTLENNNIHYELTVDVTYSSTCPCSAALARQLIQNAFSEKFNQETLSQKDVHEWLGTTQGIVATPHSQRSIANVKVKLNSKTDEFDVVNLINMLEEELKTPVQAAVKREDEQEFARLNGQNLMFCEDAARKIKALLEHNNYADYWLQINHYESLHAHDAVAIAVKGLTNGYQA

SEQ ID NO: 13109 - protein, 302 aa, Pseudoalteromonas haloplanktis
  misc_feature (1)..(302): sp|Q3ILJ5|GCH4_PSEHT GTP cyclohydrolase FolE2 OS=Pseudo alteromonas haloplanktis (strain TAC 125) OX=326442 GN= folE2 PE=3 SV=2
MPDIANTAPALQTGTLDWVGMGEIELPFIFESHGITPVTVNAKARAFVNLHKEDAKGIHMSRLFLALDTLSTEQQVNPQTLAQALDFFISSHEGLSDKALIEFKFELPLRRKSLLSDKAGWKSYPVILTSTIEQGVINYELSVDVTYSSTCPCSAALARQLIQNAFAEKFSQETLSQKEALEWLGTTQGIVATPHSQRSIANVKVKLDSNITQFDVVNLINTIEDELKTPVQAAVKREDEQEFARLNGQNLMFCEDAARKIKALLETQQYSDYWLQINHYESLHAHDALAIAVKGVAGGYRA

SEQ ID NO: 13110 - protein, 184 aa, Pseudoalteromonas haloplanktis
  misc_feature (1)..(184): sp|Q3IF89|GCH1_PSEHT GTP cyclohydrolase 1 OS=Pseudoalte romonas haloplanktis (strain TAC 125) OX=326442 GN=folE PE=3 SV=1
MHNELKQGYENIITAVGEDPNREGLLDTPKRAAKAMEYLTQGYRQTLEEITNNAVFTSDADDMVLVQDIELYSMCEHHLLPFTGRCHIAYIPNGKVLGLSKFARIVDMFARRFQIQEQLTHQIAKAVEEVTGATGVGVIVEAKHMCMMMRGVEKQNSSMRTSVMLGNFRADPKTRNEFLQLIKG

SEQ ID NO: 13111 - protein, 306 aa, Pseudoalteromonas issachenkonii
  misc_feature (1)..(306): tr|A0A290SE87|A0A290SE87_9GAMM GTP cyclohydrolase FolE2 OS=Pseudoalteromonas issachenkonii OX=152297 GN=folE P E=3 SV=1
MQKTMPDIANTAAALQTGKLDWVGMGDIELPFIFESLDLAPVTVNAKARAFVNLHKEDAKGIHMSRLFLALDHLSTEQQVNPQTLAQALDTFITSHEGLSDKAHIEFKFELPLRRKSLLSGKAGWKSYPIVLTSTINQGVISFELSVDVTYSSTCPCSAALARQLIQNAFSEKFSQETLTQSEVLEWLGTTQGIVATPHSQRSIANVKVKLANNIKQFDVVNLINLLEGELKTPVQAAVKREDEQEFARLNGQNLMFCEDAARKIKTTLESKEFSDYFLQINHYESLHAHDAVAIAVKGIEGGYKA

SEQ ID NO: 13112 - protein, 184 aa, Pseudoalteromonas issachenkonii
  misc_feature (1)..(184): tr|A0A290SAV8|A0A290SAV8_9GAMM GTP cyclohydrolase 1 OS= Pseudoalteromonas issachenkonii OX=152297 GN=folE PE=3 SV=1
MHNELKESYQKIITAVGEDAKREGLLDTPKRAAKAMEYLTQGYRQTLNEITNNAVFTSDADDMVLIQDIELYSMCEHHLLPFIGRCHIAYIPDGKVLGLSKFARIVDMFSRRFQIQEQLTHQIAKAVEEVTGAKGVGVIVEAKHMCMMMRGVEKQNSSMRTSVMLGNFRADPKTRNEFLQLIKG

SEQ ID NO: 13113 - protein, 293 aa, Pseudoalteromonas lipolytica
  misc_feature (1)..(293): tr|A0A1I6XKD9|A0A1I6XKD9_9GAMM GTP cyclohydrolase FolE2 OS=Pseudoalteromonas lipolytica OX=570156 GN=folE2 PE= 3 SV=1
MYLPDITSHSNSHFQFPLKWVGMEKIALPIKLELAGLNVALNAFADVFVSLDSNAKGIHMSRLYLMLNQMLAQQTLTQHRLAECMNHMLASQQGLSQGAKLVLHFDLPLLKPALLSDNAGYNAYPVVLTITQQAHLTVKLNVTIAYSSTCPCSAALSRQLLSEAVDTHFKEDSIHKHALLGWLASEEGSIATPHSQRSYAYIDATFESEQLPDLSHFIQTCEHAIGTPVQTAVKREDEQAFAALNAENLLFCEDAARRLKACLEAMNGLADYQFKIEHQESLHAHNAVVYEAK

SEQ ID NO: 13114 - protein, 306 aa, Pseudoalteromonas lipolytica
  misc_feature (1)..(306): tr|Z5XUK1|Z5XUK1_9GAMM GTP cyclohydrolase FolE2 OS=Pseu doalteromonas lipolytica SCSIO 04301 OX=1452721 GN=folE 2 PE=3 SV=1
MQTTMPDIADTAPALRTGKLDWVGMGEIELPFIFESRNIAPVNVVAKARAFVNLHKEDAKGIHMSRLFLALDTLSTEQQVNPQTLAQALDTFISSHDDLSDQAQIEFKFELPLRRESLLSGKVGWKNYPIHLIAKINQGVLSFELMVDVTYSSTCPCSAALARQLIQHAFDEKFAEQQIDKQTVLNWLGTTEGIVATPHSQRSIANVKVKLDNALTSFDVVGLIDALEGELKTPVQAAVKREDEQEFARLNGQNLMFCEDAARKIKGLLEEQEYADYWLQINHYESLHAHDAVAIAVKGVAGGYTA

SEQ ID NO: 13115 - protein, 306 aa, Pseudoalteromonas luteoviolacea
  misc_feature (1)..(306): tr|A0A167CED9|A0A167CED9_9GAMM GTP cyclohydrolase FolE2 OS=Pseudoalteromonas luteoviolacea DSM 6061 OX=1365250 GN=folE2 PE=3 SV=1
MPTSMPDIAHCADALKTGTLDWVGMGNIELPLQLGSKGLNDTPVTAKADAFVSLDKADAKGIHMSRLFLALDKLSCEQTLTPVTLTALLDQFLTTHKDLSQSAKVVIAFELPLRRASLLSGKQGWKNYPVTITAVLKDNQVKLELAVDVTYSSTCPCSAALARQLIQNAFEEKFAGQQLDHETVINWLGTTEGIVATPHSQRSIANIKVQLPQDEAEFDILGLIDLVEQELKTPVQTAVKREDEQEFARLNGQNLMFCEDAARKLKALFNTQNYLDFYVKINHYESLHAHDAVAYAVKGIQGGYQA

SEQ ID NO: 13116 - protein, 185 aa, Pseudoalteromonas luteoviolacea
  misc_feature (1)..(185): tr|A0A541BK25|A0A541BK25_9GAMM GTP cyclohydrolase 1 OS= Pseudoalteromonas luteoviolacea OX=43657 GN=folE PE=3 S V=1
MHDELKNSYKQIINAVGEDIEREGLLDTPKRAAKAMEYLTQGYRQTLSEITNNAVFTSDADDMVLIQDIELYSMCEHHLLPFVGRCHIAYIPDGKVLGLSKFARIVDMFARRFQIQEQLTHQIAKAVEEVTGARGVGVIVEAKHMCMMMRGVEKQNSQMRTSVMLGNFREDAKTRNEFLQLVKNG

SEQ ID NO: 13117 - protein, 306 aa, Pseudoalteromonas marina; identical to SEQ ID NO: 6974
  misc_feature (1)..(306): tr|U1JQ34|U1JQ34_9GAMM GTP cyclohydrolase FolE2 OS=Pseu doalteromonas marina DSM 17587 OX=1117316 GN=folE2 PE=3 SV=1

SEQ ID NO: 13118 - protein, 184 aa, Pseudoalteromonas marina
  misc_feature (1)..(184): tr|U1JZ69|U1JZ69_9GAMM GTP cyclohydrolase 1 OS=Pseudoal teromonas marina DSM 17587 OX=1117316 GN=folE PE=3 SV=1
MHNELKDSYQKIITAVGEDAEREGLLDTPKRAAKAMEYLTQGYRQTLDEITNNAVFTSDADDMVLVQDIELYSMCEHHLLPFIGRCHIAYIPNGKVLGLSKFARIVDMFSRRFQIQEQLTHQIAKAVEEVTGAKGVGVIVEAKHMCMMMRGVEKQNSSMRTSVMLGNFRSDPKTRNEFLQLIKG

SEQ ID NO: 13119 - protein, 184 aa, Pseudoalteromonas neustonica
  misc_feature (1)..(184): tr|A0A558IKS9|A0A558IKS9_9GAMM GTP cyclohydrolase 1 OS= Pseudoalteromonas neustonica OX=1840331 GN=folE PE=3 SV =1
MHDQLKNSYHEIITAVGEDPQREGLLDTPKRAAKAMEYLTKGYRQTLEEITNNAVFTSDADDMVLIQDIELYSMCEHHLLPFVGRCHIAYIPNGKVLGLSKFARIVDMFARRFQIQEQLTHQIAKAVEEVTGAKGVGVIVEAKHMCMMMRGVEKQNSSMRTSVMLGNFRADPKTRNEFLQLVKG

SEQ ID NO: 13120 - protein, 306 aa, Pseudoalteromonas neustonica
  misc_feature (1)..(306): tr|A0A558IQ75|A0A558IQ75_9GAMM GTP cyclohydrolase FolE2 OS=Pseudoalteromonas neustonica OX=1840331 GN=folE2 PE =3 SV=1
MQSNMPDIADTAPALQTGKLDWVGMADIELPFLFESRELAPINVNAKARAFVNLHKEDAKGIHMSRLFLALDTLSTEQHVNPQTIAQALDSFISSHTGLSDQAKIEFKFELPLRRKSLLSGKAGWKSYPLTIVAKIDRGVLSFELSLDVTYSSTCPCSAALARQLIQQAFVEKFQQHTLSHEEVVNWLGSTDGIIATPHSQRSIANVKVKLDSSIREFDILSLINTLEDELKTPVQAAVKREDEQEFARLNGQNLMFCEDAARKIKAVLEDAQYADYWLQINHYESLHAHDAVAIAVKGIAGGYQP

SEQ ID NO: 13121 - protein, 184 aa, Pseudoalteromonas nigrifaciens
  misc_feature (1)..(184): tr|A0A379H6D8|A0A379H6D8_9GAMM GTP cyclohydrolase 1 OS= Pseudoalteromonas nigrifaciens OX=28109 GN=folE PE=3 SV =1
MHNELKQSYENIITAVGEDPNREGLLDTPKRAAKAMEYLTQGYRQTLEEITNNAVFTSDADDMVLVQDIELYSMCEHHLLPFTGRCHIAYIPNGKVLGLSKFARIVDMFARRFQIQEQLTHQIAKAVEEVTGATGVGVIVEAKHMCMMMRGVEKQNSSMRTSVMLGNFRADPKTRNEFLQLIKG

SEQ ID NO: 13122 - protein, 306 aa, Pseudoalteromonas nigrifaciens
  misc_feature (1)..(306): tr|A0A379HDW0|A0A379HDW0_9GAMM GTP cyclohydrolase FolE2 OS=Pseudoalteromonas nigrifaciens OX=28109 GN=folE2 PE =3 SV=1
MQTNMPDIANTAPALQTGTLDWVGMGEIELPFIFESHGITPVTVNAKARAFVNLHKEDAKGIHMSRLFLALDTLSTEQQVNPQTLAQALDFFISSHEGLSDKALIEFKFELPLRRKSLLSGKAGWKSYPVILTSTIEQGVINYELSVDVTYSSTCPCSAALARQLIQNAFAEKFSQETLSQKEALEWLGTTQGIVATPHSQRSIANVKVKLDSNITQFDVVNLINTIEDELKTPVQAAVKREDEQEFARLNGQNLMFCEDAARKIKALLETQQYSDYWLQINHYESLHAHDALAIAVKGVAGGYRA

SEQ ID NO: 13123 - protein, 306 aa, Pseudoalteromonas peptidolytica
  misc_feature (1)..(306): tr|A0A510U8M3|A0A510U8M3_9GAMM GTP cyclohydrolase FolE2 OS=Pseudoalteromonas peptidolytica OX=61150 GN=folE2 P E=3 SV=1
MQNNMPDIAHSASALQTGTLDWVGMGNIELPLVIEVKGLGQVTVTAKADAFVDLQKEDAKGIHMSRLFLALDSLSCEKVLTPNTLKQLLDNFLSTHNELSTSAKVLFHFELPIRRPSLLSKKMGWKSYPIKLDATLRNGVYTLELALDITYSSTCPCSAALSRQLIQDAFQQAFDGTELDFHSVHKWLGSTEGIVATPHSQRSIANIKIRLGEHIDEFEILDLIELVENELKTPVQAAVKREDEQEFARLNGQNLMFCEDAARKLKALFNQQQLADFYIKINHYESLHAHDAVAYAVKGINGGYQI

SEQ ID NO: 13124 - protein, 184 aa, Pseudoalteromonas peptidolytica
  misc_feature (1)..(184): tr|A0A510U1Z9|A0A510U1Z9_9GAMM GTP cyclohydrolase 1 OS= Pseudoalteromonas peptidolytica OX=61150 GN=folE2 PE=3 SV=1
MQDELRQSYKSIIAAVGEDTGREGLLDTPKRAAKAMEYLTQGYRQTLDEITNNAVFTSDADDMVLIQDIELYSMCEHHLLPFVGRCHIAYIPNGKVLGLSKFARIVDMFARRFQIQEQLTHQIAKAVEEVTGAKGVGVIVEAKHMCMMMRGVEKQNSSMRTSVMLGNFRSDPKTRNEFLQLVKG

SEQ ID NO: 13125 - protein, 306 aa, Pseudoalteromonas phenolica
  misc_feature (1)..(306): tr|A0A0S2K5A2|A0A0S2K5A2_9GAMM GTP cyclohydrolase FolE2 OS=Pseudoalteromonas phenolica OX=161398 GN=folE2 PE=3 SV=1
MQTTMPDIAHSADALQTGKLDWVGMGNIELPLMLATKDLPEQPVTAKADAFVNLHKEDAKGIHMSRLFLALDTLSCEQALSPNTLKQLLDEFVTTHQDISDAAKVVINFELPLRRPSLLSKKQGWKSYPVSITASLVNQTFSIELALDVTYSSTCPCSAALARQLIQDAFAAKFKDKDISHEEVHAWLGTTEGVLATPHSQRSISNIKIKLDDNCQEFDIVGLVNLVEDELKTPVQAAVKREDEQEFARLNGQNLMFCEDAARKLKALFENAGFADYYIKINHYESLHAHDAVAYAFKGLPGGYSA

SEQ ID NO: 13126 - protein, 184 aa, Pseudoalteromonas phenolica
  misc_feature (1)..(184): tr|A0A0S2JX27|A0A0S2JX27_9GAMM GTP cyclohydrolase 1 OS= Pseudoalteromonas phenolica OX=161398 GN=folE PE=3 SV=1
MHDDLKKSYHEILTAVGENPEREGLLDTPKRAAKAMEFLTKGYRETLDEITNNAVFSSDADDMVLIQDIELYSMCEHHLLPFVGKCHIAYIPNGKVLGLSKFARIVDMFARRFQIQEQLTHQIAKAVEEVTGAKGVGVIVEAKHMCMMMRGVEKQNSKMRTSVMLGNFRHDPKTRNEFLQLVKN

SEQ ID NO: 13127 - protein, 184 aa, Pseudoalteromonas piratica
  misc_feature (1)..(184): tr|A0A0A7ECJ9|A0A0A7ECJ9_9GAMM GTP cyclohydrolase 1 OS= Pseudoalteromonas piratica OX=1348114 GN=folE PE=3 SV=1
MEKKLAENYLKIIEAVGEDPNREGLLDTPKRAAKAMEYLTKGYRQTLQEITNNAVFSSDADDMVLVQDIELYSMCEHHLLPFVGRCHIAYIPNGKVLGLSKFARIVDMFARRFQIQEQLTHQIAEAVQEVTNAKGVGVIVEAKHMCMMMRGVEKQNSKMRTSVMLGNFREDPKTRNEFLQLVKG

SEQ ID NO: 13128 - protein, 213 aa, Pseudoalteromonas piratica
  misc_feature (1)..(213): tr|A0A0A7EK90|A0A0A7EK90_9GAMM GTP cyclohydrolase 1 OS= Pseudoalteromonas piratica OX=1348114 GN=folE PE=3 SV=1
MISSEAQLVKQALLDAGLETPLKATEFSPEQKYERIKGLFTEIVDTLGLDLEDDSLNETPHRIAKMYVREIFAGLDYENFPKIALIENKMKVDEMVKVNNISLTSTCEHHFVTIDGYAKVAYIPNKKIIGLSKINRIVRFFAQRPQVQERLTQQVLIALQALLETDNVAVSINAVHYCVKSRGVMDATSETATTALGGAFKSNPNTRAEFLAG

SEQ ID NO: 13129 - protein, 306 aa, Pseudoalteromonas piscicida
  misc_feature (1)..(306): tr|A0A2A5JQ28|A0A2A5JQ28_PSEO7 GTP cyclohydrolase FolE2 OS=Pseudoalteromonas piscicida OX=43662 GN=folE2 PE=3 SV=1
MQNNMPDIAHSASALQTGTLDWVGMGNIELPLVLESKGLNPATVTAKADAFVNLQKEDAKGIHMSRLFLALDTLSCEQALTPNTLKQLLDNFLSTHNELSTGAKVTFKFELPIRRPSLLSKKMGWKSYPVIIDATLLDGIYKLELAVDITYSSTCPCSAALSRQLIQNAFQHAFDGKELDFHSVHNWLGSTDGIVATPHSQRSIANIKVKLNESHDEFAILDLIELVENELKTPVQAAVKREDEQEFARLNGQNLMFCEDAARKLKALFNKQALADFYIKINHYESLHAHDAVAYAVKGINGGYSV

SEQ ID NO: 13130 - protein, 184 aa, Pseudoalteromonas piscicida
  misc_feature (1)..(184): tr|A0A0F4NYG9|A0A0F4NYG9_PSEO7 GTP cyclohydrolase 1 OS= Pseudoalteromonas piscicida OX=43662 GN=folE PE=3 SV=1
MQDKLQQSYKTIIEAVGEDADREGLLDTPKRAAKAMEYLTQGYRQTLDEITNNAVFSSDADDMVLVQDIELYSMCEHHLLPFVGRCHIAYIPNGKVLGLSKFARIVDMFARRFQIQEQLTHQIAKAVEEVTGAKGVGVIVEAKHMCMMMRGVEKQNSSMRTSVMLGNFRSDPKTRNEFLQLVKG

SEQ ID NO: 13131 - protein, 184 aa, Pseudoalteromonas porphyrae
  misc_feature (1)..(184): tr|A0A0N1EX47|A0A0N1EX47_9GAMM GTP cyclohydrolase 1 OS= Pseudoalteromonas porphyrae OX=187330 GN=folE PE=3 SV=1
MHNELKNSYQEIISAVGEDPQREGLLDTPKRAAKAMEYLTKGYRQTLDEITNNAVFTSDADDMVLIQDIELYSMCEHHLLPFVGRCHIAYIPNGKVLGLSKFARIVDMYARRFQIQEQLTHQIAKAVEEVTGAKGVGVIVEAKHMCMMMRGVEKQNSSMRTSVMLGNFRADPKTRNEFLQLIKG

SEQ ID NO: 13132 - protein, 304 aa, Pseudoalteromonas porphyrae
  misc_feature (1)..(304): tr|A0A0N0LZN4|A0A0N0LZN4_9GAMM GTP cyclohydrolase FolE2 OS=Pseudoalteromonas porphyrae OX=187330 GN=folE2 PE=3 SV=1
MKLQLPDIASGQRAGAALPLKWVGMEGIAIPLNIIEQPSSSIAAKADVFVSLDKADAKGIHMSRLYLRVKDILAREQLSVGVLAALLKELVESQQGLSLAARLQLAFELTIRKPALLSDQFGYQTYPVSIRCEYINEQMNMELSLTIPYSSTCPCSAALSRQAMSDAITSQFSQDLISKEQLLDWVTSQQGSVATPHSQRSYAYLKLRLQNNALPNLETLIKNLEEVIGTPVQTAVKREDEQAFAKLNAENLMFCEDAARRLKLALENNGQVIDYWFKVEHQESLHAHNAVVIDHKSSHGYEKL

SEQ ID NO: 13133 - protein, 294 aa, Pseudoalteromonas profundi
  misc_feature (1)..(294): tr|A0A3A3EI59|A0A3A3EI59_9GAMM GTP cyclohydrolase FolE2 OS=Pseudoalteromonas profundi OX=1774956 GN=folE2 PE=3 SV=1
MQLPDITSHSNVDFQSPLKWVGMEKIALPLKLAQTHVDVHLNTKADVFVSLDSDAKGIHMSRLYLLLNQQLAKQSLTSQRISEFMEAVLRSQKGLSKGAKLVLHFDLPQLKPALLSDHAGYNAYPVVLTITKQQSLTINLKVDVAYSSTCPCSAALSRQLLSEAVDKQFSDDHIDKASLLNWLASEQGSIATPHSQRSYAYIDVTFSSEKLPDISGFITVCEQAIGTPVQTAVKREDEQAFAALNAKNLLFCEDAARRLKQCFETMPGIADYQFKVEHQESLHGHNAVVYESKY

SEQ ID NO: 13134 - protein, 306 aa, Pseudoalteromonas profundi
  misc_feature (1)..(306): tr|A0A3A3ETB1|A0A3A3ETB1_9GAMM GTP cyclohydrolase FolE2 OS=Pseudoalteromonas profundi OX=1774956 GN=folE2 PE=3 SV=1
MQTTMPDIADTAPALRTGKLDWVGMGEIELPFIFESRNIAPVNVIAKARAFVNLHKEDAKGIHMSRLFLALDTLSTEQQVNPQTLAQALDAFISSHDDLSDQAQIEFKFELPLRRKSLLSGKVGWKNYPIHLIAKINQGVLSFELMVDVTYSSTCPCSAALARQLIQNAFSEKFAEQHVDKQTVLEWLGTTDGIVATPHSQRSIANVKVKLDSQIDSFDVVGLIDALEAELKTPVQAAVKREDEQEFARLNGQNLMFCEDAARKIKGLLEEQNYADYWLQINHYESLHAHDAVAIAVKGIAGGYTA

SEQ ID NO: 13135 - protein, 306 aa, Pseudoalteromonas rubra
  misc_feature (1)..(306): tr|A0A0F4QHB4|A0A0F4QHB4_9GAMM GTP cyclohydrolase FolE2 OS=Pseudoalteromonas rubra OX=43658 GN=folE2 PE=3 SV=1
MPTSMPDIAHSADALQEGKLDWVGMGNIELPLLLSSKGINDTPVTAKADAFVSLDREDAKGIHMSRLFLALDTLSCEQTLTPGAIRSVLDSFITSHEGLSHSAKVTFHFELPLRRASLLSGKQGWKNYPVSITASLTDGRFSLELAVDVTYSSTCPCSAALARQLIQNAFEQKFAGQSLDHASVHAWLGTTEGILATPHSQRSVTNIKVKLDENCQAFDILGLVNLVEDELKTPVQAAVKREDEQEFARLNGQNLMFCEDAARKLKALFEAENYQDYYIKINHYESLHAHDAVAYAVKGLKDGYRA

SEQ ID NO: 13136 - protein, 306 aa, Pseudoalteromonas rubra
  misc_feature (1)..(306): tr|U1LVP9|U1LVP9_9GAMM GTP cyclohydrolase FolE2 OS=Pseu doalteromonas rubra DSM 6842 OX=1117318 GN=folE2 PE=3 S V=1
MPTSMPDIAHSADALQEGKLDWVGMGNIELPLLLSSKGMNDTPVTAKADAFVSLDREDAKGIHMSRLFLALDSLSCEQTLTPATIRSVLDSFITSHEGLSHSAKVTFHFELPLRRASLLSGKQGWKNYPVVITANLTNGQFNLELAVDVTYSSTCPCSAALARQLIQNAFEEKFADQSLDHASVHAWLGTTEGILATPHSQRSVTNIKVKLDEHCQEFDILGLVNMVEDELKTPVQAAVKREDEQEFARLNGQNLMFCEDAARKLKALFEAENYPDYYIKINHYESLHAHDAVAYAVKGLKDGYRV

SEQ ID NO: 13137 - protein, 184 aa, Pseudoalteromonas ruthenica
  misc_feature (1)..(184): tr|A0A0F4PUY0|A0A0F4PUY0_9GAMM GTP cyclohydrolase 1 OS= Pseudoalteromonas ruthenica OX=151081 GN=folE PE=3 SV=1
MHDELKQSYQQLISAVGEDPQREGLLDTPKRAAKAMEYLTQGYRQTLAEITNNAVFTSDADDMVLIQDIELYSMCEHHLLPFVGKAHIAYIPDGKVLGLSKFARIVDMFARRFQIQEQLTHQIAQAVEEVTGAKGVGVIVEAKHMCMMMRGVEKQNSKMRTSVMLGNFRTDPKTRNEFLQLVKN

SEQ ID NO: 13138 - protein, 307 aa, Pseudoalteromonas ruthenica
  misc_feature (1)..(307): tr|A0A0F4PSA0|A0A0F4PSA0_9GAMM GTP cyclohydrolase FolE2 OS=Pseudoalteromonas ruthenica OX=151081 GN=folE2 PE=3 SV=1
MPHPMPDIANTSASSVHHTLDWVGMSAIEIPLKIATKGMAATVINAKAQAFVNLIDTHAKGIHMSRLFLALDRLSNEASVTPAQLKTTLDAFISSHDDISDRARLSLSFELPLRRSALLSDNSGWKFYPITLDMQLNQGQLRVEAGVEVTYSSTCPCSAALARQLIQENFKRDFDAENLNFEQVLKWLGTTEGISATPHSQRSVAQTKVLLDAQLGEFDFVAIIDEIEQTLKTPVQTAVKREDEQEFARLNGANLMFCEDAARKVKAALDERADVLDFWVRINHYESLHAHDAVAITTKGLPQGYQP

SEQ ID NO: 13139 - protein, 184 aa, Pseudoalteromonas sp.; identical to SEQ ID NO: 13137
  misc_feature (1)..(184): tr|A0A4Q6Y4Z1|A0A4Q6Y4Z1_9GAMM GTP cyclohydrolase 1 OS= Pseudoalteromonas sp. CO325X OX=1777262 GN=folE PE=3 SV =1

SEQ ID NO: 13140 - protein, 306 aa, Pseudoalteromonas sp.
  misc_feature (1)..(306): tr|A0A426VLC8|A0A426VLC8_9GAMM GTP cyclohydrolase FolE2 OS=Pseudoalteromonas sp. J010 OX=998465 GN=folE2 PE=3 SV=1
MQNNMPDIAHSASALQTGTLDWVGMGNIELPLVIEVKGLGQVTVTAKADAFVDLQKEDAKGIHMSRLFLALDSLSCEKVLTPNTLKQLLDNFLSTHNELSTSAKVLFHFELPIRRPSLLSKKMGWKSYPIKLDATLRNGVYTLELALDITYSSTCPCSAALSRQLIQDAFQQAFDGTDLDFHSVHKWLGSTEGIVATPHSQRSIANIKIRLGEHIDEFEILDLIELVENELKTPVQAAVKREDEQEFARLNGQNLMFCEDAARKLKALFNQQQLADFYIKINHYESLHAHDAVAYAVKGINGGYQI

SEQ ID NO: 13141 - protein, 213 aa, Pseudoalteromonas spongiae
  misc_feature (1)..(213): tr|A0A290T964|A0A290T964_9GAMM GTP cyclohydrolase 1 OS= Pseudoalteromonas spongiae UST010723-006 OX=1117319 GN= folE PE=3 SV=1
MISKEATLVKEALIAKGLETPLKDVGLSSEQKYDKLKGLFTEVVDTLGLDLNDDSLAETPHRIAKMYVHEIFSGLDYETFPKIALIENKMQVDEMVKVNSISLTSTCEHHFVTIDGYAKVAYIPNEKIIGLSKINRIVRFFAKRPQVQERLTQQILIALQALLETDNVAVSINATHYCVKSRGVMDATSETSTTALGGDFKTNSNTRAEFLAN

SEQ ID NO: 13142 - protein, 184 aa, Pseudoalteromonas spongiae
  misc_feature (1)..(184): tr|A0A290T6W6|A0A290T6W6_9GAMM GTP cyclohydrolase 1 OS= Pseudoalteromonas spongiae UST010723-006 OX=1117319 GN= folE PE=3 SV=1
MEKKLAENYRQIIEAVGENPEREGLLDTPKRAAKAMEYLTKGYRQTLDEITNNAVFTSDADDMVLIQDIELYSMCEHHLLPFVGRCHIAYIPDGKVLGLSKFARIVDMFARRFQIQEQLTHQIAEAVQQVTNAKGVGVIVEAKHMCMMMRGVEKQNSKMRTSVMLGNFREDPKTRNEFLQLVKG

SEQ ID NO: 13143 - protein, 306 aa, Pseudoalteromonas tetraodonis
  misc_feature (1)..(306): tr|A0A290TGZ6|A0A290TGZ6_9GAMM GTP cyclohydrolase FolE2 OS=Pseudoalteromonas tetraodonis OX=43659 GN=folE PE=3 SV=1
MQKTMPDIANTAAALQTGKLDWVGMGDIELPFIFESLDLAPVTVNAKARAFVNLHKEDAKGIHMSRLFLALDHLSTEQQVNPQTLAQALDTFITSHEGLSDKAHIEFKFELPLRRKSLLSGKAGWKSYPIVLTSTINQGVISFELSVDVTYSSTCPCSAALARQLIQNAFSEKFSQETLTQSEVLEWLGTTQGIVATPHSQRSIANVKVKLANNIKQFDVVNLINLLEDELKTPVQAAVKREDEQEFARLNGQNLMFCEDAARKIKTTLESKEFSDYFLQINHYESLHAHDAVAIAVKGIEGGYKA

SEQ ID NO: 13144 - protein, 184 aa, Pseudoalteromonas tetraodonis
  misc_feature (1)..(184): tr|A0A1E3X0I8|A0A1E3X0I8_9GAMM GTP cyclohydrolase 1 OS= Pseudoalteromonas tetraodonis OX=43659 GN=folE PE=3 SV= 1
MHNELKESYQKIITAVGEDAEREGLLDTPKRAAKAMEYLTQGYRQTLNEITNNAVFTSDADDMVLIQDIELYSMCEHHLLPFIGRCHIAYIPDGKVLGLSKFARIVDMFSRRFQIQEQLTHQIAKAVEEVTGAKGVGVIVEAKHMCMMMRGVEKQNSSMRTSVMLGNFRADPKTRNEFLQLIKG

SEQ ID NO: 13145 - protein, 184 aa, Pseudoalteromonas translucida; identical to SEQ ID NO: 13121
  misc_feature (1)..(184): tr|A0A0U2VD42|A0A0U2VD42_9GAMM GTP cyclohydrolase 1 OS= Pseudoalteromonas translucida KMM 520 OX=1315283 GN=fol E PE=3 SV=1

SEQ ID NO: 13146 - protein, 306 aa, Pseudoalteromonas translucida
  misc_feature (1)..(306): tr|A0A0U2WWI3|A0A0U2WWI3_9GAMM GTP cyclohydrolase FolE2 OS=Pseudoalteromonas translucida KMM 520 OX=1315283 GN =folE PE=3 SV=1
MQTNMPDIANTAPALQTGTLDWVGMGEIELPFIFESHGITPVTVNAKARAFVNLHKEDAKGIHMSRLFLALDTLSTEQQVNPQTLAQALDFFISSHEGLSDKALIEFKFELPLRRKSLLSGKAGWKSYPVILTSTIEQGVISYELSVDVTYSSTCPCSAALARQLIQNAFAEKFNQETLSQKEALEWLGTTQGIVATPHSQRSIANVKVKLNSNITQFDVVNLINTIEDELKTPVQAAVKREDEQEFARLNGQNLMFCEDAARKIKALLETQQYSDYWLQINHYESLHAHDALAIAVKGVAGGYKA

SEQ ID NO: 13147 - protein, 342 aa, Pseudoalteromonas tunicata
  misc_feature (1)..(342): tr|A4CCK0|A4CCK0_9GAMM GTP cyclohydrolase FolE2 OS=Pseu doalteromonas tunicata D2 OX=87626 GN=folE2 PE=3 SV=1
MHKHGFFSLLKNSTAANFIVEWRVFPHRLFWSTPPMQKIMPDIAHTAEALQEGTLDWVGMSQIELPLMVSSKHCAEQHVSAKAEAFVNLTDPQAKGIHMSRLYLALDELSNQTTLTPQSLCGLLDQFISSHNDLSNQAQVNLKFDYHLRRSSLLSGKTGWKAYPVEINATFKDNAVTLELSVAVTYSSTCPCSAALARQLIQQSFEQRFTESAVDKAQVLDWLGTTQGIVATPHSQRSVAQIKVKLANTSSEFDILGLVDALENELKTPVQAAVKREDEQEFARLNGQNLMFCEDAARKVKHVLNQNTSFADFWLRVNHYESLHAHDAVSIAVKGITNGYRA

SEQ ID NO: 13148 - protein, 196 aa, Pseudoalteromonas tunicata
  misc_feature (1)..(196): tr|A4CF87|A4CF87_9GAMM GTP cyclohydrolase 1 OS=Pseudoal teromonas tunicata D2 OX=87626 GN=folE PE=3 SV=1
MAAATLNEKEQIMHDELKKSYQQIIESIGEDPTREGLLDTPKRAAKAMEYLTKGYKETLEQITNNAVFTSDADDMVLVQDIELYSMCEHHLLPFVGRCHIAYIPNGKVLGLSKFARIVDMYARRFQIQEQLTHQIAKAVEEVTGAKGVGVIVEAKHMCMMMRGVEKQNSSMRTSVMLGNFRQDPKTRNEFLQLVKN

SEQ ID NO: 13149 - protein, 307 aa, Pseudoalteromonas ulvae
  misc_feature (1)..(307): tr|A0A244CW03|A0A244CW03_9GAMM GTP cyclohydrolase FolE2 OS=Pseudoalteromonas ulvae OX=107327 GN=folE2 PE=3 SV= 1
MQKFMPDIAHSAEALQEGTLDWVGMSQIELPLVVSSKDSPEQHVSALAEAFVNLNDPQAKGIHMSRLYLALDEFSNHQTLTPKTLASVLDQFISSHHSLSDQAQVTLKFDYHLRRRSLLSGKTGWKAYPVEITATYKEQTVVLELSVAVTYSSTCPCSAALARQLIQQAFDQQFTEQAIEKDQVMQWLGSTQGIVATPHSQRSIAQVKVKLNQLDSHFDILSLIDALENELKTPVQAAVKREDEQEFARLNGQNLMFCEDAARKVKHILNQQSDYSDFWLRINHYESLHAHDAVSIAVKGVAMGYTA

SEQ ID NO: 13150 - protein, 184 aa, Pseudoalteromonas ulvae
  misc_feature (1)..(184): tr|A0A2C9ZZD7|A0A2C9ZZD7_9GAMM GTP cyclohydrolase 1 OS= Pseudoalteromonas ulvae OX=107327 GN=folE PE=3 SV=1
MHDELKKSYKQIIESVGEDANREGLLDTPKRAAKAMEYLTKGYKETLNEITNNAVFTSDADDMVLIQDIELYSMCEHHLLPFVGRCHIAYIPNGKVLGLSKFARIVDMYARRFQIQEQLTHQIAKAVEEVTGAKGVGVIVEAKHMCMMMRGVEKQNSSMRTSVMLGNFRQDPKTRNEFLQLLKN

SEQ ID NO: 13151 - protein, 190 aa, Pseudoarcobacter caeni
  misc_feature (1)..(190): tr|A0A363D2J1|A0A363D2J1_9PROT GTP cyclohydrolase 1 OS= Pseudoarcobacter caeni OX=1912877 GN=folE PE=3 SV=1
MSNEIEFENAIKKILEHIGEDVTREGLIDTPKRVRKAYEFMCSGYNQDPKEILEKALFTSTNDEMVVVKDIEFYSQCEHHMLPIIGKVHVAYIPNGKVVGLSKIPRVVDVFARRLQIQEQLTEQICDALNEHLKPKGVAVMIDARHMCMEMRGVEKICSTTVTSALRGLFKSNKKTKDEFLSIVAPSLHK

SEQ ID NO: 13152 - protein, 198 aa, Pseudobacter ginsenosidimutans
  misc_feature (1)..(198): tr|A0A4Q7MKT4|A0A4Q7MKT4_9BACT GTP cyclohydrolase 1 OS= Pseudobacter ginsenosidimutans OX=661488 GN=folE PE=3 S V=1
MAYKKTEQYEDKITSGLIDNYREVLNLLGEDPQREGLVKTPERMAKAMQYLTQGYQLDANAILASAMFREEVSEMIIVKDIELYSMCEHHLLPFFGKAHVAYIPNGHITGLSKIARVVDVFSRRLQVQERLTTQILDAIKTTLRPLGVAVVIEASHLCMMMRGVQKQNSVTTTSAFWGEFEKSETRSEFTKLISSRLH

SEQ ID NO: 13153 - protein, 192 aa, Pseudobacteriovorax antillogorgiicola
  misc_feature (1)..(192): tr|A0A1Y6CNI3|A0A1Y6CNI3_9PROT GTP cyclohydrolase 1 OS= Pseudobacteriovorax antillogorgiicola OX=1513793 GN=fol E PE=3 SV=1
MDDKTYDQHRQNFTKLLEDLGEKPSRDGLVKTPDRYLQSIQFLTSGYEEDIPTILNDALFDVEYQDMVIVRNIEFYSLCEHHVIPFYGQVHVGYIPGKRVVGLSKIPRLVDVFARRLQVQERMTNQIAACLQEYLEPEGVGVVIDAYHLCMMMRGVEKQKSYTTTSSMHGCFRNVDTRQEFLKLIHSPRRDF

SEQ ID NO: 13154 - protein, 215 aa, Pseudobacteriovorax antillogorgiicola
  misc_feature (1)..(215): tr|A0A1Y6CFU2|A0A1Y6CFU2_9PROT GTP cyclohydrolase 1 OS= Pseudobacteriovorax antillogorgiicola OX=1513793 GN=fol E PE=3 SV=1
MMKEEFIEELKGEPGTDLPTANDAFDSRKYKRESGEKAAQLILGMTGEDVRREGLLRTPHRFAKAFDHLFQGYDLNPQTAVGEGVFDSEGKGLVSVENVEFYSMCEHHLLPFWGTATVAYFPDKKILGLSKIPRLLETYARRVQVQERITEQVAAAIQELIAPRAVLVQVKAQHLCMMMRGVEKQTSFTLTEKVEGFDSLQAHEQQQFLSLMGRR

SEQ ID NO: 13155 - protein, 186 aa, Pseudobacteroides cellulosolvens
  misc_feature (1)..(186): tr|A0A0L6JSF3|A0A0L6JSF3_9FIRM GTP cyclohydrolase 1 OS= Pseudobacteroides cellulosolvens ATCC 35603 = DSM 2933 OX=398512 GN=folE PE=3 SV=1
MVDKERVKAAVREILIAIGDDPDREGLKETPDRVARMYDEIFAGLHKDPREYVKVFQEENHEEIVLVKDIPTYSICEHHLLPFVGVAHVVYIPRKGKVMGLSKLARIVDTVAKKPQLQERLTSQVADVLMDTINPIGAAVVMEAEHLCMTMRGIKKPGSRTITSALRGIIKTDARTRAEVMALIKD

SEQ ID NO: 13156 - protein, 190 aa, Pseudobutyrivibrio ruminis
  misc_feature (1)..(190): tr|A0A285RIV2|A0A285RIV2_9FIRM GTP cyclohydrolase 1 OS= Pseudobutyrivibrio ruminis DSM 9787 OX=1123011 GN=folE PE=3 SV=1
MAINKELIKESIRNIIIALGDDPERAGLKETPDRVARMYEEVFEGMNYTNEQIAEMFNKTFDEDYYDETNQDLVFVKDIEVFSYCEHHLALMYDMKVSVAYIPNGKVIGLSKIARIADMAAKRLQLQERIGNDIAEIIQMVTGSEDVAVFIEASHSCMTARGIKNASAKTHTQTLRGRFKTDRDLLQRLL

SEQ ID NO: 13157 - protein, 190 aa, Pseudobutyrivibrio ruminis; identical to SEQ ID NO: 13156
  misc_feature (1)..(190): tr|A0A1H7G815|A0A1H7G815_9FIRM GTP cyclohydrolase 1 OS= Pseudobutyrivibrio ruminis OX=46206 GN=folE PE=3 SV=1

SEQ ID NO: 13158 - protein, 190 aa, Pseudobutyrivibrio sp.
  misc_feature (1)..(190): tr|A0A1I5D5B0|A0A1I5D5B0_9FIRM GTP cyclohydrolase 1 OS= Pseudobutyrivibrio sp. JW11 OX=1855302 GN=folE PE=3 SV= 1
MAINKELIKESIRNIIIALGDDPERAGLKETPDRVARMYEEVFEGMNYTNGQIAEMFNKTFDEDYYDETNQDLVFVKDIEVFSYCEHHLALMYDMKVSVAYIPNGKVIGLSKIARIADMAAKRLQLQERIGNDIAEIIQMVTGSEDVAVFIEASHSCMTARGIKNASAKTHTQTLRGRFKTDRDLLQRLL

SEQ ID NO: 13159 - protein, 190 aa, Pseudobutyrivibrio sp.
  misc_feature (1)..(190): tr|A0A1H3ZY21|A0A1H3ZY21_9FIRM GTP cyclohydrolase 1 OS= Pseudobutyrivibrio sp. ACV-2 OX=1520801 GN=folE PE=3 SV =1
MAINKELIKESIRNIIIALGDDPERPGLIETPDRVARMYEEVFEGMNYSNQEIADMFNKTFDEDYYDADSQDLVFVKDIEVFSYCEHHLALMYDMKVSVAYIPNGKVIGLSKIARIADMAAKRLQLQERIGNDIAEIIQLVTGSEDVAVFIEASHSCMTARGIKNAGARTHTQTLRGKFKTDRDLLGRLL

SEQ ID NO: 13160 - protein, 190 aa, Pseudobutyrivibrio xylanivorans
  misc_feature (1)..(190): tr|A0A1G5S2K1|A0A1G5S2K1_PSEXY GTP cyclohydrolase 1 OS= Pseudobutyrivibrio xylanivorans OX=185007 GN=folE PE=3 SV=1
MAINKDLIKESIRNIIIALGDDPDRAGLIETPDRVARMYEEVFEGMNYSNQEIADMFNKTFDEDYYDENSQDLVFVKDIEVFSYCEHHLALMYDMKVSVAYIPNGKVIGLSKIARIADMAAKRLQLQERIGNDIAEILQMVTGSEDVAVFIEASHSCMTARGIKNAGARTQTQTLRGKFRTNRDLLARLL

SEQ ID NO: 13161 - protein, 190 aa, Pseudobutyrivibrio xylanivorans
  misc_feature (1)..(190): tr|A0A1M6FN82|A0A1M6FN82_PSEXY GTP cyclohydrolase 1 OS= Pseudobutyrivibrio xylanivorans DSM 14809 OX=1123012 GN =folE PE=3 SV=1
MAINKDLIKESIRNIIIALGDDPDRAGLIETPDRVARMYEEVFEGMNYSNQEIADMFNKTFDEDYYDENSQDLVFVKDIEVFSYCEHHLALMYDMKVSVAYIPNGKVIGLSKIARIADMAAKRLQLQERIGNDIAEILQIVTGSEDVAVFIEASHSCMTARGIKNAGARTQTQTLRGKFKNDKDLLARLR

SEQ ID NO: 13162 - protein, 203 aa, Pseudochrobactrum asaccharolyticum
  misc_feature (1)..(203): tr|A0A366EBR4|A0A366EBR4_9RHIZ GTP cyclohydrolase 1 OS= Pseudochrobactrum asaccharolyticum OX=354351 GN=folE PE =3 SV=1
MNKHIADTKNNDVIRPTQAEAEAAVKTLLLWLGEDTSREGLIETPKRVAKAYKELFSGYQQSPEEELGTVFEEVAGYKDMVLIKDISFFSHCEHHMVPIIGKAHVGYLPNGSVVGLSKIARVVDMFAHRLQTQESMTAQIAHSIQNILKPLGVAVLIEAEHMCMAMRGIRKQGSTTLTTTFTDAFETDIANQVRFMTMLRSGS

SEQ ID NO: 13163 - protein, 222 aa, Pseudocitrobacter faecalis
  misc_feature (1)..(222): tr|A0A366FN15|A0A366FN15_9ENTR GTP cyclohydrolase 1 OS= Pseudocitrobacter faecalis OX=1398493 GN=folE PE=3 SV=1
MSSLSKEAALVHEALVARGLETPLRPPVREMDNETRKRLISGHMTEIMQLLNLDLSDDSLMETPHRIAKMYVDEIFSGLDYANFPKITVIENKMKVDEMVTVRDITLTSTCEHHFVTIDGKATVAYIPKESVIGLSKINRIVQFFAQRPQVQERLTQQILTALQTLLGTNNVAVSIDAVHYCVKARGIRDATSATTTTSLGGLFKSSQNTRQEFLRAVRHHN

SEQ ID NO: 13164 - protein, 222 aa, Pseudocitrobacter sp.; identical to SEQ ID NO: 13163
  misc_feature (1)..(222): tr|A0A5B0KH64|A0A5B0KH64_9ENTR GTP cyclohydrolase 1 OS= Pseudocitrobacter sp. 73 OX=2605731 GN=folE PE=3 SV=1

SEQ ID NO: 13165 - protein, 690 aa, Pseudoclavibacter sp.
  misc_feature (1)..(690): tr|A0A2S5WVT9|A0A2S5WVT9_9MICO GTP cyclohydrolase 1 OS= Pseudoclavibacter sp. RFBB5 OX=2080574 GN=folP PE=3 SV= 1
MAPLRLGRTPSRRRATRASAAGMRAGFVSREDGDRPALRALRSEDLQMNDVGSGSSERVDLARAQAAVREFLAAIGEDPDRPGLARTPERVAEAALELFGGIGVEAITPLAGARFPVADTQQPLAAVSGAAGSAAPLSASASAVASESASARESASAAPSADNATAPVSQPVVLRDLAFRSMCEHHLLPFSGRVHLAYVPGDSIVGFGRLHALLETLSARPTLQERLGDELVDAMMTALDARGALAIIVASHACAGLRGSRQQAGVVVTVSARGELSEPIARAEIISLIGAQPIVAADEAAATPAASGQSAPPAAPIVGHVLRGARFDPRLGTQASSASADEDDTAGAPEAAEPEAAGTAAAAPASHAPAEVTERDAQLDAATGEQWAEDSGPVNTRPFELPQRFTNLLQPAIPKRPRILGILNITPDSFSDGGKFEDLFSQNRRTKRALRRARELVAQGADIIDVGGESTRPGAVRVPQEEEAARVLPVIKELAGLGVLVSIDTMYAKTAEAALELGAEYVNDVSGGLADPAMLGLVAESGNPFILSHWRGHSVRMNELADYRDPAAEILSELAGARDRAVDAGLDPSQIVLDPGLGFAKRRDDNWAVLRELEQFVALGHPLLVGASRKRFTGEMLGPDADVTERDLPTAIITALAAKAGVWGVRVHNVEANRVALDVVDAWREGAQDD

SEQ ID NO: 13166 - protein, 634 aa, Pseudoclavibacter sp.
  misc_feature (1)..(634): tr|A0A2S5UWQ0|A0A2S5UWQ0_9MICO GTP cyclohydrolase 1 OS= Pseudoclavibacter sp. AY1F1 OX=2080583 GN=folP PE=3 SV= 1
MHGGFVSREDGPMPASRAVQSEDVLMNDVDSGSADRVDLERARAAVREFLAAIGEDPDRPGLARTPERVADAALELFGGIGVDAVTPLSAARFPVSDAAASAGAGAPAPAAAGAAAPVSQPVVLRDLAFRSMCEHHLLPFSGRVHLAYVPSDSIVGFGRLHTLLETLSARATLQERLGDELVDAMMTALDARGALAVIEASHACAGLRGSRQQAGVVVTVSARGELAEPIARSEIIALIGAQPVVAESVVADETHAAAPGIAPIIGHVLRGARFDPMSGTLASAAVPLEDDASLEQSAAAEARTPTQVNDREVEEDAEGAAQLDALTDEQWAEDSGPVHTRPFELPQRFTNLLQPAIPKRPRLLGILNITPDSFSDGGKFEDLFSQNRRTTRALRRARELVAQGADIIDVGGESTRPGAVRVPQEEEAARVLPVVKELAALGVLVSIDTMYARTAEAALALGAEYVNDVSGGQADPAMLGLVADSGNPFILSHWRGHSIRMNELADYRDPASEILAELAGARDRAVDAGLDPSQIVLDPGLGFAKRRDDNWAVLRELEQFVALGHPLLVGASRKRFTGEVLQPDADVIERDMPTAVITALAAKAGIWGVRVHNVEANRVALDVVDAWREGAQDD

SEQ ID NO: 13167 - protein, 186 aa, Pseudoclostridium thermosuccinogenes
  misc_feature (1)..(186): tr|A0A2K2EY85|A0A2K2EY85_9FIRM GTP cyclohydrolase 1 OS= Pseudoclostridium thermosuccinogenes OX=84032 GN=folE P E=3 SV=1
MDKERIKKAVRELLAAIGDDPDREGLRETPDRVARMCEEIFAGMYMNPKDVVKIFQEENHEEMVLVKDIPVYSVCEHHLLPFIGVAHVAYIPRKGRVMGLSKLARIVDIIAKKPQLQERLGSQVADTIMETLEPLGVAVVIEAEHLCMTMRGIKKPGAKTVTSALRGIMKTDARTRAETMSLINGR

SEQ ID NO: 13168 - protein, 256 aa, Pseudodesulfovibrio aespoeensis
  misc_feature (1)..(256): tr|E6VSS1|E6VSS1_PSEA9 GTP cyclohydrolase FolE2 OS=Pseu dodesulfovibrio aespoeensis (strain ATCC 700646 / DSM 1 0631 / Aspo-2) OX=643562 GN=folE2 PE=3 SV=1
MEDVQKQQADIAMPIDRVGVKGLRLPIIVRDRESGIQHTVAEVSLSVDLPAEFKGTHMSRFVEALEHWSGELDYNTFLTLLEDIVVRLQARSAHVRFVFPFFLRRNSPVSGANGMMDYTCRVDGEFRDGTLTFTLGADVPVMTVCPCSKAISDEGAHSQRAEVRIRTRFTGFLWLEDLIEIGEQAGSCQVYSLLKREDEKYVTERAFANPAFVEDVVRAAAHGLDKHPKIHWYRVEVESFESIHNHSAFAVIESRE

SEQ ID NO: 13169 - protein, 256 aa, Pseudodesulfovibrio hydrargyri
  misc_feature (1)..(256): tr|A0A1J5NDP6|A0A1J5NDP6_9DELT GTP cyclohydrolase FolE2 OS=Pseudodesulfovibrio hydrargyri OX=2125990 GN=folE2 PE=3 SV=1
MEDVQKSQASIAMPIDRVGVKGLRLPITVRHRESGVQHTVAQVSMSVDLPAEFKGTHMSRFVEALEHWEGTLDYNSFLSLLDDVVDRLQARSAHLRFVFPYFLRRKSPVTKTGGMMDYTCRVDGYLKDGKLTFTLGADVPVMTVCPCSKAISDEGAHSQRAEVRIRTRFDGFLWLEDLIEIGERAGSCQVYSLLKREDEKYVTETAFAHPTFVEDVVREAAKGLDEHPKVTWYKVEVESFESIHNHSAFAVIESDG

SEQ ID NO: 13170 - protein, 257 aa, Pseudodesulfovibrio indicus
  misc_feature (1)..(257): tr|A0A126QQ19|A0A126QQ19_9DELT GTP cyclohydrolase FolE2 OS=Pseudodesulfovibrio indicus OX=1716143 GN=folE2 PE= 3 SV=1
MEDVQKSQASIAMPIDRVGVKGLRLPIVVRDRESGTQHTVAEVSLSVDLPAQFKGTHMSRFIEALEHWEHALDYNSFRTLLDDVAERLQARNAHVRFEFPYFLRRRSPVSGANGMMDYACRVDGYLKDGRLTFTLGADVPVMTVCPCSKAISDEGAHSQRAEVRIRTRFDGFVWLEDLIEIAERAGSCQVYSLLKREDEKYVTETAFANPTFVEDVVRETAKGLSEHPKIKWFKVEVESFESIHNHSAFAVIESQPA

SEQ ID NO: 13171 - protein, 258 aa, Pseudodesulfovibrio piezophilus
  misc_feature (1)..(258): tr|M1WUZ2|M1WUZ2_PSEP2 GTP cyclohydrolase FolE2 OS=Pseu dodesulfovibrio piezophilus (strain DSM 21447 / JCM 154 86 / C1TLV30) OX=1322246 GN=folE PE=3 SV=1
MEDVQKHQAAIAMPIDRVGVKGLKLPIIVRDRESGIQHTVAEVSLSVDLPAEFKGTHMSRFIEALEHWSGELDYNSFRSLLDDIVVRLQARSAHVRFVFPFFLRRNSPVSGANGLMDYTCRVDGMLKEGKLTFTLGADVPVMTVCPCSKAISNEGAHSQRAEVRIRTRFNGFVWLEDLIEIGERSGSCQVYSLLKREDEKYVTETAFANPTFVEDVVREAAKGLAEHEQIHWYKVEVESFESIHNHSAFAVIESASLA

SEQ ID NO: 13172 - protein, 256 aa, Pseudodesulfovibrio profundus
  misc_feature (1)..(256): tr|A0A2C8F562|A0A2C8F562_9DELT GTP cyclohydrolase FolE2 OS=Pseudodesulfovibrio profundus OX=57320 GN=folE PE=3 SV=1
MEDVQKHQAAIAMPIDRVGVKGLRLPIIVRDRESGIQHTVAQVSLSVDLPAEFKGTHMSRFIEALEHWSGELDYHSFRTLLDDVVVRLQARSAHVRFVFPFFLRRPSPKSGANGLMDYTCRVDGYLKEGKLRFTLGADVPVMTVCPCSKAISEEGAHSQRAEVRIRTRFDGFVWLEDLIEIAEKSGSCQVYSLLKREDEKFVTEAAFANPTFVEDVVREAAKGLDEHEQINWYKVEVESFESIHNHSAFAIIEGGE

SEQ ID NO: 13173 - protein, 257 aa, Pseudodesulfovibrio sp.
  misc_feature (1)..(257): tr|A0A443YTJ3|A0A443YTJ3_9DELT GTP cyclohydrolase FolE2 OS=Pseudodesulfovibrio sp. S3 OX=2283629 GN=folE2 PE=3 SV=1
MEDVQKHQAAIAMPIDRVGVKGLRLPIIVRDRESGVQHTVAQVSLSVDLPAEFKGTHMSRFVEALEHWSGDLDYASFRTLLDDVVVRLQARSAHVRFVFPYFLRRRSPVSKANGLMDYTCRVDGYLKNGRLTFTLGADVPVMTVCPCSKAISEEGAHSQRAEVRIRTRFDGFVWLEDLIEIGERSGSSQVYSLLKREDEKFVTETSFANPTFVEDVVREAAKGLSEHPKINWYKVEVESFESIHNHSAFAIIESHPD

SEQ ID NO: 13174 - protein, 198 aa, Pseudoflavitalea sp.
  misc_feature (1)..(198): tr|A0A3B7N713|A0A3B7N713_9BACT GTP cyclohydrolase 1 OS= Pseudoflavitalea sp. 5GH32-13 OX=2315862 GN=folE PE=3 S V=1
MAYTRSEEYDEKITSGLIETYRSALSLLGEDPNREGLTKTPERMAKAMQFLTQGYSLDAHAILNSAKFHENVSEMIIVKDIELYSMCEHHMLPFYGKAHVAYIPNGYITGLSKIARVVDVFARRLQVQERLTTQIRDAIKDTLRPLGVAVVIEASHLCMMMRGVQKQNSVTTTSAFWGEFEKNETRSEFTKLISSDLH

SEQ ID NO: 13175 - protein, 197 aa, Pseudofulvimonas gallinarii
  misc_feature (1)..(197): tr|A0A4R3LBP7|A0A4R3LBP7_9GAMM GTP cyclohydrolase 1 OS= Pseudofulvimonas gallinarii OX=634155 GN=folE PE=3 SV=1
MSQPDSPVTREQAEDAVRTLLRWAGDDPTREGLLDTPKRVVKAYSDWFSGYSEDAEGFLRRTFEEVEGYDEMIILRDIAFESHCEHHMAPIIGRAHVGYLPTNKVVGISKLARVVEAFARRFQVQEKLTAQIAHCIDDVLKPRGVGVVIEAAHECMTTRGVHKRGVSMVTSQMLGSFRDDPSTRNEFLAFIDLRGRR

SEQ ID NO: 13176 - protein, 315 aa, Pseudofulvimonas gallinarii
  misc_feature (1)..(315): tr|A0A4R3LNS0|A0A4R3LNS0_9GAMM GTP cyclohydrolase FolE2 OS=Pseudofulvimonas gallinarii OX=634155 GN=folE2 PE=3 SV=1
MSNSARSLPDVAYVAQPGLSGRLDWVGMDDIQAPVMLVGEDDQPMRFPARVGAFVDLARPDQRGIHMSRLYLHVDQALSTQAVKPALLRTLLDGFLASHRDLSSRALLRIRFDYLVRRRALVSDNAGWKSYPVVLTAKLEGGRFDLELGLEVLYSSTCPASAALARQLIQQRFRADFSTQDLLAREQVAEWLGSEQGICATPHSQRSSAEVKVRLREDVESLPFVDLIDCIESALQTPVQTAVKREDEQAFAGLNGGNLMFCEDAARRMQSALDRDARITDFWLRASHFESLHPHNAVAVASKGVPGGYLGGSTV

SEQ ID NO: 13177 - protein, 199 aa, Pseudoglutamicibacter albus
  misc_feature (1)..(199): tr|A0A2I1J8R5|A0A2I1J8R5_9MICC GTP cyclohydrolase 1 OS= Pseudoglutamicibacter albus OX=98671 GN=folE PE=3 SV=1
MVENSDAVAGQVDQPRIERAVREILLAVGEDPDRDGLVDTPARVARAYAEVFSGLHMDPAELLSTTFDIDHSEMVLVKDIPFYSTCEHHLVPFHGRAHIGYIPGVSGKVTGLSKLARLVDLFARRPQVQERLTTQIVEALEEHLQPCGAIVVIEAEHLCMSMRGVRKPGSTTTTSAVRGQLREPATRAEAMGLIMGHGR

SEQ ID NO: 13178 - protein, 204 aa, Pseudoglutamicibacter cumminsii
  misc_feature (1)..(204): tr|A0A2U3AU63|A0A2U3AU63_9MICC GTP cyclohydrolase 1 OS= Pseudoglutamicibacter cumminsii OX=156979 GN=folE PE=3 SV=1
MGENSDAVAGQVDQSQVDQPRIERAVREILLAVGEDPDRDGLVDTPARVARAYAEVFSGLHMDPAELLSTTFDIDHSEMVLVKNIPFYSTCEHHLVPFHGRAHIGYIPGVSGKVTGLSKLARLVDLFARRPQVQERLTTQIVEALEEHLQPCGAIVVIEAEHLCMSMRGVRKPGSTTTTSAVRGQLREPATRAEAMGLIMGHGR

SEQ ID NO: 13179 - protein, 310 aa, Pseudogracilibacillus auburnensis
  misc_feature (1)..(310): tr|A0A2V3VU12|A0A2V3VU12_9BACI GTP cyclohydrolase FolE2 OS=Pseudogracilibacillus auburnensis OX=1494959 GN=fol E2 PE=3 SV=1
MSKVKTSSYIDLPNKKERHKLFGSVEPGRKTKPTIKEEMADLQNSKEDFLFAINAVGISNVKYPIVVSSRLNPTTQTTIGTFKLTANVERTSKGTNMSRFLEEIEQSDDDNGFQIDFGSLTQFAKNLQKRLKQENVSIEVSFPWFYERRGPSSDKRGLNYADVTLQIDYFDDETIHFSATLSALITTLCPCSKEISEYSAHSQRGRVTMEVTFTNDYTDDTTIDWKEALLHAAESNASAMIHPVLKRPDEKFVTETAYENPRFVEDIVRLVAADLYELPFIQKFTVTCENEESIHMHDAIATIHYTKENE

SEQ ID NO: 13180 - protein, 206 aa, Pseudogulbenkiania ferrooxidans
  misc_feature (1)..(206): tr|U0Z6J2|U0Z6J2_9NEIS GTP cyclohydrolase 1 OS=Pseudogu lbenkiania ferrooxidans EGD-HP2 OX=1388764 GN=O166_1489 0 PE=3 SV=1
MSFIDDHDHSACQRPLDRVRPFDAAAFEKAVADMLTASGIAIDPIHTGKTAQRVRELWQKRLLDGYDTVPAEALGCGFADDRRDMVVIRSLAVHGMCPHHLLPFRGVAHVAYLPGGRLHGFGRIARMVDAISHRYTYQEWITHEISRTLVEHGGARGAACLIEAEQLCLLMGENRRGDERVITQCYAGDFETDANARNEFLRAIER

SEQ ID NO: 13181 - protein, 264 aa, Pseudogulbenkiania ferrooxidans
  misc_feature (1)..(264): tr|B9Z580|B9Z580_9NEIS GTP cyclohydrolase FolE2 OS=Pseu dogulbenkiania ferrooxidans 2002 OX=279714 GN=folE2 PE= 3 SV=1
MNQTTIPDVQSSHDSRNIPINKVGIKSIRHPIKVAERDNGVQHTIGLFNMYVHLPAHFKGTHMSRFVEILNQHEREISVASFEQIVREMVQRLEAVSGYVEMSFPYFVNKTAPVSGVQSLLDYEVTYVGELRDGEYHFTMKVVVPVTSLCPCSKKISQYGAHNQRSHVTLTASTHEHVWIEELIDIAEDQASCELYGLLKRPDEKFVTERAYENPKFVEDMVRDVAAAMDRDERIHAYVVESENFESIHNHSAYALIERDKRQG

SEQ ID NO: 13182 - protein, 264 aa, Pseudogulbenkiania sp.; identical to SEQ ID NO: 13181
  misc_feature (1)..(264): tr|G2IVM5|G2IVM5_PSEUL GTP cyclohydrolase FolE2 OS=Pseu dogulbenkiania sp. (strain NH8B) OX=748280 GN=folE2 PE= 3 SV=1

SEQ ID NO: 13183 - protein, 264 aa, Pseudogulbenkiania subflava
  misc_feature (1)..(264): tr|A0A1Y6BII7|A0A1Y6BII7_9NEIS GTP cyclohydrolase FolE2 OS=Pseudogulbenkiania subflava DSM 22618 OX=1123014 GN =folE2 PE=3 SV=1
MNQTAIPDVQSSHDSRNIPINKVGIKSIRHPIKVAERDNGVQHTVGLFNMYVHLPAHFKGTHMSRFVEILNQHEREISVSSFESIVREMVQRLEAVSGYVEMTFPYFVNKTAPVSGVQSLLDYEVTYVGELRDGEYHFTMKVVVPVTSLCPCSKKISQYGAHNQRSHVTLTASTHEHVWIEELIDIAEDQASCELYGLLKRPDEKFVTERAYENPKFVEDMVRDVAAAMDRDERIHAYVVESENFESIHNHSAYALIERDKRQG

SEQ ID NO: 13184 - protein, 226 aa, Pseudohaliea rubra
  misc_feature (1)..(226): tr|A0A095VSW2|A0A095VSW2_9GAMM GTP cyclohydrolase 1 OS= Pseudohaliea rubra DSM 19751 OX=1265313 GN=folE PE=3 SV =1
MEATALNPRAHADHDLSAEAIAVRTALENAGLETPMVPTGLSRDEKYARLRAAFTDVAKTLGLDLADDSLAETPHRIAKMYLDESFSGLDYRSFPSISVIENKMQVDEIVRVDAIELTSTCEHHFVTIDGSARVAYLPRERVIGLSKINRVVRFFARRPQVQERLTRQVLVALQTLLDTPDVAVSINAVHYCVKSRGVMDGTSSTHTTAMDGAFRQDPALRAEFLR

SEQ ID NO: 13185 - protein, 182 aa, Pseudohaliea rubra
  misc_feature (1)..(182): tr|A0A095VQQ6|A0A095VQQ6_9GAMM GTP cyclohydrolase 1 OS= Pseudohaliea rubra DSM 19751 OX=1265313 GN=folE PE=3 SV =1
MKAHWAAIIEDMGEDLERPGLKDTPERAAKAYQFLTRGYHQSVAEVVNDALFPSESSEMVVVQDIELYSLCEHHILPFIGKCHVGYIPTGQVLGLSKIARIVDIFARRLQIQESLTTEIAETIMAVTDAAGVGVIIEAQHMCMMMRGVEKQNSVMKTSSMLGSFREDLKTRDEFLGLLRLRH

SEQ ID NO: 13186 - protein, 205 aa, Pseudohoeflea suaedae
  misc_feature (1)..(205): tr|A0A4R5PRF6|A0A4R5PRF6_9RHIZ GTP cyclohydrolase 1 OS= Pseudohoeflea suaedae OX=877384 GN=folE PE=3 SV=1
MDAFAKRNDKLQSDIERPSRQEAEDAVRTLLRFIGEDVDREGLLDTPKRVVKAYSEMFGGYDKDPEDALGRTFEEVAGYDDIVLVRDIPFHSHCEHHMVPIIGKAHVAYLPDGKVLGLSKIARVVDIFANRLQTQEALTAQVAHAIHNTLRPLGVAVMIEAEHMCMAMRGIRKQGSTTLTTTFTGQFKGDAAAQARFISMIRDRG

SEQ ID NO: 13187 - protein, 182 aa, Pseudohongiella acticola
  misc_feature (1)..(182): tr|A0A1E8CGG2|A0A1E8CGG2_9GAMM GTP cyclohydrolase 1 OS= Pseudohongiella acticola OX=1524254 GN=folE PE=3 SV=1
MTIESAYSEIISAIGEDLSRPGLRDTPLRAAKAIQFLTRGYQQDIDDVINNAMFPSDSEEMVIVKNIELYSMCEHHMLPFIGKCHVAYLPKGKVIGLSKIARIVDVFARRLQIQENLTKEIAEVIIHKTGAAGAAVIIEAQHMCMMMRGVEKQNSVMTTSCMLGAFRSSQNTRNEFLSLIQR

SEQ ID NO: 13188 - protein, 41 aa, Pseudohongiella sp.
  misc_feature (1)..(41): tr|A0A355VA36|A0A355VA36_9GAMM GTP cyclohydrolase I Fol E (Fragment) OS=Pseudohongiella sp. OX=1979412 GN=DD407 _09535 PE=4 SV=1
HMCMMMRGVEKQNSVMTTSCMLGGFRTSQSTRNEFLSLVHR

SEQ ID NO: 13189 - protein, 188 aa, Pseudohongiella sp.
  misc_feature (1)..(188): tr|A0A2D9DQ84|A0A2D9DQ84_9GAMM GTP cyclohydrolase 1 OS= Pseudohongiella sp. OX=1979412 GN=folE PE=3 SV=1
MSKAPLENMEQAFRDIIQSIGEDLNRDGLRDTPLRAAKAMQFLTRGYQQNIDEVINNALFPSSSEEMVIVKNIELYSMCEHHMLPFIGKCHVAYLPKGKVIGLSKIARIVDMYARRLQIQENLTKEIAEVIIQKTGAAGAAVIIEAQHMCMMMRGVEKQNSVMTTSCMLGGFRNSQSTRNEFLSLVHR

SEQ ID NO: 13190 - protein, 194 aa, Pseudohongiella spirulinae
  misc_feature (1)..(194): tr|A0A0S2KDW3|A0A0S2KDW3_9GAMM GTP cyclohydrolase 1 OS= Pseudohongiella spirulinae OX=1249552 GN=folE PE=3 SV=1
MSKTPLQPADKLSGMTQAYREIIADIGENLNRPGLVDTPLRAAKAMQFLTRGYQQNIDEVINNAMFPSSSEEMVIVKNIELYSMCEHHMLPFIGKCHVAYLPKGKVIGLSKIARIVDMFARRLQIQENLTKEIAEVIIEKTGAAGAGVIIEAQHMCMMMRGVEKQNSVMTTSCMLGAFRNSQSTRNEFLSLIQR

SEQ ID NO: 13191 - protein, 210 aa, Pseudokineococcus lusitanus
  misc_feature (1)..(210): tr|A0A3N1HLS0|A0A3N1HLS0_9ACTN GTP cyclohydrolase 1 OS= Pseudokineococcus lusitanus OX=763993 GN=folE PE=3 SV=1
MGAGAPSRIGPLETAALTGPSSRPFDAARAEAAVRELLIAVGEDPDRDGLLDTPARVARMYAEVLGGLREDPAEVLRTSFDLGHDELVLVRDIEVYSLCEHHLVPFHGVAHVGYVPAADGRITGLSKLARLVDVFARRPQVQERLTSQVADALVEHLQPRGVIVVVECEHLCMSMRGVRKTGARTVTSAMRGQLRDPATRAEALALLHGR

SEQ ID NO: 13192 - protein, 217 aa, Pseudolabrys sp.
  misc_feature (1)..(217): tr|A0A0Q7TKB1|A0A0Q7TKB1_9RHIZ GTP cyclohydrolase 1 OS= Pseudolabrys sp. Root1462 OX=1736466 GN=folE PE=3 SV=1
MDAKSKIVKPWDKQGLSDHVSAAPTPAGPRPSREEAEAAVRVLIAYAGDDAKREGVLDTPKRVVDAYEELFQGYRECPAEALDRTFSETSGYDDFVLVKDITFNSHCEHHMMPFFGKAHVAYKPTERVVGLSKLARLVDVYAKRLQTQENMTAQIATALEEVLKPKGVAVMIEAEHTCMSLRGVTKPGSMTLTTHFSGTFRDDPNELVRFMSLVREK

SEQ ID NO: 13193 - protein, 216 aa, Pseudolabrys sp.
  misc_feature (1)..(216): tr|A0A371BCQ6|A0A371BCQ6_9RHIZ GTP cyclohydrolase 1 OS= Pseudolabrys sp. GY_H OX=2292256 GN=folE PE=3 SV=1
MDAKNTVIKPWQQGLSDHVRTAPAASAPRPSREEAEAAVRTLIAYAGDDATREGVLDTPKRVVDAYDELFQGYREVPADSLDRTFSETSGYNDFVLVKDIPFNSHCEHHMMPFFGLAHIAYKPTDRVVGLSKLARLVDTYAKRLQTQENMTAQIATALEEVMKPKGVAVMLEAEHTCMTMRGVAKPGSLTMTTHFSGTFRDDPNELVRFMSLLRGK

SEQ ID NO: 13194 - protein, 219 aa, Pseudolabrys taiwanensis
  misc_feature (1)..(219): tr|A0A345ZRD7|A0A345ZRD7_9RHIZ GTP cyclohydrolase 1 OS= Pseudolabrys taiwanensis OX=331696 GN=folE PE=3 SV=1
MDAKNANVKAWPLQGLSDHVRAAPTPAVPRPAREEAEAAVRTLLAYIGDDPNREGLLDTPKRVIGAFDELYQGYRECPAEVLDRTFGETAGYDDFVLVKDISFNSHCEHHMMPFTGRAHIAYMPVERVVGLSKLGRLVDVYAKRLQTQEHMTSQIATAINEILKPRGVAVLIEAEHTCMAHRGVAKQGATTVTTHFTGVFRDDPKELVRFMTMLRGAHG

SEQ ID NO: 13195 - protein, 185 aa, Pseudomonadaceae bacterium
  misc_feature (1)..(185): tr|A0A3T0SGS1|A0A3T0SGS1_9GAMM GTP cyclohydrolase 1 OS= Pseudomonadaceae bacterium SI-3 OX=2079806 GN=folE PE=3 SV=1
MNELPGHFHQILLGVGEDPQREGLLDTPKRAAKAMQYLCNGYGKSLEEVVNGALFASDSDEMIIVRDIELYSLCEHHMLPFIGKAHVAYIPTGKVLGLSKIARIVDMYARRLQIQENLTRQIAEAIQEVTRAAGVAVVIEAKHMCMMMRGVEKQNSLMNTSVMLGAFRESCTTRMEFLQLIGGNR

SEQ ID NO: 13196 - protein, 186 aa, Pseudomonadaceae bacterium
  misc_feature (1)..(186): tr|A0A2D5CFA7|A0A2D5CFA7_9GAMM GTP cyclohydrolase 1 OS= Pseudomonadaceae bacterium OX=1914538 GN=folE PE=3 SV=1
MTDLLTGNYREILLGVGENPEREGLLDTPKRAAKAMQYLCHGYQQSLEEVVNGALFASDNDEMVIVKDVELYSLCEHHLLPFIGKAHVAYIPTGKVLGLSKIARIVDMYARRLQIQENLTRQIAEAIQQVTNAAGVAVVIEAKHMCMMMRGVEKQNSVMNTSVMLGAFRESCNTRHEFLQLIGRSN

SEQ ID NO: 13197 - protein, 181 aa, Pseudomonadales bacterium
  misc_feature (1)..(181): tr|A0A1G3D4I2|A0A1G3D4I2_9GAMM GTP cyclohydrolase 1 OS= Pseudomonadales bacterium GWC2_63_15 OX=1817754 GN=folE PE=3 SV=1
MSLEQHYTAILGQLGEDVSREGLLDTPKRAAKAMQYLCKGYQQTLEEVTNGALFTSDNSEMVLVKNIELYSLCEHHMLPFIGKAHVAYLPNGKVLGLSKVARIVDMYARRLQIQENLTREIAEAMQQVTGASGVAVVIEAQHMCMMMRGVEKQNSSMVTSVMLGQFRDNAATRSEFLGLVK

SEQ ID NO: 13198 - protein, 187 aa, Pseudomonadales bacterium
  misc_feature (1)..(187): tr|A0A2D6QQR6|A0A2D6QQR6_9GAMM GTP cyclohydrolase 1 OS= Pseudomonadales bacterium OX=1891229 GN=folE PE=3 SV=1
MSLENLTNNYREILTNLGEQPQRDGLKGTPERAAKAMQFLCRGYTQSLDEIVNGALFDSDNDEMVIVKDIELYSLCEHHMLPFIGKAHVAYIPTGKVIGLSKVARIVDMFARRLQIQENLTRQIAEAIQQVTNAAGVAVVIEAKHMCMMMRGVEKQNSSMHSSVMLGAFRESVNTRQEFLQLISRSN

SEQ ID NO: 13199 - protein, 181 aa, Pseudomonas abietaniphila
  misc_feature (1)..(181): tr|A0A1G8IPN3|A0A1G8IPN3_9PSED GTP cyclohydrolase 1 OS= Pseudomonas abietaniphila OX=89065 GN=folE PE=3 SV=1
MTLEQNYTAILGQLGEDVSREGLLDTPKRAAKAMKYLCRGYEQTLEEVTNGALFSSDNSEMVVVKNIELYSLCEHHLLPFIGKAHVAYIPSGKVLGLSKVARIVDMFARRLQIQENLSRQIAEAIQQVTGALGVAVVIEAQHMCMMMRGVEKQNSSMITSVMLGEFRENAATRTEFLSLIK

SEQ ID NO: 13200 - protein, 186 aa, Pseudomonas abietaniphila
  misc_feature (1)..(186): tr|A0A1G8F5V8|A0A1G8F5V8_9PSED GTP cyclohydrolase 1 OS= Pseudomonas abietaniphila OX=89065 GN=folE PE=3 SV=1
MTLSLPQHYREILVGLGEDPEREGLLDTPKRAAKAMQYLCHGYDQTLEEIVNGALFASDNDEMVIVKDIELYSLCEHHLLPFIGKAHVAYIPTGKVLGLSKIARIVDMFARRLQIQENLTRQIADAIQGVTSAAGVAVVIEAQHMCMMMRGVEKQNSTMNTSVMLGAFRESTTTRMEFLQLIGRSK

SEQ ID NO: 13201 - protein, 187 aa, Pseudomonas abyssi; identical to SEQ ID NO: 13198
  misc_feature (1)..(187): tr|A0A2A3MNG4|A0A2A3MNG4_9PSED GTP cyclohydrolase 1 OS= Pseudomonas abyssi OX=170540 GN=folE PE=3 SV=1

SEQ ID NO: 13202 - protein, 299 aa, Pseudomonas abyssi
  misc_feature (1)..(299): tr|A0A2A3MFS8|A0A2A3MFS8_9PSED GTP cyclohydrolase FolE2 OS=Pseudomonas abyssi OX=170540 GN=folE2 PE=3 SV=1
MSSLTLPDVSLTDTAATPGALQWVGMQGIDLPLSLARDQVQVHARADVQVDLPDPAIKGVHMSRLYRLLERLVPPAVLTPARIRTALQDMVDSQADCRSTRARIGLHFDLLCRRPALLSPDLAGWKRYPVQLDASLQQGQFSLEVQVQIGYASTCPCSAALARQRVAEGFAQAFADGEAPTPAAVSDWLARHASLATPHSQRSEAQVTVALDASDAELPLLALIDQVEAALGTPLQTAVKRADEQAFAELNGQNLMFVEDAARRIQAALQKGQWREPRAQVCHMESLHPHDAVAWAGGV

SEQ ID NO: 13203 - protein, 220 aa, Pseudomonas acidophila
  misc_feature (1)..(220): tr|A0A2A4EU40|A0A2A4EU40_9PSED GTP cyclohydrolase 1 OS= Pseudomonas acidophila OX=1912599 GN=folE PE=3 SV=1
MNSKTGKVRAIRTTAKTKSVEAPVRPTREEAEAAVRTLLRWAGDDPQREGLLDTPARVVRSYEEFFAGYSVDPREILARTFSEVDGYDEMIVLKDIRFESYCEHHMVPIIGRAHVAYLPGHRVVGISKLARLVDAFAKRLQIQEKMTAQIADTLNEVLQPRGVGVILEASHQCMSTRGVHKAGVAMVTSRMLGAFRSDPSTRREFLSIVNAPPSVGIANT

SEQ ID NO: 13204 - protein, 268 aa, Pseudomonas acidophila
  misc_feature (1)..(268): tr|A0A2A4EPX2|A0A2A4EPX2_9PSED GTP cyclohydrolase FolE2 OS=Pseudomonas acidophila OX=1912599 GN=folE2 PE=3 SV= 1
MNQMNPAFVMPDVQSTLDTRQIPIQRVGVKAVRHPVIVRTQTGEAQPTVGTWNLDVHLPADQKGTHMSRFVALLEENRVPLDTTAFRTMLASMLEKLEAEAGRIEVSFPYFVSKVAPVSGVQSLLDYEVTLTGETRHGVTRVFLKVLVPVTSLCPCSKKISQYGAHNQRSHVTIDAELAGDVAVEELIRIAEEEASCELWGLLKRPDEKFVTERAYENPKFVEDLVRDVAQRLNADERIVAYVLEAENFESIHNHSAYALIEHDKRVR

SEQ ID NO: 13205 - protein, 298 aa, Pseudomonas aeruginosa
  misc_feature (1)..(298): sp|B7V776|GCH4_PSEA8 GTP cyclohydrolase FolE2 OS=Pseudo monas aeruginosa (strain LESB58) OX=557722 GN=folE2 PE= 3 SV=1
MNALTLPDIARQTTTADLPLDWVGMQGIALPVQIGGQRVAAEADAGVSLDDPQARGIHMSRLYLALAELEQGELDLSCLRAVLQRFLDSHAGLSRRAYLRLRLAPLLRRPALVSPLSGWKRYPLVLDTRLEGDDFQAEVHLELTYSSTCPCSAALARQLIQERFDQDFAGQPLDHASVLAWLGSSAGIVATPHSQRSSAHLRIGLAEDCIGLPLEELADLGESALGTAVQTAVKRADEQAFALANGQNLMFCEDAVRRLHRALQGYPQASRFSIRVVHAESLHAHDAVAESHWQRGAA

SEQ ID NO: 13206 - protein, 181 aa, Pseudomonas aeruginosa
  misc_feature (1)..(181): tr|A6V7B7|A6V7B7_PSEA7 GTP cyclohydrolase 1 OS=Pseudomo nas aeruginosa (strain PA7) OX=381754 GN=folE1 PE=3 SV= 1
MSLEQHYSSILTQLGEDVNREGLLDTPKRAAKAMKYLCRGYEQSLEEVVNGALFSSDNSEMVLVKDIELYSLCEHHLLPFIGKAHVAYIPNGKVLGLSKVARIVDMYARRLQIQENMSRQIAEAVQQVTGALGVAVVIQAQHMCMMMRGVEKQNSSMVTSVMLGEFRDNAATRSEFLSLIR

SEQ ID NO: 13207 - protein, 187 aa, Pseudomonas aestusnigri
  misc_feature (1)..(187): tr|A0A1H5S526|A0A1H5S526_9PSED GTP cyclohydrolase 1 OS= Pseudomonas aestusnigri OX=857252 GN=folE PE=3 SV=1
MSLEKLTKNYLDVLTNLGEQPERDGLKGTPERAAKAMQFLCHGYNQSLDEIVNGALFDSDNDEMVIVKDIELYSLCEHHMLPFIGKAHVAYIPTGKVIGLSKVARIVDMFARRLQIQENLTRQIAEAVQQVTNAKGVAVVIEAKHMCMMMRGVEKQNSSMHSSVMLGAFRESVNTRQEFLQLISRSN

SEQ ID NO: 13208 - protein, 301 aa, Pseudomonas aestusnigri
  misc_feature (1)..(301): tr|A0A1H6C1I7|A0A1H6C1I7_9PSED GTP cyclohydrolase FolE2 OS=Pseudomonas aestusnigri OX=857252 GN=folE2 PE=3 SV= 1
MTAALPDVSLTDLSADPAALDWVGMQGIDLPITLNETGQRQTVHARADLQVDLPRPEVKGIHMSRLYTLLDRLGQDRALAPTVLQALLQAMVESHADCGSRNARLVLQFSLLCRRPALVTPQLSGWKAYPVKLEATLVDGCFRARVELTVSYSSTCPCSAALSRQLLVSAFDRAFAGQQRLDPVAVSQWLGRNGSLATPHSQRSEARVAVDLNAAAEGLGLLVLIDRIEQALATPVQTAVKRADEQAFAALNGVNLMFVEDAARRLGAALSAAGAQHAAVHVRHIESLHPHDAVASVGAHP

SEQ ID NO: 13209 - protein, 181 aa, Pseudomonas agarici
  misc_feature (1)..(181): tr|A0A0X1SZN2|A0A0X1SZN2_PSEAA GTP cyclohydrolase 1 OS= Pseudomonas agarici OX=46677 GN=folE PE=3 SV=1
MSLEQNYTAILGQLGEDVSREGLLDTPKRAAKAMQYLCRGYEQTLEEVTNGALFSSDNSEMVLVKDIELYSLCEHHLLPFIGKAHVAYIPSGKVLGLSKVARIVDMYARRLQIQENLSRQIADAVQQVTGALGVAVVIEAQHMCMMMRGVEKQNSSMITSVMLGEFRENAATRSEFLALIK

SEQ ID NO: 13210 - protein, 186 aa, Pseudomonas agarici
  misc_feature (1)..(186): tr|A0A0X1SX13|A0A0X1SX13_PSEAA GTP cyclohydrolase 1 OS= Pseudomonas agarici OX=46677 GN=folE PE=3 SV=1
MSATLPEHYREILLGLGEDPDREGLLDTPKRAAKAMQYLCHGYSVNLDEVVNGALFASDNDEMVIVKDIELYSLCEHHLLPFIGRAHVAYIPTGKVLGLSKIVRIVDMFARRLQIQENLTREIADAIQQVTSAPGVAVVIEAQHMCMMMRGVEKQNSTMNTSVMLGALRDSNTTRMEFLQLIGRSK

SEQ ID NO: 13211 - protein, 186 aa, Pseudomonas alcaligenes
  misc_feature (1)..(186): tr|A0A142IUC1|A0A142IUC1_PSEAC GTP cyclohydrolase 1 OS= Pseudomonas alcaligenes OX=43263 GN=folE PE=3 SV=1
MNTQLPHHYREILVGLGENPEREGLLDTPKRAAKAMQYLCHGYQQSLEEIVNGALFASDNDEMVIVKDIELYSLCEHHLLPFIGKAHVAYIPTGKVLGLSKVARIVDMYARRLQIQENLTKQIADAIQQVTNAAGVAVVIEAKHMCMMMRGVEKQNSVMSSSVMLGAFRESCNTRHEFLQLIGRNK

SEQ ID NO: 13212 - protein, 182 aa, Pseudomonas alcaligenes
  misc_feature (1)..(182): tr|A0A1N6WXH8|A0A1N6WXH8_PSEAC GTP cyclohydrolase 1 OS= Pseudomonas alcaligenes OX=43263 GN=folE PE=3 SV=1
MSLEQQYTAILGQLGEDVSREGLLDTPKRAAKAMQYLCKGYQQTLEEVTNGALFSSDNSEMVLVKNIELYSLCEHHLLPFIGKAHVAYIPSGKVLGLSKVARIVDMYARRLQIQENLSRQIAEAVQQVTGALGVAVVIEAQHMCMMMRGVEKQNSSMVTSVMLGEFRENAATRSEFLNLIRD

SEQ ID NO: 13213 - protein, 181 aa, Pseudomonas alcaliphila
  misc_feature (1)..(181): tr|A0A1G7IW14|A0A1G7IW14_9PSED GTP cyclohydrolase 1 OS= Pseudomonas alcaliphila OX=101564 GN=folE PE=3 SV=1
MSLEQQYTAILGQLGEDVSREGLLDTPKRAAKAMQYLCRGYQQTLEEVTNGALFSSDNSEMVLVKNIELYSLCEHHLLPFIGKAHVAYIPNGKVLGLSKVARIVDMYARRLQIQENLSRQIAEAVEQVTGALGVAVVIEAQHMCMMMRGVEKQNSSMVTSVMLGEFRSNPATRGEFLNLVR

SEQ ID NO: 13214 - protein, 296 aa, Pseudomonas alcaliphila
  misc_feature (1)..(296): tr|A0A1L7G6F2|A0A1L7G6F2_9PSED GTP cyclohydrolase FolE2 OS=Pseudomonas alcaliphila JAB1 OX=741155 GN=folE2 PE= 3 SV=1
MNEQPLPDIAAQATHHDLPLDWVGMAGIALPLRLADAAVTACVDIGVSLDDAGARGIHMSRLYLAAQRLVHQPLNVPAVLQVLDDCLSSHQELSDSATLTLRGEVPLKRPALVSPLHGWKTYPFELHARQDGRGVNIELQVEVSYSSTCPCSAALARQLIQQRFAWDFPDQQVDYSSVLDWLGSTQGIVATPHSQRSTATLQLRLAPGCIELPVLELIDSAEQALGTPVQTAVKRADEQAFALANGQNLMFCEDAARRLHRALRQLPQASAFRLKVVHAESLHAHDAVAESSWNWC

SEQ ID NO: 13215 - protein, 295 aa, Pseudomonas alkylphenolica
  misc_feature (1)..(295): tr|A0A443ZZI5|A0A443ZZI5_9PSED GTP cyclohydrolase FolE2 OS=Pseudomonas alkylphenolica OX=237609 GN=folE2 PE=3 SV=1
MTALTLPDIAAQATQSSLPLNWVGMCNIALPVQFDGSRLRASADAGVDLDDGNSRGIHMSRLYLALEVFEQQPLTPQLIHQVLGTFLESHAGLSTGAYLQLRFELMLKRPALISPLAGWKAYPVTLSAQLKDEVFHVELNVQLDYSSTCPCSAALARQLIQQQFLADFSDRGLNHEAVFNWLGSAEGVVATPHSQRSSAQLQVRLKEGMNELPIKALIDQAEAALGTAVQTAVKRTDEQAFALANGQNLMFCEDAARRLHRALQQLPWLTGFTLRVEHAESLHAHDAVAHSQWYW

SEQ ID NO: 13216 - protein, 295 aa, Pseudomonas alkylphenolica
  misc_feature (1)..(295): tr|A0A077FIP5|A0A077FIP5_9PSED GTP cyclohydrolase FolE2 OS=Pseudomonas alkylphenolica OX=237609 GN=folE2 PE=3 SV=1
MTALTLPDIAAQAIHTSLPLDWVGMCNIALPVLFDGSTLRASADAGVSLDDGSSRGIHMSRLYLALEVFEQQPLTPLLIHQVLDTFLESHAGISAGAYLNLHFELMLKRPALISPLAGWKAYPVSLSAQLKDEVFHVELKVQLDYSSTCPCSAALARQLIQQQFLTDFGNRSLSHEAVLDWLGSAQGVVATPHSQRSVAQLQIRLKQGVSELPIKALIDQAETALGTAVQTAVKRADEQAFALANGQNLMFCEDAARRLHLALQHLTWLSGFSLRVEHAESLHAHDAVAHSQWHW

SEQ ID NO: 13217 - protein, 187 aa, Pseudomonas amygdali
  misc_feature (1)..(187): tr|A0A2S4IJD6|A0A2S4IJD6_PSEA0 GTP cyclohydrolase 1 OS= Pseudomonas amygdali pv. morsprunorum OX=129138 GN=folE PE=3 SV=1
MSSSLPQHYRDILLELGENPDREGLLDTPKRASKAMQYLCHGYTQTVEEIVNGALFASDNDEMVIVQNIELYSLCEHHLLPFIGKAHVAYIPTGKVVGLSKIARIVDMFARRLQIQENLTKQIADAIQEVTGAAGVAVVIEAQHMCMMMRGVEKQNSTMNTSVMLGAFRESSTTRMEFLQLIGRSRT

SEQ ID NO: 13218 - protein, 187 aa, Pseudomonas amygdali
  misc_feature (1)..(187): tr|A0A0P9UEN8|A0A0P9UEN8_PSEA0 GTP cyclohydrolase 1 OS= Pseudomonas amygdali pv. hibisci OX=251723 GN=folE PE=3 SV=1
MSSSLPQHYRDILLGLGEDPDREGLLDTPKRASKAMQYLCHGYTQSVAEIVNGALFASDNDEMVIVQNIELYSLCEHHLLPFIGKAHVAYIPTGKVLGLSKIARIVDMFARRLQIQENLTKQIADAIQQVTGAAGVAVVIEAKHMCMMMRGVEKQNSTMNTSVMLGAFRDSSTTRMEFLQLIGRSRQ

SEQ ID NO: 13219 - protein, 186 aa, Pseudomonas anguilliseptica
  misc_feature (1)..(186): tr|A0A1H4NII3|A0A1H4NII3_PSEAG GTP cyclohydrolase 1 OS= Pseudomonas anguilliseptica OX=53406 GN=folE PE=3 SV=1
MTPELPNHYREILLGVGENPEREGLLDTPKRAAKAMQYLCNGYHKSLEDVVNGALFESDNDEMVIVRDIELYSLCEHHMLPFIGKAHVAYIPTGKVLGLSKVARIVDMFARRLQIQENLTKQIADAIQQVTNAAGVAVVIEAKHMCMMMRGVEKQNSVMTSSVMLGAFRESCNTRHEFLQLIGRSK

SEQ ID NO: 13220 - protein, 182 aa, Pseudomonas anguilliseptica
  misc_feature (1)..(182): tr|A0A1H5EQ94|A0A1H5EQ94_PSEAG GTP cyclohydrolase 1 OS= Pseudomonas anguilliseptica OX=53406 GN=folE PE=3 SV=1
MSLEQNYTAILGQLGEDVSREGLLDTPKRAAKAMQYLCKGYQQTLEEVTNGALFSSDNSEMVLVKNIELYSLCEHHLLPFIGKAHVAYIPNGKVLGLSKVARIVDMYTRRLQIQENLSRQIAEAIQQVTGALGVAVVIEAQHMCMMMRGVEKQNSSMVTSVMLGEFRENAATRSEFLSLVNS

SEQ ID NO: 13221 - protein, 186 aa, Pseudomonas antarctica
  misc_feature (1)..(186): tr|A0A1G9XFA2|A0A1G9XFA2_9PSED GTP cyclohydrolase 1 OS= Pseudomonas antarctica OX=219572 GN=folE PE=3 SV=1
MTLSLPQHYREILKGLGEDPEREGLLDTPKRAAKAMQYLCHGYEQNLDEIVNGALFASDNDEMVILKDIELYSLCEHHLLPFIGKAHVAYIPTGKVLGLSKLARIVDMYARRLQIQENLTRQIADAVQQVTQAAGVAVVIEAKHMCMMMRGVEKQNSTMNTSVMLGAFRESNTTRMEFLQLIGRSK

SEQ ID NO: 13222 - protein, 186 aa, Pseudomonas antarctica
  misc_feature (1)..(186): tr|A0A1H0ALA0|A0A1H0ALA0_9PSED GTP cyclohydrolase 1 OS= Pseudomonas antarctica OX=219572 GN=folE PE=3 SV=1
MNASLAEHYREILVGVGENPEREGLLDTPKRAAKAMQYLCNGYTMSLEELINGALFESQNDEMVIVRDIELYSLCEHHMLPFIGKAHVAYIPTGRVLGLSKVARVVDMFARRLQIQENLTKQIADAIQHITDAAGVAVVIEAKHMCMMMRGVEKQNSVMTSSVMLGAFRESSATRHEFLQLIGRLG

SEQ ID NO: 13223 - protein, 186 aa, Pseudomonas argentinensis
  misc_feature (1)..(186): tr|A0A1I3JYK4|A0A1I3JYK4_9PSED GTP cyclohydrolase 1 OS= Pseudomonas argentinensis OX=289370 GN=folE PE=3 SV=1
MNPLLPNHYREILLGLGEDPEREGLLDTPKRAAKAMQYLCNGYEKSLEEVVNGALFSSDSDEMVIVKDVELYSLCEHHLLPFIGKAHVAYIPTGKVLGLSKIARIVDMYARRLQIQENLTRQIASAIQEVTQAAGVAVVIEAQHMCMMMRGVEKQNSVMSTSVMLGAFRESYNTRHEFLQLIGRSK

SEQ ID NO: 13224 - protein, 187 aa, Pseudomonas argentinensis
  misc_feature (1)..(187): tr|A0A1I3L5W2|A0A1I3L5W2_9PSED GTP cyclohydrolase 1 OS= Pseudomonas argentinensis OX=289370 GN=folE PE=3 SV=1
MDSSRNTLEQQYTEILGQLGEDVSREGLLDTPKRAAKAMQYLCNGYQKTLEEVTNGALFSSDASEMVVVKNIELYSLCEHHLLPFIGKAHVAYIPNGKVLGLSKVARIVDMYARRLQIQESLSRQIAEAVQQVTGALGVAVVIEAKHMCMMMRGVEKQNSSMVTSVMLGEFRENAATRSEFLSLVNG

SEQ ID NO: 13225 - protein, 181 aa, Pseudomonas arsenicoxydans
  misc_feature (1)..(181): tr|A0A1H0JFH3|A0A1H0JFH3_9PSED GTP cyclohydrolase 1 OS= Pseudomonas arsenicoxydans OX=702115 GN=folE PE=3 SV=1
MSLEQNYTAILGQLGEDVSREGLLDTPKRAAKAMQYLCRGYEQTLEEVTNGALFSSDNSEMVLVKDIELYSLCEHHLLPFIGKAHVAYIPSGKVLGLSKVARIVDMYARRLQIQENLSRQIADAVQQVTGALGVAVVIEAKHMCMMMRGVEKQNSSMITSVMLGEFRENAATRSEFLSLIK

SEQ ID NO: 13226 - protein, 191 aa, Pseudomonas arsenicoxydans
  misc_feature (1)..(191): tr|A0A1H0AJ89|A0A1H0AJ89_9PSED GTP cyclohydrolase 1 OS= Pseudomonas arsenicoxydans OX=702115 GN=folE PE=3 SV=1
MTLSLHQNALSQSYREILIGLGENPDREGLQDTPTRAAKAMQYLCHGYEQSVEEIVNGALFASDNDEMIIVDNIELYSLCEHHMLPFIGKAHVAYIPTGKVLGLSKIARLVDMFARRLQIQENLTRQIADAVQQVTGAAGVAVVIEAKHMCMMMRGVEKQNSTMNTSVMLGAFRESSNTRQEFLQLIGRSK

SEQ ID NO: 13227 - protein, 186 aa, Pseudomonas asplenii
  misc_feature (1)..(186): tr|A0A3S3C7Q2|A0A3S3C7Q2_9PSED GTP cyclohydrolase 1 OS= Pseudomonas asplenii OX=53407 GN=folE PE=3 SV=1
MSATLPEHYREILLGLGENPDREGLLDTPKRAAKAMQYLCHGYEQSLDEVVNGALFASDNDEMVIVKDIELYSLCEHHLLPFIGKAHVAYMPTGKVLGLSKIARIVDMFARRLQIQENLTRQIADAIEQVTQAAGVAVVIEAQHMCMMMRGVEKQNSTMNTSVMLGALRDSSTTRMEFLQLIGRSK

SEQ ID NO: 13228 - protein, 181 aa, Pseudomonas asplenii
  misc_feature (1)..(181): tr|A0A3S3D8J5|A0A3S3D8J5_9PSED GTP cyclohydrolase 1 OS= Pseudomonas asplenii OX=53407 GN=folE PE=3 SV=1
MSLEQNYTAILGQLGEDVSREGLLDTPKRAAKAMQYLCRGYEQTLEEVTNGALFSSDNSEMVLVKDIELYSLCEHHLLPFIGKAHVAYIPSGKVLGLSKVARIVDMYARRLQIQENLSRQIADAVQQVTGALGVAVVIEAKHMCMMMRGVEKQNSSMITSVMLGEFRENAATRSEFLALIK

SEQ ID NO: 13229 - protein, 301 aa, Pseudomonas asturiensis
  misc_feature (1)..(301): tr|A0A1M7KUM0|A0A1M7KUM0_9PSED GTP cyclohydrolase FolE2 OS=Pseudomonas asturiensis OX=1190415 GN=folE2 PE=3 SV =1
MNSSLPDVAVTHASSALIALDWVGMQAIEVPIRLSEEGASQSVHAHVDLHVDLADPSIKGIHMSRLYRLLDRFAEERALNVAALSDLLEAMVESHADCHSTRARIKLNFNLLCRRPALVTDGLSGWKSYPIVIEGLWEAGRLCLDFSAGITYSSTCPCSAALSRQLLESAFIAHFDRQTFVDTMQVANWLRTNGSLATPHSQRSVATVQVRVPEHATELGLMALIDTAERALGTPVQTAVKRADEQAFARLNGQNLMYVEDAARKVQQALEGLYTASRVSVRHFESLHPHDAAAQTSTYPS

SEQ ID NO: 13230 - protein, 187 aa, Pseudomonas asturiensis
  misc_feature (1)..(187): tr|A0A1M7LCP9|A0A1M7LCP9_9PSED GTP cyclohydrolase 1 OS= Pseudomonas asturiensis OX=1190415 GN=folE PE=3 SV=1
MSLSLPQHYRDILVGLGEDPDREGLLDTPKRAAKAMQYLCHGYTQSVEEIVNGALFASDNDEMVIVQNIELYSLCEHHLLPFIGKAHVAYIPTGKVLGLSKIARIVDMFARRLQIQENLTRQIAEAIKDVTGASGVAVVIEAKHMCMMMRGVEKQNSTMNTSVMLGAFRESSTTRMEFLQLIGRSKQ

SEQ ID NO: 13231 - protein, 187 aa, Pseudomonas avellanae; identical to SEQ ID NO: 13217
  misc_feature (1)..(187): tr|A0A2S3TJC5|A0A2S3TJC5_9PSED GTP cyclohydrolase 1 OS= Pseudomonas avellanae OX=46257 GN=folE PE=3 SV=1

SEQ ID NO: 13232 - protein, 301 aa, Pseudomonas avellanae
  misc_feature (1)..(301): tr|A0A3M5SST4|A0A3M5SST4_9PSED GTP cyclohydrolase FolE2 OS=Pseudomonas avellanae OX=46257 GN=folE2 PE=3 SV=1
MNSPLPDVALTEVSSALIALDWVGMQGVEVPLTLGEPGATHPVHAYADLQVDLTDPSVKGIHMSRLYRLLDGFAEHQVLTPETLSALLEAMVESHVDCHSSGARITLTFNLLCRRPALVTEGLSGWKSYPVKLEAVWRAGRLCLDVSADITYSSTCPCSAALSRQLLEETFVTRFGRQSFVDPMQVAAWLRDNASYATPHSQRSVATVQVRVAEQATEMGLMALIDTVEQALGTPVQTAVKRADEQAFARLNGQNLMYVEDAARKIQQALEGRYPASSVSVRHFESLHPHDAAAQTSNYLS

SEQ ID NO: 13233 - protein, 300 aa, Pseudomonas azotoformans
  misc_feature (1)..(300): tr|A0A3M5MLZ0|A0A3M5MLZ0_PSEAZ GTP cyclohydrolase FolE2 OS=Pseudomonas azotoformans OX=47878 GN=folE2 PE=3 SV= 1
MDLLMNALTLPDIAAQASRQALPLDWVGMRGIALPILIDGQHLTATADAGVSLDDGTARGIHMSRLYLALEMLDQQPLTSALLRNVLQRFLDTHEGLSKNAYLRIHTQLLLKRPALVSPLAGWKTYPVSIEARLENQMFHVELKIDVTYSSTCPCSAALARQLIQQQFVDDFANTPLQHEAVLAWLGTADGIVATPHSQRSSAQLHVQLQGTDLPIVGLINAAEAALGTAVQTAVKRADEQAFALANGQNLMFCEDAARRLNLALKRSDAIKAFHLKVIHAESLHAHDAVAESRWTRDFA

SEQ ID NO: 13234 - protein, 186 aa, Pseudomonas azotoformans
  misc_feature (1)..(186): tr|A0A4Q0HS39|A0A4Q0HS39_PSEAZ GTP cyclohydrolase 1 OS= Pseudomonas azotoformans OX=47878 GN=folE PE=3 SV=1
MTLSLPHHYREILKGLGEDPQREGLLDTPKRAAKAMQYLCHGYEQNLEEIVNGALFASDNDEMVILKDIELYSLCEHHLLPFIGKAHVAYIPTGKVLGLSKLARIVDMFARRLQIQENLTRQIADAIQDVTQAAGVAVVIEAKHMCMMMRGVEKQNSTMNTSVMLGAFRESNTTRMEFLQLIGRSK

SEQ ID NO: 13235 - protein, 181 aa, Pseudomonas baetica
  misc_feature (1)..(181): tr|A0A2T4F454|A0A2T4F454_9PSED GTP cyclohydrolase 1 OS= Pseudomonas baetica OX=674054 GN=folE PE=3 SV=1
MTLEQNYTAILGQLGEDVSREGLLDTPKRAAKAMQYLCRGYEQTLEEVTNGALFSSDNSEMVLVKDIELYSLCEHHLLPFIGKAHVAYIPSGKVLGLSKVARIVDMYARRLQIQENLSRQIADAVQQVTGALGVAVVIEAKHMCMMMRGVEKQNSSMITSVMLGEFRENAATRSEFLSLIK

SEQ ID NO: 13236 - protein, 186 aa, Pseudomonas baetica
  misc_feature (1)..(186): tr|A0A2N0DN30|A0A2N0DN30_9PSED GTP cyclohydrolase 1 OS= Pseudomonas baetica OX=674054 GN=folE PE=3 SV=1
MTRSLPENYREILIGLGENPDREGLLDTPVRAAKAMQYLCHGYGQSVDEIVNGALFASDSDEMIIVADIELYSLCEHHLLPFIGKAHVAYIPTGKVLGLSKIARLVDMFARRLQIQENLTRQIADAVQQVTDAAGVAVVIEARHMCMMMRGVEKQNSTMNTSVMLGAFRDSSNTRQEFLQLIGRSK

SEQ ID NO: 13237 - protein, 186 aa, Pseudomonas balearica
  misc_feature (1)..(186): tr|A0A1G9RWM7|A0A1G9RWM7_9PSED GTP cyclohydrolase 1 OS= Pseudomonas balearica DSM 6083 OX=1123016 GN=folE PE=3 SV=1
MDTLSSQYRDILQGLGEDPEREGLRDTPLRAAKAMRYLCNGYTKSLEEVVNGALFASDNDEMVIVKDIELYSLCEHHLLPFIGRAHVAYIPTGRVLGLSKVARIVDMYARRLQIQENLTRQIAEAIQEVTSAAGVAVVIEARHMCMMMRGVEKQNSVMNTSVMLGAFRSSCNTRMEFMQLIGRDRA

SEQ ID NO: 13238 - protein, 181 aa, Pseudomonas balearica
  misc_feature (1)..(181): tr|A0A1G9RBM0|A0A1G9RBM0_9PSED GTP cyclohydrolase 1 OS= Pseudomonas balearica DSM 6083 OX=1123016 GN=folE PE=3 SV=1
MSLEHNYTQILTQLGEDVSREGLLDTPKRAAKAMQYLCKGYQQTLEEVTNGALFSSDNSEMVLVKNIELYSLCEHHMLPFIGKAHVAYLPAGKVLGLSKVARIVDMYARRLQIQENLTREIAEAVQQVTGAAGVAVVIEAQHMCMMMRGVEKQNSSMVTSVMLGQFRDNAATRSEFLGLVK

SEQ ID NO: 13239 - protein, 297 aa, Pseudomonas batumici
  misc_feature (1)..(297): tr|A0A0C2I1E7|A0A0C2I1E7_9PSED GTP cyclohydrolase FolE2 OS=Pseudomonas batumici OX=226910 GN=folE2 PE=3 SV=1
MNALTLPDIAAQSSRQALPLEWVGMCGIALPISIDGQRLSAKADAGVSLDDGEARGIHMSRLYLALERLEQEDLTPELIRETLQQFLGSHDGLSSNAYLRIHTDLLLKRPALVSPLAGWKTYPVSVLVELKNGVFHVELKIDVAYSSTCPCSAALARQLIQQQFIDDFADKPLEHSDILGWLGGQGVVATPHSQRSIAQLHIRLDEKIGRFPLEPLINEAEAALGTAVQTAVKRADEQAFALANGQNLMFCEDAARRLNLALKRSDAVSAFHLRVVHAESLHAHDAVAESRWNWRQA

SEQ ID NO: 13240 - protein, 186 aa, Pseudomonas batumici
  misc_feature (1)..(186): tr|A0A0C2F2G7|A0A0C2F2G7_9PSED GTP cyclohydrolase 1 OS= Pseudomonas batumici OX=226910 GN=folE PE=3 SV=1
MSATLPEHYREILLGLGENPDREGLQDTPKRAAKAMQYLCRGYAQTLEDVVNGALFASDNDEMIIVKDIELYSLCEHHLLPFIGKVHVAYVPTGKVLGLSKIARIVDMFARRLQIQENLTREIADAIEQVTQAAGVAVVIEAQHMCMMMRGVEKQNSTMNTSVMLGALRDSSRTRMEFLQLIGRSK

SEQ ID NO: 13241 - protein, 185 aa, Pseudomonas bauzanensis
  misc_feature (1)..(185): tr|A0A4U0YF00|A0A4U0YF00_9PSED GTP cyclohydrolase 1 OS= Pseudomonas bauzanensis OX=653930 GN=folE PE=3 SV=1
MSLENLTQNYESILLNLGENPKRGGLLDTPLRAAKAMQFLCLGYELSLGEIVNNALFESDSDEMVIVKDIELYSLCEHHMLPFIGKAHVAYMPTGKVIGLSKIARIVDMFSRRLQIQENLTRQIAEAIQEVTDAGGVAVVIEAKHMCMMMRGVEKQNSSMYTSVMLGAFRESGNTRQEFLQLIGK

SEQ ID NO: 13242 - protein, 186 aa, Pseudomonas bauzanensis
  misc_feature (1)..(186): tr|A0A1H9U2I7|A0A1H9U2I7_9PSED GTP cyclohydrolase 1 OS= Pseudomonas bauzanensis OX=653930 GN=folE PE=3 SV=1
MSTENIALQYEAILRGIGEDPQRGGLAETPLRAAKAMQFLCKGYEQSLEEIVNNALFDAKGDEMVIVKDIELYSLCEHHMLPFVGKAHVAYLPKGKVIGLSKVARIVDMFARRLQIQENLTRQIAEALQEVTQAEGVAVVIEAKHMCMMMRGVEKQNSTMFTSVMLGAFRASGNTRQEFLQLIGRG

SEQ ID NO: 13243 - protein, 186 aa, Pseudomonas benzenivorans
  misc_feature (1)..(186): tr|A0A1G7UYE2|A0A1G7UYE2_9PSED GTP cyclohydrolase 1 OS= Pseudomonas benzenivorans OX=556533 GN=folE PE=3 SV=1
MSQELPRFFREILIGVGEDPEREGLLDTPKRAAKAMQYLCHGYQKSLEEVVNGALFVSDNDEMVIVKDVELYSLCEHHLLPFIGKAHVAYIPTGKVLGLSKVARIVDMYARRLQIQENLTRQIAEAVQQVTKAAGVAVVVEAKHMCMMMRGVEKQNSVMSTSVMLGAFRESSNTRHEFLQLIGRSH

SEQ ID NO: 13244 - protein, 182 aa, Pseudomonas benzenivorans
  misc_feature (1)..(182): tr|A0A1G7ZU61|A0A1G7ZU61_9PSED GTP cyclohydrolase 1 OS= Pseudomonas benzenivorans OX=556533 GN=folE PE=3 SV=1
MSLEQHYTAILGQLGEDASREGLLDTPKRAAKAMQYLCRGYQQTLEEVTNGALFSSDNSEMVLVKHIELYSLCEHHLLPFIGKAHVAYIPNGKVLGLSKVARIVDMFARRLQIQENLSRQIAEAIQEVTGALGVAVVIEAQHMCMMMRGVEKQNSSMVTSVMLGEFRNNAATRSEFLSLINS

SEQ ID NO: 13245 - protein, 298 aa, Pseudomonas borbori
  misc_feature (1)..(298): tr|A0A1I5R7B8|A0A1I5R7B8_9PSED GTP cyclohydrolase FolE2 OS=Pseudomonas borbori OX=289003 GN=folE2 PE=3 SV=1
MNALTLPDIAAQATLYQQTLDWVGMGEIALPLLFAGQRINARADAGVSLDDGGARGIHMSRLYLALQVLETDNLSPPLLRQLLGEFLDSHKGLSRQAHISLRGEALLSRPALVSPLSGWKAYPFEVRARQDSWGFHVELQAQLDYSSTCPCSAALARQLIQQRFIEDFADQSLEHQQLLTWLGSTQGILATPHSQRSTATLQVRLSPQADELPLIELIDRAEQALGTAVQTAVKRADEQAFALANGQNLMFCEDAARRLHSALLLQPGLSAFHLRVVHAESLHAHDAVATSSWNWSPA

SEQ ID NO: 13246 - protein, 186 aa, Pseudomonas borbori
  misc_feature (1)..(186): tr|A0A1I5X2R5|A0A1I5X2R5_9PSED GTP cyclohydrolase 1 OS= Pseudomonas borbori OX=289003 GN=folE PE=3 SV=1
MSQELPSFFREILIGVGEDPEREGLLDTPKRAAKAMQYLCHGYQKSLEEVVNGALFASDNDEMVIVKDVELYSLCEHHLLPFIGKAHVAYIPTGKVLGLSKVARIVDMYARRLQIQENLTRQIAEAVQQVTNAAGVAVVIEAKHMCMMMRGVEKQNSVMSTSVMLGVFRESSNTRHEFLQLIGRSH

SEQ ID NO: 13247 - protein, 186 aa, Pseudomonas brassicacearum
  misc_feature (1)..(186): tr|W8PEL1|W8PEL1_9PSED GTP cyclohydrolase 1 OS=Pseudomo nas brassicacearum OX=930166 GN=folE PE=3 SV=1
MTLSLPENYREILIGLGENPEREGLLDTPMRAAKAMQYLCHGYEQSVEQIVNGALFASDSDEMVIVADIELYSLCEHHLLPFIGKAHVAYIPTGKVLGLSKIARLVDMFARRLQIQENLTRQIADAVQQVTQAAGVAVVIEAQHMCMMMRGVEKQNSTMNTSVMLGAFRESSTTRQEFLQLIRRSQ

SEQ ID NO: 13248 - protein, 191 aa, Pseudomonas brassicacearum
  misc_feature (1)..(191): tr|A0A423GSE1|A0A423GSE1_9PSED GTP cyclohydrolase 1 OS= Pseudomonas brassicacearum OX=930166 GN=folE PE=3 SV=1
MTLSLPQNSLSQSYREILIGLGEDPDREGLLDTPARAAKAMQYLCHGYEQSVDEIVNGALFASDNDEMVIVDDIELYSLCEHHLLPFIGKAHVAYIPTGKVLGLSKIARIVDMFARRLQIQENLTREIAEAVQRVTQAAGVAVVIEAQHMCMMMRGVEKQNSTMNTSVMLGAFRESSNTRQEFLQLIGRSK

SEQ ID NO: 13249 - protein, 298 aa, Pseudomonas brenneri
  misc_feature (1)..(298): tr|A0A4R6YZ51|A0A4R6YZ51_9PSED GTP cyclohydrolase FolE2 OS=Pseudomonas brenneri OX=129817 GN=folE2 PE=3 SV=1
MNALTLPDIAAQASRQALPLDWVGMCGIALPILIDGQRLSAKADAGVSLDDGEARGIHMSRLYLALEMLESQDLQPALLRQVLQRFLDSHEGLSSSAYLRIHTDLLLKRPALVSPLAGWKSYPVSIEARLEKQMFHVELKIDVTYSSTCPCSAALARQLIQQQFIDDFANTTLQHEDVLAWLGSAKGIIATPHSQRSTAQLLVALQAGQPTLPLTELIDHAEAALGTAVQTAVKRADEQAFALANGQNLMFCEDAARRLNLVLQRSIAVQAFHVKVIHAESLHAHDAVAETRWTRTTA

SEQ ID NO: 13250 - protein, 185 aa, Pseudomonas brenneri
  misc_feature (1)..(185): tr|A0A4V3DLN7|A0A4V3DLN7_9PSED GTP cyclohydrolase 1 OS= Pseudomonas brenneri OX=129817 GN=folE PE=3 SV=1
MNPLLARHYREILVGVGENPEREGLLDTPERAAKAMQYLCNGYALSLEDVTNGALFESPSDEMVIVSDIELYSLCEHHMLPFIGKVHVAYIPTGRVLGLSKVTRVVDMFARRLQIQENLTRQIAEAIEQITDAAGVAVVIEAKHMCMMMRGVEKQNSVMTSSVMLGVFRDSSTTRQEFLQLIGRR

SEQ ID NO: 13251 - protein, 184 aa, Pseudomonas canadensis
  misc_feature (1)..(184): tr|A0A423EZ21|A0A423EZ21_9PSED GTP cyclohydrolase 1 OS= Pseudomonas canadensis OX=915099 GN=folE PE=3 SV=1
MTLPHHYREILKGLGEDPEREGLLDTPKRAAKAMQYLCHGYEQNLEEIINGALFTSDNDEMVILKDIELYSLCEHHLLPFIGKAHVAYIPTGKVLGLSKLARIVDMFARRLQIQENLTRQIADAIQDVTQAAGVAVVIEAKHMCMMMRGVEKQNSTMNTSVMLGAFRESNTTRMEFLQLIGRSK

SEQ ID NO: 13252 - protein, 296 aa, Pseudomonas canadensis
  misc_feature (1)..(296): tr|A0A423EX90|A0A423EX90_9PSED GTP cyclohydrolase FolE2 OS=Pseudomonas canadensis OX=915099 GN=folE2 PE=3 SV=1
MNALTLPDIAAQASRQALPLDWVGMCGIALPILIDGQRLTATADAGVSLDDGAARGIHMSRLYLALEMLDQQPLTPALLRNVLQRFLDSHEDLSNNAYLRIHTDLLLKRPALVSPLAGWKGYPVSIEARMENQMFHVELKIDVTYSSTCPCSAALARQLIQQQFLDDFANTPLQHEDVLTWLGSANGIVATPHSQRSSAQLHVELQGEQLPLTALIDTVETALGTAVQTAVKRADEQAFALANGQNLMFCEDAARRLNLALKRSDAVKAFHLKVVHAESLHAHDAVAESRWTRHPA

SEQ ID NO: 13253 - protein, 209 aa, Pseudomonas cannabina
  misc_feature (1)..(209): tr|A0A3M3K1A7|A0A3M3K1A7_PSECA GTP cyclohydrolase 1 OS= Pseudomonas cannabina OX=86840 GN=folE PE=3 SV=1
MWKRSSLVQNRYTPKKRTALKPTRKHSPVTLEQNYTAILGQLGEDVSREGLLDTPKRAAKAMQYLCRGYAQTLEEVTNGALFSSDASEMVMVKDIELYSLCEHHLLPFIGKAHVAYIPKGKVLGLSKVARIVDMYARRLQIQENLSRQIAEAIQQVTGALGVAVVIEAKHMCMMMRGVEKQNSAMITSVMLGEFRENAATRSEFLSLIK

SEQ ID NO: 13254 - protein, 301 aa, Pseudomonas cannabina
  misc_feature (1)..(301): tr|A0A0P9M9E5|A0A0P9M9E5_PSECA GTP cyclohydrolase FolE2 OS=Pseudomonas cannabina OX=86840 GN=folE2 PE=3 SV=1
MNSPLPDVALTEVSSALIALDWVGMQGVEVPLMLGEPGATHPVHAYADLQVDLADPSVKGIHMSRLYRLLDGFAEHQLLTPDSLSALLEAMVESHADCHSSGARITLTFNLLCRRPALITEGLSGWKSYPVRLEAIWRAGRLCLDVSADITYSSTCPCSAALSRQLLEEAFAARFGRQSFVDRMQVAAWLRENASYATPHSQRSVATVRVRAAEQASELGLMALIDAVEQALGTPVQTAVKRADEQAFARLNGQNLMYVEDAARKIQQALEGHYAASSVSVRHFESLHPHDAAAQTSNYLS

SEQ ID NO: 13255 - protein, 181 aa, Pseudomonas capeferrum
  misc_feature (1)..(181): tr|A0A084CAK8|A0A084CAK8_9PSED GTP cyclohydrolase 1 OS= Pseudomonas capeferrum OX=1495066 GN=folE PE=3 SV=1
MSLEQNYTEILSQIGEDVSREGLLDTPKRAAKAMKYLCRGYEQTLEEVTNGALFTSDNSEMVLVRDIELYSMCEHHMLPFIGKAHVAYLPKGKVLGLSKVARIVDMYARRLQIQENLSRQVAEAVEKVTGAAGVAVVIEAKHMCMMMRGVEKQNSSMITSVMLGEFRENAATRSEFLSLIK

SEQ ID NO: 13256 - protein, 301 aa, Pseudomonas capeferrum
  misc_feature (1)..(301): tr|A0A084C978|A0A084C978_9PSED GTP cyclohydrolase FolE2 OS=Pseudomonas capeferrum OX=1495066 GN=folE2 PE=3 SV= 1
MTQLKLPDIASQAQQHALPLDWVGMCGIDLPVQFEGRIAAAKVDAGVSLVDGSSRGIHMSRLYLALESLEGQPLTALVIRQLLADFLNSHEGLSSAAYLRLSFDHLLKRPALVSPLAGWKSYPVTLDARIESEMFHVELFVSVPYSSTCPCSAALARQLIQQQFQADFAEQQVDKDRVMAWLGSSQGIVATPHSQRSSAQIHVRLKSNVLELPVTELINRVEASLGTAVQTAVKRADEQAFALANGQNLMFCEDAARRLHQSLRQLKWATAFKLRVEHAESLHAHDAVATSQWQWQISYAV

SEQ ID NO: 13257 - protein, 301 aa, Pseudomonas caricapapayae
  misc_feature (1)..(301): tr|A0A0P9KB51|A0A0P9KB51_9PSED GTP cyclohydrolase FolE2 OS=Pseudomonas caricapapayae OX=46678 GN=folE2 PE=3 SV =1
MNNPLPDVALTEVSSALVSLDWVGMQGVEVPVRLAEAGVRYPVHAYVDLQVDLADPSVKGIHMSRLYRLLDRYAEHQILSPDTLSALMEAMVESHVDCHSSRARLTLSFNLLCRRPALVTEGLSGWKSYPVKLDAIWHAGRLCLDVSAEITYSSTCPCSAALSRQLLEGAFTERFGRQSFVDPMQVATWLRENASFATPHSQRSVATVQVRVAEQASELGLMRLIDTVEQALGTPVQTAVKRADEQAFARLNGQNLMYVEDAARKVQQALEGRYAASSVSVRHFESLHPHDAAAQTSNYLS

SEQ ID NO: 13258 - protein, 187 aa, Pseudomonas caricapapayae
  misc_feature (1)..(187): tr|A0A0P9JZ55|A0A0P9JZ55_9PSED GTP cyclohydrolase 1 OS= Pseudomonas caricapapayae OX=46678 GN=folE PE=3 SV=1
MSSSLPQHYREILLGLGEDPDREGLLDTPKRASKAMQYLCHGYTQSVEEIVNGALFASDNDEMVIVQNIELYSLCEHHLLPFIGKAHVAYIPTGKVLGLSKIARIVDMFARRLQIQENLTKQIADAIQAVTGAAGVAVVIEAKHMCMMMRGVEKQNSTMNTSVMLGAFRDSSTTRMEFLQLIGRSRQ

SEQ ID NO: 13259 - protein, 191 aa, Pseudomonas caspiana
  misc_feature (1)..(191): tr|A0A502J7L1|A0A502J7L1_9PSED GTP cyclohydrolase 1 OS= Pseudomonas caspiana OX=1451454 GN=folE PE=3 SV=1
MTLSLPQNALSQSYREILIGLGENPDREGLQDTPVRAAKAMQYLCRGYEQSVEEIVNGALFASDNDEMIIVDNIELYSLCEHHMLPFIGKAHVAYIPTGKVLGLSKIARLVDMFARRLQIQENLTRQIAEAVQQVTGAAGVAVVIEAKHMCMMMRGVEKQNSTMNTSVMLGAFRESSNTRQEFLQLIGRSK

SEQ ID NO: 13260 - protein, 298 aa, Pseudomonas caspiana
  misc_feature (1)..(298): tr|A0A502JEG8|A0A502JEG8_9PSED GTP cyclohydrolase FolE2 OS=Pseudomonas caspiana OX=1451454 GN=folE2 PE=3 SV=1
MNALTLPDIAAQASRQALPLDWVGMCGIALPVLFDGQRLSAKADAGVSLDDGEARGIHMSRLYLALEMLEQENLTPALLRRVLQRFLKTHEGLSNSAYLKIHTDLLLKRPALVSPLAGWKTYPVSIEAHLKNAMFHVELKIDVPYSSTCPCSAALSRQLIQQQFVDDFANKPLQHADVLAWLGSTKGIVATPHSQRSTARLRLRVDDYLEDLPLIALINDAEAALGTAVQTAVKRADEQAFALANGQNLMFCEDAVRRLNLALKRSPGINAFHIRVVHAESLHAHDAVAESRWNWEAA

SEQ ID NO: 13261 - protein, 181 aa, Pseudomonas cedrina
  misc_feature (1)..(181): tr|A0A1V2K495|A0A1V2K495_PSECE GTP cyclohydrolase 1 OS= Pseudomonas cedrina subsp. cedrina OX=76762 GN=folE PE= 3 SV=1
MTLEQNYTAILGQLGEDVSREGLLDTPKRAAKAMQYLCRGYAQTLEEVTNGALFSSDNSEMVLVKDIELYSLCEHHLLPFIGKAHVAYIPSGKVLGLSKVARIVDMYARRLQIQENLSRQIADAVLQVTGALGVAVVIEAKHMCMMMRGVEKQNSSMITSVMLGEFRENAATRSEFLSLIK

SEQ ID NO: 13262 - protein, 186 aa, Pseudomonas cedrina
  misc_feature (1)..(186): tr|A0A1V2KJ30|A0A1V2KJ30_PSECE GTP cyclohydrolase 1 OS= Pseudomonas cedrina subsp. cedrina OX=76762 GN=folE PE= 3 SV=1
MTLSLPQHYREILKGLGEDPEREGLLDTPKRAAKAMQYLCHGYEQNLEEIVNGALFASDNDEMVILKDIELYSLCEHHLLPFIGKAHVAYIPTGKVLGLSKLARIVDMFARRLQIQENLTRQIADAIQDVTQAAGVAVVIEARHMCMMMRGVEKQNSTMNTSVMLGAFRESTTTRMEFLQLIGRSK

SEQ ID NO: 13263 - protein, 187 aa, Pseudomonas cerasi
  misc_feature (1)..(187): tr|A0A193SK09|A0A193SK09_9PSED GTP cyclohydrolase 1 OS= Pseudomonas cerasi OX=1583341 GN=folE1 PE=3 SV=1
MSSSLPQHYRDILLGLGEDPDREGLLDTPKRASKAMQCLCHGYTQSVEEIVNGALFASDNDEMVIVQNIELYSLCEHHLLPFIGKAHVAYIPTGKVLGLSKIARIVDMFARRLQIQENLTKQIADAIQKVTGAAGVAVVIEAQHMCMMMRGVEKQNSTMNTSVMLGAFRDSSTTRMEFLQLIGRSRQ

SEQ ID NO: 13264 - protein, 301 aa, Pseudomonas cerasi
  misc_feature (1)..(301): tr|A0A193SRG8|A0A193SRG8_9PSED GTP cyclohydrolase FolE2 OS=Pseudomonas cerasi OX=1583341 GN=folE2 PE=3 SV=1
MNKPLPDVALTEISPALVSLDWVGMQGVEVPIRLAEAGIRHPVHTHVDLQVDLADPSVKGIHMSRLYRLLDGYAEHQIVSPYTLSALLEAMVESHLDCHSSHARLTLSFNLLCRRPALITEALSGWKSYPVKLDATWHAGRLCLDSSVDITYSSTCPCSAALSRQLLEEAFAARFGRQSFVDPMQVASWLRENASFATPHSQRSVATVQVRVADQATELGLMTLIDLVEQALGTPVQTAVKRADEQAFARLNGQNLMYVEDAARKVQQALEGRYAASSVSVRHFESLHPHDAAAQTSNYLS

SEQ ID NO: 13265 - protein, 186 aa, Pseudomonas chengduensis
  misc_feature (1)..(186): tr|A0A1G6KVT6|A0A1G6KVT6_9PSED GTP cyclohydrolase 1 OS= Pseudomonas chengduensis OX=489632 GN=folE PE=3 SV=1
MSQPLSQQYREILVGLGENPEREGLLDTPKRAAKAMQYLCHGYQQSLDEIVNGALFESDNDEMVIVKDIELYSLCEHHLLPFIGKAHVAYIPTGKVLGLSKVARIVDMYARRLQIQENLTKQIADAIQRVTNAAGVAVVIEAKHMCMMMRGVEKQNSVMSSSVMLGAFRESCNTRHEFLQLIGRNN

SEQ ID NO: 13266 - protein, 296 aa, Pseudomonas chengduensis
  misc_feature (1)..(296): tr|A0A1G6I752|A0A1G6I752_9PSED GTP cyclohydrolase FolE2 OS=Pseudomonas chengduensis OX=489632 GN=folE2 PE=3 SV =1
MNEQPLPDIAAQATHHDLPLDWVGMAGIALPIRLADAAVTASVDIGVSLDDAGARGIHMSRLYLAAQRLVHQPLNVPAVLQVLDDCLSSHQELSDSATLTLRGEVPLKRPALVSPLNGWKGYPFELRARQDGRGVNIELQVEVGYSSTCPCSAALARQLIQQRFAWDFPDQQVDYSSVLDWLGSTQGIVATPHSQRSTATLQLRLAPGCVELPVLALIDSAEHALGTPVQTAVKRADEQAFALANGQNLMFCEDAARRLHKALYQLPQVSALRLRVVHAESLHAHDAVAESSWNWS

SEQ ID NO: 13267 - protein, 185 aa, Pseudomonas chloritidismutans
  misc_feature (1)..(185): tr|V4S911|V4S911_PSECO GTP cyclohydrolase 1 OS=Pseudomo nas chloritidismutans AW-1 OX=1263865 GN=folE PE=3 SV=1
MNDLPGHYREILSGVGENPEREGLRDTPQRAAKAMQYLCGGYNRSLEEIVNGALFASDNDEMVIVKDIELYSLCEHHMLPFIGKAHVAYIPTGRVLGLSKIARIVDMFARRLQIQENLTRQIAEAIQEVTGAAGVAVVIEAKHMCMMMRGVEKQNSVMNTSVMLGAFRSSCNTRMEFLQLIGRGQ

SEQ ID NO: 13268 - protein, 181 aa, Pseudomonas chloritidismutans; identical to SEQ ID NO: 13197
  misc_feature (1)..(181): tr|V4S489|V4S489_PSECO GTP cyclohydrolase 1 OS=Pseudomo nas chloritidismutans AW-1 OX=1263865 GN=folE PE=3 SV=1

SEQ ID NO: 13269 - protein, 186 aa, Pseudomonas chlororaphis
  misc_feature (1)..(186): tr|A0A1E1FR16|A0A1E1FR16_9PSED GTP cyclohydrolase 1 OS= Pseudomonas chlororaphis subsp. aurantiaca OX=86192 GN= folE PE=3 SV=1
MTLSLPQHYREILKGLGEDPEREGLLDTPQRAAKAMQYLCHGYSQSVDEVVNGALFASDNDEMVIVADIELYSLCEHHLLPFIGKAHVAYIPTGKVLGLSKIARIVDMFARRLQIQENLTREIADAVQRVTQAAGVAVVIEAQHMCMMMRGVEKQNSTMHTSVMLGAFRESSTTRQEFLQLIGRSK

SEQ ID NO: 13270 - protein, 186 aa, Pseudomonas chlororaphis
  misc_feature (1)..(186): tr|A0A3G7BYU4|A0A3G7BYU4_9PSED GTP cyclohydrolase 1 OS= Pseudomonas chlororaphis subsp. piscium OX=1513890 GN=f olE PE=3 SV=1
MTLSLPQHYREILKDLGEDPEREGLLDTPQRAAKAMQYLCHGYSQSVDEVVNGALFASDNDEMVIVADIELYSLCEHHLLPFIGKAHVAYIPTGKVLGLSKIARIVDMFARRLQIQENLTREIADAVQRVTQAAGVAVVVEAQHMCMMMRGVEKQNSTMHTSVMLGAFRESSTTRQEFLQLIGRSK

SEQ ID NO: 13271 - protein, 181 aa, Pseudomonas cichorii
  misc_feature (1)..(181): tr|A0A3M4LJH3|A0A3M4LJH3_PSECI GTP cyclohydrolase 1 OS= Pseudomonas cichorii OX=36746 GN=folE PE=3 SV=1
MTLEQNYTAILSQLGEDVSREGLLDTPKRAAKAMQYLCRGYEQTLEEVTNGALFSSDASEMVMVRNIELYSLCEHHLLPFIGKAHVAYIPNGKVLGLSKVARIVDMFARRLQIQENLSRQIAEAIQTVTGAMGVAVVIEAQHMCMMMRGVEKQNSSMITSVMLGEFRENAATRSEFLSLIK

SEQ ID NO: 13272 - protein, 315 aa, Pseudomonas cichorii
  misc_feature (1)..(315): tr|A0A3M4MA94|A0A3M4MA94_PSECI GTP cyclohydrolase FolE2 OS=Pseudomonas cichorii OX=36746 GN=folE2 PE=3 SV=1
MPAAVKLDNEIPPDMNSPLPDVALTETSAALIALDWVGMQGIEVPILLSEPGVQHPVHAYVDLQVDLADPGVKGIHMSRLYTLLDSFAEHQLFTPGAMAALLEAMVSSHADCHSSRARFRMSFNLLCRRAALKTRGLSGWKSYPVVLDAVWVDGKLSLDASVEVTYSSTCPCSAALSRQLLEEAFLAQFGEQSELTPAHAALWLRENGSFATPHSQRSVATVQVRIPEQASELGLMSLIDVTERALGTPVQTAVKRADEQAFARLNGQNLMYVEDAARKIQQALEGRFAASSVGVRHLESLHPHDAVAYTSNYMS

SEQ ID NO: 13273 - protein, 186 aa, Pseudomonas citronellolis
  misc_feature (1)..(186): tr|A0A127MYY9|A0A127MYY9_9PSED GTP cyclohydrolase 1 OS= Pseudomonas citronellolis OX=53408 GN=folE_2 PE=3 SV=1
MTDSLSANYREILLGLGENPEREGLLDTPKRAAKAMRYLCHGYELSLEEVVNGALFASDNDEMVIVRDIELYSLCEHHLLPFIGKAHVAYIPTGRVLGLSKVARIVDMFARRLQIQENLTRQIAEAVERITGAAGVAVVIEAQHMCMMMRGVEKQNSQMFTSVMLGAFRDSSNTRQEFLQLIGRSK

SEQ ID NO: 13274 - protein, 297 aa, Pseudomonas citronellolis
  misc_feature (1)..(297): tr|A0A4Z0IMG1|A0A4Z0IMG1_9PSED GTP cyclohydrolase FolE2 OS=Pseudomonas citronellolis OX=53408 GN=folE2 PE=3 SV =1
MTAFLPDVASQAASDTLALDWVGMQGIALPLRLHGERLNALADAGVSLDAAAARGIHMSRLYLALARLEQAELGPQLLREVLDDFLASHAGLSRRASLRLAFDALLSRPALVSPLSGWKQYPCEVHARLDDQDLRLELRLRLAYSSTCPCSAALARQLIQQRFAEEFADRSPSHQEVHTWLGSSAGIVATPHSQRSFADLHLHLREGLDGLPLRELLDCAEAALGTAVQTAVKRADEQAFALANGQNLMFCEDAARRLHRALAQRGELEAFALSVVHAESLHAHDAVARSQWRREAP

SEQ ID NO: 13275 - protein, 181 aa, Pseudomonas coleopterorum
  misc_feature (1)..(181): tr|A0A1H5JJ59|A0A1H5JJ59_9PSED GTP cyclohydrolase 1 OS= Pseudomonas coleopterorum OX=1605838 GN=folE PE=3 SV=1
MSLEQNYTEILGQLGEDVTREGLLDTPKRAAKAMKYLCRGYEQTLDEVTNGALFSSDASEMVMVRDIELYSLCEHHLLPFIGRAHVAYIPNGKVLGLSKVARIVDMYARRLQIQENLGRQIADAVQQVTGALGVAVVIEAKHMCMMMRGVEKQNSSMITSVMLGEFRDNAATRSEFLSLIK

SEQ ID NO: 13276 - protein, 181 aa, Pseudomonas composti
  misc_feature (1)..(181): tr|A0A1I5SJ89|A0A1I5SJ89_9PSED GTP cyclohydrolase 1 OS= Pseudomonas composti OX=658457 GN=folE PE=3 SV=1
MSLEQHYTAILGQLGEDVSREGLLDTPKRAAKAMQYLCRGYQQTLEEVTNGALFSSDNSEMVLVKNIELYSLCEHHLLPFIGKAHVAYIPNGKVLGLSKVARIVDMFARRLQIQENLSRQIAEAVEQVTGALGVAVVIEAQHMCMMMRGVEKQNSSMVTSVMLGEFRSNPATRGEFLNLVR

SEQ ID NO: 13277 - protein, 296 aa, Pseudomonas composti
  misc_feature (1)..(296): tr|A0A1I5MA91|A0A1I5MA91_9PSED GTP cyclohydrolase FolE2 OS=Pseudomonas composti OX=658457 GN=folE2 PE=3 SV=1
MNEQPLPDIAAQATHHDLPLDWVGMAGIALPIRLADVAVTATVDIGVSLDDAGARGIHMSRLYLAAQRLVHQELNVPALLQVLDDCLGSHQALSDSATLTLRGEVPLKRPALVSPLHGWKTYPFELRARQDGRGVSIELQVEVGYSSTCPCSAALARQLIQQRFAWDFPDQQVDYSSVLDWLGSTQGIIATPHSQRSTATLQLRLAPGCVDLPLLTLIDSAEQALGTPLQTAVKRADEQAFALANGQNLMFCEDAARRLHRALRQLPQASAFHLKVVHAESLHAHDAVAQSHWNWS

SEQ ID NO: 13278 - protein, 187 aa, Pseudomonas congelans
  misc_feature (1)..(187): tr|A0A0P9RN35|A0A0P9RN35_9PSED GTP cyclohydrolase 1 OS= Pseudomonas congelans OX=200452 GN=folE PE=3 SV=1
MSSSLPQNYRDILLGLGEDPDREGLLDTPKRASKAMQYLCHGYTQSVEEIVNGALFASDNDEMVIVQNIELYSLCEHHLLPFIGKAHVAYIPTGKVLGLSKIARIVDMFARRLQIQENLTKQIADAIQKVTGAAGVAVVIEAQHMCMMMRGVEKQNSTMNTSVMLGAFRDSSTTRMEFLQLIGRSRQ

SEQ ID NO: 13279 - protein, 181 aa, Pseudomonas congelans
  misc_feature (1)..(181): tr|A0A0P9MIM3|A0A0P9MIM3_9PSED GTP cyclohydrolase 1 OS= Pseudomonas congelans OX=200452 GN=folE PE=3 SV=1
MTLEQNYTAILGQLGEDVSREGLLDTPKRAAKAMQYLCRGYAQTLEEVTNGALFSSDASEMVMVKDIELYSLCEHHLLPFIGKAHVAYIPQGKVLGLSKVARIVDMYARRLQIQENLSRQIAEAIQQVTGALGVAVVIEAKHMCMMMRGVEKQNSAMITSVMLGEFRENAATRSEFLSLIK

SEQ ID NO: 13280 - protein, 187 aa, Pseudomonas coronafaciens
  misc_feature (1)..(187): tr|A0A0M0V0W1|A0A0M0V0W1_9PSED GTP cyclohydrolase 1 OS= Pseudomonas coronafaciens pv. porri OX=83964 GN=folE PE =3 SV=1
MSSSLPQHYRDILLGLGENPDREGLLDTPKRASKAMQYLCHGYNQSVEEIVNGALFASDNDEMVIVQNIELYSLCEHHLLPFIGKAHVAYIPTGKVLGLSKIARIVDMFARRLQIQENLTKQIADAIQNVTGAAGVGVVIEAQHMCMMMRGVEKQNSTMNTSVMLGAFRESSTTRMEFLQLIGRSRQ

SEQ ID NO: 13281 - protein, 301 aa, Pseudomonas coronafaciens
  misc_feature (1)..(301): tr|A0A0Q0KF41|A0A0Q0KF41_9PSED GTP cyclohydrolase FolE2 OS=Pseudomonas coronafaciens pv. zizaniae OX=251700 GN =folE2 PE=3 SV=1
MNNPLPDVALTEVSSALISLDWVGMQGVEVPIRLAEAGIRHPVHAHVDLQVDLADPSVKGIHMSRLYRLLDRYAEHQILSPDTLAALMEAMVESHLDCHSSRARLTLSFNLLCRRPALITEGLSGWKSYPVKLDATWHAGHLCLNVSADITYSSTCPCSAALSRQLLEEAFTMRFGRQSFVDPMVVAAWLRENASHATPHSQRSVATVQVRVAEQAAELGLMSLIDAVEQALGTPVQTAVKRADEQAFARLNGQNLMYVEDAARKIQQALEGRYAASSVSVRHFESLHPHDAAAQTSNYLS

SEQ ID NO: 13282 - protein, 186 aa, Pseudomonas corrugata
  misc_feature (1)..(186): tr|A0A3M3EYD5|A0A3M3EYD5_9PSED GTP cyclohydrolase 1 OS= Pseudomonas corrugata OX=47879 GN=folE PE=3 SV=1
MALSLPQNYREILIGLGEDPEREGLLDTPARAAKAMQYLCHGYEQSVEQIVNGALFDSDSDEMVIVADIELYSLCEHHLLPFIGKAHVAYIPTGKVLGLSKIARLVDMFARRLQIQENLTRQIAAAVQQVTQAAGVAVVIEAQHMCMMMRGVEKQNSTMNTSVMLGAFRESSTTRQEFLQLIRRSK

SEQ ID NO: 13283 - protein, 300 aa, Pseudomonas corrugata
  misc_feature (1)..(300): tr|A0A3M3E6B0|A0A3M3E6B0_9PSED GTP cyclohydrolase FolE2 OS=Pseudomonas corrugata OX=47879 GN=folE2 PE=3 SV=1
MIMNAFALPDIAAQASRQALPLDWVGMCGVALPVLIEGQQLSAIADLGVSLDDVDARGIHMSRLYLALEMLENSPLSPPLLQRVLLHFLNSHEGLSQAASLTLHTELLLKRPALVSPLSGWKRYPVSIEAHLKHAVFHVELNIQIPYSSTCPCSAALARQLIQQQFVDDFANKSLEHAEVLAWLGSSKGIVATPHSQRSIASLNIRLSAGTSQLPLPRIINQAEAALGTAVQTAVKRADEQAFALANGQNLMFCEDAARRLSQALRQSPDVMALNVRVVHAESLHAHDAVAQSRWTREAA

SEQ ID NO: 13284 - protein, 298 aa, Pseudomonas costantinii
  misc_feature (1)..(298): tr|A0A1S2UYM0|A0A1S2UYM0_9PSED GTP cyclohydrolase FolE2 OS=Pseudomonas costantinii OX=168469 GN=folE2 PE=3 SV= 1
MNALTLPDIAAQASRQALPLDWVGMCGIALPILIDGQRLTATADAGVSLDDGEARGIHMSRLYLALEMLDQQPLTPALLRTLLERFLESHEGLSKNAYLRIHTNLLLKRQALISPLAGWKGYPVCIEARLENQMFHVELKIDVTYSSTCPCSAALARQLIQQQFLADFANTPLQHEDVLTWLGSANGIVATPHSQRSSAQLSIQLENNQVSLPLTDLIDNVEAALGTAVQTAVKRADEQAFALANGQNLMFCEDAARRLNLALKRSDAVKAFHLKVIHAESLHAHDAVAESRWTRHSA

SEQ ID NO: 13285 - protein, 186 aa, Pseudomonas costantinii
  misc_feature (1)..(186): tr|A0A1S2UTL0|A0A1S2UTL0_9PSED GTP cyclohydrolase 1 OS= Pseudomonas costantinii OX=168469 GN=folE PE=3 SV=1
MTLSLPQHYREILKGLGEDPEREGLLDTPKRAAKAMQYLCHGYEQNLEEIVNGALFSSDNDEMVILKDIELYSLCEHHLLPFIGKAHVAYIPTGKVLGLSKLARIVDMFARRLQIQENLTRQIADAIQQVTQAAGVAVVIEAKHMCMMMRGVEKQNSTMNTSVMLGAFRESNTTRMEFLQLIGRSK

SEQ ID NO: 13286 - protein, 296 aa, Pseudomonas cremoricolorata
  misc_feature (1)..(296): tr|A0A089YAG9|A0A089YAG9_9PSED GTP cyclohydrolase FolE2 OS=Pseudomonas cremoricolorata OX=157783 GN=folE2 PE=3 SV=1
MTSLSLPDIAAQTVPHATALEWVGMCGIALPVVFEQQRVSAVADAGVSLDDAQARGIHMSRLYLALKQLESAPLDCSALRRLLDSFLASHTGLSNRASVRIAFNHLLKRSALVSPLAGWKHYPVEIKAHLSGEMFHVELFMDIAYSSTCPCSAALARQLIQESFAKRFMDESAVDPKAVLSWLGTTEGVVATPHSQRSRARLQVRLGEGADALPFTALIDAAEQALGTAVQTAVKRADEQAFALANGQNLMFCEDAARRLHQALRQEEQLSGFHIRVEHAESLHAHDAVAASQWRW

SEQ ID NO: 13287 - protein, 181 aa, Pseudomonas cremoricolorata
  misc_feature (1)..(181): tr|A0A089WMV2|A0A089WMV2_9PSED GTP cyclohydrolase 1 OS= Pseudomonas cremoricolorata OX=157783 GN=folE PE=3 SV=1
MSLEQNYTEILGQIGEDVSREGLRDTPKRAAKAMKYLCRGYEQTLEEVTNNALFSSDNSEMVVVRDIELYSMCEHHMLPFIGKAHVAYLPKGKVLGLSKVARIVDMFARRLQIQENLSRQIAEAIEKVTGAAGVAVVIEAKHMCMMMRGVEKQNSSMITSVMLGEFRANAATRTEFLSLIR

SEQ ID NO: 13288 - protein, 180 aa, Pseudomonas cuatrocienegasensis
  misc_feature (1)..(180): tr|A0A1H8ZTZ0|A0A1H8ZTZ0_9PSED GTP cyclohydrolase 1 OS= Pseudomonas cuatrocienegasensis OX=543360 GN=folE PE=3 SV=1
MSLEQQYTAILGKLGEDVTREGLRDTPKRAAKAMQYLCQGYQQNLEEVTNGALFSSDASEMVLVRDIELYSLCEHHLLPFIGKAHVAYLPNGKVLGLSKVARIVDMYARRLQIQENLSRQIAEAVQQVTGALGVAVVVEAQHMCMMMRGVEKQNSSMVTSVMLGEFRDNAATRSEFLSLI

SEQ ID NO: 13289 - protein, 298 aa, Pseudomonas cuatrocienegasensis
  misc_feature (1)..(298): tr|A0A1H9N3F1|A0A1H9N3F1_9PSED GTP cyclohydrolase FolE2 OS=Pseudomonas cuatrocienegasensis OX=543360 GN=folE2 PE=3 SV=1
MNALTLPDIAAQATHHAQALTWVGMADIALPLHLAEQRIAGRADAGVSLDDGEARGIHMSRLYLALHAFEQQPVTPALLQQVLGHFLDSHLQLSNSAYLTLRGEVLLNRPALVSPLSGWKSYPLEIRARQDTRGFHVELQVSVGYSSTCPCSAALARRLIQQRFSADFADQPLDHADVLAWLGSTQGILATPHSQRSTATLQVRLDASAAELPLLTLIDDAERALGTALQTAVKRADEQAFALANGQNLMFCEDAARRLHRCLAALPLVAGFHLRVVHAESLHAHDAVAESQQHWQPS

SEQ ID NO: 13290 - protein, 187 aa, Pseudomonas daroniae
  misc_feature (1)..(187): tr|A0A4Q9QHV1|A0A4Q9QHV1_9PSED GTP cyclohydrolase 1 OS= Pseudomonas daroniae OX=2487519 GN=folE PE=3 SV=1
MDSSRNTLEQHYTAILGQLGEDVSREGLLDTPKRAAKAMQYLCNGYEKTLEEVTNGALFSSDASEMVLVKNIELYSLCEHHLLPFIGKAHVAYIPNGKVLGLSKVARIVDMYARRLQIQESLSRQIAEAVQQVTGALGVAVVIEAKHMCMMMRGVEKQNSSMVTSVMLGEFRENAATRSEFLSLVNN

SEQ ID NO: 13291 - protein, 302 aa, Pseudomonas daroniae
  misc_feature (1)..(302): tr|A0A4Q9QGU6|A0A4Q9QGU6_9PSED GTP cyclohydrolase FolE2 OS=Pseudomonas daroniae OX=2487519 GN=folE2 PE=3 SV=1
MTTSMKHRSNLPDIAAQRSDDSAATLDWVGMRCIALPVRIEEQAVSARIDAGVSLDDGQTRGIHMSRLYLALAELRREPLSPVLLRQVLERFLDSHRDLSLCAYLDLQGEWLIERPALVSPLSGYKAYPLTIRSRLDPGGFHLELGLQLGYSSTCPCSAALARQLIQQRFAEDFAERQPDFDELHAWLGSSAGIVATPHSQRSEAAILVRLKNEATALPFIDLLDRAEAALGTAVQTAVKRADEQAFALANGQNLMFCEDAARRLHGALLAMPGISAFHIQVTHAESLHAHDAVASASHGWR

SEQ ID NO: 13292 - protein, 186 aa, Pseudomonas deceptionensis
  misc_feature (1)..(186): tr|A0A0J6GDM4|A0A0J6GDM4_PSEDM GTP cyclohydrolase 1 OS= Pseudomonas deceptionensis OX=882211 GN=folE PE=3 SV=1
MNPSIAEHYREILVGLGENPEREGLRDTPTRAAKAMQYLCCGYAMSLKEVINGALFESQSDEMVIVRDIELYSMCEHHMLPFIGKAHVAYIPTGRVLGLSKIARVVDMFARRLQIQENLTKQIADAIQHSTDAAGVAVVIEAKHMCMMMRGVEKQNSVMTTSVMLGAFRESSATRLEFLQLIGRIG

SEQ ID NO: 13293 - protein, 186 aa, Pseudomonas deceptionensis
  misc_feature (1)..(186): tr|A0A0J6G670|A0A0J6G670_PSEDM GTP cyclohydrolase 1 OS= Pseudomonas deceptionensis OX=882211 GN=folE PE=3 SV=1
MSVLLPGYYRDILIGLGENPDREGLVDTPKRAAKAMQYLCQGYDQSLETIVNGALFASDSDEMVIVANIELYSLCEHHLLPFIGKAHVAYIPTGKVLGLSKIARIVDMFARRLQIQENLTREIADAIEGVTQAAGVAVVIEAKHMCMMMRGVEKQNSTMNTSVMLGAFREPSTRMEFLQLIGRSKS

SEQ ID NO: 13294 - protein, 297 aa, Pseudomonas delhiensis
  misc_feature (1)..(297): tr|A0A239L8K8|A0A239L8K8_9PSED GTP cyclohydrolase FolE2 OS=Pseudomonas delhiensis OX=366289 GN=folE2 PE=3 SV=1
MTAFLPDVASQAASDTLALDWVGMQGIALPLRLHGERLGALADAGVSLDDAAARGIHMSRLYLALSRLERAELGPRLLREVLDDFLASHAGLSRRASLRLAFDALLERPALVSPLSGWKRYPCEVHAQLDEQGLRLELRLRLAYSSTCPCSAALARQLIQQRFAADFAGGEPSHRDVHTWLGSSAGIVATPHSQRSFADLRLHLREGLDSLPLRELLDCAEAALGTAVQTAVKRADEQAFALANGQNLMFCEDAARRLHRALAQRDELDAFGLTVVHAESLHAHDAVARSQWRREAP

SEQ ID NO: 13295 - protein, 186 aa, Pseudomonas delhiensis
  misc_feature (1)..(186): tr|A0A239DZ81|A0A239DZ81_9PSED GTP cyclohydrolase 1 OS= Pseudomonas delhiensis OX=366289 GN=folE PE=3 SV=1
MTDSLSANYREILLGLGENPDREGLLDTPKRAAKAMRYLCHGYELSLEEIVNGALFASDNDEMVIVRDIELYSLCEHHLLPFIGKAHVAYIPTGRVLGLSKVARIVDMFARRLQIQENLTRQIAEAIERITGAAGVAVVIEAQHMCMMMRGVEKQNSQMFTSVMLGAFRDSSNTRQEFLQLIGRSK

SEQ ID NO: 13296 - protein, 181 aa, Pseudomonas denitrificans
  misc_feature (1)..(181): tr|A0A5J6QVU6|A0A5J6QVU6_PSEDE GTP cyclohydrolase I Fol E OS=Pseudomonas denitrificans OX=43306 GN=folE PE=4 SV =1
MSLEQNYSAILSQLGEDVTREGLVDTPKRAAKAMQYLCRGYQQTLEEIVNGALFSSDNSEMVLVKDIELYSLCEHHLLPFIGKAHVAYIPNGKVLGLSKVARIVDMYARRLQIQENMSRQIAEAVQQVTGALGVAVVIEAKHMCMMMRGVEKQNSSMVTSVMLGEFRENAATRSEFLSLIR

SEQ ID NO: 13297 - protein, 186 aa, Pseudomonas denitrificans
  misc_feature (1)..(186): tr|A0A5J6R431|A0A5J6R431_PSEDE GTP cyclohydrolase I Fol E OS=Pseudomonas denitrificans OX=43306 GN=folE PE=4 SV =1
MIEDLSHHYREILQGIGEDPTREGLLDTPKRAAKAMQYLCHGYGQTLDEIVNGALFASDNDEMVIVKDIELYSLCEHHLLPFIGKAHVAYIPTGKVLGLSKVARIVDMFARRLQIQESLTRQIAEAVQQVTSAAGVAVVIEAQHMCMMMRGVEKQNSVMNTSVMLGAFRASTNTRQEFLQLIGRSK

SEQ ID NO: 13298 - protein, 295 aa, Pseudomonas donghuensis
  misc_feature (1)..(295): tr|A0A2M9VSP8|A0A2M9VSP8_9PSED GTP cyclohydrolase FolE2 OS=Pseudomonas donghuensis OX=1163398 GN=folE2 PE=3 SV =1
MSAFTLPDIAAQATNSQLPLDWVGMCGIALPLQINGQILRASADAGVSLDDGASRGIHMSRLYLALEALEHQALSPVLLNAVLECFLDSHIGLSASAFLTLRFELMLKRPALISPLAGWKAYPVTLNAQLKDGVFHVELFVDVEYSSTCPCSAALARQLIQQQFLTDFGNRTLSHEAVLSWLGSAQGIVATPHSQRSVAKLQARLRQGINELPIEALIDHAEKALGTAVQTAVKRADEQAFALANGQNLMFCEDAARRLHVALKTLPWLGGFNLRVEHAESLHAHDAVAHSQWHW

SEQ ID NO: 13299 - protein, 186 aa, Pseudomonas donghuensis
  misc_feature (1)..(186): tr|A0A2M9VR01|A0A2M9VR01_9PSED GTP cyclohydrolase 1 OS= Pseudomonas donghuensis OX=1163398 GN=folE PE=3 SV=1
MESAPVTLEQNYTAILGQLGEDISREGLLDTPKRAAKAMQYLCRGYEQTLEEVTNGALFSSDNSEMVLVKDIELYSLCEHHMLPFIGKAHVAYIPDGKVLGLSKVARIVDMYARRLQIQENLSRQIAEAIQKVTGALGVAVVIEAKHMCMMMRGVEKQNSTMITSVMLGEFRENAATRSEFLSLIK

SEQ ID NO: 13300 - protein, 182 aa, Pseudomonas dryadis
  misc_feature (1)..(182): tr|A0A4Q9QT12|A0A4Q9QT12_9PSED GTP cyclohydrolase 1 OS= Pseudomonas dryadis OX=2487520 GN=folE PE=3 SV=1
MSLEQHYTAILGQLGEDVSREGLLDTPKRAAKAMQYLCRGYQQTLEEVTNGALFSSDASEMVLVKNIELYSLCEHHLLPFIGKAHVAYIPSGKVLGLSKVARIVDMYARRLQIQENLSRQIAEAVQRVTGAMGVAVVIEAQHMCMMMRGVEKQNSSMVTSVMLGEFRENAATRSEFLSLINP

SEQ ID NO: 13301 - protein, 186 aa, Pseudomonas dryadis
  misc_feature (1)..(186): tr|A0A4Q9QXN2|A0A4Q9QXN2_9PSED GTP cyclohydrolase 1 OS= Pseudomonas dryadis OX=2487520 GN=folE PE=3 SV=1
MNPSLPDHYRDILLGLGENPDREGLLDTPKRAAKAMQYLCNGYEKSLEEVVNGALFSSDSDEMVIVKDVELYSLCEHHLLPFIGKAHVAYIPTGKVLGLSKIARIVDMYARRLQIQENLTRQIADAIAQVTQAAGVAVVIEAQHMCMMMRGVEKQNSVMNTSVMLGAFRESYNTRHEFLQLIGRSK

SEQ ID NO: 13302 - protein, 182 aa, Pseudomonas duriflava
  misc_feature (1)..(182): tr|A0A562Q7R0|A0A562Q7R0_9PSED GTP cyclohydrolase 1 OS= Pseudomonas duriflava OX=459528 GN=folE PE=3 SV=1
MSLEQHYSAILSQLGEDVSREGLLDTPKRAAKAMQYLCRGYNQTLEEVVGDALFTSDNSEMVLVKNIELYSLCEHHMLPFIGKAHVAYMPSGKVLGLSKVARIVDMYARRLQIQENMTREIAEAIQKVTQAAGVAVVIEAQHMCMMMRGVEKQNSSMVTSVMLGQFRSNDATRAEFMGLINR

SEQ ID NO: 13303 - protein, 181 aa, Pseudomonas endophytica
  misc_feature (1)..(181): tr|A0A0Q1CCH9|A0A0Q1CCH9_9PSED GTP cyclohydrolase 1 OS= Pseudomonas endophytica OX=1563157 GN=folE PE=3 SV=1
MSLEQNYTAILGQLGEDVSREGLLDTPKRAAKAMQYLCRGYEQTLEEVTNGALFSSDNSEMVLVKDIELYSLCEHHLLPFIGKAHVAYIPSGKVLGLSKVARIVDMYARRLQIQENLSRQIADAVMQVTGALGVAVVIEAKHMCMMMRGVEKQNSSMITSVMLGEFRENAATRSEFLSLIK

SEQ ID NO: 13304 - protein, 187 aa, Pseudomonas endophytica
  misc_feature (1)..(187): tr|A0A0N8VSE6|A0A0N8VSE6_9PSED GTP cyclohydrolase 1 OS= Pseudomonas endophytica OX=1563157 GN=folE PE=3 SV=1
MSTSLPEHYREILVGLGENPEREGLLDTPKRAAKAMQYLCHGYNQSVEEIVNGALFASDSDEMVIVADIELYSLCEHHLLPFVGKAHVAYIPTGKVLGLSKVARIVDMFARRLQIQENLTREIADAIQNITQAAGVAVVIEAKHMCMMMRGVEKQNSTMNTSVMLGAFRESSSTRMEFLQLIGRSKS

SEQ ID NO: 13305 - protein, 293 aa, Pseudomonas entomophila
  misc_feature (1)..(293): sp|Q1I2L2|GCH4_PSEE4 GTP cyclohydrolase FolE2 OS=Pseudo monas entomophila (strain L48) OX=384676 GN=folE2 PE=3 SV=1
MTSLTLPDIAAQSAQQPLPLDWVGMCGIAMPVQFEGRQLSALADAGVSLDDGASRGIHMSRLYLALEALERDTLTPRLIHQVLEQFLFSHEGLSASAHLRLQFDHLLKRPALVSPLAGWKHYPVAIDARLKAEMFHVELSVEIPYSSTCPCSAALARQLIQERFDQDFTGQAVDRQGVRAWLGSSSGIVATPHSQRSMAKLQVRLVGDELPVTVLIDKAEAALGTAVQTAVKRADEQAFALANGQNLMFCEDAARRLNLALRQLDWVAGFTVRVEHAESLHAHDAVAVSRFQR

SEQ ID NO: 13306 - protein, 202 aa, Pseudomonas entomophila
  misc_feature (1)..(202): tr|Q1IAJ6|Q1IAJ6_PSEE4 GTP cyclohydrolase 1 OS=Pseudomo nas entomophila (strain L48) OX=384676 GN=folE PE=3 SV= 1
MQNDKERSHAKARQGVIDILEYLGEDTNRQGLHETPERFLKSMVAQTVGYSQDPYRVLEKFFEEVAGYKNLIMLQNIHFESMCEHHLAPIVGNATVGYIPNGRVVGLSKLARVVDIFAKRLQIQERLTSEIGLALDEVLRPKGVGVIIRAKHNCLCTRGAYKPNANMTTTYFSGVLDSDAIKRGEFYTAAALPWGNGVHHSQ

SEQ ID NO: 13307 - protein, 296 aa, Pseudomonas extremaustralis
  misc_feature (1)..(296): tr|A0A5C5QDF1|A0A5C5QDF1_9PSED GTP cyclohydrolase FolE2 OS=Pseudomonas extremaustralis OX=359110 GN=folE2 PE=3 SV=1
MNALTLPDIAAQASRQALPLDWVGMCGIALPILIDDQRLTATADAGVSLDDGSARGIHMSRLYLALEMLEQQPLTPALLRNVLQRFLDSHEDLSKNAYLRIHTDLLLKRPALVSPLTGWKAYPVSIEARVENQMFHVELKIDVAYSSTCPCSAALARQLIQQQFLQDFGNTPLRHEDVLTWLGSANGIVATPHSQRSSAQLHVHLQGDHLALVELINDAEAALGTAVQTAVKRADEQAFALANGQNLMFCEDAARRLNLALKRSDAVKAFHLKVIHAESLHAHDAVAESRWTRHSV

SEQ ID NO: 13308 - protein, 181 aa, Pseudomonas extremaustralis
  misc_feature (1)..(181): tr|A0A5C5Q7L8|A0A5C5Q7L8_9PSED GTP cyclohydrolase 1 OS= Pseudomonas extremaustralis OX=359110 GN=folE PE=3 SV=1
MTLEQNYTAILGQLGEDVTREGLLDTPKRAAKAMQYLCRGYEQTLEEVTNGALFSSDNSEMVLVKDIELYSLCEHHLLPFIGKAHVAYIPSGKVLGLSKVARIVDMYARRLQIQENLSRQIADAVMQVTGALGVAVVIEAKHMCMMMRGVEKQNSSMITSVMLGEFRENAATRSEFLSLIK

SEQ ID NO: 13309 - protein, 298 aa, Pseudomonas extremorientalis
  misc_feature (1)..(298): tr|A0A1H0SZJ3|A0A1H0SZJ3_9PSED GTP cyclohydrolase FolE2 OS=Pseudomonas extremorientalis OX=169669 GN=folE2 PE= 3 SV=1
MNALTLPDIAAQASRQALPLDWVGMCGIALPILIDGERLAATADAGVSLDDGAARGIHMSRLYLALEMLDQQPLTPARLRNVLQRFLDSHEGLSNNAYLRIHTDLLLKRSALVSPLAGWKGYPVSIQARLENQMFHVELKIDVTYSSTCPCSAALARQLIQQQFLEDFGNTPLQHEDVLTWLGSANGIVATPHSQRSSAQLLIELDGDQPSLPITELIDNVEAALGTAVQTAVKRADEQAFALANGQNLMFCEDAARRLNLALKRSDAVNAFHLKVIHAESLHAHDAVAESRWTRNPA

SEQ ID NO: 13310 - protein, 186 aa, Pseudomonas extremorientalis
  misc_feature (1)..(186): tr|A0A1H0QLV6|A0A1H0QLV6_9PSED GTP cyclohydrolase 1 OS= Pseudomonas extremorientalis OX=169669 GN=folE PE=3 SV= 1
MTLSLPHHYREILKGLGEDPEREGLLDTPKRAAKAMQYLCHGYEQNLEEIVNGALFASDNDEMVILKDIELYSLCEHHLLPFIGKAHVAYIPTGKVLGLSKLARIVDMFARRLQIQENLTRQIADAIQEVTQAAGVAVVIEAKHMCMMMRGVEKQNSTMNTSVMLGAFRESNTTRMEFLQLIGRSK

SEQ ID NO: 13311 - protein, 181 aa, Pseudomonas ficuserectae
  misc_feature (1)..(181): tr|A0A0P9RFF1|A0A0P9RFF1_9PSED GTP cyclohydrolase 1 (Fr agment) OS=Pseudomonas ficuserectae OX=53410 GN=ALO69_0 4710 PE=3 SV=1
MQRCRAPALLRKLLCAPSATGLPSHPSKPTRKHTPVTLEQNYTAILGQLGEDVSREGLLDTPKRAAKAMQYLCRGYAQTLEEVTNGALFSSDASEMVMVKDIELYSLCEHHLLPFIGKAHVAYIPNGKVLGLSKVARIVDMYARRLQIQENLSRQIAEAIQQVTGALGVAVVIEAKHMCMM

SEQ ID NO: 13312 - protein, 301 aa, Pseudomonas ficuserectae
  misc_feature (1)..(301): tr|A0A3M5C2Y3|A0A3M5C2Y3_9PSED GTP cyclohydrolase FolE2 OS=Pseudomonas ficuserectae OX=53410 GN=folE2 PE=3 SV= 1
MNNPLPDVALTEVSSALVSLDWVGMQGVEVPVRLAEAGVRYPVHAHVDLQVDLADPSVKGIHMSRLYRLLDRYAEHQILSPDTLGALMEAMVESHLDCHSSRARLTLSFNLLCRRPALITEGLSGWKSYPVKLDATWHAGRLCLDVSADITYSSTCPCSAALSRQLLEGAFTARFGRQSFVDPMQVATWLRENASFATPHSQRSVATVQVRVAEQATELGLMTLIDAVEQALGTPVQTAVKRADEQAFARLNGQNLMYVEDAARKVQQALEGRYVASSVSVRHFESLHPHDAAAQTSNYLS

SEQ ID NO: 13313 - protein, 298 aa, Pseudomonas flavescens
  misc_feature (1)..(298): tr|A0A1G8QKY4|A0A1G8QKY4_9PSED GTP cyclohydrolase FolE2 OS=Pseudomonas flavescens OX=29435 GN=folE2 PE=3 SV=1
MNHQTHLPDIAAQRSAGPAATLDWVGMRGIALPVRIAEQTLNARIDAGVSLDDGHTRGIHMSRLYLALAELQREPLSPASLRQVLHGFLDSHQGLSLCAYLDLRGEWLIERPALVSPLSGYKAYPLTIRAHLDPGGFHLQLGLQLGYSSTCPCSAALARQLIQQRFSDDFAACPPDFEQVLAWLGSSSGIVATPHSQRSEAKIRIRLPGDASTLPLIDLLDRAESALGTAVQTAVKRADEQAFALANGQNLMFCEDAARRLHEAVLAMPGVSGLHIQVTHAESLHAHDAVACASHNWR

SEQ ID NO: 13314 - protein, 187 aa, Pseudomonas flavescens
  misc_feature (1)..(187): tr|A0A1G7ZAD4|A0A1G7ZAD4_9PSED GTP cyclohydrolase 1 OS= Pseudomonas flavescens OX=29435 GN=folE PE=3 SV=1
MDSSRNTLEQHYTAILGQLGEDVSREGLLDTPKRAAKAMQYLCNGYAKTLEEVTNGALFSSEASEMVVVRNIELYSLCEHHLLPFIGKAHVAYIPNGKVLGLSKVARIVDMYARRLQIQESLSRQIAEAVQQVTGALGVAVVIEAKHMCMMMRGVEKQNSSMVTSVMLGEFRENAATRSEFLSLVNN

SEQ ID NO: 13315 - protein, 181 aa, Pseudomonas flexibilis
  misc_feature (1)..(181): tr|A0A0B2D6W3|A0A0B2D6W3_9PSED GTP cyclohydrolase 1 OS= Pseudomonas flexibilis OX=706570 GN=folE PE=3 SV=1
MSLEQHYSSILEQLGEDVAREGLRDTPKRAAKAMQFLCRGYEQTLEDVTNGALFSSDNSEMVLVKNIELYSLCEHHILPFIGKAHVAYMPNGKVLGLSKVARIVDMYARRLQIQENLTRQIAEAIEQVTDAAGVAVVIEAQHMCMMMRGVEKQNSSMVTSVMLGQFRSNAATRSEFLSLIR

SEQ ID NO: 13316 - protein, 301 aa, Pseudomonas floridensis
  misc_feature (1)..(301): tr|A0A1X0N324|A0A1X0N324_9PSED GTP cyclohydrolase FolE2 OS=Pseudomonas floridensis OX=1958950 GN=folE2 PE=3 SV =1
MNSSLPDVALTEASSALIALDWVGMRAIEVPIRLSEEGVSHPVHAYVDLHVDLADPSVKGIHMSRLYRLLDRFAEDRVLNVASLSDLLEAMVESHASCRSTRARIKLDFNLLCRRPALVTEGLSGWTSYPITLEGVWEAGRLSLDLAADITYSSTCPCSAALSRQALEQAFIARFDRQTFVDTMQVATWLRENGSLATPHSQRSVATVQVRVPEHATDLGLMALIDTTERALGTPVQTAVKRADEQAFARLNGQNLMYVEDAARKVQQALESTYAASSVSVRHFESLHPHDAAAQTSNYLT

SEQ ID NO: 13317 - protein, 119 aa, Pseudomonas floridensis
  misc_feature (1)..(119): tr|A0A1X0MLQ2|A0A1X0MLQ2_9PSED GTP cyclohydrolase 1 (Fr agment) OS=Pseudomonas floridensis OX=1958950 GN=BZK31_ 28400 PE=3 SV=1
MSLSLPQHYRDILVGLGEDPDREGLLDTPKRAAKAMQYLCHGYTQSVEEIVNGALFASDNDEMVIVQDIELYSLCEHHLLPFIGKAHVAYIPTGKVLGLSKIARIVDMFARRLQIQENL

SEQ ID NO: 13318 - protein, 297 aa, Pseudomonas fluorescens
  misc_feature (1)..(297): sp|Q4K3E8|GCH4_PSEF5 GTP cyclohydrolase FolE2 OS=Pseudo monas fluorescens (strain ATCC BAA-477 / NRRL B-23932 / Pf-5) OX=220664 GN=folE2 PE=3 SV=1
MNALTLPDIAAQASRQTLPLEWVGMCGIALPVVINNQPSAAKADAGVSLDDGEARGIHMSRLYLALEMLEQENLTPALLRRILQRFLDSHEGLAHSAYLRIQLDLLLKRPALVSPLAGWKSYPLSIEARLKNAMFHVELKIDVPYSSTCPCSAALARQLIQQQFIEDFANRPLQHADVLAWLGSPQGVVATPHSQRSNAALHLRLDDFIDELPLIALINDAENALGTAVQTAVKRADEQAFALANGQNLMFCEDAARRLNLALRRSPGINAFQLRVVHAESLHAHDAVAESRWNWEA

SEQ ID NO: 13319 - protein, 252 aa, Pseudomonas fluorescens
  misc_feature (1)..(252): tr|A0A109L392|A0A109L392_PSEFL Nif3-like dinuclear meta l center hexameric protein OS=Pseudomonas fluorescens O X=294 GN=C7A09_23380 PE=4 SV=1
MAVPLTTLVEEADRYLGSAKIADYCPNGLQVEGRPQVMRIVSGVTASQALLDAAVEAKADLVLVHHGYFWKGENPCITGMKQRRLKTLLKHDISLLAYHLPLDLHADVGNNVQLARHLDITVEGPLDPGNPKIVGLVGSLAEPLSPRDFARRVQDVMGREPLLIEGSEMIRRVGWCTGGGQGYIDQAIAAGVDLYLSGEASEQTFHSARENDISFIAAGHHATERYGVQALGDYLARRFALEHLFIDCPNPI

SEQ ID NO: 13320 - protein, 187 aa, Pseudomonas formosensis
  misc_feature (1)..(187): tr|A0A1I5ZKA0|A0A1I5ZKA0_9PSED GTP cyclohydrolase 1 OS= Pseudomonas formosensis OX=1002526 GN=folE PE=3 SV=1
MSLEKLTSNYHDILTNLGENPEREGLKGTPQRAAKAMQFLCRGYQQSLEEIVNGALFESSSDEMVIVKNIELYSLCEHHMLPFIGKAHVAYLPAGKVIGLSKVARIVDMFARRLQIQESLTRQIAEAVQTVTDARGVAVVIEARHMCMMMRGVEKQNSSMMTSVMLGAFRESFNTRQEFLQLIGRDN

SEQ ID NO: 13321 - protein, 186 aa, Pseudomonas formosensis
  misc_feature (1)..(186): tr|A0A1I6C886|A0A1I6C886_9PSED GTP cyclohydrolase 1 OS= Pseudomonas formosensis OX=1002526 GN=folE PE=3 SV=1
MSTENIALQYEAILRGIGEDPQRGGLAETPLRAAKAMQFLCKGYEQSLEEIVNNALFDAKGDEMVVVKDIELYSLCEHHMLPFVGKAHVAYLPKGKVIGLSKVARIVDMFARRLQIQENLTRQIAEALQEVTQAEGVAVVIEAKHMCMMMRGVEKQNSTMFTSVMLGAFRASGNTRQEFLQLIGRG

SEQ ID NO: 13322 - protein, 297 aa, Pseudomonas fragi
  misc_feature (1)..(297): tr|A0A0X8F0N1|A0A0X8F0N1_PSEFR GTP cyclohydrolase FolE2 OS=Pseudomonas fragi OX=296 GN=folE2 PE=3 SV=1
MNALTLPDIASQNARQSLPLEWVGMCGIALPVLINAQRHTATADAGVSLDDGEARGIHMSRLYLALEVLESQELNPLLLKIILQRFLDSHDDLSICAYLRIHTQLLLKRPALVSPLSGWKSYPVSIDASLKNGMFHVELKIEVTYSSTCPCSAALARQLIQQQFVSDFANQPLHHADVLTWLGSSQGIVATPHSQRSTACLQLNLSSELQSLPIEMIIDEAERALGTAVQTAVKRADEQAFALANGQNLMFCEDAARRLNVALKTAPGVKGFMLKVVHAESLHSHDAVAESRWNWRV

SEQ ID NO: 13323 - protein, 297 aa, Pseudomonas fragi
  misc_feature (1)..(297): tr|A0A267B212|A0A267B212_PSEFR GTP cyclohydrolase FolE2 OS=Pseudomonas fragi OX=296 GN=folE2 PE=3 SV=1
MNALTLPDVAAQSSQQAIALEWVGMCGIASPVLINGQRLSAKIDAGVNLVDATARGIHMSRLYLALDQLETENLTPALLRQLLQCFLDSHEGLSNKAYVRIHSDVLLKRSALVSPLAGWKSYPTSIEASLKNGMFHVELKILVSYSSTCPCSAALARQLIQRQFIDDFANTSLQHADVLAWLGSSKGIVATPHSQRSAAHLTIRLGHQFPQLPLETIINNAEGALGTAVQTAVKRADEQAFALANGQNLMFCEDAARRLNTVLQKTSGVEAFKLKVVHAESLHSHDAVAESFWNWEA

SEQ ID NO: 13324 - protein, 191 aa, Pseudomonas frederiksbergensis
  misc_feature (1)..(191): tr|A0A423KLG1|A0A423KLG1_9PSED GTP cyclohydrolase 1 OS= Pseudomonas frederiksbergensis OX=104087 GN=folE PE=3 S V=1
MPLSLPQNALSQSYREILIGLGENPDREGLQDTPMRAAKAMQYLCHGYEQSVEEIVNGALFSSDTDEMIIVADIELYSLCEHHLLPFIGKAHVAYIPTGKVLGLSKIARLVDMFARRLQIQENLTRQIADAVQQVTDAAGVAVVIEAKHMCMMMRGVEKQNSTMNTSVMLGAFRESSNTRQEFLQLIGRSK

SEQ ID NO: 13325 - protein, 191 aa, Pseudomonas frederiksbergensis
  misc_feature (1)..(191): tr|A0A1H4UVP6|A0A1H4UVP6_9PSED GTP cyclohydrolase 1 OS= Pseudomonas frederiksbergensis OX=104087 GN=folE PE=3 S V=1
MTFSLPQNALSQSYREILIGLGENPDREGLQDTPVRAAKAMQYLCRGYEQSVEEIVNGALFASDNDEMIIVDNIELYSLCEHHMLPFIGKAHVAYIPTGKVLGLSKIARLVDMFARRLQIQENLTRQIAEAVQQVTGAAGVAVVIEAKHMCMMMRGVEKQNSTMNTSVMLGAFRESSNTRQEFLQLIGRSK

SEQ ID NO: 13326 - protein, 296 aa, Pseudomonas fulva
  misc_feature (1)..(296): tr|F6ADE6|F6ADE6_PSEF1 GTP cyclohydrolase FolE2 OS=Pseu domonas fulva (strain 12-X) OX=743720 GN=folE2 PE=3 SV= 1
MNSQPLPDIAAQRSAHANVPLDRVGMGGIALPVLLGEQPINAQVDAGVSLDDGQSRGIHMSRLYLALAALQGEPLSPALLRYVLENFLVSHYGLSHCAYLELCGDWLLSRPALVSPLAGYKAYPLTINARLDPAGFHLELGLRVTYSSTCPCSAALARQLIQQRFAADFADRPLDFDALHAWLGSTGIVATPHSQRSDAHIRVRLPDEANALPFLALLDGAEAALGTAVQSAVKRADEQAFALANGQNLMFCEDAARRLCQALLKMPGIDAFHIQVTHAESLHAHDAVASASHGWC

SEQ ID NO: 13327 - protein, 187 aa, Pseudomonas fulva
  misc_feature (1)..(187): tr|F6A9V5|F6A9V5_PSEF1 GTP cyclohydrolase 1 OS=Pseudomo nas fulva (strain 12-X) OX=743720 GN=folE PE=3 SV=1
MDSSRNTLEQHYTAILGQLGEDVSREGLLDTPKRAAKAMQYLCNGYQKTLEEVTNGALFSSDASEMVVVKDIELYSLCEHHLLPFIGKAHVAYIPNGKVLGLSKVARIVDMYARRLQIQESLSRQIAEAVQQVTGALGVAVVIEAKHMCMMMRGVEKQNSSMVTSVMLGEFRENAATRSEFLSLVSG

SEQ ID NO: 13328 - protein, 186 aa, Pseudomonas furukawaii
  misc_feature (1)..(186): tr|L8MP31|L8MP31_PSEFK GTP cyclohydrolase 1 OS=Pseudomo nas furukawaii OX=1149133 GN=folE PE=3 SV=1
MNEDLSPHYREILLGLGEDPQREGLRDTPRRAAKAMRYLCHGYEQSLEEIVNGALFSSDNDEMVTVKDIELYSLCEHHLLPFIGKAHVAYIPTGKVLGLSKVARIVDMYARRLQIQENLTRQIAEAVQRVTGAAGVAVVIEAKHMCMMMRGVEKQNSVMSTSVMLGAFRQSQSTRHEFLKLIGRSN

SEQ ID NO: 13329 - protein, 297 aa, Pseudomonas furukawaii
  misc_feature (1)..(297): tr|L8MTQ8|L8MTQ8_PSEFK GTP cyclohydrolase FolE2 OS=Pseu domonas furukawaii OX=1149133 GN=folE2 PE=3 SV=1
MNAISLPDIAVQTQSGSLPLDWVGMCGIALPVRLDGQRIRVSADAGVSLDDGQARGIHMSRLYLALEMLEEEELSGDLMRRLLVRFLDSHRALSSRASLTLRGEALLGRAALVSPLKGWKAYPFEVHASLEGERFHVELRLELDYSSTCPCSAALARQLIQQRFDDDFRDRPLDHERILAWLGSQQGIVATPHSQRSRAHLRVRLEQVGTIPLRSLADLAEQALGTPVQTAVKRVDEQAFALANGQNLMFCEDAARRLAGALRQRSDVHGFGVRVVHAESLHAHDAVAEYRWNYSAE

SEQ ID NO: 13330 - protein, 181 aa, Pseudomonas fuscovaginae
  misc_feature (1)..(181): tr|A0A0N0E2M3|A0A0N0E2M3_9PSED GTP cyclohydrolase 1 OS= Pseudomonas fuscovaginae OX=50340 GN=folE PE=3 SV=1
MSLEQNYTAILGQLGEDVSREGLLDTPKRAAKAMQYLCRGYQQTLEEVTNGALFSSDNSEMVLVKDIELYSLCEHHLLPFIGKAHVAYIPSGKVLGLSKVARIVDMYARRLQIQENLSRQIADAVQQVTGALGVAVVIEAKHMCMMMRGVEKQNSSMITSVMLGEFRENAATRSEFLALIK

SEQ ID NO: 13331 - protein, 186 aa, Pseudomonas fuscovaginae
  misc_feature (1)..(186): tr|A0A1H6MS44|A0A1H6MS44_9PSED GTP cyclohydrolase 1 OS= Pseudomonas fuscovaginae OX=50340 GN=folE PE=3 SV=1
MSASLPEHYREILQGLGEDPDREGLLDTPKRAAKAMQYLCHGYTESIESVVNGALFASDNDEMVIVKDIELYSLCEHHLLPFIGKAHVAYIPTGKVLGLSKVARIVDMFARRLQIQENLTREIAEAIQQVTHAAGVAVVIEAQHMCMMMRGVEKQNSTMNTSVMLGAFRDSNTTRMEFLQLIGRSK

SEQ ID NO: 13332 - protein, 187 aa, Pseudomonas gallaeciensis
  misc_feature (1)..(187): tr|A0A395R3G2|A0A395R3G2_9PSED GTP cyclohydrolase 1 OS= Pseudomonas gallaeciensis OX=857227 GN=folE PE=3 SV=1
MSLENLTNNYREILTNLGEQPQRDGLKGTPERAAKAMQFLCRGYTQSLDEIVNGALFDSDNDEMVIVKDIELYSLCEHHMLPFIGKAHVAYIPTGKVIGLSKVARIVDMFARRLQIQENLTRQIAEAIQQMTNAAGVAVVIEAKHMCMMMRGVEKQNSSMHSSVMLGAFRESVNTRQEFLQLISRSN

SEQ ID NO: 13333 - protein, 301 aa, Pseudomonas gallaeciensis
  misc_feature (1)..(301): tr|A0A395R2G3|A0A395R2G3_9PSED GTP cyclohydrolase FolE2 OS=Pseudomonas gallaeciensis OX=857227 GN=folE2 PE=3 S V=1
MNAVLPDVSRTEVSSRLLPLDWVGMQGIDLPVVLDESGERQTVHARADVHVDLPQPQVKGIHMSRLYRLLDSLGEGAPLAPGRLRAVLQEMVDSHADCGSQSARLALQFDFLTRRPALVTEGLAGWKSYPVRLQASLSRGVFQLNLRVTVGYSSTCPCSAALARQLVQQAFLQTFAGQTLSAAQVASWLETHATLATPHSQRSEAEVDVTLEEAASGLGLLSLVDEIEQALGTPVQTAVKRADEQAFAALNGQNLMFVEDAARRIQSAPGLAGLQPQVFVRHIESLHPHDAVAWASGPSSL

SEQ ID NO: 13334 - protein, 203 aa, [Pseudomonas] geniculata; identical to SEQ ID NO: 5274
  misc_feature (1)..(203): tr|A0A0L8AFX8|A0A0L8AFX8_9GAMM GTP cyclohydrolase 1 OS= [Pseudomonas] geniculata N1 OX=1167641 GN=folE PE=3 SV= 1

SEQ ID NO: 13335 - protein, 181 aa, Pseudomonas gessardii
  misc_feature (1)..(181): tr|A0A1V2J057|A0A1V2J057_9PSED GTP cyclohydrolase 1 OS= Pseudomonas gessardii OX=78544 GN=folE PE=3 SV=1
MSLEQNYTEILGQIGEDVSREGLLDTPKRAAKAMQYLCRGYEQTLEEVTNGALFSSDSSEMVLVKDIELYSLCEHHLLPFIGKAHVAYIPSGKVLGLSKVARIVDMYARRLQIQENLSRQIADAVQQVTGALGVAVVIEAKHMCMMMRGVEKQNSSMITSVMLGEFRENAATRSEFLSLIK

SEQ ID NO: 13336 - protein, 185 aa, Pseudomonas gessardii
  misc_feature (1)..(185): tr|A0A1V2JQY9|A0A1V2JQY9_9PSED GTP cyclohydrolase 1 OS= Pseudomonas gessardii OX=78544 GN=folE PE=3 SV=1
MNEEMTKNYREILQHVGEDPQREGLLKTPERAAKAMRYLCHGYRQTLEEIVNGALFESDNDEMVIVREIELYSLCEHHLLPFIGKAHVAYIPTGKVLGLSKVARIIDMFARRLQIQENLTRQIADAIAQVTNAAGVAVVIEAKHMCMMMRGVEKQNSVMSTSVMLGAFRESYNTRQEFLQLIRSR

SEQ ID NO: 13337 - protein, 186 aa, Pseudomonas gingeri
  misc_feature (1)..(186): tr|A0A2K1FG82|A0A2K1FG82_9PSED GTP cyclohydrolase 1 OS= Pseudomonas gingeri NCPPB 3146 = LMG 5327 OX=707248 GN= folE PE=3 SV=1
MSATLPEHYREILLGLGEDPDREGLLDTPKRAAKAMQYLCHGYAEDLAGVVNGALFASDNDEMVIVKDIELYSLCEHHLLPFIGKAHVAYIPTGKVLGLSKIARIVDMFARRLQIQENLTREIADAIQQVTSAAGVAVVIEAQHMCMMMRGVEKQNSTMNTSVMLGAFRDSNTTRMEFLQLIGRSK

SEQ ID NO: 13338 - protein, 181 aa, Pseudomonas gingeri; identical to SEQ ID NO: 13228
  misc_feature (1)..(181): tr|A0A2K1FJJ8|A0A2K1FJJ8_9PSED GTP cyclohydrolase 1 OS= Pseudomonas gingeri NCPPB 3146 = LMG 5327 OX=707248 GN= folE PE=3 SV=1

SEQ ID NO: 13339 - protein, 181 aa, Pseudomonas graminis
  misc_feature (1)..(181): tr|A0A1C2DY65|A0A1C2DY65_9PSED GTP cyclohydrolase 1 OS= Pseudomonas graminis OX=158627 GN=folE PE=3 SV=1
MTLEQNYTAILGQLGEDVSREGLRDTPKRAAKAMQYLCRGYEQTLEEVTNGALFSSDNSEMVVVKDIELYSLCEHHLLPFIGKAHVAYIPSGKVLGLSKVARIVDMYARRLQIQENLSRQIAEAIQQVTGALGVAVVIEAKHMCMMMRGVEKQNSSMITSVMLGEFRENAATRTEFLSLIK

SEQ ID NO: 13340 - protein, 186 aa, Pseudomonas graminis
  misc_feature (1)..(186): tr|A0A1C2D8F4|A0A1C2D8F4_9PSED GTP cyclohydrolase 1 OS= Pseudomonas graminis OX=158627 GN=folE PE=3 SV=1
MTLSLPQHYREILVGLGEDPEREGLLDTPKRAAKAMQYLCHGYEQTLERIVNGALFASASDEMVIVKDIELYSLCEHHLLPFIGKAHVAYIPTGKVLGLSKIARIVDMFARRLQIQENLTRQIADAIQDVTKAAGVAVVIEAQHMCMMMRGVEKQNSTMNTSVMLGAFRESTTTRMEFLQLIGRSK

SEQ ID NO: 13341 - protein, 186 aa, Pseudomonas grimontii
  misc_feature (1)..(186): tr|A0A1H1BYT1|A0A1H1BYT1_9PSED GTP cyclohydrolase 1 OS= Pseudomonas grimontii OX=129847 GN=folE PE=3 SV=1
MTLSLPHHYREILKSLGEDPEREGLLDTPKRAAKAMQYLCHGYEQNLETIVNGALFASDNDEMVILKDIELYSLCEHHLLPFIGKAHVAYIPTGKVLGLSKLARIVDMFARRLQIQENLTRQIADAIQEVTQAAGVAVVIEAKHMCMMMRGVEKQNSTMNTSVMLGAFRESNTTRMEFLQLIGRSK

SEQ ID NO: 13342 - protein, 296 aa, Pseudomonas grimontii
  misc_feature (1)..(296): tr|A0A1H1DPG4|A0A1H1DPG4_9PSED GTP cyclohydrolase FolE2 OS=Pseudomonas grimontii OX=129847 GN=folE2 PE=3 SV=1
MNALTLPDIAAQASRQALPLDWVGMCGIALPILIDGQRLTATADAGVSLDDGTARGIHMSRLYLALEMLDQQPVTPAVLRNVLQRFLDSHEDLSKNAYLRLHTNLLLKRPALVSPLAGWKGYPVSIEARLENQMFHVELKIDVTYSSTCPCSAALARQLIQQQFIQDFGNTPLQHEDVLTWLGSANGIVATPHSQRSSAQLHVHLQGEHLALTDLINAAEAALGTAVQTAVKRADEQAFALANGQNLMFCEDAARRLNLALKRSDAVKAFHLKVIHAESLHAHDAVAESRWTRNPS

SEQ ID NO: 13343 - protein, 299 aa, Pseudomonas guangdongensis
  misc_feature (1)..(299): tr|A0A1H2FB82|A0A1H2FB82_9PSED GTP cyclohydrolase FolE2 OS=Pseudomonas guangdongensis OX=1245526 GN=folE2 PE=3 SV=1
MNASLLPDIAAQTSTACLPLQRVGMAGIAQPLRLHGERLAARIDAGVSLDDAGARGIHMSRLYLALEALEHEELTPALLARLLDAFLDSHAGLSQRAHLDIHCEALLRRPALVSPLAGWKGYPLRISASRVRGAALRLGLRVEIGYSSTCPCSAALARQLIQQRFAADFAGRELRQEAVLDWLGSSAGILATPHSQRSRAILDVQLGAACHELPLLALIDGAEAALGTALQTAVKRADEQAFALANGQNLMFCEDAARRLHRALRALPQLDAFSVRVEHAESLHAHDAVAESRWSREAA

SEQ ID NO: 13344 - protein, 181 aa, Pseudomonas guangdongensis
  misc_feature (1)..(181): tr|A0A1H2H4H4|A0A1H2H4H4_9PSED GTP cyclohydrolase 1 OS= Pseudomonas guangdongensis OX=1245526 GN=folE PE=3 SV=1
MSLEQHYTEILGLLGEDVNREGLRDTPKRAAKAMQYLCRGYAQSLEEVTNGALFSSDNSEMVVVRDIELYSLCEHHLLPFIGKAHVAYIPNGKVLGLSKVARIVDMYARRLQIQENLSRQIAEAIEQVTGALGVAVVIEAQHMCMMMRGVEKQNSAMVTSVMLGEFRANPATRGEFLSLIG

SEQ ID NO: 13345 - protein, 295 aa, Pseudomonas guariconensis
  misc_feature (1)..(295): tr|A0A2N5QIW0|A0A2N5QIW0_9PSED GTP cyclohydrolase FolE2 OS=Pseudomonas guariconensis OX=1288410 GN=folE2 PE=3 SV=1
MTSLTLPDVATQSLPEAVPLEWVGMCGIAVPLQFEGHTLNAQADAGVNLEDGAARGIHMSRLYLALEALENTELSPLLLRRLLASFLDTHVGLSSKAQVSLRFEHLLKRPALVSPLAGWKSYPVSLDATTDNEMFHVELSVVIPYSSTCPCSAALARQLIQQQFLKDFPEQVPDQSTLLEWLGSNQGIVATPHSQRSEAQVRVRLRENLQHLPLSELIDTLERALGTAVQTAVKRADEQAFALANGQNLMFCEDAARRLHQALRQVRWVEGFSLRVEHAESLHAHDAVAISRYRF

SEQ ID NO: 13346 - protein, 181 aa, Pseudomonas guariconensis
  misc_feature (1)..(181): tr|A0A1G6MHK9|A0A1G6MHK9_9PSED GTP cyclohydrolase 1 OS= Pseudomonas guariconensis OX=1288410 GN=folE PE=3 SV=1
MSLEQNYTAILSQLGEDVSREGLRDTPKRAAKAMKYLCRGYEQTLEEVTNDALFTSDNSEMVLVRDIELYSMCEHHMLPFIGKAHVAYLPKGKVLGLSKVARIVDMFARRLQIQENLSRQIAEAVEKVTGAAGVAVVIEAKHMCMMMRGVEKQNSTMITSVMLGEFRSNAATRSEFLSLIK

SEQ ID NO: 13347 - protein, 296 aa, Pseudomonas guguanensis
  misc_feature (1)..(296): tr|A0A1H0WZ89|A0A1H0WZ89_9PSED GTP cyclohydrolase FolE2 OS=Pseudomonas guguanensis OX=1198456 GN=folE2 PE=3 SV =1
MNEQPLPDIAAQATHHDLPLQWVGMAGIALPIRLAGAAVTASVDIGVSLDDAGARGIHMSRLYLALQHLAGKPLTLAALQHLLDGCLSSHHELSDSASLTVRGALPLQRPALVSQLSGWKHYPFEIHARQDGRGLHTELQVELDYSSTCPCSAALARQLIQQRFAETFAQESLDYLEVLDWLGSTQGIVATPHSQRSTATLRLRLAPDCAELPLLALIDSAERALGTPVQTAVKRADEQAFALANGQNLMFCEDAARRLHRALRQLPQASAFCLRVVHAESLHAHDAVAESRWNWS

SEQ ID NO: 13348 - protein, 181 aa, Pseudomonas guguanensis
  misc_feature (1)..(181): tr|A0A1H0W2I1|A0A1H0W2I1_9PSED GTP cyclohydrolase 1 OS= Pseudomonas guguanensis OX=1198456 GN=folE PE=3 SV=1
MSLEQQYTAILGQLGEDVSREGLLDTPKRAAKAMQYLCRGYQQTLEEVTNGALFSSDNSEMVLVKNIELYSLCEHHMLPFIGKAHVAYLPNGKVLGLSKVARIVDMYARRLQIQENLSRQIAEAVAQVTGALGVAVVIEAQHMCMMMRGVEKQNSSMVTSVMLGEFRSNPATRGEFLNLVR

SEQ ID NO: 13349 - protein, 186 aa, Pseudomonas guineae
  misc_feature (1)..(186): tr|A0A1I3PB74|A0A1I3PB74_9PSED GTP cyclohydrolase 1 OS= Pseudomonas guineae OX=425504 GN=folE PE=3 SV=1
MNPEMNNHYREIILGVGENPEREGLLDTPKRAAKAMQYLCNGYHKSLEEVVNGALFESDNDEMVIVRDIELYSLCEHHMLPFIGKAHVAYIPTGKVLGLSKVARIVDMFARRLQIQENLTKQIADAIQQVTNAAGVAVVIEAKHMCMMMRGVEKQNSVMTSSVMLGAFRESCNTRHEFLQLIGRGK

SEQ ID NO: 13350 - protein, 298 aa, Pseudomonas guineae
  misc_feature (1)..(298): tr|A0A1I3FP67|A0A1I3FP67_9PSED GTP cyclohydrolase FolE2 OS=Pseudomonas guineae OX=425504 GN=folE2 PE=3 SV=1
MNALTLPDIATQIPAHEQALDWVGMQGIALPINLAGQRINTRADVGVSLDDGNARGIHMSRLYLALHALEHNALNPATLQQLLGEFLDSHQGLSQQASITLRGETLLSRPALVSPLAGWKAYPFEVRARQGSWGFHVELQVEVAYSSTCPCSAALARQLIQQRFIEDFANQPLDHAHLLAWLGSPQGIVATPHSQRSYATLQVRLHEDCAELPLVELIDAAEQALGTAVQTAVKRADEQAFALANGQNLMFCEDAARRLHSALREQTAFNAFHLRVVHAESLHAHDAVAVSRWNWSNT

SEQ ID NO: 13351 - protein, 181 aa, Pseudomonas helleri
  misc_feature (1)..(181): tr|A0A0J6J678|A0A0J6J678_9PSED GTP cyclohydrolase 1 OS= Pseudomonas helleri OX=1608996 GN=folE PE=3 SV=1
MSLEQNYTAILGQLGEDVSREGLLDTPKRAAKAMKYLCRGYEQTLEEVTNGALFSSDNSEMVLVKDIELYSLCEHHLLPFIGKAHVAYIPSGKVLGLSKVARIVDMYARRLQIQENLSRQIADAVMQVTGALGVAVVIEAKHMCMMMRGVEKQNSSMITSVMLGEFRENAATRSEFLSLIK

SEQ ID NO: 13352 - protein, 298 aa, Pseudomonas helleri
  misc_feature (1)..(298): tr|A0A0J6HXA7|A0A0J6HXA7_9PSED GTP cyclohydrolase FolE2 OS=Pseudomonas helleri OX=1608996 GN=folE2 PE=3 SV=1
MNALTLPDIASQNARQIVPLDWVGMCGIALPIVIEGQRLTATADAGVSLDDGEARGIHMSRLYLALEMLESQDLNPLLLKKILQQFLDSHDDLSICAYLRIHTQMLLKRPALVSPLSGWKTYPVSIDASLKNGMFHVELKIEVNYSSTCPCSAALARQLIQQQFVNDFANKPLEHADVLAWLGSSQGIVATPHSQRSTAILQTLLSSDQRALPIEVIIDEAEAALGTAVQTAVKRADEQAFALANGQNLMFCEDAARRLNVALKTVPGVQGFNLKVVHAESLHSHDAVAESRWNWKAH

SEQ ID NO: 13353 - protein, 181 aa, Pseudomonas helmanticensis; identical to SEQ ID NO: 13225
  misc_feature (1)..(181): tr|A0A4R7VLT9|A0A4R7VLT9_9PSED GTP cyclohydrolase 1 OS= Pseudomonas helmanticensis OX=1471381 GN=folE PE=3 SV=1

SEQ ID NO: 13354 - protein, 186 aa, Pseudomonas helmanticensis
  misc_feature (1)..(186): tr|A0A4R7VPQ2|A0A4R7VPQ2_9PSED GTP cyclohydrolase 1 OS= Pseudomonas helmanticensis OX=1471381 GN=folE PE=3 SV=1
MTRSLPENYREILIGLGEDPDREGLLDTPVRAAKAMQYLCHGYEQSVDDIVNGALFASDSDEMIIVADIELYSLCEHHLLPFIGKAHVAYIPTGKVLGLSKIARLVDMFARRLQIQENLTRQIADAVQQVTDAAGVAVVIEARHMCMMMRGVEKQNSTMNTSVMLGAFRESSNTRQEFLQLIGRSK

SEQ ID NO: 13355 - protein, 186 aa, Pseudomonas hunanensis
  misc_feature (1)..(186): tr|A0A2I0CC83|A0A2I0CC83_9PSED GTP cyclohydrolase 1 OS= Pseudomonas hunanensis OX=1247546 GN=folE PE=3 SV=1
MSHSLAEHYHEILVGIGENPQREGLLDTPQRAAKAMQYLCNGYAQDLHEVVNGALFESENDEMIVVRDIELYSLCEHHMLPFIGKAHVAYLPTGRVLGLSKVARVVDMFARRLQIQENLTRQIAYAVQEVTDAAGVAVVIEAKHMCMMMRGVEKQNSVMMTSVMLGEFRDDPSTRHEFLNLIGRHS

SEQ ID NO: 13356 - protein, 181 aa, Pseudomonas hunanensis
  misc_feature (1)..(181): tr|A0A2I0C6V2|A0A2I0C6V2_9PSED GTP cyclohydrolase 1 OS= Pseudomonas hunanensis OX=1247546 GN=folE PE=3 SV=1
MSLEQNYTEILSQIGEDVSREGLLDTPKRAAKAMKYLCRGYEQTLEEVTNNALFSSDNSEMVLVRDIELYSMCEHHMLPFIGKAHVAYLPKGKVLGLSKVARIVDMYARRLQIQENLSRQIAEAVQQVTGAAGVAVVVEAKHMCMMMRGVEKQNSTMITSVMLGEFRDNAATRSEFLSLIK

SEQ ID NO: 13357 - protein, 296 aa, Pseudomonas hussainii
  misc_feature (1)..(296): tr|A0A1H7FDA5|A0A1H7FDA5_9PSED GTP cyclohydrolase FolE2 OS=Pseudomonas hussainii OX=1429083 GN=folE2 PE=3 SV=1
MTAALPDIAAQLHPHAQPLDWVGMQGIALPIQLLGHTLAAKVDAGVSLDTPGVRGIHMSRLYLALESLSEQPLDVGGLRAVLQQFLDYHQGMAQRAYIRLHGEVLIQRPALVSPLSGWRAYPLSIAAELGANGLQLSLTLDIGYSSTCPCSAALARQLIQQQFARYFAGKSFDHAAISTWLGSAEGIVATPHSQRSTATLQLQLAPTLSNLPIAQLLDSAEKALGTALQTAVKRADEQAFALANGQNLMFCEDAARRLHNALENHPALLGFDLTVVHAESLHAHDAVARSRWQAPL

SEQ ID NO: 13358 - protein, 182 aa, Pseudomonas hussainii
  misc_feature (1)..(182): tr|A0A1H7H0D7|A0A1H7H0D7_9PSED GTP cyclohydrolase 1 OS= Pseudomonas hussainii OX=1429083 GN=folE PE=3 SV=1
MSLEQHYSAILTQLGEDVQREGLLDTPKRAAKAMQFLCRGYQQTLDEVVGSALFSSDNSELVLVKNIELYSLCEHHLLPFIGKVHVGYLPNGKVLGLSKVARIVDMFGRRLQIQENLTRQIAEAIEQVTGALGVGVVIEAQHMCMMMRGVEKQNSSMVSSVMLGELRANPATRSEFLSLIGK

SEQ ID NO: 13359 - protein, 186 aa, Pseudomonas indica
  misc_feature (1)..(186): tr|A0A1G9MHE9|A0A1G9MHE9_9PSED GTP cyclohydrolase 1 OS= Pseudomonas indica OX=137658 GN=folE PE=3 SV=1
MSEQLSHHYREILRGLGENPEREGLLDTPKRAAKAMQYLCHGYGQTLEEIVNGALFESDNDEMVIVREIELYSLCEHHLLPFIGKAHVAYIPTGKVLGLSKVARIVDMYARRLQIQENLTRQIAEAVQSVTQAAGVAVVIEAKHMCMMMRGVEKQNSVMSTSVMLGAFRESSNTRHEFLKLIGRSN

SEQ ID NO: 13360 - protein, 181 aa, Pseudomonas indica
  misc_feature (1)..(181): tr|A0A1G9KUK7|A0A1G9KUK7_9PSED GTP cyclohydrolase 1 OS= Pseudomonas indica OX=137658 GN=folE PE=3 SV=1
MSLEQHYTAIIGQLGEDTSREGLIDTPKRAAKAMQYLCRGYQQTLDEIVNGALFSSDNSEMVLVKNIELYSLCEHHLLPFIGKAHVAYIPNGKVLGLSKVARIVDMYARRLQIQENLSRQIAEAVQQVTGALGVAVVIEAQHMCMMMRGVEKQNSSMVTSVMLGEFRESAATRSEFLSLIG

SEQ ID NO: 13361 - protein, 181 aa, Pseudomonas indoloxydans
  misc_feature (1)..(181): tr|A0A2T5PI54|A0A2T5PI54_9PSED GTP cyclohydrolase 1 OS= Pseudomonas indoloxydans OX=404407 GN=folE PE=3 SV=1
MSLEQQYTAILGQLGEDVSREGLLDTPKRAAKAMQYLCRGYQQTLEEVTNGALFSSDNSEMVLVKNIELYSLCEHHLLPFIGKAHVAYIPNGKVLGLSKVARIVDMYARRLQIQENLSRQIAEAIEQVTGALGVAVVIEAQHMCMMMRGVEKQNSSMVTSVMLGEFRSNPATRGEFLNLVR

SEQ ID NO: 13362 - protein, 186 aa, Pseudomonas indoloxydans
  misc_feature (1)..(186): tr|A0A2T5PJD5|A0A2T5PJD5_9PSED GTP cyclohydrolase 1 OS= Pseudomonas indoloxydans OX=404407 GN=folE PE=3 SV=1
MSQPLSQQYREILVGLGENPEREGLLDTPKRAAKAMQYLCHGYQQSLDEIVNGALFESDNDEMVIVKDIELYSLCEHHLLPFIGKAHVAYIPTGKVLGLSKVARIVDMYARRLQIQENLTKQIADAIQQVTNAAGVAVVIEAKHMCMMMRGVEKQNSVMSSSVMLGAFRESCNTRHEFLQLIGRNN

SEQ ID NO: 13363 - protein, 181 aa, Pseudomonas japonica
  misc_feature (1)..(181): tr|A0A239HC50|A0A239HC50_9PSED GTP cyclohydrolase 1 OS= Pseudomonas japonica OX=256466 GN=folE PE=3 SV=1
MSLEQHYTAILGQLGEDVSREGLLDTPKRAAKAMQYLCRGYNQTLEEVTNGALFSSDNSEMVLVRDIELYSLCEHHLLPFIGKAHVAYIPSGKVLGLSKVARIVDMYARRLQIQENLSREIAEAVQQVTGAVGVAVVIEAKHMCMMMRGVEKQNSSMITSVMLGEFRENAATRSEFLSLIK

SEQ ID NO: 13364 - protein, 299 aa, Pseudomonas japonica
  misc_feature (1)..(299): tr|A0A239BCB7|A0A239BCB7_9PSED GTP cyclohydrolase FolE2 OS=Pseudomonas japonica OX=256466 GN=folE2 PE=3 SV=1
MVRSMTSLTLPDIAAQASRHSLPLDWVGMCGIALPVRLDQHVLNATADAGVDLSDGHSRGIHMSRLYLALAAFNDEALSISLIRRVLRQFLDSHEGLSTCAYLTLRFEVLLERPALVSSESGFKRYPVILEARLSNEMFHVELSTDVVYSSTCPCSAALARQLIQQQFLTDFGNRSLTHEEVLSWLGGAHGIVATPHSQRSTAKLRIRLKDDCDDLPIRELIDQAEAALGTAVQTAVKRADEQAFALANGQNLMFCEDAARRLHLAVRALASVDGFQLRVEHAESLHAHDAVAQSQWNW

SEQ ID NO: 13365 - protein, 186 aa, Pseudomonas jessenii
  misc_feature (1)..(186): tr|A0A370S282|A0A370S282_9PSED GTP cyclohydrolase 1 OS= Pseudomonas jessenii OX=77298 GN=folE PE=3 SV=1
MESAPVTLEQNYTAILGQLGEDVSREGLLDTPKRAAKAMQYLCRGYEQTLEEVTNGALFSSDNSEMVLVKDIELYSLCEHHLLPFIGKAHVAYIPSGKVLGLSKVARIVDMYARRLQIQENLSRQIADAVQQVTGALGVAVVIEAKHMCMMMRGVEKQNSSMITSVMLGEFRENAATRSEFLSLIK

SEQ ID NO: 13366 - protein, 181 aa, Pseudomonas jessenii; identical to SEQ ID NO: 13303
  misc_feature (1)..(181): tr|A0A2V4JTM5|A0A2V4JTM5_9PSED GTP cyclohydrolase 1 OS= Pseudomonas jessenii OX=77298 GN=folE PE=3 SV=1

SEQ ID NO: 13367 - protein, 181 aa, Pseudomonas jinjuensis
  misc_feature (1)..(181): tr|A0A1G9YSC9|A0A1G9YSC9_9PSED GTP cyclohydrolase 1 OS= Pseudomonas jinjuensis OX=198616 GN=folE PE=3 SV=1
MSLEQNYSAILTQLGEDVTREGLVDTPKRAAKAMQYLCRGYQQTLEEIVNGALFSSDNSEMVLVKDIELYSLCEHHLLPFIGKAHVAYIPNGKVLGLSKVARIVDMFARRLQIQENMSRQIAEAVQQVTGALGVAVVIEAKHMCMMMRGVEKQNSSMVTSVMLGEFRDNAATRSEFLSLIR

SEQ ID NO: 13368 - protein, 186 aa, Pseudomonas jinjuensis
  misc_feature (1)..(186): tr|A0A1H0H755|A0A1H0H755_9PSED GTP cyclohydrolase 1 OS= Pseudomonas jinjuensis OX=198616 GN=folE PE=3 SV=1
MNESLTQHYRGILQGLGENPEREGLRDTPKRAAKAMRYLCHGYELTLEEIVNGALFASDNDEMVMVKDIELYSLCEHHLLPFIGKAHVAYIPTGKVLGLSKVARIVDMYARRLQIQENLTREIAEAVQSVTGAAGVAVVIEAQHMCMMMRGVEKQNSVMNTSVMLGAFRASNTTRQEFLQLIGRSK

SEQ ID NO: 13369 - protein, 186 aa, Pseudomonas kairouanensis
  misc_feature (1)..(186): tr|A0A4Z0AR92|A0A4Z0AR92_9PSED GTP cyclohydrolase 1 OS= Pseudomonas kairouanensis OX=2293832 GN=folE PE=3 SV=1
MTLSLPQHYREILKGLGEDPEREGLLDTPKRAAKAMQYLCHGYEQSLDEIVNGALFTSDNDEMVILKDIELYSLCEHHLLPFIGKAHVAYIPTGKVLGLSKLARIVDMYARRLQIQENLTRQIADAIQQVTQAAGVAVVIEAKHMCMMMRGVEKQNSTMNTSVMLGAFRESNTTRMEFLQLIGRSK

SEQ ID NO: 13370 - protein, 181 aa, Pseudomonas kairouanensis
  misc_feature (1)..(181): tr|A0A4Z0AR94|A0A4Z0AR94_9PSED GTP cyclohydrolase 1 OS= Pseudomonas kairouanensis OX=2293832 GN=folE PE=3 SV=1
MSLEQNYTAILGQLGEDVSREGLLDTPKRAAKAMQYLCRGYEQTLEEVTNGALFSSDNSEMVLVKDIELYSLCEHHLLPFIGKAHVAYIPSGKVLGLSKVARIVDMYARRLQIQENLSRQIADAVLQVTGALGVAVVIEAKHMCMMMRGVEKQNSSMITSVMLGEFRENAATRSEFLSLIK

SEQ ID NO: 13371 - protein, 186 aa, Pseudomonas kilonensis
  misc_feature (1)..(186): tr|A0A0F4XNZ5|A0A0F4XNZ5_9PSED GTP cyclohydrolase 1 OS= Pseudomonas kilonensis OX=132476 GN=folE PE=3 SV=1
MTLSLPQNYREILIGLGENPEREGLLDTPVRAAKAMQYLCHGYEQSVEQIVNGALFASDSDEMVIVADIELYSLCEHHLLPFIGKAHVAYIPTGKVLGLSKIARLVDMFARRLQIQENLTRQIADAVQQVTQAAGVAVVIEAQHMCMMMRGVEKQNSTMNTSVMLGAFRDSSTTRQEFLQLIRRSN

SEQ ID NO: 13372 - protein, 181 aa, Pseudomonas kilonensis; identical to SEQ ID NO: 13225
  misc_feature (1)..(181): tr|A0A0F4XGU4|A0A0F4XGU4_9PSED GTP cyclohydrolase 1 OS= Pseudomonas kilonensis OX=132476 GN=folE PE=3 SV=1

SEQ ID NO: 13373 - protein, 297 aa, Pseudomonas knackmussii
  misc_feature (1)..(297): tr|A0A024HA01|A0A024HA01_PSEKB GTP cyclohydrolase FolE2 OS=Pseudomonas knackmussii (strain DSM 6978 / LMG 2375 9 / B13) OX=1301098 GN=folE2 PE=3 SV=1
MTAFLPDIATQAAPAQLALDWVGMQGIALPLRLYGERLSALADAGVSLDDSNARGIHMSRLYLALARLAQDELTPSLLRQVLDDFLASHTGLSHRASLRLGFDLLLERAALVSRLHGWKTYPCEVHAQLDDQGLRLELQLRLPYSSTCPCSAALARQLIQQRFAADFAERTPSREAVHAWLGSSAGIVATPHSQRSFAELRIELRDDLEQLPLKALIDLAEASLGTAVQTAVKRADEQAFALANGQNPMFCEDAARRLHLALAGHADVRAFSLQVVHAESLHAHDAVARSQWRREVA

SEQ ID NO: 13374 - protein, 186 aa, Pseudomonas knackmussii
  misc_feature (1)..(186): tr|A0A024HN51|A0A024HN51_PSEKB GTP cyclohydrolase 1 OS= Pseudomonas knackmussii (strain DSM 6978 / LMG 23759 / B13) OX=1301098 GN=folE1 PE=3 SV=1
MSDSLSAHYREILLGLGEDPAREGLLDTPKRAAKAMRYLCHGYELSLEEIVNGALFASDNDEMVIVRDIELYSLCEHHLLPFIGKAHVAYIPTGKVLGLSKVARIVDMFARRLQIQENLTRQIAEAIERITGAAGVAVVIEAQHMCMMMRGVEKQNSQMFTSVMLGAFRESANTRQEFLQLIKRSH

SEQ ID NO: 13375 - protein, 298 aa, Pseudomonas koreensis
  misc_feature (1)..(298): tr|A0A4Q4L832|A0A4Q4L832_9PSED GTP cyclohydrolase FolE2 OS=Pseudomonas koreensis OX=198620 GN=folE2 PE=3 SV=1
MNALTLPDIAAQSARQAMPLDWVGMREIALPVLLEGQRLSARVDAGVSLDDSEARGIHMSRLYLALEALEQRSLSPALLHQVLECFLASHRGLSECAYLNVHTDLLLKRPALVSPLAGWKSYPASISASLKQQMFHVELKIELPYSSTCPCSAALARQLIQQQFIDDFANKTLQHEDVLAWLGSTKGIVATPHSQRSYAQLHLQLDNFIDELPLTAIINDAEAALGTAVQTAVKRPDEQAFALANGQNLMFCEDAARRLNLALQRTPGINQFHIRVIHAESLHAHDAVAESSWQREQP

SEQ ID NO: 13376 - protein, 181 aa, Pseudomonas koreensis
  misc_feature (1)..(181): tr|A0A1E8PIC1|A0A1E8PIC1_9PSED GTP cyclohydrolase 1 OS= Pseudomonas koreensis OX=198620 GN=folE PE=3 SV=1
MSLEQNYTAILGQLGEDVSREGLLDTPKRAAKAMQYLCRGYAQTLEEVTNGALFSSDNSEMVLVKDIELYSLCEHHLLPFIGKAHVAYIPSGKVLGLSKVARIVDMYARRLQIQENLSRQIADAVMQVTGALGVAVVIEAKHMCMMMRGVEKQNSSMITSVMLGEFRENAATRSEFLSLIK

SEQ ID NO: 13377 - protein, 298 aa, Pseudomonas kribbensis
  misc_feature (1)..(298): tr|A0A4Y8V7A3|A0A4Y8V7A3_9PSED GTP cyclohydrolase FolE2 OS=Pseudomonas kribbensis OX=1628086 GN=folE2 PE=3 SV= 1
MNALTLPDIAAQAARQALPLDWVGMRGIALPVFIEGQRLAAKADAGVSLDDGEARGIHMSRLYLALEMLEQQNLTPALLQQVLQRFIDSHEGLANSAYLNIHTDLLLRRPALVSLLAGWKTYPVTIAATLKNAVFHVELNIEVAYSSTCPCSAALARQLIQQQFVDDFANKPLQHAEVLAWLGSTQGIIATPHSQRSTAQLHLHLDEFVDGLPLTSTINDAEAALGTAVQTAVKRADEQAFALANGQNLMFCEDAARRLNLALRRSPGIREFHLRVIHAESLHAHDAVAESHWRRETA

SEQ ID NO: 13378 - protein, 186 aa, Pseudomonas kribbensis
  misc_feature (1)..(186): tr|A0A345RKK5|A0A345RKK5_9PSED GTP cyclohydrolase 1 OS= Pseudomonas kribbensis OX=1628086 GN=folE PE=3 SV=1
MTRSLPENYREILIGLGEDPDREGLLDTPVRAAKAMQYLCHGYEQSVDEIVNGALFASDSDEMIIVADIELYSLCEHHLLPFIGKAHVAYIPTGKVLGLSKIARLVDMFARRLQIQENLTRQIAEAVQQVTDAAGVAVVIEARHMCMMMRGVEKQNSTMNTSVMLGAFRESSNTRQEFLQLIGRSK

SEQ ID NO: 13379 - protein, 185 aa, Pseudomonas kunmingensis
  misc_feature (1)..(185): tr|A0A2N8SCD7|A0A2N8SCD7_9PSED GTP cyclohydrolase 1 OS= Pseudomonas kunmingensis OX=1211807 GN=folE PE=3 SV=1
MNEDMIQHYRGILEGVGENPGREGLVDTPKRAAKAMQYLCQGYGQTVEQVVNGALFESDNDEMVIVRDIELYSMCEHHMLPFIGKAHVAYIPTGKVLGLSKVARIVDMFARRLQIQENMTKQIADAIMQVTNAAGVAVVIEAQHMCMMMRGCEKQNSVMTTSVMLGEFRDSYNTRQEFLQLIRGR

SEQ ID NO: 13380 - protein, 181 aa, Pseudomonas kunmingensis; identical to SEQ ID NO: 13197
  misc_feature (1)..(181): tr|A0A1I3WRT4|A0A1I3WRT4_9PSED GTP cyclohydrolase 1 OS= Pseudomonas kunmingensis OX=1211807 GN=folE PE=3 SV=1

SEQ ID NO: 13381 - protein, 181 aa, Pseudomonas kuykendallii
  misc_feature (1)..(181): tr|A0A2W5CUK2|A0A2W5CUK2_9PSED GTP cyclohydrolase 1 OS= Pseudomonas kuykendallii OX=1007099 GN=folE PE=3 SV=1
MSLEKNYTEILAEIGEDVNREGLLDTPKRAAKAMQYLCRGYQQTLEEVTNGALFSSDNSEMVLVKNIELYSMCEHHMLPFIGKAHVAYLPSGKVLGLSKVARIVDMYARRLQIQENLTRQIADAVQSITQAAGVAVVIEAQHMCMMMRGVEKQNSSMVTSVMLGEFRENSDTRAEFLSLVN

SEQ ID NO: 13382 - protein, 181 aa, Pseudomonas kuykendallii
  misc_feature (1)..(181): tr|A0A1H3E1G8|A0A1H3E1G8_9PSED GTP cyclohydrolase 1 OS= Pseudomonas kuykendallii OX=1007099 GN=folE PE=3 SV=1
MSLEKNYTEILAEIGEDVNREGLLDTPKRAAKAMQYLCRGYQQTLEEVTNGALFSSDNSEMVLVKNIELYSMCEHHMLPFIGKAHVAYLPSGKVLGLSKVARIVDMYARRLQIQENLTRQIADAVQSITHAAGVAVVIEAQHMCMMMRGVEKQNSSMVTSVMLGEFRENSDTRAEFLSLVN

SEQ ID NO: 13383 - protein, 181 aa, Pseudomonas lactis
  misc_feature (1)..(181): tr|A0A0R3C8A5|A0A0R3C8A5_9PSED GTP cyclohydrolase 1 OS= Pseudomonas lactis OX=1615674 GN=folE PE=3 SV=1
MSLEQNYTAILGQLGEDVSREGLLDTPKRAAKAMQYLCRGYEQTLEEVTNGALFSSDNSEMVLVKDIELYSLCEHHLLPFIGKAHVAYIPSGKVLGLSKVARIVDMYARRLQIQENLSRQIADAVLEVTGALGVAVVIEAKHMCMMMRGVEKQNSSMITSVMLGEFRENAATRSEFLSLIK

SEQ ID NO: 13384 - protein, 181 aa, Pseudomonas lactis
  misc_feature (1)..(181): tr|I4KGD7|I4KGD7_9PSED GTP cyclohydrolase 1 OS=Pseudomo nas lactis OX=1615674 GN=folE PE=3 SV=1
MSLEQNYTEILGQLGEDVSREGLLDTPKRAAKAMQYLCRGYEQTLEEVTNGALFSSDNSEMVLVKDIELYSLCEHHLLPFIGKAHVAYIPSGKVLGLSKVARIVDMYARRLQIQENLSRQIADAVLEVTGALGVAVVIEAKHMCMMMRGVEKQNSSMITSVMLGEFRENAATRSEFLSLIK

SEQ ID NO: 13385 - protein, 186 aa, Pseudomonas laurylsulfatiphila
  misc_feature (1)..(186): tr|A0A2S6FFB2|A0A2S6FFB2_9PSED GTP cyclohydrolase 1 OS= Pseudomonas laurylsulfatiphila OX=2011015 GN=folE PE=3 SV=1
MTLSLPQNYREILIGLGENPDREGLLDTPVRAAKAMQYLCHGYEQSVEEIVNGALFASDNDEMVIVDNIELYSLCEHHMLPFIGKAHVAYIPTGKVLGLSKIARLVDMFARRLQIQENLTRQIADAVQQVTGAAGVAVVIEAQHMCMMMRGVEKQNSTMNTSVMLGAFRESSNTRQEFLQLIGRSK

SEQ ID NO: 13386 - protein, 298 aa, Pseudomonas laurylsulfatiphila
  misc_feature (1)..(298): tr|A0A2S6FIP2|A0A2S6FIP2_9PSED GTP cyclohydrolase FolE2 OS=Pseudomonas laurylsulfatiphila OX=2011015 GN=folE2 PE=3 SV=1
MNALTLPDIAAQASLQALPLEWVGMCGIALPVLFDGQRLNAKADAGVSLDDGNARGIHMSRLYLALELLEQESLSPALLRRVLQRFLESHEGLSRSAHLTIHAEVLLKRPALISPLSGWKSYPVSIEARLKNAMFHVELKIDVPYSSTCPCSAALSRQLIQQQFVDDFANKSLQHADVLAWLGSTNGIVATPHSQRSSAKLRVRLADFLDELPLIAIINDAEAALGTAVQTAVKRADEQAFALANGQNLMFCEDAARRLNLALKRSTGINAFHIRVIHAESLHAHDAVAESRFNWEIA

SEQ ID NO: 13387 - protein, 298 aa, Pseudomonas laurylsulfativorans
  misc_feature (1)..(298): tr|A0A2S3VME4|A0A2S3VME4_9PSED GTP cyclohydrolase FolE2 OS=Pseudomonas laurylsulfativorans OX=1943631 GN=folE2 PE=3 SV=1
MNALTLPDIAAQASRQALPLEWVGMCGIALPVLFDGQRLNAKADAGVSLDDGNVRGIHMSRLYLALELLEQESLSPALLRRVLQRFLESHEGLSSSAHLTIHTDVLLKRPALISPLAGWKSYPVSIEARLKNAMFHVELKIELPYSSTCPCSAALSRQLIQQQFVDDFANKSLQHADVLAWLGSTNGIVATPHSQRSSALLCVRLADFLDDLPLIAIINDAEAALGTAVQTAVKRADEQAFALANGQNLMFCEDAARRLNLALKRSTGINAFHIRVIHAESLHAHDAVAESRFNWEVA

SEQ ID NO: 13388 - protein, 186 aa, Pseudomonas laurylsulfativorans
  misc_feature (1)..(186): tr|A0A2S3VS12|A0A2S3VS12_9PSED GTP cyclohydrolase 1 OS= Pseudomonas laurylsulfativorans OX=1943631 GN=folE PE=3 SV=1
MTLSLPQNYREILIGLGENPDREGLLDTPMRAAKAMQYLCHGYEQSVEDIVNGALFASDNDEMVIVDNIELYSLCEHHILPFIGKAHVAYIPTGKVLGLSKIARLVDMFARRLQIQENLTRQIADAVQQVTGAAGVAVVIEAQHMCMMMRGVEKQNSTMNTSVMLGAFRESSNTRQEFLQLIGRSK

SEQ ID NO: 13389 - protein, 186 aa, Pseudomonas libanensis
  misc_feature (1)..(186): tr|A0A0R2YD45|A0A0R2YD45_9PSED GTP cyclohydrolase 1 OS= Pseudomonas libanensis OX=75588 GN=folE PE=3 SV=1
MTLSLPHHYREILKGLGEDPQREGLLDTPKRAAKAMQYLCHGYGQNLEEIVNGALFASDNDEMVILKDIELYSLCEHHLLPFIGKAHVAYIPTGKVLGLSKLARIVDMFARRLQIQENLTRQIADAIQDVTQAAGVAVVIEARHMCMMMRGVEKQNSTMNTSVMLGAFRESNTTRMEFLQLIGRSK

SEQ ID NO: 13390 - protein, 296 aa, Pseudomonas libanensis
  misc_feature (1)..(296): tr|A0A0R2YMH6|A0A0R2YMH6_9PSED GTP cyclohydrolase FolE2 OS=Pseudomonas libanensis OX=75588 GN=folE2 PE=3 SV=1
MNALTLPDIAAQASRQALPLDWVGMCGIALPILIDDQRLTATADAGVSLDDGTARGIHMSRLYLALEMLDQQPLTPALLRNVLLRFLDSHEGLSKNAYLRIHTDLLLKRPALVSPLAGWKSYPVSIEARLENQMFHVELKIDVTYSSTCPCSAALARQLIQQQFLEDFANSPLQHEDVLAWLGSANGIVATPHSQRSSAQLHVHLQGNELTIVDLINGAEAALGTAVQTAVKRADEQAFALANGQNLMFCEDAARRLNLALKRSDAVKAFHLKVIHAESLHAHDAVAESRWTRDLA

SEQ ID NO: 13391 - protein, 191 aa, Pseudomonas lini
  misc_feature (1)..(191): tr|A0A0J6K1S9|A0A0J6K1S9_9PSED GTP cyclohydrolase 1 OS= Pseudomonas lini OX=163011 GN=folE PE=3 SV=1
MTLFPPHNSLSESYREILIGLGENPDREGLQDTPVRAAKAMQYLCHGYEQSVEEIVNGALFASDNDEMIIVDNIELYSLCEHHMLPFIGKAHVAYIPTGKVLGLSKIARLVDMFARRLQIQENLTRQIADAVQQVTDAAGVAVVIEAQHMCMMMRGVEKQNSTMNTSVMLGAFRESSNTRQEFLQLIGRSK

SEQ ID NO: 13392 - protein, 181 aa, Pseudomonas lini
  misc_feature (1)..(181): tr|A0A0J6HJM0|A0A0J6HJM0_9PSED GTP cyclohydrolase 1 OS= Pseudomonas lini OX=163011 GN=folE PE=3 SV=1
MSLEQNYTEILGQLGEDASREGLLDTPKRAAKAMQYLCRGYEQTLEEVTNGALFSSDNSEMVLVKDIELYSLCEHHMLPFIGKAHVAYIPSGKVLGLSKVARIVDMYARRLQIQENLSRQIADAVQQVTGALGVAVVIEAKHMCMMMRGVEKQNSTMITSVMLGEFRENAATRSEFLSLIK

SEQ ID NO: 13393 - protein, 189 aa, Pseudomonas linyingensis
  misc_feature (1)..(189): tr|A0A1H6XTY9|A0A1H6XTY9_9PSED GTP cyclohydrolase 1 OS= Pseudomonas linyingensis OX=915471 GN=folE PE=3 SV=1
MSDQLSQITHHYHEILKGLGEDPEREGLLDTPKRAAKAMQYLCRGYEQSLDEIVNGALFASDNDEMVIVRDIELYSLCEHHLLPFIGKAHVAYIPTGKVLGLSKVARIVDMFARRLQIQENLTRQIAEAVQQVTSAAGVAVVIEAKHMCMMMRGVEKQNSVMTSSVMLGAFRQSTNTRQEFLQLIGRSK

SEQ ID NO: 13394 - protein, 304 aa, Pseudomonas linyingensis
  misc_feature (1)..(304): tr|A0A1H7AHC2|A0A1H7AHC2_9PSED GTP cyclohydrolase FolE2 OS=Pseudomonas linyingensis OX=915471 GN=folE2 PE=3 SV =1
MNSLTLPDIAAQTTTARLPLERVGMAGIAQPVVLLGQRLAARVAAGVSLDDAAARGIHMSRLYLALAALESEELAPALLARVLGEFLASHRGLSARAQLEIRGEALLRRPALVSPLAGWKGYPFLVDAQLDADGLRVELEVAIGYSSTCPCSAALARQLFQQRFAADFAGQALEPGAVLEWLGSSAGSLATPHSQRSTATLRVTLAREATTLPLLELIERAETALGTALQTAVKRADEQAFALANGQNLMFCEDAARRLHVALLRQPVLDAFSVRVVHAESLHAHDAVAESRWRSATGATPTAR

SEQ ID NO: 13395 - protein, 186 aa, Pseudomonas litoralis
  misc_feature (1)..(186): tr|A0A1H1VZY2|A0A1H1VZY2_9PSED GTP cyclohydrolase 1 OS= Pseudomonas litoralis OX=797277 GN=folE PE=3 SV=1
MMSIENLTHSYESILLNLGENPQRGGLLGTPLRAAKAMQFLCRGYDQSLDEIVNNALFDADSDEMVIVKDIELYSLCEHHMLPFIGKAHVAYIPTGKVIGLSKIARIVDMFARRLQIQENLTRQIAEAIQEVTDAGGVAVVIEAKHMCMMMRGVEKQNSSMYTSVMLGAFRESGNTRQEFLQLIGR

SEQ ID NO: 13396 - protein, 187 aa, Pseudomonas litoralis
  misc_feature (1)..(187): tr|A0A1H1LH23|A0A1H1LH23_9PSED GTP cyclohydrolase 1 OS= Pseudomonas litoralis OX=797277 GN=folE PE=3 SV=1
MSLEKLTSNYHDILTNLGENPEREGLKGTPLRAAKAMQFLCRGYDQSLEEIVNGALFESSSDEMVIVKNIELYSLCEHHMLPFIGKAHVAYMPNGKVVGLSKIARIVDMFARRLQIQESLTRQIAEAVQSVTDAQGVAVVIEAKHMCMMMRGVEKQNSSMLTSVMLGSFRESVNTRQEFLQLIGRSN

SEQ ID NO: 13397 - protein, 297 aa, Pseudomonas lundensis
  misc_feature (1)..(297): tr|A0A2C8F1P0|A0A2C8F1P0_9PSED GTP cyclohydrolase FolE2 OS=Pseudomonas lundensis OX=86185 GN=folE PE=3 SV=1
MTSLTLPDIASQTALHDIPLDWVGMCGIALPVVINGQRLAATADAGVSLDDGEARGIHMSRLFLALEVLDSQAVNPALLKKILQRFLDSHDELSTCAYLNLNTQMLLKRPALISPLSGWKSYPVEIKASLENGMFHVELNVEVEYSSTCPCSAALARQLIQQKFVDDYANKTLQHAEVLAWLGSTRGIVATPHSQRSTAHLQLHIREDGDNFPIEYVIDKAEKALGTAVQTAVKREDEQAFALANGQNLMFCEDAVRRLHVALKSTSAVKGFNLKVVHAESLHSHDAVAKSRWNWRR

SEQ ID NO: 13398 - protein, 181 aa, Pseudomonas lundensis
  misc_feature (1)..(181): tr|A0A1D9ISZ5|A0A1D9ISZ5_9PSED GTP cyclohydrolase 1 OS= Pseudomonas lundensis OX=86185 GN=folE PE=3 SV=1
MTLEQNYTAILGQLGEDVSREGLLDTPKRAAKAMQYLCRGYEQTLEEVTNGALFSSDNSEMVLVKDIELYSLCEHHLLPFIGKAHVAYIPSGKVLGLSKVARIVDMYARRLQIQENLSRQIADAVLQVTGALGVAVVIEAKHMCMMMRGVEKQNSSMITSVMLGEFRDNAATRSEFLSLIK

SEQ ID NO: 13399 - protein, 298 aa, Pseudomonas lurida
  misc_feature (1)..(298): tr|A0A2R3I3W9|A0A2R3I3W9_9PSED GTP cyclohydrolase FolE2 OS=Pseudomonas lurida OX=244566 GN=folE2 PE=3 SV=1
MNALTLPDIAAQASRQALPLEWVGMCGIALPILIDGQRLAATADAGVSLNDGTARGIHMSRLYLALEMLDQQALTPALLRNVLQRFLDSHEGLSNNAYLRIHTDVLLKRPALVSPLAGWKGYPVSIEARLENQMFHVELKIDVAYSSTCPCSAALARQLIQQQFLQDFANTPLQHEDVLTWLGSASGIVATPHSQRSSAQLLIQLDGDQSGLPITDLIDDVEAALGTAVQTAVKRADEQAFALANGQNLMFCEDAARRLNLALKRSDAVKAFHLKVIHAESLHAHDAVAESRWTRNPA

SEQ ID NO: 13400 - protein, 298 aa, Pseudomonas lurida
  misc_feature (1)..(298): tr|A0A2A9DJM9|A0A2A9DJM9_9PSED GTP cyclohydrolase FolE2 OS=Pseudomonas lurida OX=244566 GN=folE2 PE=3 SV=1
MNALTLPDIAAQASRQALPLDWVGMCGIALPILIDGQRLAATADAGVSLNDGTARGIHMSRLYLALEMLDQQALTPALLRNLLQRFLDSHEGLSNNAYLRIHTDVLLKRPALVSPLAGWKGYPVSIEARLENQMFHVELKIDVAYSSTCPCSAALARQLIQQQFLQDFANTPLQHEDVLTWLGSASGIVATPHSQRSSAQLLIQLDGDQSGLPITDLIDDVEAALGTAVQTAVKRADEQAFALANGQNLMFCEDAARRLNLALKRSDAVKAFHLKVIHAESLHAHDAVAESRWTRNPA

SEQ ID NO: 13401 - protein, 181 aa, Pseudomonas lutea
  misc_feature (1)..(181): tr|A0A098SXE1|A0A098SXE1_9PSED GTP cyclohydrolase 1 OS= Pseudomonas lutea OX=243924 GN=folE PE=3 SV=1
MTLEQNYTAILGQLGEDVSREGLRDTPKRAAKAMQYLCRGYEQTLEDVTNGALFSSDNSEMVVVKDIELYSLCEHHLLPFIGKAHVAYIPSGKVLGLSKVARIVDMYARRLQIQENLSRQIAEAIQQVTGALGVAVVIEAKHMCMMMRGVEKQNSSMITSVMLGEFRENAATRTEFLSLIK

SEQ ID NO: 13402 - protein, 186 aa, Pseudomonas lutea
  misc_feature (1)..(186): tr|A0A098SVK2|A0A098SVK2_9PSED GTP cyclohydrolase 1 OS= Pseudomonas lutea OX=243924 GN=folE PE=3 SV=1
MTLSLPQHYREILVGLGEDPEREGLLDTPKRAAKAMQYLCHGYEQTLEEIVNGALFASESDEMVIVKDIELYSLCEHHLLPFIGKAHVAYIPTGKVLGLSKIARIVDMFARRLQIQENLTRQIADAIQDVTKAAGVAVVIEAQHMCMMMRGVEKQNSTMNTSVMLGAFRESTTTRMEFLQLIGRSK

SEQ ID NO: 13403 - protein, 182 aa, Pseudomonas luteola
  misc_feature (1)..(182): tr|A0A2X2D2D9|A0A2X2D2D9_PSELU GTP cyclohydrolase 1 OS= Pseudomonas luteola OX=47886 GN=folE PE=3 SV=1
MSLEQHYSAILSQLGEDVSREGLLDTPKRAAKAMQYLCKGYNQTLEEVVGDALFTSDNSEMVLVKNIELYSLCEHHMLPFIGKAHVAYMPSGKVLGLSKVARIVDMYARRLQIQENMTREIAEAIQKVTNAAGVAVVIEAQHMCMMMRGVEKQNSSMVTSVMLGQFRSNDATRAEFMGLINR

SEQ ID NO: 13404 - protein, 191 aa, Pseudomonas mandelii
  misc_feature (1)..(191): tr|A0A255XSY4|A0A255XSY4_9PSED GTP cyclohydrolase 1 OS= Pseudomonas mandelii OX=75612 GN=folE PE=3 SV=1
  misc_feature (96)..(96): Xaa can be any naturally occurring amino acid
  misc_feature (98)..(98): Xaa can be any naturally occurring amino acid
  misc_feature (100)..(100): Xaa can be any naturally occurring amino acid
MTLSLHQNALSQSYREILINLGENPDREGLQDTPVRAAKAMQYLCHGYDQSVEEIVNGALFASDTDEMIIVADIELYSLCEHHLLPFIGKAHVAYXPXGXVLGLSKIARLVDMFARRLQIQENLTRQIAEAVQQVTDAAGVAVVIEAKHMCMMMRGVEKQNSTMNTSVMLGAFRESNTTRMEFLQLIGRSK

SEQ ID NO: 13405 - protein, 185 aa, Pseudomonas mandelii
  misc_feature (1)..(185): tr|A0A5C5QI84|A0A5C5QI84_9PSED GTP cyclohydrolase 1 OS= Pseudomonas mandelii OX=75612 GN=folE PE=3 SV=1
MNEELAKNYRGILQAVGEDPQREGLLDTPKRAAKAMHYLCHGYRQTLEEIVNGALFESDNDEMIIVRDIELYSLCEHHLLPFIGKAHVAYMPTGKVLGLSKVARIVDMFARRLQIQENLTRQIAEAIAQVSRAAGVAVVIEAKHMCMMMRGVEKQNSTMTTSVMLGTFRESYNTRQEFLQLIRSR

SEQ ID NO: 13406 - protein, 181 aa, Pseudomonas marginalis
  misc_feature (1)..(181): tr|A0A3M4FK21|A0A3M4FK21_PSEMA GTP cyclohydrolase 1 OS= Pseudomonas marginalis pv. marginalis OX=97473 GN=folE PE=3 SV=1
MSLEQNYTDILGQLGEDVSREGLLDTPKRAAKAMQYLCRGYAQTLEEVTNGALFSSDNSEMVLVKDIELYSLCEHHLLPFIGKAHVAYIPSGKVLGLSKVARIVDMYARRLQIQENLSRQIADAVMQVTGALGVAVVIEAKHMCMMMRGVEKQNSSMITSVMLGEFRENAATRSEFLSLIK

SEQ ID NO: 13407 - protein, 181 aa, Pseudomonas marginalis; identical to SEQ ID NO: 13303
  misc_feature (1)..(181): tr|A0A3M5PX09|A0A3M5PX09_PSEMA GTP cyclohydrolase 1 OS= Pseudomonas marginalis pv. marginalis OX=97473 GN=folE PE=3 SV=1

SEQ ID NO: 13408 - protein, 185 aa, Pseudomonas marincola
  misc_feature (1)..(185): tr|A0A1I7B4J2|A0A1I7B4J2_9PSED GTP cyclohydrolase 1 OS= Pseudomonas marincola OX=437900 GN=folE PE=3 SV=1
MSEELANHYHAILQGLGEDPQREGLQDTPKRAAKAMQYLCHGYQQDIDQIVNGALFESDNDEMVIVRDIELYSLCEHHLLPFTGKAHIAYIPTGRVLGLSKVARIVEMFARRLQIQENLTRQIAEAIAEITQAAGVAVVIEAKHMCMMMRGVEKQNSDMCTSVMLGCFRESYNTRQEFLQLIRSR

SEQ ID NO: 13409 - protein, 182 aa, Pseudomonas marincola
  misc_feature (1)..(182): tr|A0A1I6XER4|A0A1I6XER4_9PSED GTP cyclohydrolase 1 OS= Pseudomonas marincola OX=437900 GN=folE PE=3 SV=1
MSLEQNYTEILGQLGEDASREGLLDTPKRAAKAMQYLCRGYQQTLEEVTNGALFSSDNSEMVLVKNIELYSLCEHHLLPFIGKAHVAYIPSGKVLGLSKVARIVDMFARRLQIQENLSRQIADAVQQVTGAMGVAVVIEAQHMCMMMRGVEKQNSSMVTSVMLGEFRSNAATRSEFLSLINN

SEQ ID NO: 13410 - protein, 181 aa, Pseudomonas mediterranea; identical to SEQ ID NO: 13235
  misc_feature (1)..(181): tr|A0A0A4GNH3|A0A0A4GNH3_9PSED GTP cyclohydrolase 1 OS= Pseudomonas mediterranea CFBP 5447 OX=1348058 GN=folE P E=3 SV=1

SEQ ID NO: 13411 - protein, 298 aa, Pseudomonas mediterranea
  misc_feature (1)..(298): tr|A0A0A4HIF7|A0A0A4HIF7_9PSED GTP cyclohydrolase FolE2 OS=Pseudomonas mediterranea CFBP 5447 OX=1348058 GN=fo lE2 PE=3 SV=1
MNAFTLPDIAAQASRQALPLDWVGMCGVALPVLIDGQQLSATADLGVSLDDEEARGIHMSRLYLALETLENSPLSPPLLHRTLQQFLESHEGLSQAASLIIHTELMLKRPALVSPLSGWKRYPISIEAQLKHEVFHVELNIQLPYSSTCPCSAALARQLIQQQFVEDFANKAVEHGEVLAWLGSTEGIAATPHSQRSFASLKVRLDPGINHLPLSAFINQAEAALGTAVQTAVKRADEQAFALANGQNLMFCEDAARRLSLALRQSPDVMALNVRVVHAESLHAHDAVAQSRWAREAA

SEQ ID NO: 13412 - protein, 216 aa, Pseudomonas meliae
  misc_feature (1)..(216): tr|A0A0N8S5C8|A0A0N8S5C8_9PSED GTP cyclohydrolase 1 OS= Pseudomonas meliae OX=86176 GN=folE PE=3 SV=1
MQRCRAPALLRKLLCAPSATGQPSHPSKPTRKHTPVTLEQNYTAILGQLGEDVSREGLLDTPKRAAKAMQYLCRGYAQTLEEVTNGALFSSDASEMVMVKDIELYSLCEHHLLPFIGKAHVAYIPNGKVLGLSKVARIVDMYARRLQIQENLSRQIAEAIQQVTGALGVAVVIEAKHMCMMMRGVEKQNSAMITSVMLGEFRENAATRSEFLSLIK

SEQ ID NO: 13413 - protein, 301 aa, Pseudomonas meliae
  misc_feature (1)..(301): tr|A0A0P9UXH9|A0A0P9UXH9_9PSED GTP cyclohydrolase FolE2 OS=Pseudomonas meliae OX=86176 GN=folE2 PE=3 SV=1
MNNPLPDVALTEVSSALVSLDWVGMQGVEVPVRLAEAGVRHPVHAHVDLQVDLADPSVKGIHMSRLYRLLDRFAEHQILSPDTLSALMEAMVESHLDCHSSRARLTLSFNLLCRRPALITEGLSGWKSYPVKLDATWHAGRLCLDVSADITYSSTCPCSAALSRQLLEGAFTARFGRQSFVDPMQVATWLRENASFATPHSQRSVATVQVRVAEQATELGLMTLIDAVEQALGTPVQTAVKRADEQAFARLNGQNLMYVEDAARKVQQALEGRYAASSVSVRHFESLHPHDAVAQTSNYLS

SEQ ID NO: 13414 - protein, 296 aa, Pseudomonas mendocina
  misc_feature (1)..(296): sp|A4Y119|GCH4_PSEMY GTP cyclohydrolase FolE2 OS=Pseudo monas mendocina (strain ymp) OX=399739 GN=folE2 PE=3 SV =1
MNEQLLPDIAAQATHHDLPLHWVGMAGIALPIQLAGQALNASVDIGVSLDDAGARGIHMSRLYLALQGLAGKPLTLAALQHLLDDCLSSHHELSDSASLTVRGALPLQRPALVSQLSGWKHYPFEIHARQDGRGLHMELQVELDYSSTCPCSAALARQLIQQRFAESFAQQPLNYLDVLDWLGSTQGIVATPHSQRSTATLQLRLAADCIDLPLLALLEAAERALGTPVQTAVKRADEQAFALANGQNLMFCEDAARRLHRALRQLPQASAFRVRVVHAESLHAHDAVAESRWNWS

SEQ ID NO: 13415 - protein, 181 aa, Pseudomonas mendocina
  misc_feature (1)..(181): tr|A0A550FPM1|A0A550FPM1_PSEME GTP cyclohydrolase 1 OS= Pseudomonas mendocina OX=300 GN=folE PE=3 SV=1
MSLEQHYTAILGQLGEDVSREGLLDTPKRAAKAMQYLCRGYQQTLEEVTNGALFSSDNSEMVLVKNIELYSLCEHHLLPFIGKAHVAYIPNGKVLGLSKVARIVDMYARRLQIQENLSRQIAEAVEQVTGALGVAVVIEAQHMCMMMRGVEKQNSSMVTSVMLGEFRSNPATRGEFLNLVR

SEQ ID NO: 13416 - protein, 209 aa, [Pseudomonas] mesoacidophila
  misc_feature (1)..(209): tr|A0A2A4F9Y2|A0A2A4F9Y2_9BURK GTP cyclohydrolase 1 OS= [Pseudomonas] mesoacidophila OX=265293 GN=folE PE=3 SV= 1
MGKKSSRPEPAASRPSRSEAEEAVRVLLRWAGDDPAREGLVDTPARVVRAYEEFFSGYGHEPRDILARTFSEVDGYDEMIVLKDIRFESYCEHHMVPIIGRAHVAYLPNHRVVGISKLARLVDAFAKRLQIQEKMTVQIADTLFDVLQPKGVGVILEAAHQCISTRGIHKPGVEMVTSRMLGTFRTDPSTRREFLSIVANPSSVNLTNT

SEQ ID NO: 13417 - protein, 269 aa, [Pseudomonas] mesoacidophila
  misc_feature (1)..(269): tr|A0A2A4FMP6|A0A2A4FMP6_9BURK GTP cyclohydrolase FolE2 OS=[Pseudomonas] mesoacidophila OX=265293 GN=folE2 PE= 3 SV=1
MNQMNPAFVMPDVQSTVDTRQIPIQRVGVKAVRHPLTVRTESGDVQPSVGLWNLDVHLPAEQKGTHMSRFVALLEEHRAPLTTGLFRTMLASMLEKLEAEAGRIEVTFPYFVNKTAPVSGVQSLLDYEVTLAGESRGGATRLFLKVLVPVTSLCPCSKKISQYGAHNQRSHVTIDAELAADVPVEALIRMAEEEASCELWGLLKRPDEKFVTERAYENPKFVEDLVRDVAQRLDADERIVAYVLEAENFESIHNHSAYALIERDKRQAA

SEQ ID NO: 13418 - protein, 298 aa, Pseudomonas migulae
  misc_feature (1)..(298): tr|A0A1H5NKY2|A0A1H5NKY2_9PSED GTP cyclohydrolase FolE2 OS=Pseudomonas migulae OX=78543 GN=folE2 PE=3 SV=1
MNALTLPDIAAQASRQALPLEWVGMCGIALPVLFDGQRLSAKADAGVSLDDGEARGIHMSRLYLALEMLEQENLTPALLRRVLQQFLDTHEGLSNNAYLNIHADLLLKRPALISPLSGWKSYPVSIEARLKNAMFHVELKIDISYSSTCPCSAALSRQLIQQQFVDDFANKSLQHADVLAWLGSTKGIVATPHSQRSNAQLKLRLDDYLDDLPLIALINDAEAALGTAVQTAVKRADEQAFALANGQNLMFCEDAVRRLNLALKRSPGINAFHLKVVHAESLHAHDAVAESRWNWEAA

SEQ ID NO: 13419 - protein, 186 aa, Pseudomonas migulae
  misc_feature (1)..(186): tr|A0A1H5LIW5|A0A1H5LIW5_9PSED GTP cyclohydrolase 1 OS= Pseudomonas migulae OX=78543 GN=folE PE=3 SV=1
MESASVTLEQNYTAILGQLGEDVSREGLLDTPKRAAKAMQYLCRGYEQTLEEVTNGALFSSDNSEMVLVKDIELYSLCEHHLLPFIGKAHVAYIPSGKVLGLSKVARIVDMYARRLQIQENLSRQIADAVQQVTGALGVAVVIEAKHMCMMMRGVEKQNSSMITSVMLGEFRENAATRSEFLSLIK

SEQ ID NO: 13420 - protein, 298 aa, Pseudomonas mohnii
  misc_feature (1)..(298): tr|A0A1H4V3E4|A0A1H4V3E4_9PSED GTP cyclohydrolase FolE2 OS=Pseudomonas mohnii OX=395600 GN=folE2 PE=3 SV=1
MNALTLPDIAAQAARQALPLEWVGMCGIALPVLFDGQRLVATADAGVSLDDGEARGIHMSRLYLALEQLAQETLSPPVLQRVLQRFLDSHRGLSSSASIKIHTDLLLKRPALISPLAGWKSYPVTIEARLKNAMFHVELKIDLPYSSTCPCSAALARQLIQQQFITDFANTSLQHADVLAWLGSTNGIVATPHSQRSSAQLRLRLDDYLDELPLVAIINDAEAALGTAVQTAVKRADEQAFALANGQNLMFCEDAARRLNQALKRAPGINAFHIRVVHAESLHAHDAVADSRWNWEAA

SEQ ID NO: 13421 - protein, 186 aa, Pseudomonas mohnii
  misc_feature (1)..(186): tr|A0A1H5A1E9|A0A1H5A1E9_9PSED GTP cyclohydrolase 1 OS= Pseudomonas mohnii OX=395600 GN=folE PE=3 SV=1
MNPSLAEHYREILVGVGENPEREGLLDTPKRAAKAMQYLCNGYTTRLEDVINGALFESQNDEMVIVRDIELYSLCEHHMLPFIGKAHVAYLPTGRVLGLSKVARVVDMFARRLQIQENLTRQIADAIQHITDAAGVAVVIEAKHMCMMMRGVEKQNSVMTSSVMLGAFRESSTTRQEFLQLIGRRP

SEQ ID NO: 13422 - protein, 181 aa, Pseudomonas monteilii
  misc_feature (1)..(181): tr|V9UWN4|V9UWN4_9PSED GTP cyclohydrolase 1 OS=Pseudomo nas monteilii SB3101 OX=1435058 GN=folE PE=3 SV=1
MSLEQNYTEILSQIGEDVSREGLLDTPKRAAKAMKYLCRGYEQTLEEVTNNALFSSDNSEMVLVRDIELYSMCEHHMLPFIGKAHVAYLPKGKVLGLSKVARIVDMYARRLQIQENLSRQVAEAVQKVTGAAGVAVVIEAKHMCMMMRGVEKQNSTMITSVMLGEFRENAATRSEFLSLIK

SEQ ID NO: 13423 - protein, 301 aa, Pseudomonas monteilii
  misc_feature (1)..(301): tr|A0A399LXP5|A0A399LXP5_9PSED GTP cyclohydrolase FolE2 OS=Pseudomonas monteilii OX=76759 GN=folE2 PE=3 SV=1
MTPLKLPDIAAQTQKYTLPLSWVGMCGIALPVQFEGRTAAAKVDAGVSLVGGSSRGIHMSRLYLALESLEHQPLTPLAMRQLLADFLSSHDGLSSAAYLQISFEHLLKRPALVSPLAGWKSYAVTVNARIENEMFHVELSVSVPYSSTCPCSAALARQLIQQQFQANFSDQQVDQSAVLQWLGSAEGIVATPHSQRSNAQIHVRLHSNQQVLPITELIDRIEASLGTAVQTAVKRADEQAFALANGQNLMFCEDAARRLHKALRQVEWSTAFKLRVEHAESLHAHDAVATSQWQWDLSCAV

SEQ ID NO: 13424 - protein, 181 aa, Pseudomonas moorei; identical to SEQ ID NO: 13225
  misc_feature (1)..(181): tr|A0A1H1H4D6|A0A1H1H4D6_9PSED GTP cyclohydrolase 1 OS= Pseudomonas moorei OX=395599 GN=folE PE=3 SV=1

SEQ ID NO: 13425 - protein, 298 aa, Pseudomonas moorei
  misc_feature (1)..(298): tr|A0A1H1IIU3|A0A1H1IIU3_9PSED GTP cyclohydrolase FolE2 OS=Pseudomonas moorei OX=395599 GN=folE2 PE=3 SV=1
MNALTLPDIAVQASRQALPLEWVGMCGIALPVLFDGQRLVAKADAGVSLDDGEARGIHMSRLYLALEQLEQETLSPPVLRRVLQRFLDSHPGISSRASVKIHTDLLLKRPALISPLAGWKTYPVTIEAHLKNAMFHVELKIDVPYSSTCPCSAALSRQLIQQQFITDFANTSLQHADVLAWLGSTKGIVATPHSQRSIAQLHLRLDDFLDELPLIAIINDAEAALGTAVQTAVKRADEQAFALANGQNLMFCEDAARRLNQALKRAPGINAFHIRVVHAESLHAHDAVAESRWNWEVA

SEQ ID NO: 13426 - protein, 298 aa, Pseudomonas moraviensis
  misc_feature (1)..(298): tr|V8R271|V8R271_9PSED GTP cyclohydrolase FolE2 OS=Pseu domonas moraviensis R28-S OX=1395516 GN=folE2 PE=3 SV=1
MNALTLPDIAAQSARLALPLDWVGMRGIALPVVLEGQCLSARVDAGVSLDDGEARGIHMSRLYLALETLEQRSLSPALLHQVLKCFLTSHQGLSACAYLNIHTELLLKRPALVSPLAGWKSYPASISASLKQQMFHVELKIELPYSSTCPCSAALARQLIQQQFVDDFANKALQHADVLAWLGSTKGIVATPHSQRSYAQLHLQLDNFIDELPLTAIIDDAEAALGTAVQTAVKRPDEQAFALANGQNLMFCEDAARRLNLALQRTPGINQFHIRVIHAESLHAHDAVAECSWRREQK

SEQ ID NO: 13427 - protein, 181 aa, Pseudomonas moraviensis; identical to SEQ ID NO: 13376
  misc_feature (1)..(181): tr|A0A1H2J362|A0A1H2J362_9PSED GTP cyclohydrolase 1 OS= Pseudomonas moraviensis OX=321662 GN=folE PE=3 SV=1

SEQ ID NO: 13428 - protein, 181 aa, Pseudomonas mosselii
  misc_feature (1)..(181): tr|A0A1X1P0S1|A0A1X1P0S1_9PSED GTP cyclohydrolase 1 OS= Pseudomonas mosselii OX=78327 GN=folE PE=3 SV=1
MSLEQNYTAILSQIGEDVSREGLLDTPKRAAKAMKYLCRGYEQTLEEVTNGALFTSDNSEMVLVRDIELYSMCEHHMLPFIGKAHVAYLPKGKVLGLSKVARIVDMYARRLQIQENLSRQIAEAVQQVTGAAGVAVVIEAKHMCMMMRGVEKQNSTMLTSVMLGEFRENAATRSEFLSLIK

SEQ ID NO: 13429 - protein, 181 aa, Pseudomonas mosselii
  misc_feature (1)..(181): tr|A0A2V4L0H8|A0A2V4L0H8_9PSED GTP cyclohydrolase 1 OS= Pseudomonas mosselii OX=78327 GN=folE PE=3 SV=1
MSLEQNYTAILSQIGEDVSREGLLDTPKRAAKAMKYLCRGYEQTLEEVTNGALFTSDNSEMVLVRDIELYSMCEHHMLPFIGKAHVAYLPKGKVLGLSKVARIVDMYARRLQIQENLSRQIAEAVQQVTGAAGVAVVIEAKHMCMMMRGVEKQNSTMLTSVMLGEFRDNASTRSEFLSLIK

SEQ ID NO: 13430 - protein, 186 aa, Pseudomonas mucidolens
  misc_feature (1)..(186): tr|A0A1H2NGY4|A0A1H2NGY4_9PSED GTP cyclohydrolase 1 OS= Pseudomonas mucidolens OX=46679 GN=folE PE=3 SV=1
MTLSLPHHYREILKDLGEDPDREGLLDTPKRAAKAMQYVCHGYSQSVEDIVNGALFTSDSDEMVIVANIELYSMCEHHLLPFIGKAHVAYIPTGKVLGLSKIARLVDMFARRLQIQENLTQQIAEAIQSVTQAAGVAVVIEAQHMCMMMRGVAKQNSTMNTSVMLGAFRESNTTRMEFLQLIGRSK

SEQ ID NO: 13431 - protein, 181 aa, Pseudomonas mucidolens
  misc_feature (1)..(181): tr|A0A1H2N2Q1|A0A1H2N2Q1_9PSED GTP cyclohydrolase 1 OS= Pseudomonas mucidolens OX=46679 GN=folE PE=3 SV=1
MTLEQNYTAILGQLGEDVSREGLLDTPKRAAKAMQYLCRGYEQTLEEVTNGALFSSDNSEMVLVKDIELYSLCEHHLLPFIGKAHVAYIPSGKVLGLSKVARIVDMYARRLQIQENLSRQIADAVLQVTGALGVAVVIEAKHMCMMMRGVEKQNSSMITSVMLGEFRENAATRSEFLSLIK

SEQ ID NO: 13432 - protein, 184 aa, Pseudomonas nabeulensis
  misc_feature (1)..(184): tr|A0A4Z0AR44|A0A4Z0AR44_9PSED GTP cyclohydrolase 1 OS= Pseudomonas nabeulensis OX=2293833 GN=folE PE=3 SV=1
MTLPHHYREILKGLGEDSEREGLLDTPKRAAKAMQYLCHGYEQSLDEIVNGALFTSDNDEMVILKDIELYSLCEHHLLPFIGKAHVAYIPTGKVLGLSKLARIVDMYARRLQIQENLTRQIADAIQSVTQAAGVAVVIEAQHMCMMMRGVEKQNSTMNTSVMLGAFRESNTTRMEFLQLIGRSK

SEQ ID NO: 13433 - protein, 181 aa, Pseudomonas nabeulensis; identical to SEQ ID NO: 13370
  misc_feature (1)..(181): tr|A0A4Z0B2K7|A0A4Z0B2K7_9PSED GTP cyclohydrolase 1 OS= Pseudomonas nabeulensis OX=2293833 GN=folE PE=3 SV=1

SEQ ID NO: 13434 - protein, 295 aa, Pseudomonas nitroreducens
  misc_feature (1)..(295): tr|A0A246FD94|A0A246FD94_9PSED GTP cyclohydrolase FolE2 OS=Pseudomonas nitroreducens OX=46680 GN=folE2 PE=3 SV =1
MTALLPDIACQSTRLLIPLDWVGMQGIAVPLRIAGERVAAYADASVSLDEAEARGIHMSRLYLALEALAEAELSPALLRDLLKRFLRSHAQLSRRARLALRFELMLRRPALVSPLSGWKRYPCEIHAQLEDDALQLELRLSLPYSSTCPCSAALARQLIQERFDSDFAGRPLKASEVRAWLGSPLGIVATPHSQRSEAQLKVQLGPTAQAFAFSELIDLAEEALGTAVQTAVKRADEQAFALANGQNLMFCEDAARRLHRALLQREEVSGFEVRVVHAESLHAHDAVAVSRWRRD

SEQ ID NO: 13435 - protein, 181 aa, Pseudomonas nitroreducens; identical to SEQ ID NO: 13296
  misc_feature (1)..(181): tr|A0A246FAP0|A0A246FAP0_9PSED GTP cyclohydrolase 1 OS= Pseudomonas nitroreducens OX=46680 GN=folE PE=3 SV=1

SEQ ID NO: 13436 - protein, 301 aa, Pseudomonas oceani
  misc_feature (1)..(301): tr|A0A2P4ES26|A0A2P4ES26_9PSED GTP cyclohydrolase FolE2 OS=Pseudomonas oceani OX=1708783 GN=folE2 PE=3 SV=1
MTAALPDVSLSDLSADPAALDWVGMQGIDLPITLNETGQRQTVHACADLQVDLPRPEVKGIHMSRLYTLLDRLGQDRALAPTVLQALLQAMVESHADCGSRNARLVLQFSLLCRRPALVTPQLSGWKAYPVKLEATLVEGRFRARVELTVSYSSTCPCSAALSRQLLVSAYDKAFAGRQRLDPVAVSQWLGRNGSLATPHSQRSEAKVAVDLQAAEESLGLLALIDQIEQALATPVQTAVKRADEQAFAALNGANLMFVEDAARRLGAALSAAGAQHAAVHVRHIESLHPHDAVASVGAHP

SEQ ID NO: 13437 - protein, 187 aa, Pseudomonas oceani
  misc_feature (1)..(187): tr|A0A2P4ETC1|A0A2P4ETC1_9PSED GTP cyclohydrolase 1 OS= Pseudomonas oceani OX=1708783 GN=folE PE=3 SV=1
MSLEKLTKNYLDVLTNLGEQPERDGLKGTPERAAKAMQFLCHGYNQSLDEIVNGALFDSDNDEMVIVKDIELYSLCEHHMLPFIGKAHVAYIPTGKVIGLSKVARIVDMFARRLQIQENLTRQIAEAIQQVTNARGVAVVIEAKHMCMMMRGVEKQNSSMHSSVMLGAFRESVNTRQEFLQLISRGN

SEQ ID NO: 13438 - protein, 206 aa, Pseudomonas oleovorans
  misc_feature (1)..(206): tr|A0A2W5WVD2|A0A2W5WVD2_PSEOL Putative GTP cyclohydrol ase OS=Pseudomonas oleovorans OX=301 GN=folE2 PE=4 SV=1
MNEQPLPDIAAQATHHDLPLDWVGMAGIALPIRLADAAVNACVDIGVSIELQVEVAYSSTCPCSAALARQLIQQRFAWDFPDQQVDYSSVLDWLGSTQGIVATPHSQRSTATLQLRLAPGCVELPVLALIDSAEQALGTPVQTAVKRADEQAFALANGQNLMFCEDAARRLHRTLRQLPQASAFRLKVVHAESLHAHDAVAQSRWS

SEQ ID NO: 13439 - protein, 296 aa, Pseudomonas oleovorans
  misc_feature (1)..(296): tr|A0A3R8X083|A0A3R8X083_PSEOL GTP cyclohydrolase FolE2 OS=Pseudomonas oleovorans OX=301 GN=folE2 PE=3 SV=1
MNEQPLPDIAAQATHHDLPLDWVGMAGIALPIRLASAAVTASVDIGVSLDDAGARGIHMSRLYLAAQRLVHQELDVPAVLQVLDDCLSSHQELSDSATLTLRGEVPLKRPALVSPLSGWKGYPFELRARQDGRGVNIELQVEVSYSSTCPCSAALARQLIQQRFAESFAQEPLDYLEVLDWLGSTQGIVATPHSQRSTATLQLRLASGCVELPVLALIDSAEHALGTPVQTAVKRADEQAFALANGQNLMFCEDAARRLHRALRQLPQASAFRLRVIHAESLHAHDALAESRWNWS

SEQ ID NO: 13440 - protein, 296 aa, Pseudomonas orientalis
  misc_feature (1)..(296): tr|A0A3G7X9V7|A0A3G7X9V7_9PSED GTP cyclohydrolase FolE2 OS=Pseudomonas orientalis OX=76758 GN=folE2 PE=3 SV=1
MNALTLPDIAAQASRQALPLDWVGMCGVALPVLLDGQRLPATADAGVSLDDGSARGIHMSRLYLALEMFDQQPLTPALLRNVLQRFLDTHEDLSNNAYLRIHTHLLLKRPALVSPLDGWKRYPISIEARLENQMFHVELKIDVTYSSTCPCSAALARQLIQQQFLNDFAHAPLQHADVLTWLGSANGIVATPHSQRSSAQLHVHLQGEQLPIVDLINSAEAALGTAVQTAVKRADEQAFALANGQNLMFCEDAARRLNLALKRSNAVKAFHLKVVHAESLHAHDAVAESRWTRPST

SEQ ID NO: 13441 - protein, 181 aa, Pseudomonas orientalis
  misc_feature (1)..(181): tr|A0A2L0S039|A0A2L0S039_9PSED GTP cyclohydrolase 1 OS= Pseudomonas orientalis OX=76758 GN=folE PE=3 SV=1
MSLEQNYTEILGQLGEDVSREGLLDTPKRAAKAMQYLCRGYEQTLEEVTNGALFSSDNSEMVLVKDIELYSLCEHHLLPFIGKAHVAYIPSGKVLGLSKVARIVDMYARRLQIQENLSRQIADAVLEVTGALGVAVVIEAKHMCMMMRGVEKQNSSMITSVMLGEFRDNAATRSEFLSLIK

SEQ ID NO: 13442 - protein, 186 aa, Pseudomonas oryzae
  misc_feature (1)..(186): tr|A0A1H1Q6D4|A0A1H1Q6D4_9PSED GTP cyclohydrolase 1 OS= Pseudomonas oryzae OX=1392877 GN=folE PE=3 SV=1
MNDYLSDHYRGILVGLGENPEREGLLDTPGRAAKAMQYLCRGYRQSLDEIVNGALFASDNDEMVIVRDVELYSLCEHHLLPFIGKAHVAYIPTGKVLGLSKVARIVDMYARRLQIQENLTRQIAEAIQSVTNAAGVAVVIEAQHMCMMMRGVEKQNSVMNTSVMLGAFRESCNTRHEFLQLIGRRH

SEQ ID NO: 13443 - protein, 181 aa, Pseudomonas oryzae
  misc_feature (1)..(181): tr|A0A1H1SDE3|A0A1H1SDE3_9PSED GTP cyclohydrolase 1 OS= Pseudomonas oryzae OX=1392877 GN=folE PE=3 SV=1
MSVEQHYTAILSLLGEDVEREGLRDTPKRAAKAMQYLCRGYQQSLEEVTNGALFSSDNSEMVLVKDIELYSLCEHHLLPFIGKAHVAYIPNGKVLGLSKVARIVDMYARRLQIQENLTRQIAEAVEQVTGALGVAVVIEAKHMCMMMRGVEKQNSAMITSVMLGEFRANTATRGEFLSLIR

SEQ ID NO: 13444 - protein, 182 aa, Pseudomonas oryzihabitans
  misc_feature (1)..(182): tr|A0A0U4VNH2|A0A0U4VNH2_9PSED GTP cyclohydrolase 1 OS= Pseudomonas oryzihabitans OX=47885 GN=folE PE=3 SV=1
MSLEQHYSSILTGLGEDISREGLVDTPKRAAKAMQYLCRGYNQTLEEVVGDALFTSDNSEMVLVKNIELYSLCEHHMLPFIGKAHVAYMPKGKVLGLSKVARVVDMFARRLQIQENMTRQIAEAIEQVTGAAGVAVVIEAQHMCMMMRGVEKQNSSMVTSVMLGQFRANDATRAEFLGLINR

SEQ ID NO: 13445 - protein, 182 aa, Pseudomonas oryzihabitans
  misc_feature (1)..(182): tr|A0A2Z5AAF7|A0A2Z5AAF7_9PSED GTP cyclohydrolase 1 OS= Pseudomonas oryzihabitans OX=47885 GN=folE PE=3 SV=1
MSLEQHYSSILTGLGEDIGREGLVDTPKRAAKAMQYLCRGYTQTLEEVVGEALFTSDNSEMVLVKNIELYSLCEHHMLPFIGKAHVAYMPKGKVLGLSKVARIVDMFARRLQIQENMTRQIAEAIEKVTGAAGVAVVIEAQHMCMMMRGVEKQNSSMVTSVMLGQFRASDATRAEFLSLISR

SEQ ID NO: 13446 - protein, 296 aa, Pseudomonas otitidis
  misc_feature (1)..(296): tr|A0A1I0U3H6|A0A1I0U3H6_9PSED GTP cyclohydrolase FolE2 OS=Pseudomonas otitidis OX=319939 GN=folE2 PE=3 SV=1
MNDLSLPDVASQTQATLAPLDRVGMAGIRLPLQVAGQAVQARVEASVSLDTPGVRGIHMSRLYLALEALAGEELTLTALQALLQHFLDSHQGLSLSAHLRVAGELLLKRPALVSPLSGHKAYPFEIALSLDPRGFHVELMLELGYSSTCPCSAALSRQMTQRAFSERFAGQAPTWEALHEWLGSEAAMPATPHSQRSKARLWLRPADPLQAPDWIELVDRCEAALGTALQTAVKRADEQAFALANGHNLMFCEDAARRLAEPLRALPDLAAFKVRVEHEESLHAHDAVAEIHWLWT

SEQ ID NO: 13447 - protein, 185 aa, Pseudomonas otitidis
  misc_feature (1)..(185): tr|A0A1I0UCN1|A0A1I0UCN1_9PSED GTP cyclohydrolase 1 OS= Pseudomonas otitidis OX=319939 GN=folE PE=3 SV=1
MNDDLSSHYREILMGVGENPEREGLLDTPKRAAKAMRYLCRGYEQSLEEVVNGALFSSDNDEMVTVKDIELYSLCEHHLLPFIGKAHVAYIPTGKVLGLSKVARIVDMFARRLQIQENLTRQIAEAIQRVTGAAGVAVVIEAKHMCMMMRGVEKQNSVMTTSVMLGAFRESPSTRQEFLKLIGRS

SEQ ID NO: 13448 - protein, 205 aa, Pseudomonas pachastrellae
  misc_feature (1)..(205): tr|A0A1S8DDK8|A0A1S8DDK8_9PSED GTP cyclohydrolase 1 OS= Pseudomonas pachastrellae OX=254161 GN=folE PE=3 SV=1
MPAIERRPAPQVSRRDTAMSLENLTNNYREILTNLGEQPQRDGLKGTPERAAKAMQFLCRGYTQSLEEIVNGALFDSDNDEMVIVKDIELYSLCEHHMLPFIGKAHVAYIPTGKVIGLSKVARIVDMFARRLQIQENLTRQIAEAIQQVTNAAGVAVVIEAKHMCMMMRGVEKQNSSMHSSVMLGAFRESVNTRQEFLQLISRSN

SEQ ID NO: 13449 - protein, 296 aa, Pseudomonas palleroniana
  misc_feature (1)..(296): tr|A0A0X7JYE2|A0A0X7JYE2_9PSED GTP cyclohydrolase FolE2 OS=Pseudomonas palleroniana OX=191390 GN=folE2 PE=3 SV =1
MNALTLPDIAAQASRQALPLDWVGMCGIALPILIDGQRLTAIADAGVSLDDGAARGIHMSRLYLALEMLDQQLLTPALLRNVLQRFLDSHEGLSKNAYLRIHTDLLLKRPALVSPLAGWKSYPVSIEARLENQMFHVELKIDVTYASTCPCSAALARQLIQQQFLQDFANTQLQHADVLTWLGSASGIVATPHSQRSSAQLHVQLQGEHLPFTDLINDAEAALGTAVQTAVKRADEQAFALANGQNLMFCEDAARRLNLALKRSDAVKAFHLKVIHAESLHAHDAVAESRWTRPSA

SEQ ID NO: 13450 - protein, 181 aa, Pseudomonas palleroniana; identical to SEQ ID NO: 13431
  misc_feature (1)..(181): tr|A0A0X7K2C3|A0A0X7K2C3_9PSED GTP cyclohydrolase 1 OS= Pseudomonas palleroniana OX=191390 GN=folE PE=3 SV=1

SEQ ID NO: 13451 - protein, 181 aa, Pseudomonas panacis
  misc_feature (1)..(181): tr|A0A1H4VDA0|A0A1H4VDA0_PSEPA GTP cyclohydrolase 1 OS= Pseudomonas panacis OX=307251 GN=folE PE=3 SV=1
MSLEQNYTAILGQLGEDVTREGLLDTPKRAAKAMQYLCRGYEQTLEEVTNGALFSSDNSEMVLVKDIELYSLCEHHLLPFIGKAHVAYIPSGKVLGLSKVARIVDMYARRLQIQENLSRQIADAVMQVTGALGVAVVIEAKHMCMMMRGVEKQNSSMITSVMLGEFRENAATRSEFLSLIK

SEQ ID NO: 13452 - protein, 186 aa, Pseudomonas panacis
  misc_feature (1)..(186): tr|A0A1H4ILH7|A0A1H4ILH7_PSEPA GTP cyclohydrolase 1 OS= Pseudomonas panacis OX=307251 GN=folE PE=3 SV=1
MTLSLPHHYREILKGLGEDPEREGLLDTPKRAAKAMQYLCHGYEQNLEEIVNGALFASDNDEMVILKDIELYSLCEHHLLPFIGKAHVAYIPTGRVLGLSKLARIVDMFARRLQIQENLTRQIADAIQDVTQASGVAVVIEAKHMCMMMRGVEKQNSTMNTSVMLGAFRESNTTRMEFLQLIGRSK

SEQ ID NO: 13453 - protein, 181 aa, Pseudomonas panipatensis
  misc_feature (1)..(181): tr|A0A1G8F648|A0A1G8F648_9PSED GTP cyclohydrolase 1 OS= Pseudomonas panipatensis OX=428992 GN=folE PE=3 SV=1
MSLEQHYSAILSQLGEDVTREGLVDTPKRAAKAMQYLCRGYQQTLDEIVNGALFSSDNSEMVLVKDIELYSLCEHHLLPFIGKAHVAYIPNGKVLGLSKVARIVDMYARRLQIQENMSRQIAEAVQQVTGALGVAVVIEAKHMCMMMRGVEKQNSSMVTSVMLGEFRDNAATRSEFLSLIR

SEQ ID NO: 13454 - protein, 298 aa, Pseudomonas panipatensis
  misc_feature (1)..(298): tr|A0A1G8J0C9|A0A1G8J0C9_9PSED GTP cyclohydrolase FolE2 OS=Pseudomonas panipatensis OX=428992 GN=folE2 PE=3 SV =1
MTALPLPDIARQMTTAPLALDWVGMQGIAVPLRLHGERLAAQADAGVSLDKADARGIHMSRLYLALQRLAHEELRPALLRALIDDFLASHTELSQRASVRLHFEALLQRPALVSHLSGWKGYPCELLAEGDARHMRLELRLQLAYSSTCPCSAALARQLIQQRFASDFGGRALEHADLHAWLGGSAGIAATPHSQRSLADLRLQLRGDLAELPLLALLDCAERSLGTAVQTAVKRADEQAFALANGQNPMFCEDAARRLHHALAQREELLAFELTVVHAESLHAHDAVARSRWQREAA

SEQ ID NO: 13455 - protein, 295 aa, Pseudomonas parafulva
  misc_feature (1)..(295): tr|A0A0A7JVU0|A0A0A7JVU0_9PSED GTP cyclohydrolase FolE2 OS=Pseudomonas parafulva OX=157782 GN=folE2 PE=3 SV=1
MTSLTLPDIAAQTSPTLQPLDWVGMRGIALPVQLGGRTLSAWADAGVSLDDGESRGIHMSRLYLALEALEHTELTPLALRQLLAHFLDTHDGLSSSAYVRLKFDCMLKRPALISPLEGWKRYPVILDARIENEMFHVEQYVEIPYSSTCPCSAALARQLIQQQFLNDFANQPADIQAVLQWLGSTAGIVATPHSQRSQAAVRVRLQDTLQTLPVEALIDAVESALGTAVQTAVKRADEQAFALANGQNLMFCEDAARRIHHALRGLAWCSGFDLRVEHAESLHAHDAVAESRWQW

SEQ ID NO: 13456 - protein, 186 aa, Pseudomonas parafulva
  misc_feature (1)..(186): tr|A0A497UMH0|A0A497UMH0_9PSED GTP cyclohydrolase 1 OS= Pseudomonas parafulva OX=157782 GN=folE PE=3 SV=1
MNPLLASHYREILVGVGENPEREGLLDTPKRAAKAMQYLCNGYTMSLEDVTNGALFESQSDEMVIVSDIELYSLCEHHMLPFIGKAHVAYIPTGRVLGLSKVARVVDMFARRLQIQENLTRQIAEAIQQITDAAGVAVVIEARHMCMMMRGVEKQNSIMTSSVMLGAFRDSTTTRQEFLQLIGRRS

SEQ ID NO: 13457 - protein, 296 aa, Pseudomonas paralactis
  misc_feature (1)..(296): tr|A0A0R3AJ76|A0A0R3AJ76_9PSED GTP cyclohydrolase FolE2 OS=Pseudomonas paralactis OX=1615673 GN=folE2 PE=3 SV= 1
MNALTLPDIAAQASRQALPLDWVGMCGIALPVLLEGQRLAAIADAGVSLDDGTARGIHMSRLYLALEMLEQQPLTPALLRNVLQRFLDTHEDLSKDAYLRIHTNLLLKRPALVSPLEGWKSYPVSIEARLENQMFHVELKIDVTYSSTCPCSAALARQLIQQQFLQDFAHTPLQHEAVLTWLGSANGIVATPHSQRSSAQLNVQLQGDDLAIVDLINAAEAALGTAVQTAVKRADEQAFALANGQNLMFCEDAARRLNLALKRSDAVKAFHLKVVHAESLHAHDAVAESRWTRDFA

SEQ ID NO: 13458 - protein, 186 aa, Pseudomonas paralactis
  misc_feature (1)..(186): tr|A0A0R3AJY5|A0A0R3AJY5_9PSED GTP cyclohydrolase 1 OS= Pseudomonas paralactis OX=1615673 GN=folE PE=3 SV=1
MTFSLPHHYREILKGLGEDPEREGLLDTPKRAAKAMQYLCHGYEQNLEEIVNGALFASDNDEMVILKDIELYSLCEHHLLPFIGKAHVAYIPTGKVLGLSKLARIVDMFARRLQIQENLTRQIADAIQDVTQAAGVAVVIEAKHMCMMMRGVEKQNSTMNTSVMLGAFRESNTTRMEFLQLIGRSK

SEQ ID NO: 13459 - protein, 186 aa, Pseudomonas pelagia
  misc_feature (1)..(186): tr|A0A2A4AVB3|A0A2A4AVB3_9PSED GTP cyclohydrolase 1 OS= Pseudomonas pelagia OX=553151 GN=folE PE=3 SV=1
MSLEKLTDCYRGILTELDEEPGRDGLVGTPLRAAKAMQFMCRGYGQSLDEIVNNALFDSDNDEMVIVKDIELYSLCEHHMLPFIGKAHVAYIPTGKVIGLSKVARIVDMFARRLQIQENLTRQIAEALQQVTQAGGVAVVIEAKHMCMMMRGVEKQNSTMFSSVMLGAFRESGNTRQEFLQLISRG

SEQ ID NO: 13460 - protein, 195 aa, Pseudomonas pelagia
  misc_feature (1)..(195): tr|A0A2A4AXB3|A0A2A4AXB3_9PSED GTP cyclohydrolase 1 OS= Pseudomonas pelagia OX=553151 GN=folE PE=3 SV=1
MTHDETPEMSLENLTQNYQEILTNLGENPQREGLKGTPLRAAKAMQFLCRGYDQSLEEIVNGALFDSTNDEMVIVKDIELYSLCEHHLLPFIGKAHVAYIPTGKVIGLSKVARIVDMFARRLQIQENLTRQIADALLSVTNAKGVAVVIEAKHMCMMMRGVEKQNSSMHSSVMLGAFRDSVNTRQEFLQLIARSS

SEQ ID NO: 13461 - protein, 296 aa, Pseudomonas peli
  misc_feature (1)..(296): tr|A0A1G4R5K8|A0A1G4R5K8_9PSED GTP cyclohydrolase FolE2 OS=Pseudomonas peli OX=592361 GN=folE2 PE=3 SV=1
MNALTLPDIATQAPAHALALDWVGMQGIALPIKLAEQHIHARADIGVSLDYGNARGIHMSRLYLALHALEQRELNPTTLRELMGEFLDSHQGLSQQASITLRGEALLNRPALVSPLSGWKAYPFEVRARQDSWGFHVELQVEVTYSSTCPCSAALARQLIQQRFVEDFANQPLDHAQLLAWLGSTQGIVATPHSQRSTATLQVRLHGDSAKLPLVALIDAAEQALGTAVQTAVKRADEQAFALANGQNLMFCEDAARRLHSALREQPAFSAFHLRVVHAESLHAHDAVAASTWNWR

SEQ ID NO: 13462 - protein, 182 aa, Pseudomonas peli
  misc_feature (1)..(182): tr|A0A1G4PD89|A0A1G4PD89_9PSED GTP cyclohydrolase 1 OS= Pseudomonas peli OX=592361 GN=folE PE=3 SV=1
MSLEQQYTEILGQLGEDVSREGLLDTPKRAAKAMQYLCKGYQQTLEEVTNGALFSSDNSEMVLVKNIELYSLCEHHLLPFIGKAHVAYIPNGKVLGLSKVARIVDMYARRLQIQENLSRQIAEAIQQVTGALGVAVVIEAQHMCMMMRGVEKQNSSMVTSVMLGEFRENAATRSEFLSLINN

SEQ ID NO: 13463 - protein, 315 aa, Pseudomonas plecoglossicida
  misc_feature (1)..(315): tr|A0A495PES9|A0A495PES9_9PSED GTP cyclohydrolase FolE2 OS=Pseudomonas plecoglossicida OX=70775 GN=folE2 PE=3 SV=1
MMSSALPDVSVTDLAPSLSPLQWVGMQGIDLPVRIQEPTYQRELHARADVQVDLPAPHVKGIHMSRLYRLLDAWGQAAAVSPASLFALLQEMIDSHQDCESRNARLRLDFDLLVRRPALVTEGLSGWKSYPVHVLATKVGGALNLSIEVRIGYSSTCPCSAALSRQLIEDGFLRTFKDQPLLEASAVAQWLRSNASLATPHSQRSEARVRVTVPADAPDLGLLALIDHIEGALRTPVQTAVKRADEQAFAALNGQNLMFVEDAARRIQANLHGYRDSQVHVRHLESLHPHDASAWSAPQAAAPDQQESFATGNER

SEQ ID NO: 13464 - protein, 301 aa, Pseudomonas plecoglossicida
  misc_feature (1)..(301): tr|A0A099N8R3|A0A099N8R3_9PSED GTP cyclohydrolase FolE2 OS=Pseudomonas plecoglossicida OX=70775 GN=folE2 PE=3 SV=1
MTQLKLPDIAAQTHEYALPLNWVGMCGIAQPVQFEGRTAAATVDAGVSLVDGSSRGIHMSRLYLALESLEHQPLTPLTIRQLLGNFLSSHEGLSSAAYLRLRFEHLLKRPALISPLEGWKSYAVTVDARIENEMFHVELSVSVPYSSTCPCSAALARQLIQQQFQAHFSTEQVDKSAVLQWLGSAEGIVATPHSQRSSALIQVRLRSNQQVLPITELIDCIEASLGTAVQTAVKRADEQAFALANGQNLMFCEDAARRLHKALRQIEWSTAFKLRVEHAESLHAHDAVATSQWQWDVSCAA

SEQ ID NO: 13465 - protein, 181 aa, Pseudomonas poae
  misc_feature (1)..(181): tr|A0A1H0MKW9|A0A1H0MKW9_9PSED GTP cyclohydrolase 1 OS= Pseudomonas poae OX=200451 GN=folE PE=3 SV=1
MSLEQNYTAILGQIGEDVSREGLLDTPKRAAKAMQYLCRGYEQTLEEVTNGALFSSDNSEMVLVKDIELYSLCEHHLLPFIGKAHVAYIPSGKVLGLSKVARIVDMYARRLQIQENLSRQIADAVLQVTGALGVAVVIEAKHMCMMMRGVEKQNSSMITSVMLGEFRENAATRSEFLSLIK

SEQ ID NO: 13466 - protein, 181 aa, Pseudomonas poae; identical to SEQ ID NO: 13303
  misc_feature (1)..(181): tr|A0A2A9H5X0|A0A2A9H5X0_9PSED GTP cyclohydrolase 1 OS= Pseudomonas poae OX=200451 GN=folE PE=3 SV=1

SEQ ID NO: 13467 - protein, 186 aa, Pseudomonas pohangensis
  misc_feature (1)..(186): tr|A0A1H2E7D5|A0A1H2E7D5_9PSED GTP cyclohydrolase 1 OS= Pseudomonas pohangensis OX=364197 GN=folE PE=3 SV=1
MNTQLSDHYQQILVGLGENPSREGLIDTPMRAAKAMQYLCNGYSKSLEEVVNGALFESDNDEMVIVRDIELYSLCEHHLLPFIGKAHVAYIPTGKVLGLSKVARIVDMFARRLQIQENLTRQIAEAIQQVTNAAGVAVVIEAKHMCMMMRGVEKQNSVMSSSVMLGAFRESCNTRHEFLQLIGRGR

SEQ ID NO: 13468 - protein, 181 aa, Pseudomonas pohangensis
  misc_feature (1)..(181): tr|A0A1H2EVV5|A0A1H2EVV5_9PSED GTP cyclohydrolase 1 OS= Pseudomonas pohangensis OX=364197 GN=folE PE=3 SV=1
MPMEQHYTAILSQLGEDVSREGLIDTPKRAAKAMQFLCRGYQQTLEEVTNNALFSSDNSEMVLVKNIELYSLCEHHLLPFIGKAHVAYIPSGKVLGLSKVARIVDMYARRLQIQENLSRQIADAIQQVTGALGVAVVIEAQHMCMMMRGVEKQNSSMVTSVMLGEFRENAATRSEFLSLIG

SEQ ID NO: 13469 - protein, 189 aa, Pseudomonas prosekii
  misc_feature (1)..(189): tr|A0A1H1SXZ9|A0A1H1SXZ9_9PSED GTP cyclohydrolase 1 OS= Pseudomonas prosekii OX=1148509 GN=folE PE=3 SV=1
MTLSRNALSESYREILIGLGENPDREGLQDTPMRAAKAMQYLCHGYQQSVEEIVNGALFSSDTDEMIIVADIELYSLCEHHLLPFIGKAHVAYMPTGKVLGLSKIARLVDMFARRLQIQENLTRQIADAVQQVTGAAGVAVVIEARHMCMMMRGVEKQNSTMNTSVMLGAFRDSSNTRQEFLQLIGRSK

SEQ ID NO: 13470 - protein, 181 aa, Pseudomonas prosekii
  misc_feature (1)..(181): tr|A0A3L8CFG1|A0A3L8CFG1_9PSED GTP cyclohydrolase 1 OS= Pseudomonas prosekii OX=1148509 GN=folE PE=3 SV=1
MSLEQNYTAILGQLGEDVSREGLRDTPKRAAKAMQYLCRGYEQTLEEVTNGALFSSDNSEMVLVKDIELYSLCEHHLLPFIGKAHVAYIPSGKVLGLSKVARIVDMYARRLQIQENLSRQIADAVQQVTGALGVAVVIEAKHMCMMMRGVEKQNSSMITSVMLGEFRENAATRSEFLSLIK

SEQ ID NO: 13471 - protein, 186 aa, Pseudomonas protegens
  misc_feature (1)..(186): tr|A0A2C9EKC4|A0A2C9EKC4_PSEPH GTP cyclohydrolase 1 OS= Pseudomonas protegens (strain DSM 19095 / LMG 27888 / C HA0) OX=1124983 GN=folE2 PE=3 SV=1
MHDPLSQHFHGILQGLGEDPTREGLRDTPQRASKALRYLCHGYETSLEELVNGALFSSTSDEMVMVQNIELYSLCEHHLLPFIGQAHVAYIPTGKVLGLSKVARIVDMYARRLQIQENLTRQIAEAIQEVTRAAGVAVVIEARHMCMMMRGVEKQNSLMNTSVMLGAFRESASTRQEFLQLLRRQP

SEQ ID NO: 13472 - protein, 181 aa, Pseudomonas protegens
  misc_feature (1)..(181): tr|A0A2K2X0A9|A0A2K2X0A9_9PSED GTP cyclohydrolase 1 OS= Pseudomonas protegens OX=380021 GN=folE PE=3 SV=1
MSLEQNYTAILGQLGEDVSREGLLDTPKRAAKAMQYLCRGYAQTLEEVTNGALFSSDNSEMVLVKDIELYSLCEHHLLPFIGKAHVAYIPSGKVLGLSKVARIVDMYARRLQIQENLSRQIADAVQQVTGALGVAVVIEAKHMCMMMRGVEKQNSSMITSVMLGEFRENAATRSEFLSLIK

SEQ ID NO: 13473 - protein, 181 aa, Pseudomonas pseudoalcaligenes; identical to SEQ ID NO: 13361
  misc_feature (1)..(181): tr|W6R421|W6R421_PSEP5 GTP cyclohydrolase 1 OS=Pseudomo nas pseudoalcaligenes (strain CECT 5344) OX=1182590 GN= folE3 PE=3 SV=1

SEQ ID NO: 13474 - protein, 186 aa, Pseudomonas pseudoalcaligenes; identical to SEQ ID NO: 13362
  misc_feature (1)..(186): tr|W6QUW3|W6QUW3_PSEP5 GTP cyclohydrolase 1 OS=Pseudomo nas pseudoalcaligenes (strain CECT 5344) OX=1182590 GN= folE1 PE=3 SV=1

SEQ ID NO: 13475 - protein, 186 aa, Pseudomonas psychrophila
  misc_feature (1)..(186): tr|S6I321|S6I321_9PSED GTP cyclohydrolase 1 OS=Pseudomo nas psychrophila OX=122355 GN=folE PE=3 SV=1
MSASLPGHYREILIDIGEDPDREGLLDTPKRAAKAMQYLCHGYEQSLETLVNGALFASDSDEMVIVANIELYSLCEHHLLPFIGKAHVAYIPTGKVLGLSKIARIVDMYARRLQIQENLTREIADAIQSVTQAAGVAVVIEAQHMCMMMRGVEKQNSTMNTSVMLGEFRESSTRMEFLQLIGRSKS

SEQ ID NO: 13476 - protein, 181 aa, Pseudomonas psychrophila
  misc_feature (1)..(181): tr|S6I0B7|S6I0B7_9PSED GTP cyclohydrolase 1 OS=Pseudomo nas psychrophila OX=122355 GN=folE PE=3 SV=1
MTLEQNYTAILGQLGEDVSREGLLDTPKRAAKAMQYLCRGYEQTLEEVTNGALFSSDNSEMVLVKDIELYSLCEHHLLPFIGKAHVAYIPSGKVLGLSKVARIVDMYARRLQIQENLSRQIADAVMQVTGALGVAVVIEAKHMCMMMRGVEKQNSSMITSVMLGEFRENAATRSEFLSLIK

SEQ ID NO: 13477 - protein, 182 aa, Pseudomonas psychrotolerans
  misc_feature (1)..(182): tr|A0A147H3U1|A0A147H3U1_9PSED GTP cyclohydrolase 1 OS= Pseudomonas psychrotolerans OX=237610 GN=folE PE=3 SV=1
MSLEQHYSSILTGLGEDIGREGLVDTPKRAAKAMQYLCRGYNQTLEEVVGDALFTSDNSEMVLVKNIELYSLCEHHMLPFIGKAHVAYMPNGKVLGLSKVARIVDMFARRLQIQENMTRQIAEAIEKVTQAAGVAVVIEAQHMCMMMRGVEKQNSSMVTSVMLGQFRANDATRAEFLGLINR

SEQ ID NO: 13478 - protein, 182 aa, Pseudomonas psychrotolerans
  misc_feature (1)..(182): tr|A0A4Y5W1J0|A0A4Y5W1J0_9PSED GTP cyclohydrolase 1 OS= Pseudomonas psychrotolerans OX=237610 GN=folE PE=3 SV=1
MSLEQHYSSILTGLGEDIGREGLVDTPKRAAKAMQYLCRGYNQTLEEVVGDALFTSDNSEMVLVKNIELYSLCEHHMLPFIGKAHVAYMPNGKVLGLSKVARIVDMFARRLQIQENMTRQIAEAIEKVTHAAGVAVVIEAQHMCMMMRGVEKQNSSMVTSVMLGQFRANDATRAEFLGLINR

SEQ ID NO: 13479 - protein, 187 aa, Pseudomonas punonensis
  misc_feature (1)..(187): tr|A0A1M7MC34|A0A1M7MC34_9PSED GTP cyclohydrolase 1 OS= Pseudomonas punonensis OX=1220495 GN=folE PE=3 SV=1
MDSSRNTLEQQYTAILGQLGEDVSREGLLDTPKRAAKAMQYLCNGYQKTLEEVTNGALFSSDASEMVVVKDIELYSLCEHHLLPFIGKAHVAYIPNGKVLGLSKVARIVDMYARRLQIQESLSRQIAEAVQQVTGALGVAVVIEAKHMCMMMRGVEKQNSSMVTSVMLGEFRENAATRSEFLSLVNG

SEQ ID NO: 13480 - protein, 186 aa, Pseudomonas punonensis
  misc_feature (1)..(186): tr|A0A1M7FIG0|A0A1M7FIG0_9PSED GTP cyclohydrolase 1 OS= Pseudomonas punonensis OX=1220495 GN=folE PE=3 SV=1
MNPLLPNHYREILLGLGEDPEREGLLDTPKRAAKAMQYLCNGYEKSLEEVVNGALFSSDNDEMVIVKDVELYSLCEHHLLPFIGKAHVAYIPTGKVLGLSKIARIVDMYARRLQIQENLTRQIANAIEQVTKAAGVAVVIEAQHMCMMMRGVEKQNSVMSTSVMLGAFRESYNTRHEFLQLIGRSK

SEQ ID NO: 13481 - protein, 190 aa, Pseudomonas putida
  misc_feature (1)..(190): sp|Q88LV4|GCH11_PSEPK GTP cyclohydrolase 1 1 OS=Pseudom onas putida (strain ATCC 47054 / DSM 6125 / NCIMB 11950 / KT2440) OX=160488 GN=folE1 PE=3 SV=1
MRFFPTGRSMSLEQNYTEILSQIGEDVSREGLLDTPKRAAKAMKYLCRGYEQTLEEVTNNALFSSDNSEMVLVRDIELYSMCEHHMLPFIGKAHVAYLPKGKVLGLSKVARIVDMYARRLQIQENLSRQIAEAVQQVTGAAGVAVVVEAKHMCMMMRGVEKQNSTMITSVMLGEFRDNAATRSEFLSLIK

SEQ ID NO: 13482 - protein, 185 aa, Pseudomonas putida
  misc_feature (1)..(185): tr|A0A0P7C947|A0A0P7C947_PSEPU GTP cyclohydrolase 1 OS= Pseudomonas putida OX=303 GN=folE PE=3 SV=1
MNEELTRNYREILQGIGENPQREGLLDTPRRAAKAMQYLCHGYQQSLEQIVNGALFDSDNDEMVIVRDIELYSLCEHHLLPFIGKAHVAYIPTGKVLGLSKVARIVDMFARRLQIQENLTRQVAEAIAQVTHAAGVAVVIEAKHMCMMMRGVEKQNSVMSTSVMLGCMRDSYNTRQEFLQLIRNR

SEQ ID NO: 13483 - protein, 295 aa, Pseudomonas reidholzensis
  misc_feature (1)..(295): tr|A0A383RMF7|A0A383RMF7_9PSED GTP cyclohydrolase FolE2 OS=Pseudomonas reidholzensis OX=1785162 GN=folE2 PE=3 SV=1
MTLATLPDIATQTHQRNQPLDWVGMQGIALPVRFADTRLSASASAGVNLDDGQSRGIHMSRLYLALACLEQQELNPQALRRLLAQFLDSHEGLSSAASVRIDFELLLKRPALVSPLSGWKSYPVTVEARIKNEMFHVELFVRIPYSSTCPCSAALARQLIQAQFQADFEGADVDRDSVLAWLGSSQGIVATPHSQRSEAQIKVRLLDGGSELPVIDLIERVEAALGTAVQTAVKRADEQAFALANGQNLMFCEDAARRVDEALRKAAWASGFTLRVEHAESLHAHDAVAVSQWRW

SEQ ID NO: 13484 - protein, 181 aa, Pseudomonas reidholzensis
  misc_feature (1)..(181): tr|A0A383RSH8|A0A383RSH8_9PSED GTP cyclohydrolase 1 OS= Pseudomonas reidholzensis OX=1785162 GN=folE1 PE=3 SV=1
MSLEQNYTEILSQIGEDVSREGLLDTPKRAAKAMKYLCRGYEQTLEEVTNGALFSSDNSEMVLVRDIELYSMCEHHMLPFIGKAHVAYLPKGKVIGLSKVARIVDMYARRLQIQENLSRQIAEAIEKVTGAAGVAVVVEAKHMCMMMRGVEKQNSSMITSVMLGEFRENAATRSEFLSLIK

SEQ ID NO: 13485 - protein, 186 aa, Pseudomonas reinekei; identical to SEQ ID NO: 13365
  misc_feature (1)..(186): tr|A0A1H0T0P7|A0A1H0T0P7_9PSED GTP cyclohydrolase 1 OS= Pseudomonas reinekei OX=395598 GN=folE PE=3 SV=1

SEQ ID NO: 13486 - protein, 186 aa, Pseudomonas reinekei
  misc_feature (1)..(186): tr|A0A1H0M108|A0A1H0M108_9PSED GTP cyclohydrolase 1 OS= Pseudomonas reinekei OX=395598 GN=folE PE=3 SV=1
MTLSLPQNFREILIGLGENPDREGLRDTPMRAAKAMQYLCHGYEQSVEQIVNGALFASDNDEMVIVDNIELYSLCEHHMLPFIGKAHVAYIPTGKVLGLSKIARLVDMFARRLQIQENLTRQIADAVQAVTGAAGVAVVIEARHMCMMMRGVEKQNSTMNTSVMLGAFRESSNTRQEFLQLIGRSK

SEQ ID NO: 13487 - protein, 296 aa, Pseudomonas resinovorans
  misc_feature (1)..(296): tr|S6B2D0|S6B2D0_PSERE GTP cyclohydrolase FolE2 OS=Pseu domonas resinovorans NBRC 106553 OX=1245471 GN=folE2 PE =3 SV=1
MNARHLPDIAAQDADLDLPLDWVGMHGIAQPLLLDGQRIAARADAGVSLDDSSARGIHMSRLYLALQALEGEELSIPLLRRVLASFLESHQGLSSSASLRLQGETLLQRPALVSALSGWKAYPFEVLAHQDRWGFHVELWVQLAYSSTCPCSAALARQLVQQAFTEDFAAEIPLEREQILAWLGSDRGMLATPHSQRSTASLQARLGDVDGIPLGRLVDLAEQALGTPVQTAVKRADEQAFALANGQNLMFCEDAARRLGAVLREQEWLAGFRLRVVHAESLHAHDAVAEYAWRYR

SEQ ID NO: 13488 - protein, 185 aa, Pseudomonas resinovorans
  misc_feature (1)..(185): tr|S6AF70|S6AF70_PSERE GTP cyclohydrolase 1 OS=Pseudomo nas resinovorans NBRC 106553 OX=1245471 GN=folE PE=3 SV =1
MSEPMTQHYREILLGVGENPAREGLLDTPKRAAKAMQFLCNGYQKTLAEIVNGALFESDNDEMVIVREIELYSLCEHHLLPFIGKAHVAYIPTGKVLGLSKVARIVDMYARRLQIQENLTRQIAEAIQQVTGAAGVAVVIEAQHMCMMMRGVEKQNSVMSTSVMLGAFRESQNTRSEFLQLIGRK

SEQ ID NO: 13489 - protein, 181 aa, Pseudomonas rhizosphaerae; identical to SEQ ID NO: 13275
  misc_feature (1)..(181): tr|A0A089YKH9|A0A089YKH9_9PSED GTP cyclohydrolase 1 OS= Pseudomonas rhizosphaerae OX=216142 GN=folE PE=3 SV=1

SEQ ID NO: 13490 - protein, 181 aa, Pseudomonas rhodesiae
  misc_feature (1)..(181): tr|A0A5C5NSV3|A0A5C5NSV3_9PSED GTP cyclohydrolase 1 OS= Pseudomonas rhodesiae OX=76760 GN=folE PE=3 SV=1
MSLEQNYTAILGQLGEDVSREGLLDTPKRAAKAMQYLCRGYEQTLEEVTNGALFSSDNSEMVLVKDIELYSLCEHHLLPFIGKAHVAYVPSGKVLGLSKVARIVDMYARRLQIQENLSRQIADAVLQVTGALGVAVVIEAKHMCMMMRGVEKQNSSMITSVMLGEFRENAATRSEFLSLIK

SEQ ID NO: 13491 - protein, 186 aa, Pseudomonas rhodesiae
  misc_feature (1)..(186): tr|A0A5C5NS41|A0A5C5NS41_9PSED GTP cyclohydrolase 1 OS= Pseudomonas rhodesiae OX=76760 GN=folE PE=3 SV=1
MTFSLPHHYREILMGLGEDPEREGLLDTPKRAAKAMQYLCHGYEQNLEEIVNGALFASDNDEMVILKDIELYSLCEHHLLPFIGKAHVAYIPTGRVLGLSKLARIVDMFARRLQIQENLTRQIADAIQEVTQAAGVAVVIEAQHMCMMMRGVEKQNSTMNTSVMLGAFRESNTTRMEFLQLIGRSK

SEQ ID NO: 13492 - protein, 186 aa, Pseudomonas sabulinigri
  misc_feature (1)..(186): tr|A0A1H1WGC5|A0A1H1WGC5_9PSED GTP cyclohydrolase 1 OS= Pseudomonas sabulinigri OX=472181 GN=folE PE=3 SV=1
MSLEKLSQNYLEILTNLGEQPERDGLKGTPERAAKAMQFLCRGYDQSLEQIVNGALFDSDNDEMVIVKDIELYSLCEHHMLPFIGKAHVAYIPTGKVIGLSKVARIVDMFARRLQIQENLTRQIAEALQQVTNAAGVAVVIEAKHMCMMMRGVEKQNSSMHSSVMLGAFRDSFNTRQEFLQLIARS

SEQ ID NO: 13493 - protein, 186 aa, Pseudomonas sabulinigri
  misc_feature (1)..(186): tr|A0A1H1VXP2|A0A1H1VXP2_9PSED GTP cyclohydrolase 1 OS= Pseudomonas sabulinigri OX=472181 GN=folE PE=3 SV=1
MNIEKLTRHYANIIEELDENPTRDGLKNTPERAAKAMQFLCRGYEQSLDELVNNALFESDNDEMVIVKDIELYSLCEHHMLPFIGKAHVAYIPTGKVVGLSKIARIVDMFARRLQIQENLTRQIAEAIQTVTNAEGVAVVIEAKHMCMMMRGVEKQNSTMYSSVMLGAFRESGNTRQEFLQLIGRH

SEQ ID NO: 13494 - protein, 189 aa, Pseudomonas sagittaria
  misc_feature (1)..(189): tr|A0A1I5V081|A0A1I5V081_9PSED GTP cyclohydrolase 1 OS= Pseudomonas sagittaria OX=1135990 GN=folE PE=3 SV=1
MSDQLSQITQHYREILKGIGEDPEREGLQDTPKRAAKAMQYLCRGYEQSLDEIVNGALFASDNDEMVIVRDIELYSLCEHHLLPFIGKAHVAYIPTGKVLGLSKVARIVDMFARRLQIQENLTRQIAEAVQQVTNAAGVAVVIEAQHMCMMMRGVEKQNSVMSSSVMLGAFRQSTNTRQEFLQLIGRSR

SEQ ID NO: 13495 - protein, 303 aa, Pseudomonas sagittaria
  misc_feature (1)..(303): tr|A0A1I5WVL3|A0A1I5WVL3_9PSED GTP cyclohydrolase FolE2 OS=Pseudomonas sagittaria OX=1135990 GN=folE2 PE=3 SV= 1
MNSLSLPDIAAQTTTARLPLERVGMAGIAQPVVLLGQRLAARVSAGVSLDDAAARGIHMSRLYLALAALETEELTPALLARVLGEFLASHRELSARAQLEIRGEALLRRPALVSPLAGWKGYPLVVDAQLYAGGLRVELEVAIGYSSTCPCSAALARQLLQQRFAADFAGRELEQGAVLEWLGSSAGSLATPHSQRSTATLRVQLSTAAVHLPLLELIERAEAALGTALQTAVKRADEQAFALANGQNLMFCEDAARRLHAALLRQPGLEAFSVRVEHAESLHAHDAVAQSFWRRAAEGCSTT

SEQ ID NO: 13496 - protein, 308 aa, Pseudomonas salegens
  misc_feature (1)..(308): tr|A0A1H2HTN8|A0A1H2HTN8_9PSED GTP cyclohydrolase FolE2 OS=Pseudomonas salegens OX=1434072 GN=folE2 PE=3 SV=1
MNAPLPDVSLTDRVTNGCPLDWVGMQGIDIPVTLKESGYQRDLHARADLAVDLQQPEVKGIHMSRLYRLLDAWSEREALTPASLQQLLQTMIDSHLDCASQNARVVLQFDLLTRRPALITPDLSGWTAYPVQMTAMLRQGVFSLEMQVTACYSSTCPCSAALARQLVEQGFRQAFAGQQHLDATVVADWLRQHATLATPHSQRSEAEVRVQLGAESGSLGLFELIDRVEQALGTPVQTAVKRADEQAFAAMNGQNLMFVEDAARRIQAALDGHYHQPRVQVRHLESLHPHDAVASAGVRRAPRPVEPV

SEQ ID NO: 13497 - protein, 184 aa, Pseudomonas salegens
  misc_feature (1)..(184): tr|A0A1H2E9Z9|A0A1H2E9Z9_9PSED GTP cyclohydrolase 1 OS= Pseudomonas salegens OX=1434072 GN=folE PE=3 SV=1
MSLEKLTDNYHQILCNLGEDPERGGLKDTPKRAAKAMQFLCHGYQQTLEEIVNGALFDSDNDEMVIVQDIELYSMCEHHMLPFIGKAHVAYLPQGKVVGLSKVARIVDMYARRLQIQENLTLQIANAVQSVTNAKGVAVIIEAKHMCMMMRGVQKQNSLMRTSVMLGMFRESVNTRQEFLQLIS

SEQ ID NO: 13498 - protein, 298 aa, Pseudomonas salomonii
  misc_feature (1)..(298): tr|A0A1H3TL35|A0A1H3TL35_9PSED GTP cyclohydrolase FolE2 OS=Pseudomonas salomonii OX=191391 GN=folE2 PE=3 SV=1
MNALTLPDIAAQASRQALPLDWVGMCGIALPIVIDGQRLTATADAGVSLDDGEARGIHMSRLYLALEMLDQQLLTPALLRNVLQRFLESHEGLSKNAYLRIHTDLLLKRPALVSPLAGWKGYPVCIEARLENQMFHVELKIDVTYSSTCPCSAALARQLIQQQFLQDFANTPLQHEDVLTWLGSANGIVATPHSQRSSAQLSIQLDASHNTLPLTDLIDTVEAALGTAVQTAVKRADEQAFALANGQNLMFCEDAARRLNLALKRSDAVKAFHLKVIHAESLHAHDAVAESRWTRDSA

SEQ ID NO: 13499 - protein, 186 aa, Pseudomonas salomonii
  misc_feature (1)..(186): tr|A0A1H3US09|A0A1H3US09_9PSED GTP cyclohydrolase 1 OS= Pseudomonas salomonii OX=191391 GN=folE PE=3 SV=1
MTLSLPQHYREILKGLGEDPEREGLLDTPKRAAKAMQYLCHGYEQNLETIVNGALFASDNDEMVILKDIELYSLCEHHLLPFIGKAHVAYIPTGKVLGLSKLARIVDMYARRLQIQENLTRQIADAIQQVTQAAGVAVVIEAKHMCMMMRGVEKQNSTMNTSVMLGAFRESNTTRMEFLQLIGRSK

SEQ ID NO: 13500 - protein, 186 aa, Pseudomonas saponiphila
  misc_feature (1)..(186): tr|A0A1H4X1L9|A0A1H4X1L9_9PSED GTP cyclohydrolase 1 OS= Pseudomonas saponiphila OX=556534 GN=folE PE=3 SV=1
MSLSLPQHYREILKDLGEDPEREGLLDTPKRAAKAMQYLCHGYSQSLEGIVNGALFASDSDEMVIVADIELYSLCEHHLLPFIGKAHVAYIPTGKVLGLSKIARIVDMFARRLQIQENLTREIADAVQNVTQAAGVAVVIEAKHMCMMMRGVEKQNSTLHTSVMLGAFRDSSTTRQEFLQLIGRSK

SEQ ID NO: 13501 - protein, 297 aa, Pseudomonas saponiphila
  misc_feature (1)..(297): tr|A0A1H4UXQ4|A0A1H4UXQ4_9PSED GTP cyclohydrolase FolE2 OS=Pseudomonas saponiphila OX=556534 GN=folE2 PE=3 SV= 1
MNALTLPDIAAQASRQALPLEWVGMCGIALPVVIDGQRTAAKADAGVSLDDGEARGIHMSRLYLALEMLEQENLNPALLHRVLQRFLDSHDGLAHSAYLRLHFDLLLKRPALVSPLTGWKRYPLSIEARLKNAMFHVELKIDVPYSSTCPCSAALSRQLIQQQFVEDFANRPLQHADVLAWLGSTQGIVATPHSQRSTAELRLRLDDFLDELPLIALINDAESALGTAVQTAVKRADEQAFALANGQNLMFCEDAARRLNQALRRSPGVNAFHLRVVHAESLHAHDAVAESRWNWEV

SEQ ID NO: 13502 - protein, 187 aa, Pseudomonas saudimassiliensis
  misc_feature (1)..(187): tr|A0A078M352|A0A078M352_9PSED GTP cyclohydrolase 1 OS= Pseudomonas saudimassiliensis OX=1461581 GN=folE1 PE=3 SV=1
MSLEKLTSNYHDILSNLGEDPQREGLKGTPLRAAKAMQFLCRGYDQSLEDIVNGALFESSSDEMVIVKNIELYSLCEHHMLPFIGKAHVAYMPDGKVIGLSKVARIVDMFARRLQIQESLTRQIAEAVQSVTGAKGVAVVIEARHMCMMMRGVEKQNSSMMTSVMLGSFRESFNTRQEFLQLIGRSN

SEQ ID NO: 13503 - protein, 181 aa, Pseudomonas saudiphocaensis
  misc_feature (1)..(181): tr|A0A078LUG0|A0A078LUG0_9PSED GTP cyclohydrolase 1 OS= Pseudomonas saudiphocaensis OX=1499686 GN=folE PE=3 SV= 1
MSLEQHYTAILGQLGEDVNREGLLDTPKRAAKAMQYLCKGYQQTLEEVTNNALFSSDNSEMVLVKNIELYSLCEHHMLPFIGKAHVAYLPNGKVLGLSKVARIVDMYARRLQIQENLTREIAEAIQQVTGAWGVAVVIEAQHMCMMMRGVEKQNSSMVTSVMLGQFRENPATRSEFLGLVK

SEQ ID NO: 13504 - protein, 301 aa, Pseudomonas savastanoi
  misc_feature (1)..(301): sp|Q48HN1|GCH4_PSE14 GTP cyclohydrolase FolE2 OS=Pseudo monas savastanoi pv. phaseolicola (strain 1448A / Race 6) OX=264730 GN=folE2 PE=3 SV=1
MNNPLPDVALTEVSSALVSLDWVGMQGVEVPVRLAEAGVRYPVHAHVDLQVDLADPSVKGIHMSRLYRLLDRYAEHQILSPDTLGALLEAMVESHLDCHSSRARLTLSFNLLCRRPALITEGLSGWKSYPVKLDATWHAGRLCLDVSADITYSSTCPCSAALSRQLLEGAFTARFGRQSFVDPMQVATWLRENASFATPHSQRSVATVQVRVAEQATELGLMTLIDAVEQALGTPVQTAVKRADEQAFARLNGQNLMYVEDAARKVQQALEGRYAASSVSVRHFESLHPHDAAAQTSNYLS

SEQ ID NO: 13505 - protein, 150 aa, Pseudomonas savastanoi
  misc_feature (1)..(150): tr|A0A3M3GHR0|A0A3M3GHR0_PSESG GTP cyclohydrolase 1 (Fr agment) OS=Pseudomonas savastanoi pv. glycinea OX=318 G N=ALQ75_05141 PE=3 SV=1
MLMSSSLPQHYRDILLGLGEDPDREGLLDTPKRASKAMQYLCHGYTQSVDEIVNGALFASDNDEMVIVQNIELYSLCEHHLLPFIGKAHVAYIPTGKVLGLSKIARIVDMFARRLQIQENLTKQIADAIQQVTGAAGVAVVIEAKHMCMM

SEQ ID NO: 13506 - protein, 186 aa, Pseudomonas segetis
  misc_feature (1)..(186): tr|A0A239CPK3|A0A239CPK3_9PSED GTP cyclohydrolase 1 OS= Pseudomonas segetis OX=298908 GN=folE PE=3 SV=1
MNDQLSEHYREILIAVGENPEREGLLDTPKRAAKAMQYLCHGYDKSLEEVVNGALFASDNDEMVIVKDIELYSLCEHHLLPFIGKAHVAYIPTGKVLGLSKIARIVDMYARRLQIQENLTRQIADSIQAVTQAAGVAVVIEAQHMCMMMRGVEKQNSIMNTSVMLGAFRESYNTRHEFLQLIGRSK

SEQ ID NO: 13507 - protein, 182 aa, Pseudomonas segetis
  misc_feature (1)..(182): tr|A0A239I0H9|A0A239I0H9_9PSED GTP cyclohydrolase 1 OS= Pseudomonas segetis OX=298908 GN=folE PE=3 SV=1
MSLEQNYTQILGQLGEDVSREGLLDTPKRAAKAMQYLCRGYQQTLEEVTNGALFSSDASEMVLVKNIELYSLCEHHLLPFIGKAHVAYIPSGKVLGLSKIARIVDMYARRLQIQENLSRQIAEAIQQVTGALGVAVVIEAQHMCMMMRGVEKQNSSMVTSVMLGEFRKNAATRSEFLSLINN

SEQ ID NO: 13508 - protein, 186 aa, Pseudomonas seleniipraecipitans
  misc_feature (1)..(186): tr|A0A1G7GXA7|A0A1G7GXA7_9PSED GTP cyclohydrolase 1 OS= Pseudomonas seleniipraecipitans OX=640205 GN=folE PE=3 SV=1
MNPLLPNHYREILLGIGENPEREGLLDTPKRAAKAMQYLCNGYEKSLQEVVNGALFSSESDEMVIVKDVELYSLCEHHLLPFIGKAHVAYIPTGKVLGLSKIARIVDMYARRLQIQENLTRQIASAIEEVTQAAGVAVVIEAQHMCMMMRGVEKQNSVMSTSVMLGAFRESYNTRHEFLQLIGRSK

SEQ ID NO: 13509 - protein, 298 aa, Pseudomonas seleniipraecipitans
  misc_feature (1)..(298): tr|A0A1G7UEC7|A0A1G7UEC7_9PSED GTP cyclohydrolase FolE2 OS=Pseudomonas seleniipraecipitans OX=640205 GN=folE2 PE=3 SV=1
MNQQTDMPDIAAQRSSGSTAMLDWVGMRGIALPVRIDTQAVSARIDAGVSLDDGQTRGIHMSRLYLAVAELQREAVSPALLREVLERFLNSHDGLSLRAYLELRGEWLIERPALISPLSGYKAYPLTLKAHLAPSGFHLELGLQLSYSSTCPCSAALARQLIQQRFADDFCERQPDFDTMHAWLGSSAGIIATPHSQRSEADIRVRLQADATSLPFIGLLDRAEAALGTAVQTAVKRADEQAFALANGQNLMFCEDAARRLHGALLSMPEVEGFRLHVTHAESLHAHDAAASASHNWR

SEQ ID NO: 13510 - protein, 186 aa, Pseudomonas sihuiensis; identical to SEQ ID NO: 13265
  misc_feature (1)..(186): tr|A0A1H2LYA7|A0A1H2LYA7_9PSED GTP cyclohydrolase 1 OS= Pseudomonas sihuiensis OX=1274359 GN=folE PE=3 SV=1

SEQ ID NO: 13511 - protein, 296 aa, Pseudomonas sihuiensis
  misc_feature (1)..(296): tr|A0A1H2MPE1|A0A1H2MPE1_9PSED GTP cyclohydrolase FolE2 OS=Pseudomonas sihuiensis OX=1274359 GN=folE2 PE=3 SV= 1
MNEQPLPDIAAQATHHDLPLDWVGMAGIALPIRLADAVVTASVDIGVSLDDAGARGIHMSRLYLAAQRLVHQPLNVPAVLQVLDDCLSSHQELSDSATLTLRGEVPLKRPALVSPLHGWKTYPFELRARQNGRGVNIELQVEVSYSSTCPCSAALARQLIQQRFAWDFPDQQVDYSSVLDWLGSTQGILATPHSQRSTATLQLRLAPGCIDLPVLALIDSAEQALGTPVQTAVKRADEQAFALANGQNLMFCEDAARRLHRALRQLPLASAFRVRVVHAESLHAHDAVAESSWNWC

SEQ ID NO: 13512 - protein, 186 aa, Pseudomonas silesiensis
  misc_feature (1)..(186): tr|A0A191YZN8|A0A191YZN8_9PSED GTP cyclohydrolase 1 OS= Pseudomonas silesiensis OX=1853130 GN=folE PE=3 SV=1
MTLSLSQSYREILIGLGENPDREGLRDTPVRAAKAMQYLCHGYEQSVEEIVNGALFMSDNDEMIIVDNIELYSLCEHHMLPFIGKAHVAYIPTGKVLGLSKIARLVDMFARRLQIQENLTRQIAEAVQHVTGAAGVAVVIEARHMCMMMRGVEKQNSTMNTSVMLGAFRESSNTRQEFLQLIGRSK

SEQ ID NO: 13513 - protein, 181 aa, Pseudomonas silesiensis
  misc_feature (1)..(181): tr|A0A191YQC0|A0A191YQC0_9PSED GTP cyclohydrolase 1 OS= Pseudomonas silesiensis OX=1853130 GN=folE PE=3 SV=1
MSLEQNYTEILGQLGEDASREGLLDTPKRAAKAMQYLCRGYEQTLEEVTNGALFSSDNSEMVLVKDIELYSLCEHHLLPFIGKAHVAYIPSGKVLGLSKVARIVDMYARRLQIQENLSRQIADAVQEVTGAIGVAVVIEAKHMCMMMRGVEKQNSTMITSVMLGEFRENAATRSEFLSLIK

SEQ ID NO: 13514 - protein, 181 aa, Pseudomonas simiae; identical to SEQ ID NO: 13370
  misc_feature (1)..(181): tr|A0A1N7UKY2|A0A1N7UKY2_9PSED GTP cyclohydrolase 1 OS= Pseudomonas simiae OX=321846 GN=folE PE=3 SV=1

SEQ ID NO: 13515 - protein, 184 aa, Pseudomonas simiae
  misc_feature (1)..(184): tr|A0A1N7UH79|A0A1N7UH79_9PSED GTP cyclohydrolase 1 OS= Pseudomonas simiae OX=321846 GN=folE PE=3 SV=1
MTLPHHYREILKGLGEDPEREGLLDTPKRAAKAMQYLCHGYEQSLEDIVNGALFTSDNDEMVILKDIELYSLCEHHLLPFIGKAHVAYIPTGKVLGLSKLARIVDMYARRLQIQENLTRQIADAIQDVTQAAGVAVVIEAQHMCMMMRGVEKQNSTMNTSVMLGAFRESNTTRMEFLQLIGRSK

SEQ ID NO: 13516 - protein, 293 aa, Pseudomonas soli
  misc_feature (1)..(293): tr|A0A1H9HFU2|A0A1H9HFU2_9PSED GTP cyclohydrolase FolE2 OS=Pseudomonas soli OX=1306993 GN=folE2 PE=3 SV=1
MTSLSLPDVAAQSNQQALPLDWVGMNGIAVALQLDGRTVTAFADAGVSLDDGASRGIHMSRLYLALEALEQQPLSPPLLRHILRSFLLSHTGLSNNAYLRLTFDHLLKRSALISPLAGWKRYPVTVDAKLEDEMFHVELSVNVPYSSTCPCSAALARQLIQEQFDRDFAHRPLDRCGIRQWLGSSDGIVATPHSQRSMARLQVRLAGEALNLTGLIDAAEAALGTAVQTAVKRADEQAFALANGQNLMFCEDAARRLHLALMQIEEVLGFSVRVEHAESLHAHDAVAVTQHRW

SEQ ID NO: 13517 - protein, 181 aa, Pseudomonas soli; identical to SEQ ID NO: 13428
  misc_feature (1)..(181): tr|A0A1H9FNS9|A0A1H9FNS9_9PSED GTP cyclohydrolase 1 OS= Pseudomonas soli OX=1306993 GN=folE PE=3 SV=1

SEQ ID NO: 13518 - protein, 185 aa, Pseudomonas songnenensis
  misc_feature (1)..(185): tr|A0A482UA58|A0A482UA58_9PSED GTP cyclohydrolase 1 OS= Pseudomonas songnenensis OX=1176259 GN=folE PE=3 SV=1
MNDLPGHYREILSGVGENPEREGLRDTPLRAAKAMQYLCGGYNRSLEEVVNGALFASDNDEMVIVKDIELYSLCEHHILPFIGKAHVAYIPTGRVLGLSKVARIVDMFARRLQIQENLTRQIAEAIQEVTGAAGVAVVIEAKHMCMMMRGVEKQNSVMNTSVMLGAFRSSCNTRMEFLQLIGRGQ

SEQ ID NO: 13519 - protein, 181 aa, Pseudomonas songnenensis
  misc_feature (1)..(181): tr|A0A482U1G9|A0A482U1G9_9PSED GTP cyclohydrolase 1 OS= Pseudomonas songnenensis OX=1176259 GN=folE PE=3 SV=1
MSLEQHYTAILGQLGEDVSREGLLDTPKRAAKAMQYLCKGYQQTLEEVTNGALFSSDNSEMVLVKNIELYSLCEHHMLPFIGKAHVAYLPNGKVLGLSKVARIVDMYARRLQIQENLTREIAEAMQQVTGASGVAVVIEAQHMCMMMRGVEKQNSSMVTSVMLGQFRENAATRSEFLGLVK

SEQ ID NO: 13520 - protein, 297 aa, Pseudomonas sp.
  misc_feature (1)..(297): tr|A0A1S1GP97|A0A1S1GP97_9PSED GTP cyclohydrolase FolE2 OS=Pseudomonas sp. HMSC75E02 OX=1608908 GN=folE2 PE=3 SV=1
MTAFLPDVASQAASDTLALDWVGMQGIALPLRLHGERLNALADAGVSLDAAAARGIHMSRLYLALARLEQAELGPQLLREVLDDFLASHAGLSRRASLRLAFDALLSRPALVSPLSGWKQYPCEVHARLDDQGLRLELRLRLAYSSTCPCSAALARQLIQQRFAEDFADRSPSHQEVHTWLGSSAGIVATPHSQRSFADLHLHLRAGLDGLPLRELLDCAEAALGTAVQTAVKRADEQAFALANGQNLMFCEDAARRLHRALAQRGELEAFALSVVHAESLHAHDAVARSQWRREAP

SEQ ID NO: 13521 - protein, 181 aa, Pseudomonas sp.
  misc_feature (1)..(181): tr|S2FAY0|S2FAY0_9PSED GTP cyclohydrolase 1 OS=Pseudomo nas sp. G5(2012) OX=1268068 GN=folE PE=3 SV=1
MSLEQNYTAILGQLGEDPSREGLLDTPKRAAKAMQYLCRGYEQTLEEVTNGALFSSDNSEMVLVKDIELYSLCEHHLLPFIGKAHVAYIPSGKVLGLSKVARIVDMYARRLQIQENLSRQIADAVQQVTGALGVAVVIEAKHMCMMMRGVEKQNSTMITSVMLGEFRENAATRSEFLSLIK

SEQ ID NO: 13522 - protein, 297 aa, Pseudomonas straminea
  misc_feature (1)..(297): tr|A0A1I1Y7C2|A0A1I1Y7C2_PSEOC GTP cyclohydrolase FolE2 OS=Pseudomonas straminea OX=47882 GN=folE2 PE=3 SV=1
MNNSTTLPDIAAQRSAHANVPLDWVGMGGIALPVLLGEQPINAQVDAGVSLDDGQSRGIHMSRLYLALAALQGEPLSPALLRYVLENFLVSHYGLSHCAYLELRGDWLLSRPALVSPLAGYKAYPLTINARLDPAGFHLELGLRVAYSSTCPCSAALARQLIQQRFAADFANRPLDFDGLHAWLGSTGIAATPHSQRSDANIRVRLPDEANDLPFLALLDSAEATLGTAVQTAVKRADEQAFALANGQNLMFCEDAARRLYQALLKMPGIDAFHIQVTHAESLHAHDAVARVSHGLC

SEQ ID NO: 13523 - protein, 186 aa, Pseudomonas straminea
  misc_feature (1)..(186): tr|A0A1I1Z950|A0A1I1Z950_PSEOC GTP cyclohydrolase 1 OS= Pseudomonas straminea OX=47882 GN=folE PE=3 SV=1
MNPLLPNHYREILVGLGENPEREGLLDTPKRAAKAMQYLCNGYEKSLEEVVNGALFSSESDEMVIVKDIELYSLCEHHLLPFIGKAHVAYIPTGKVLGLSKIARIVDMYARRLQIQENLTRQIATAIEQVTQAAGVAVVIEAQHMCMMMRGVEKQNSVMSTSVMLGAFRESYNTRHEFLQLIGRSK

SEQ ID NO: 13524 - protein, 185 aa, Pseudomonas stutzeri; identical to SEQ ID NO: 13379
  misc_feature (1)..(185): tr|I4JKB1|I4JKB1_PSEST GTP cyclohydrolase 1 OS=Pseudomo nas stutzeri TS44 OX=477228 GN=folE PE=3 SV=1

SEQ ID NO: 13525 - protein, 181 aa, Pseudomonas stutzeri
  misc_feature (1)..(181): tr|I4JIQ3|I4JIQ3_PSEST GTP cyclohydrolase 1 OS=Pseudomo nas stutzeri TS44 OX=477228 GN=folE PE=3 SV=1
MSLEQQYTEILAQLGEDVTREGLLDTPKRAAKAMQYLCKGYQQTLEEVTNDALFSSDNSEMVLVKNIELYSLCEHHMLPFIGKAHVAYLPNGKVLGLSKVARIVEMYARRLQIQENLTREIAEAVQQVTGASGVAVVIEAQHMCMMMRGVEKQNSSMVTSVMLGQFRANAATRAEFLGLVK

SEQ ID NO: 13526 - protein, 186 aa, Pseudomonas synxantha
  misc_feature (1)..(186): tr|I4L3Y2|I4L3Y2_9PSED GTP cyclohydrolase 1 OS=Pseudomo nas synxantha BG33R OX=96901 GN=folE PE=3 SV=1
MTLSLPHHYREILKGLGEDPEREGLLDTPKRAAKAMQYLCHGYAQNLEEIVNGALFASDNDEMVILKDIELYSLCEHHLLPFIGKAHVAYIPTGKVLGLSKLARIVDMFARRLQIQENLTRQIADAIQDVTQAAGVAVVIEAKHMCMMMRGVEKQNSTMNTSVMLGAFRESNTTRMEFLQLIGRSK

SEQ ID NO: 13527 - protein, 181 aa, Pseudomonas synxantha
  misc_feature (1)..(181): tr|A0A0R2Z3I9|A0A0R2Z3I9_9PSED GTP cyclohydrolase 1 OS= Pseudomonas synxantha OX=47883 GN=folE PE=3 SV=1
MSLEQNYTEILGQLGEDVSREGLLDTPKRAAKAMQYLCRGYAQTLEEVTNGALFSSDNSEMVLVKDIELYSLCEHHLLPFIGKAHVAYIPSGKVLGLSKVARIVDMYARRLQIQENLSRQIADAVLEVTGALGVAVVIEAKHMCMMMRGVEKQNSSMITSVMLGEFRDNAATRSEFLSLIK

SEQ ID NO: 13528 - protein, 187 aa, Pseudomonas syringae
  misc_feature (1)..(187): sp|Q887V1|GCH11_PSESM GTP cyclohydrolase 1 1 OS=Pseudom onas syringae pv. tomato (strain ATCC BAA-871 / DC3000) OX=223283 GN=folE1 PE=3 SV=1
MSSSLPQHYRDILLELGENPEREGLLDTPKRASKAMQYLCHGYTQTVEEIVNGALFASDNDEMVIVQNIELYSLCEHHLLPFIGKAHVAYIPTGKVLGLSKIARIVDMFARRLQIQENLTKQIADSIQQVTGAAGVAVVIEAQHMCMMMRGVEKQNSTMNTSVMLGAFRESSTTRMEFLQLIGRSRT

SEQ ID NO: 13529 - protein, 301 aa, Pseudomonas syringae
  misc_feature (1)..(301): tr|A0A2S3TZ09|A0A2S3TZ09_9PSED GTP cyclohydrolase FolE2 OS=Pseudomonas syringae group genomosp. 3 OX=251701 GN =folE2 PE=3 SV=1
MNSPLPDVALTEVSSALIALDWVGMQGVEVPLTLGEPGATHPVHAYADLQVDLTDPSVKGIHMSRLYRLLDGFAEHQVLTPETLSALLEAMVESHVDCHSSGARITLTFNLLCRRPALVTEGLSGWKSYPVKLEAVWRAERLCLDVSADITYSSTCPCSAALSRQLLEEAFVARFGRQSFVDPMQVAAWLRDNASYATPHSQRSVATVQVRVAEQATEMGLMALIDTVEQALGTPVQTAVKRADEQAFARLNGQNLMYVEDAARKIQQALEGRYPASSVSVRHFESLHPHDAAAQTSNYLS

SEQ ID NO: 13530 - protein, 182 aa, Pseudomonas taeanensis
  misc_feature (1)..(182): tr|A0A0A1YHB2|A0A0A1YHB2_9PSED GTP cyclohydrolase 1 OS= Pseudomonas taeanensis MS-3 OX=1395571 GN=folE PE=3 SV= 1
MSLEQNYTAILGQIGEDASREGLLDTPKRAAKAMQYLCRGYQQTLEDVTNGALFSSDNSEMVLVKHIELYSLCEHHLLPFIGKAHVAYIPNGKVLGLSKVARIVDMYARRLQIQENLSRQIAEAVQEVTGALGVAVVIEAQHMCMMMRGVEKQNSSMVTSVMLGEFRENAATRSEFLSLINN

SEQ ID NO: 13531 - protein, 186 aa, Pseudomonas taeanensis
  misc_feature (1)..(186): tr|A0A0A1YEG8|A0A0A1YEG8_9PSED GTP cyclohydrolase 1 OS= Pseudomonas taeanensis MS-3 OX=1395571 GN=folE PE=3 SV= 1
MNHLLSNHYREILIGVGEDPEREGLLDTPKRAAKAMQYLCHGYQSSLEEVVNGALFASDNDEMVMVKDVELYSLCEHHLLPFIGKAHVAYIPTGKVLGLSKIARIVDMYARRLQIQENLTRQIADAIQQVTSAAGVAVVIEAQHMCMMMRGVEKQNSLMSTSVMLGAFRESSNTRQEFLQLIGRSK

SEQ ID NO: 13532 - protein, 181 aa, Pseudomonas taetrolens
  misc_feature (1)..(181): tr|A0A0J6GNP9|A0A0J6GNP9_PSETA GTP cyclohydrolase 1 OS= Pseudomonas taetrolens OX=47884 GN=folE PE=3 SV=1
MSLEQNYTAILGQLGEDVSREGLLDTPKRAAKAMQYLCRGYEQTLEEVTNGALFSSDNSEMVLVKDIELYSLCEHHMLPFIGKAHVAYIPSGKVLGLSKVARIVDMYARRLQIQENLSRQIADAVMQVTGALGVAVVIEAKHMCMMMRGVEKQNSSMITSVMLGEFRENAATRSEFLSLIK

SEQ ID NO: 13533 - protein, 298 aa, Pseudomonas taetrolens
  misc_feature (1)..(298): tr|A0A0J6GRF3|A0A0J6GRF3_PSETA GTP cyclohydrolase FolE2 OS=Pseudomonas taetrolens OX=47884 GN=folE2 PE=3 SV=1
MNALTLPDVASQNTLQALPLEWVGMCGIALPVVIDGQRLSATADAGVSLDDSEARGIHMSRLYLALEVLESQELNPLLLKKILQRFLDSHDDLSISAYLRIHTHVLLKRPALVSPLSGWKSYPVSIDAAVKNGMFHVELKTEVIYSSTCPCSAALARQLIQQKFMDDFANKSLQHAEVLSWLGSSRGIVATPHSQRSTAYLQLRMNTELPDIPLIPIIDMAESALGTAVQTAVKRADEQAFALANGQNLMFCEDAARRLNVALKASPGVIGFDLKVVHAESLHSHDAVAESRWNWESQ

SEQ ID NO: 13534 - protein, 305 aa, Pseudomonas taiwanensis
  misc_feature (1)..(305): tr|V7DIM4|V7DIM4_9PSED GTP cyclohydrolase FolE2 OS=Pseu domonas taiwanensis SJ9 OX=1388762 GN=folE2 PE=3 SV=1
MEYQMTQLKLPDIAAQTHEYALPLNWVGMCGIAQPVQFEGRTAAATVDAGVSLVDGSSRGIHMSRLYLALESLEHQPLTPLTIRQLLGNFLSSHEGLSSAAYLRLRFEHLLKRPALISPLEGWKSYAVTVDARIENEMFHVELSVSVPYSSTCPCSAALARQLIQQQFQAHFSTEQVDKSAVLQWLGSAEGIVATPHSQRSSALIQVRLRSNQQVLPITELIDCIEASLGTAVQTAVKRADEQAFALANGQNLMFCEDAARRLHKALRQIEWSTAFKLRVEHAESLHAHDAVATSQWQWDVSCAA

SEQ ID NO: 13535 - protein, 181 aa, Pseudomonas taiwanensis
  misc_feature (1)..(181): tr|V7DCW3|V7DCW3_9PSED GTP cyclohydrolase 1 OS=Pseudomo nas taiwanensis SJ9 OX=1388762 GN=folE PE=3 SV=1
MSLEQNYTEILSQIGEDVSREGLLDTPKRAAKAMKYLCRGYEQTLEEVTNNALFSSDNSEMVLVRDIELYSMCEHHMLPFIGKAHVAYLPKGKVLGLSKVARIVDMYARRLQIQENLSRQVAEAVQQVTGAAGVAVVIEAKHMCMMMRGVEKQNSTMITSVMLGEFRENAATRSEFLSLIK

SEQ ID NO: 13536 - protein, 181 aa, Pseudomonas thivervalensis; identical to SEQ ID NO: 13235
  misc_feature (1)..(181): tr|A0A176NSG3|A0A176NSG3_9PSED GTP cyclohydrolase 1 OS= Pseudomonas thivervalensis OX=86265 GN=folE PE=3 SV=1

SEQ ID NO: 13537 - protein, 186 aa, Pseudomonas thivervalensis
  misc_feature (1)..(186): tr|A0A176NQN5|A0A176NQN5_9PSED GTP cyclohydrolase 1 OS= Pseudomonas thivervalensis OX=86265 GN=folE PE=3 SV=1
MTLSLPQNYREILIGLGENPEREGLLDTPVRAAKAMQYLCHGYEQSVEQIVNGALFASDSDEMVIVADIELYSLCEHHLLPFIGKAHVAYIPTGKVLGLSKIARLVDMFARRLQIQENLTRQIADAVQQVTQAAGVAVVIEAQHMCMMMRGVEKQNSTMNTSVMLGAFRDSSTTRQEFLQLIRRSK

SEQ ID NO: 13538 - protein, 181 aa, Pseudomonas tolaasii; identical to SEQ ID NO: 13303
  misc_feature (1)..(181): tr|A0A2N0E8Z4|A0A2N0E8Z4_PSETO GTP cyclohydrolase 1 OS= Pseudomonas tolaasii NCPPB 2192 OX=564423 GN=folE PE=3 SV=1

SEQ ID NO: 13539 - protein, 298 aa, Pseudomonas tolaasii
  misc_feature (1)..(298): tr|A0A2N0E382|A0A2N0E382_PSETO GTP cyclohydrolase FolE2 OS=Pseudomonas tolaasii NCPPB 2192 OX=564423 GN=folE2 PE=3 SV=1
MNALTLPDIAAQASRQAMPLDWVGMCGIALPILIDGQRLTATADAGVSLDDGAARGIHMSRLYLALEMLDQQPLTPALLRTLLERFLESHEGLSKNAYLRIHTDLLLKRAALVSPLAGWKGYPVCIEARLENRMFHVELKIDVTYSSTCPCSAALARQLIQQQFIDDFANTPLQHEDVLTWLGSANGIVATPHSQRSSAQISVQLDETLPSLPLTDLIDNVELALGTAVQTAVKRADEQAFALANGQNLMFCEDAARRLNLALKRSDAVKAFHLKVIHAESLHAHDAVAESRWTRNAE

SEQ ID NO: 13540 - protein, 186 aa, Pseudomonas toyotomiensis
  misc_feature (1)..(186): tr|A0A1I5W700|A0A1I5W700_9PSED GTP cyclohydrolase 1 OS= Pseudomonas toyotomiensis OX=554344 GN=folE PE=3 SV=1
MSQPLSQQYREILVGLGENPEREGLLDTPKRAAKAMQYLCHGYQQSLDEIVNGALFESDNDEMVIVKDIELYSLCEHHLLPFIGKAHVAYIPTGKVLGLSKVARIVDMYARRLQIQENLTKQIADAIQRVTNAAGVAVVIEAKHMCMMMRGVEKQNSVMSSSVMLGAFRQSCNTRHEFLQLIGRNN

SEQ ID NO: 13541 - protein, 181 aa, Pseudomonas toyotomiensis
  misc_feature (1)..(181): tr|A0A1I5UFY7|A0A1I5UFY7_9PSED GTP cyclohydrolase 1 OS= Pseudomonas toyotomiensis OX=554344 GN=folE PE=3 SV=1
MSLEQQYTAILGQLGEDVSREGLLDTPKRAAKAMQYLCRGYQQTLEEVTNGALFSSDNSEMVLVKNIELYSLCEHHLLPFIGKAHVAYIPNGKVLGLSKVARIVDMYARRLQIQENLSRQIAEAVEQVTGALGVAVVIEAQHMCMMMRGVEKQNSSMVTSVMLGEFRNNPATRGEFLNLVR

SEQ ID NO: 13542 - protein, 187 aa, Pseudomonas tremae; identical to SEQ ID NO: 13280
  misc_feature (1)..(187): tr|A0A0Q0F1H8|A0A0Q0F1H8_9PSED GTP cyclohydrolase 1 OS= Pseudomonas tremae OX=200454 GN=folE PE=3 SV=1

SEQ ID NO: 13543 - protein, 181 aa, Pseudomonas tremae
  misc_feature (1)..(181): tr|A0A0Q0C3A0|A0A0Q0C3A0_9PSED GTP cyclohydrolase 1 OS= Pseudomonas tremae OX=200454 GN=folE PE=3 SV=1
MTLEQNYTAILGQLGEDVSREGLLDTPKRAAKAMQYLCRGYAQTLEEVTNGALFSSEASEMVMVKDIELYSLCEHHLLPFIGKAHVAYIPQGKVLGLSKVARIVDMYARRLQIQENLSRQIAEAIQQVTGALGVAVVIEAKHMCMMMRGVEKQNSAMITSVMLGEFRENAATRSEFLSLIK

SEQ ID NO: 13544 - protein, 181 aa, Pseudomonas trivialis
  misc_feature (1)..(181): tr|A0A0R2ZL19|A0A0R2ZL19_9PSED GTP cyclohydrolase 1 OS= Pseudomonas trivialis OX=200450 GN=folE PE=3 SV=1
MSLEQNYTAILGQLGEDVSREGLLDTPKRAAKAMQYLCRGYEQTLEEVTNGALFSSDNSEMVLVKDIELYSLCEHHLLPFIGKAHVAYIPRGKVLGLSKVARIVDMYARRLQIQENLSRQIADAVLEVTGALGVAVVIEAKHMCMMMRGVEKQNSSMITSVMLGEFRENAATRSEFLSLIK

SEQ ID NO: 13545 - protein, 296 aa, Pseudomonas trivialis
  misc_feature (1)..(296): tr|A0A0H5ABA1|A0A0H5ABA1_9PSED GTP cyclohydrolase FolE2 OS=Pseudomonas trivialis OX=200450 GN=folE2 PE=3 SV=1
MNALTLPDIAAQASRQALPLDWVGMCGIALPILIDGQRLSATADAGVSLDDGNARGIHMSRLYLALEMLDQQSLTPAHLRNVLQRFLDSHEGLSKNAYLRIHTDLLLKRAALVSTLAGWKRYPISIEARLENQMFHVELKIDVTYSSTCPCSAALARQLIQQQFLQDFANTPLRHDDVLTWLGSANGIVATPHSQRSNAQLHVQLQGEQLPITELIDKVEAALGTAVQTAVKRADEQAFALANGQNLMFCEDAARRLNLALKRSDAVKAFHLKVIHAESLHAHDAVAESRWTRNPA

SEQ ID NO: 13546 - protein, 191 aa, Pseudomonas umsongensis
  misc_feature (1)..(191): tr|A0A1H1P842|A0A1H1P842_9PSED GTP cyclohydrolase 1 OS= Pseudomonas umsongensis OX=198618 GN=folE PE=3 SV=1
MTLSLHQNCLSQSYREILIGLGENPEREGLRDTPLRAAKAMQYLCHGYEQSVEEIINGALFASDNDEMVIVDNIELYSLCEHHLLPFIGKAHVAYIPTGKVLGLSKIARLVDMFARRLQIQENLTRQIADAVQQVTGAAGVAVVIEAQHMCMMMRGVEKQNSTMNTSVMLGAFRESSNTRQEFLQLIGRSK

SEQ ID NO: 13547 - protein, 186 aa, Pseudomonas umsongensis
  misc_feature (1)..(186): tr|A0A1H1YUY7|A0A1H1YUY7_9PSED GTP cyclohydrolase 1 OS= Pseudomonas umsongensis OX=198618 GN=folE PE=3 SV=1
MNPSIAEHYREILVAIGENPDREGLLDTPKRAAKAMQYLCNGYTMNLEEVINGALFESLNDEMVIVRDIELYSLCEHHMLPFIGKAHVAYIPTGRVLGLSKVARVVDMFARRLQIQENLTKQIADALQHMTDAAGVAVVIEAKHMCMMMRGVEKQNSVMTTSVMLGAFRDSSATRHEFLQLIGRIG

SEQ ID NO: 13548 - protein, 188 aa, Pseudomonas vancouverensis
  misc_feature (1)..(188): tr|A0A1H2NZW0|A0A1H2NZW0_9PSED GTP cyclohydrolase 1 OS= Pseudomonas vancouverensis OX=95300 GN=folE PE=3 SV=1
MNEQLTRNYREILQGVGENPQREGLLDTPARAAKAMQYLCHGYQQNLEQVVNGALFESDNDEMVIVRDIELYSLCEHHLLPFIGKAHVAYLPTGKVLGLSKIARIVDMFARRLQIQENLTRQVADAIARVTDAAGVAVVIEAKHMCMMMRGVEKQNSVMSTSVMLGVFRDSYNTRQEFLQLIRNSQGQ

SEQ ID NO: 13549 - protein, 191 aa, Pseudomonas vancouverensis
  misc_feature (1)..(191): tr|A0A1H2P8W3|A0A1H2P8W3_9PSED GTP cyclohydrolase 1 OS= Pseudomonas vancouverensis OX=95300 GN=folE PE=3 SV=1
MTLTLPQQALSESYREILIGVGEDPEREGLLDTPKRAAKAMQYLCHGYAQSVEEIVNGALFASDNDEMVIVDNIELYSLCEHHLLPFIGKAHVAYIPTGKVLGLSKIARLVDMFARRLQIQENLTRQIAEAVQQVTGAAGVAVVIEAQHMCMMMRGVEKQNSTMNTSVMLGAFRESSNTRQEFLQLIGRSK

SEQ ID NO: 13550 - protein, 181 aa, Pseudomonas veronii; identical to SEQ ID NO: 13451
  misc_feature (1)..(181): tr|A0A1D3K1E0|A0A1D3K1E0_9PSED GTP cyclohydrolase 1 OS= Pseudomonas veronii 1YdBTEX2 OX=1295141 GN=folE2 PE=3 S V=1

SEQ ID NO: 13551 - protein, 185 aa, Pseudomonas veronii
  misc_feature (1)..(185): tr|A0A0R3B0T0|A0A0R3B0T0_9PSED GTP cyclohydrolase 1 OS= Pseudomonas veronii OX=76761 GN=folE PE=3 SV=1
MNEELARNYREILHGVGEDPEREGLLDTPKRAAKAMQYLCHGYQQSLEQIVNGALFESDNDEMVIVRDIELYSLCEHHLLPFIGKAHVAYIPTGKVLGLSKVARIVDMFARRLQIQENLTRQIADAISLVTDAAGVAVVIEAKHMCMMMRGVEKQNSVMSTSVMLGAFRESYNTRQEFLQLIRGR

SEQ ID NO: 13552 - protein, 186 aa, Pseudomonas versuta
  misc_feature (1)..(186): tr|A0A0M4QT93|A0A0M4QT93_9PSED GTP cyclohydrolase 1 OS= Pseudomonas versuta OX=1788301 GN=folE PE=3 SV=1
MSATLPEQYREILIGLGENPDREGLLDTPKRAAKAMQYLCHGYEQSVETIVNGALFASDSDEMVIVSDIELYSLCEHHLLPFIGKAHVAYIPTGKVLGLSKIARIVDMFARRLQIQENLTREIADAIQGITQAAGVAVVIEARHMCMMMRGVEKQNSTMNTSVMLGAFREPSTRMEFLQLIGRSKS

SEQ ID NO: 13553 - protein, 181 aa, Pseudomonas versuta; identical to SEQ ID NO: 13303
  misc_feature (1)..(181): tr|A0A0M5LVU9|A0A0M5LVU9_9PSED GTP cyclohydrolase 1 OS= Pseudomonas versuta OX=1788301 GN=folE PE=3 SV=1

SEQ ID NO: 13554 - protein, 301 aa, Pseudomonas viridiflava
  misc_feature (1)..(301): tr|A0A3M5P9N6|A0A3M5P9N6_PSEVI GTP cyclohydrolase FolE2 OS=Pseudomonas viridiflava OX=33069 GN=folE2 PE=3 SV=1
MNSSLPDVALTEASSALIALDWVGMQAIEVPIRLSEEGVSHSVHAFVDLHVDLADPSVKGIHMSRLYRLLDRFAEERLLNVAALSDLLEAMVESHASCRSTRARIKLNFNLLCRRPALVTEGLSGWKSYPITIDALWEAGRLRLDLSVGITYSSTCPCSAALSRQLLESAFIAHFDRQTFVDTMQVANWLRDNGSLATPHSQRSLATVQVRVPEHATELGLMALIDTTERALGTPVQTAVKRADEQAFARLNGQNLMYVEDAARKIQQALEGLYAASSVSVRHFESLHPHDAAAQTSNYLT

SEQ ID NO: 13555 - protein, 181 aa, Pseudomonas viridiflava
  misc_feature (1)..(181): tr|A0A0N8GJD4|A0A0N8GJD4_PSEVI GTP cyclohydrolase 1 OS= Pseudomonas viridiflava OX=33069 GN=folE2 PE=3 SV=1
MTLEQNYTAILGQLGEDVSREGLLDTPKRAAKAMQYLCRGYAQTLEEVTNEALFSSDASEMVMVKDIELYSLCEHHLLPFIGKAHVAYIPNGKVLGLSKVARIVDMYARRLQIQENLSRQIAEAIQQVTGALGVAVVIEAQHMCMMMRGVEKQNSAMITSVMLGEFRENAATRSEFLSLIK

SEQ ID NO: 13556 - protein, 181 aa, Pseudomonas vranovensis
  misc_feature (1)..(181): tr|A0A423D4N6|A0A423D4N6_9PSED GTP cyclohydrolase 1 OS= Pseudomonas vranovensis OX=321661 GN=folE PE=3 SV=1
MSLEQNYTAILGQLGEDVSREGLLDTPKRAAKAMQYLCRGYEQTLEEVTNGALFSSDNSEMVLVKDIELYSLCEHHMLPFIGKAHVAYIPDGKVLGLSKVARIVDMYARRLQIQENLSRQVAEAIQQVTGALGVAVVIEAKHMCMMMRGVEKQNSTMITSVMLGEFRENAATRSEFLSLIK

SEQ ID NO: 13557 - protein, 295 aa, Pseudomonas vranovensis
  misc_feature (1)..(295): tr|A0A423D7K0|A0A423D7K0_9PSED GTP cyclohydrolase FolE2 OS=Pseudomonas vranovensis OX=321661 GN=folE2 PE=3 SV= 1
MSAFTLPDIAAQATTSQLPLDWVGMCGIALPLQINGQISPATADAGVSLDDGASRGIHMSRLYLALQALEHQPLSPALINEVLQGFLDSHIGLSASAFLTLRFELMLKRPALISPLAGWKAYPVTLDAQIKDGVFHVELFVDVAYSSTCPCSAALARQLIQQQFISDFGNCSLSHEAVLSWLGSAEGIVATPHSQRSAAKLQVRLRPGVNELPIETLINQAESALGTAVQTAVKRADEQAFALANGQNLMFCEDAARRLNVTLKTLPWLSGFNLRVEHAESLHAHDAVAHSQWRW

SEQ ID NO: 13558 - protein, 271 aa, Pseudomonas wadenswilerensis
  misc_feature (1)..(271): tr|A0A380STV9|A0A380STV9_9PSED GTP cyclohydrolase FolE2 OS=Pseudomonas wadenswilerensis OX=1785161 GN=folE2 PE =4 SV=1
MSGIALPLRINGQNLPASADAGVSLDDGASRGIHMSRLYLALEALEQQALSPALVNGVLERFLDSHIGLSASAFLTLRFELMLKRPALISPLAGWKAYPVTLDAQIKDGVFHVELFVDVEYSSTCPCSAALARQLIQQQFLTDFGNRSLSHEAVLSWLGSAEGIVATPHSQRSVAKLQVRLRQGINELPLEALINQAENALGTAVQTAVKRADEQAFALANGQNLMFCEDAARRLHVALKTLPWLGGFNLRVEHAESLHAHDAVAHSQWRW

SEQ ID NO: 13559 - protein, 186 aa, Pseudomonas wadenswilerensis
  misc_feature (1)..(186): tr|A0A380SX47|A0A380SX47_9PSED GTP cyclohydrolase 1 OS= Pseudomonas wadenswilerensis OX=1785161 GN=folE2 PE=3 S V=1
MESAPVTLEQNYTAILGQLGEDVSREGLLDTPKRAAKAMQYLCRGYEQTLEEVTNGALFSSDNSEMVLVKDIELYSLCEHHMLPFIGKAHVAYIPDGKVLGLSKVARIVDMYARRLQIQENLSRQIAEAIQQVTGALGVAVVIEAKHMCMMMRGVEKQNSTMITSVMLGEFRENAATRSEFLSLIK

SEQ ID NO: 13560 - protein, 298 aa, Pseudomonas weihenstephanensis
  misc_feature (1)..(298): tr|A0A0J6LHS6|A0A0J6LHS6_9PSED GTP cyclohydrolase FolE2 OS=Pseudomonas weihenstephanensis OX=1608994 GN=folE2 PE=3 SV=1
MNALTLPDIASQNARQTVPLEWVGMCGIALPVVINGQRLAATADAGVSLDDGEARGIHMSRLYLALEVLDSQALNPLLLKKILQQFLDSHDDLSICAYLKIHTQVLLKRPALVSALSGWKSYPVSIEASLKNGMFHVELKIDVDYSSTCPCSAALARQLIQQQFVDDFANKPLHHAEVLTWLGSTQGIVATPHSQRSTAHLQLHLGRELQNFPINNIIDEAETALGTAVQTAVKRADEQAFALANGQNLMFCEDAARRLNVALKSTAGVKGFSLKVVHAESLHSHDAVAQSRWNWRNA

SEQ ID NO: 13561 - protein, 186 aa, Pseudomonas weihenstephanensis
  misc_feature (1)..(186): tr|A0A0J6IRA5|A0A0J6IRA5_9PSED GTP cyclohydrolase 1 OS= Pseudomonas weihenstephanensis OX=1608994 GN=folE PE=3 SV=1
MSTSLPEHYREILLGLGENPDREGLLDTPKRAAKAMQYLCHGYDQSVDDIVNGALFASDSDEMVIVADIELYSLCEHHLLPFIGKAHVAYIPTGKVLGLSKVARIVDMFARRLQIQENLTREIADAIQNVTQAAGVAVVIEAKHMCMMMRGVEKQNSTMNTSVMLGAFREPSTRMEFLQLIGRSKS

SEQ ID NO: 13562 - protein, 185 aa, Pseudomonas xanthomarina
  misc_feature (1)..(185): tr|A0A3R8VQD2|A0A3R8VQD2_9PSED GTP cyclohydrolase 1 OS= Pseudomonas xanthomarina OX=271420 GN=folE PE=3 SV=1
MSESMPQHYREILLGIGENPAREGLLDTPKRAAKAMQYLCHGYRQTLEEVTNGALFSSDNSEMVLVKNIELYSLCEHHLLPFIGKAHVAYIPNGKVLGLSKVARIVDMFARRLQIQENLSRQIAEAIEQVTGALGVAVVIEAQHMCMMMRGVEKQNSSMVTSVMLGEFRNNPATRSEFLQLIGRK

SEQ ID NO: 13563 - protein, 181 aa, Pseudomonas xanthomarina; identical to SEQ ID NO: 13197
  misc_feature (1)..(181): tr|A0A098FRK6|A0A098FRK6_9PSED GTP cyclohydrolase 1 OS= Pseudomonas xanthomarina OX=271420 GN=folE PE=3 SV=1

SEQ ID NO: 13564 - protein, 185 aa, Pseudomonas xinjiangensis
  misc_feature (1)..(185): tr|A0A1H1VU65|A0A1H1VU65_9PSED GTP cyclohydrolase 1 OS= Pseudomonas xinjiangensis OX=487184 GN=folE PE=3 SV=1
MSLENLTRHYHEILSDLGENPEREGLQGTPLRAAKAMQFLCRGYNESLEDIVNGALFESENDEMVIVKDIELYSMCEHHMLPFIGKAHVAYIPTGRVIGLSKVARIVDMYARRLQIQENLTRQIAEALQSVTHAKGVAVVIEAKHMCMMMRGVEKQNSSMHTSVMLGAFRNSGTTRQEFLQLITR

SEQ ID NO: 13565 - protein, 298 aa, Pseudomonas yamanorum
  misc_feature (1)..(298): tr|A0A145XN33|A0A145XN33_9PSED GTP cyclohydrolase FolE2 OS=Pseudomonas yamanorum OX=515393 GN=folE2 PE=3 SV=1
MNALTLPDIAAQASRQALPLDWVGMCGIALPIQIDGQRLSAKADAGVSLDDGEARGIHMSRLYLALEMLEQQPLTPALLRSVLQRFLDSHEGLSTNAYLRIHTDLLLKRPALVSPLAGWKSYPVSIEARLENQMFHVELKIDVTYSSTCPCSAALARQLIQQQFIEDFAGTPLQHEDVLTWLGSANGIVATPHSQRSSALLQVRLQGDQPTLPLTQLIDETEAALGTAVQTAVKRADEQAFALANGQNLMFCEDAARRLNLALKRSDAVIAFHLKVIHAESLHAHDAVAESRWTRPSE

SEQ ID NO: 13566 - protein, 181 aa, Pseudomonas yamanorum; identical to SEQ ID NO: 13225
  misc_feature (1)..(181): tr|A0A1H2F0F1|A0A1H2F0F1_9PSED GTP cyclohydrolase 1 OS= Pseudomonas yamanorum OX=515393 GN=folE PE=3 SV=1

SEQ ID NO: 13567 - protein, 185 aa, Pseudomonas yangmingensis
  misc_feature (1)..(185): tr|A0A1I4NAA1|A0A1I4NAA1_9PSED GTP cyclohydrolase 1 OS= Pseudomonas yangmingensis OX=1720063 GN=folE PE=3 SV=1
MSLENLTRNYHEILENLGENPQREGLTGTPLRAAKAMQFLCHGYQQSLEEIVNGALFESDNDEMVIVKDIELYSLCEHHLLPFIGKAHVAYIPTGKVIGLSKVARIVDMFARRLQIQENLTRQIAEALQSVTNAKGVAVVIEAKHMCMMMRGVEKQNSSMHSSVMLGAFRDSVNTRQEFLQLIRN

SEQ ID NO: 13568 - protein, 182 aa, Pseudomonas zeshuii; identical to SEQ ID NO: 13403
  misc_feature (1)..(182): tr|A0A1M6L690|A0A1M6L690_9PSED GTP cyclohydrolase 1 OS= Pseudomonas zeshuii OX=1076620 GN=folE PE=3 SV=1

SEQ ID NO: 13569 - protein, 185 aa, Pseudomonas zhaodongensis; identical to SEQ ID NO: 13195
  misc_feature (1)..(185): tr|A0A365PQW9|A0A365PQW9_9PSED GTP cyclohydrolase 1 OS= Pseudomonas zhaodongensis OX=1176257 GN=folE PE=3 SV=1

SEQ ID NO: 13570 - protein, 185 aa, Pseudomonas zhaodongensis
  misc_feature (1)..(185): tr|A0A3M2HTY4|A0A3M2HTY4_9PSED GTP cyclohydrolase 1 OS= Pseudomonas zhaodongensis OX=1176257 GN=folE PE=3 SV=1
MNDLPNHFREILLGVGEDPQREGLLDTPKRAAKAMQYLCNGYDKSIEEVVNGALFASDNDEMVIVRDIELYSLCEHHMLPFIGKAHVAYIPTGKVLGLSKVARIVDMYARRLQIQENLTRQIAEAIQEVTQAAGVAVVIEAKHMCMMMRGVEKQNSLMNTSVMLGAFRESCTTRMEFLQLIGGNR

SEQ ID NO: 13571 - protein, 199 aa, Pseudonocardia alni
  misc_feature (1)..(199): tr|A0A2N0IDA7|A0A2N0IDA7_9PSEU GTP cyclohydrolase 1 OS= Pseudonocardia alni OX=33907 GN=folE PE=3 SV=1
MAAGVTRAVPGGIDLDRAERAVRELLIAVGEDPDREGLKETPARVARAYGEIFAGLFVDPDTVLEKTFDEGHGELVLVKDIPMFSTCEHHLVPFHGVAHVGYIPAVDGQVTGLSKLARVVDLYAKRPQVQERLTAQIADALVRKLNPRAVIVVLEAEHLCMAMRGIRKPGSRTTTSAVRGLFKSSATSRAEALSLIRGR

SEQ ID NO: 13572 - protein, 199 aa, Pseudonocardia ammonioxydans
  misc_feature (1)..(199): tr|A0A1I4SKP9|A0A1I4SKP9_9PSEU GTP cyclohydrolase 1 OS= Pseudonocardia ammonioxydans OX=260086 GN=folE PE=3 SV= 1
MSAGVTQAVPEGVDLERAERAVRELLIAVGENPDREGLKETPARVARAYGEIFSGLFVDPDQVLEKTFDEGHGELVLVKDIPMFSTCEHHLVPFHGVAHVGYIPAVDGQVTGLSKIARVVDLYAKRPQVQERLTAQVADALVRKLDPRAVIVVMEAEHLCMAMRGIRKPGSRTTTSAVRGLFKSSASSRAEALSLIRGA

SEQ ID NO: 13573 - protein, 220 aa, Pseudonocardia asaccharolytica
  misc_feature (1)..(220): tr|A0A511CZ40|A0A511CZ40_9PSEU GTP cyclohydrolase 1 OS= Pseudonocardia asaccharolytica DSM 44247 = NBRC 16224 O X=1123024 GN=folE PE=3 SV=1
MVADVTASPRQPPSSPAPPAAPRLRVVSDRTAVDVAAAERAVADLLRALGKDPDSVHLADTPRRVAGSFVELLTPRQFDLTTFPNDEGYDELVVATHLPVQSLCEHHLLPFHGVAHVGYLPGQRILGLSKLARVVELFGHDLQVQERLTKQVADWLQEHLAPRGVGVVIEAEHMCMSLRGVRAAGSRTITSALHGVLREDARSRNEFFALTGTSSRPVSA

SEQ ID NO: 13574 - protein, 193 aa, Pseudonocardia asaccharolytica
  misc_feature (1)..(193): tr|A0A511CY27|A0A511CY27_9PSEU GTP cyclohydrolase 1 OS= Pseudonocardia asaccharolytica DSM 44247 = NBRC 16224 O X=1123024 GN=folE PE=3 SV=1
MNGRRRVDRPRAEAAVRELLVALGEDPDREGLRETPARVARAYEEIFAGLYVDADSVLDKTFDEDHQELILVREIPLFSTCEHHLVPFHGFAHVGYIPNKSGRVTGLSKIARVVENYARRPQVQERLTGQIADAIVRKLEPRGVIVVIDAEHLCMAIRGINKPGARTTTSAVRGLFQTSPSSRAEALALIRGG

SEQ ID NO: 13575 - protein, 204 aa, Pseudonocardia autotrophica
  misc_feature (1)..(204): tr|A0A1Y2MXV5|A0A1Y2MXV5_PSEAH GTP cyclohydrolase 1 OS= Pseudonocardia autotrophica OX=2074 GN=folE PE=3 SV=1
MRSAAVAAGIADAAPEGMDLERAARAVRELLIAIGEDPDREGLRETPARVARAYGEIFAGMFVDPDTVLEKTFDEGHGELVLVKDIPMFSTCEHHLVPFHGVAHVGYIPAIDGQVTGLSKIARVVDLYAKRPQVQERLTAQVADALVRKLNPRAVIVVMEAEHLCMAMRGIRKPGSRTTTSAVRGLFKSSASSRAEALSLIRGS

SEQ ID NO: 13576 - protein, 215 aa, Pseudonocardia cypriaca
  misc_feature (1)..(215): tr|A0A543GC81|A0A543GC81_9PSEU GTP cyclohydrolase 1 OS= Pseudonocardia cypriaca OX=882449 GN=folE PE=3 SV=1
MTSPARAFPPTTPLRVVPPADGVDLPGAERAAAAFLAALGVQTDTAAGGAAAGTPRRMARAYAEMLSPRSFDLTTFANDEHYDELVLARGIPVHSVCEHHMLPFLGTAHVGYLPGQRILGLSKLARVVELFARRPQVQERLTKQVADWLQTHLEPRGVGVVIEAEHMCMTLRGVRAGGANTITSTLLGTLREDPRSRAEFLALTTSTPTTARGRN

SEQ ID NO: 13577 - protein, 205 aa, Pseudonocardia dioxanivorans
  misc_feature (1)..(205): tr|F4CLU6|F4CLU6_PSEUX GTP cyclohydrolase 1 OS=Pseudono cardia dioxanivorans (strain ATCC 55486 / DSM 44775 / J CM 13855 / CB1190) OX=675635 GN=folE PE=3 SV=1
MSSASAAAPTSSVNGHRGVDRARAEAAVRELLIAIGEDPDREGLRDTPARVARAYEEIFAGLYTDADAVLDRTFDEQHQELILVKDIPMFSTCEHHLVPFHGVAHVGYIPNVTGRVTGLSKIARVVENYARRPQVQERLTGQVADALVRKLEPRGVIVVIDAEHLCMAMRGVRKPGSRTTTSAVRGLFSTSSTSRAEAMSLIRSG

SEQ ID NO: 13578 - protein, 211 aa, Pseudonocardia dioxanivorans
  misc_feature (1)..(211): tr|F4D0V4|F4D0V4_PSEUX GTP cyclohydrolase 1 OS=Pseudono cardia dioxanivorans (strain ATCC 55486 / DSM 44775 / J CM 13855 / CB1190) OX=675635 GN=folE PE=3 SV=1
MNGDSALAEAVVRPLRVVPPDSGIDLGRAERAARDFLVALGVPVDGDATAGTPGRMARAYAEMLAPRSFDLTTFANDEGYDELVLARSIPVQSVCEHHMLPFVGVAHVGYLPGERILGLSKLARVVELFARRPQVQERLTKQVADWLDSQLAPRGVGVVVEAEHMCMSLRGVRADGTSTITSTLLGTLREDPRSRAEFLALTMPRPGGGHV

SEQ ID NO: 13579 - protein, 191 aa, Pseudonocardia endophytica
  misc_feature (1)..(191): tr|A0A4R1HI27|A0A4R1HI27_9PSEU GTP cyclohydrolase 1 OS= Pseudonocardia endophytica OX=401976 GN=folE PE=3 SV=1
MPEGVDIDRAEAAVRELLLACGEDPDREGLKETPARVARAYGEIFAGLFVDPASVLEKTFDEGHGELVLVRDIPMFSTCEHHLVPFHGVAHVGYIPAVDGQVTGLSKIARVVDLYAKRPQVQERLTGQIADALVRKLDPRAVIVVIDAEHLCMAMRGIRKPGSRTTTSAVRGLFKNSASSRAEALSLIRQG

SEQ ID NO: 13580 - protein, 178 aa, Pseudonocardia hierapolitana
  misc_feature (1)..(178): tr|A0A561SSL1|A0A561SSL1_9PSEU GTP cyclohydrolase 1 OS= Pseudonocardia hierapolitana OX=1128676 GN=folE PE=3 SV =1
MRELLLAIGEDPDREGLRDTPARVARSYAEIFQGLYSDPDEVLDRTFDEHHQELILVKDIPMFSMCEHHLVPFHGVAHVGYIPNPDGRVTGLSKIARLVDLYARRPQVQERLTAQVADALVRKLEPKGVIVVIEAEHLCMGMRGIRKPGSRTTTSAVRGMLRSSPTSRAEVLALIRNG

SEQ ID NO: 13581 - protein, 214 aa, Pseudonocardia hierapolitana
  misc_feature (1)..(214): tr|A0A561T041|A0A561T041_9PSEU GTP cyclohydrolase 1 OS= Pseudonocardia hierapolitana OX=1128676 GN=folE PE=3 SV =1
MTSPARAFPPPTPLRVVPPVEGVDLVGAERAAAAFLTALGVATDGGATADTPRRMAHAYAEMLSPRSFDLTTFANDEDYDELVLARGIPVHSVCEHHMLPFLGTAHVGYLPGQRILGLSKLARVVELFARRPQVQERLTKQVADWLQTHLKPRGVGVVIEAEHMCMTLRGVRAGGTSTVTSSLLGGLRDDPRSRAEFLALTTGAGSAATGSRRG

SEQ ID NO: 13582 - protein, 155 aa, Pseudonocardia hydrocarbonoxydans
  misc_feature (1)..(155): tr|A0A4Y3WU07|A0A4Y3WU07_9PSEU GTP cyclohydrolase 1 OS= Pseudonocardia hydrocarbonoxydans OX=76726 GN=folE PE=3 SV=1
MARAYEEIFAGLYTDPDTVLEKTFDESHRELILVRDIPMFSTCEHHLVPFHGMAHVGYIPGVSGRVTGLSKIARVVDLYARRPQVQERLTAQVADALVRKLAPTGVIVVMEAEHLCMGMRGIRKPGSRTMTSAVRGQFQTSPSSRAEAYSLIRGT

SEQ ID NO: 13583 - protein, 178 aa, Pseudonocardia kunmingensis
  misc_feature (1)..(178): tr|A0A543E2L4|A0A543E2L4_9PSEU GTP cyclohydrolase 1 OS= Pseudonocardia kunmingensis OX=630975 GN=folE PE=3 SV=1
MRELLIAVGEDPDREGLRETPARVARAYEEIFQGLYSDPDEVLDRTFDEHHQELILVKDIPMFSMCEHHLVPFHGVAHVGYIPNIDGRVTGLSKLARLVDLYARRPQVQERLTAQVADALRRKLEPQGVIVVIEAEHLCMGMRGIRKPGSRTITSAVRGMLQSSPTSRAEALSLIRSG

SEQ ID NO: 13584 - protein, 196 aa, Pseudonocardia oroxyli
  misc_feature (1)..(196): tr|A0A1G7PG39|A0A1G7PG39_9PSEU GTP cyclohydrolase 1 OS= Pseudonocardia oroxyli OX=366584 GN=folE PE=3 SV=1
MNGRVTATGVDHARAEAAVRELLLAIGEDPDREGLRDTPGRVARAYEELFAGLYTDPAAVLEKTFDEGHGELVMVKDIPIYSTCEHHLVPFHGVAHIGYIPSLDGKVTGLSKLARVVDLYAKRPQVQERLTGQVADALVAKLNPRGVIVVIDAEHLCMAMRGIRKPGSRTTTSAVRGMFETSPSSRAEALALIRGS

SEQ ID NO: 13585 - protein, 204 aa, Pseudonocardia sp.
  misc_feature (1)..(204): tr|A0A1Q8LAB7|A0A1Q8LAB7_9PSEU GTP cyclohydrolase 1 OS= Pseudonocardia sp. Ae706_Ps2 OX=1885035 GN=folE PE=3 SV =1
MESAAVAAGVTQAVPGGIDLDRAERAVRELLIAVGEDPDREGLKETPARVARAYGEIFAGLFVDPDSVLEKTFDEGHGELVLVKDIPMFSTCEHHLVPFHGVAHVGYIPAVDGQVTGLSKLARVVDLYAKRPQVQERLTAQIADALVRKLNPRAVIVVLEAEHLCMAMRGIRKPGSRTTTSAVRGLFKSSASSRAEALSLIRGR

SEQ ID NO: 13586 - protein, 208 aa, Pseudonocardia sp.
  misc_feature (1)..(208): tr|A0A1Q4DTQ4|A0A1Q4DTQ4_9PSEU GTP cyclohydrolase 1 OS= Pseudonocardia sp. 73-21 OX=1895809 GN=folE PE=3 SV=1
MSATAPGDQVVPTVAGNGHRGVDHARAQAAVRELLIAVGEDPDREGLRDTPARVARAYEEIFAGLYTEPDSVLEKTFNEHHNELVLVKDIPIFSTCEHHLVPFHGMAHVGYIPGTSGRVTGLSKIARVVDLYARRPQVQERLTAQVADAIVRKLEPRGVIVVIEAEHLCMGMRGVRKPGSRTFTSAVRGLFQSSPSSRAEALSLIRGS

SEQ ID NO: 13587 - protein, 216 aa, Pseudonocardia sulfidoxydans
  misc_feature (1)..(216): tr|A0A511DAR9|A0A511DAR9_9PSEU GTP cyclohydrolase 1 OS= Pseudonocardia sulfidoxydans NBRC 16205 OX=1223511 GN=f olE PE=3 SV=1
MTTPDISLVPAGADAVVRPLRVTAPEAGVDLAGAERAARDFLTALGVPTDGEATAGTPGRMARAYAEMLAPRSFDLTTFDNDEGYDELVLARRIPVASVCEHHMLPFVGVAHVGYLPGKRILGLSKLARVVELFARRPQVQERLTKQVADWLDEHLAPRGVGVVVEAEHMCMSLRGVRSEGTSTITSTLLGTLREDPRSRSEFLALTMPRPGGVHG

SEQ ID NO: 13588 - protein, 204 aa, Pseudonocardia sulfidoxydans
  misc_feature (1)..(204): tr|A0A511DQ84|A0A511DQ84_9PSEU GTP cyclohydrolase 1 OS= Pseudonocardia sulfidoxydans NBRC 16205 OX=1223511 GN=f olE PE=3 SV=1
MASTPASARTTTNGHRGIDHARAEAAVRELLIAVGEDPDREGLRETPARVARAYAELFAGLYTDADAVLDKTFDEDHQELILVKDIPLFSTCEHHLVPFHGIAHVGYIPNVTGRVTGLSKIARVVENYARRPQVQERLTGQVADALVRKLEPRGVIVVMDAEHLCMAMRGVRKPGARTTTSAVRGLFATSSTSRAEALSLIRGG

SEQ ID NO: 13589 - protein, 205 aa, Pseudonocardia thermophila
  misc_feature (1)..(205): tr|A0A1M6UL57|A0A1M6UL57_PSETH GTP cyclohydrolase 1 OS= Pseudonocardia thermophila OX=1848 GN=folE PE=3 SV=1
MDGELNGDVPGLRPGARGVDRARAEAAVRELLIAIGEDPDREGLRDTPARVARAYEEIFAGLYVEPDEVLERTFDEHHQELILVRDIPLFSTCEHHLVPFHGFAHVGYIPNAEGKVTGLSKIARVVDLYARRPQVQERLTAQVADALVRKLDPRGVIVVMEAEHLCMGMRGIRKPGSTTTTSAVRGLFQSSPSSRAEALALIRRG

SEQ ID NO: 13590 - protein, 204 aa, Pseudonocardiaceae bacterium
  misc_feature (1)..(204): tr|A0A431NCB9|A0A431NCB9_9PSEU GTP cyclohydrolase 1 OS= Pseudonocardiaceae bacterium OX=1873463 GN=folE PE=3 SV =1
MTSTSANAQASTNGHRGIDHARAEAAVRELLIAVGEDPEREGLRETPARVARAYGELFAGLYTDPDAVLDKTFDEQHQELILVRDIPLFSTCEHHLVPFHGVAHVGYIPNVTGRVTGLSKIARVVDNYARRPQVQERLTGQVADALVRKLEPRGVIVVMDAEHLCMAMRGVRKPGARTTTSAVRGIFATSSTSRAEALSLIREG

SEQ ID NO: 13591 - protein, 199 aa, Pseudonocardiaceae bacterium
  misc_feature (1)..(199): tr|A0A419HQ04|A0A419HQ04_9PSEU GTP cyclohydrolase 1 OS= Pseudonocardiaceae bacterium YIM PH 21723 OX=2340915 GN =folE PE=3 SV=1
MSNTAEGTERPAFDQERAQAAVRELLIACGEDPDREGLLETPARVARAYQELFAGLYTDPSAVLDKTFDESHEELILVTGIPVYSTCEHHLLPFHGEAHVGYIPNKEGRVTGLSKLARLVDLYAKRPQVQERLTSQVADAIEGKLRARGVIVVIEAEHLCMGMRGIRKPGARTTTSAVRGLLRTQASSRAEALSLIKGR

SEQ ID NO: 13592 - protein, 193 aa, Pseudonocardiales bacterium
  misc_feature (1)..(193): tr|A0A2W6C1A2|A0A2W6C1A2_9PSEU GTP cyclohydrolase 1 OS= Pseudonocardiales bacterium OX=2201155 GN=folE PE=3 SV= 1
MAHEAQPARIVDLEAATLAASDFLCALGISIDGESMRETPRRMARAYAEFFSVPSFALTTFPNDENYDELVVARGIPVRSVCEHHLLPFVGVAHVGYLPGGRILGLSKMARVVTHFASRPQVQERLTKQIANWLDEQLAPKGVGVVIDAEHTCMTLRGVRAVGSSTITSALVGVLRDDPRSRQEFLSLTARAG

SEQ ID NO: 13593 - protein, 196 aa, Pseudonocardiales bacterium
  misc_feature (1)..(196): tr|A0A2W6C772|A0A2W6C772_9PSEU GTP cyclohydrolase 1 OS= Pseudonocardiales bacterium OX=2201155 GN=folE PE=3 SV= 1
MNESEPTGRVDLDRAEAAVRELLIAVGENPDREGLKSTPARVARTYAEVFAGLFVDPDDVLQTTFDENHDELVLVKDIALYSTCEHHLVPWHGSAAVGYIPGESGRITGLSKLARVVDLYARRPQVQERLTGQVADAVMRRLEPRGVIVVIQAEHLCMAMRGVRKPGSITMTSAVRGIFKSDQRTRAEALSLILGR

SEQ ID NO: 13594 - protein, 364 aa, Pseudooceanicola antarcticus
  misc_feature (1)..(364): tr|A0A285ITR8|A0A285ITR8_9RHOB GTP cyclohydrolase FolE2 OS=Pseudooceanicola antarcticus OX=1247613 GN=folE2 PE =3 SV=1
MNVHPNELKPKTDEARDALALLRDWAAKASDSEIAALDPAIARLLPGQTDYPQLSDEYPADFKAGSNYRSTMPDLQNGPSSLIRGAHARIQHVGISNFRLPISFHSRDGGDRTLEASVTGTVSLEAEKKGINMSRIMRSFYGHSEKRFSFEAIEAALEDYKSDLGSLDARIMMRFSYPVKRESLRSGLVGYQYYDLALEVVEEGGERKRFIHLDYVYSSTCPCSLELSEHARRERGQLATPHSQRSVARISVQEAPVPGQCLWFEDLIDMARRAVPTETQVMVKREDEQAFAELNAANPIFVEDAARLFCEELENDPRIGDFRVAASHQESLHSHDAVSVLTKGETFASHSLDPRFFTTLHKVG

SEQ ID NO: 13595 - protein, 364 aa, Pseudooceanicola atlanticus
  misc_feature (1)..(364): tr|A0A0A0ECR4|A0A0A0ECR4_9RHOB GTP cyclohydrolase FolE2 OS=Pseudooceanicola atlanticus OX=1461694 GN=folE2 PE= 3 SV=1
MNIHPNDMQPQPDRDEAKAALDKLRKWAAQASDRQINDLDPAIARLLSNSDYPTLARDYPEEFTVDPDYRATLPDLQNGPASLIRGARRAIQHVGISNFRLPIRYETRDGDAIMLESSVTGTVSLEADKKGINMSRIMRSFYAHAEKTFSFAVIEAALDDYKADLESFDARIQMRFSYPMKVPSLRSGLQGYQYYDIALELVESAGQRLRIVHLDYVYSSTCPCSLELSEHARRDRGQLATPHSQRSVARLSVVLDDDDKRLWFEDLIDMARRAVPTETQVMVKREDEQAFAELNAANPIFVEDAARLFAAQLEADERVGDFRIAASHQESLHSHDAVSVLTEGETFASASLDPNFFSTLIHRG

SEQ ID NO: 13596 - protein, 363 aa, Pseudooceanicola batsensis
  misc_feature (1)..(363): tr|A3TTQ1|A3TTQ1_PSEBH GTP cyclohydrolase FolE2 OS=Pseu dooceanicola batsensis (strain ATCC BAA-863 / DSM 15984 / KCTC 12145 / HTCC2597) OX=252305 GN=folE2 PE=3 SV=1
MNIHPNDMQALPDRDEAEAALSRLRQWAAAASDSEINDLDPALARLLSDEGYPLLSRRYPAGFDADEGYRASLPDLQNGPASLIRGSRRTIQHVGISNFRLPIRYRTRAGGEISLESAVTGTVSLEADKKGINMSRIMRSFYAHAEKTFSFEVIEAALDDYKADLGTLDARIQMRFSYPLRVDSLRSGLSGYQYYDIALELVERGGERLRIVHLDYVYSSTCPCSLELSEHARRERRQLATPHSQRSVARISVVLAGTDRLWFEDLIDMARRAVPTETQVMVKREDEQAFAELNAANPIFVEDAARLFSAELEQDERIGDFRIVASHQESLHSHDAVSILTEGPTFEAASLDPGLFGTLHHVR

SEQ ID NO: 13597 - protein, 363 aa, Pseudooceanicola flagellatus
  misc_feature (1)..(363): tr|A0A1W2CUI8|A0A1W2CUI8_9RHOB GTP cyclohydrolase FolE2 OS=Pseudooceanicola flagellatus OX=1387277 GN=folE2 PE =3 SV=1
MNVHLSDVPTDLTREEAQAALAALRLWAANASKEDLSSMDPAVARLIGEADQPQMSNLYPQDFVVDEAYKASLPDLQNGPAALIRGAKRAIQHVGISNFRLPLRYHTRDNGDLTLETSVTGTVSLEADKKGINMSRIMRSFYGHAEKTFSFEVIEAALDDYKTDLESFDARIQMRFSFPVKIESLRSGLSGYQYYDLALELVERDGVRNKIMHLDYLYSSTCPCSLELSEHARRARGQLATPHSQRSVARISVEVRKGDCLWFEDLIDMCRRAVPTETQVMVKREDEQAFAELNAANPIFVEDAARLFAEQLTADARIGDYRVIASHQESLHSHDAVSILTEGETFKADSLDPKLFNTLFHVG

SEQ ID NO: 13598 - protein, 371 aa, Pseudooceanicola lipolyticus
  misc_feature (1)..(371): tr|A0A2M8IYN0|A0A2M8IYN0_9RHOB GTP cyclohydrolase FolE2 OS=Pseudooceanicola lipolyticus OX=2029104 GN=folE2 PE =3 SV=1
MNIQTSRPGTSPDKAPDRDAAAAALDLLRRWARTASEAELNTLDPAIARLLPDRTPSNYPALSRSYPEDFVVDAAYKASLPDLQNGPSSLIRGARQQIQHVGISNFRLPIRFHTRDDGDLTLETSVTGTVSLEADKKGINMSRIMRSFYAHADRTFSFEVIEAALDDYKSDLESFDARIQMRFSFPVRVHSLRSGLSGFQYYDIALELVEIAGVRQKILHLDYVYSSTCPCSLELSEHARQARGQLATPHSQRSVARISVVDAGGAECLWFEDLIDACRRAVPTETQVMVKREDEQAFAELNAANPIFVEDAARLFCAELKADPRIGDFRVIASHQESLHSHDAVSVLYEGATFAATSMDPRLFSTLIHVG

SEQ ID NO: 13599 - protein, 362 aa, Pseudooceanicola marinus
  misc_feature (1)..(362): tr|A0A1X6YZP9|A0A1X6YZP9_9RHOB GTP cyclohydrolase FolE2 OS=Pseudooceanicola marinus OX=396013 GN=folE2 PE=3 SV =1
MNIHPNDLKPETEEAKAALALLRDWVAKASDAEINALDPAVAQLLPGQGGYPVLSRDYPQDFAVDAAYRATLPDLQNGPASLIRGAHAPIQHVGISNFRLPIRFHTRDGGDQTLESSVTGTVSLEADKKGINMSRIMRSFYGHAEKCFSFGVIEAALDDYKSDLDSLDARIMMRFSYPVKRESLRSGLAGYQYYDIALEVVDEGGQRNRYIHLDYVYSSTCPCSLELSEHARRARGQLATPHSQRSVARISVQVLPGDCLWFEDLIDMARVAVPTETQVMVKREDEQAFAELNAANPIFVEDAARLFCEELQGDARIGDFRVAASHQESLHSHDAVSILTEGPTFAASSLDPRFLATLHHAG

SEQ ID NO: 13600 - protein, 363 aa, Pseudooceanicola nitratireducens
  misc_feature (1)..(363): tr|A0A1I1JTR3|A0A1I1JTR3_9RHOB GTP cyclohydrolase FolE2 OS=Pseudooceanicola nitratireducens OX=517719 GN=folE2 PE=3 SV=1
MNIHPSDMQPMPDRDEAKDALARLRQWASAASDAEINALDPAVARLLNDSEYPLLNRVYPADFTSDPAYRATLPDLQNGPSSLIRGAHRTIQHVGISNFRLPIRYKTRDGGEVMLESSVTGTVSLEADKKGINMSRIMRSFYAHAEKTFSFEVIEAALDDYKSDLETLDARIQMRLSYPLRVPSLRSGLSGYQYYDISLELVDTAGSRLRVLHLDYVYSSTCPCSLELSEHAREQRGQLATPHSQRSVARISVVLQGDDPLWFEDLIEIARKAVPTETQVMVKREDEQAFAELNAANPIFVEDAARLFAQGLEADDRIGDFRVVASHQESLHSHDAVSILTDGPTFEAASLDPRLFGTLHHVR

SEQ ID NO: 13601 - protein, 363 aa, Pseudooceanicola sp.
  misc_feature (1)..(363): tr|A0A2E3H079|A0A2E3H079_9RHOB GTP cyclohydrolase FolE2 OS=Pseudooceanicola sp. OX=1914328 GN=folE2 PE=3 SV=1
MNIHPNDMLTQPNRDDAAEALRKLREWAGTATDSEINELDPAIARLLQPTGYPLLSDAYPEDLKTDADYRATLPDLQNGPASLIRGSRRAIQHVGISNFRLPIRYLTRAGGDIMLESAVTGTVSLEADKKGINMSRIMRSFYAHADKTFSFSVIEAALDDYITDLDSLDARIQMRLSYPLKVESLRSGLAGYQYYDIALELIESAGERLRVLHLDYVYSSTCPCSLELAEHARRERGQLATPHSQRSVARMSVVLTGEGRLWFEDLIDMARRAVPTETQVMVKREDEQAFAELNAANPIFVEDAARLFSRELESDARVGDFRVVASHQESLHSHDAVSILTEGPTFAAASLDPRLFGTLHHVR

SEQ ID NO: 13602 - protein, 369 aa, Pseudooceanicola sp.
  misc_feature (1)..(369): tr|A0A2E2PBH6|A0A2E2PBH6_9RHOB GTP cyclohydrolase FolE2 OS=Pseudooceanicola sp. OX=1914328 GN=folE2 PE=3 SV=1
MNVHLPPSALPEPDMDDAADALALLRRWAQKSTDEELSALDPALARLLPGRDLGNYPPLSRDYPEGFHADSAYRATLPDLQNGPASLIRGARKPIQHVGISNFRLPIRFHTRDGGDLTLETSVTGTVGLDADKKGINMSRIMRSFYAHADKTFSFEVIEAALDDYKSDLESLDARIQMRFSFPVRLGSLRSGLSGYQYYDIALELVESDGQRRKFMHLDYVYSSTCPCSLELSEHARATRGQLATPHSQRSVARISVALDRVEGDCLWFEDLIGHCRRAVPTETQVMVKREDEQAFAELNAANPMFVEDAARLFSGVLLEDPRIGDFRVVASHQESLHSHDAVSVLTEGETFAAQSLDPRLFASLFHVG

SEQ ID NO: 13603 - protein, 391 aa, Pseudooctadecabacter jejudonensis
  misc_feature (1)..(391): tr|A0A1Y5RNY1|A0A1Y5RNY1_9RHOB GTP cyclohydrolase FolE2 OS=Pseudooctadecabacter jejudonensis OX=1391910 GN=fol E2 PE=3 SV=1
MCKRETDNETAVVAVSRGATEGAGMNIHSKDLDRDLSREEAEAALALLRQWAADKTDEEVASLDPLVSRLVPGKEVSNYPALARAYPEDFAVDEDYKASMPDLQNGPSSLIRGAKRAIQHVGISNFRLPIGFHTRDNGDLTLETSVTGTVSLEAEKKGINMSRIMRTFYKHAEEVFSFEVIARALDAYKSDLESFDARIMMRMSFPMKVDSLRSGLAGYQYYDIALELIEADGVRKKIVHLDYVYSSTCPCSLELSEHARQYRGQLATPHSQRSVARVSVELDPTADVLWFEDLIDMCRAAVPTETQVMVKREDEQAFAELNAANPIFVEDAARLFAEQLQADARVADYRVIASHQESLHSHDAVSVLTEGATFDAESLDPRLFQSLFHVG

SEQ ID NO: 13604 - protein, 196 aa, Pseudopedobacter saltans
  misc_feature (1)..(196): tr|A0A2W5FFR5|A0A2W5FFR5_9SPHI GTP cyclohydrolase 1 OS= Pseudopedobacter saltans OX=151895 GN=folE PE=3 SV=1
MAYRKIEEYDEETTQKLQEQYKTVLETLGEDPTREGLVKTPYRVAKAMQFLTQGYDQDAVAILNSAKFTAPKSEIVIVKDIELYSLCEHHMLPFVGKAHVAYIPNGYITGLSKIARVVDVFARRLQVQERLTMQIMNAIDEALKPLGVAVVVEANHMCMMMRGVQKQNSLTTTSTFSGEFENDVTRSEFLRLIQMK

SEQ ID NO: 13605 - protein, 211 aa, Pseudopedobacter saltans
  misc_feature (1)..(211): tr|F0S8F9|F0S8F9_PSESL GTP cyclohydrolase 1 OS=Pseudope dobacter saltans (strain ATCC 51119 / DSM 12145 / JCM 2 1818 / LMG 10337 / NBRC 100064 / NCIMB 13643) OX=762903 GN=folE PE=3 SV=1
MIHSDNDDFFEDSGYIKIDRYNQERTTKIASHYKEILNEIGEDTSRDGLLKTPERYAKALQFLTHGYDLNAEEILRSAMFEEEYSQMVIVKDIEVYSLCEHHIIPFFGKAHIAYIPNGHIVGLSKIPRIVDVFARRLQVQERLTNEIRDCIQNTLNPAGVAVVLECKHMCMSMRGIQKQNSVTTTSAFTGEFANDRTRSEFLRLIAADLYK

SEQ ID NO: 13606 - protein, 366 aa, Pseudopelagicola gijangensis
  misc_feature (1)..(366): tr|A0A1M6D3U3|A0A1M6D3U3_9RHOB GTP cyclohydrolase FolE2 OS=Pseudopelagicola gijangensis OX=1470563 GN=folE2 PE =3 SV=1
MNIYSADSKDDQARREAVEALRRLRAWAASATPTEIAELDSAIARLLPDQPLANYPDLNRDYPEDFTVTEVYRDSLPDLQNGPASLIKGEKQQIQHVGISNFRLPIRFHSRDNSDVTLETSVTGTVSLDAEKKGINMSRIMRSFYKHAEKTFSFDVMEQALADYVSDLESVDARIQMRFSYPMQIQSLRSGLSGYQYYDIAMEKVQVSGELHKVMHLDYVYSSTCPCSLELSEHARQSRGQLATPHSQRSVARISVQVLPGGKLWFEDLIDMCRLAVPTETQIMVKREDEQAFAELNAANPIFVEDAARLFCEQLKADPRIGDFQVVASHQESLHSHDAVSVLTDGPFFASASLDPKLFNTLFHVG

SEQ ID NO: 13607 - protein, 188 aa, Pseudopropionibacterium propionicum
  misc_feature (1)..(188): tr|A0A3S4UT29|A0A3S4UT29_9ACTN GTP cyclohydrolase 1 OS= Pseudopropionibacterium propionicum OX=1750 GN=folE PE= 3 SV=1
MSHVDQPRIEEAVREILLAVGEDPDRDGLSETPGRVARAYRELFSGLAQDPAELLSTTFDIDHEELVLVRDIELTSCCEHHLLPFFGVAHVGYIPGGGRVTGLSKLARLVDIYARRPQVQERLTTQVADALVTHLGAQGVIVVIEAEHTCMTMRGVRKPGSRTITSAVRGQLRNAATRAEAMSLIMAR

SEQ ID NO: 13608 - protein, 190 aa, Pseudopropionibacterium propionicum
  misc_feature (1)..(190): tr|A0A3P1WQS8|A0A3P1WQS8_9ACTN GTP cyclohydrolase 1 OS= Pseudopropionibacterium propionicum OX=1750 GN=folE PE= 3 SV=1
MSVDRGRIESAVREILLAVGEDPDRDGLRDTPARVARAYEELFVGLRQDPAEILATTFDIDHEELVLVRDIELTSCCEHHLLPFVGVAHVGYIPGGGQVTGLSKLARLVDAYARRPQVQERLTSQVADALVEHLGARGVIVVIEAEHMCMTMRGVRKRGSRTITSAVRGQLRDPATRAEAMSLIHGGGTS

SEQ ID NO: 13609 - protein, 363 aa, Pseudopuniceibacterium sediminis
  misc_feature (1)..(363): tr|A0A399IXI9|A0A399IXI9_9RHOB GTP cyclohydrolase FolE2 OS=Pseudopuniceibacterium sediminis OX=2211117 GN=folE 2 PE=3 SV=1
MNIHPSDLKPETQEARDALDTLRDWAAKASDEEINALDPAVARLLPGQADYPVMSHVYPTGFVSDEAYRATLPDLQNGPASLIRGARAQIQHVGISNFRLPIRFHTRDGGELTLETSVTGSVSLEADKKGINMSRIMRSFYAHSEKCFSFSVIEAALEDYMSDLESLDARIMMRFSYPVKILSLRSGLQGYQYYDIALELVDEGGVRNRYIHLDYVYSSTCPCSLELSEHARRTRNQLATPHSQRSVARIAVQSVPNEDCLWFEDLIDKARAAVPTETQVMVKREDEQAFAELNAANPIFVEDAARLFCEQLQDDPRIGDFRVAASHQESLHSHDAVSVLTQGDTFRASSLDPHFFATLHHAG

SEQ ID NO: 13610 - protein, 204 aa, Pseudorhizobium pelagicum
  misc_feature (1)..(204): tr|A0A081MPP8|A0A081MPP8_9RHIZ GTP cyclohydrolase 1 OS= Pseudorhizobium pelagicum OX=1509405 GN=folE PE=3 SV=1
MDAIVKNFPTSGHAESRPTREQAEEAVRVLLRWAGEDPQREGLLDTPKRVATAYRELFSGYDLSHEEVLGRTFEEVSGYGDPVLVRDIPFYSHCEHHMLPIIGKAHVAYLPNDRVLGLSKIARVVDIFGRRLQTQENMTAQIAQAIDETLKPRGVAVMIEAEHMCMAMRGVQKQGSTTLTTTFKGEFKSNAAEQARFLTLVRNR

SEQ ID NO: 13611 - protein, 355 aa, Pseudorhodobacter antarcticus
  misc_feature (1)..(355): tr|A0A1H8AXJ3|A0A1H8AXJ3_9RHOB GTP cyclohydrolase FolE2 OS=Pseudorhodobacter antarcticus OX=1077947 GN=folE2 P E=3 SV=1
MKPNAVPTRDEAEAALALLQRWAGDAPAGEVAALGAQAFLAGGYPELSAHYPADFVVDAAYKASLPDLQNGPASLIKGEKTLIQHVGISNFRLPIRYHVRDGADVVLETSVTGSVSLEAEKKGINMSRIMRSFYSHAEQAFSHKVIERALEDYKRDLDSFDARIQMRFSFPVKIESLRSGLAGWQYYDIALELVDQGGVRKTIMHLDYVYSSTCPCSLELSEHARRTRGQLATPHSQRSVARISVELVGDNCLWFEDLINLARAAVPTETQVMVKREDEQAFAELNAANPIFVEDAARSFCAQLQADPRVGDFRIVASHQESLHSHDAVSVLTIGDTFAATSLDPKLFTTLFHIG

SEQ ID NO: 13612 - protein, 349 aa, Pseudorhodobacter antarcticus
  misc_feature (1)..(349): tr|A0A1H8N4S0|A0A1H8N4S0_9RHOB GTP cyclohydrolase FolE2 OS=Pseudorhodobacter antarcticus OX=1077947 GN=folE2 P E=3 SV=1
MTMISGPILTPTTQNSKPIQPVTPDVDAILATQAEAYPVFSTKFPEGFEVDGDYIASLPDLQNESEGLINGAGQRIQHVGISNFRLPVRFQSRDSSKLQLEAAVSGTVSLDASKRGINMSRIMRTFYRHAEREFDFAVIEGVLDEYKSDLESFDARIQMKFSYPREVRSLRSGLYGYQYYEVAFELSEIDGVRQRIIHIDYVYSSTCPCSLELSEHARKNRRQLATPHSQRSVARISVVETPGVDKIWIEDLVDLCLRAVPTETQVMVKREDEQAFAELNAANPIFVEDAARLFCEHLRLDSRIGDFRVIASHQESLHSHDAVSILTEGRTFAQSSLDPNLFKTLFHVG

SEQ ID NO: 13613 - protein, 351 aa, Pseudorhodobacter sp.
  misc_feature (1)..(351): tr|A0A4P8EIU6|A0A4P8EIU6_9RHOB GTP cyclohydrolase FolE2 OS=Pseudorhodobacter sp. S12M18 OX=2500533 GN=folE2 PE =3 SV=1
MNIHSKGTQPDRSDAEAALAVLQSWAAHAPAAEVAALGLYPALSAEYPADFVVDADYKAGLPDLQNGPSSLIKGERTVIQHVGISNFRLPIRYHTRDGADVILETSVTGSVSLEAEKKGINMSRIMRSFYAYAEKSFSYKVIERALEDYKRDLDSFDARIQMRFSFPMKIESLRSGLSGWQYYDIALELVDAGGARKTIMHLDYVYSSTCPCSLELSEHARRSRNQLATPHSQRSVARISVELVGDKCLWFEDLIDLARAAVPTETQVMVKREDEQAFAELNAANPIFVEDAARSFCAQLQADRRVGDFRIIASHQESLHSHDAVSVLTIGDTFAATSLDPKLFTTLFHVG

SEQ ID NO: 13614 - protein, 362 aa, Pseudorhodobacter sp.
  misc_feature (1)..(362): tr|A0A2M8N225|A0A2M8N225_9RHOB GTP cyclohydrolase FolE2 OS=Pseudorhodobacter sp. MZDSW-24AT OX=2052957 GN=folE 2 PE=3 SV=1
MNIHTPEIDRKPSRDEAEAALALLQKWARHSSDDEIATLEPGVGYLLPGQFAPALSRAYPQNFAVTPAYKDSLPDLQNGPSSLIRGERQRIQHVGISNFRLPIRYQTRDAAPVMLETSVTGTVSLEAEKKGINMSRIMRSFYAHAERTFGFSVIEAALDDYKADLGSFDARIQMRFSYPMQVPSLRSGLAGWQYYEVAFELVETAGLRKKIVHLDYVYSSTCPCSLELSEHARNTRGQLATPHSQRSVARLSVEVLDAALTVEDLVEIARAGVVTETQVMVKREDEQAFAELNAANPIFVEDAARLFCAVLKRDPRIGDFRVLASHQESLHSHDAVSLLTEGPTFAQDSLDPRLFQSLFHIG

SEQ ID NO: 13615 - protein, 212 aa, Pseudorhodoplanes sinuspersici
  misc_feature (1)..(212): tr|A0A1W6ZVU9|A0A1W6ZVU9_9RHIZ GTP cyclohydrolase 1 OS= Pseudorhodoplanes sinuspersici OX=1235591 GN=folE PE=3 SV=1
MDAIIKPWPKTGQQTADTSDIARPTREQAEEAVRTLIAFAGDNPARDGVLDTPGRVVEAYEEMFRGYRENPKEVLDRTFSESEAYDDFVLVRDITFNSHCEHHMMPFYGRAHVAYRPVDRVVGLSKLARLVDIYAHRLQTQEHMTAQIVTAIDEILKPKGVAVMIEAEHMCMSIRGVTKPGALTVTTQFRGTFREDPNEQVRFLTSIRAGQR

SEQ ID NO: 13616 - protein, 363 aa, Pseudoroseicyclus aestuarii
  misc_feature (1)..(363): tr|A0A318SYY6|A0A318SYY6_9RHOB GTP cyclohydrolase FolE2 OS=Pseudoroseicyclus aestuarii OX=1795041 GN=folE2 PE= 3 SV=1
MTDHATALPERAEAEAALATLRHWAAGASPEEVAALDPRIARLLPGAPLANYPALARAYPEDFTADEAYRAALPDLQNGPASLIRGAPRPIQHVGISNFRLPIRFETKGGSDLTLETSVTGTVSLDAGRKGINMSRIMRSFYRHAEESFSFEVIERALAAYQSDLDSFDARIQMRFSFPLRMASLRSGLAGFQYYDLALELVEQGGAAKRIIHLDYVYSSTCPCSLELSEHARQSRGQLATPHSQRSVARLSVVCAPGPRLWFEDLIDLARGAVPTETQVMVKREDEQAFAELNAANPVFVEDAVRLFSERLLADPRIGDFRVLASHQESLHSHDAVSLLTEGPTFHAESLDPRLFAGLRHPG

SEQ ID NO: 13617 - protein, 367 aa, Pseudoruegeria aquimaris
  misc_feature (1)..(367): tr|A0A1Y5SIN8|A0A1Y5SIN8_9RHOB GTP cyclohydrolase FolE2 OS=Pseudoruegeria aquimaris OX=393663 GN=folE2 PE=3 SV =1
MNMQVSRQHETPTREEAEKALATLRDWAAKASYTEVAELDPSVSRLLPSGDRPNYPALARAYPEEFRVDDAYKASLPDLQNGPESLIKGARRAIQHVGISNFRLPIRFHTRDNGDVTLETSVTGTVSLEAEKKGINMSRIMRTFYKHAERTFSFEVIEAALDDYKADLESFDARIQMRFSFPLKVKSLRSGLEGFQYYDIALELVEVDGVRRRMVHLDYVYSSTCPCSLELSEHARQFRGQLATPHSQRSVARISVELAAGQPCLWFEDLVDLCRAAVPTETQVMVKREDEQAFAELNAANPIFVEDAARLFAEQLSADSRIGDFRVIASHQESLHSHDAVSVLTEGRTFASESLDPKLFNTLFHVG

SEQ ID NO: 13618 - protein, 366 aa, Pseudoruegeria sp.
  misc_feature (1)..(366): tr|A0A1X4J222|A0A1X4J222_9RHOB GTP cyclohydrolase FolE2 OS=Pseudoruegeria sp. SK021 OX=1933035 GN=folE2 PE=3 S V=1
MTVHSSKIDRLPTCDEAAQALALLQRWAGAVSAADAAALAPDLARVLAAQTGATYPELTREYPDGFQVSPEYMNSLPDLQNGPSSLIRGAHQPIQHVGISNFRLPVRYRTRGKGDLTLETSVTGTVSLDAEKKGINMSRIMRSFYRHADETFSFDLMRRAIDAYKADLDSFDARIQMRLSFPMRTESLRSGLTGYQYYDLTLELVEQGGVAQQILHLDYVYSSTCPCSLELSEHARRTRGQLATPHSQRSIARISVEILGGACLWFEDVIDMCRAAVPTETQVMVKREDEQAFAELNAANPIFVEDAVRLFCAGLQGDPRIGDFRIVASHQESLHSHDAVSVLAHGPTFASGSLEPRLFSSLYLTG

SEQ ID NO: 13619 - protein, 222 aa, Pseudoscardovia radai
  misc_feature (1)..(222): tr|A0A261EZ17|A0A261EZ17_9BIFI GTP cyclohydrolase 1 OS= Pseudoscardovia radai OX=987066 GN=folE PE=3 SV=1
MVTQNDDVARETAIETATEAASAPETSDLVSADGSRHYDEEGVRRAVYDFLVAIGEDPQREGLLDTPDRIARAGKELFGGLYKSPQEPLSRQFKTDTDEMVLVRDIELYSVCEHHLMPFHGVAHIAYIPSNGMVVGLSKLARLVEVYARRPQVQERLTKQIADALMTELGAKGCLVVIDCEHLCMSMRGVKKSQARTTTSAVRGIMKNAATRAEAMQLICRG

SEQ ID NO: 13620 - protein, 243 aa, Pseudoscardovia suis
  misc_feature (1)..(243): tr|A0A261EWA6|A0A261EWA6_9BIFI GTP cyclohydrolase 1 OS= Pseudoscardovia suis OX=987063 GN=folE PE=3 SV=1
MATMICTVCCMVSVDCSERQCMDRMDIDDNDFPTPTQQTQGARTSVGSELVSPDGRRHYDEEGVRKAVRDFLVAIGEDPNREGLLDTPDRIARAGKELFGGLYQSPKEPLSRRFKTDTDEMVLVRNIELYSVCEHHLMPFLGVAHIAYIPSNGMVVGLSKLARLVEVYARRPQVQERLTKQIADALMEELDARGCLVVIDCEHLCMSMRGIKKSQARTTTSAVRGIMKNAATRAEAMQLICRE

SEQ ID NO: 13621 - protein, 214 aa, Pseudosphingobacterium domesticum
  misc_feature (1)..(214): tr|A0A1H7S443|A0A1H7S443_9SPHI GTP cyclohydrolase 1 OS= Pseudosphingobacterium domesticum OX=407022 GN=folE PE= 3 SV=1
MNVTNNDALYDDDEQLDGYIKIDRYNTDKVESIAHHYHDILDKLGENPNRQGLLKTPERVAKALQYLTHGYDLDPAAILKSAMFEEDYSQMVVVKDIEVYSMCEHHMLPFFGKAHIAYIPNGHIVGLSKIPRVVDAFARRLQVQERLTNEIRDCIQETLNPAGVAVVMECKHLCMAMRGIQKQNSVTTTSAFTGEFAHERTRAEFLRLITASLD

SEQ ID NO: 13622 - protein, 184 aa, Pseudospirillum japonicum
  misc_feature (1)..(184): tr|A0A1H6QQ41|A0A1H6QQ41_9GAMM GTP cyclohydrolase 1 OS= Pseudospirillum japonicum OX=64971 GN=folE PE=3 SV=1
MTEELTQLYSQVISLLGEDVEREGLKDTPKRTAKAMQFLTQGYQQSLEAVVNGAVFSSENDEMVIVKDIELYSLCEHHILPFIGKCHIGYLPNGQVLGLSKFARIVDMYARRLQIQENLTREIAQAVQEVTGAKGVAVIIEAQHMCMMMRGVEKQNSWMQSSVMLGAFRNSQNTRQEFLQLLQR

SEQ ID NO: 13623 - protein, 137 aa, Pseudosporangium ferrugineum
  misc_feature (1)..(137): tr|A0A2T0S6K0|A0A2T0S6K0_9ACTN GTP cyclohydrolase 1 OS= Pseudosporangium ferrugineum OX=439699 GN=CLV70_107218 PE=3 SV=1
MLTTTFEANHEELVLVRDIELMSLCEHHLLPFKGVAHIGYIPGVDGRITGLSKLARLVEVYARRPQVQERLTSQIADLLMEKLDPRGVIVVLECEHLCMEMRGIRKVGARTVTSAVRGAFQRDGKVRAEAMALINAR

SEQ ID NO: 13624 - protein, 258 aa, Pseudothermotoga hypogea
  misc_feature (1)..(258): tr|A0A0X1KP60|A0A0X1KP60_9THEM GTP cyclohydrolase FolE2 OS=Pseudothermotoga hypogea DSM 11164 = NBRC 106472 OX =1123384 GN=folE2 PE=3 SV=1
MKDVQNQKDDRNVYLQRVGIRNLSYPITVMDKTNGYQDTVAKINMYVDLPEHFRGTHMSRFVEVLNKYRLGIDPKLIRQMLEELRTKLKASTARVEIEFPYFLVKEAPVSGQKSFLSYTCRIEGQKTFEKYDFLVGVGVPILTLCPCSKEISEYGAHNQRAVAWINIRSRKLVWFEELIEYAEQAASAPVYTILKRSDEKYITERAYENPRFVEDVAREIALKLNADERIFWYRVEVESFESIHAHNAYACVTKYKEE

SEQ ID NO: 13625 - protein, 258 aa, Pseudothermotoga lettingae
  misc_feature (1)..(258): sp|A8F7Q8|GCH4_PSELT GTP cyclohydrolase FolE2 OS=Pseudo thermotoga lettingae (strain ATCC BAA-301 / DSM 14385 / NBRC 107922 / TMO) OX=416591 GN=folE2 PE=3 SV=1
MKDVQNQPDNRNIYLQRVGIRNLQYPVTVMDRNNGYQDTVATINMYVDLPVNFRGTHMSRFVEVLNRYRLGIDPKIIKNMLEELRNNLNASVARVEIEFPYFILKKAPVSSIESFLKYTCRIEGQKTEKLYEFTMSVGVPIMTLCPCSKEISERGAHNQRAMAWIHIKSKKMIWFEELIDAAEQAASSPVFTILKRVDEKFVTEHAYDNPRFVEDVAREIAVRLNRDERISWYRVEVESFESIHDHSAYACVMKDKED

SEQ ID NO: 13626 - protein, 258 aa, Pseudothermotoga sp.
  misc_feature (1)..(258): tr|A0A3D3V303|A0A3D3V303_9THEM GTP cyclohydrolase FolE2 OS=Pseudothermotoga sp. OX=2033661 GN=folE2 PE=3 SV=1
MKDVQSQKDDRNIYLQRVGIRNLYYPITVMDRTNGYQDTVAKINMYVDLPEHFRGTHMSRFVEVLNKYRLGIDPKLIRQMLEELRTKLKASTARVEIEFPYFLAKKAPVSGQKSFLSYTCRIEGQKTFEKYDFLVGVGVPILTLCPCSKEISERGAHNQRAVAWVHIRSRKLVWFEELIEYAEQAASAPVYTILKRPDEKYITERAYDNPRFVEDVAREIALKLNADKRIFWYRVEVESFESIHAHNAYACVTKYKEE

SEQ ID NO: 13627 - protein, 267 aa, Pseudothermotoga thermarum
  misc_feature (1)..(267): tr|F7YU57|F7YU57_9THEM GTP cyclohydrolase FolE2 OS=Pseu dothermotoga thermarum DSM 5069 OX=688269 GN=folE2 PE=3 SV=1
MKDVQSQPDRRNIYLQRVGIKGLLYPITVMDRQKGFQDTVATINMYVDLPVQFRGTHMSRFVEVLNKYHLGIDPRVLGELLEELRKKLKAKTAVVEIEFPYFMTKKAPVTNAEGFVSYTCRIFGQKTEEGCDFTFSVGVPVMTLCPCSKEISDRGAHNQRAVAWVHVKSKRLIWFEELIQIAEESASAPVFTVLKRPDEKFLTEHAYDNPRFVEDLAREIALRLKSDKRIEWYKVEVESFESIHTHNAYACVISEKEDFSNDDTSLG

SEQ ID NO: 13628 - protein, 210 aa, Pseudovibrio axinellae
  misc_feature (1)..(210): tr|A0A161VAY9|A0A161VAY9_9RHOB GTP cyclohydrolase 1 OS= Pseudovibrio axinellae OX=989403 GN=folE PE=3 SV=1
MDAVLRPVTDTDPTATEDNKLPNRPSRAEAEAAARVLLHWIGDDPEREGLLDTPKRVVKAYEDLFSGYKEDPREHMERTFEEVGGYNDIVLLKDISFTSFCEHHVLPFTGKAHIAYYPNHAVVGLSKIARVVDIFARRLQTQEHLTVQISTAIEKYLAPRGVAVMIEAEHQCMSMRGIQKQGVSTLTNRFSGAFENDASEQVRFMTMVRS

SEQ ID NO: 13629 - protein, 207 aa, Pseudovibrio denitrificans
  misc_feature (1)..(207): tr|A0A1I7ANF5|A0A1I7ANF5_9RHOB GTP cyclohydrolase 1 OS= Pseudovibrio denitrificans OX=258256 GN=folE PE=3 SV=1
MLLSETPTKEQARKRPTREDAEAAVRTLIEWSGDDPEREGLLDTPARVARAYEDFFAGYETDPKQLLTQTFEETDGYDDLIVLRNMRLESHCEHHIVPIIGKAHVAYLPAGRVVGISKLARVVEAYSKRLQIQETLTAQIGDAIWEALQPRGVAVIVEAAHMCMTTRGIRKPGVSMVTRYFEGDFKTNTTMRQEFLSLLHAPSGNFG

SEQ ID NO: 13630 - protein, 210 aa, Pseudovibrio denitrificans
  misc_feature (1)..(210): tr|A0A1I6ZT91|A0A1I6ZT91_9RHOB GTP cyclohydrolase 1 OS= Pseudovibrio denitrificans OX=258256 GN=folE PE=3 SV=1
MDAVLRPVTETDPTATEDNKLPNRPSRAEAEAAARVLLQWIGDDPEREGLLDTPKRVVKAYEDLFSGYKEDPREHLERTFEEVGGYNDIVLLKDITFTSFCEHHVLPFTGKAHIAYYPNHAVVGLSKIARVVEIYARRLQTQEHLTVQIATALEEYLAPRGVAVMIEAEHQCMSMRGIQKQGVSTLTNRFSGVFEDNASEQVRFMTMVRS

SEQ ID NO: 13631 - protein, 210 aa, Pseudovibrio sp.
  misc_feature (1)..(210): tr|A0A1H1ILD5|A0A1H1ILD5_9RHOB GTP cyclohydrolase 1 OS= Pseudovibrio sp. Tun.PSC04-5.I4 OX=1798213 GN=folE PE=3 SV=1
MDAVLRPVIETDPTATEDNKLPNRPSRAEAEAAAHVLLQWIGDNPEREGLLDTPKRLVKAYEDLFSGYNDDPREHLERTFEEVGGYNDIVLLKDISFTSFCEHHVLPFTGKAHIAYYPDHAVVGLSKIARVVDIFARRLQTQEHLTVQISNALETYLAPRGVAVMIEAEHQCMSMRGIQKQGVSTLTNRFSGIFKDNAAEQVRFMTMIRS

SEQ ID NO: 13632 - protein, 210 aa, Pseudovibrio sp.
  misc_feature (1)..(210): tr|A0A165T997|A0A165T997_9RHOB GTP cyclohydrolase 1 OS= Pseudovibrio sp. Ad26 OX=989410 GN=folE_2 PE=3 SV=1
MDAVLRPVTETDPTATEDNKLPNRPSRAEAEAAARVLLQWIGDDTEREGLLDTPKRVVKAYEDLFSGYKEDPREHLERTFEEVGGYNDIVLLKDISFTSFCEHHVLPFTGKAHIAYYPDHAVVGLSKIARVVEIYARRLQTQEHLTVQIATALEEYLAPRGVAVMIEAEHQCMSMRGIQKQGVSTLTNRFSGVFEDNASEQVRFMTMVRS

SEQ ID NO: 13633 - protein, 209 aa, Pseudoxanthobacter soli
  misc_feature (1)..(209): tr|A0A1M7ZCT6|A0A1M7ZCT6_9RHIZ GTP cyclohydrolase 1 OS= Pseudoxanthobacter soli DSM 19599 OX=1123029 GN=folE PE =3 SV=1
MDAVVKSLSDRRERDATAPARPSREEAEAAVRTLIQWAGDDPDREGLLDTPRRVTAAYDEFFRGYRDDVAAVLDRTFEEVSGYSDMVLVRDIPFYSHCEHHIVPFIGKAYIAYYPSKGVVGLSKLARLVDVFARRLQTQENLTAQVVQAMEDYLHPRGAAVLFEAEHQCMSLRGVQKAGVSTVTSQFTGVFKDNPAEQVRFMTMIRGTR

SEQ ID NO: 13634 - protein, 200 aa, Pseudoxanthomonas composti
  misc_feature (1)..(200): tr|A0A4Q1JWQ8|A0A4Q1JWQ8_9GAMM GTP cyclohydrolase 1 OS= Pseudoxanthomonas composti OX=2137479 GN=folE PE=3 SV=1
MSDSDNTRGGVSRDQAEEAVRTLLRWAGEDPQREGLLDTPKRVAKAYGDWFSGYQRDPREYLARTFEEVAGYDELIVLRDIEYESHCEHHMAPIIGRVHVGYLPDGKVVGISKLARVVDAYARRFQVQEKMTAQIAQCIQDVLQPRGVGVVVEGAHECMTTRGVHKRGVSMVTSKMLGAFREDARTRAEFLRFIEAGGKR

SEQ ID NO: 13635 - protein, 305 aa, Pseudoxanthomonas dokdonensis
  misc_feature (1)..(305): tr|A0A0R0D0K1|A0A0R0D0K1_9GAMM GTP cyclohydrolase FolE2 OS=Pseudoxanthomonas dokdonensis OX=344882 GN=folE2 PE =3 SV=1
MSTPRPVLADVADQSVPHARALDWVGMEGIALPIRLADVDGQPVMVPASIDLSVNLTNPDARGIHMSRLYLQLQQGLASEVITPAGLRHLLSNSVASQQGLASQARLVIRYEALLQRRALESEFAGWKRYPVEIEATLVDEHLQLALSLAVEYSSTCPASAALSRQANAARFDTDFADATPLSPQVVSDWLASERGMAATPHAQRSRASVRVQLRPQFDELPLVALIDALEAVLATPVQTAVKRVDEQAFARLNAENLMFCEDAARRVASVLSTDPRVEAFDATVAHFESLHPHDAVARVSGRGP

SEQ ID NO: 13636 - protein, 203 aa, Pseudoxanthomonas dokdonensis
  misc_feature (1)..(203): tr|A0A0R0CH83|A0A0R0CH83_9GAMM GTP cyclohydrolase 1 OS= Pseudoxanthomonas dokdonensis OX=344882 GN=folE PE=3 SV =1
MTDSSKSPVDPAVTQQQAEDAVRVLLRWAGEDVAREGLQDTPKRVAKAYRDWFSGYQIDPREYLQRTFEEVAGYDEMIVLRDIEYESHCEHHMAPIIGKVHVGYLPDGKVVGISKLARVVDAYARRFQVQEKMTAQIAQCIQDVLQPRGVAVVVEGAHECMTTRGVHKRGVSMVTSKMLGEFREDARTRTEFLRFIEAGGSRR

SEQ ID NO: 13637 - protein, 310 aa, Pseudoxanthomonas indica
  misc_feature (1)..(310): tr|A0A1T5LVV6|A0A1T5LVV6_9GAMM GTP cyclohydrolase FolE2 OS=Pseudoxanthomonas indica OX=428993 GN=folE2 PE=3 SV =1
MATVPPAAPRADLPDVAHQSVPLARALDWVGMEGIALPIRIADGEGGQLQVPANIDVFVNLTNPDARGIHMSRLYLHLQDGLAREVITPAGLRHLLQEGVASQQGLADQARIVLRYEALLRRKALESDYSGWKRYPVEIEATLVEGHLHLALSVAVEYSSTCPASAALSRQANAERFAGDFAAAHPLSVGVVRDWLASERGLAATPHAQRSRASVRVELRPQFDELPLVALIDGIEAALGTPVQTAVKRVDEQAFARLNAENLMFCEDAARRVAGALSQDPRVARFEATVAHFESLHPHDAVARVSGTNA

SEQ ID NO: 13638 - protein, 199 aa, Pseudoxanthomonas indica
  misc_feature (1)..(199): tr|A0A1T5KPI0|A0A1T5KPI0_9GAMM GTP cyclohydrolase 1 OS= Pseudoxanthomonas indica OX=428993 GN=folE PE=3 SV=1
MSEPNDPSGKISQAQAEDAIRVLLEWAGENPQREGLLDTPKRVAKAYRDWFSGYQMDPREYLARTFEEVAGYDEMIVLRDIEFESHCEHHMAPIIGRAHVGYLPSGKVVGISKLARVVDVYARRFQVQEKLTAQIAQAIQDVLQPRGVGVVIEATHECMTTRGVHKRGVSMVTSKMLGEFREDARTRSEFLRFLESGKR

SEQ ID NO: 13639 - protein, 200 aa, Pseudoxanthomonas sp.
  misc_feature (1)..(200): tr|A0A4Q8LBQ3|A0A4Q8LBQ3_9GAMM GTP cyclohydrolase 1 OS= Pseudoxanthomonas sp. NML171200 OX=2480816 GN=folE PE=3 SV=1
MSDSDNIRGGVSRDQAEDAVRTLLRWAGEDPQREGLLDTPKRVAKAYGDWFSGYQRDPREYLARTFEEVAGYDELIVLRDIEYESHCEHHMAPIIGKVHVGYLPDGKVVGISKLARVVDAYARRFQVQEKMTAQIAQCIQDVLQPRGVGVVVEGAHECMTTRGVHKRGVSMVTSKMLGAFREDARTRAEFLRFIEVGGKR

SEQ ID NO: 13640 - protein, 304 aa, Pseudoxanthomonas sp.
  misc_feature (1)..(304): tr|A0A4Q8LF12|A0A4Q8LF12_9GAMM GTP cyclohydrolase FolE2 OS=Pseudoxanthomonas sp. NML171202 OX=2480817 GN=folE2 PE=3 SV=1
MSLPLPDVCLDESPSQPAPLSWVGMSGIDLPLRLDESGCQRLLDARVDAQVDLPDARAKGIHMSRLHRQLDHLGVEAPLSPARVQALLSAMIHSHADCGSRRARVQLGLALPVRRPALRTPGLAGWKTYPVRIAARLDGGGLALRVQVAVTYSSTCPCSAALARAVVAEAFLRDFQARASVDTQEVTRWLSANASLATPHSQRSVAQVAIDVPAEAAGFGLLALIDRVEAALGTPVQTAVKREDEQAFAIANGANLMFVEDAARRILAALEGRYARPGVQVTHAESLHAHDAVAWAGAPLEQAA

SEQ ID NO: 13641 - protein, 201 aa, Pseudoxanthomonas spadix
  misc_feature (1)..(201): tr|G7UV24|G7UV24_PSEUP GTP cyclohydrolase 1 OS=Pseudoxa nthomonas spadix (strain BD-a59) OX=1045855 GN=folE PE= 3 SV=1
MSDSDNTRGGVSRDQAEDAVRTLLRWAGEDPAREGLLDTPKRVAKAYGDWFSGYRSDPHEYLARTFEEVAGYDELIVLRDIEYESHCEHHMAPIIGRVHVGYLPNGKVVGISKLARVVDAYARRFQVQEKMTAQIAQCIQDVLAPCGVGVVVEGAHECMSTRGVHKRGVSMVTSKMLGQFRKDARTRAEFLRFIEVGSARR

SEQ ID NO: 13642 - protein, 201 aa, Pseudoxanthomonas spadix
  misc_feature (1)..(201): tr|A0A3M6PR44|A0A3M6PR44_9GAMM GTP cyclohydrolase 1 OS= Pseudoxanthomonas spadix OX=415229 GN=folE PE=3 SV=1
MSDSDNTRGGVSRDQAEDAVRTLLRWAGEDPAREGLLDTPKRVAKAYGDWFSGYRSDPHEYLARTFEEVAGYDELIVLRDIEYESHCEHHMAPIIGRVHVGYLPNGKVVGISKLARVVDAYARRFQVQEKMTAQIAQCIQDVLAPCGVGVVVEGAHECMTTRGVHKRGVSMVTSKMLGQFRKDARTRAEFLRFIEVGSARR

SEQ ID NO: 13643 - protein, 197 aa, Pseudoxanthomonas suwonensis
  misc_feature (1)..(197): tr|E6WXI4|E6WXI4_PSEUU GTP cyclohydrolase 1 OS=Pseudoxa nthomonas suwonensis (strain 11-1) OX=743721 GN=folE PE =3 SV=1
MTSSVPTPQVTREQAEEAVRTLLRWAGEDPSREGLLDTPRRVAEAYGDWFSGYRDDPREYLARTFKEVAGYDEMIVLRDIEYESHCEHHMAPIIGRVHVGYLPAGKVVGISKLARVVDAYARRFQVQEKMTAQIAQCIQETLHPLGVGVVVEGAHECMTTRGVHKRGVSMVTSCMLGSFREDARTRSEFLRFIEGRR

SEQ ID NO: 13644 - protein, 313 aa, Pseudoxanthomonas suwonensis
  misc_feature (1)..(313): tr|A0A0E3YYW5|A0A0E3YYW5_9GAMM GTP cyclohydrolase FolE2 OS=Pseudoxanthomonas suwonensis OX=314722 GN=folE2 PE= 3 SV=1
MSVPAPAAPHVASLPDVAHQPATLARPLDWVGMEGIALPVRVSDGAGGHVQVAARVDLSVDLKQAGERGIHMSRLYLRLQEELARNEVTPAGLRHVLQGSVDSQAGLSSRARLRLRYEALLLRRALRSDNAGWKRYPVEIEAVLEHGHLKLVLGFGVEYSSTCPCSAALSRQANAERFAEDFADARPISTGVVRDWLASERGMAATPHAQRSEARVKVELRPQFDELPLVALVDALEAALGTPVQTAVKREDEQAFAMLNAENLMFCEDAARRVASVLSADPRIERYEATVSHFESLHPHDAVASVSGTNPAR

SEQ ID NO: 13645 - protein, 197 aa, Pseudoxanthomonas taiwanensis
  misc_feature (1)..(197): tr|A0A562DID6|A0A562DID6_9GAMM GTP cyclohydrolase 1 OS= Pseudoxanthomonas taiwanensis J19 OX=935569 GN=folE PE= 3 SV=1
MTSSSPTPAVTREQAEEAVRTLLRWAGEDPGREGLLDTPRRVAEAYGDWFSGYREDPREYLARTFEEVAGYDEMIVLRDIEYESHCEHHMAPIIGRVHVGYLPAGKVVGISKLARVVDAYARRFQVQEKMTAQIAHTIQDVLQPQGVGVVVVGAHECMTTRGVHKRGVSMVTSCMLGSFREDARTRSEFLRFIEGRR

SEQ ID NO: 13646 - protein, 314 aa, Pseudoxanthomonas taiwanensis
  misc_feature (1)..(314): tr|A0A562D8Z4|A0A562D8Z4_9GAMM GTP cyclohydrolase FolE2 OS=Pseudoxanthomonas taiwanensis J19 OX=935569 GN=folE 2 PE=3 SV=1
MSLPAPDLSRAGDLLPDVAYQPAALARPLDWVGMEGIAIPVRVPDGAGGHVQVAAQADLSVNLHRAGERGIHMSRLYLRLQQELARHEVTPAGLRHILQDSVESQAGLATRARLRLRYDALLLRRALRSDNAGWKRYPVEIEALLEDGHLKLVLGFSLEYSSTCPCSAALSRQANAARLRADFGDAEALRVEEIAQWLSSERGMAATPHAQRSEARVRVELRPQFDELPLVALIDALEASLGTPVQTAVKREDEQAFAELNAANLMFCEDAARRVASVLSADPRIERYEATVSHFESLHPHDAVASVSGSGPAA

SEQ ID NO: 13647 - protein, 309 aa, Pseudoxanthomonas wuyuanensis
  misc_feature (1)..(309): tr|A0A286CW50|A0A286CW50_9GAMM GTP cyclohydrolase FolE2 OS=Pseudoxanthomonas wuyuanensis OX=1073196 GN=folE2 P E=3 SV=1
MSSPPSAPRADLPDVADHSVPFARPLDWVGMDNIALPIRISDGVGGQLQVAASIDLSVNLVNPDARGIHMSRLYLQLQDGLAREAITPAGLRHLLQDGIASQNGLASQARLTLRYEALLQRRALESDYAGWKRYPVGIEATLSDGHLHLALSFAVEYSSTCPASAALSRQANAERFADDFAAATDLSVEGVHDWLASERGLAATPHAQRSRAQIRVELRPQFDELPLVPLIDAVEAVLATPVQTAVKRVDEQAFARLNAENLMFCEDAARRVASVLSSDARIARYQATVAHYESLHPHDAVARVSGSNP

SEQ ID NO: 13648 - protein, 200 aa, Pseudoxanthomonas wuyuanensis
  misc_feature (1)..(200): tr|A0A286DEX1|A0A286DEX1_9GAMM GTP cyclohydrolase 1 OS= Pseudoxanthomonas wuyuanensis OX=1073196 GN=folE PE=3 S V=1
MSKSKPTHPHVTQEQAEDAVRVLLEWAGENPQREGLLDTPKRVAKAYRDWFSGYQIDPREYLARTFEEVAGYDEMIVLRDIEYESHCEHHMAPIIGKVHVGYLPDGKVVGISKLARVVDAYARRFQVQEKMTAQIAQCIQDVLQPRGVAVVVEGAHECMTTRGVHKRGVSMVTSKMLGEFREDVRTRTEFLRFIEANGKR

SEQ ID NO: 13649 - protein, 226 aa, Pseudozobellia sp.; identical to SEQ ID NO: 7998
  misc_feature (1)..(226): tr|A0A2E5BCR0|A0A2E5BCR0_9FLAO GTP cyclohydrolase 1 OS= Pseudozobellia sp. OX=2024854 GN=folE PE=3 SV=1

SEQ ID NO: 13650 - protein, 199 aa, Pseudozobellia sp.; identical to SEQ ID NO: 7999
  misc_feature (1)..(199): tr|A0A2E5BDV7|A0A2E5BDV7_9FLAO GTP cyclohydrolase 1 OS= Pseudozobellia sp. OX=2024854 GN=folE PE=3 SV=1

SEQ ID NO: 13651 - protein, 199 aa, Pseudozobellia thermophila
  misc_feature (1)..(199): tr|A0A1M6F077|A0A1M6F077_9FLAO GTP cyclohydrolase 1 OS= Pseudozobellia thermophila OX=192903 GN=folE PE=3 SV=1
MAPYRNLEEYNLEVTSEVKDRYSKIISEIGEDVSRDGLIKTPERAAKAMLFLTQGYKQDAVEILKSAMFKEDYDDMVIIKDIELYSLCEHHMLPFFGKAHVAYIPNGHIVGLSKIPRVVDVFARRLQVQERLTHDILECINNTLKPQGVAVVIEASHMCMMMRGVQKQNSVTTTSGFRGQFEKIETRNEFLKLISSDLS

SEQ ID NO: 13652 - protein, 261 aa, Pseudozobellia thermophila
  misc_feature (1)..(261): tr|A0A1M6HHH4|A0A1M6HHH4_9FLAO GTP cyclohydrolase 1 OS= Pseudozobellia thermophila OX=192903 GN=folE PE=3 SV=1
MLSVLFQVALEVARDRFTGRNFVVLNDLGRKRIQQMKIDSTLDKQFEEMGNDHVSTSEDTPLRSDAFVLSDKEKIERIQENIREVMLTLGLDLDDDSLKGTPNRVAKMFVNEIFGGLHPDRKPKSSTFSNKYKYGEMLVEKNITLYSTCEHHLLPIVGKAHIAYISSGNVVGLSKMNRIVDYFAKRPQVQERLTIQIVRELQRVLKTEDVACVIDAKHLCVNSRGIRDIDSSTVTAEYGGKFKQEAVRREFLDYINIDTNF

SEQ ID NO: 13653 - protein, 186 aa, Psychrilyobacter sp.
  misc_feature (1)..(186): tr|A0A369Y0V3|A0A369Y0V3_9FUSO GTP cyclohydrolase 1 OS= Psychrilyobacter sp. S5 OX=2283384 GN=folE PE=3 SV=1
MDKKKIMDGVKLILEGMGEDINREGLIDTPDRVARMFGEICGGLHKDPADEISVFFHVEHNDMVLVKDIQFYSLCEHHLLPFYGKVHIAYIPEDGKVTGLSKLARVVDVASKKPQLQERLNSEIVEALMSKLSAKGVLVVIEAEHMCMTMRGIQKTGSKTITSGVRGIFRTNLATREEGLSLIKHM

SEQ ID NO: 13654 - protein, 189 aa, Psychrobacillus insolitus
  misc_feature (1)..(189): tr|A0A2W7MV69|A0A2W7MV69_9BACI GTP cyclohydrolase 1 OS= Psychrobacillus insolitus OX=1461 GN=folE PE=3 SV=1
MTNVDLKKIEEAVKMILEAVGEDPTREGLLDTPKRVSKMYAEMFEGLHLDPKEYFKTVFNEDHEELVLVKDIPFYSMCEHHLVPFYGKAHVAYIPRDGVVTGLSKLARAVETTARRPQLQERITSTIADDIMEMLNPHGVYVVIEAEHMCMTMRGIKKPGAKTITAVARGILETDQIKRAEILSFIQMK

SEQ ID NO: 13655 - protein, 189 aa, Psychrobacillus lasiicapitis
  misc_feature (1)..(189): tr|A0A544THN6|A0A544THN6_9BACI GTP cyclohydrolase 1 OS= Psychrobacillus lasiicapitis OX=1636719 GN=folE PE=3 SV =1
MTNVDLKKIEEAVKMILEAVGENPEREGLLETPKRVSKMYAEMFEGLHQDPKEYFKTVFNEDHEELVLVKDIPFHSMCEHHLVPFYGKAHVAYIPRDGVVTGLSKLARAVETTARRPQLQERITSSIADDIMEMLNPHGVYVVIEAEHMCMTMRGIKKPGAKTVTAVARGILETDEVKRSEILSFIQMK

SEQ ID NO: 13656 - protein, 189 aa, Psychrobacillus psychrodurans; identical to SEQ ID NO: 12111
  misc_feature (1)..(189): tr|A0A1I4RC96|A0A1I4RC96_9BACI GTP cyclohydrolase 1 OS= Psychrobacillus psychrodurans OX=126157 GN=folE PE=3 SV =1

SEQ ID NO: 13657 - protein, 189 aa, Psychrobacillus psychrotolerans
  misc_feature (1)..(189): tr|A0A1I5VWV8|A0A1I5VWV8_9BACI GTP cyclohydrolase 1 OS= Psychrobacillus psychrotolerans OX=126156 GN=folE PE=3 SV=1
MTNVDLNKIEEAVKMILEAVGEDPNREGLLDTPKRVSKMYAEMFEGLHQDPKEYFKTVFNEDHEELVLVKDIPFYSMCEHHLVPFYGKAHVAYIPRNGVVTGLSKLARAVETTARRPQLQERITSSVADDIMQMLNPHGVYVVVEAEHMCMTMRGIKKPGAKTITAVARGILETDDVKRSEILSFIKMK

SEQ ID NO: 13658 - protein, 189 aa, Psychrobacillus soli
  misc_feature (1)..(189): tr|A0A544TD67|A0A544TD67_9BACI GTP cyclohydrolase 1 OS= Psychrobacillus soli OX=1543965 GN=folE PE=3 SV=1
MTNVDLKKIEEAVKMILEAVGEDPEREGLLETPKRVSKMYAEMFEGLHQDPKEYFKTVFNEDHEELVLVKDIPFHSMCEHHLVPFYGKAHVAYIPRDGVVTGLSKLARAVETTARRPQLQERITSSIAEDIMEMLNPHGVYVVIEAEHMCMTMRGIKKPGAKTVTAVARGILETDEVKRSEILTFIQMQ

SEQ ID NO: 13659 - protein, 189 aa, Psychrobacillus sp.
  misc_feature (1)..(189): tr|A0A0Q3S0F7|A0A0Q3S0F7_9BACI GTP cyclohydrolase 1 OS= Psychrobacillus sp. FJAT-21963 OX=1712028 GN=folE PE=3 SV=1
MTNVDLKKIEKAVTMILEAVGEDPSREGLLDTPKRVSKMYAEMFEGLHQDPKEYFKTVFNEDHEELVLVKDIPFYSMCEHHLVPFYGKAHVAYIPRDGVVTGLSKLARAVETTARRPQLQERITSTIAESIMDMLNPHGVYVVIEAEHMCMTMRGIKKPGAKTITAVAKGILEKDEVKRSEILSFIQMK

SEQ ID NO: 13660 - protein, 189 aa, Psychrobacillus sp.
  misc_feature (1)..(189): tr|A0A5J6SLC7|A0A5J6SLC7_9BACI GTP cyclohydrolase I Fol E OS=Psychrobacillus sp. PB01 OX=2283160 GN=folE PE=4 S V=1
MKNVDLEKIEEAVKMILEAVGENPSREGLLDTPKRVAKMYAEMFEGLQQDPKEYFQTVFNEEHEELVLVKDIPFYSMCEHHLVPFYGKAHVAYIPRNGVVTGLSKLARAVETTAKRPQLQERITSTVADDIMEMLNPHGVYVVVEAEHMCMTMRGIKKPGSKTVTAVARGILETNDIKRSEILSFIQMS

SEQ ID NO: 13661 - protein, 198 aa, Psychrobacter alimentarius
  misc_feature (1)..(198): tr|A0A144PAE6|A0A144PAE6_9GAMM GTP cyclohydrolase 1 OS= Psychrobacter alimentarius OX=261164 GN=folE PE=3 SV=1
MSNTPTITSDYQESVESYRQLIGSTGEDLERPGLEETPMRAAKAFAHLTQGYHQSLDEVVNDALFPSSNRELVLVQNIEFYSLCEHHMLPFHGIAHIGYLPNGQVLGLSKFARIVDMFARRLQVQENLSDQIAQTIMDVTGCRGVAVVMDASHMCMMMRGVNKQQSTTRTTSMLGEFVHDNQARMEFLTAIPRRQPAF

SEQ ID NO: 13662 - protein, 203 aa, Psychrobacter aquaticus
  misc_feature (1)..(203): tr|U4T3F1|U4T3F1_9GAMM GTP cyclohydrolase 1 OS=Psychrob acter aquaticus CMS 56 OX=1354303 GN=folE PE=3 SV=1
MAAKLMSNTPIITSDYQESVESYRQLILSTGEDLERPGLAETPLRAAKAFAHLTQGYHQSLDEVVNDALFPSNNRELVLVQNIEFYSLCEHHMLPFHGVAHVGYLPNGQVLGLSKFARIVDMFARRLQVQENLSDQVAQTIMDVTGCRGVAIVMDAAHMCMMMRGVNKQHSTTRTTSMLGEFVHDNQARTEFLSAIPRRQPAF

SEQ ID NO: 13663 - protein, 203 aa, Psychrobacter arcticus
  misc_feature (1)..(203): tr|Q4FSW1|Q4FSW1_PSYA2 GTP cyclohydrolase 1 OS=Psychrob acter arcticus (strain DSM 17307 / 273-4) OX=259536 GN= folE2 PE=3 SV=1
MAAKLMSNTATIASDYQESIESYRQLIASTGEDLHRPGLEDTPTRAAKAFAHLTKGYHQSLDEVVNGAVFPSTNRELVLVQNIEFYSLCEHHMLPFHGVAHIGYLPNGQVLGLSKFARIVDMFARRLQIQENLSEQVAQTIMDVTGCRGVAVVMDAAHMCMMMRGVNKQHSTTRSTAMLGEYVHDNQARNEFLDAVPKRRPAF

SEQ ID NO: 13664 - protein, 203 aa, Psychrobacter cryohalolentis
  misc_feature (1)..(203): tr|Q1QAU9|Q1QAU9_PSYCK GTP cyclohydrolase 1 OS=Psychrob acter cryohalolentis (strain K5) OX=335284 GN=folE PE=3 SV=1
MAAKLMSNTATIASDYQESIESYRQLIASTGEDLHRPGLEDTPTRAAKAFAHLTKGYHQSLDEVVNDALFPSTNRELVLVQNIEFYSLCEHHMLPFHGVAHIGYLPNGQVLGLSKFARIVDMFSRRLQVQENLSEQIAQTIMDVTGCRGVAVVMDAAHMCMMMRGVNKQHSTTRTMSMLGEYVHDNQARNEFLDAVPKRKPAF

SEQ ID NO: 13665 - protein, 198 aa, Psychrobacter fozii
  misc_feature (1)..(198): tr|A0A2V4UDZ4|A0A2V4UDZ4_9GAMM GTP cyclohydrolase 1 OS= Psychrobacter fozii OX=198480 GN=folE PE=3 SV=1
MSNTLTITSNYQESAESYRQLISSTGEDLHRPGLEDTPMRAAKAFAHLTQGYHQNLDEVVNDALFPSSNRELVLVQNIEFYSLCEHHMLPFHGIAHVGYLPNGQVLGLSKFARIVDMFSRRLQVQENLSEQIAQTIMEVTGCRGVAVVMDAAHMCMMMRGVNKQHSTTRTMSMLGEFVHDNQARTEFLSAIPKRQPAF

SEQ ID NO: 13666 - protein, 203 aa, Psychrobacter frigidicola
  misc_feature (1)..(203): tr|A0A5C7A8C6|A0A5C7A8C6_9GAMM GTP cyclohydrolase 1 OS= Psychrobacter frigidicola OX=45611 GN=folE PE=3 SV=1
MAANLMSNTPIITTDYQESVESYRQLISSTGENLERPGLEDTPIRAAKAFAHLTRGYCQNLDAVVNDALFPSTNRELVLVQNIEFYSLCEHHMLPFHGIAHIGYLPNGQVLGLSKFARIVDMFARRLQVQENLSEQVAQTIMDVTGCRGVAVVMDAAHMCMMMRGVNKQHSTTRTTSMLGEYVHDNQARNEFLGAIPKRQPAF

SEQ ID NO: 13667 - protein, 198 aa, Psychrobacter immobilis
  misc_feature (1)..(198): tr|A0A2V2A5K8|A0A2V2A5K8_PSYIM GTP cyclohydrolase 1 OS= Psychrobacter immobilis OX=498 GN=folE PE=3 SV=1
MSNTPTIASDYQESVESYRQLILSTGEDLQRPGLEETPMRAAKAFAHLTQGYHQSLDEVVNDALFPSSNRELVLVQNIEFYSLCEHHMLPFHGIAHVGYLPNGQVLGLSKFARIVDMFARRLQVQENLSEQVAQTIMDVTGCRGVAVVMDAAHMCMMMRGVNKQHSTTRTTSMLGEFVHDNQARNEFLSAIPRRQPAF

SEQ ID NO: 13668 - protein, 198 aa, Psychrobacter pacificensis
  misc_feature (1)..(198): tr|A0A1G6Z586|A0A1G6Z586_9GAMM GTP cyclohydrolase 1 OS= Psychrobacter pacificensis OX=112002 GN=folE PE=3 SV=1
MSNTPIITPDYKESIESYRQLIGSTGEDLDRPGLLDTPVRAAKAFAHLTKGYHQSIEEVVNDAVFPSANRELVLVQNIEFYSLCEHHMLPFHGVAHIGYLPDGQVLGLSKFARIVDMFARRLQIQENLSEQIAQTIMDVTGCRGVAVVMDASHMCMMMRGVSKQHSTTRSTAMLGEYQHNNQARNEFLGAVPKRQPAF

SEQ ID NO: 13669 - protein, 103 aa, Psychrobacter pasteurii
  misc_feature (1)..(103): tr|A0A1R4EFP0|A0A1R4EFP0_9GAMM Putative GTP cyclohydrol ase 1 type 2 OS=Psychrobacter pasteurii OX=1945520 GN=A 1019T_01252 PE=4 SV=1
MYKLAVFIPEPDLEPVKQALFSAGAGHIGNYSHCCWQVKGTGQFMPRAGSQPHIGEQDTIEQVTEWRVEMVVAKDKISEVIKTLKQAHPYETPAYDVIEVIDL

SEQ ID NO: 13670 - protein, 253 aa, Psychrobacter pasteurii
  misc_feature (1)..(253): tr|A0A1R4EHM2|A0A1R4EHM2_9GAMM Putative GTP cyclohydrol ase 1 type 2 OS=Psychrobacter pasteurii OX=1945520 GN=A 1019T_01935 PE=4 SV=1
MTELSPLALEQWCNDYLKAKEFKDYCPNGLQVDADTPIKKIVTGVTATKNLIDAAIAQNADALLVHHGYFWKGEPEPLTGMKGKRIRSLFQNNISLFAYHLPLDAHPVVGNNAVLADLLDLEVVGALYPEEKHPVGNIAQCEPISIEAFIEKVTQKLQRTPTHISAGNSMISKVGICTGGAQDMIEQAANMGCQLYISGEISERTTHSARELGIDYLACGHHATEMGGIQALGEVIASTLEVQVSFIDDPNPA

SEQ ID NO: 13671 - protein, 201 aa, Psychrobacter phenylpyruvicus
  misc_feature (1)..(201): tr|A0A379LLU2|A0A379LLU2_9GAMM GTP cyclohydrolase 1 OS= Psychrobacter phenylpyruvicus OX=29432 GN=folE PE=3 SV= 1
MCDSNSNASISNLDPRLPSPDLYAKLIASTGEDLNRPGLVDTPTRAAKAFGYLTQGYHQTLEEVTNNAVFPTDNPELVLIHNIEFYSLCEHHLLPFYGVAHVGYLPDGKVIGLSKVARIIDMYARRLQIQENLSKQIADAIMEVTNCRGVAVVMDASHMCMMMRGVNKQLSSTRTTAMLGDFKTDIQARNEFLAAVPASKI

SEQ ID NO: 13672 - protein, 102 aa, Psychrobacter piechaudii
  misc_feature (1)..(102): tr|A0A1R4GXH7|A0A1R4GXH7_9GAMM Putative GTP cyclohydrol ase 1 type 2 OS=Psychrobacter piechaudii OX=1945521 GN= A1232T_01783 PE=4 SV=1
MYKLTVFIPEPNLEPVKQALFDAGAGHIGNYSHCCWQVKGTGQFMPRAGSQPHIGEQDSIEQVTEWRVEMVVAKEKISEVIKTLKQAHPYETPAYDVIEIIT

SEQ ID NO: 13673 - protein, 253 aa, Psychrobacter piechaudii
  misc_feature (1)..(253): tr|A0A1R4GWF7|A0A1R4GWF7_9GAMM Putative GTP cyclohydrol ase 1 type 2 OS=Psychrobacter piechaudii OX=1945521 GN= A1232T_01778 PE=4 SV=1
MTELSPVALEQWCNDYLKAKEFKDYCPNGLQVDADAPIKKIITGVTATQNLIDAAIEQNADAILVHHGYFWKGEPEPLTGMKGKRIRSLLQNNISLLAYHLPLDAHPVVGNNAVLANLLDLQIMGALYPDEKHPVGNIAQCDPISIEDFIKKVSEKLQRTPTHISAGNSVISKVGICTGGAQDMIEQAAHMGCQLYISGEISERTTHSARELGIDYLACGHHATEMGGIQALGEVIESTLGVQVSFVDDPNPA

SEQ ID NO: 13674 - protein, 203 aa, Psychrobacter piscatorii
  misc_feature (1)..(203): tr|A0A0T6DSP5|A0A0T6DSP5_9GAMM GTP cyclohydrolase 1 OS= Psychrobacter piscatorii OX=554343 GN=folE PE=3 SV=1
MAAKLMSNTPIITPDYKDSTESYRQLIGSTGEDLNRPGLLDTPVRAAKAFAHLTKGYHQSIEEVVNDAVFPSANRELVLVQNIEFYSLCEHHMLPFHGVAHIGYLPDGQVLGLSKFARIVDMFARRLQIQENLSEQIAQAIMDVTGCRGVAVVMDASHMCMMMRGVSKQHSTTRSTAMLGEYQHNNQARNEFLGAVPKRQPAF

SEQ ID NO: 13675 - protein, 203 aa, Psychrobacter sp.
  misc_feature (1)..(203): tr|A0A1D9CWC5|A0A1D9CWC5_9GAMM GTP cyclohydrolase 1 OS= Psychrobacter sp. AntiMn-1 OX=1720344 GN=folE PE=3 SV=1
MAAKLMSNTPIITPDYKESIESYRQLIGSTGEDLDRPGLLDTPVRAAKAFAHLTKGYHQSIEEVVNDAVFPSANRELVLVQNIEFYSLCEHHMLPFHGVAHIGYLPDGQVLGLSKFARIVDMFARRLQIQENLSEQIAQTIMDVTGCRGVAVVMDASHMCMMMRGVSKQHSTTRSTAMLGEYQHNNQARNEFLGAVPKRQPAF

SEQ ID NO: 13676 - protein, 300 aa, Psychrobacter sp.
  misc_feature (1)..(300): tr|A0A3D4WKT0|A0A3D4WKT0_9GAMM GTP cyclohydrolase FolE2 OS=Psychrobacter sp. OX=56811 GN=folE2 PE=3 SV=1
MINDLPDISENLNVAPHSSCLDWVGMENIALPIYIENTLCPSQVNAFVSLDDPAVKGIHMSRLYIRLLELVKLKILNFSHLKDTLQDFLKSHEGLSSNAKLHIKSQLYVERPALISPLTGWKSYPFELVCQLIDQQFFFEVQVEIPYSSTCPCSAALSRSLIQQQFQKALSEKRFDLTNSEEVIDWLGTTEAIVATPHSQRSVAQLRFKVSTELAELPLIAIIDQAEHALATPVQTAVKRVDEQAFALANGQNLMFCEDAVRRLRHTFLDYANILGFKFKVIHAESLHAHDAVAEGSWQW

SEQ ID NO: 13677 - protein, 203 aa, Psychrobacter urativorans
  misc_feature (1)..(203): tr|A0A0M4T0N7|A0A0M4T0N7_9GAMM GTP cyclohydrolase 1 OS= Psychrobacter urativorans OX=45610 GN=folE PE=3 SV=1
MAAKLMSNTPTVTLDYQESTESYRQLISSTGEDLERPGLQDTPIRAAKAFAHLTRGYCQNLDEVVNDALFPSTNRELVLVQNIEFYSLCEHHMLPFHGVAHIGYLPNGHVLGLSKFARIVDMFARRLQVQENLSEQIAQSIMDVTGCRGVAVVMDAAHMCMMMRGVNKQHSTTRTTSMLGEYVHDNQARNEFLGAIPKRQPAF

SEQ ID NO: 13678 - protein, 194 aa, Psychroflexus gondwanensis
  misc_feature (1)..(194): tr|N1WRG3|N1WRG3_9FLAO GTP cyclohydrolase 1 OS=Psychrof lexus gondwanensis ACAM 44 OX=1189619 GN=folE PE=3 SV=1
MSYKTYEEYSQPYVDEIKSSYESILKNIGEDTTRNGIVKTPERAAKAMQFLTQGYNMDPKEILLGAMFEEPYDDMVLIKDIELYSLCEHHMLPFFGKVHVGYIPNGKIVGLSKIPRIIDVFARRLQVQERLTHDILECINDTLQPKGVGVVIEAQHMCMMMRGVQKQNSATTTSGFRGEFKNQETRSEFLKLIG

SEQ ID NO: 13679 - protein, 225 aa, Psychroflexus gondwanensis
  misc_feature (1)..(225): tr|N1WSF1|N1WSF1_9FLAO GTP cyclohydrolase 1 OS=Psychrof lexus gondwanensis ACAM 44 OX=1189619 GN=folE PE=3 SV=1
MSDQNKENLIEELGDNHIATSYENPIREDAFEMSDDEKIEKIKGHVHQIMETLGMDMTDDSLQGTPNRVAKMYVNETFGGLHPNKKPKASTFQNNYKYGEMLVEKNITVYSTCEHHLLPIIGRAHVAYISSGRVIGLSKMNRIVNYYAKRPQVQERLTMQVVKELQKALKTEDVACVIDAKHLCVNSRGINDIESSTVTSEYGGKFKDENVRRELLNYIKLDTKF

SEQ ID NO: 13680 - protein, 225 aa, Psychroflexus halocasei
  misc_feature (1)..(225): tr|A0A1H4C9Q1|A0A1H4C9Q1_9FLAO GTP cyclohydrolase 1 OS= Psychroflexus halocasei OX=908615 GN=folE PE=3 SV=1
MSDNKNTEFNDNIGDNHVATCTENPLKPDAFAISDDKKIELIQDDVKKILDTLGMDLNDDSLKGTPKRVAKMFVNEIFSGLNPKNKPKASTFENNYQYGEMLVEKNITVYSTCEHHLLPIIGRAHVAYISSGRVIGLSKMNRIVNYFAKRPQVQERLTMQIVKEMQEALQTEDVACVIDAKHLCVNSRGISDIESSTVTSEYGGKFKDKLVKKEFLDYIKLDTKF

SEQ ID NO: 13681 - protein, 198 aa, Psychroflexus salarius
  misc_feature (1)..(198): tr|A0A1M4W8W6|A0A1M4W8W6_9FLAO GTP cyclohydrolase 1 OS= Psychroflexus salarius OX=1155689 GN=folE PE=3 SV=1
MSFKLFEEYNQEFITDVKESYHTILDRVGEDPKREGIVKTPERAAKAMQFLTQGYEMDPKQILEGAMFKEDYSDMVLIKDIELYSLCEHHMLPFFGKAHIAYIPNGHIVGLSKIPRVVDVFSRRLQVQERLTHDILECINSTLQPKGVAVVIEARHMCMMMRGVQKQNSATTTSGFRGEFKHSETRNEFLRLIGKDLA

SEQ ID NO: 13682 - protein, 225 aa, Psychroflexus salarius
  misc_feature (1)..(225): tr|A0A1M4WXE1|A0A1M4WXE1_9FLAO GTP cyclohydrolase 1 OS= Psychroflexus salarius OX=1155689 GN=folE PE=3 SV=1
MSKDKNTDFIEDIGDNHVATSTENPIRKDAFSISNDTKIEQIESHVNSILDILGMDLTDDSLRGTPKRVAKMFVNEIFSGLHPDNKPKASTFDNKYKYGEMLVEKNITVYSTCEHHLLPIVGRAHVAYISTGKVIGLSKMNRIVNYYSKRPQVQERLTMQIVKEMQEALNTEDVACVIDAKHLCVNSRGISDIESSTVTSEFGGKFKNETTKKEFLDYIKLETKF

SEQ ID NO: 13683 - protein, 194 aa, Psychroflexus sediminis
  misc_feature (1)..(194): tr|A0A1G7XT98|A0A1G7XT98_9FLAO GTP cyclohydrolase 1 OS= Psychroflexus sediminis OX=470826 GN=folE PE=3 SV=1
MSYKTYEEYTQPFVGEIKSNYLSILENIGEDPSRSGILKTPERAAKAMQFLTQGYEMDPQKILLGAMFEEDYDDMVLIKDIELYSLCEHHMLPFFGKVHIAYIPNGKIVGLSKIPRVVDVFARRLQVQERLTRDILECINNTLQPKGVAIVIEAQHMCMMMRGVQKQNSATTTSGFRGAFRNQETRNEFLKLIS

SEQ ID NO: 13684 - protein, 225 aa, Psychroflexus sediminis
  misc_feature (1)..(225): tr|A0A1G7VSZ3|A0A1G7VSZ3_9FLAO GTP cyclohydrolase 1 OS= Psychroflexus sediminis OX=470826 GN=folE PE=3 SV=1
MSEQKQKKLIDEIGDNHIATSYENPVREDAFDMTEDEKIEKIKGHVHEIMHTLGMDMTDDSLMGTPKRVAKMYVNEIFGGLDPAKKPKASTFENNYKYGEMLVEKNITVYSTCEHHLLPIVGRAHVAYISSGRVVGLSKMNRIVNYYANRPQVQERLTMQIVKELQNALDTEDVACIIDAKHLCVNSRGINDIESSTVTSEFGGKFKDENVRKELLSYVNMDTKF

SEQ ID NO: 13685 - protein, 194 aa, Psychroflexus sp.
  misc_feature (1)..(194): tr|A0A2I0D5H2|A0A2I0D5H2_9FLAO GTP cyclohydrolase 1 OS= Psychroflexus sp. MES1-P1E OX=2058320 GN=folE PE=3 SV=1
MSYKTDEEHSQPYVDEIESSYESILKNIGEDTTRNGIVKTPERAAKAMQFLTQGYNMNPEEILLGAMFEEPYEDMVLIKDIELYSLCEHHMLPFFGKVHVGYIPNGKIVGLSKIPRIVDVFARRLQVQERLTHDILECINDTLQPKGVGVVIEAQHMCMMMRGVQKQNSATTTSGFRGEFKNQETRSEFLKLIG

SEQ ID NO: 13686 - protein, 225 aa, Psychroflexus sp.
  misc_feature (1)..(225): tr|A0A2I0D4W1|A0A2I0D4W1_9FLAO GTP cyclohydrolase 1 OS= Psychroflexus sp. MES1-P1E OX=2058320 GN=folE PE=3 SV=1
MSDHNKEDLTEELGDNHIATSYENPIREDAFDMSDDEKIEKIKGHVHEIMETLGMDMTDDSLQGTPNRVAKMYVNETFGGLRPHKKPKVSTFENNYKYGQMLVEKNITVYSTCEHHLLPIIGRAHVAYISSGRVIGLSKMNRIVNYYAKRPQVQERLTMQVVKELQKALETEDVACVIDAKHLCVNSRGINDIESSTVTSEYGGKFKDEDVRKELLSYIKLDTKF

SEQ ID NO: 13687 - protein, 194 aa, Psychroflexus torquis
  misc_feature (1)..(194): tr|K4IIW6|K4IIW6_PSYTT GTP cyclohydrolase 1 OS=Psychrof lexus torquis (strain ATCC 700755 / ACAM 623) OX=313595 GN=folE PE=3 SV=1
MPYKTDEEHSQPYVDEIKSSYESILKNIGEDTTRNGIVKTPERAAKAMRFLTQGYNMNPEEILLGAMFEEPYEDMVLIKDIELYSLCEHHMLPFFGKVHVGYIPNGKIVGLSKIPRIVDVFARRLQVQERLTHDILECINDTLQPKGVGVVIEAQHMCMMMRGVQKQNSATTTSGFRGEFKNQETRSEFLKLIG

SEQ ID NO: 13688 - protein, 225 aa, Psychroflexus torquis
  misc_feature (1)..(225): tr|K4IH45|K4IH45_PSYTT GTP cyclohydrolase 1 OS=Psychrof lexus torquis (strain ATCC 700755 / ACAM 623) OX=313595 GN=folE PE=3 SV=1
MSDQNKEDLTEELGDNHIATSYENPIREDAFDMSDDEKIEKIKGHVHEIMETLGMDMTDDSLQGTPNRVAKMYVNETFGGLRPHKKPKVSTFENNYKYGQMLVEKNITVYSTCEHHLLPIIGRAHVAYISSGRVIGLSKMNRIVNYYAKRPQVQERLTMQVVKELQKALETEDVACVIDAKHLCVNSRGINDIESSTVTSEYGGKFKDEDVRKELLSYIKLDTKF

SEQ ID NO: 13689 - protein, 186 aa, Psychromicrobium lacuslunae
  misc_feature (1)..(186): tr|A0A0D4C1C0|A0A0D4C1C0_9MICC GTP cyclohydrolase 1 OS= Psychromicrobium lacuslunae OX=1618207 GN=folE PE=3 SV= 1
MDLPRIERAVREILLAIGEDPDRSGLADTPARVARAYAEVFSGLQQDPADVLSRTFDISHQELVLVKDIPFYSTCEHHLVPFHGFAHVGYIPSHDGKVTGLSKLARLVDVFAKRPQVQERLTTQIVDALVEHLKPRGAIVVVECEHMCMSMRGVRKPGAKTVTSAVRGILHEPATRAEAMSLILGK

SEQ ID NO: 13690 - protein, 304 aa, Psychromonas ingrahamii
  misc_feature (1)..(304): sp|A1STF0|GCH4_PSYIN GTP cyclohydrolase FolE2 OS=Psychr omonas ingrahamii (strain 37) OX=357804 GN=folE2 PE=3 S V=2
MPDIANSAQAQTEGKLDRVGMSNIELPLMVQTDDCPPQQVSANAEVFVNLGDAQAKGIHMSRLYLQLDELSTESELNISTLTALLQGFITSHHELSQRAFVKFSFDYHLRRKSLISEKRGWKAYPVIIIGRLSEGNFEVELQVNVPYSSTCPCSAALARQLIQQAFSQKYDQQTEVNKEEIFAWLGSTKGIVATPHSQRSIVEVKVKLNSLNQSFPIIELIDLIEKTLKTPVQAAVKREDEQEFALLNGQNLMFCEDAARHLQHSLHQETKFDDFWLRVNHYESLHAHDAVAMTTKGIEGGYLA

SEQ ID NO: 13691 - protein, 306 aa, Psychromonas sp.
  misc_feature (1)..(306): tr|A0A4Y7ZUQ9|A0A4Y7ZUQ9_9GAMM GTP cyclohydrolase FolE2 OS=Psychromonas sp. RZ22 OX=2555643 GN=folE2 PE=3 SV=1
MAMPDIANSAQAQTEGTLDRVGMSNIELPLMVQTDNCPAQQVSASVEVFVNLGDPQAKGIHMSRLYLQLDELSTESELTLETLTALLTGFIESHNDLSSEAFVKIAFDYNLRRKSLISEKRGWKAYPVVIIGRLINGKFDFQLQVDVPYSSTCPCSAALARQLIQDAFSKQYEQQASIDKEDILTWLGSTQGIVATPHSQRSVAQVKVKLGKSASNFPIIALIDLIEATLKTPVQAAVKREDEQEFARLNGQNLMFCEDAARQLQYALNQQTQFDDFWLRVNHYESLHAHDAVSITTKGIKDGYQA

SEQ ID NO: 13692 - protein, 306 aa, Psychromonas sp.
  misc_feature (1)..(306): tr|A0A366W2L6|A0A366W2L6_9GAMM GTP cyclohydrolase FolE2 OS=Psychromonas sp. B3M02 OX=2267226 GN=folE2 PE=3 SV= 1
MAMPDIANSAQAQTEGTLDRVGMSNIELPLMVQTDDCPAQQVSAKAEVFVNLGDPQAKGIHMSRLYLQLDQLSTESELTLGTLTTLLSGFIESHHDLSSEAYVKVAFDYNLRRKSLISEKRGWKAYPVVIVGRLIDGEFDFELKVDVPYSSTCPCSAALARQLIQDAFSKQYEEQANIAKEDILTWLGSTQGIVATPHSQRSVAEVKVKLSNEADNFPIIALIDLIEATLKTPVQAAVKREDEQEFARLNGQNLMFCEDSARQLKFALNQQELFDDFWLRVNHYESLHAHDAVSVTTKGIKDGYQA

SEQ ID NO: 13693 - protein, 225 aa, Psychroserpens burtonensis
  misc_feature (1)..(225): tr|A0A5C7B642|A0A5C7B642_9FLAO GTP cyclohydrolase 1 OS= Psychroserpens burtonensis OX=49278 GN=folE PE=3 SV=1
MKIEKDIQDYDAIGDDHVGSSSETPLRHDAFELTSSEKINIIKEDVKHIMETLGLDLADDSLKGTPNRVAKMFVNEIFGGLDPDKKPKASTFDNKYKYGEMLVEKNITVYSTCEHHLLPIVGKAHIAYISNGTVVGLSKMNRIVDYFAKRPQVQERLTIQVVKELQKVLNTEDVACIIDAKHLCVNSRGIRDVASSTITSEFGGVFKSKETKREFLDYVSLDTAF

SEQ ID NO: 13694 - protein, 231 aa, Psychroserpens burtonensis
  misc_feature (1)..(231): tr|A0A5C7B6A8|A0A5C7B6A8_9FLAO GTP cyclohydrolase 1 OS= Psychroserpens burtonensis OX=49278 GN=folE PE=3 SV=1
MNTDTLKIKQNGHSLNDFNITDIGDDHLFTGLETPMKADAFKISDEEKKQRIAILFEEIMDVMGLDLTDDSLKGTPKRVAKMYIDEIFSGLNPANKPKVALFDNKYQYNQMVVEKNITFYSNCEHHFVPIIGKAHVSYISSGKVIGLSKLNRIVQYYAKRPQVQERLTNQIAEDLKAILETEDVAVIIDAKHLCVSSRGIKDDTSATVTTYYGGQFNTPAKIAELHNYINN

SEQ ID NO: 13695 - protein, 225 aa, Psychroserpens sp.
  misc_feature (1)..(225): tr|A0A4P7WWV3|A0A4P7WWV3_9FLAO GTP cyclohydrolase 1 OS= Psychroserpens sp. NJDZ02 OX=2570561 GN=folE PE=3 SV=1
MKIENNIDENDAIGENHIGTNHDTPLRADAFDLSDADKIESIKKDVTKILETLGLDLTDDSLKGTPNRVAKMFVNEIFGGLHPDKKPKASTFDNKYQYGEMLVEKNITVYSTCEHHLLPIVGRAHVAYISNGTVVGLSKMNRIVDYYAKRPQVQERLTIQIVKELQKALGTDDVACIIDAKHLCVNSRGIRDIESSTVTSEFGGQFKKESTRREFLEYIKLETKF

SEQ ID NO: 13696 - protein, 198 aa, Psychroserpens sp.
  misc_feature (1)..(198): tr|A0A4P7X0N7|A0A4P7X0N7_9FLAO GTP cyclohydrolase 1 OS= Psychroserpens sp. NJDZ02 OX=2570561 GN=folE PE=3 SV=1
MPYKQFEEYSIKVTDDVKERYKNIIEDLGEDTNREGLIKTPERAAKAMQFLTQGYDQDAAEILKGAMFKEEYNDMVIVKDIEFYSLCEHHILPFFGKAHIAYIPNGHIVGLSKLPRIVDVFSRRLQVQERLTHQILDCINDTLKPEGVAVVIEASHMCMQMRGVQKQNSVTTTSGFRGAFENIETRTEFLNLISSKLS

SEQ ID NO: 13697 - protein, 306 aa, Psychrosphaera saromensis
  misc_feature (1)..(306): tr|A0A2S7UU87|A0A2S7UU87_9GAMM GTP cyclohydrolase FolE2 OS=Psychrosphaera saromensis OX=716813 GN=folE2 PE=3 S V=1
MTTKMPDIANQAQAQTEGVLDWVGMSNIEMPIMVEMQGETRQVSALVEAFVNLKDPKAKGIHMSRLYLMLDELSVEGSLNKATLTDLLTNFIQSHEDLSDSAHLKFEFDYHMRRKSLISGKRGWKAYPVVITGNLTNGVLDIELAVKVPYSSTCPCSAALARQLIQNAFNDKFTGDVSAEEIHQWLGTTEGIVATPHSQRSIAEVKVKLADDITEFPLVDLVDAIENVLQTPVQAAVKREDEQEFARLNGQNLMFCEDAGRRIKHTLDAISGYKDFWLRVNHYESLHAHDAVSVASKGIANGYASK

SEQ ID NO: 13698 - protein, 189 aa, Pueribacillus theae
  misc_feature (1)..(189): tr|A0A2U1K642|A0A2U1K642_9BACI GTP cyclohydrolase 1 OS= Pueribacillus theae OX=2171751 GN=folE PE=3 SV=1
MARFDSEKIEQAVKMIIEAIGEDPNREGLIDTPKRVARMYEEVFQGLNQNPKDYFATIFGEEHEELVLVKNIPFYSMCEHHLVPFFGEAHVAYIPKDGKVTGLSKLARAVESVARRPQLQERITSTVANSIVETLSPHGVMVVVEAEHMCMTMRGIKKPGAITVTSAVRGCFENDPASRAEVLNLMIKK

SEQ ID NO: 13699 - protein, 366 aa, Puniceibacterium antarcticum
  misc_feature (1)..(366): tr|A0A2G8R9K9|A0A2G8R9K9_9RHOB GTP cyclohydrolase FolE2 OS=Puniceibacterium antarcticum OX=1206336 GN=folE2 PE =3 SV=1
MNIHTPEMDRKPSREEAEQALALLRQWAGKAHDAEIEALDPVLARLVPDAPVDSYPVLSRRYPEAFGVTSAYKDTLPDLQNGPSALIKGANRSIQHVGISNFRLPIQYHTRDNGDLTLETSVTGTVSLDADKKGINMSRIMRSFYVYAEETFSFGVIEAALEDYKTDLESFDARINMRIKFPVKVSSLRSGLSGYQYYDIALELVESNGVRRKIMHLDYVYSSTCPCSLELSEHARRTRGQLATPHSQRSVARISVVLNEGECLWFEDLIDMCRRAVPTETQVMVKREDEQAFAELNAANPIFVEDAARLFAEQLQGDPRVGDFRVLASHQESLHSHDAVSVLTEGDTFANDSLDPKLFSTLFHVG

SEQ ID NO: 13700 - protein, 367 aa, Puniceibacterium sediminis
  misc_feature (1)..(367): tr|A0A238UX21|A0A238UX21_9RHOB GTP cyclohydrolase FolE2 OS=Puniceibacterium sediminis OX=1608407 GN=folE2 PE=3 SV=1
MNMHTPEMDRKPSREEAAAALAVLRKWAGKAHDSEIESLDPVLARLAPDAPVDAYPLLSRAYEADFDASPAYKDTLPDLQNGPSALIKGANRAIQHVGISNFRLPIQYHTRDKGDLSLETSVTGTVSLEADKKGINMSRIMRSFYEYAEETFSFGVIEAALDDYKTDLESFDARINMRLKFPVKVQSLRSGLSGYQYYDIALELIEIDGVRRKIMHLDYVYSSTCPCSLELSEHARRTRGQLATPHSQRSVARISVELTADGKCLWFEDLIDMCRRAVPTETQVMVKREDEQAFAELNAANPIFVEDAARLFAEALQNDPRIGDYRVLASHQESLHSHDAVSVLTEGTTFASDSLDPKLFSTLFHVG

SEQ ID NO: 13701 - protein, 366 aa, Puniceibacterium sp.
  misc_feature (1)..(366): tr|A0A0J5QCR2|A0A0J5QCR2_9RHOB GTP cyclohydrolase FolE2 OS=Puniceibacterium sp. IMCC21224 OX=1618204 GN=folE2 PE=3 SV=1
MNIHTPEIDRVPSREEAAKALALLRLWAGKVPDSEIEALDPVLARLAPDAPADEYPVLSRDYPQSFAVTGAYKATLPDLQNGSATLIRGADRAIQHVGISNFRLPLQYRTRDSGALTLETSVTGTVSLDAGKKGINMSRIMRSFYKHAEKTFSFGVIEAALDDYKKDLESFDARINMRLSFPVRVESLRSGLSGYQYYDIALELVETAGVRREIMHLDYVYSSTCPCSLELAEHARRTRGQLATPHSQRSVARISVEVLDGKCLWFEDLIEMCRNAVPTETQVMVKREDEQAFAELNAANPIFVEDAARLFAEQVQKDRRIGDFRVLASHQESLHSHDAVSVLTEGALFADESLDPKLFSTLFHVG

SEQ ID NO: 13702 - protein, 363 aa, Puniceibacterium sp.; identical to SEQ ID NO: 13609
  misc_feature (1)..(363): tr|A0A5B3BLU8|A0A5B3BLU8_9RHOB GTP cyclohydrolase FolE2 OS=Puniceibacterium sp. HSS470 OX=2541729 GN=folE2 PE= 3 SV=1

SEQ ID NO: 13703 - protein, 326 aa, Puniceicoccaceae bacterium
  misc_feature (1)..(326): tr|A0A368B6J8|A0A368B6J8_9BACT GTP cyclohydrolase FolE2 OS=Puniceicoccaceae bacterium OX=2026784 GN=folE2 PE=3 SV=1
MKSESSSTTPNQSSASAAKLSKVYDRDFVLTDEYRAALPDMQNTDSQQIFGANVPILKVGISNFRLPLSYITSNSDTMTLETSVTGTVSLEANQKGINMSRIMRVFYTYQERVFTPDLLKEILLQYKEEINAHRAQLKLSFEYPILKPSLRSGLEGWQYYRAAYEGRVDELSRFRKYIHFDFIYSSACPCSSELSEHARGNRDVYGIPHSQRSTARVSVEVTEDQHLSLERLQELCLKALQTETQVMVKREDEQAFAEMNGAFTKFVEDAARLLYEQLDDEPKIVDFQVACAHLESLHSHDAVAVINKGVPGGFTGHFDDYKSLIR

SEQ ID NO: 13704 - protein, 326 aa, Puniceicoccaceae bacterium; identical to SEQ ID NO: 7010
  misc_feature (1)..(326): tr|A0A2A5VYW8|A0A2A5VYW8_9BACT GTP cyclohydrolase FolE2 OS=Puniceicoccaceae bacterium MED-G30 OX=1986244 GN=fo lE2 PE=3 SV=1

SEQ ID NO: 13705 - protein, 213 aa, Puniceispirillum marinum
  misc_feature (1)..(213): tr|D5BQG8|D5BQG8_PUNMI GTP cyclohydrolase 1 OS=Puniceis pirillum marinum (strain IMCC1322) OX=488538 GN=folE PE =3 SV=1
MMTPYDANDDAVSHDTDTGNSDITATPSREEAEAAVEVLLRWAGDDPTREGLVGTPGRVARAWKEFCVGYTEDPMEMLERTFDEVEGYDDMVMLRNIRMESHCEHHMVPILGVAHIAYMPDKRVVGISKLARVLDSFARRLQTQETLTAQVANCIQTALKPKGVAILMDAQHQCMTTRGVRKPDVSMLTTRFTGVFENDADLRGRFLDQAKRG

SEQ ID NO: 13706 - protein, 277 aa, Pusillimonas ginsengisoli
  misc_feature (1)..(277): tr|A0A4U5LEY2|A0A4U5LEY2_9BURK GTP cyclohydrolase FolE2 OS=Pusillimonas ginsengisoli OX=453575 GN=folE2 PE=3 S V=1
MNILIDSAVAMPDVQSSVDVRHIAIERVGVRGVRHPMLIAAAGETQPTVANWEMTVALPASEKGTHMSRFVALLEQYRRQAMTPVLFCDMAQAMLPLLNAEKGDISASFAYFVNKVAPVSGVASLMDYEVTWTAKAQAQAAEGAGHAAPGSVEFELSVLVPVTSLCPCSKAISDYGAHNQRSHVTVSAMFDDPAHVDLDGLIKSVEKQASCELWGLLKRTDEKYVTERAYENPKFVEDLVRDVAGQLKQMTGVQRFRVVAENFESIHNHSAYAVVEG

SEQ ID NO: 13707 - protein, 267 aa, Pusillimonas noertemannii
  misc_feature (1)..(267): tr|A0A2U1CHZ7|A0A2U1CHZ7_9BURK GTP cyclohydrolase FolE2 OS=Pusillimonas noertemannii OX=305977 GN=folE2 PE=3 S V=1
MNSVTDSVVAMPDVQSSVDTRRLPIQRVGVRGVRHPMLVACSNGEALPTVANWELTVALPAEEKGTHMSRFVAQLEQYRRLPMTPALFCEMTEKMLPLLNAKQGDITAVFPYFIDKVAPVSGVSSLMDYEVKWLARAAEGEATVFELTVVVPVTSLCPCSKAISEYGAHNQRSHVTVNAVLSDPAIDMPAFIQSIEQQASCELWGLLKRGDEKYVTERAYENPKFVEDLVRDVAMAVKGFEAVQGFRIEAENFESIHNHSAYAVVEG

SEQ ID NO: 13708 - protein, 266 aa, Pusillimonas sp.
  misc_feature (1)..(266): tr|A0A368WD68|A0A368WD68_9BURK GTP cyclohydrolase FolE2 OS=Pusillimonas sp. EA3 OX=2183983 GN=folE2 PE=3 SV=1
MNSITDSVAVMPDVQSSADTRRMPIQRVGVRGVRHPMLVQAAGAALPTVAQWELTVALPAEEKGTHMSRFVALLEQYHSTAMTPALFCEMAQEMLPLLNAEKGDICARFPYFMKKVAPVSEVESLMDYEVTWKAVATSDDVQFYLTVQVPVTSLCPCSKAISQYGAHNQRSHVTVDVVYDDVGHICVDDLIQRVEQQASCELWGLLKRGDEKFVTERAYENPKFVEDLVRDVAVQLQALPGVQRFRIEAENFESIHNHSAYAVVEG

SEQ ID NO: 13709 - protein, 266 aa, Pusillimonas sp.; identical to SEQ ID NO: 13708
  misc_feature (1)..(266): tr|A0A3A1YTK3|A0A3A1YTK3_9BURK GTP cyclohydrolase FolE2 OS=Pusillimonas sp. L52-1-41 OX=2026684 GN=folE2 PE=3 SV=1

SEQ ID NO: 13710 - protein, 226 aa, Pustulibacterium marinum
  misc_feature (1)..(226): tr|A0A1I7FQG5|A0A1I7FQG5_9FLAO GTP cyclohydrolase 1 OS= Pustulibacterium marinum OX=1224947 GN=folE PE=3 SV=1
MKIDKALEQHYEEYGDNHVGSSADTPIRKDAFELSPLEKMEKIESNVYEILETLGMDLTDDSLKGTPRRVAKMFVNEIFGGLLPENKPSASTFENKYKYGEMLVEKNIVVYSTCEHHLLPIVGRAHVGYISKGKVVGLSKMNRIVDYFSKRPQVQERLTMQIVQEMQKVLGTDDVACVIDAKHLCVNSRGIRDIESSTVTAEFGGKFKEESARREFLNYIKLETEF

SEQ ID NO: 13711 - protein, 210 aa, Pyrinomonas methylaliphatogenes
  misc_feature (1)..(210): tr|A0A0B6WYB9|A0A0B6WYB9_9BACT GTP cyclohydrolase 1 OS= Pyrinomonas methylaliphatogenes OX=454194 GN=folE PE=3 SV=1
MNTQFSATEPDEEIAEAPPARRQVDLGKIAQGVRLILEGIGEDPDRPGLRRTPQRVAEMYAELTAGMDEDPHEYIVPLPGDTHDEMVIVKDIQIASLCEHHLAPFVGRCHIAYIPKDGRIIGLSKLARLADAFARRLQVQERLTSQIADTLYEALKPVGVMVVIEAEHTCMTVRGVKKPGSLTITSAIRGGFRKDQRTRAEAMALIKGRG

SEQ ID NO: 13712 - protein, 199 aa, Quadrisphaera granulorum
  misc_feature (1)..(199): tr|A0A316A9E4|A0A316A9E4_9ACTN GTP cyclohydrolase 1 OS= Quadrisphaera granulorum OX=317664 GN=folE PE=3 SV=1
MSAVPADLLVTDRPGVDLEAATTAAAAFLQALGVDTDRPGLDRTPERMARAYAELFDAGPVELTTFPNEEAYDEVVLARGIPFRSVCEHHLLPFVGVAHVGYLPGERIVGLSKLARVVEHLAAGPQVQERLTSQVARLLQDRLRPRGVGVVLDAEHLCMSVRGVRATGARTRTSALLGRMRSDARTRAEFLALTGTGAA

SEQ ID NO: 13713 - protein, 201 aa, Quadrisphaera granulorum
  misc_feature (1)..(201): tr|A0A316A8N1|A0A316A8N1_9ACTN GTP cyclohydrolase 1 OS= Quadrisphaera granulorum OX=317664 GN=folE PE=3 SV=1
MRTPAPPAPRQAPAHAPEPDLAAAERAVADLLRALRLDTEAPGLVGTPGRVARAYAELLTPQEFAFTTFPNDEGYDELVVVSDIPFRSLCEHHLLPFVGTAHVGYLPGERVVGLSKLARAVEALASRPQVQERLTCQVADLLEEALAPRGVGVVLEADHSCMSLRGARAVGARTRTSALRGLVRSDARTRAEFFDLTGRTR

SEQ ID NO: 13714 - protein, 215 aa, Quadrisphaera sp.
  misc_feature (1)..(215): tr|A0A5C8ZJ22|A0A5C8ZJ22_9ACTN GTP cyclohydrolase 1 OS= Quadrisphaera sp. DD2A OX=2593304 GN=folE PE=3 SV=1
MRSATTVPPPRPDEDLDRERSLAQVAPSSPPVDPAAAERAVGQLLVALGLDPGAPGLQDTPRRVARAYADLLTPEPFALTTFPNDEGYDELVVVSDIPFTSLCEHHLLPFSGVAHVGYLPGSRVVGLSKLARVVEALSRRPQVQERLTCQVADLLQEALDPDGVGVVLEAEHTCMSLRGVRAVGALTRTSALRGRVRSDARTRAEFLDLARRSRS

SEQ ID NO: 13715 - protein, 194 aa, Quadrisphaera sp.
  misc_feature (1)..(194): tr|A0A1H0YPD2|A0A1H0YPD2_9ACTN GTP cyclohydrolase 1 OS= Quadrisphaera sp. DSM 44207 OX=1881057 GN=folE PE=3 SV= 1
MAGTPPPGYDAERVRRAVREILLAIGEDPDREGLVGTPERVARAYEEIFAGLHQDPAQVLATTFDLGHDEMVLVRDITVSSVCEHHLLPFTGVAHVAYIPSADGRITGLSKLARLVDVYARRPQVQERLTAQVADALVQHLSPRGVMVVLDCEHLCMSMRGVQRGGARTTTSAVRGGMREPATRAEALSLVLGR

SEQ ID NO: 13716 - protein, 188 aa, Quasibacillus thermotolerans
  misc_feature (1)..(188): tr|A0A0F5HYQ1|A0A0F5HYQ1_9BACI GTP cyclohydrolase 1 OS= Quasibacillus thermotolerans OX=1221996 GN=folE PE=3 SV =1
MTEVNRAQIEEAVRMILEAVGEDPNREGLLDTPKRVAKMYEEVFSGLNTDPKEYFETIFGEDYEELVLVKDIPFYSMCEHHLVPFFGHAHVAYLPKNGKVTGLSKLARAVEAVARRPQLQERITAEVANAIMEKLQPHGVMVVVEAEHMCMAMRGVKKPGSKTVTTAARGKFANDVHSRSELLSLIKG

SEQ ID NO: 13717 - protein, 266 aa, Quisquiliibacterium sp.
  misc_feature (1)..(266): tr|A0A5C8NSA1|A0A5C8NSA1_9BURK GTP cyclohydrolase FolE2 OS=Quisquiliibacterium sp. CC-CFT501 OX=2498847 GN=fol E2 PE=3 SV=1
MNAPEKLLLPDIQSTADARQLAIQRVGVRGIVFPVTIAGAGGAQASVARVDMYVGLPADQKGTHMSRFLEVLHVQDEPLSYAALDRLMVAMLDRLEADSGWIEMRLPYFVKKAAPVSGVESLMDYELTLRIEARDGLRRQTLKVLVPVTSLCPCSKEISAYGAHNQRSHVTIAARLSAGLPVESLIEVAEQAASCELWGLLKRPDEKYVTERAYENPKFVEDLVRDIALALDRIPAVEAYTVESENFESIHNHSAYALIERERPAA

SEQ ID NO: 13718 - protein, 221 aa, Rahnella aquatilis
  misc_feature (1)..(221): tr|H2IQP9|H2IQP9_RAHAC GTP cyclohydrolase 1 OS=Rahnella aquatilis (strain ATCC 33071 / DSM 4594 / JCM 1683 / N BRC 105701 / NCIMB 13365 / CIP 78.65) OX=745277 GN=folE PE=3 SV=1
MSTLSKEAILVHEALLARGLETPLREALPIDNETRKQRIQEHMTGIMQLLNLDLSDDSLAETPHRIAKMYVDEIFSGLDYANFPKITVIENKMKVDEMVTVRDITLTSTCEHHFVTIDGKATVAYIPKETVIGLSKINRIVQFFSQRPQVQERLTQQILVALQTLLGTTNVAVSIDAVHYCVKARGVRDATSATTTTSLGGLFKSSQNTRQEFLRTVRHPS

SEQ ID NO: 13719 - protein, 221 aa, Rahnella aquatilis
  misc_feature (1)..(221): tr|H8NRN9|H8NRN9_RAHAQ GTP cyclohydrolase 1 OS=Rahnella aquatilis HX2 OX=1151116 GN=folE PE=3 SV=1
MPILSKEAILVHEALLARGLETPLREALPIDNETRKQRIQEHMTGIMQLLNLDLSDDSLAETPHRIAKMYVDEIFSGLDYANFPKITVIENKMKVDEMVTVRDITLTSTCEHHFVTIDGKATVAYIPKDTVIGLSKINRIVQFFSQRPQVQERLTQQILVALQTLLGTTNVAVSIDAVHYCVKARGVRDATSATTTTSLGGLFKSSQNTRQEFLRTVRHPS

SEQ ID NO: 13720 - protein, 221 aa, Rahnella inusitata
  misc_feature (1)..(221): tr|A0A419MEB3|A0A419MEB3_9GAMM GTP cyclohydrolase 1 OS= Rahnella inusitata OX=58169 GN=folE PE=3 SV=1
MPTLSKEAILVHEALLARGLETPLREALPIDNETRKQRIQEHMTGIMQLLNLDLSDDSLAETPNRIAKMYVDEIFSGLDYANFPKITVIENKMKVDEMVTVRDITLTSTCEHHFVTIDGKATVAYIPKDTVIGLSKINRIVQFFSQRPQVQERLTQQILVALQTLLGTTNVAVSIDAVHYCVKARGVRDATSATTTTSLGGLFKSSQNTRQEFLRTVRHAS

SEQ ID NO: 13721 - protein, 221 aa, Rahnella sp.
  misc_feature (1)..(221): tr|A0A2N0W542|A0A2N0W542_9GAMM GTP cyclohydrolase 1 OS= Rahnella sp. AA OX=2057180 GN=folE PE=3 SV=1
MPTLSKEAILVHEALLARGLETPLREALPIDNETRKKQIQEHMTGIMQLLNLDLSDDSLAETPHRIAKMYVDEIFSGLDYANFPKITVIENKMKVDEMVTVRDITLTSTCEHHFVTIDGKATVAYIPKETVIGLSKINRIVQFFSQRPQVQERLTQQILVALQTLLGTTNVAVSIDAVHYCVKARGVRDATSATTTTSLGGLFKSSQNTRQEFLRTVRHAS

SEQ ID NO: 13722 - protein, 221 aa, Rahnella sp.; identical to SEQ ID NO: 8001
  misc_feature (1)..(221): tr|A0A4R7GI17|A0A4R7GI17_9GAMM GTP cyclohydrolase 1 OS= Rahnella sp. BIGb0236 OX=2485117 GN=folE PE=3 SV=1

SEQ ID NO: 13723 - protein, 221 aa, Rahnella woolbedingensis; identical to SEQ ID NO: 8001
  misc_feature (1)..(221): tr|A0A419NDV7|A0A419NDV7_9GAMM GTP cyclohydrolase 1 OS= Rahnella woolbedingensis OX=1510574 GN=folE PE=3 SV=1

SEQ ID NO: 13724 - protein, 235 aa, Raineya orbicola
  misc_feature (1)..(235): tr|A0A2N3IEZ8|A0A2N3IEZ8_9BACT GTP cyclohydrolase 1 OS= Raineya orbicola OX=2016530 GN=folE PE=3 SV=1
MKPNETSLNTLPNAWQMIEEIGENHFSSNLDTPLRDDAFEIDDDLKIELIEKHFREIMHILGLDLTDDSLKGTPHRVAKMYVKEIFSGLNPANKPKISLFENKYEYNQMLVEKDIIVYSYCEHHFVPIVGKAHVAYISKGQVIGLSKLNRIVQYYARRPQVQERMTMQIGKELQEVLQTEDVAIVVDAKHLCVSSRGVQDVCSSTITAFYEGKFREEATKNEFLKYLSLSTEYGI

SEQ ID NO: 13725 - protein, 209 aa, Raineyella antarctica
  misc_feature (1)..(209): tr|A0A1G6IJC6|A0A1G6IJC6_9ACTN GTP cyclohydrolase 1 OS= Raineyella antarctica OX=1577474 GN=folE PE=3 SV=1
MAEQLTDRFPDVSPEEWGAARRPFDHDRVAAAVREILVGIGEDPDRDGLLDTPARVARMYGEVFAGMHESASEVLSTTFDINHEELVLVKDIEVWSMCEHHLVPFNGVAHVGYIPGGDGQVTGLSKLARLVDVYARRPQVQERLTTQVAEALVHHLRPRGVIVVFDCEHLCMTMRGVHKPGSRTVTSAVRGILRNPATRAEAMGLIMGR

SEQ ID NO: 13726 - protein, 268 aa, Ralstonia insidiosa
  misc_feature (1)..(268): tr|A0A191ZUG7|A0A191ZUG7_9RALS GTP cyclohydrolase FolE2 OS=Ralstonia insidiosa OX=190721 GN=folE2 PE=3 SV=1
MNDMNPAFVMPDVQSSHDTRQIPIQRVGVRGVRYPMSLQTPSGVQNTVGTYNLDVHLPADQKGTHMSRFVALLEEEREPLNLAQFQLLLEKMLEKLEADAGRIEVHFPYFVSKTAPVSGVQSLMDYEVTMIGEVRDGHTKVRVKALVPVTSLCPCSKKISQYGAHNQRSHITIDAELAADTPVESLIRMAEEEASCELWGLLKRPDEKFVTERAYENPKFVEDLVRDIAMRLNLDDRIVAYTLEAENFESIHNHSAYALIERDKRLDK

SEQ ID NO: 13727 - protein, 268 aa, Ralstonia mannitolilytica
  misc_feature (1)..(268): tr|A0A0D5ARV7|A0A0D5ARV7_9RALS GTP cyclohydrolase FolE2 OS=Ralstonia mannitolilytica OX=105219 GN=folE2 PE=3 S V=1
MNDMNPAFAMPDVQSSHDTRQIPIQRVGVRGVRYPMSLQTPSGVQNTVGTFNLDVHLPADQKGTHMSRFVALLEEEREPLNLAQFQLLLEKMLEKLEADAGRIEVHFPYFVSKTAPVSGVQSLMDYEVTMIGEVRNGHTTVRVKALVPVTSLCPCSKKISQYGAHNQRSHITIDAELAADTPVEALIRMAEEEASCELWGLLKRPDEKFVTERAYENPKFVEDLVRDIAMRLNQDDRIVAYTLEAENFESIHNHSAYALIERDKRTDK

SEQ ID NO: 13728 - protein, 268 aa, Ralstonia pickettii
  misc_feature (1)..(268): tr|C6BK66|C6BK66_RALP1 GTP cyclohydrolase FolE2 OS=Rals tonia pickettii (strain 12D) OX=428406 GN=folE2 PE=3 SV =1
MNDMNPAFAMPDVQSSHDNRQIPIQRVGVRGVRYPMSLQTPSGVLNTVGTYNLDVHLPADQKGTHMSRFVALLEEEREPLNLAQFQLLLEKMLEKLEADAGRIEVHFPYFVSKTAPVSGVQSLMDYEVTMIGEVRDGHTKVRVKALVPVTSLCPCSKKISQYGAHNQRSHITIDAELAADTPVEALIRMAEEEASCELWGLLKRPDEKFVTERAYENPKFVEDLVRDIAMRLNQDDRIVAYSLEAENFESIHNHSAYALIERDKRSDK

SEQ ID NO: 13729 - protein, 268 aa, Ralstonia pickettii; identical to SEQ ID NO: 13728
  misc_feature (1)..(268): tr|A0A2P4RM54|A0A2P4RM54_RALPI GTP cyclohydrolase FolE2 OS=Ralstonia pickettii OX=329 GN=folE2 PE=3 SV=1

SEQ ID NO: 13730 - protein, 268 aa, Ralstonia pseudosolanacearum
  misc_feature (1)..(268): tr|A0A223GNY1|A0A223GNY1_9RALS GTP cyclohydrolase FolE2 OS=Ralstonia pseudosolanacearum OX=1310165 GN=folE2 PE =3 SV=1
MNDMNPGFVMPDVQSSHDTRQIPIQRVGVRGVRYPMSLQTPSGVLSTVGTFNLDVHLPADQKGTHMSRFVALLEEEREPLNLAQFQLLLEKMLEKLEADAGRIEVSFPYFVSKTAPVSGVQSLMDYEVTMIGEVRDGHTTVRVKALVPVTSLCPCSKKISQYGAHNQRSHITIDAELAADTPVEALIRMAEEEASCELWGLLKRPDEKFVTERAYENPKFVEDLVRDIAMRLNEDDRIVAYTLEAENFESIHNHSAYALIERDKRRAG

SEQ ID NO: 13731 - protein, 209 aa, Ralstonia pseudosolanacearum
  misc_feature (1)..(209): tr|A0A223H0Q3|A0A223H0Q3_9RALS GTP cyclohydrolase 1 OS= Ralstonia pseudosolanacearum OX=1310165 GN=folE PE=3 SV =1
MLCSHDDDDPIRTAASHGIRRVRAFDAQRFELAVQSLLEASGIEIDTAHTGKTAQRVRELWQRRLLDGYDIDPAEALGHGFEDPRRDMVIIRSIAVHGVCPHHLLPFRGVAHVAYLPDGRLHGFGRIARMIDAISHRYTYQEWVTNEVAHALVAHGQARGAACLIEAEQLCLLMGENRRGDERVITQCYVGEFEQNMQARTEFLRAIKG

SEQ ID NO: 13732 - protein, 209 aa, Ralstonia solanacearum; identical to SEQ ID NO: 13731
  misc_feature (1)..(209): sp|Q8XZK8|GCH1_RALSO GTP cyclohydrolase 1 OS=Ralstonia solanacearum (strain GMI1000) OX=267608 GN=folE PE=3 SV =1

SEQ ID NO: 13733 - protein, 208 aa, Ralstonia solanacearum
  misc_feature (1)..(208): tr|A0A0S4TP02|A0A0S4TP02_RALSL GTP cyclohydrolase 1 OS= Ralstonia solanacearum OX=305 GN=folE PE=3 SV=1
MLCSHDDDPVRTAASHGIRRVRAFDAQRFELAVQSLLEASGIEIDTAHTGKTAQRVRELWQRRLLDGYDIDPAEALGHGFEDPRRDMVVIRSIAVHGVCPHHLLPFRGVAHVAYLPDGRLHGFGRIGRMIDAISHRYTYQEWVTNEVAHVLVAHGQARGAACLIEAEQLCLLMGENRRGDERVITQCYVGEFEQNMQARTEFLRAIKG

SEQ ID NO: 13734 - protein, 268 aa, Ralstonia sp.
  misc_feature (1)..(268): tr|U3G6W7|U3G6W7_9RALS GTP cyclohydrolase FolE2 OS=Rals tonia sp. 5_2_56FAA OX=658080 GN=folE2 PE=3 SV=1
MNDMNPAFAMPDVQSSHDTRQIPIQRVGVRGVRYPMSLQTPSGVLNTVGTYNLDVHLPADQKGTHMSRFVALLEEEREPLNLAQFQLLLEKMLEKLEADAGRIEVHFPYFVSKTAPVSGVQSLMDYEVTMIGEVRDGHTKVRVKALVPVTSLCPCSKKISQYGAHNQRSHITIDAELAADTPVEALIRMAEEEASCELWGLLKRPDEKFVTERAYENPKFVEDLVRDIAMRLNQDDRIVAYTLEAENFESIHNHSAYALIERDKRSDK

SEQ ID NO: 13735 - protein, 268 aa, Ralstonia sp.
  misc_feature (1)..(268): tr|A0A0J9DY98|A0A0J9DY98_9RALS GTP cyclohydrolase FolE2 OS=Ralstonia sp. MD27 OX=1676617 GN=folE2 PE=3 SV=1
MNDMNPAFAMPDVQSSHDTRQIPIQRVGVRGVRYPMSLQTPSGVQNTVGTYNLDVHLPADQKGTHMSRFVALLEEEREPLNLAQFQLLLEKMLEKLEADAGRIEVHFPYFVSKTAPVSGVQSLMDYEVTMIGEVRDGHTKVRVKALVPVTSLCPCSKKISQYGAHNQRSHITIDAELAADTPVESLIRMAEEEASCELWGLLKRPDEKFVTERAYENPKFVEDLVRDIAMRLNQDDRIVAYTLEAENFESIHNHSAYALIERDKRLDK

SEQ ID NO: 13736 - protein, 268 aa, Ralstonia syzygii
  misc_feature (1)..(268): tr|G3A083|G3A083_9RALS GTP cyclohydrolase FolE2 OS=Rals tonia syzygii R24 OX=907261 GN=folE2 PE=3 SV=1
MNDMNPAFVMPDVQSSHDTRQIPIQRVGVRGVRYPMSLQTPSGVQSTVGTFNLDVHLPADKKGTHMSRFVALLEEEREPLNLAQFQLLLEKMLEKLEADAGRIEVSFPYFISKTAPVSGVQSLMDYEVTMIGEVRDGHTTVRVKALVPVTSLCPCSKKISQYGAHNQRSHITIDAELAADTPVEALIRMAEEEASCELWGLLKRPDEKFVTERAYENPKFVEDLVRDIAMRLNEDDRIVAYTLEAENFESIHNHSAYALVERDKRRAS

SEQ ID NO: 13737 - protein, 222 aa, Raoultella electrica
  misc_feature (1)..(222): tr|A0A514EP26|A0A514EP26_9ENTR GTP cyclohydrolase 1 OS= Raoultella electrica OX=1259973 GN=folE PE=3 SV=1
MSALSKEAILVHEALVARGLETPLRPPVEEIDNETRKSLIAGHMTEIMQLLNLDLTDDSLMETPRRIAKMYVDEIFSGLDYARFPKITVIENKMQVDEMVTVRDITLTSTCEHHFVTIDGKATVAYIPKDSVIGLSKINRIVQFFSQRPQVQERLTQQILTALQTLLGTSNVAVSIDAVHYCVKARGIRDATSATTTTSLGGLFKSSQNTRQEFLRAVRHHN

SEQ ID NO: 13738 - protein, 222 aa, Raoultella ornithinolytica
  misc_feature (1)..(222): tr|A0A4R2XXF3|A0A4R2XXF3_RAOOR GTP cyclohydrolase 1 OS= Raoultella ornithinolytica OX=54291 GN=folE PE=3 SV=1
MSSLSKEAILVHEALVARGLETPLRPPVQEIDNETRKRLIAGHMTEIMQLLNLDLSDDSLMETPHRIAKMYVDEIFSGLDYARFPKITVIENKMQVDEMVTVRDITLTSTCEHHFVTIDGKATVAYIPKDSVIGLSKINRIVQFFSQRPQVQERLTQQILTALQTLLGTSNVAVSIDAVHYCVKARGIRDATSATTTTSLGGLFKSSQNTRQEFLRAVRHHS

SEQ ID NO: 13739 - protein, 222 aa, Raoultella ornithinolytica
  misc_feature (1)..(222): tr|A0A1Y6GKR2|A0A1Y6GKR2_RAOOR GTP cyclohydrolase 1 OS= Raoultella ornithinolytica OX=54291 GN=folE PE=3 SV=1
MSALSKEAILVHEALVARGLETPLRPPVQEIDNETRKSLIAGHMTEIMQLLNLDLTDDSLMETPRRIAKMYVDEIFSGLDYARFPKITVIENKMQVDEMVTVRDITLTSTCEHHFVTIDGKATVAYIPKDSVIGLSKINRIVQFFSQRPQVQERLTQQILTALQTLLGTSNVAVSIDAVHYCVKARGIRDATSATTTTSLGGLFKSSQNTRQEFLRAVRHHN

SEQ ID NO: 13740 - protein, 76 aa, Raoultella planticola
  misc_feature (1)..(76): tr|A0A0D8TWR5|A0A0D8TWR5_RAOPL GTP cyclohydrolase (Frag ment) OS=Raoultella planticola OX=575 GN=folE PE=4 SV=1
MSALSKEAILVHEALVARGLETPLRPPVQEIDNETRKSLIAGHMTEIMQLLNLDLTDDSLMETPRRIAKMYVDEIF

SEQ ID NO: 13741 - protein, 222 aa, Raoultella planticola; identical to SEQ ID NO: 13739
  misc_feature (1)..(222): tr|A0A2X2ED43|A0A2X2ED43_RAOPL GTP cyclohydrolase 1 OS= Raoultella planticola OX=575 GN=folE PE=3 SV=1

SEQ ID NO: 13742 - protein, 222 aa, Raoultella sp.; identical to SEQ ID NO: 13738
  misc_feature (1)..(222): tr|A0A509BVK5|A0A509BVK5_9ENTR GTP cyclohydrolase 1 OS= Raoultella sp. NCTC 9189 OX=2583577 GN=folE PE=3 SV=1

SEQ ID NO: 13743 - protein, 222 aa, Raoultella sp.
  misc_feature (1)..(222): tr|A0A4R3ZNY4|A0A4R3ZNY4_9ENTR GTP cyclohydrolase 1 OS= Raoultella sp. BIGb0138 OX=2485115 GN=folE PE=3 SV=1
MSALSKEAILVHEALVARGLETPLRPPVQEIDNETRKRLIAGHMTEIMQLLNLDLSDDSLMETPHRIAKMYVDEIFSGLDYARFPKITVIENKMQVDEMVTVRDITLTSTCEHHFVTIDGKATVAYIPKDSVIGLSKINRIVQFFSQRPQVQERLTQQILTALQTLLGTSNVAVSIDAVHYCVKARGIRDATSATTTTSLGGLFKSSQNTRQEFLRAVRHHN

SEQ ID NO: 13744 - protein, 309 aa, Raoultella terrigena
  misc_feature (1)..(309): tr|A0A3P8M2J9|A0A3P8M2J9_RAOTE GTP cyclohydrolase FolE2 OS=Raoultella terrigena OX=577 GN=folE2 PE=3 SV=1
MTLRKTLCPAMLPDVQSAKVASDAESLSWVGMEHIDLPVEIAGRPVSARVNAGINLLSSTDAEKGIHMSRLYLLLDELTQHEITPALLGTVLEGFLKSHRGRSDEASIDITGELLLSRKSLNSNHFGWKAYPIHLRAELNKGLTVTLKAGIPYSSTCPASAALSRHVAGLQFRSDFGNRIDRLPVEEVAEWLTDKGMPATPHSQRSWAWVTVWLHTDADSFPVNDVIDYAEIALGTAVQTVVKRSDEQAFAVANGQNLMFCEDAARRLSKAFHAAPFCEDFEIHVEHQESLHAHNAVARIYRKGTKNVT

SEQ ID NO: 13745 - protein, 222 aa, Raoultella terrigena; identical to SEQ ID NO: 13738
  misc_feature (1)..(222): tr|A0A1V2BQS2|A0A1V2BQS2_RAOTE GTP cyclohydrolase 1 OS= Raoultella terrigena OX=577 GN=folE PE=3 SV=1

SEQ ID NO: 13746 - protein, 235 aa, Raphidiopsis brookii; identical to SEQ ID NO: 7301
  misc_feature (1)..(235): tr|D4TRY5|D4TRY5_9CYAN GTP cyclohydrolase 1 OS=Raphidio psis brookii D9 OX=533247 GN=folE PE=3 SV=1

SEQ ID NO: 13747 - protein, 235 aa, Raphidiopsis curvata; identical to SEQ ID NO: 7302
  misc_feature (1)..(235): tr|A0A1Z4VCB7|A0A1Z4VCB7_9CYAN GTP cyclohydrolase 1 OS= Raphidiopsis curvata NIES-932 OX=1973482 GN=folE PE=3 S V=1

SEQ ID NO: 13748 - protein, 188 aa, Rarobacter faecitabidus
  misc_feature (1)..(188): tr|A0A542ZTI9|A0A542ZTI9_RARFA GTP cyclohydrolase 1 OS= Rarobacter faecitabidus OX=13243 GN=folE PE=3 SV=1
MAVDQERIAAAVREILLAVGEDPDRDGLRETPERVARSYAEVFSGLADDPAEVLETVFDIDHDEMILVKDIAVYSTCEHHLVPFHGVAHVAYIPSAQGHVTGLSKLARLVDVYAKRPQVQERLTTQIAEALVASLQPRGVAVVVECEHMCMSMRGVRKPGAKTVTSAVRGQMRDPATRAEVMALILGR

SEQ ID NO: 13749 - protein, 188 aa, Rarobacter incanus
  misc_feature (1)..(188): tr|A0A542SP74|A0A542SP74_9MICO GTP cyclohydrolase 1 OS= Rarobacter incanus OX=153494 GN=folE PE=3 SV=1
MAVDTERVAAAVREILLAVGEDPDRDGLRETPQRVARAYAEVFAGLGQSPADVLETVFDIDHDEMILVKDISVYSTCEHHLVPFHGVAHVAYIPSEQGSVTGLSKLARLVDVYAKRPQVQERLTTQIAEALVEYLHPRGVAVVLECEHLCMSMRGVRKPGAKTVTSAVRGQMRNPATRAEVMGLIHGR

SEQ ID NO: 13750 - protein, 197 aa, Rathayibacter caricis
  misc_feature (1)..(197): tr|A0A2T4UQF4|A0A2T4UQF4_9MICO GTP cyclohydrolase 1 OS= Rathayibacter caricis DSM 15933 OX=1328867 GN=folE PE=3 SV=1
MAVDRARIEAAVVELLAAIGDDPGREGLASTPRRFAEAYEEFFGESDVDPASHLDETFAVVEGEATAHPDGQTVIVRDLAFRSVCEHHLLPFVGVAHIAYRAGERVVGLGRLPRVVETVASRLQLQERLTEQIADVIQTGLAPEGVVVVVDAEHGCVRMRGPRQTRSSTVTVAARGTLAEPAARAEIIALIGAARGE

SEQ ID NO: 13751 - protein, 196 aa, Rathayibacter festucae
  misc_feature (1)..(196): tr|A0A3Q9UZS6|A0A3Q9UZS6_9MICO GTP cyclohydrolase 1 OS= Rathayibacter festucae DSM 15932 OX=1328866 GN=folE PE= 3 SV=1
MPVDRARIEAAVAELLAAIGEDPGREGLSTTPQRFADSYEEFFGEFDLDPASHLAETFAVVEEGEQPPATQTVVVRDLAFRSVCEHHLLPFAGVAHIAYRAGERVVGLGKLPRVVETVASRPQLQERLTEQIADVLDAGLSPEGVLVVVDAEHGCVRLRGARQRASSTVTVAARGTLADPAARAEIIALIGAAREA

SEQ ID NO: 13752 - protein, 196 aa, Rathayibacter iranicus
  misc_feature (1)..(196): tr|A0A316B422|A0A316B422_9MICO GTP cyclohydrolase 1 OS= Rathayibacter iranicus NCPPB 2253 = VKM Ac-1602 OX=1328 868 GN=folE PE=3 SV=1
MPVDKARIEAAVTEILAAIGENPGREGLVATPRRVAAAYEEFFTDFDTDAAAQLTETFAVVEDGQEAPLQQTIIVRDLVFRSVCEHHLLPFVGVVHIAYRPQERVVGLGRLPRVVDTVASRPQIQERLTEQIADALDDGLAPEGVLVVVDAEHGCVRMRGPRQAASSTVTVAARGSLAETAARAEIIALIGAARGR

SEQ ID NO: 13753 - protein, 195 aa, Rathayibacter oskolensis
  misc_feature (1)..(195): tr|A0A1X7NZN4|A0A1X7NZN4_9MICO GTP cyclohydrolase 1 OS= Rathayibacter oskolensis OX=1891671 GN=folE PE=3 SV=1
MPVDKARIEAAVVELLAAIGEDPGREGLASTPKRFAEAYEEFFGEFDLDPASHLVETFAVVEGGAPVDAQTVIIRDLAFRSVCEHHLLPFAGVAHIAYRAGDRVVGLGKLPRIVETVASRPQLQERLTEQVADVIDTGLSPEGVLVVVDAEHGCVRMRGARQTSSSTVTVAARGTLAEPAARAEIIALIGAARGE

SEQ ID NO: 13754 - protein, 196 aa, Rathayibacter rathayi
  misc_feature (1)..(196): tr|A0A286HC54|A0A286HC54_RATRA GTP cyclohydrolase 1 OS= Rathayibacter rathayi NCPPB 2980 = VKM Ac-1601 OX=13288 65 GN=folE PE=3 SV=1
MPVDKTRIEAAVAEILAAIGEDPGREGLTETPRRFAEAYEEFFGGFDADAAAELTETFAVVEGGQESSLDQTVIVRDLAFRSVCEHHLLPFLGVAHIAYRPRERVVGLGRLPRVVETVASRPQIQERMTEQIADALEQGLDPEGVLVVVDAEHGCVRMRGPRQTASSTVTVAARGSLADPAARAEIIALIGAARGE

SEQ ID NO: 13755 - protein, 196 aa, Rathayibacter rathayi; identical to SEQ ID NO: 13754
  misc_feature (1)..(196): tr|A0A2S5XV87|A0A2S5XV87_RATRA GTP cyclohydrolase 1 OS= Rathayibacter rathayi OX=33887 GN=folE PE=3 SV=1

SEQ ID NO: 13756 - protein, 194 aa, Rathayibacter sp.
  misc_feature (1)..(194): tr|A0A0Q5AFN8|A0A0Q5AFN8_9MICO GTP cyclohydrolase 1 OS= Rathayibacter sp. Leaf294 OX=1736326 GN=folE PE=3 SV=1
MPVDKARIEAAVVELLAAIGEDPGREGLTSTPKRFAEAYAEFFGEFELDPASHLDETFAVVEGGRAEQQTVIVRDLSFRSVCEHHLLPFVGVAHIAYRAGDRVIGLGKLPRIVETVASRPQLQERLTEQVAEVIDSGLNPEGVLVVVDAEHGCVRMRGARQTASSTVTVAARGTLAEPAARAEIIALIGVARGE

SEQ ID NO: 13757 - protein, 196 aa, Rathayibacter sp.
  misc_feature (1)..(196): tr|A0A2S5XJE9|A0A2S5XJE9_9MICO GTP cyclohydrolase 1 OS= Rathayibacter sp. AY1C5 OX=2080538 GN=folE PE=3 SV=1
MPVDKARIEAAVAEILAAIGDDPGREGLLDTPRRFAEAYEEFFGGFDDDAAAQLTETFAVVEGGQESPLDQTVVVRDLAFRSVCEHHLLPFLGVAHIAYRPRERVVGLGRLPRVVETVASRPQIQERMTEQIADALEQGLAPEGVLVVVDAEHGCVRMRGPRQTASSTVTVAARGSLADPAARAEIIALIGAARGE

SEQ ID NO: 13758 - protein, 196 aa, Rathayibacter tanaceti
  misc_feature (1)..(196): tr|A0A162GFD2|A0A162GFD2_9MICO GTP cyclohydrolase 1 OS= Rathayibacter tanaceti OX=1671680 GN=folE PE=3 SV=1
MPVDKARIEAAVAEILAAIGDDPGREGLAATPRRVAEACEEFFGEFGADAAEQLTETFAVVEGGQESALDQTVIVRDLAFRSVCEHHLLPFLGFAHIAYRPRERVVGLGRLPRVVDTVASRPQLQERLTEQIADALVEGLAPEGVLVVVDAEHGCVRMRGPRQTASSTVTVAARGSLAEPAARAEIVALIGAPRGQ

SEQ ID NO: 13759 - protein, 271 aa, Rathayibacter tanaceti
  misc_feature (1)..(271): tr|A0A168G8D2|A0A168G8D2_9MICO Dinuclear metal center Y bgI/SA1388 family protein OS=Rathayibacter tanaceti OX= 1671680 GN=ACH61_00982 PE=4 SV=1
MPLLRDVHAVIDRLWPEAAAESWDTPGLVTGDPDSSVERILLTVDVVADTVSEAVDGGFQLLVAHHPLLLRGVTSIAEDGYKGRLLAELIRGGCALVSAHTNADIVTDGVSDVIATRLGLTGTTPLVPGAEPSIGLGRVGDLPEEVTLGRLAAAVAELLPATAGGVRAAGGYETPVRRVSLCGGAGDSLLDAAAVRTSDVYITADLRHHPASEAREKALHGTGPALIDVSHWASEWLWLDVAAAALREALPTVAVEVSETRTDPWDFAIVH

SEQ ID NO: 13760 - protein, 196 aa, Rathayibacter toxicus
  misc_feature (1)..(196): tr|A0A2S5Y4H9|A0A2S5Y4H9_9MICO GTP cyclohydrolase 1 OS= Rathayibacter toxicus OX=145458 GN=folE PE=3 SV=1
MPVDKARIEAAVAEILAAIGEDPTRAGIALTPRRFAEAYEEFFAEVDCDPYDALDETFAVSDSGEEALLEQTVIVRHLAFRSVCEHHLLPFAGVAHLAYSPRERVVGLGRLSRVVAAVASRLQLQERMTEQVVDVLDRGLSPRGALVVLDAEHGCVRMRGPRETSSSTITIAARGCLAEPAARAEIIALLGAARRE

SEQ ID NO: 13761 - protein, 196 aa, Rathayibacter toxicus
  misc_feature (1)..(196): tr|A0A0C5BIU7|A0A0C5BIU7_9MICO GTP cyclohydrolase 1 OS= Rathayibacter toxicus OX=145458 GN=folE PE=3 SV=1
MPVDKARIEAAVAEILAAIGEDPTRAGIALTPRRFAEAYEEFFAEVDCDPYDALDETFAVSDSGEEALLEQTVIVRHLAFRSVCEHHLLPFAGVAHLAYSPRERVVGLGRLSRVVATVASRLQLQERMTEQVVDVLDRGLSPRGALVVLDAEHGCVRMRGPRETSSSTITIAARGCLAEPAARAEIIALLGAARRE

SEQ ID NO: 13762 - protein, 196 aa, Rathayibacter tritici
  misc_feature (1)..(196): tr|A0A160KUK0|A0A160KUK0_9MICO GTP cyclohydrolase 1 OS= Rathayibacter tritici OX=33888 GN=folE PE=3 SV=1
MPVDKARIEAAVAEILAAIGDDPGREGLIDTPRRCAEAYEEFFGGFDADAAAQLSETFAVVEGGQESPVDQTVIVRDLAFRSVCEHHLLPFLGIAHIAYRPRQRVVGLGRLPRMVETVASRPQIQERMTEQIADALEQGLDPEGALVVVDAEHDCVRMRGPRQTDSSTVTVAARGSLADPAARAEIIALIGAARGE

SEQ ID NO: 13763 - protein, 231 aa, Reichenbachiella agariperforans
  misc_feature (1)..(231): tr|A0A1M6TPI0|A0A1M6TPI0_9BACT GTP cyclohydrolase 1 OS= Reichenbachiella agariperforans OX=156994 GN=folE PE=3 SV=1
MKQKETMSNTPLDNDDILDDHVASSYDTPLRPDAFEMDDELKKELIAKHFKEIMQILGMDLTDDSLAGTPRRVAKMYVEEVFSGLNPKNKPKARLFENKFGYNQMLVEKDITFYSHCEHHFVPIYGKAHVAYISSGEVIGLSKINRIVQYYSKRPQVQERLTVQIANELRKVLKTEDVGVVIDANHMCVSSRGVGDTNSKTGTAHFSGKFLEEKYKNEFLNYINSPGNGMV

SEQ ID NO: 13764 - protein, 227 aa, Reichenbachiella faecimaris
  misc_feature (1)..(227): tr|A0A1W2GEM1|A0A1W2GEM1_9BACT GTP cyclohydrolase 1 OS= Reichenbachiella faecimaris OX=692418 GN=folE PE=3 SV=1
MKQKETMSNTPSDDVIDDLDHVATSFDTPLRADAFEMDDELKIELISKHFKEIMQVLGLDLNDDSLKGTPNRVAKMYVQEVFSGLNPKNKPHARLFENKFGYDQMLVEKEITFYSHCEHHFVPIYGKAHVAYISSGKVIGLSKINRIVQYYAKRPQVQERMTVQIANELRSVLKTEDVAVVIDANHMCVSSRGVGDTNSKTGTAHFSGKFTNEDTKKEFLNYINTPA

SEQ ID NO: 13765 - protein, 225 aa, Reichenbachiella sp.
  misc_feature (1)..(225): tr|A0A2G5L552|A0A2G5L552_9BACT GTP cyclohydrolase 1 OS= Reichenbachiella sp. 5M10 OX=1889772 GN=folE PE=3 SV=1
MSNTPLDNDDILDDHVASSYDTPLRPDAFEMDDELKKELIAKHFKEIMQILGMDLTDDSLAGTPRRVAKMYVEEVFSGLNPKNKPKARLFENKFGYNQMLVEKDITFYSHCEHHFVPIYGKAHVAYISSGEVIGLSKINRIVQYYSKRPQVQERLTVQIANELRKVLKTEDVGVVIDANHMCVSSRGVGDTNSKTGTAHFSGKFLEEKYKNEFLNYINSPGNGMV

SEQ ID NO: 13766 - protein, 213 aa, Reinekea blandensis
  misc_feature (1)..(213): tr|A4BK59|A4BK59_9GAMM GTP cyclohydrolase 1 OS=Reinekea blandensis MED297 OX=314283 GN=folE PE=3 SV=1
MAVSSEAKAVRDRLIEMGLETPMVEQTLTKAERQSRIESLMTDVMGALALDLSDDSLAETPARIAKMFVNEIFSGLDYEHFPKITLIENKMSVSEMIRVKDIDLTSTCEHHFVTIDGTADVAYIPAKRIIGLSKINRIVRFFAQRPQVQERLNQQVLVALQTLLGTEDVAVRMNAVHYCVKARGVMDSTSSTETLSLGGAFLNDRDVRRDFVR

SEQ ID NO: 13767 - protein, 28 aa, Reinekea blandensis
  misc_feature (1)..(28): tr|A4BK58|A4BK58_9GAMM GTP cyclohydrolase I OS=Reinekea blandensis MED297 OX=314283 GN=folE PE=4 SV=1
MDFFLTHYGNIRGLIDDGCRSDGCQNDE

SEQ ID NO: 13768 - protein, 213 aa, Reinekea forsetii
  misc_feature (1)..(213): tr|A0A2K8KTH2|A0A2K8KTH2_9GAMM GTP cyclohydrolase 1 OS= Reinekea forsetii OX=1336806 GN=folE PE=3 SV=1
MAISVEAHAVHKRLLELGLETPVMEQKLTPAAQIEKIEGLMHQVMGALALDLTDDSMAETPHRIAKMYVNEIFSGLDYNKFPKITLIENKMSATEMIRIRDIELTSTCEHHFVTIDGFADVAYIPGQRIIGLSKINRIVRFFAQRPQVQERLNQQVLVALQTLLDTEDVAVKINATHYCVKARGVMDSHSSTETLSLGGQFLTDRDLRRDFVR

SEQ ID NO: 13769 - protein, 213 aa, Reinekea marinisedimentorum
  misc_feature (1)..(213): tr|A0A4R3IC64|A0A4R3IC64_9GAMM GTP cyclohydrolase 1 OS= Reinekea marinisedimentorum OX=230495 GN=folE PE=3 SV=1
MPISAEALAVQKRLIELGLETPMVEQTLSEAEQKSRIEVLMKEVMQVLALDLSDDSLAETPERMAKMYVSEIFSGLNYENFPKITLIENKMGVREMIRVKDICLTSTCEHHFVTIDGTADVAYIPKDRIIGLSKINRIVGFFAQRPQVQERLNQQVLIALQTLLGTDDVAVKMNATHYCVKARGVMDSTSSTETLSLGGKFLSDRDLRRDFVR

SEQ ID NO: 13770 - protein, 213 aa, Reinekea sp.
  misc_feature (1)..(213): tr|A0A5C8ZB04|A0A5C8ZB04_9GAMM GTP cyclohydrolase 1 OS= Reinekea sp. SSH23 OX=2593301 GN=folE PE=3 SV=1
MSISAEALAVHNKLIELGMETPMLQQRLKTSEQKAKIETLMREVMQVLALDLSDDSLSETPERIAKMYVSEVFSGLSYENFPKITLIENKMGVSEMIRVKDIGLTSTCEHHFVTIDGTADVAYIPDQKIIGLSKINRIVRFFAQRPQVQERLNQQVLIALQTLLGTDNVAVKMNATHFCVKSRGVMDSTSSTETLSLGGRFLTDKDLRREFSL

SEQ ID NO: 13771 - protein, 201 aa, Renibacterium salmoninarum
  misc_feature (1)..(201): tr|A9WUR0|A9WUR0_RENSM GTP cyclohydrolase 1 OS=Renibact erium salmoninarum (strain ATCC 33209 / DSM 20767 / JCM 11484 / NBRC 15589 / NCIMB 2235) OX=288705 GN=folE PE= 3 SV=1
MCDVDEEAQVPAKSVVDLARIEAAVREILIAIGENPDRSGLMETPQRVARAYSEVFSGLNQDPAEVLSRTFDISHQELVLVKDIPFYSTCEHHLVPFHGSAHVGYIPSADGKVTGLSKLARLVDVFAKRPQVQERLTTQIVDALVEHLKPRGAIVVVECEHMCMSMRGVRKPGAKTVTSAVCGILHDPATRAEAMSLILGK

SEQ ID NO: 13772 - protein, 208 aa, Reyranella soli
  misc_feature (1)..(208): tr|A0A512NJR9|A0A512NJR9_9PROT GTP cyclohydrolase 1 OS= Reyranella soli OX=1230389 GN=folE PE=3 SV=1
MNKMVKKSEMVSLATGLTRPSRDEAEAAVRTLIRWAGDDPDREGLVGTPDRVVRSYEEFFRGYDEDPREMLQRTFEEVEGYDEVVVLRDIRLESHCEHHMVPIIGKVHVGYLPDKRVVGISKLARVVDAFAFRLQIQEKLTAQIANTLQEVLQPRGVAVVIEAAHQCMTTRGVHKSDVAMVTSRMLGAFRDNGETRREFLTMIGRTSV

SEQ ID NO: 13773 - protein, 214 aa, Reyranella sp.
  misc_feature (1)..(214): tr|A0A5C5SKH6|A0A5C5SKH6_9PROT GTP cyclohydrolase 1 OS= Reyranella sp. CPCC 100927 OX=2599616 GN=folE PE=3 SV=1
MNKVLKRPDLGSAAVAASQVKPSRAEAEEAVRTLIRWAGDDPDREGLVGTPDRVVRSYEEFFAGYAEDPREILARTFEETDGYDEMVVLRDIRLESYCEHHIVPIIGKAHVGYLPAHRVVGISKLARIVEAYAKRLQIQEKMTAQIANCIQEVLEPRGVAVVIEAAHQCMTTRGIRKPGVAMVTSRMLGSFRDDPSTRREFLAMIGKNGAGGYA

SEQ ID NO: 13774 - protein, 208 aa, Reyranella sp.
  misc_feature (1)..(208): tr|A0A521RR64|A0A521RR64_9PROT GTP cyclohydrolase 1 OS= Reyranella sp. OX=1929291 GN=folE PE=3 SV=1
MNKMAKPREIVSLATGLPRPSREEAEAAVRTLIRWAGDDPGREGLAGTPDRVVRSYEEFFAGYDQDPRDMLQRTFEEVEGYDEVVALRDIRLESHCEHHMVPIIGRVHVGYLPDKRVVGISKLARVVDAYALRLQIQEKLTAQIANTLQEVLQPRGVAVVIEAAHQCMTTRGVHKSDVTMVTSRMLGAFRDNGETRREFLSMIGRTSV

SEQ ID NO: 13775 - protein, 214 aa, Rheinheimera nanhaiensis
  misc_feature (1)..(214): tr|I1DWR4|I1DWR4_9GAMM GTP cyclohydrolase 1 OS=Rheinhei mera nanhaiensis E407-8 OX=562729 GN=folE PE=3 SV=1
MLSQEAILVRSALEAQGLETPMLENGLSRDQKYSKISALMTEVVSTLGLDLQDDSLSETPHRIAKMYVDEIFCGLDYKNFPKIALIDNKMQVKEMVKVKDISFTSTCEHHFVTIDGSATVAYIPEKRIIGLSKINRIVRFFAQRPQVQERLTQQILVALQTLLQTKNVAVTMDAVHYCVKSRGVMDVNSKTQTTALGGIFKDDGRTRAEFLARY

SEQ ID NO: 13776 - protein, 214 aa, Rheinheimera pacifica
  misc_feature (1)..(214): tr|A0A1H6MTI2|A0A1H6MTI2_9GAMM GTP cyclohydrolase 1 OS= Rheinheimera pacifica OX=173990 GN=folE PE=3 SV=1
MLSEEAVLVRSALEALGLETPMLDNGLSRDQKYDKINSLMAEVVSTLGLDLRDDSLSETPHRIAKMYVDEIFGGLNYANFPKMALIENKMQVKEMVKVKDISFTSTCEHHFVTIDGYATVAYIPEKRIIGLSKINRIVRFFAQRPQVQERLTQQVLVAMQTLLQTQNVAVTMEAVHYCVKSRGVMDVNSKTQTTALGGIFKDDGRTRAEFLARY

SEQ ID NO: 13777 - protein, 304 aa, Rheinheimera pacifica
  misc_feature (1)..(304): tr|A0A1H6NB34|A0A1H6NB34_9GAMM GTP cyclohydrolase FolE2 OS=Rheinheimera pacifica OX=173990 GN=folE2 PE=3 SV=1
MHFPALADTAHAASPAFAVALDNVGMQHIDLILTLSDLPQHPLAVKADVSVNLPQPDKKGIHMSRLYQHLYQWVQVQSVSPATLHDLLTILLQSQQECASASASLHLSAQLLLRRPALKTPALAGFKAYPLTISATLINNELNIELSVVIGYSSTCPCSASLSRQLLSEQFQQQFAGQPVVDTALASQWLLQHASLATPHSQRSTAQLRIKLNPAQHDFGILPLIDRAEQALATPLQTAVKRADEQEFARLNGANLMFVEDAARRLHAALSQHYDAFSIAVAHHESLHPHDAVANVTFAANSNG

SEQ ID NO: 13778 - protein, 215 aa, Rheinheimera salexigens
  misc_feature (1)..(215): tr|A0A1E7Q537|A0A1E7Q537_9GAMM GTP cyclohydrolase 1 OS= Rheinheimera salexigens OX=1628148 GN=folE PE=3 SV=1
MLSKEATLVRDTLIARGLETPMLDNGLSRDEKYTKVRQLMSEVVSTLGLDLQDDSLNETPHRIAKMYVDEIFGGLNYANFPKMSLIDNKMQVSEMIKVKDISFTSTCEHHFVTIDGYAMVAYIPSGRIIGLSKINRIVRFFAQRPQVQERLTQQVLVALQTLLETDDVAVTMEAVHYCVKSRGVMDVNSKTQTTALGGSFKDDARTRAEFLANNG

SEQ ID NO: 13779 - protein, 214 aa, Rheinheimera sp.
  misc_feature (1)..(214): tr|A0A4P6VVF7|A0A4P6VVF7_9GAMM GTP cyclohydrolase 1 OS= Rheinheimera sp. D18 OX=2545632 GN=folE PE=3 SV=1
MLSDEAILVRRALEAQGLETPMQHNGLSRDQKYNKINALMSEVVSTLGLDLADDSLRETPHRIAKMYVDEIFGGLDYANFPKMSLIENKMQVKEMVKVKEISFTSTCEHHFVTIDGTATVAYLPDARIIGLSKINRIVRFFSQRPQVQERLTQQILVALQTLLQTDNVAVTMEAVHYCVKSRGVMDVTSKTQTTALGGTFKEDARTRAEFLARY

SEQ ID NO: 13780 - protein, 213 aa, Rheinheimera sp.
  misc_feature (1)..(213): tr|A0A486XRC7|A0A486XRC7_9GAMM GTP cyclohydrolase 1 OS= Rheinheimera sp. BAL341 OX=1708203 GN=folE PE=3 SV=1
MLSDEAILVRSALEAQGLETPMLDNGLSRDEKYKKISALMTEIVSTLGLDLQDDSLNETPHRIAKMYVDEVFSGLDYRNFPKIALIENKMQVNEMVKVKDISFTSTCEHHFVTIDGYATVAYIPNQRIIGLSKINRIVRFFAQRPQVQERLTQQILIALQTLLQTKNVAVTMEAIHYCVKSRGVMDVNSKTQTTALGGIFKDDGRTRAEFLAR

SEQ ID NO: 13781 - protein, 214 aa, Rheinheimera tuosuensis
  misc_feature (1)..(214): tr|A0A285J767|A0A285J767_9GAMM GTP cyclohydrolase 1 OS= Rheinheimera tuosuensis OX=1323745 GN=folE PE=3 SV=1
MLSEEAILVRSALEAQGLETPMLDNGLSRDEKYQKISQLMTEVVSTLGLDLTDDSLSETPHRIAKMYVDEIFGGLNYQHFPKIALIENKMQVREMVKVKDISFTSTCEHHFVTIDGSATVAYIPQGRIIGLSKINRIVRFFAQRPQVQERLTQQILLALQTLLQTKDVAVTMEAVHYCVKSRGVMDMNSKTQTTALGGIFKDDGRTRAEFLARY

SEQ ID NO: 13782 - protein, 271 aa, Rhizobacter sp.
  misc_feature (1)..(271): tr|A0A0Q7A7Y2|A0A0Q7A7Y2_9BURK GTP cyclohydrolase FolE2 OS=Rhizobacter sp. Root404 OX=1736528 GN=folE2 PE=3 SV =1
MTNLKDALHIPDTQSARDERHLAIQRVGVKSVRYPLQLRIGNTVSPTVAVWSLDVALPAEQKGTHMSRFVAWLDGLDKPLDAPALRAEMALMLDKLHATEGVIDAQFPFFLRKRAPVTGVQSLLEYQGRWIAEARAGKGSPAGAVAPVTIWAEVVVPVKSLCPCSKEISDYGAHNQRSHVTIRVELLGDIGWQELVRFAEDSASSEIWPMLKRADEKWVTERAYENPKFVEDLVRDVALRLNTDARIGRYSVDVENFESIHNHSAFARIER

SEQ ID NO: 13783 - protein, 266 aa, Rhizobacter sp.
  misc_feature (1)..(266): tr|A0A1M7QWY4|A0A1M7QWY4_9BURK GTP cyclohydrolase FolE2 OS=Rhizobacter sp. OV335 OX=1500264 GN=folE2 PE=3 SV=1
MNHMTNLKDALHIPDTQSERDERHLAIQRVGVKDVRYPLQLKFGKTVQPTIGQWELDVALPAEQKGTHMSRFVAWLDALHEPLDADGLKLRFAEMLEKLHATHGRVEVKFPFFIRKRAPVSGVESLLDYQGSWVAEMRDGQPVVWSQVLVPVKSLCPCSKEISDYGAHNQRSHVTIRAELLQDVPWGELVRFAENAASSEIWPMLKRADEKWVTEHAYENPKFVEDLVRDVALALNGDARIGRYTVDVENFESIHNHSAFARIERL

SEQ ID NO: 13784 - protein, 204 aa, Rhizobiaceae bacterium
  misc_feature (1)..(204): tr|A0A4U6A1U7|A0A4U6A1U7_9RHIZ GTP cyclohydrolase 1 OS= Rhizobiaceae bacterium LC148 OX=1120689 GN=folE PE=3 SV =1
MDAIVKNFPASSQTQARPTQQEAEEAVRVLLRWAGDDPMREGLLDTPKRVATAYMELFGGYEQSPEEVLGRTFEEVSGYDDIVLVRDIPFHSHCEHHMLPIIGKAHVAYLPNGRVLGLSKIARVVDIFARRLQTQENMTAQIANVIQDVLKPRGVAVMLEAKHMCMEMRGVEKQGSDTLTTTFTGEFKGNAADQARFLSLIRGR

SEQ ID NO: 13785 - protein, 204 aa, Rhizobiaceae bacterium
  misc_feature (1)..(204): tr|A0A4Q3GX35|A0A4Q3GX35_9RHIZ GTP cyclohydrolase 1 OS= Rhizobiaceae bacterium OX=1913961 GN=folE PE=3 SV=1
MNTITDHEQFSAAGDDAVPHEVQESIRALIRWAGDDPAREGLRDTPRRVARAWREYCRGYDEDPGEHLARTFDEVGGYDEIVMLRAIPFQSHCEHHMAPITGTATIAYLPAGRVVGISKLARVLNGYASRLQVQERLTAQVAQAIWDELAPRGVAVMIEAQHGCMTGRGVKTSGVGMITSRMLGCFLDDPQSRNEVLSLMNSRH

SEQ ID NO: 13786 - protein, 237 aa, Rhizobiales bacterium
  misc_feature (1)..(237): tr|A0A258J2F4|A0A258J2F4_9RHIZ GTP cyclohydrolase 1 OS= Rhizobiales bacterium 32-66-11 OX=1970549 GN=folE PE=3 SV=1
MDAVVKLLRAQAENEAKARKHVKHLQAQAKRHDDAPQDAAADEAHDPARPSKREAEAAVRTLLAYIGEDPDREGLLETPHRVVKAYGELFSGYRHDAAEALDRTFGEIGNFDDFVLVRDIPFYSHCEHHMVPFVGKAHVAYFPVERVVGLSKIARVVDIYAKRLQTQEHLTSQIISALDETLKPRGVAVMIEAEHMCMAMRGITKAGVSTITSQFTGAFRDDPAEQVRFITLVRARG

SEQ ID NO: 13787 - protein, 197 aa, Rhizobiales bacterium
  misc_feature (1)..(197): tr|A0A1H4QS48|A0A1H4QS48_9RHIZ GTP cyclohydrolase 1 OS= Rhizobiales bacterium GAS188 OX=1884351 GN=folE PE=3 SV =1
MTSPLRRPSREEAEAAVRTLIRWAGDDPTREGLVETPRRVVRAYEQLFDGYEKDPSHALARVFEEAGGYDDLVLVRDIPFFSHCEHHMLPFFGKAHVGYYSSSGVVGLSKLAHVIDIFSRRLQTQETMSAEIVQAIEESLMPRGVALLVEAEHLCMSMRGVRKVGASTVTTQFSGVFRDDPAEQAKFLTMLCQKTAG

SEQ ID NO: 13788 - protein, 204 aa, Rhizobium acidisoli
  misc_feature (1)..(204): tr|A0A0N1DKV4|A0A0N1DKV4_9RHIZ GTP cyclohydrolase 1 OS= Rhizobium acidisoli OX=1538158 GN=folE PE=3 SV=1
MDAIVKNFPQTNRDSDRPSQQEAEEAVRVLLRWAGENPTREGLIETPARVVKSYRELFAGYDMAPEDVLGRTFEEVAGYDDMVLVKDIPFFSHCEHHMVPIIGKAHVAYMPDGRVLGLSKIARVVEIYGRRLQTQETMTAQIARAIDDTLNPRGVAVMIEAEHMCMAMRGVQKQGSTTLTTTFTGTFKTEPADQARFMTMVRSR

SEQ ID NO: 13789 - protein, 204 aa, Rhizobium aethiopicum
  misc_feature (1)..(204): tr|A0A1C3XWG7|A0A1C3XWG7_9RHIZ GTP cyclohydrolase 1 OS= Rhizobium aethiopicum OX=1138170 GN=folE PE=3 SV=1
MDAIVKNFPQPNRDSDRPSQQEAEEAVRVLLRWAGDNPAREGLIETPARVAKAYRELFAGYDMAPEDVLGRTFEEVAGYDDMVLVKDIPFYSHCEHHMVPIIGKAHVAYMPDGRVLGLSKIARVVEIYGRRLQTQETMTAQIARAIDDTLNPRGVAVMIEAEHMCMAMRGVQKQGSTTLTTTFTGTFKTEPADQARFMSMVRSR

SEQ ID NO: 13790 - protein, 204 aa, Rhizobium album
  misc_feature (1)..(204): tr|A0A2U2DT26|A0A2U2DT26_9RHIZ GTP cyclohydrolase 1 OS= Rhizobium album OX=2182425 GN=folE PE=3 SV=1
MDAIVKNFPRTGQESGRPTQQEAEDAVRVLLRWAGDDPLREGLLDTPMRVAKAYRELFSGYEQSPEDVLGRTFEEVAGYDDMVLVRDIPFFSHCEHHVVPIIGKAHVAYLPEGRVLGLSKIARVVEIYGRRLQTQESMTAQIARAIDETLAPRGVAVMIEAEHMCMAMRGVQKQGSTTLTTTFTGAFKTDAAEQVRFMTMVRSR

SEQ ID NO: 13791 - protein, 206 aa, Rhizobium altiplani
  misc_feature (1)..(206): tr|A0A109JLI5|A0A109JLI5_9RHIZ GTP cyclohydrolase 1 OS= Rhizobium altiplani OX=1864509 GN=folE PE=3 SV=1
MDAIIKNFPQTPADLDADRPSQKEAEDAVRTLLRWAGDDPTREGLLDTPARVAKAYRELFAGYDMDPEDVLGRTFEEVAGYDDMVLVRDIPFFSHCEHHMVPIIGKAHVAYMPDGKVLGLSKIARVVEIYGRRLQTQETMTAQIAKAIDDTLTPRGVAVMIEAEHMCMAMRGVQKQGSTTLTTTFTGTFKTEPADQARFMSMVRSR

SEQ ID NO: 13792 - protein, 204 aa, Rhizobium anhuiense
  misc_feature (1)..(204): tr|A0A3S0Q2F2|A0A3S0Q2F2_9RHIZ GTP cyclohydrolase 1 OS= Rhizobium anhuiense OX=1184720 GN=folE PE=3 SV=1
MDAIVKNFPQTNRDSDRPSQQEAEEAVRVLLRWAGDDPTREGLLDTPARVVKSYRELFSGYDMAAEDVLGRTFEEVAGYDDMVLVKDIPFFSHCEHHMVPIIGKAHVAYMPDGRVLGLSKIARVVEIYGRRLQTQETMTAQIARAIDDTLNPRGVAVMIEAEHMCMAMRGVQKQGSTTLTTTFTGTFKTEPADQARFMTMVRSR

SEQ ID NO: 13793 - protein, 202 aa, Rhizobium anhuiense
  misc_feature (1)..(202): tr|A0A3S0RZ02|A0A3S0RZ02_9RHIZ GTP cyclohydrolase 1 OS= Rhizobium anhuiense OX=1184720 GN=folE PE=3 SV=1
MDAIVTNACPVAASERPTQHQAEEAVRTLIRWAGDDPSREGLLDTPKRVAKAYRELFSGYATEPEDVLSKTFSEVGGYNEMVLVRDIEFHSHCEHHMVPFHGIAHIAYIPEQGVLGLSKMARLVDLYARRLQTQETMTAQIAKALEESLRPKGVAVMIEAEHMCMAMRGLRKQGAKTLTTAFAGQFEASASDQARFIMLARG

SEQ ID NO: 13794 - protein, 204 aa, Rhizobium azibense
  misc_feature (1)..(204): tr|A0A4R7ZT07|A0A4R7ZT07_9RHIZ GTP cyclohydrolase 1 OS= Rhizobium azibense OX=1136135 GN=folE PE=3 SV=1
MDAIVKNFPQTSRDAERPSQKEAEDAIRVLLRWAGDDPSREGLIDTPTRVAKAYRELFAGYEMDPEDVLGRTFEEVAGYDDMVLVKDIPFYSHCEHHMVPIIGKAHVAYMPDGKVLGLSKIARVVEIYGRRLQTQETMTAQIAKAIDDTLAPRGVAVMLEAEHLCMAMRGVQKQGSTTLTTTFTGIFKAEPAEQARFMTMVRSR

SEQ ID NO: 13795 - protein, 204 aa, Rhizobium azibense
  misc_feature (1)..(204): tr|A0A4R3Q7K6|A0A4R3Q7K6_9RHIZ GTP cyclohydrolase 1 OS= Rhizobium azibense OX=1136135 GN=folE PE=3 SV=1
MDAIVKNFPQTSRDTERPSQKEAEEAIRVLLRWAGDDPSREGLIDTPARVAKAYRELFAGYEMDPEDVLGRTFEEVAGYDDMVLVKDIPFYSHCEHHMVPIIGKAHVAYMPDGKVLGLSKIARVVEIYGRRLQTQETMTAQIAKAIDDTLAPRGVAVMLEAEHMCMAMRGVQKQGSTTLTTTFTGTFKAEPAEQARFMTMVRSR

SEQ ID NO: 13796 - protein, 204 aa, Rhizobium esperanzae
  misc_feature (1)..(204): tr|A0A246DVZ0|A0A246DVZ0_9RHIZ GTP cyclohydrolase 1 OS= Rhizobium esperanzae OX=1967781 GN=folE PE=3 SV=1
MDAIVKNFPQPNRDSDRPSQQEAEEAVRVLLRWAGDDPTREGLIETPARVAKAYRELFAGYDMAPEDVLGRTFEEVAGYDDMVLVKDIPFYSHCEHHMVPIIGKAHVAYMPDGRVLGLSKIARVVEIYGRRLQTQETMTAQIARAIDDTLNPRGVAVLIEAEHMCMAMRGVQKQGSTTLTTTFTGTFKTEPADQARFMSMVRSR

SEQ ID NO: 13797 - protein, 204 aa, Rhizobium etli
  misc_feature (1)..(204): tr|F2AJ19|F2AJ19_RHIET GTP cyclohydrolase 1 OS=Rhizobiu m etli CNPAF512 OX=993047 GN=folE PE=3 SV=1
MDAIVKNFPQPNRDSDRPSQQEAEEAVRVLLRWAGDDPTREGLIETPARVAKAYRELFAGYDMAPEDVLGRTFEEVAGYDDMVLVKDIPFYSHCEHHMVPIIGKAHVAYMPDGRVLGLSKIARVVEIYGRRLQTQETMTAQIARAIDDTLQPRGVAVMIEAEHMCMAMRGVQKQGSTTLTTTFTGTFKTEPADQARFMNMVRSR

SEQ ID NO: 13798 - protein, 204 aa, Rhizobium etli
  misc_feature (1)..(204): tr|A0A0A8GCW9|A0A0A8GCW9_RHIET GTP cyclohydrolase 1 OS= Rhizobium etli bv. phaseoli str. IE4803 OX=1432049 GN=f olE PE=3 SV=1
MDAIVKNFPQPNRDSDRPSQQEAEEAVRVLLRWAGDDPTREGLIETPARVAKAYRELFAGYDMAAEDVLGRTFEEVAGYDDMVLVKDIPFYSHCEHHMVPIIGKAHVAYMPDGRVLGLSKIARVVEIYGRRLQTQETMTAQIARAIDDTLQPRGVAVMIEAEHMCMAMRGVQKQGSTTLTTTFTGTFKTEPADQARFMSMVRSR

SEQ ID NO: 13799 - protein, 206 aa, Rhizobium favelukesii
  misc_feature (1)..(206): tr|W6RH48|W6RH48_9RHIZ GTP cyclohydrolase 1 OS=Rhizobiu m favelukesii OX=348824 GN=folE PE=3 SV=1
MDAIIKNFPQTPADLEADRPSRKEAEDAVRTLLRWAGDDPSREGLVDTPARVAKAYRELFAGYDMDPEDVLGRTFEEVAGYDDMVLVRDIPFFSHCEHHMVPIIGKAHVAYMPDGKVLGLSKIARVVEIYGRRLQTQETMTAQIAKAIDDTLSPRGVAVMIEAEHMCMAMRGVQKQGSTTLTTTFTGTFKTEPADQARFMTMVRSR

SEQ ID NO: 13800 - protein, 205 aa, Rhizobium fredii
  misc_feature (1)..(205): tr|A0A2A6LV82|A0A2A6LV82_RHIFR GTP cyclohydrolase 1 OS= Rhizobium fredii OX=380 GN=folE PE=3 SV=1
MDAIVKNFPLLDDTSGRPTQKEAEEAVRVLLRWAGEDPTREGLKDTPTRVVKSYREIFGGYDLIAEDVLGRTFEEVSGYDDIVLEKDIPFYSHCEHHMVPIIGKAHVAYLPNGRVLGLSKIARVVDIYARRLQTQESMTAQIARAIDETLDPRGVAVMIEAEHLCMAMRGIKKQGATTLTTTFTGAFKTEPTEQARFMTMLRGFK

SEQ ID NO: 13801 - protein, 205 aa, Rhizobium fredii; identical to SEQ ID NO: 13800
  misc_feature (1)..(205): tr|G9A4Z6|G9A4Z6_RHIFH GTP cyclohydrolase 1 OS=Rhizobiu m fredii (strain HH103) OX=1117943 GN=folE PE=3 SV=1

SEQ ID NO: 13802 - protein, 203 aa, Rhizobium freirei
  misc_feature (1)..(203): tr|N6UY83|N6UY83_9RHIZ GTP cyclohydrolase 1 OS=Rhizobiu m freirei PRF 81 OX=363754 GN=folE PE=3 SV=1
MDAIVKNFPQVVDSDRPSQKEAEDAVRVLLRWAGDDPQREGLLDTPARVAKAYRELFGGYDLNPEDVLGRTFEEVSGYDDIVLVRDIPFFSHCEHHMVPIIGKAHVGYLPNGRVLGLSKIARVVDIFGRRLQTQEAMTAQIANAIDDTLRPRGVAVMIEAEHMCMAMRGVQKQGSTTLTMTFTGAFKADAAEQARFMSLVRGR

SEQ ID NO: 13803 - protein, 204 aa, Rhizobium galegae
  misc_feature (1)..(204): tr|A0A5J5KQ86|A0A5J5KQ86_RHIGA GTP cyclohydrolase I Fol E OS=Rhizobium galegae OX=399 GN=folE PE=4 SV=1
MDAIVKNFPASKEKQVRPSQQEAEEAVRVLLRWAGDDPAREGLLDTPKRVAAAYRELFAGYEQSPEDVLGRTFEEVSGYDDIVLVRDIPFFSHCEHHMLPIIGKAHVAYLPNGRVLGLSKIARVVEIFGRRLQTQENLTAQIANAIEETLKPRGVAIMIEAEHLCMEMRGVQKQGSHTMTTTFTGEFKANAAEQARFFTLARNR

SEQ ID NO: 13804 - protein, 204 aa, Rhizobium gallicum
  misc_feature (1)..(204): tr|A0A1L5NII7|A0A1L5NII7_9RHIZ GTP cyclohydrolase 1 OS= Rhizobium gallicum OX=56730 GN=folE PE=3 SV=1
MDAIVKNFPQTSRDAERPSQKEAEDAIRVLLRWAGDDPSREGLTDTPTRVAKAYRELFAGYEMDPEDVLGRTFEEVAGYDDMVLVKDIPFYSHCEHHMVPIIGKAHVAYMPDGKVLGLSKIARVVEIYGRRLQTQETMTAQIAKAIDDTLAPRGVAVMLEAEHMCMAMRGVQKQGSTTLTTTFTGIFKAEPAEQARFMSMVRSR

SEQ ID NO: 13805 - protein, 204 aa, Rhizobium gallicum; identical to SEQ ID NO: 13794
  misc_feature (1)..(204): tr|A0A0B4X2F1|A0A0B4X2F1_9RHIZ GTP cyclohydrolase 1 OS= Rhizobium gallicum bv. gallicum R602 OX=1418105 GN=folE PE=3 SV=1

SEQ ID NO: 13806 - protein, 206 aa, Rhizobium grahamii
  misc_feature (1)..(206): tr|A0A370KS79|A0A370KS79_9RHIZ GTP cyclohydrolase 1 OS= Rhizobium grahamii OX=1120045 GN=folE PE=3 SV=1
MDAIIKNFPQTPADLDADRPSQKEAEDAVRTLLRWAGDDPSREGLLDTPSRVAKAYRELFAGYDMDPEDVLGRTFEEVAGYDDMVLVKDIPFFSHCEHHMVPIIGKAHVAYMPDGKVLGLSKIARVVEIYGRRLQTQETMTAQIARAIDETLAPRGVAVMIEAEHMCMAMRGVQKQGSTTLTTTFTGTFKTEPADQARFMSMVRSR

SEQ ID NO: 13807 - protein, 206 aa, Rhizobium grahamii; identical to SEQ ID NO: 13806
  misc_feature (1)..(206): tr|S3HL09|S3HL09_9RHIZ GTP cyclohydrolase 1 OS=Rhizobiu m grahamii CCGE 502 OX=990285 GN=folE PE=3 SV=1

SEQ ID NO: 13808 - protein, 203 aa, Rhizobium hainanense
  misc_feature (1)..(203): tr|A0A1C3WHI0|A0A1C3WHI0_9RHIZ GTP cyclohydrolase 1 OS= Rhizobium hainanense OX=52131 GN=folE PE=3 SV=1
MDAIVKNFPQVTDSERPSQQEAEDAIRVLLRWAGDDPRREGLLDTPARVAKAYRELFGGYELNPEDVLGRTFEEVSGYDDIVLERDVPFYSHCEHHMVPIIGKAHVAYLPSGRVLGLSKIARVVDIFARRLQTQEAMTAQIANAIDESLRPRGVAVMIDAEHMCMSMRGIKKQGSSTLTMTFTGAFKADPAEQARFMSLVRGR

SEQ ID NO: 13809 - protein, 204 aa, Rhizobium hidalgonense
  misc_feature (1)..(204): tr|A0A2A6KHF0|A0A2A6KHF0_9RHIZ GTP cyclohydrolase 1 OS= Rhizobium hidalgonense OX=1538159 GN=folE PE=3 SV=1
MDAIVKNFPQTNRDSDRPSQQEAEEAVRVLLRWAGENPTREGLIETPARVVKSYRELFSGYDMAPEDVLGRTFEEVAGYDDMVLVKDIPFFSHCEHHMVPIIGKAHVAYMPDGRVLGLSKIARVVEIYGRRLQTQETMTAQIARAIDDTLNPRGVAVMIEAEHMCMAMRGVQKQGSTTLTTTFTGTFKTEPADQARFMTMVRSR

SEQ ID NO: 13810 - protein, 210 aa, Rhizobium ipomoeae
  misc_feature (1)..(210): tr|A0A4S8NTU6|A0A4S8NTU6_9RHIZ GTP cyclohydrolase 1 OS= Rhizobium ipomoeae OX=1210932 GN=folE PE=3 SV=1
MDTSAAKANLEKLDRQVTREEVEDAIRTLLIWVGEDPYREGLLETPKRVAKAFKEYCAGYAMDPRDVLYRTFEDAVGYEDMVVLRHIPFESMCEHHLAPIVGNAHIAYIPVGRVVGISKLARLVDGYARRLQIQERLTFEIAQAIGEVLKPKGVACIIEAEHFCMKCRGVRKNGSRLTTSHFVGAFSSDHGLRQEFYQRLRCEALPTGAY

SEQ ID NO: 13811 - protein, 200 aa, Rhizobium ipomoeae
  misc_feature (1)..(200): tr|A0A4S8P8M2|A0A4S8P8M2_9RHIZ GTP cyclohydrolase 1 OS= Rhizobium ipomoeae OX=1210932 GN=folE PE=3 SV=1
MDAIVKKLTTEPRRPSQEDAEAAVRTLLLWAGDDPEREGLIDTPARVAKSFRELFAGYHADIEEVLGRTFEEVGGYKDMVLVRDIPFHSHCEHHMLPVIGKAHVGYLPDGRVLGLSKIARIVDVFAKRLQTQENMTAQIAQAIDETLRPKGVAVFVEAEHMCMAMRGIQKSGSTTLTTTFKGAFDGNAAEQVRFMTMVRG

SEQ ID NO: 13812 - protein, 207 aa, Rhizobium jaguaris
  misc_feature (1)..(207): tr|A0A387FUW1|A0A387FUW1_9RHIZ GTP cyclohydrolase 1 OS= Rhizobium jaguaris OX=1312183 GN=folE PE=3 SV=1
MDAIVKNFPQALESNPELDRPSQKEAEDAVRVLLRWAGDDPQREGLLDTPTRVVKAYRELFAGYDMNPEDVLGRTFEEVSGYDDMVLVRDIPFFSHCEHHMVPIIGKAHVAYLPSGRVLGLSKIARVVEIFGRRLQTQEAMTAQIANAIDETLRPRGVAVMLEAEHMCMAMRGVQKQGSSTLTTTFTGAFKADPAEQVRFMTMVRSR

SEQ ID NO: 13813 - protein, 204 aa, Rhizobium laguerreae
  misc_feature (1)..(204): tr|A0A1S9GPJ9|A0A1S9GPJ9_9RHIZ GTP cyclohydrolase 1 OS= Rhizobium laguerreae OX=1076926 GN=folE PE=3 SV=1
MDAIVKNFPQTNRDSDRPSQQEAEEAVRVLLRWAGDDPTREGLLETPARVVKSYRELFSGYDMAAEDVLGRTFEEVAGYDDMVLVKDIPFYSHCEHHMVPIIGKAHVAYMPDGRVLGLSKIARVVEIYGRRLQTQETMTAQIARAIDDTLNPRGVAVLIEAEHMCMAMRGVQKQGSTTLTTTFTGTFKTEPADQARFMTMVRSR

SEQ ID NO: 13814 - protein, 204 aa, Rhizobium leguminosarum
  misc_feature (1)..(204): tr|A0A2K9Z2P7|A0A2K9Z2P7_RHILE GTP cyclohydrolase 1 OS= Rhizobium leguminosarum OX=384 GN=folE PE=3 SV=1
MDAIVKNFPQTNRDSDRPSQQEAEEAVRVLLRWAGDDPTREGLLETPARVVKSYRELFSGYDMAAEDVLGRTFEEVAGYDDMVLVKDIPFYSHCEHHMVPIIGKAHVAYMPDGRVLGLSKIARVVEIYGRRLQTQETMTAQIARAIDDTLHPRGVAVLIEAEHMCMAMRGVQKQGSTTLTTTFTGTFKTEPADQARFMTMVRSR

SEQ ID NO: 13815 - protein, 204 aa, Rhizobium leguminosarum
  misc_feature (1)..(204): tr|Q1MGA4|Q1MGA4_RHIL3 GTP cyclohydrolase 1 OS=Rhizobiu m leguminosarum bv. viciae (strain 3841) OX=216596 GN=f olE PE=3 SV=1
MDAIVKNFPQTTRDSDRPSQQEAEEAVRVLLRWAGDDPTREGLLETPARVVKSYRELFSGYDMAAEDVLGRTFEEVAGYDDMVLVKDIPFYSHCEHHMVPIIGKAHVAYMPDGRVLGLSKIARVVEIYGRRLQTQETMTAQIARAIDDTLNPRGVAVLIEAEHMCMAMRGVQKQGSTTLTTTFTGTFKTEPADQARFMTMVRSR

SEQ ID NO: 13816 - protein, 204 aa, Rhizobium loessense
  misc_feature (1)..(204): tr|A0A1G4U6J5|A0A1G4U6J5_9RHIZ GTP cyclohydrolase 1 OS= Rhizobium loessense OX=158890 GN=folE PE=3 SV=1
MDAIVKNFPQTSRDAERPSQKEAEDAIRVLLRWAGDDPSREGLIDTPTRVAKAYRELFAGYEMDPEDVLGRTFEEVAGYDDMVLVKDIPFYSHCEHHMVPIIGKAHVAYMPDGKVLGLSKIARVVEIYGRRLQTQETMTAQIAKAIDDTLAPRGVAVMLEAEHMCMAMRGVQKQGSMTLTTTFTGIFKAEPAEQARFMSMVRSR

SEQ ID NO: 13817 - protein, 211 aa, Rhizobium loti; identical to SEQ ID NO: 10554
  misc_feature (1)..(211): tr|A0A1A5IFT7|A0A1A5IFT7_RHILI GTP cyclohydrolase 1 OS= Rhizobium loti OX=381 GN=folE PE=3 SV=1

SEQ ID NO: 13818 - protein, 211 aa, Rhizobium loti
  misc_feature (1)..(211): tr|A0A316CC11|A0A316CC11_RHILI GTP cyclohydrolase 1 OS= Rhizobium loti OX=381 GN=folE PE=3 SV=1
MDAVIKKLMPQSAYMEKPVTDRPSEAEVEAAVRTLLRWTGDNPDREGLIDTPKRVAKAYREMFGGYDMCPAEELGRTFEEVAGYDDLVIVKDITFHSHCEHHMVPIIGKAHVGYLPDGKVVGLSKIARVVDIFAHRLQTQEALTAQIAGVIQDVLNPRGVAVMIEAEHMCMAMRGIRKQGSTTLTSTFTGVFKDTPEEQVRFVTMVRGGGV

SEQ ID NO: 13819 - protein, 203 aa, Rhizobium lusitanum
  misc_feature (1)..(203): tr|A0A1C3VID1|A0A1C3VID1_9RHIZ GTP cyclohydrolase 1 OS= Rhizobium lusitanum OX=293958 GN=folE PE=3 SV=1
MDAIVKNFPQVVESERPSQKEAEDAVRVLLRWAGDDPRREGLLDTPERVAKAYRELFAGYDMNPEDVLGRTFEEVAGYDDIVLVRDIPFFSHCEHHMVPIIGKAHVAYLPNGRVLGLSKIARVVEIFGRRLQTQEAMTAQIANAIDETLRPRGVAVMIDAEHMCMAMRGVQKQGSSTLTTTFTGAFKADPAEQVRFMSMVRGR

SEQ ID NO: 13820 - protein, 204 aa, Rhizobium meliloti
  misc_feature (1)..(204): sp|Q92QB4|GCH1_RHIME GTP cyclohydrolase 1 OS=Rhizobium meliloti (strain 1021) OX=266834 GN=folE PE=3 SV=1
MDAIVKNFPVLDDTGRPTQKEAEEAVRVLLRWAGEDPAREGLKDTPSRVAKAYREIFGGYDLVAEDVLGRTFEEVSGYDDIVLEKDIPFYSHCEHHMVPIIGKAHIAYLPNGRVLGLSKIARVVDIYARRLQTQEAMTAQIAKAIDETLMPRGVAVMIEAEHLCMAMRGIKKQGATTLTTTFTGAFKSEPAEQVRFMTMLRGFK

SEQ ID NO: 13821 - protein, 204 aa, Rhizobium meliloti; identical to SEQ ID NO: 13820
  misc_feature (1)..(204): tr|A0A222J6Y7|A0A222J6Y7_RHIML GTP cyclohydrolase 1 OS= Rhizobium meliloti OX=382 GN=folE PE=3 SV=1

SEQ ID NO: 13822 - protein, 206 aa, Rhizobium mesoamericanum
  misc_feature (1)..(206): tr|K0PPD4|K0PPD4_9RHIZ GTP cyclohydrolase 1 OS=Rhizobiu m mesoamericanum STM3625 OX=1211777 GN=folE PE=3 SV=1
MDAIIKNFPQTPVDLDADRPSQKEAEDAVRTLLRWAGDDPSREGLLDTPARVAKAYRELFAGYDMEPEDVLGRTFEEVAGYDDMVLVKDIPFFSHCEHHMVPIIGKAHVAYMPDGKVLGLSKIARVVEIYGRRLQTQETMTAQIAKAIDDTLAPRGVAVMIEAEHMCMAMRGVQKQGSTTLTTTFTGTFKTEPADQARFMSMVRSR

SEQ ID NO: 13823 - protein, 203 aa, Rhizobium miluonense
  misc_feature (1)..(203): tr|A0A1C3WPW5|A0A1C3WPW5_9RHIZ GTP cyclohydrolase 1 OS= Rhizobium miluonense OX=411945 GN=folE PE=3 SV=1
MDAIVKNFPQVVDSDRPSQKEAEDAVRVLLRWAGDDPQREGLLDTPARVAKAYRELFGGYDLNPEDVLGRTFEEVSGYDDIVLVRDIPFFSHCEHHMVPIIGKAHVGYLPNGRVLGLSKIARVVDIFGRRLQTQEAMTAQIANAIDDTLRPRGVAVMIEAEHMCMAMRGVQKQGSSTLTMTFTGAFKADAAEQARFMSLVRGR

SEQ ID NO: 13824 - protein, 204 aa, Rhizobium mongolense
  misc_feature (1)..(204): tr|A0A559SNG6|A0A559SNG6_9RHIZ GTP cyclohydrolase 1 OS= Rhizobium mongolense USDA 1844 OX=1079460 GN=folE PE=3 SV=1
MDAIVKNFPQTSRDAERPSQKEAEDAIRVLLRWAGDDPSREGLIDTPTRVAKAYRELFAGYEMDPEDVLGRTFEEVAGYDDMVLVKDIPFYSHCEHHMVPIIGKAHVAYMPDGKVLGLSKIARVVEIYGRRLQTQETMTAQIAKAIDDTLAPRGVAVMLEAEHMCMAMRGVQKQGSTTLTTTFTGIFKAEPAEQARFMTMVRSR

SEQ ID NO: 13825 - protein, 203 aa, Rhizobium multihospitium; identical to SEQ ID NO: 13808
  misc_feature (1)..(203): tr|A0A1C3WKH6|A0A1C3WKH6_9RHIZ GTP cyclohydrolase 1 OS= Rhizobium multihospitium OX=410764 GN=folE PE=3 SV=1

SEQ ID NO: 13826 - protein, 203 aa, Rhizobium naphthalenivorans
  misc_feature (1)..(203): tr|A0A512HCP2|A0A512HCP2_9RHIZ GTP cyclohydrolase 1 OS= Rhizobium naphthalenivorans OX=1118451 GN=folE PE=3 SV= 1
MGMDAIVNKLAPLDKRPSREEAEEAVRVLLRWAGDDPAREGLIDTPKRVANAYRELFSGYDADIEDVLGTTFEEVAGYDDIVLVRDIPFFSHCEHHVLPVIGKAHVAYLPDSRVLGLSKIARVVEVFGRRLQTQEAMTAQIATAIDETLRPQGVAVFIEAEHMCMAMRGVQKSGSTTLTTTFTGRFKDNAVEQARFMSMVRGR

SEQ ID NO: 13827 - protein, 208 aa, Rhizobium nepotum; identical to SEQ ID NO: 4188
  misc_feature (1)..(208): tr|A0A0D8K9R1|A0A0D8K9R1_9RHIZ GTP cyclohydrolase 1 OS= Rhizobium nepotum 39/7 OX=1368418 GN=folE PE=3 SV=1

SEQ ID NO: 13828 - protein, 205 aa, Rhizobium oryzae
  misc_feature (1)..(205): tr|A0A1Q9AXC0|A0A1Q9AXC0_9RHIZ GTP cyclohydrolase 1 OS= Rhizobium oryzae OX=464029 GN=folE PE=3 SV=1
MDAIIKSFPAPSGVDDRPTQKEAEDAVRVLLRWAGEDPDREGLRDTPARVAKSYRELFSGYDLAAEDVLGRTFEEVSGYDDMVLVKDIPFFSHCEHHMVPIIGHAHVAYLPQGRVLGLSKIARVVDIFGRRLQTQESMTAQIAAAIDDTLRPRGVAVMIEAEHLCMAMRGVQKQGATTLTTTFTGVFKSDPAEQARFMTFLRTQR

SEQ ID NO: 13829 - protein, 204 aa, Rhizobium oryzae
  misc_feature (1)..(204): tr|A0A1X7GGZ3|A0A1X7GGZ3_9RHIZ GTP cyclohydrolase 1 OS= Rhizobium oryzae OX=464029 GN=folE PE=3 SV=1
MDAIVKNFPASKEKQARPTLQEAEEAVRVLLRWAGDDPAREGLLDTPKRVAAAYRELFAGYEQSPEEVLGRTFEEVSGYDDIVLVRDIPFFSHCEHHMLPIIGKAHVAYLPKGRVLGLSKIARVVEIFGRRLQTQENLTAQIANAIEETLKPRGVAVMIEAEHMCMEMRGVQKRGSQTMTTTFSGEFKTNAAEQARFFTLVRNR

SEQ ID NO: 13830 - protein, 201 aa, Rhizobium oryziradicis
  misc_feature (1)..(201): tr|A0A1Q8ZPB9|A0A1Q8ZPB9_9RHIZ GTP cyclohydrolase 1 OS= Rhizobium oryziradicis OX=1867956 GN=folE PE=3 SV=1
MDAIVKKLTPEAGRPSRAEAEDAVRTLLRWAGEDITREGLLDTPKRVAKAYAELFSGYHISVEDALGTTFEEVGGYNDIVLVRDIPFFSHCEHHMLPVIGKAHVAYLPAGRVLGLSKIARVVDIFARRLQTQETMTAQIAEAIDTNLMPRGVAVMVDAEHMCMAMRGIQKSGSTTLTTTFTGEFKDNAAEQVRFMTMVRSR

SEQ ID NO: 13831 - protein, 204 aa, Rhizobium phaseoli; identical to SEQ ID NO: 13797
  misc_feature (1)..(204): tr|A0A0M3GIA9|A0A0M3GIA9_9RHIZ GTP cyclohydrolase 1 OS= Rhizobium phaseoli Ch24-10 OX=1128399 GN=folE PE=3 SV=1

SEQ ID NO: 13832 - protein, 204 aa, Rhizobium phaseoli
  misc_feature (1)..(204): tr|A0A2U3CYV2|A0A2U3CYV2_9RHIZ GTP cyclohydrolase 1 OS= Rhizobium phaseoli OX=396 GN=folE PE=3 SV=1
MDAIVKNFPQPNRDSDRPSQQEAEEAVRVLLRWAGDDPTREGLIETPARVAKAYRELFAGYDMAPEDVLGRTFEEVAGYDDMVLVKDIPFYSHCEHHMVPIIGKAHVAYMPDGRVLGLSKIARVVEIYGRRLQTQETMTAQIARAIDDTLQPRGVAVMIEAEHMCMAMRGVQKQGSTTLTTTFTGTFKTEPADQARFMSMVRSR

SEQ ID NO: 13833 - protein, 204 aa, Rhizobium pisi
  misc_feature (1)..(204): tr|A0A3R9AVJ8|A0A3R9AVJ8_9RHIZ GTP cyclohydrolase 1 OS= Rhizobium pisi OX=574561 GN=folE PE=3 SV=1
MDAIVKNFPQTNRESDRPSQQEAEEAVRVLLRWAGDDPAREGLLETPARVVKAYRELFAGYDMAPEDVLGRTFEEVAGYDDMVLVKDIPFYSHCEHHMVPIIGKAHVAYMPDGRVLGLSKIARVVEIYGRRLQTQETMTAQIARAIDDTLNPRGVAVMIEAEHMCMAMRGVQKQGSTTLTTTFTGTFKTEPADQARFMTMVRSR

SEQ ID NO: 13834 - protein, 208 aa, Rhizobium pusense; identical to SEQ ID NO: 4184
  misc_feature (1)..(208): tr|A0A1L9CFU2|A0A1L9CFU2_9RHIZ GTP cyclohydrolase 1 OS= Rhizobium pusense OX=648995 GN=folE PE=3 SV=1

SEQ ID NO: 13835 - protein, 208 aa, Rhizobium radiobacter
  misc_feature (1)..(208): tr|A0A420G2C5|A0A420G2C5_RHIRD GTP cyclohydrolase 1 OS= Rhizobium radiobacter OX=358 GN=folE PE=3 SV=1
MDAIVKNFPGAGAKPDVAEARPSQAEAEEAVRVLLRWAGENPAREGLLDTPKRVAKAYRELFAGYELNVQDVLGTTFEEVGGYDDVVLVRDIPFFSHCEHHMVPIVGKAHVAYLPAGRVLGLSKIARVVEIFGRRLQTQENMTAQIARSIEETLKPRGVAVMIDAEHMCMSMRGVNKQGSTTLTTSFTGVFKNDPAEQVRFMTMVRNR

SEQ ID NO: 13836 - protein, 208 aa, Rhizobium radiobacter
  misc_feature (1)..(208): tr|A0A2T7W6N6|A0A2T7W6N6_RHIRD GTP cyclohydrolase 1 OS= Rhizobium radiobacter OX=358 GN=folE PE=3 SV=1
MDAIVKNFPGAGATDDVTKARPTQAEAEDAVRVLLSWAGDDPTREGLLDTPKRVAKAYRELFSGYDLDAKDVLGTFFEEVGGYDDIILVRDIPFFSHCEHHMVPIIGKAHVAYLPNGRVLGLSKIARVVEIFGRRLQTQETMTAQIASAIETTLKPRGVAVMIDAEHMCMSMRGVQKQGSTTLTTSFTGAFKKDPAEQARFMSMVRSR

SEQ ID NO: 13837 - protein, 205 aa, Rhizobium rhizosphaerae
  misc_feature (1)..(205): tr|A0A1Q9AJA3|A0A1Q9AJA3_9RHIZ GTP cyclohydrolase 1 OS= Rhizobium rhizosphaerae OX=1672749 GN=folE PE=3 SV=1
MDAIIKNFPAPEGVDDRPSQKEAEDAVRVLLRWAGEDPEREGLRDTPARVAKSYRELFAGYDLAAEDVLGRTFEEVAGYDEMVLVKDIPFFSHCEHHMVPIIGRAHVAYLPQGRVLGLSKIARVVDIYGRRLQTQESMTAQIATAIDETLRPRGVAVMIEAEHLCMAMRGVQKQGSTTLTTTFTGAFKTDAAEQARFMTFLRAQR

SEQ ID NO: 13838 - protein, 201 aa, Rhizobium rosettiformans
  misc_feature (1)..(201): tr|A0A4S8Q5K9|A0A4S8Q5K9_9RHIZ GTP cyclohydrolase 1 OS= Rhizobium rosettiformans W3 OX=538378 GN=folE PE=3 SV=1
MDAIVTKLTAQSPRPTREEAEQAVRTLLLWAGDDPEREGLLDTPARVAKAYGELFSGYEADIEDVLGRTFEEVGGYEDMVLVRDISFFSHCEHHMLPVIGKAHVAYLPKGRVLGLSKIARVVDVFAKRLQTQENMTAQIAHAIDETLQPRGVAVFLEAEHMCMAMRGIQKTGSTTLTTTFTGAFKDNPAEQARFMSMVRSR

SEQ ID NO: 13839 - protein, 227 aa, Rhizobium selenitireducens
  misc_feature (1)..(227): tr|A0A376AGH6|A0A376AGH6_9RHIZ GTP cyclohydrolase 1 OS= Rhizobium selenitireducens ATCC BAA-1503 OX=1336235 GN= folE PE=3 SV=1
MSRVTHLQAEKSKQAVRNLKDRETMGMDAIVNKLAPNAKRPSREEAENAVRVLLRWAGDDPAREGLLDTPKRVANAYRELFAGYDADIEDVLGTTFEEVAGYDDIVVVRDIPFFSHCEHHMLPVIGKAHVAYLPDGRVLGLSKIARVVEVFGRRLQTQEAMTAQISAAIDETLKPRGVAVFIEAEHMCMAMRGVQKSGSTTLTTTFTGVFKDNAAEQARFMSMVRGR

SEQ ID NO: 13840 - protein, 208 aa, Rhizobium smilacinae
  misc_feature (1)..(208): tr|A0A5C4XGU7|A0A5C4XGU7_9RHIZ GTP cyclohydrolase 1 OS= Rhizobium smilacinae OX=1395944 GN=folE PE=3 SV=1
MDAIVKNFPAQGQESSKDQARPSQAEAEEAVRVLLRWAGDDPTREGLLDTPTRVAKSYRELFAGYDQSYEEVLGRTFEEMSGFDDVVLVRDIPFFSHCEHHMLPIKGMATVAYLPNGPVLGLSKIARVIEIFGRRLQTQENMTAQIANAIQDTLKPRGVAVLIEAEHMCMEMRGVQKQGSRTLTTTFTGEFKTNATEQARFFTLARNR

SEQ ID NO: 13841 - protein, 204 aa, Rhizobium sophoriradicis; identical to SEQ ID NO: 13798
  misc_feature (1)..(204): tr|A0A2A5KLF2|A0A2A5KLF2_9RHIZ GTP cyclohydrolase 1 OS= Rhizobium sophoriradicis OX=1535245 GN=folE PE=3 SV=1

SEQ ID NO: 13842 - protein, 206 aa, Rhizobium sp.
  misc_feature (1)..(206): tr|A0A246U558|A0A246U558_9RHIZ GTP cyclohydrolase 1 OS= Rhizobium sp. R72 OX=1764278 GN=folE PE=3 SV=1
MDAIIKNFPQTPTDLEADRPSQKEAEDAVRTLLRWAGDDPSREGLLDTPARVAKAYRELFAGYDMDPEDVLGRTFEEVAGYDDMVLVRDIPFFSHCEHHMVPIIGKAHVAYMPDGKVLGLSKIARVVEIYGRRLQTQETMTAQIAKAIDDTLAPRGVAVMIEAEHMCMAMRGVQKQGSTTLTTTFTGTFKTEPADQARFMSMVRSR

SEQ ID NO: 13843 - protein, 201 aa, Rhizobium sp.
  misc_feature (1)..(201): tr|A0A2S6BMA0|A0A2S6BMA0_9RHIZ GTP cyclohydrolase 1 OS= Rhizobium sp. KAs_5_22 OX=2067668 GN=folE PE=3 SV=1
MDASVNKIVPVDQRPSREEAENAVRVLLRWAGDDPAREGLLDTPKRVVNAYRELFAGYDADIEDVLGTTFGEVAGYDDIVLVRDIPFFSHCEHHMLPVIGKAHVAYLPDGRVLGLSKIARVVDVFGRRLQTQEAMTAQIAAAIDETLAPKGVAVFIEAEHMCMAMRGVQKSGSTTLTTTFTGRFKDNAAEQARFMSMVRGR

SEQ ID NO: 13844 - protein, 202 aa, Rhizobium straminoryzae
  misc_feature (1)..(202): tr|A0A549TGP2|A0A549TGP2_9RHIZ GTP cyclohydrolase 1 OS= Rhizobium straminoryzae OX=1387186 GN=folE PE=3 SV=1
MDAIVKNFPAGQKQARPTQQEAEEAVRLLLRWAGDDPTREGLLDTPKRVAAAYRELFSGYEQTPEEILGRTFEEVAGYDDMVLVRDIPFFSHCEHHMVPIIGKAHVAYLPKGRVLGLSKIARVVDVYGRRLQTQEAMTAQITHAIQEVLQPRGVAVMIDAEHMCMSMRGIQKQGSTTLTTTFTGEFQNNAAEQARFLTMIRR

SEQ ID NO: 13845 - protein, 205 aa, Rhizobium subbaraonis
  misc_feature (1)..(205): tr|A0A285UAH1|A0A285UAH1_9RHIZ GTP cyclohydrolase 1 OS= Rhizobium subbaraonis OX=908946 GN=folE PE=3 SV=1
MDAVIKNFPVGEENSGRPTQKEAEDAVRVLLRWAGDDPSREGLLDTPSRVAKAYRELFSGYELDPEDVLGRTFEEVAGYDDIVLVKDIPFYSHCEHHMVPIIGRAHVAYLPNGRVLGLSKIARVVEIYGRRLQTQETMTAQIASAIDETLRPRGVAVMIEAEHMCMAMRGIQKQGSTTLTTTFTGAFKAEPAEQVRFMTMIRGRG

SEQ ID NO: 13846 - protein, 204 aa, Rhizobium sullae
  misc_feature (1)..(204): tr|A0A4R3QAA5|A0A4R3QAA5_RHISU GTP cyclohydrolase 1 OS= Rhizobium sullae OX=50338 GN=folE PE=3 SV=1
MGLGPSHAPRKRPTREAAEAAVRTLIEWAGDDPDREGLVGTPDRVVRAYEEFFEGYRIDPVDLLGRTFEETQNYGDMVVLRDVRLESHCEHHIVPIIGKAHVAYLPSGRVVGISKLARLVEVYGKRLQIQETLTAQIADAIDEVLKPKGVAVVIEAAHMCMTTRGIRKPGITMVTRRLTGAFETDAELRRDFLGSISGSREAFG

SEQ ID NO: 13847 - protein, 204 aa, Rhizobium sullae
  misc_feature (1)..(204): tr|A0A2N0CZY0|A0A2N0CZY0_RHISU GTP cyclohydrolase 1 OS= Rhizobium sullae OX=50338 GN=folE PE=3 SV=1
MDAIVKNFPQNNRDSERPSQKEAEDAIRVLLRWAGDDPSREGLIDTPNRVAKAYRELFAGYDMDAEDVLGRTFEEVAGYDDMVLVKDIPFYSHCEHHMVPIIGKAHVAYIPDGKVLGLSKIARVVEIYGRRLQTQETMTAQIAKAIDDTLAPRGVAVMLEAEHMCMAMRGVQKQGSTTLTTTFTGTFKAEPAEQVRFMTMVRSR

SEQ ID NO: 13848 - protein, 201 aa, Rhizobium taibaishanense
  misc_feature (1)..(201): tr|A0A1Q9A1C2|A0A1Q9A1C2_9RHIZ GTP cyclohydrolase 1 OS= Rhizobium taibaishanense OX=887144 GN=folE PE=3 SV=1
MDASVKKLSPDAARPSREEAENAVRTLLRWAGDDPAREGLLDTPKRVAKAYAELFGGYSVNVEDVLGTTFEEVGGYNDIVLVRDIPFFSHCEHHMLPVIGKAHVAYLPNGRVLGLSKIARVVDLYARRLQTQETMTAQIAESIVKYLQPRGVAVMVDAEHMCMAMRGIQKSGSTTLTTTFTGEFKDNAAEQVRFMTMVQNR

SEQ ID NO: 13849 - protein, 206 aa, Rhizobium tibeticum
  misc_feature (1)..(206): tr|A0A1H8LPQ8|A0A1H8LPQ8_9RHIZ GTP cyclohydrolase 1 OS= Rhizobium tibeticum OX=501024 GN=folE PE=3 SV=1
MDAIIKNFPQTPADLEADRPSQKEAEDAVRTLLRWAGDDPSREGLLDTPARVAKAYRELFAGYDMDPEDVLGRTFEEVAGYDDMVLVRDIPFFSHCEHHMVPIIGKAHVAYMPDGKVLGLSKIARVVEIYGRRLQTQETMTAQIAKAIDDTLAPRGVAVMIEAEHMCMAMRGVQKQGSTTLTTTFTGTFKTEPADQARFMTMVRSR

SEQ ID NO: 13850 - protein, 203 aa, Rhizobium tropici
  misc_feature (1)..(203): tr|L0LKM2|L0LKM2_RHITR GTP cyclohydrolase 1 OS=Rhizobiu m tropici CIAT 899 OX=698761 GN=folE PE=3 SV=1
MDAIVKNFPQSVDSERPSQKEAEDAVRVLLRWAGDDPLREGLLDTPARVAKAYRELFAGYDMNPEDVLGRTFEEVSGYDDIVLVRDIPFFSHCEHHMVPIIGKAHVAYLPNGRVLGLSKIARVVEIFGRRLQTQEAMTAQIANAIDDTLRPRGVAVMIDAEHMCMAMRGVQKQGSSTLTMTFTGAFKADPAEQARFMSLVRGR

SEQ ID NO: 13851 - protein, 203 aa, Rhizobium tropici
  misc_feature (1)..(203): tr|A0A5B0VV74|A0A5B0VV74_RHITR GTP cyclohydrolase 1 OS= Rhizobium tropici OX=398 GN=folE PE=3 SV=1
MDAIVKNFPQVVDSERPTQKEAEDAVRVLLRWAGDDPQREGLLDTPARVAKAYRELFGGYDMSPEDELGRTFEEVSGYDDIVLERDIPFFSHCEHHMVPIIGKAHVAYLPNGRVLGLSKIARVVDIFARRLQTQEAMTAQIANAIDETLRPRGVAVMIDAEHMCMAMRGVKKQGSTTLTMTFTGAFKADPAEQARFMSLVRGR

SEQ ID NO: 13852 - protein, 204 aa, Rhizobium tubonense
  misc_feature (1)..(204): tr|A0A2W4CJV6|A0A2W4CJV6_9RHIZ GTP cyclohydrolase 1 OS= Rhizobium tubonense OX=484088 GN=folE PE=3 SV=1
MDAVVKNFPQPDLKSDRPSQQEAEDAVRVLLRWAGDDPTREGLVDTPARVAKSYRELFAGYDMDPEDVLGRTFEEVAGYDDMVLVKDIPFFSHCEHHMVPIVGKAHVAYLPNGRVLGLSKIARVVEIYGRRLQTQEAMTAQIAAAIDETLRPRGVAIMIEAEHMCMAMRGVQKQGSTTLTTTFTGSFKVDPAEQVRFMTMVRGR

SEQ ID NO: 13853 - protein, 200 aa, Rhizobium tubonense
  misc_feature (1)..(200): tr|A0A2W4C413|A0A2W4C413_9RHIZ GTP cyclohydrolase 1 OS= Rhizobium tubonense OX=484088 GN=folE PE=3 SV=1
MDAIVRVFSKAAERPSKDEAEEAVRTLIRWAGDDPGREGLQDTPRRVTKAYGELFAGYDEPADDPLARTFSDVGGYQDMVIVKGIPFFSHCEHHMLPFHGHVHIGYQPAGRVLGLSKFARLVEIFARRLQTQETITAQIAQSLDDGLQPLGVAVMVEAEHMCMSMRGVKKQGAATLTMTFKGEMQNSASLQARFLSEVRA

SEQ ID NO: 13854 - protein, 201 aa, Rhizobium tumorigenes
  misc_feature (1)..(201): tr|A0A2W4BIU3|A0A2W4BIU3_9RHIZ GTP cyclohydrolase 1 OS= Rhizobium tumorigenes OX=2041385 GN=folE PE=3 SV=1
MDAMLANADLAAFERPSQQEAEAAVRTLIRWAGEDPTREGLLDTPKRVTKAYRELFAGYDLAPEDVLSRTFSEVAGYNDMVIVKDITFHSHCEHHMVPFHGVAHIAYVPDKGVLGLSKMARLVDLYARRLQTQETMTAQIATALDESLRPKGVAVMIEAEHMCMAMRGVAKQGTKTLTTRFTGSFQMSAADQARFITLARG

SEQ ID NO: 13855 - protein, 204 aa, Rhizobium tumorigenes
  misc_feature (1)..(204): tr|A0A2W4BWP1|A0A2W4BWP1_9RHIZ GTP cyclohydrolase 1 OS= Rhizobium tumorigenes OX=2041385 GN=folE PE=3 SV=1
MDAVLKNLALTDTHPDRPTQKEAEDAVRVLLRWAGDDPTREGLIDTPARVAKSYRELFAGYELDPENVLGRTFEEVAGYDDMVLVRDIPFFSHCEHHMVPIIGKAHVAYLPNGRVLGLSKIARVVDIFGRRLQTQETMTAQIATAIDETLRPRGVAIMIEAEHMCMAMRGVQKQGSTTLTTRFTGSYKVDPAEQARFMTLVRGR

SEQ ID NO: 13856 - protein, 204 aa, Rhizobium vallis
  misc_feature (1)..(204): tr|A0A432PM16|A0A432PM16_9RHIZ GTP cyclohydrolase 1 OS= Rhizobium vallis OX=634290 GN=folE PE=3 SV=1
MDAIVKNFPQTNRESDRPSQQEAEEAVRVLLRWAGDDPTREGLLETPARVAKSYRELFAGYDMAPEDVLGRTFEEVAGYDDMVLVKDIPFYSHCEHHMVPIIGKAHVAYMPDGRVLGLSKIARVVEIYGRRLQTQETMTAQIARAIDDTLNPRGVAVMIEAEHMCMAMRGVQKQGSTTLTTTFTGTFKTEPADQARFMTMVRSR

SEQ ID NO: 13857 - protein, 206 aa, Rhizorhabdus dicambivorans
  misc_feature (1)..(206): tr|A0A2A4G327|A0A2A4G327_9SPHN GTP cyclohydrolase 1 OS= Rhizorhabdus dicambivorans OX=1850238 GN=folE PE=3 SV=1
MSILGDDDEALHGTPPSKLPVPEDVQDAIRTLIRWSGDDPDREGLLDTPARVGRAWKEYCQGYQEDPSLHLSRTFEEVGGYDEIVLLKDIPFQSHCEHHMAPIIGHAHIAYLPNHRVVGISKLARVLHGFARRLQIQERLTAEVADCIWTHLEPIGVAVVIHATHACMTARGVRTPGVGMTTSRMMGVFREDDRSRKEVLSLMGLG

SEQ ID NO: 13858 - protein, 206 aa, Rhizorhabdus sp.
  misc_feature (1)..(206): tr|A0A521SF32|A0A521SF32_9SPHN GTP cyclohydrolase 1 OS= Rhizorhabdus sp. OX=1968843 GN=folE PE=3 SV=1
MSISGEDDQTPNATLPDKLPVPEHVQDAIRTLIRWAGDDPDREGLLDTPSRVGRAWREYCQGYDEDPSLHLSRTFEEVGGYDEIVLLKQIPFHSHCEHHMAPIIGHAHIAYLPHNRVVGISKLARVLHGFARRLQIQERLTAEIADCIWTHLEPAGVAVVIQATHACMTARGVRTPGVGMTTSRMMGVFRDDERSRKEVLSLMGLG

SEQ ID NO: 13859 - protein, 200 aa, Rhodanobacter denitrificans
  misc_feature (1)..(200): tr|M4NDI4|M4NDI4_9GAMM GTP cyclohydrolase 1 OS=Rhodanob acter denitrificans OX=666685 GN=folE PE=3 SV=1
MSEQRHPNDVSQEQAEEAVRTLLRWAGEDPSREGLLDTPKRVVKAYRDWFAGYDSDPGDYLRRTFKEVNGYDEMVVLRDIEFESHCEHHMAPIIGRAHVGYLPTNRVVGISKLARVVDGFARRFQVQEKLTAQIAQCIQETLQPAGVAVVVDASHECMTTRGVHKRGVSMVTSQMLGTFRDDARTRAEFLQFIGIHGGHR

SEQ ID NO: 13860 - protein, 315 aa, Rhodanobacter denitrificans
  misc_feature (1)..(315): tr|A0A368KJ88|A0A368KJ88_9GAMM GTP cyclohydrolase FolE2 OS=Rhodanobacter denitrificans OX=666685 GN=folE2 PE=3 SV=1
MPNQENTARLLPDVAVHAQPHLAGALDWVGMADIQVPVLFDAGDGQAQRSSARVGAFVNLSRPDKRGIHMSRLYLQVEQALSSQALNAQMLHALLRGFLDSHRDLSDRACLSIHFEHLVRRPALKSANSGWRAYPVCIEASLTGDEFLLEFGTEVVYSSTCPASAALSRQLIQDQFASDFDAGRPLDHAAVLAWLGSEQGIVATPHAQRSVARLRIRLVPGTDFHLIGLIDRVEHALGTPVQTAVKREDEQAFALANGGNLMFCEDAARRIQKALDADAALSDFHIRVEHQESLHPHDAVAYASKGVEGGYGSTP

SEQ ID NO: 13861 - protein, 329 aa, Rhodanobacter fulvus
  misc_feature (1)..(329): tr|I4VYH4|I4VYH4_9GAMM GTP cyclohydrolase FolE2 OS=Rhod anobacter fulvus Jip2 OX=1163408 GN=folE2 PE=3 SV=1
MRLLRHDDPQDKTMTNQENTARLLPDVAVHAQPHLAGALDWVGMAEIQVPVRFDAGDGDVQRASARVGAFVNLKRPDKRGIHMSRLYLQAEQALSTQTLGADTLQALLRGFLDSHADLSDRACLSIRFEHLVRRPALRSANSGWRAYPVTIEASLTGSAFLLELGTEVVYSSTCPASAALSRQLIQDQFASDFAADATLDRAAVLEWLGSEKGIVATPHAQRSVACLRVRPAAGAPLQLISLIDRVETALGTPVQTAVKRQDEQAFALANGGNLMFCEDAARRIQKALDADAALDDFHIRVEHQESLHPHDAVAYASKGIDGGYGGAKF

SEQ ID NO: 13862 - protein, 200 aa, Rhodanobacter fulvus
  misc_feature (1)..(200): tr|I4VPZ2|I4VPZ2_9GAMM GTP cyclohydrolase 1 OS=Rhodanob acter fulvus Jip2 OX=1163408 GN=folE PE=3 SV=1
MSDHANQPDVTREQAEEAVRTLLRWAGDDPAREGLIDTPKRVAKAYRDWFSGYESDPAEFLLRTFEEVGGYDQMVVLRDIQFESHCEHHLAPIIGRAHVGYMPTNRVVGISKLARVVDGFARRLQVQEKLTAQIAHCIQETLQPAGVAVVIDASHECMTTRGVHKRGVSMVTSQMLGSFRDDARTRMEFLQFIGLQGGHH

SEQ ID NO: 13863 - protein, 202 aa, Rhodanobacter glycinis
  misc_feature (1)..(202): tr|A0A1I3YYD7|A0A1I3YYD7_9GAMM GTP cyclohydrolase 1 OS= Rhodanobacter glycinis OX=582702 GN=folE PE=3 SV=1
MSEPNHPTDVTREQAEDAVRTLLRWAGEDPSREGLLDTPKRVVKAYRDWFAGYAEDPGDYLLRTFKEVEGYDEMVVLRDIEFESHCEHHMAPIIGRAHVGYLPTNRVVGISKLARVVDGFARRFQVQEKLTAEIAHCIQENLQPAGVAVVIDASHECMTTRGVHKRGVSMVTSQMLGSFRDDARTRAEFLEFIGLHGSVRSR

SEQ ID NO: 13864 - protein, 315 aa, Rhodanobacter glycinis
  misc_feature (1)..(315): tr|A0A502CF55|A0A502CF55_9GAMM GTP cyclohydrolase FolE2 OS=Rhodanobacter glycinis OX=582702 GN=folE2 PE=3 SV=1
MPNQENTARLLPDVAVHAQPHLAGALDWVGMADIQVPVLFDAGDGEVQRASARVGAFVNLSRPDKRGIHMSRLYLQVEQALSTQKLTADSLHALLRGFLDSHKDLSDRACVSIRFEHLVRRPALRSANSGWRAYPVCIEASLTGDEFLLEFGTEVVYSSTCPASAALSRQLIQDQFVSDFSATQPVDHAAVLAWLGSERGIVATPHAQRSVARLRIRLVAGAGFQLIDLIDRVEHALGTPVQTAVKREDEQAFALANGGNLMFCEDAARRIQKALDADGHLSDFHIRVEHQESLHPHDAVAYASKGVAGGYGSTP

SEQ ID NO: 13865 - protein, 200 aa, Rhodanobacter lindaniclasticus
  misc_feature (1)..(200): tr|A0A4S3KJ64|A0A4S3KJ64_9GAMM GTP cyclohydrolase 1 OS= Rhodanobacter lindaniclasticus OX=75310 GN=folE PE=3 SV =1
MNEEHHSQEVSQQQAEDAVRTLLRWAGDDPTREGLLDTPKRVARAYRDWFSGYESDPAEFLRRTFEEVAGYDQMVVLRDIQFESHCEHHLAPIIGRAHVGYMPTNRVVGISKLARVVDGFARRLQVQEKLTAQIAHCIQETLQPSGVAVVIDASHQCMTTRGVHKRGVSMVTSQMLGSFRDDVRTRNEFLQFIGIHGSAR

SEQ ID NO: 13866 - protein, 315 aa, Rhodanobacter lindaniclasticus
  misc_feature (1)..(315): tr|A0A4S3KGL6|A0A4S3KGL6_9GAMM GTP cyclohydrolase FolE2 OS=Rhodanobacter lindaniclasticus OX=75310 GN=folE2 PE =3 SV=1
MPNQENTARLLPDVAVHAQPHLAGALDWVGMAEIQVPVLFDAGDGQPQRSSARVGAFVNLKRPDKRGIHMSRLYLQVEQALGTQTLSADMLRSLLRGFLDSHQDLSDRACLSIHFEHLVRRPALKSANSGWRAYPVCIEASLVGDQFLLEFGTEVVYSSTCPASAALSRQLIQDQFIHDFAPGETLDHAAVLAWLGSEKGIVAAAHAQRSVARLRVRPAAGAGFHLVELIDRVESALGTPVQTAVKREDEQAFALANGSNLMFCEDAARRIQKALDADDRLGDFHIRVEHQESLHPHDAVAYASKGVEGGYGSIG

SEQ ID NO: 13867 - protein, 315 aa, Rhodanobacter sp.
  misc_feature (1)..(315): tr|A0A1V3P464|A0A1V3P464_9GAMM GTP cyclohydrolase FolE2 OS=Rhodanobacter sp. C05 OX=1945855 GN=folE2 PE=3 SV=1
MPNQENTARLLPDVAVHAQPHLAGALDWVGMADIQVPVLFDAGDGEVQRASARVGAFVNLNRPDKRGIHMSRLYLQVEQALSTQVLTADSLHALLRGFLDSHKDLSDRACLSIHFEQLVRRPALRSANSGWRAYPVCIEASLTDDEFLLEFGTEVVYSSTCPASAALSRQLIQDQFASDFDAAKPIDHAAVLAWLGSEHGIVATPHAQRSVARLRIRPVAGAGFHLIDLVDRVEHVLGTPVQTAVKREDEQAFALANGGNLMFCEDAARRIQKALDADAKLGDFHIRVEHQESLHPHDAVAYASKGVDGGYGSTP

SEQ ID NO: 13868 - protein, 201 aa, Rhodanobacter sp.
  misc_feature (1)..(201): tr|A0A522L8V3|A0A522L8V3_9GAMM GTP cyclohydrolase 1 OS= Rhodanobacter sp. OX=1883446 GN=folE PE=3 SV=1
MSEPPSPRTVTREQAEDAVRTLLRWAGDDPAREGLLDTPARVARAYRDWFSGYDEDPAEFLLRTFKEVDGYDEMVVLRDIEFESHCEHHLAPIIGRAHVGYLPTNRVVGISKLARVVDGFARRLQVQEKLTAQIAQCIQDTLQPAGVAVVIDATHGCMTTRGVHKTGVSMITSHMLGAFRNDARTRAEFLEFIGLHGSMRR

SEQ ID NO: 13869 - protein, 200 aa, Rhodanobacter spathiphylli
  misc_feature (1)..(200): tr|I4W2X1|I4W2X1_9GAMM GTP cyclohydrolase 1 OS=Rhodanob acter spathiphylli B39 OX=1163407 GN=folE PE=3 SV=1
MNDRAKHPEVTPEQAEEAVRTLLRWAGEDPSREGLLDTPKRVVKAYRDWFSGYETDPGEYLRRTFKEVAGYDEMVVLRDIEFESHCEHHMAPIIGRAHVGYLPTNRVVGISKLARVVDGYARRFQVQEKLTAEIAHCIQETLQPAGVAVVIDASHECMTTRGVHKRGVSMVTSQMLGTFRDDARTRAEFLQFIGIHGGHR

SEQ ID NO: 13870 - protein, 315 aa, Rhodanobacter spathiphylli
  misc_feature (1)..(315): tr|I4W5U0|I4W5U0_9GAMM GTP cyclohydrolase FolE2 OS=Rhod anobacter spathiphylli B39 OX=1163407 GN=folE2 PE=3 SV= 1
MPNQENTARLLPDVAVHAQPHLAGALDWVGMADIQVPVLFDAGDGQPQRASARVGAFVNLKRPDKRGIHMSRLYLQVEQALSTQALGADMLHALLRGFLDSHGDLSDRACLSIRFEHLVRRPALKSANSGWRAYPVCIEASLTGDEFLLEFGTEVIYSSTCPASAALSRQLIQDQFASDFSADQPLDHAAVLAWLGSEKGIVATPHAQRSVARLRVRPVPGAGFHLVGLIDGVEHALGTPVQTAVKREDEQAFALANGGNLMFCEDAARRIQKSLDADATLSDFHIRVEHQESLHPHDAVAYASKGVEGGYGSAP

SEQ ID NO: 13871 - protein, 200 aa, Rhodanobacter thiooxydans; identical to SEQ ID NO: 13859
  misc_feature (1)..(200): tr|A0A154QIM8|A0A154QIM8_9GAMM GTP cyclohydrolase 1 OS= Rhodanobacter thiooxydans OX=416169 GN=folE PE=3 SV=1

SEQ ID NO: 13872 - protein, 315 aa, Rhodanobacter thiooxydans
  misc_feature (1)..(315): tr|A0A154QHK2|A0A154QHK2_9GAMM GTP cyclohydrolase FolE2 OS=Rhodanobacter thiooxydans OX=416169 GN=folE2 PE=3 S V=1
MPNQENTARLLPDVAVHAQPHLAGALDWVGMADIQVPVLFDAGDGQVQRSSARVGAFVNLSRPDKRGIHMSRLYLQVEQALSTQTLDASMLHALLRGFLDSHKDLSDRACLSIQFEHLVRRPALKSANSGWRAYPVCIEASLTSDEFLLEFGTEVVYSSTCPASAALSRQLIQDQFASDFDAGQPLGHAAVLAWLGSERGIVATPHAQRSVARLRIRLVPGADFHLIGLIDRVEHALGTPVQTAVKREDEQAFALANGGNLMFCEDAARRIQKALDADAALGDFHVRVEHQESLHPHDAVAYASKGVEGGYGSTP

SEQ ID NO: 13873 - protein, 307 aa, Rhodanobacteraceae bacterium
  misc_feature (1)..(307): tr|A0A522QZM9|A0A522QZM9_9GAMM GTP cyclohydrolase FolE2 OS=Rhodanobacteraceae bacterium OX=2052182 GN=folE2 PE =3 SV=1
MTSNIDNARLPDVATDVEPAAGGALDWVGMDGIDLPVRCADGDGGTLTVPARVSVQVNLADPEARGIHMSRLYLALEKSLGEQTLTPSGLCSLLHALVASHADLSSRARLRVEYSQLLKRRALVSDNAGWHAYPVTVGAQLFDDRFSVQLGCAVTYSSTCPASAALSRQLNRQRFDEDFADAVPSLRAVGEWIGSERGMAATPHAQRSTAHVMVRLAPGFDLPVSELIDAVETALETPVQTAVKREDEQAFAKLNAENLMFCEDAARRIRNALDTDERVAGYHIRAAHHESLHAHDAVAEVSRSFSW

SEQ ID NO: 13874 - protein, 305 aa, Rhodanobacteraceae bacterium
  misc_feature (1)..(305): tr|A0A522S373|A0A522S373_9GAMM GTP cyclohydrolase FolE2 OS=Rhodanobacteraceae bacterium OX=2052182 GN=folE2 PE =3 SV=1
MNTVADDRRLPDVATGPEPAAGGALDWVGMDGIDLPVRCADGRGGTLTVPARVSVQVNLADPAARGIHMSRLYLALEQSLAGQVLTPAGLCSLLHALVASHAGLSSRARLRVEYSQLLQRPALVSDNTGWRAYPVTVEAQLLGERFSVQLGCELLYSSTCPASAALSRQLNQQRFDADFAGAVPSQRAVREWLGSERGVAATPHAQRSTANVVVRLAAGFDLPVSELVDMLERALATPVQTAVKREDEQAFAKLNAENLMFCEDAARRMCAALDTDARIAGYRIRAAHHESLHPHDAVAEVCKNF

SEQ ID NO: 13875 - protein, 363 aa, Rhodobaca barguzinensis
  misc_feature (1)..(363): tr|A0A2K8KD53|A0A2K8KD53_9RHOB GTP cyclohydrolase FolE2 OS=Rhodobaca barguzinensis OX=441209 GN=folE2 PE=3 SV= 1
MNLHVSSLEKTPSREEAEAALDVLRRFTDAAPVTERVEMEAAVTSLMPAAGYPVLNRDYPSEFEVDSAYKDGLPDLQNGPASLIVGAKAPIQHVGISNFRLPIRYHTRDNGDLTLETSVTGTVSLEAEKKGINMSRIMRSFYAHAERTFSADVIRAALDNYKTDLESFDARIMMRFSFPMKVQSLRSGLSGYQYYDIALELVDQGGVRQMFMHLDYVYSSTCPCSLELSEHARATRGQLATPHSQRSVARISVEVLEGEKLWFEDLIDLCRIAVPTETQVMVKREDEQAFAELNAANPIFVEDAARSFCAQLDGDVRIGDFRVVASHQESLHSHDAVSVLTRGASFEAASLDPRLFSTLFHVG

SEQ ID NO: 13876 - protein, 363 aa, Rhodobacter aestuarii
  misc_feature (1)..(363): tr|A0A1N7P594|A0A1N7P594_9RHOB GTP cyclohydrolase FolE2 OS=Rhodobacter aestuarii OX=453582 GN=folE2 PE=3 SV=1
MNIQGRIGTPDTDEAKAALEVLRLWAAEAHPAEVTALDPAIARLLPGAPESYPELARSYDAEFRPDAAYKAAMPDLQNGPSSLIVGAKTRIEHVGISNFRLPIKYRLRDGGEVVLETSVTGSVSLEAEKKGINMSRILRSFYTHAECEFSFEVMAAALDDYVENLESFDARLMMRFSLPLQVDSLRSGLTGWQYYDIALELVEQAGVRTKIVHLDFVYSSTCPCSLELSEDARIRRGRLATPHSQRSVARISAVIEPGKTLWFEDLIDLARANVPTETQVMVKREDEQAFAELNAANPIFVEDAVRAFAAGLMAEPRVGDFRVIASHQESLHSHDAVALLTEGPTFAQTSLDPQLFGTLIHRG

SEQ ID NO: 13877 - protein, 359 aa, Rhodobacter azotoformans
  misc_feature (1)..(359): tr|A0A2T5K6U1|A0A2T5K6U1_9RHOB GTP cyclohydrolase FolE2 OS=Rhodobacter azotoformans OX=43057 GN=folE2 PE=3 SV= 1
MNILTPVADRLPSREEAEEALAVLRRWAKHTPVSDVAGLAPDVPALVYPEFSRSYPRNFTVDEAYKASLPDLQNGPASLIVGAKAVIQHVGISNFRLPIRYHTRDNGDLTLETSVTGTVSLEAEKKGINMSRIMRSFYAHAEQGFSFEVIERALEDYKRDLESFDARIQMRFSFPVKVPSLRSGLVGWQYYDIALELVDRGGVRKKIMHLDFVYSSTCPCSLELSEHARRERGQLATPHSQRSVARISVEVRPGKCLWFEDLIELARAAVPTETQVMVKREDEQAFAELNAANPIFVEDAARSFCQALQSDPRIGDFRVVASHQESLHSHDAVSVLTEGPTFAAESLDPRLFASLYHTG

SEQ ID NO: 13878 - protein, 363 aa, Rhodobacter blasticus
  misc_feature (1)..(363): tr|A0A2T4J4K2|A0A2T4J4K2_RHOBL GTP cyclohydrolase FolE2 OS=Rhodobacter blasticus DSM 2131 OX=1188250 GN=folE2 PE=3 SV=1
MNVHTPEIDRKPSREEAEAALAVLRQWAGKSSDEEISRLDPAVGNLLPGHGYPALSRVYPADFVADDAYKATLPDLQNGPASLIVGERQTIQHVGISNFRLPIRYRTRDNGEVMLETSVTGTVSLEAEKKGINMSRIMRSFYAHSEKDFSFAVIEHALDDYKRDLGAFDARIQMRFSFPVRVASLRSGLSGWQYYDIALELVDAGGVRKKIMHLDYVYSSTCPCSLELSEHARMTRGQLATPHSQRSVARISVELSGKACLWFEDLIDLAREGVPTETQVMVKREDEQAFAELNAANPIFVEDAARSFCKALKADARVGDFRVVASHQESLHSHDAVSLLTEGPTFAAESLDPRLFASLIHAG

SEQ ID NO: 13879 - protein, 363 aa, Rhodobacter capsulatus
  misc_feature (1)..(363): tr|D5ATE9|D5ATE9_RHOCB GTP cyclohydrolase FolE2 OS=Rhod obacter capsulatus (strain ATCC BAA-309 / NBRC 16581 / SB1003) OX=272942 GN=folE2 PE=3 SV=1
MNIHGRIDTPDTAEAKAALELLRAFVAQAHPAEVAALDPAIARLFTPVPGPYPELARVYDAEFRPDDAYKAAMPDLQNGPASLIRGAKTRIEHVGISNFRLPIRYKLRDGGDVMLETSVTGTVSLEAEKKGINMSRILRSFYAHSESEFSFEVMAAALDDYIDHLESFDARLMMRFSLPLQVESLRSGLRGWQYYDIALELVEQAGVRTKIVHLDYVYSSTCPCSLELSEDARIRRGRLATPHSQRSVARISAVIEPGKTLWFEDLIEIARANVPTETQVMVKREDEQAFAELNAANPIFVEDAVRSFAAGLMAEPRVGDFRVIASHQESLHSHDAVAVLTEGPTFASASLDPKLFASLVHAG

SEQ ID NO: 13880 - protein, 363 aa, Rhodobacter capsulatus; identical to SEQ ID NO: 13879
  misc_feature (1)..(363): tr|A0A0E2PFH5|A0A0E2PFH5_RHOCA GTP cyclohydrolase FolE2 OS=Rhodobacter capsulatus Y262 OX=1415161 GN=folE2 PE= 3 SV=1

SEQ ID NO: 13881 - protein, 359 aa, Rhodobacter johrii
  misc_feature (1)..(359): tr|A0A330HDS6|A0A330HDS6_9RHOB GTP cyclohydrolase FolE2 OS=Rhodobacter johrii OX=445629 GN=folE2 PE=3 SV=1
MNILTPVAERLPSREEAEEALAVLRRWAKHTPASDMAALAPDAPALVYPELSRSYPRTFTVDEAYKASLPDLQNGPASLIVGAKAVIQHVGISNFRLPIRYHTRDNGDLLLETSVTGTVSLEAEKKGINMSRIMRSFYAHAEQSFSFEVIERALEDYKRDLESFDARIQMRFSFPVKVPSLRSGLVGWQYYDIALELVDRGGVRKEIMHLDFVYSSTCPCSLELSEHARRERGQLATPHSQRSVARISVEVRPGKCLWFEDLLDLARSAVPTETQVMVKREDEQAFAELNAANPIFVEDAARSFCQALQSDPRIGDFRVVASHQESLHSHDAVSVLTEGPTFAAESLDPKLFSSLYHVG

SEQ ID NO: 13882 - protein, 363 aa, Rhodobacter maris
  misc_feature (1)..(363): tr|A0A285RZC8|A0A285RZC8_9RHOB GTP cyclohydrolase FolE2 OS=Rhodobacter maris OX=446682 GN=folE2 PE=3 SV=1
MNIQGRIGTPDMDEAKAALETLRLWAAEAHPGEVAALDPAIARLLPGAPASYPDLARVYDATFRPDAAYKAAMPDLQNGPASLIVGAKTRIEHVGISNFRLPIKYRLRDGGEVVLETSVTGSVSLEAEKKGINMSRILRSFYAHAEREFSFEVMAAALDDYVENLESFDARLMMRFSLPLQVESLRSGLSGWQYYDIALEMVDQGGVRTKIVHLDFVYSSTCPCSLELSEDARIRRGRLATPHSQRSVARISVVVEPGQVLWFEDLIEIARANVPTETQVMVKREDEQAFAELNAANPIFVEDAVRAFAAGLMAEPRVGDFRVIASHQESLHSHDAVALLTEGPTFAAASLDPQLFASLIHRG

SEQ ID NO: 13883 - protein, 359 aa, Rhodobacter megalophilus
  misc_feature (1)..(359): tr|A0A239JBY7|A0A239JBY7_9RHOB GTP cyclohydrolase FolE2 OS=Rhodobacter megalophilus OX=418630 GN=folE2 PE=3 SV =1
MNILTPVAERLPSREEAEEALAVLRRWAAHTPASDIAALAPEAPALVYPDLSRAYPRTFTVDEAYKASLPDLQNGPASLIVGAKAVIQHVGISNFRLPIRYHTRDNGDLQLETSVTGTVSLEAEKKGINMSRIMRSFYAHAEQAFSFEVIERALEDYKRDLESFDARIQMRFSFPVKVPSLRSGLTGWQYYDIALELVDRGGVRKEIMHLDFVYSSTCPCSLELSEHARRERGQLATPHSQRSVARISVEVRQGKCLWFEDLLDLVRSAVPTETQVMVKREDEQAFAELNAANPIFVEDAARSFCQALQSDPRIGDFRVVASHQESLHSHDAVSVLTEGPTFAAESLDPRLFSSLYHVG

SEQ ID NO: 13884 - protein, 359 aa, Rhodobacter ovatus
  misc_feature (1)..(359): tr|A0A285CQ51|A0A285CQ51_9RHOB GTP cyclohydrolase FolE2 OS=Rhodobacter ovatus OX=439529 GN=folE2 PE=3 SV=1
MNILTPVSDRIPSRDEAEAALDLLRRWARATPVGEVTLLAPDVPSMVYPDLSRTYPKGFVADEAYKAGMPDLQNGPASLIVGAKAVIQHVGISNFRLPIRYHTRDNGDLTLETSVTGTVSLEAEKKGINMSRIMRSFYAHAERSFSFEVIEHALDDYKRDLESFDARIQMRFSFPVKVPSLRSGLVGWQYYDIALELVDKGGVRRKIMHLDFVYSSTCPCSLELSEHARRERGQLATPHSQRSVARISVEVLPGQCLWFEDLIELARAAVPTETQVMVKREDEQAFAELNAANPIFVEDAARSFCQALQSESRIGDFRVVASHQESLHSHDAVSVLTEGPTFATDSLDPRLFASLYHIG

SEQ ID NO: 13885 - protein, 362 aa, Rhodobacter sp.
  misc_feature (1)..(362): tr|C8S0W5|C8S0W5_9RHOB GTP cyclohydrolase FolE2 OS=Rhod obacter sp. SW2 OX=371731 GN=folE2 PE=3 SV=1
MNIHMPEIDRKPSRAQAEAALALLRQWAGTASDAEIAAVDPDALLLLGQGETVLSRAYPEDFVATEAYKATLPDLQNGPASLIVGTRTQIQHVGISNFRLPIRYHTRDNGDLTLETSVTGTVSLEAEKKGINMSRIMRSFYAHAERDFSFEVIEHALEDYKRDLQSFDARIQMRLSFPAKVQSLRSGLTGWQYYDIALELVDAGGVRKKIMHLDFVYSSTCPCSLELSEHARRSRGQLATPHSQRSVARISVVVNDGECLWFEDLIDLARAAVPTETQVMVKREDEQAFAELNGANPIFVEDAARSFCAKLLDDPRIGDFRVLASHQESLHSHDAVSLLTQGPTFAQESLDPRLFGTLFHVG

SEQ ID NO: 13886 - protein, 369 aa, Rhodobacter sp.
  misc_feature (1)..(369): tr|A0A366JQE5|A0A366JQE5_9RHOB GTP cyclohydrolase FolE2 OS=Rhodobacter sp. 140A OX=2183910 GN=folE2 PE=3 SV=1
MNKHERSNSPDTEAAKAALATLRAWAERADPVEVARLDPAIARLLPGHALSNYPDLVRSYDAGFRPDAAYKDGMPDLQNGPASLITGAHAPIAHVGISNFRLPIRYRLRPGTDNPPGEVTLETSVTGTVSLDAEKKGINMSRIIRSFYGHAEREFSFEVMAAALDGYKDHLDSFDARLMMRFSYPVRVESLRSGLSGWQYYDIALEMADQGGRRLKAIHLDYVYSSTCPCSLELSEHARRDRGRLATPHSQRSVARISVAVEPGAPLWFEDLIDIARAAVPTETQVMVKREDEQAFAELNAAHPIFVEDAVRVFAAGLLAEPRVGDFRVVASHQESLHSHDAVAVLTEGPTFAAASLDPRFFASLVHSR

SEQ ID NO: 13887 - protein, 359 aa, Rhodobacter sphaeroides
  misc_feature (1)..(359): sp|B9KM22|GCH4_RHOSK GTP cyclohydrolase FolE2 OS=Rhodob acter sphaeroides (strain KD131 / KCTC 12085) OX=557760 GN=folE2 PE=3 SV=1
MNILTPVAERLPSREEAEEALAVLRRWATHTPASDVAALAPEAPALVYPELSRSYPRAFTVDEAYKASLPDLQNGPASLIVGAKAVIQHVGISNFRLPIRYHTRDNGDLQLETSVTGTVSLEAEKKGINMSRIMRSFYAHAEQAFSFEVIERALEDYKRDLESFDARIQMRFSFPVKVPSLRSGLTGWQYYDIALELVDRGGVRKEIMHLDFVYSSTCPCSLELSEHARRERGQLATPHSQRSVARISVEVRQGKCLWFEDLLDLVRSAVPTETQVMVKREDEQAFAELNAANPIFVEDAARSFCQALQSDPRIGDFRVVASHQESLHSHDAVSVLTEGPTFAAESLDPRLFSSLYHVG

SEQ ID NO: 13888 - protein, 359 aa, Rhodobacter sphaeroides
  misc_feature (1)..(359): tr|A0A370Y5D1|A0A370Y5D1_RHOSH GTP cyclohydrolase FolE2 OS=Rhodobacter sphaeroides f. sp. denitrificans OX=397 23 GN=folE2 PE=3 SV=1
MNILTPVAERLPSREEAEEALAVLRRWAKHTPASDMAALAPDAPALVYPELSRSYPRTFTVDEAYKASLPDLQNGPASLIVGAKAVIQHVGISNFRLPIRYHTRDNGDLLLETSVTGTVSLEAEKKGINMSRIMRSFYVHAEKSFSFEVIERALEDYKRDLESFDARIQMRFSFPVKVPSLRSGLVGWQYYDIALELVDRGGVRKEIMHLDFVYSSTCPCSLELSEHARRERGQLATPHSQRSVARISVEVRPGKCLWFEDLLDLARSAVPTETQVMVKREDEQAFAELNAANPIFVEDAARSFCQALQSDPRIGDFRVVASHQESLHSHDAVSVLTEGPTFAAESLDPKLFSSLYHVG

SEQ ID NO: 13889 - protein, 365 aa, Rhodobacter veldkampii
  misc_feature (1)..(365): tr|A0A2T4JKG4|A0A2T4JKG4_9RHOB GTP cyclohydrolase FolE2 OS=Rhodobacter veldkampii DSM 11550 OX=1185920 GN=folE 2 PE=3 SV=1
MNIQGRISHAPDRQEAEEALERLRAWAMAATETEIATLDPVIARLLPGREGASYPDLSRRYPEEFRADAAYKATLPDLQNGPASLIVGAKTQIQHVGISNFRLPIRYHTRDNGDLTLETSVTGTVSLEAEKKGINMSRIMRSFYAHAERTFSFDVIEAALDDYKADLGSFDARIQMRFSFPMTVGSLRSGLAGWQYYNIALEVVERAGVRKKIVHLDYVYSSTCPCSLELSEHARATRGQLATPHSQRSVARISVVVEPGGVLWFEDLIDMARAAVPTETQVMVKREDEQAFAELNAANPIFVEDAARAFAGVLLADWRVGDFRVLASHQESLHSHDAVSLLTEGPTFAAESLDPRLFASLIHHG

SEQ ID NO: 13890 - protein, 365 aa, Rhodobacter vinaykumarii
  misc_feature (1)..(365): tr|A0A1N7L6G6|A0A1N7L6G6_9RHOB GTP cyclohydrolase FolE2 OS=Rhodobacter vinaykumarii OX=407234 GN=folE2 PE=3 SV =1
MNIHGRILGAPDREDARSALETLRAWAAEATEAEISTLDPAIARLVPGRAPDSYPTLSRAYPADFAVDEAYKDSLPDLQNGPSSLIVGARTQIQHVGISNFRLPIRYHTRDNGDITLETGVTGTVSLEAEKKGINMSRIMRSFYAHAERTFSFEVMEAALDDYKSDLESFDARIQMRLSFPMKVDSLRSGLSGWQYYDIALELVERAGVRKKIVHLDFVYSSTCPCSLELSEHARATRGQLATPHSQRSVARISVVLEPGAVLWFEDLIEAARAAVPTETQVMVKREDEQAFAELNAANPIFVEDAARAFAAVLLADPRVGDFRILASHQESLHSHDAVSLLTEGPTFAAESLDPHLFATLIHRG

SEQ ID NO: 13891 - protein, 363 aa, Rhodobacter viridis
  misc_feature (1)..(363): tr|A0A318TY05|A0A318TY05_9RHOB GTP cyclohydrolase FolE2 OS=Rhodobacter viridis OX=1054202 GN=folE2 PE=3 SV=1
MNIHGRIDTPDTAEAKAALEVLRAFVAQAHPAEVAGLDPAIARLFNPAPTPYPELARVYDAEFRPDDAYKAAMPDLQNGPASLIRGAKTRIEHVGISNFRLPIRYKLRDGGDVTLETSVSGTVSLEAEKKGINMSRILRSFYAHSESEFSFEVMAAALDDYIDHLESFDARLMMRFSLPLQVESLRSGLRGWQYYDIALELVEQAGVRTKIVHLDYVYSSTCPCSLELSEDARIRRGRLATPHSQRSVARISVVVEPGKTLWFEDLIEIARDNVPTETQVMVKREDEQAFAELNAANPIFVEDAVRSFAAGLMAEPRVADFRVIASHQESLHSHDAVAVLTEGPTFASASLDPKLFASLVHAG

SEQ ID NO: 13892 - protein, 364 aa, Rhodobacteraceae bacterium; identical to SEQ ID NO: 4675
  misc_feature (1)..(364): tr|A0A327LS97|A0A327LS97_9RHOB GTP cyclohydrolase FolE2 OS=Rhodobacteraceae bacterium AsT-22 OX=2230886 GN=fol E2 PE=3 SV=1

SEQ ID NO: 13893 - protein, 367 aa, Rhodobacteraceae bacterium
  misc_feature (1)..(367): tr|A0A2V2LMJ9|A0A2V2LMJ9_9RHOB GTP cyclohydrolase FolE2 OS=Rhodobacteraceae bacterium TG-679 OX=2072018 GN=fol E2 PE=3 SV=1
MNIHSPVLDRDLTREDAAQALAVLRRWAGQATEAEVETLDPAVKRLAAAPEPGSYPDLSRFYPEDFAVTPDYKAALPDLQNGPASLIKGARQQIQHVGISNFRLPIRFRTRDNGDLTLETSVTGTVSLEAEKKGINMSRIMRTFYGHAEKTFSFGVIEAALDDYKTDLESFDARIQMRFSFPVKVPSLRSGLAGYQYYDIALELVESAGVRKRIVHLDYVYSSTCPCSLELSEHARSTRGQLATPHSQRSVARVSVELDEAAGTLWFEDLIEMCRAAVPTETQVMVKREDEQAFAELNAANPIFVEDAARLFCAQLLGDPRIGDFRIVASHQESLHSHDAVSVLTEGATFASESLDPRLFGTLFHIG

SEQ ID NO: 13894 - protein, 367 aa, Rhodobacterales bacterium
  misc_feature (1)..(367): tr|A0A1Y5HJW1|A0A1Y5HJW1_9RHOB GTP cyclohydrolase FolE2 OS=Rhodobacterales bacterium 56_14_T64 OX=1856299 GN=f olE2 PE=3 SV=1
MNIHAHKTDEKPDRDAAEAALLVLRNWAAGATETEIALLDPAVARLLPGRELQNYPDLSRQYPEDFISDEIYRATLPDLQNGPSSLIRGAKQQIQHVGISNFRLPIRFHTRDDGDLTLETSITGTVSLEGEKKGINMSRIMRSFYKHADRTFSFEVMAAALDDYLSDLDSPDARIQMRFSFPARVSSLRSGLSGYQYYDFALELVDHDGVREKIIHMDYVYSSTCPCSLELSEHARAVRGQLATAHSQRSVARLSVQVKPEGDCLWFEDLIDHCRKAVPTETQVMVKREDEQAFAELNAANPIFVEDAARLFCEVLQSDPRIGDFRVLASHQESLHSHDAVSVLTNGNTFVSRSLDPKLFSTLIHQG

SEQ ID NO: 13895 - protein, 362 aa, Rhodobacterales bacterium
  misc_feature (1)..(362): tr|A0A1Q4CQG8|A0A1Q4CQG8_9RHOB GTP cyclohydrolase FolE2 OS=Rhodobacterales bacterium 65-51 OX=1895824 GN=folE2 PE=3 SV=1
MNIRTPELDRKPGPEEVEAALALIRQWASKASDTEMLALDPAARALIGDGYPDLSTIYPAEFRADAAYKATLPDLQNGPASLIRGAKTQIQHVGISNFRLPIRYRTRDAGEVLLETSVTGTVSLEAEKKGINMSRIMRSFYTHAERDFSFDVIEHALSDYKRDLESFDARIQMRFSFPVKVPSLRSGLSGWQYYDIALELVDRAGERLKIMHLDYVYSSTCPCSLELSEHARRTRGQLATPHSQRSVARISVVANPGPALWFEDLIELCRRAVPTETQVMVKREDEQAFAELNAANPIFVEDAARLFCAQLQADPRAGDFRIVASHQESLHSHDAVSVLTEGPTFAQASLDPRLFGTLFHVG

SEQ ID NO: 13896 - protein, 207 aa, Rhodobiaceae bacterium
  misc_feature (1)..(207): tr|A0A2E1MT66|A0A2E1MT66_9RHIZ GTP cyclohydrolase 1 OS= Rhodobiaceae bacterium OX=2026785 GN=folE PE=3 SV=1
MDVKVSDKTIHTESNNQDLKKPSREEAMDAVRTLISWAGDDPSREGLVETPKRVVKAYEEFFAGYNQDPVKVLGKTFSDVKGYDDIVFLRDINIETHCEHHMVPILGKAHVAYLPKNKVVGISKLARVIEIFAKRLQTQETMTMQILNTIDDTLEPYGSAIMIDAKHQCMTTRGINKPNVSTVTTKFSGSFSNDTDLRQRFMQLTKE

SEQ ID NO: 13897 - protein, 208 aa, Rhodobiaceae bacterium
  misc_feature (1)..(208): tr|A0A2D7FQM5|A0A2D7FQM5_9RHIZ GTP cyclohydrolase 1 OS= Rhodobiaceae bacterium OX=2026785 GN=folE PE=3 SV=1
MDARVDGNNTPTNRERDIKVEKPSREEAEAAVRTLISWAGDNPDREGLVDTPKRVVKAYQEFFAGYDEDPEEVLGRTFEDVEGYDDMVMLRDISLESHCEHHMVAILGKVHIAYMPVDKVVGISKLARVIEIFAKRLQTQETMTAQIVDCIQRVMEPAGIAILVDAKHQCMTTRGIRKPDVATITTQFTGVFAEDPKMEARFLAMINS

SEQ ID NO: 13898 - protein, 211 aa, Rhodobium orientis
  misc_feature (1)..(211): tr|A0A327JRT6|A0A327JRT6_9RHIZ GTP cyclohydrolase 1 OS= Rhodobium orientis OX=34017 GN=folE PE=3 SV=1
MDAIVKSLRPADEKEVALEPVRRPTREEAEAAVRTLIAWAGDNPDREGLVDTPKRVAKAFEEFYRGYNERAEDALERTFDEVGGYEDIVLVRDIPFYSHCEHHLVPFVGKAHIAYYPSEGVVGLSKLARVVDVFARRMQTQENLTAQIIGAIDETLKPRGVAVMLEAEHQCMSLRGVQKPGVSTITSQFTGVFQDDPTEQVRFLTLVRSGK

SEQ ID NO: 13899 - protein, 210 aa, Rhodoblastus acidophilus
  misc_feature (1)..(210): tr|A0A212R9B0|A0A212R9B0_RHOAC GTP cyclohydrolase 1 OS= Rhodoblastus acidophilus OX=1074 GN=folE PE=3 SV=1
MDDMVKSARPHRERAKKNAIGRKPTREEAEAAVATLLAWAGDDPSREGLRETPARVAKAYLEVFAGYAQDPSDVLDTVFEDVGGYGEMVLVKDIPFYSHCEHHMAPFFGHAHIAYYPAGGVFGLSKFGRLVDIYARRLQTQETMTAQILAALDARLNSRGAAVMIEAEHMCMSMRGVRKPGATTVTMQFSGPFKTDPAEQARFLSLVRRR

SEQ ID NO: 13900 - protein, 210 aa, Rhodoblastus sphagnicola
  misc_feature (1)..(210): tr|A0A2S6MXX0|A0A2S6MXX0_9RHIZ GTP cyclohydrolase 1 OS= Rhodoblastus sphagnicola OX=333368 GN=folE PE=3 SV=1
MDDVVKSARPQRERTAEKNDARKPTREEAEAAVATLLAWAGDDPSREGLRDTPARVAKAYEELFAGYAQDPSDVLDTVFEDVGGYGEMVLVRDIPFYSHCEHHMAPFFGHAHIAYYPSGGVFGLSKFGRLVDIYARRLQTQETMTAQILAALDARLHSRGAAVMIEAEHMCMSMRGVRKPGASTVTMQFSGPFKTDPAEQARFLTLVRGR

SEQ ID NO: 13901 - protein, 217 aa, Rhodococcus aetherivorans
  misc_feature (1)..(217): tr|A0A059MTK4|A0A059MTK4_9NOCA GTP cyclohydrolase 1 OS= Rhodococcus aetherivorans OX=191292 GN=folE PE=3 SV=1
MSVNHLDSETDSASIGGDGEVLRSLESGRVFDQARAEAAVRELLIAVGEDPEREGLLDTPARVARAYREMFAGLYTDPDSVLDKTFDEGHQELVLVRDIPMYSTCEHHLVSFHGVAHVGYIPGRTGRVTGLSKLARVVDLYAKRPQVQERLTSQIADALVRKLDPVGVIVVVEAEHLCMAMRGIRKPGASTTTSAVRGLLQSNSASRAEALDLILRR

SEQ ID NO: 13902 - protein, 205 aa, Rhodococcus agglutinans
  misc_feature (1)..(205): tr|A0A3S3ATA7|A0A3S3ATA7_9NOCA GTP cyclohydrolase 1 OS= Rhodococcus agglutinans OX=1644129 GN=folE PE=3 SV=1
MSVNQLGSETVALMTGRPFDQARAEAAVRELLIAVGEDPDRPGLLDTPGRVARAYREVFAGLYTDPDDVLNTTFDEGHQEMVLVRDIPMYSTCEHHLVSFHGVAHVGYIPGPTGRVTGLSKLARLVDLYAKRPQVQERLTSQIADALVRKLDPRGAIVVIEAEHLCMAMRGIRKPGASTTTSAVRGLFQSNSASRAEALDLILRK

SEQ ID NO: 13903 - protein, 221 aa, Rhodococcus biphenylivorans
  misc_feature (1)..(221): tr|A0A2Z4VE99|A0A2Z4VE99_9NOCA GTP cyclohydrolase 1 OS= Rhodococcus biphenylivorans OX=1500843 GN=folE PE=3 SV= 1
MEGERVSVNHLKSDTGSDPEDVTTHELSVDAGRTFDQARAEAAVRELLIAVGEDPDREGLRDTPARVARAYREVFGGLFTDPDEVLDTTFDEGHQELVLVRDIPMYSTCEHHLVSFHGVAHVGYIPGPTGRVTGLSKLARVVDLYAKRPQVQERLTRQIADAMMRKLQPRGVIVVVEAEHLCMAMRGIRKPGASTTTSAVRGLFQTSSASRAEALDLILRR

SEQ ID NO: 13904 - protein, 218 aa, Rhodococcus coprophilus
  misc_feature (1)..(218): tr|A0A2X4UHS0|A0A2X4UHS0_9NOCA GTP cyclohydrolase 1 OS= Rhodococcus coprophilus OX=38310 GN=folE PE=3 SV=1
MSVDHVSTATGSGMDDDDVVSQTLSVEAGRVFDQARAEAAVRELLIAVGEDPEREGLRDTPARVARAYREVFAGLFTNPDEVLNTTFDEGHRELVLVRDIPMYSTCEHHLVSFHGVAHVGYIPGPTGRVTGLSKLARVVDLYAKRPQVQERLTSQIADALVRKLEPRGVIVVVEAEHLCMAMRGIRKPGASTTTSAVRGLLQTSSASRAEALDLILRR

SEQ ID NO: 13905 - protein, 205 aa, Rhodococcus enclensis
  misc_feature (1)..(205): tr|A0A1C4EYL4|A0A1C4EYL4_9NOCA GTP cyclohydrolase 1 OS= Rhodococcus enclensis OX=1049584 GN=folE PE=3 SV=1
MSVNDVASELVSLGTGRPFDQARAEAAVRELLIAVGEDPERPGLLDTPARVARSYKEIFAGLYSEPDDALNTTFDEGHQELVLVRDIPMFSTCEHHLVSFHGVAHVGYIPGKSGKVTGLSKLARVVDLYAKRPQVQERLTSQIADALMRKLDPRGAIVVIEAEHLCMAMRGIRKPGASTTTSAVRGLLQSSAASRSEALDLILRK

SEQ ID NO: 13906 - protein, 205 aa, Rhodococcus erythropolis; identical to SEQ ID NO: 13905
  misc_feature (1)..(205): tr|C0ZPK6|C0ZPK6_RHOE4 GTP cyclohydrolase 1 OS=Rhodococ cus erythropolis (strain PR4 / NBRC 100887) OX=234621 G N=folE PE=3 SV=1

SEQ ID NO: 13907 - protein, 205 aa, Rhodococcus erythropolis; identical to SEQ ID NO: 13905
  misc_feature (1)..(205): tr|A0A0C3AE84|A0A0C3AE84_RHOER GTP cyclohydrolase 1 OS= Rhodococcus erythropolis OX=1833 GN=folE PE=3 SV=1

SEQ ID NO: 13908 - protein, 227 aa, Rhodococcus fascians
  misc_feature (1)..(227): tr|A0A161GMH1|A0A161GMH1_RHOFA GTP cyclohydrolase 1 OS= Rhodococcus fascians D188 OX=1051973 GN=folE PE=3 SV=1
MSVNRTDESTGDSAEVPAAVQSVVPQQGITETVAYATGAVFDQPRAEAAVRELLIAVGEDPDRPGLLDTPARVARSYREIFAGLYTDPDTALNTTFDEGHQELVLVRDIPMYSTCEHHLVSFHGVAHVGYIPGKSGKVTGLSKLARVVDMYAKRPQVQERLTSQIADALMRKLDPRGAIVVIEAEHLCMAMRGIRKPGASTTTSAVRGLLQSSAASRSEALDLILRK

SEQ ID NO: 13909 - protein, 188 aa, Rhodococcus fascians
  misc_feature (1)..(188): tr|A0A260U2C0|A0A260U2C0_RHOFA GTP cyclohydrolase 1 OS= Rhodococcus fascians OX=1828 GN=folE PE=3 SV=1
MFDQPRAEAAVRELLIAVGEDPDRPGLLDTPARVARSYREIFAGLYTDPDTALNTTFDEGHQELVLVRDIPMYSTCEHHLVSFHGVAHVGYIPGKSGKVTGLSKLARVVDMYAKRPQVQERLTSQIADALMRKLDPRGAIVVIEAEHLCMAMRGIRKPGASTTTSAVRGLLQSSAASRSEALDLILRK

SEQ ID NO: 13910 - protein, 216 aa, Rhodococcus gordoniae
  misc_feature (1)..(216): tr|A0A379M295|A0A379M295_9NOCA GTP cyclohydrolase 1 OS= Rhodococcus gordoniae OX=223392 GN=folE PE=3 SV=1
MSVNHLKSDTGSDPEDVTTHALSVDAGRTFDQARAEAAVRELLIAVGEDPDREGLRDTPARVARAYREVFGGLFTDPDEVLDTTFDEGHQELVLVRDIPMYSTCEHHLVSFHGVAHVGYIPGPTGRVTGLSKLARVVDLYAKRPQVQERLTSQVADAMMRKLQPRGVIVVVEAEHLCMAMRGIRKPGASTTTSAVRGLFQTSSASRAEALDLILRR

SEQ ID NO: 13911 - protein, 219 aa, Rhodococcus hoagii
  misc_feature (1)..(219): tr|A0A3S5Y2E7|A0A3S5Y2E7_RHOH1 GTP cyclohydrolase 1 OS= Rhodococcus hoagii (strain 103S) OX=685727 GN=folE PE=3 SV=1
MGQGSQPRYWRCGRLSVNQLGSESVALATGRPFDQARAEAAVRELLLAVGEDPDRPGLLDTPARVARAYREVFAGLYTNPDDVLNTTFDEGHQELVLVRDIPMYSTCEHHLVSFHGVAHVGYIPGPEGRVTGLSKLARLVDLYAKRPQVQERLTSQIADALMAKLAPRGAIVVVEAEHLCMAMRGIRKPGASTTTSAVRGLFQSNSASRAEALDLILRK

SEQ ID NO: 13912 - protein, 205 aa, Rhodococcus hoagii
  misc_feature (1)..(205): tr|A0A2K7TVR9|A0A2K7TVR9_RHOHA GTP cyclohydrolase 1 OS= Rhodococcus hoagii OX=43767 GN=folE PE=3 SV=1
MSVNQLGSESVALATGRPFDQARAEAAVRELLLAVGEDPDRPGLLDTPARVARAYREVFAGLYTNPDDVLNTTFDEGHQELVLVRDIPMYSTCEHHLVSFHGVAHVGYIPGPEGRVTGLSKLARLVDLYAKRPQVQERLTSQIADALMAKLAPRGAIVVVEAEHLCMAMRGIRKPGASTTTSAVRGLFQSNSASRAEALDLILRK

SEQ ID NO: 13913 - protein, 188 aa, Rhodococcus imtechensis
  misc_feature (1)..(188): tr|I0W6R1|I0W6R1_9NOCA GTP cyclohydrolase 1 OS=Rhodococ cus imtechensis RKJ300 = JCM 13270 OX=1165867 GN=folE P E=3 SV=1
MFDQPRAEAAVRELLIAIGENPDRPGLRDTPARVARSYREVFAGLYTDPDTVLNTTFDEGHQELVLVRDIPLYSTCEHHLVSFHGVAHVGYIPGKTGKVTGLSKLARVVDLYAKRPQVQERLTSQIADAVMRKLDPRGAIVVIEAEHLCMAMRGIRKPGASTTTSAVRGLLQSSAASRSEALDLILRK

SEQ ID NO: 13914 - protein, 198 aa, Rhodococcus imtechensis
  misc_feature (1)..(198): tr|I0WDH5|I0WDH5_9NOCA GTP cyclohydrolase 1 OS=Rhodococ cus imtechensis RKJ300 = JCM 13270 OX=1165867 GN=folE P E=3 SV=1
MPSTATLHVLHQAPGRDLAAAEEAAAAFLEALGIDLDSESLRQTPRRMAHGYAELFTPRAFDLTTFPNDEDYDELVLVRNVPLRSVCEHHLLPFAGTVHIGYLPGERIIGLSKLARVAEHFACRPQVQERLTKQIAGWLDEHLHPRGVGVVIEAEHSCMTLRGVQSVGSATVTSALLGALRDDPRSRQEFFALAGVHA

SEQ ID NO: 13915 - protein, 203 aa, Rhodococcus jostii
  misc_feature (1)..(203): tr|Q0RVZ8|Q0RVZ8_RHOJR GTP cyclohydrolase 1 OS=Rhodococ cus jostii (strain RHA1) OX=101510 GN=folE PE=3 SV=1
MTVVNDVVVAVQTGRTFDQPRAEAAVRELLAAVGEDPDRPGLVDTPARVARAYKEIFGGLYTDPDSVLNTTFDEGHQELVLVRDIPMFSTCEHHLVSFHGVAHVGYIPGKSGKVTGLSKLARVVDLYAKRPQVQERLTSQIADAVMRKLDPRGAIVVVEAEHLCMAMRGIRKPGASTTTSAVRGLLQSSAASRAEALDLILRK

SEQ ID NO: 13916 - protein, 205 aa, Rhodococcus jostii
  misc_feature (1)..(205): tr|Q0S8E2|Q0S8E2_RHOJR GTP cyclohydrolase 1 OS=Rhodococ cus jostii (strain RHA1) OX=101510 GN=folE PE=3 SV=1
MSVNHLGSEPVALETGRVFDQPRAEAAVRELLIAIGEDPDRPGLRDTPSRVARSYREVFAGLYTDPDTVLNTTFDEGHQELVLVRDIPLYSTCEHHLVSFHGVAHVGYIPGKTGKVTGLSKLARVVDLYAKRPQVQERLTSQIADAVMRKLDPRGAIVVIEAEHLCMAMRGIRKPGASTTTSAVRGLLQSSAASRSEALDLILRK

SEQ ID NO: 13917 - protein, 198 aa, Rhodococcus koreensis; identical to SEQ ID NO: 13914
  misc_feature (1)..(198): tr|A0A1H4LVQ7|A0A1H4LVQ7_9NOCA GTP cyclohydrolase 1 OS= Rhodococcus koreensis OX=99653 GN=folE PE=3 SV=1

SEQ ID NO: 13918 - protein, 203 aa, Rhodococcus koreensis
  misc_feature (1)..(203): tr|A0A1H4TW26|A0A1H4TW26_9NOCA GTP cyclohydrolase 1 OS= Rhodococcus koreensis OX=99653 GN=folE PE=3 SV=1
MNHLGSEPVALETGRVFDQPRAEAAVRELLIAIGEDPDRPGLRDTPARVARSYREVFAGLYTDPDTVLNTTFDEGHQELVLVRDIPLYSTCEHHLVSFHGVAHVGYIPGRTGKVTGLSKLARVVDLYAKRPQVQERLTSQIADAVMRKLDPRGAIVVIEAEHLCMAMRGIRKPGASTTTSAVRGLLQSSAASRSEALDLILRK

SEQ ID NO: 13919 - protein, 208 aa, Rhodococcus kroppenstedtii
  misc_feature (1)..(208): tr|A0A1I0TTA4|A0A1I0TTA4_9NOCA GTP cyclohydrolase 1 OS= Rhodococcus kroppenstedtii OX=293050 GN=folE PE=3 SV=1
MSLSRVDESYDQPVSVSNGRPFDRERAEAAVRELLLAVGEDPDREGLKDTPARVARAYAEVFGGLFVDPDSVLDTTFDESHRELVLVRDIPMYSTCEHHLVSFHGVAHVGYIPGPSGRVTGLSKLARVVDLYAKRPQVQERLTTQVADALMRKLEPRGVIVVMEAEHLCMAMRGIRKPGARTTTSAVRGVFQSSAVSRSEALDLILRG

SEQ ID NO: 13920 - protein, 212 aa, Rhodococcus kyotonensis
  misc_feature (1)..(212): tr|A0A239GQM8|A0A239GQM8_9NOCA GTP cyclohydrolase 1 OS= Rhodococcus kyotonensis OX=398843 GN=folE PE=3 SV=1
MSVRHVDEDGEAVVNDVVAVETGRRFDQPRAEAAVRELLIAVGENPDRPGLLDTPARVARAYREIFGGLYTDPDSVLNTTFDEGHQELVLVRDIPMFSTCEHHLVSFHGVAHVGYIPGKAGKVTGLSKLARVVDLYAKRPQVQERLTSQIADAVMRKLDPRGAIVVIEAEHLCMAMRGIRKPGASTTTSAVRGLLQSSAASRSEALDLILRK

SEQ ID NO: 13921 - protein, 215 aa, Rhodococcus kyotonensis
  misc_feature (1)..(215): tr|A0A177YL02|A0A177YL02_9NOCA GTP cyclohydrolase 1 OS= Rhodococcus kyotonensis OX=398843 GN=folE PE=3 SV=1
MSVRHAGDDGAAAINGVGELVAVETGQTFDQPRAEAAVRELLIAVGEDPDRPGLVDTPARVARAYKEIFGGLYTDPDSVLNTTFDEGHQELVLVRDIPMFSTCEHHLVSFHGVAHVGYIPGKAGKVTGLSKLARVVDLYAKRPQVQERLTSQIADAVMRKLDPRGAIVVIEAEHLCMAMRGIRKPGASTTTSAVRGLLQSSAASRAEALDLILRK

SEQ ID NO: 13922 - protein, 229 aa, Rhodococcus maanshanensis
  misc_feature (1)..(229): tr|A0A1H7HH34|A0A1H7HH34_9NOCA GTP cyclohydrolase 1 OS= Rhodococcus maanshanensis OX=183556 GN=folE PE=3 SV=1
MSVNQLGGANSRDASTSQERDAVESDERGAAAPLECIETGRVFDQPRAEAAIRELLIAVGENPDRPGLLDTPARVARAYREVFAGLYTDPDSVLNTTFDEGHQELVLVRDIPMYSTCEHHLVSFHGVAHVGYIPGSTGRVTGLSKLARLVDLYAKRPQVQERLTSQIADAMVRKLDPRGVIVVVEAEHLCMAMRGIRKPGASTTTSAVRGLLQSSAASRAEALDLILRK

SEQ ID NO: 13923 - protein, 196 aa, Rhodococcus opacus
  misc_feature (1)..(196): tr|A0A076EXG9|A0A076EXG9_RHOOP GTP cyclohydrolase 1 OS= Rhodococcus opacus OX=37919 GN=folE PE=3 SV=1
MLLYGGAAGVGDPRNADLVAAESAARAFLHALGIDTGASGVRNTPARMARAYLDLFTPSTFELTTFPNDEGYDELVVAKSIPVRSVCEHHLLPFSGVAHVGYLPGERVLGLSKLARIVEFFARRPQVQERLTKQVADCLTTKLGPKGVGVVIEAEHSCMSMRGIRAIGSTTVTSALSGSLRDDPRSRQEFFTLTGV

SEQ ID NO: 13924 - protein, 205 aa, Rhodococcus opacus
  misc_feature (1)..(205): tr|A0A076EN39|A0A076EN39_RHOOP GTP cyclohydrolase 1 OS= Rhodococcus opacus OX=37919 GN=folE PE=3 SV=1
MSVNHLGSEPVALETGRVFDQPRAEAAVRELLIAIGENPDRPGLRDTPARVARSYREVFAGLYTDPDTVLNTTFDEGHQELVLVRDIPLYSTCEHHLVSFHGVAHVGYIPGKTGKVTGLSKLARVVDLYAKRPQVQERLTSQIADAVMRKLDPRGAIVVIEAEHLCMAMRGIRKPGASTTTSAVRGLLQSSAASRSEALDLILRK

SEQ ID NO: 13925 - protein, 221 aa, Rhodococcus pyridinivorans; identical to SEQ ID NO: 13903
  misc_feature (1)..(221): tr|H0JLQ4|H0JLQ4_9NOCA GTP cyclohydrolase 1 OS=Rhodococ cus pyridinivorans AK37 OX=1114960 GN=folE PE=3 SV=1

SEQ ID NO: 13926 - protein, 216 aa, Rhodococcus pyridinivorans
  misc_feature (1)..(216): tr|A0A419ZGQ0|A0A419ZGQ0_9NOCA GTP cyclohydrolase 1 OS= Rhodococcus pyridinivorans OX=103816 GN=folE PE=3 SV=1
MSVNHLKSDTGSDPEDVTTHELSVDAGRTFDRARAEAAVRELLIAVGEDPDREGLRDTPSRVARAYREVFGGLFTDPDEVLDTTFDEGHQELVLVRDIPMYSTCEHHLVSFHGVAHVGYIPGPTGRVTGLSKLARLVDLYAKRPQVQERLTSQIADAMMRKLQPRGVIVVVEAEHLCMAMRGIRKPGASTTTSAVRGLFQTSSASRAEALDLILRR

SEQ ID NO: 13927 - protein, 215 aa, Rhodococcus qingshengii
  misc_feature (1)..(215): tr|A0A4R5Z9G7|A0A4R5Z9G7_9NOCA GTP cyclohydrolase 1 OS= Rhodococcus qingshengii OX=334542 GN=folE PE=3 SV=1
MKSEQLLILCEKFPHLFNKQTIEENGNLANVTTFTEAIKQLIKLCGDDPERDGLQETPYRVLKAFLEYTEGYHEDPKLHLEKTFDIHHKGLILIKDIEFYSLCEHHFSPFFGVAHIGYIPKEKITGLSKMGRLVEGYAKRFQVQERLTTQIAEAIEEVLDPEGTIVVVEAKHMCMCSRGIKKANTVTTTSSLLGIYENRPDLRAEFYSLIKNARE

SEQ ID NO: 13928 - protein, 205 aa, Rhodococcus qingshengii; identical to SEQ ID NO: 13905
  misc_feature (1)..(205): tr|A0A069JB99|A0A069JB99_9NOCA GTP cyclohydrolase 1 OS= Rhodococcus qingshengii OX=334542 GN=folE PE=3 SV=1

SEQ ID NO: 13929 - protein, 206 aa, Rhodococcus rhodnii
  misc_feature (1)..(206): tr|R7WSJ5|R7WSJ5_9NOCA GTP cyclohydrolase 1 OS=Rhodococ cus rhodnii LMG 5362 OX=1273125 GN=folE PE=3 SV=1
MSDPAAFADAVAIATGRTFDQARAEAAVRELLLAVGEDPDRPGLRDTPARVARSYREIFSGLYTDPGDVLGTTFDEEHRELIVVRDIPMYSTCEHHLVSFHGVAHVGYIPGREGRVTGLSKLARVVDLYAKRPQVQERLTSQVADALVRKLEPTGVIVVIEAEHLCMAMRGIRKPGARTTTSAVRGSLQSNSASRAEALDLILRAR

SEQ ID NO: 13930 - protein, 216 aa, Rhodococcus rhodochrous
  misc_feature (1)..(216): tr|A0A1X7KPQ4|A0A1X7KPQ4_RHORH GTP cyclohydrolase 1 OS= Rhodococcus rhodochrous J3 OX=903528 GN=folE PE=3 SV=1
MSVNHLKSDTGSDPEDVTTHELSVDAGRTFDQARAEAAVRELLIAVGEDPDREGLRDTPARVARAYREVFGGLFTDPDEVLDTTFDEGHQELVLVRDIPMYSTCEHHLVSFHGVAHVGYIPGPTGRVTGLSKLARVVDLYAKRPQVQERLTSQIADAMMRKLQPRGVIVVVEAEHLCMAMRGIRKPGASTTTSAVRGLFQTSSASRAEALDLILRR

SEQ ID NO: 13931 - protein, 217 aa, Rhodococcus rhodochrous; identical to SEQ ID NO: 13901
  misc_feature (1)..(217): tr|W4A9Z2|W4A9Z2_RHORH GTP cyclohydrolase 1 OS=Rhodococ cus rhodochrous ATCC 21198 OX=1429046 GN=folE PE=3 SV=1

SEQ ID NO: 13932 - protein, 217 aa, Rhodococcus ruber
  misc_feature (1)..(217): tr|M2ZJ80|M2ZJ80_9NOCA GTP cyclohydrolase 1 OS=Rhodococ cus ruber BKS 20-38 OX=1278076 GN=folE PE=3 SV=1
MSVNHLDSEADSVSIGGDGQPLRSRESGRAFDQARAEAAVRELLIAVGEDPEREGLLETPARVARAYREMFAGLYTDPDSVLDKTFDEGHQELVLVRDIPMYSTCEHHLVSFHGVAHVGYIPGPTGRVTGLSKLARVVDLYAKRPQVQERLTSQVADALMRKLDPVGVIGVVEAEHLCMAMRGSRKPGASTTTSAVRGLLQTNSASRAEALDLILRR

SEQ ID NO: 13933 - protein, 217 aa, Rhodococcus ruber
  misc_feature (1)..(217): tr|A0A098BPJ4|A0A098BPJ4_9NOCA GTP cyclohydrolase 1 OS= Rhodococcus ruber OX=1830 GN=folE PE=3 SV=1
MSVNHLDSEADSVSIGGDGELLRSRESGRAFDQARAEAAVRELLIAVGEDPEREGLLDTPARVARAYREMFAGLYTDPDSVLDKTFDEGHQELVLVRDIPMYSTCEHHLVSFHGVAHVGYIPGPTGRVTGLSKLARVVDLYAKRPQVQERLTSQVADALMRKLDPVGVIVVVEAEHLCMAMRGIRKPGASTTTSAVRGLLQTNSASRAEALDLILRR

SEQ ID NO: 13934 - protein, 205 aa, Rhodococcus sp.
  misc_feature (1)..(205): tr|A0A4P8Q1E5|A0A4P8Q1E5_9NOCA GTP cyclohydrolase 1 OS= Rhodococcus sp. SGAir0479 OX=2567884 GN=folE PE=3 SV=1
MSVNQLGSESVALMTGRPFDQARAEAAVRELLIAVGEDPDRPGLLDTPARVARAYREVFAGLYTEPDDVLNTTFDEGHQELVLVRDIPMYSTCEHHLVSFHGVAHVGYIPGPTGRVTGLSKLARLVDLYAKRPQVQERLTSQVADAMVRKLDPNGVIVVMEAEHLCMAMRGIRKPGASTTTSAVRGLFQTNSASRAEALDLILRK

SEQ ID NO: 13935 - protein, 229 aa, Rhodococcus sp.
  misc_feature (1)..(229): tr|A0A285E068|A0A285E068_9NOCA GTP cyclohydrolase 1 OS= Rhodococcus sp. OK270 OX=1882814 GN=folE PE=3 SV=1
MSVNQLGGANSRDASTSQERDAAEAPERVAAAPLECVETGRVFDQPRAEAAIRELLIAVGENPDRPGLLDTPARVARAYREVFAGLYTDPDSVLNTTFDEGHQELVLVRDIPMYSTCEHHLVSFHGVAHVGYIPGSTGRVTGLSKLARLVDLYAKRPQVQERLTSQIADAMVRKLDPRGVIVVVEAEHLCMAMRGIRKPGASTTTSAVRGLLQSSAASRSEALDLILRK

SEQ ID NO: 13936 - protein, 219 aa, Rhodococcus triatomae
  misc_feature (1)..(219): tr|M2VM00|M2VM00_9NOCA GTP cyclohydrolase 1 OS=Rhodococ cus triatomae BKS 15-14 OX=1278078 GN=folE PE=3 SV=1
MGGAVQVSVHQLGGAGTGEAGEVLQSLESGRAFDQQRAEAAVRELLIAVGEDPDRPGLLDTPARVARAYREVFAGLYTDPDSVLDTTFDEGHQELVLVRDIPMYSTCEHHLVSFHGVAHVGYIPGPTGRVTGLSKLARVVDLYAKRPQVQERLTSQIADALVRKLDPRGVIVVVEAEHLCMAMRGIRKPGASTTTSAVRGLFQTSAASRAEALDLIVRR

SEQ ID NO: 13937 - protein, 219 aa, Rhodococcus triatomae
  misc_feature (1)..(219): tr|A0A1G8S051|A0A1G8S051_9NOCA GTP cyclohydrolase 1 OS= Rhodococcus triatomae OX=300028 GN=folE PE=3 SV=1
MSVNDLSSDGHSGAGVDSVVPSAEVATATGRPFDQERAEAAVRELLIAVGEDPSRPGLVDTPARVARAYREVFAGLYTDPDAVLNTTFDEGHQELVVVRDIPMFSTCEHHLVSFHGVAHVGYIPGPTGRVTGLSKLARLVDLYAKRPQVQERLTSQVADAMMRKLDPRGVIVVVEAEHLCMAMRGIRKPGARTTTSAVRGTLQSSAASRSEALDLILRK

SEQ ID NO: 13938 - protein, 204 aa, Rhodococcus tukisamuensis
  misc_feature (1)..(204): tr|A0A1G7CZW7|A0A1G7CZW7_9NOCA GTP cyclohydrolase 1 OS= Rhodococcus tukisamuensis OX=168276 GN=folE PE=3 SV=1
MSAALDLEVEPPTQVRAGRLRPAVDLPAAERAVADLLRALGRDPDGVHLSDTPRRVAASYEEMLTPRDFDLTTFPNDAGYDELVLARDIPMISLCEHHLLPFRGVAHVGYLPGGRILGLSKLARVVELFARDLQVQERLTMQVADWLGEHLQPRGIGVVIEAEHMCMSVRGVQAAGTRTVTSAVRGALRENPAARREFLDLIRG

SEQ ID NO: 13939 - protein, 216 aa, Rhodococcus tukisamuensis
  misc_feature (1)..(216): tr|A0A1G6N933|A0A1G6N933_9NOCA GTP cyclohydrolase 1 OS= Rhodococcus tukisamuensis OX=168276 GN=folE PE=3 SV=1
MSVNQLGGANSHGGSNESHELTALASGRVFDQPRAEAAVRELLLAVGEDPDRPGLLDTPSRVARAYREVFAGLYTDPDSVLNTTFDEGHQELVLVRDIPMYSTCEHHLVSFHGVAHVGYIPGTTGRVTGLSKLARLVDLYAKRPQVQERLTSQIADAMMRKLDPRGVIVVVEAEHLCMAMRGIRKPGASTTTSAVRGLLQSSAASRSEALDLILRK

SEQ ID NO: 13940 - protein, 203 aa, Rhodococcus wratislaviensis
  misc_feature (1)..(203): tr|A0A3D9R749|A0A3D9R749_9NOCA GTP cyclohydrolase 1 OS= Rhodococcus wratislaviensis OX=44752 GN=folE PE=3 SV=1
MNHLGSEPVALETGRVFDQPRAEAAVRELLIAIGENPDRPGLRDTPARVARSYREVFAGLYTDPDTVLNTTFDEGHQELVLVRDIPLYSTCEHHLVSFHGVAHVGYIPGKTGKVTGLSKLARVVDLYAKRPQVQERLTSQIADAVMRKLDPRGAIVVIEAEHLCMAMRGIRKPGASTTTSAVRGLLQSSAASRSEALDLILRK

SEQ ID NO: 13941 - protein, 205 aa, Rhodococcus wratislaviensis; identical to SEQ ID NO: 13924
  misc_feature (1)..(205): tr|X0RFS7|X0RFS7_9NOCA GTP cyclohydrolase 1 OS=Rhodococ cus wratislaviensis NBRC 100605 OX=1219028 GN=folE PE=3 SV=1

SEQ ID NO: 13942 - protein, 269 aa, Rhodocyclaceae bacterium
  misc_feature (1)..(269): tr|A0A3S0CPC3|A0A3S0CPC3_9RHOO GTP cyclohydrolase FolE2 OS=Rhodocyclaceae bacterium OX=1898103 GN=folE2 PE=3 S V=1
MNAPTAIAIPDVQSSADSRRIAIDKVGIKSIRHPIKVADKRGGVQHTVASFNMYVGLPHNFKGTHMSRFIEILNGREREISVENFEPMLRTMVERLEAETGHVEMSFPYFINKTAPVSGVQSLMDYEVCFIGSIREGGAYEFTMKVVVPVTSLCPCSKKISAYGAHNQRSHVTVTAVLNDHLWIEEMVQMVEAQASCEVFGLLKRPDEKWVTERAYDNPKFVEDMVRDVAGELNREPRIDAYVVESENFESIHNHSAYALIERDKRRDA

SEQ ID NO: 13943 - protein, 269 aa, Rhodocyclaceae bacterium
  misc_feature (1)..(269): tr|A0A524B6S0|A0A524B6S0_9RHOO GTP cyclohydrolase FolE2 OS=Rhodocyclaceae bacterium OX=1898103 GN=folE2 PE=3 S V=1
MTSPSNSVTQIPDVQNSADTRQLAINKVGIKAIRHPIKVQDKTGGIQHTIAVFNMYVGLPHNFKGTHMSRFVEILNGHEREISVENFPTMLREMLQKLEAETGHIEMNFPYFINKAAPVSGVQSLMDYDVTFIGDISGDEISFSLKVVVPVTSLCPCSKKISERGAHNQRSHVTITARTTERVWIEEIVELVESEASCELFGLLKRPDEKYVTERAYDNPKFVEDMVRDVAARLNAEARIEAYVVESENFESIHNHSAYALIERDKKIG

SEQ ID NO: 13944 - protein, 207 aa, Rhodocyclales bacterium
  misc_feature (1)..(207): tr|A0A3L6M3U3|A0A3L6M3U3_9RHOO GTP cyclohydrolase 1 OS= Rhodocyclales bacterium GT-UBC OX=2316108 GN=folE PE=3 SV=1
MSAPDDHLAPSNPPGIGIARSGQFDPVAFETAVGDLLKACGIADDSPHMGRTAQRVRELWQKRLLGGYDLDPSTVLGEGFADERSDLVVIRGIAVHGVCPHHLVPFRGVAHVGYLPGGRLHGFGRIARLVDAIGHRFTYQEWMSRDIANALVTYGQAAGAACIIEAEQLCLLLGEDRRGDERVVTQAFAGAFETSAQLRNEFLRAVG

SEQ ID NO: 13945 - protein, 264 aa, Rhodocyclales bacterium
  misc_feature (1)..(264): tr|A0A1G3HSK9|A0A1G3HSK9_9RHOO GTP cyclohydrolase FolE2 OS=Rhodocyclales bacterium GWA2_65_20 OX=1802017 GN=fo lE2 PE=3 SV=1
MSIPIPDVQSSADSRQLPINKVGIKSIRHPVKVLDKSGGVQHTIATFNMYVSLPHNFKGTHMSRFVEILNAHEREISVESFESMLRDMVKLLEAETGHIEMSFPYFINKEAPVSKVKSLMDYDVTFVGEILEGGQYRQTTKVVVAATSLCPCSKKIADRGAHNQRSHITITATTNAFVWIEEIVQIAESQASCELFGLLKRPDEKHVTERAYDNPKFVEDIVRDVAGALNADARIDAYVVESENFESIHNHSAYALIEFNKKLF

SEQ ID NO: 13946 - protein, 233 aa, Rhodoferax antarcticus
  misc_feature (1)..(233): tr|A0A1Q8Y9N5|A0A1Q8Y9N5_9BURK Putative GTP cyclohydrol ase I OS=Rhodoferax antarcticus ANT.BR OX=1111071 GN=BL L52_4046 PE=4 SV=1
MNPVDTDEGTPVSVKIRERIQAARKRFHANDNIAEFIQPGELELLLDEVQEKMKGVLGSLVIDTEHDHNTDKTARRVAKMYLKEVFQGRYVPQPAITEFPNAEHLNELMIVGPITVRSACSHHLVPVIGKLWIGVLPNEHTNVIGLSKYARLAEWIMGRPQIQEEAVVQLADLIQRKTQPDGLAIVMEATHFCVGWRGVRDLDSKMINSVMRGSFLKDANLRREFLSLIAQKG

SEQ ID NO: 13947 - protein, 242 aa, Rhodoferax ferrireducens
  misc_feature (1)..(242): tr|Q21YW8|Q21YW8_RHOFT GTP cyclohydrolase OS=Rhodoferax ferrireducens (strain ATCC BAA-621 / DSM 15236 / T118) OX=338969 GN=Rfer_1301 PE=4 SV=1
MLMKSQSTMNPSDADEGIPVSVKIRQRLLAARKRFHANDNIADFIEPGELEQLLDEVEDKMKGVLSSLVIDTDHDHNTDETARRVAKMYLKEVFNGRYVSAPTITEFPNAEHLNELMIVGPITVRSACSHHLCPIVGQIWIGVLPNEHTNVIGLSKYARLAEWVMGRPQIQEEAVVQLADLIQEKTQPDGLAIVMEATHFCMGWRGVKDLDSKMINSVMRGSFLKDPNLRREFLSLIPKKEG

SEQ ID NO: 13948 - protein, 195 aa, Rhodoglobus vestalii
  misc_feature (1)..(195): tr|A0A543UT09|A0A543UT09_9MICO GTP cyclohydrolase 1 OS= Rhodoglobus vestalii OX=193384 GN=folE PE=3 SV=1
MSIDVARIEAAVAEMLSAVGEDPARAGLTATPRRVAEAYSEFFAGNELNALDHLSDSIEFTAKADQTGELVLVRDIEFRSMCEHHLLPFLGVAHVAYVPDERIIGLGNIARVVETISARAQLQERLTEEITEAINDGLSPRGVLVVIDAVHGCVSTRGPRQTASSTVTLASRGVLSDPLERAEVMALIGSRGGDG

SEQ ID NO: 13949 - protein, 234 aa, Rhodohalobacter barkolensis
  misc_feature (1)..(234): tr|A0A2N0VM10|A0A2N0VM10_9BACT GTP cyclohydrolase 1 OS= Rhodohalobacter barkolensis OX=2053187 GN=folE PE=3 SV= 1
MSKEKNVVDSLELNHAEADEIGDDHISTSVKTPLREGAFDLTDSEKIEEIEKHFAHIMHALGLDLNDESLSGTPHRVAKMYVKEIFQGLNPKNRPEARKFGNKYEYGDMVVVKNINVTSFCEHHFLPFIGKAHVAYHSTGKVIGLSKINRIVDYYARRPQVQERLTLQIADELETALESKDVAVFIESKHFCVSTRGIQDRESSTVTTEYRGQFKKEMIQQRFIDYIKTQTELA

SEQ ID NO: 13950 - protein, 299 aa, Rhodohalobacter barkolensis
  misc_feature (1)..(299): tr|A0A2N0VLN4|A0A2N0VLN4_9BACT GTP cyclohydrolase FolE2 OS=Rhodohalobacter barkolensis OX=2053187 GN=folE2 PE= 3 SV=1
MISTNLKRFYDPTFVVTDQYKESLPDLQNGPASLIEGANVPIQQVGISNFKLPLKYPTPSGDVITLETSVDGYVGLDAGKKGINMSRIMRTFYKFKDEIFHPDKLRDILEQYQEDLESRSAFLKLSFSYPMIQESLRSGMSGYQYYNVAIEGKLDEQGKFTRFVHIDFEYSSACPCSFELAEHARETRDVATIPHSQRSVANITVQLNSEMMIDDLVMACREALKTETQVMVKREDEQAFAELNGAYQKFVEDAARLLYDELNTDERIRDFVVRCAHLESLHSHDAVSRICKGVPNGLR

SEQ ID NO: 13951 - protein, 235 aa, Rhodohalobacter sp.
  misc_feature (1)..(235): tr|A0A371QP37|A0A371QP37_9BACT GTP cyclohydrolase 1 OS= Rhodohalobacter sp. SW132 OX=2293433 GN=folE PE=3 SV=1
MNKDKQTLDSTGNNHSVQDIDDIGEDHIATSVQTPLRKDAFLLSDDEKIAKIENHFGEIMQILGLDLTDESLSGTPRRVAKMYVKEIFQGLNPKNRPDAKKFGNKYEYGDLVVVKNINVTSFCEHHFLPFLGKAHVAYKSSGSVIGLSKINRLVDYYSRRPQVQERLTLQIADELETSLETGDVAVFIESKHLCVSTRGIQDRASSTVTTEYRGAFKEKDTQQRFIDYISTDTEM

SEQ ID NO: 13952 - protein, 299 aa, Rhodohalobacter sp.
  misc_feature (1)..(299): tr|A0A371QN60|A0A371QN60_9BACT GTP cyclohydrolase FolE2 OS=Rhodohalobacter sp. SW132 OX=2293433 GN=folE2 PE=3 SV=1
MITTQLKRFYDPTFTVTDQYKASLPDLQNGPSSLIEGANVPIQQVGISNFKLPLKYPTPSGELLTLETSVDGYVGLDAGKKGINMSRIMRTFYDFRDEVFYPGKLKDLLEAYQRDLDSRSAFLKLSYSYPMIKKSLRSGLEGYQYYDVSIEGKLDEYGNFRKFMHLDFVYSSACPCSFELAEHAREQRDVAAIPHSQRSVASISVELSDDIFVDELVEISRDALHTETQVMVKREDEQAFAEMNGAYQKFVEDAARLLYDKLSEEDRIYDFLVRCAHLESLHSHDAVSRICKGVPNGMR

SEQ ID NO: 13953 - protein, 184 aa, Rhodoluna lacicola
  misc_feature (1)..(184): tr|A0A060JL32|A0A060JL32_9MICO GTP cyclohydrolase 1 OS= Rhodoluna lacicola OX=529884 GN=folE PE=3 SV=1
MIDAERVKKAVVELISAIGEDPTRSELLATPEKVAVAYGEFFKGVGVDEKEVLAETFAAEHNEVVILKDIDFVSMCEHHLLPFTGVAHVAYLPSDRVIGLGRLPKLVELVAARPQLQENLTAQIADALEQGLGTKGVVVVIEARHHCVISRGARQPEANTITMAARGCYSEPASRAEVMALISK

SEQ ID NO: 13954 - protein, 202 aa, Rhodomicrobium udaipurense
  misc_feature (1)..(202): tr|A0A037UVV6|A0A037UVV6_9RHIZ GTP cyclohydrolase 1 OS= Rhodomicrobium udaipurense JA643 OX=858455 GN=folE PE=3 SV=1
MRASGDTRRPSREEAEAAVRTLLAWTGDDLTREGLLDTPKRVVDSYAEYFWGYDGDPVDELSRTFEDVQGYDDIVMLRDIDFASHCEHHMVPIIGVAHVAYIPDRRIVGISKLARVVDIYAKRLQTQETMTAQIANCIQEALKPKGVAVMIDALHQCMTMRGVHKKGTTTITTRFTGVFSEDKAERDRFMQLVNGTRVLASR

SEQ ID NO: 13955 - protein, 220 aa, Rhodomicrobium vannielii
  misc_feature (1)..(220): tr|E3I318|E3I318_RHOVT GTP cyclohydrolase 1 OS=Rhodomic robium vannielii (strain ATCC 17100 / ATH 3.1.1 / DSM 1 62 / LMG 4299) OX=648757 GN=folE PE=3 SV=1
MERKASAPVPPLREPQTGLRASADSQRPSREEAEAAVRTLLAWTGDDPTREGLIDTPKRVVDSYAEYFWGYDGDPVDELSRTFEDVQGYDDIVMLRDIDFASHCEHHMVPIIGVAHVAYIPDRRIVGISKLARVVDIYAKRLQTQETMTAQIANCIQDALKPKGVAVMIDALHQCMTMRGVHKKGTTTITTRFTGVFSEDKAERDRFMQLVNGTRVLASR

SEQ ID NO: 13956 - protein, 231 aa, Rhodonellum psychrophilum
  misc_feature (1)..(231): tr|U5BUF8|U5BUF8_9BACT GTP cyclohydrolase 1 OS=Rhodonel lum psychrophilum GCM71 = DSM 17998 OX=1123057 GN=folE PE=3 SV=1
MKQKETLLNTMGINYAQEIEEMGEDHVGTSYETPLRADAFEMDDDLKIELIGKHFKEIMHIMGLDLSDDSLKGTPHRVAKMYVKEIFSGLNPKNKPAAKLFENKYKYNEMLVEKDITFFSNCEHHFVPIYGKAHVAYISNGTVIGLSKINRIVQYFAKRPQVQERLTMQIGNELKEILGTNDVAVILDADHMCVSSRGINDVNSSTVTSFYGGKFEKDEQTRNEFLKYVSL

SEQ ID NO: 13957 - protein, 222 aa, Rhodopila globiformis
  misc_feature (1)..(222): tr|A0A2S6N7D0|A0A2S6N7D0_RHOGL GTP cyclohydrolase 1 OS= Rhodopila globiformis OX=1071 GN=folE PE=3 SV=1
MNRSGGESAVNIVTPATSRSDRGITPEPPTREQAEEAVRTLLRWAGDDPDREGLRDTPSRVARSFKEFFVGYAVDPFALLERTFEETDGYDEIVLLRDIRLESTCEHHMAPIIGRAHVAYLPYRRVVGISKLARVVDAYAKRLQIQEKLTAQIANTIHEVLEPRGVAVVIEAAHQCMTTRGVHKPGVTMVTSRMLGAFRDNAATRRELLAMIGNRGATIQSE

SEQ ID NO: 13958 - protein, 229 aa, Rhodopirellula bahusiensis
  misc_feature (1)..(229): tr|A0A2G1W3N1|A0A2G1W3N1_9PLAN GTP cyclohydrolase 1 OS= Rhodopirellula bahusiensis OX=2014065 GN=folE PE=3 SV=1
MFRDSANTIAPSNQDSDKPVVDKEQPAERTPFFVDKNAPHNEVDFARIESAVRVILEAVGEDPDRDGLLETPARVARMYAEMFAGLKSDPGRHLAKVFAEDYDEIVLVRDISFCSMCEHHLLPFTGKAHIAYLPSGKVVGLSKLARVVEEVARRPQVQERLTHTVANLIEDRLSARGVAVVVESTHSCMTMRGIRKPGSLCLTSAMRGAFKTDPKSRAEVLGLINRAAS

SEQ ID NO: 13959 - protein, 229 aa, Rhodopirellula baltica
  misc_feature (1)..(229): sp|Q7UJJ7|GCH1_RHOBA GTP cyclohydrolase 1 OS=Rhodopirel lula baltica (strain DSM 10527 / NCIMB 13988 / SH1) OX= 243090 GN=folE PE=3 SV=1
MFRESDNTIAPSNQDLNKPVVDKEQPAERTPFFVDKNAPHNEVDFARIESAVREILEAVGEDPDRDGLLETPERVARMYAEMFAGLKSDPGRHLAKVFAEDYDEIVLVRDISFCSMCEHHLLPFTGKAHIAYLPSGKVVGLSKLARVVEEVARRPQVQERLTHTVANLIEDRLSARGVAVVVESTHSCMTMRGIRKPGSLCLTSAMRGAFKTDPKSRAEVLGLINRAAS

SEQ ID NO: 13960 - protein, 210 aa, Rhodopirellula baltica
  misc_feature (1)..(210): tr|K5E4F2|K5E4F2_RHOBT GTP cyclohydrolase 1 OS=Rhodopir ellula baltica SH28 OX=993517 GN=folE PE=3 SV=1
MVDKEQPAERTPFFVDKNAPHNEVDYPRIEAAVREILEAVGEDPDRDGLLETPERVARMYAEMFAGLKSDPGRHLAKVFAEDYDEIVLVRDISFCSMCEHHLLPFTGKAHIAYLPSGKVVGLSKLARVVEEVARRPQVQERLTHTVANLIEDRLSARGVAVVVESTHSCMTMRGIRKPGSLCLTSAMRGAFKTDPKSRAEVLGLINRAAS

SEQ ID NO: 13961 - protein, 229 aa, Rhodopirellula europaea
  misc_feature (1)..(229): tr|M5S0L5|M5S0L5_9PLAN GTP cyclohydrolase 1 OS=Rhodopir ellula europaea SH398 OX=1263868 GN=folE PE=3 SV=1
MFRDSDNTIAPSNQDSNKPVVDKEQPAEQTPFFVDKNAPHNEVDFARIESAVREILEAVGEDPDRDGLLETPARVARMYAEMFAGLKSEPGRHLAKVFAEDYDEIVLVRDISFCSMCEHHLLPFTGKAHIAYLPSGKVVGLSKLARVVEEVARRPQVQERLTHTVANLIEDRLSARGVAVVVESTHSCMTMRGIRKPGSLCLTSAMRGAFKTDPKSRAEVLGLINRAAS

SEQ ID NO: 13962 - protein, 83 aa, Rhodopirellula europaea
  misc_feature (1)..(83): tr|M2AAD7|M2AAD7_9PLAN GTP cyclohydrolase 1 OS=Rhodopir ellula europaea 6C OX=1263867 GN=RE6C_05839 PE=3 SV=1
MVEEVARRPQVQERLTHTVANLIEDRLSARGVAVVVESTHSCMTMRGIRKPGSLCLTSAMRGAFKTDPKSRAEVLGLINRAAS

SEQ ID NO: 13963 - protein, 210 aa, Rhodopirellula islandica
  misc_feature (1)..(210): tr|A0A0J1BJB4|A0A0J1BJB4_RHOIS GTP cyclohydrolase 1 OS= Rhodopirellula islandica OX=595434 GN=folE PE=3 SV=1
MADKEQPAERTPFFVDKNAPHNEVDFARIESAVREILEAVGEDPDRDGLLETPERVARMYAEMFAGLKSDPGRHLAKVFAEDYDEIVLVRDISFCSMCEHHLLPFTGKAHIAYLPSGKVVGLSKLARVVEEVARRPQVQERLTHTVANLIEDRLSARGVAVVVESTHSCMTMRGIRKPGSLCLTSAMRGAFKTDPKSRAEVLGLINRAAS

SEQ ID NO: 13964 - protein, 235 aa, Rhodopirellula maiorica
  misc_feature (1)..(235): tr|M5RX92|M5RX92_9PLAN GTP cyclohydrolase 1 OS=Rhodopir ellula maiorica SM1 OX=1265738 GN=folE PE=3 SV=1
MQNVDPRSYKEPSCNLPFLQSDSGANCNAASISPEPPLFPDRNAPSRDHVDLPRIEQAVRIILDAVGEDPDREGLLETPARVARMYAEMFAGLKSDPGRHLAKVFTEEYDEIVLVRDISFCSMCEHHLLPFTGRAHIAYLPSGKVVGLSKLARVVEEVARRPQVQERMTQTIADLVEERLSATGVAVVCEATHSCMTMRGVRKPGSLCLTSAMRGAFRDDPKSRAEVLGLINREV

SEQ ID NO: 13965 - protein, 221 aa, Rhodopirellula sallentina
  misc_feature (1)..(221): tr|M5U7N5|M5U7N5_9PLAN GTP cyclohydrolase 1 OS=Rhodopir ellula sallentina SM41 OX=1263870 GN=folE PE=3 SV=1
MIASSKNDSSEEGEDTATERQPFFVDKNEPKNDSVDYPAIEAAVRVILESVGEDPDRDGLLETPARVARMYAEMFAGLKSDPGRHLAKVFEEDYDEIVLVRDISFCSMCEHHLLPFTGKAHIAYLPSGKVVGLSKLARVVEEVARRPQVQERLTHTVANLIEERLSARGVAVVVESTHSCMTMRGIRKPGSLCLTSAMRGTFKTDPKSRAEVLGLINRSAS

SEQ ID NO: 13966 - protein, 274 aa, Rhodopirellula sp.
  misc_feature (1)..(274): tr|A0A255QPP7|A0A255QPP7_9PLAN GTP cyclohydrolase FolE2 OS=Rhodopirellula sp. MGV OX=2023130 GN=folE2 PE=3 SV= 1
MTNPSINSTPLPDIQSTGDRRQVAINKVGVTNVRYPISLRTPGSGKGNEFLHTVATINMFVSLPHDVKGTHMSRFLEVLNEFHEELCSDTLSLVTNRMKEKLGSEDAYLELTFPYFINKKAPVTGQSGKLDFDVAFELASNGTDDFVMTLKVPATSLCPCSKEISEYGAHNQRCDMTVKVRMADGVNLWIEELFSIVEKCASTQVFSVLKRPDEKWVTEKAYENPKFVEDIVRDLAVALNNDDRIVWYQCSSENYESIHNHNAFAFIECDKREQ

SEQ ID NO: 13967 - protein, 197 aa, Rhodopirellula sp.
  misc_feature (1)..(197): tr|A0A2E4M5D7|A0A2E4M5D7_9PLAN GTP cyclohydrolase 1 OS= Rhodopirellula sp. OX=2024855 GN=folE PE=3 SV=1
MNKSEANGQNVDLPRIEAAVKEILAAVGEDPEREGLIETPGRVARMYAEMFGGLHTDPTEHTKKFFPEEYDEVVLVRDISFCSMCEHHLLPFIGKAHIGYMPDGKVIGLSKLARVVEGFARRPQVQERMTQQVANLLVEELGAKGVAVVLEASHSCMSIRGVRKPGSITVTSAMKGIFRSNLSSRSEMMQLIYGNRG

SEQ ID NO: 13968 - protein, 209 aa, Rhodoplanes elegans
  misc_feature (1)..(209): tr|A0A327K660|A0A327K660_9RHIZ GTP cyclohydrolase 1 OS= Rhodoplanes elegans OX=29408 GN=folE PE=3 SV=1
MAKRTKDHDAPGGRSRTERQKIERPSRAEVEAAFRTILRWTGDDPDREGLLETPARAARAYEEFFKGYREDPAAILRKTFDETAGYDEMVVLRGVRFESHCEHHIVPIIGRAWVAYVPNGRVVGISKLARVVEVYAKRLQIQEKMTAQIADTIQDVLEPQGVAVVIKAQHHCMSTRGVHKHDTDMVTSRMTGVFRDNTATRQEFLALID

SEQ ID NO: 13969 - protein, 218 aa, Rhodoplanes elegans
  misc_feature (1)..(218): tr|A0A327K795|A0A327K795_9RHIZ GTP cyclohydrolase 1 OS= Rhodoplanes elegans OX=29408 GN=folE PE=3 SV=1
MDHVIKTLTPAARPSEAPGEVPVAPARVRPSRTEAEAAVRVLLGYIGDDPDREGLLDTPRRVVAAYDELFGGYHESAGEVLERTFSEIGTYDDIVLVRDIPFTSHCEHHMMPFMGRAHVGYLPVERVVGLSKIARLIDIFAKRLQTQERLSSEIVTEIDTVLKPRGVAVMLEAEHTCMSMRGVQKIGSRTITTQFTGVFRDDPKEQFRFVNLVRNGIG

SEQ ID NO: 13970 - protein, 228 aa, Rhodoplanes piscinae
  misc_feature (1)..(228): tr|A0A327JUV9|A0A327JUV9_9RHIZ GTP cyclohydrolase 1 OS= Rhodoplanes piscinae OX=444923 GN=folE PE=3 SV=1
MDTVTKTLTPAARSSDPAVPTGPAPSGAPSPATSGALSRPSRAEAEAAVRVLLGYIGDDPDREGLLDTPRRVVSAFDELYGGYREQPGEALERTFSEIGTYDDIVLVRDIPFSSHCEHHMMPFVGRAHVGYLPVERVVGLSKIARVIDIFARRLQTQERLSSEIVTEIDTVLKPRGVAVMLEAEHTCMSMRGVAKVGSRTITTQFTGVFRDDPGEQLRFLNLVRNGIG

SEQ ID NO: 13971 - protein, 210 aa, Rhodoplanes piscinae
  misc_feature (1)..(210): tr|A0A327K684|A0A327K684_9RHIZ GTP cyclohydrolase 1 OS= Rhodoplanes piscinae OX=444923 GN=folE PE=3 SV=1
MTPAVQVIDTMAKRKKDAGRPRIERPSRAEVEAAFRTILRWTGDDPDREGLLETPARAARAYEEFFRGYDEDPAAILRKTFEETGGYDEMVVLRGVRFESHCEHHIVPIIGRAWVAYVPNGRVVGISKLARLVEVYAKRLQIQEKMTAQIADTIQEVLEPQGVAVVIKAQHHCMTTRGVHKHDTDMVTSRMTGVFRDNTATRQEFLSLID

SEQ ID NO: 13972 - protein, 205 aa, Rhodoplanes roseus
  misc_feature (1)..(205): tr|A0A327KNU7|A0A327KNU7_9RHIZ GTP cyclohydrolase 1 OS= Rhodoplanes roseus OX=29409 GN=folE PE=3 SV=1
MAKRTKSDDRKTRARPKIERPSRAEVEAAFRTIIRWTGDDPDREGLLETPARAARAYEEFFKGYDQDPVAILRKTFEETAGYDEMVVLRGVRFESHCEHHIVPIIGRAWVAYVPNGRVVGISKLARLVEVYAKRLQIQEKLTAQVADTIQEVLEPQGVAVVIKAQHHCMTTRGVHKHDTDMVTSRMTGVFRDNTATRQEFLSLID

SEQ ID NO: 13973 - protein, 217 aa, Rhodoplanes roseus
  misc_feature (1)..(217): tr|A0A327KUX9|A0A327KUX9_9RHIZ GTP cyclohydrolase 1 OS= Rhodoplanes roseus OX=29409 GN=folE PE=3 SV=1
MDHVIKTLTPAARPSEAAETTAPSTLVRPSRAEAEAAVRVLIGYLGDDPDREGLLDTPRRVVSAYEELFGGYHENPADVLDRTFSEIGTYDDIVLVRDIPFNSHCEHHMMPFVGKAHVGYLPVERVVGLSKIARLIDIFARRLQTQERLSSQIVTEIDTVLKPRGVAVMLEAEHSCMSMRGVQKVGSRTITTQFTGVFRDDPKEQFRFVSLVRNGIG

SEQ ID NO: 13974 - protein, 219 aa, Rhodoplanes sp.
  misc_feature (1)..(219): tr|A0A127EWS9|A0A127EWS9_9RHIZ GTP cyclohydrolase 1 OS= Rhodoplanes sp. Z2-YC6860 OX=674703 GN=folE PE=3 SV=1
MDAIVKPAVVGSNSPLSDHVRKAPDPVSPRPSREQAESAVRTLLAYIGDDPAREGLLDTPKRVVGAYEELYRGYRESPVEALERTFSETGNYDDLVLVRDISFNSACEHHMMPFTGKAHVAYMPVDKVVGLSKLARLVDVYARRLQTQEHMNSQIATAIEEILKPRGVAVMIEAEHTCMSLRGVEKPGALTVTTQFRGAFREDTNEQVRFIQLVRGGQR

SEQ ID NO: 13975 - protein, 204 aa, Rhodoplanes sp.
  misc_feature (1)..(204): tr|A0A127EVW8|A0A127EVW8_9RHIZ GTP cyclohydrolase 1 OS= Rhodoplanes sp. Z2-YC6860 OX=674703 GN=folE PE=3 SV=1
MAKSARARSLQKPSRSEAEDAVRVLLRWAGDDPRREGLAGTPGRVARAFEEWFSGYQQDPRQYLSRTFEEVAGYDEIVALRDIPFESHCEHHLAPIIGKAHIAYLPRRRVVGISKLARLVDVYAKRLQIQEKMTAEIAACLDKVLQPMGVAVVIEGTHQCMTTRGVHKPGVSMVTSRMLGVFRDQPETRQEFLASLHLRERTSI

SEQ ID NO: 13976 - protein, 227 aa, Rhodopseudomonas faecalis
  misc_feature (1)..(227): tr|A0A318TKZ4|A0A318TKZ4_9BRAD GTP cyclohydrolase 1 OS= Rhodopseudomonas faecalis OX=99655 GN=folE PE=3 SV=1
MDAVIKPLRGGKPSDEPTDFRAPELDPSDFLDAAVLPDQPRPTREEAEAAVKTLLAYIGENTEREGLVDTPRRVIEAYDELFQGYHQCPAEVLNRTFGETAGYDDFVLIRDMYFTSHCEHHVMPFYGQAHIAYTPVERVVGLSKLARLVDVFARRLQTQEHLTAQIAAAVDEVLKPRGVAVLVEAEHTCMSVRGIAKRGAKTFTTRFTGVFRDNPAEQARFLSMVRS

SEQ ID NO: 13977 - protein, 229 aa, Rhodopseudomonas palustris
  misc_feature (1)..(229): sp|B3QE25|GCH1_RHOPT GTP cyclohydrolase 1 OS=Rhodopseud omonas palustris (strain TIE-1) OX=395960 GN=folE PE=3 SV=1
MDAKIKPIRGTNPAEGRPEFQPAELEPSEFLEVAVQPDQPRPSRAEAEAAVKTLLSYIGENTEREGLIDTPRRVVEAYDELFQGYHQCPKEVLERTFGETAGYDDFVLVRNISFTSHCEHHVMPFYGKAHIAYTPVERVVGLSKLARLVDIFARRLQTQEHLTAQIAAAIDEVLKPRGVAVLLEAEHTCMSVRGIAKKGATTFTSRYTGVFRDNPAEQARFMSMVRDRG

SEQ ID NO: 13978 - protein, 229 aa, Rhodopseudomonas palustris
  misc_feature (1)..(229): tr|E6VNI1|E6VNI1_RHOPX GTP cyclohydrolase 1 OS=Rhodopse udomonas palustris (strain DX-1) OX=652103 GN=folE PE=3 SV=1
MDAKIKPIRGTKPADARSEFQPAELDPSDFLEVAVQPDQPRPSRAEAEAAVKTLLSYIGENTEREGLLDTPRRVVEAYDELFQGYHQCPKEVLERTFGETAGYDDFVLVRNISFTSHCEHHVMPFYGKAHIAYTPVERVVGLSKLARLVDIFARRLQTQEHLTAQIAAAIDEVMKPRGVAVLIEAEHTCMSVRGIAKKGATTFTSRYTGVFRDNPAEQARFMSMVRDRG

SEQ ID NO: 13979 - protein, 229 aa, Rhodopseudomonas pentothenatexigens
  misc_feature (1)..(229): tr|A0A336JTC4|A0A336JTC4_9BRAD GTP cyclohydrolase 1 OS= Rhodopseudomonas pentothenatexigens OX=999699 GN=folE P E=3 SV=1
MDAKIKPIRGTKPADSRPEFQPTELDPSDFLEVAVQPDQPRPSRAEAEAAVKTLLSYIGENTEREGLIDTPRRVVEAYDELFQGYHQCPKEVLERTFGETAGYDDFVLVRNISFTSHCEHHVMPFYGKAHIAYTPVERVVGLSKLARLVDIFGRRLQTQEHLTAQIAAAVDEVLKPRGVAVLIEAEHTCMSVRGIAKKGATTFTSRYTGVFRDNPAEQARFMSMVRDRG

SEQ ID NO: 13980 - protein, 229 aa, Rhodopseudomonas pseudopalustris
  misc_feature (1)..(229): tr|A0A1H8Q3V3|A0A1H8Q3V3_9BRAD GTP cyclohydrolase 1 OS= Rhodopseudomonas pseudopalustris OX=1513892 GN=folE PE= 3 SV=1
MDAKIKPLRGGKPADARAEFQPAELDPSEFLAAAVQPDQPRPSRNEAEQAVKTLLAYIGENTGREGLLDTPRRVVEAYDELFQGYHQCPAEVLDRTFGETAGYDDFVLVRDIGFTSHCEHHVMPFYGKAHIAYTPVERVVGLSKLARLVEIFARRLQTQEHLTAQIAAAIDEVLKPRGVAVMIEAEHTCMSVRGIGKQGASTFTSRYTGMFRDNPAEQARFMSMIRSRG

SEQ ID NO: 13981 - protein, 229 aa, Rhodopseudomonas sp.
  misc_feature (1)..(229): tr|A0A0N1CCQ0|A0A0N1CCQ0_9BRAD GTP cyclohydrolase 1 OS= Rhodopseudomonas sp. AAP120 OX=1523430 GN=folE PE=3 SV= 1
MDAKIKPLRTGKPPEARTDFQPAELDPSEFLAAAVQPDQPRPSRAEAEAAVKTLLSYIGENVEREGLLDTPRRVVEAYDELFQGYHQCPAEVLDRTFGETAGYDDFVLVRDISFTSHCEHHVMPFYGKAHIAYTPVERVVGLSKLARLVEIFARRLQTQEHLTAQIAAAIDEVLKPRGVAVMIEAEHTCMSVRGIGKQGASTFTSRYTGMFRDNPAEQARFMSMIRNHR

SEQ ID NO: 13982 - protein, 364 aa, Rhodosalinus sediminis
  misc_feature (1)..(364): tr|A0A3D9BVK1|A0A3D9BVK1_9RHOB GTP cyclohydrolase FolE2 OS=Rhodosalinus sediminis OX=1940533 GN=folE2 PE=3 SV= 1
MNIQISDLDRTPDRDEAEAALAKLRRWMEHASDAEIDALDPMMRRLLSGDGGYPDLSRVYPEGFAADAAYRATLPDLQNGPAALIRGARRPIQHVGISNFRLPIRFATRGGGEMTLETSVTGTVSLDAEKKGINMSRIMRSFYTHAERVVSFAVIEAALDDYKTDLETLDARIQMRASFPMKVESLRSGLAGYQYYDIALELVERAGVRRRILHLDYVYSSTCPCSLELSEHARRERGQLATPHSQRSVARISVELTEDGCLWFEDLVEMCRAAVPTETQVMVKREDEQAFAELNAANPIFVEDAARLFAAELERDARVGDFRVVASHQESLHSHDAVSVLTEGETFAGESLDPRLFGTLVHPG

SEQ ID NO: 13983 - protein, 364 aa, Rhodosalinus sp.
  misc_feature (1)..(364): tr|A0A365UCK4|A0A365UCK4_9RHOB GTP cyclohydrolase FolE2 OS=Rhodosalinus sp. E84 OX=2259333 GN=folE2 PE=3 SV=1
MNIHLSDLDRTPGRDEAEAALDKLRRWMEQASEAEIAALDPAILRLLPGASDYPALSRVYPERFAADEAYRATLPDLQNGPAALIRGARRPIQHVGISNFRLPIRFRTRAGGDVTLETSVTGTVSLDAEKKGINMSRIMRSFYTHAERVFSFDVIEAALDDYKAELESLDARIQMRLSFPMRVESLRSGLAGYQYYDMALELVERAGVRRRILHLDYVYSSTCPCSLELSEHARRERGQLATPHSQRSVARLSVVLTEDGCLWFEDLVEMCRRAVPTETQVMVKREDEQAFAELNAANPIFVEDAARLFAAELEGDPRVGDFRVVASHQESLHSHDAVSVLTEGETFASESLDPRLFGTLIHAG

SEQ ID NO: 13984 - protein, 222 aa, Rhodospira trueperi
  misc_feature (1)..(222): tr|A0A1G7EJJ4|A0A1G7EJJ4_9PROT GTP cyclohydrolase 1 OS= Rhodospira trueperi OX=69960 GN=folE PE=3 SV=1
MPLDRPPGKPHPYSDYRDAAGRLHPDPDTGPDPRPSREEAEEAVRTLLRWAGDDPTREGLLDTPKRVAAAYEEFFAGYAEDPRDILMRTFEEVEGYDEMVVLRDIRLESHCEHHMVPIIGKAHVAYLPDSRVVGISKLARVVDAYAKRLQIQETLTAQIANTINDVLAPKGVAVVIEAAHQCMTTRGVHKPGVTMVTSRMLGAFRTSSDTRREFLSMINGGG

SEQ ID NO: 13985 - protein, 199 aa, Rhodospirillaceae bacterium
  misc_feature (1)..(199): tr|A0A1Z9J4B4|A0A1Z9J4B4_9PROT GTP cyclohydrolase 1 OS= Rhodospirillaceae bacterium TMED167 OX=1986863 GN=folE PE=3 SV=1
MDSLKVERPSQDEAEEAVRTLIKWAGDDPNREGLIGTPHRVAKAYEEFFAGYNEDPVSVLGATFEETGSYDDVVILRDIRLESHCEHHIVPIIGKVHIGYLPNGRVVGISKLARLIEVFAKRMQIQETLTAQIADTIADVLEPHGVAVVIEAAHQCMTTRGIRKPGVSMVTSRMLGVFRDDSNTRREFLSMIGKPSNSG

SEQ ID NO: 13986 - protein, 209 aa, Rhodospirillaceae bacterium
  misc_feature (1)..(209): tr|A0A2E7BD74|A0A2E7BD74_9PROT GTP cyclohydrolase 1 OS= Rhodospirillaceae bacterium OX=1898112 GN=folE PE=3 SV= 1
MTPNDNSLTAADKPTADLTAIRPTRAEAEAAVDLLIRWLGEDPSREGLRDTPARVVRAWEEFCAGYAEDPAVYLSSTFEEVEGYDDMVMLRNIQLESHCEHHMVPILGVAHIAYLPHRRVVGISKLARVLDSYARRLQTQETLTAQVADCIHSVLQPRGVAVMIDAQHQCMTTRGVRKDGVSMVTSRFTGAFDSDDALRNRFLDQIRIG

SEQ ID NO: 13987 - protein, 203 aa, Rhodospirillales bacterium
  misc_feature (1)..(203): tr|A0A1G3IBM5|A0A1G3IBM5_9PROT GTP cyclohydrolase 1 OS= Rhodospirillales bacterium RIFCSPLOWO2_12_FULL_58_28 OX =1802022 GN=folE PE=3 SV=1
MSAEKSASSRPSRSEAEEAVRTLIRWSGDDVTREGLKETPARVVRSCEESFAGYKSDPVDLLRRTFEEIEGYDEMVLLKDIRFESHCEHHMAPFIGKAHVAYLPKRRVVGISKLARLVDVYARRLQIQEKMTAQIANTINEVLQPEGVAVVIEASHQCMTTRGIHKPGVVMVTSRMLGAFRDNPSTRHEFLAMIGNPASGENV

SEQ ID NO: 13988 - protein, 208 aa, Rhodospirillales bacterium
  misc_feature (1)..(208): tr|A0A259MI88|A0A259MI88_9PROT GTP cyclohydrolase 1 OS= Rhodospirillales bacterium 39-66-50 OX=1970570 GN=folE PE=3 SV=1
MNKMAKPREVVSLATGQSRPSREEAEAAVRTLIRWAGDDPVREGLAGTPDRVVRSYEEFFAGYDQDPRDMLQRTFEEVEGYDEVVALRDIRLESHCEHHMVPIIGKVHVGYLPDKRVVGISKLARVVDAYAHRLQIQEKLTAQIANTLQEVLQPRGVAVVIEAAHQCMTTRGVHKSDVTMVTSRMLGAFRNNGETRREFLSMIGRSSI

SEQ ID NO: 13989 - protein, 220 aa, Rhodospirillum centenum
  misc_feature (1)..(220): tr|B6IPQ8|B6IPQ8_RHOCS GTP cyclohydrolase 1 OS=Rhodospi rillum centenum (strain ATCC 51521 / SW) OX=414684 GN=f olE PE=3 SV=1
MSPSKTTAGMIVPGPAHGRRAAAPVERPTRAEAEAAVRTLIRWAGDDPGREGLLGTPDRVVRSYEEFFAGYHEDPVELLSRTFEETDGYDEMVVLRDIRFESHCEHHMVPIIGKAHVAYLPRKRVVGISKLARVIEVYAKRLQIQEKMTSQIANSIDEVLQPLGVAVVVEASHQCMTTRGVHKPGVSMVTSRMLGAFRDDPTTRREFLAMIGNPTNRVEA

SEQ ID NO: 13990 - protein, 234 aa, Rhodospirillum rubrum
  misc_feature (1)..(234): tr|Q2RXR9|Q2RXR9_RHORT GTP cyclohydrolase 1 OS=Rhodospi rillum rubrum (strain ATCC 11170 / ATH 1.1.1 / DSM 467 / LMG 4362 / NCIB 8255 / S1) OX=269796 GN=folE PE=3 SV= 1
MTTNLPADTAEASLCAFRADGEEGIPATPVVADGLWPTTKPSRAEAEAAVRTLIRWAGDDPNREGLIDTPARVARSYEELFSGYGADPEDLLRRTFEEVEGYDEVVLLRDIRIESHCEHHMVPIIGKVHIGYLPNRRVVGISKLARVAEVYAKRLQIQEKMTAQIANAINAVLEPRGVAVVVEAAHQCMTTRGVHKPGVTMVTSRMLGAFRTNSDTRREFLHLIGQTREGGFGL

SEQ ID NO: 13991 - protein, 210 aa, Rhodospirillum rubrum
  misc_feature (1)..(210): tr|Q2RTB3|Q2RTB3_RHORT GTP cyclohydrolase 1 OS=Rhodospi rillum rubrum (strain ATCC 11170 / ATH 1.1.1 / DSM 467 / LMG 4362 / NCIB 8255 / S1) OX=269796 GN=folE PE=3 SV= 1
MEKTLLSRAQSGVEAFDATPYYKPVSVGEAEAAIAVLLRYIGEDPTREGLVETPARFIRACGHHFAGYAQDPLRILATTFSESAGYAGMILLRDIRFEAFCEHHLAPIIGKAHVAYMPNDRVVGLSKLARVVDVFAKRLQLQERMTMQIATAIEAALAPRGVAVLIESEHHCMSTRGAYKPGSTMVTSVTTGCFEADGAPRREFFEAVRA

SEQ ID NO: 13992 - protein, 216 aa, Rhodothalassium salexigens
  misc_feature (1)..(216): tr|A0A4R2PFK2|A0A4R2PFK2_RHOSA GTP cyclohydrolase 1 OS= Rhodothalassium salexigens DSM 2132 OX=1188247 GN=folE PE=3 SV=1
MESIAPDRDRPCADLAATETPEIARPTRAEAESAVRTLLLWAGDNPDREGLLDTPRRVVKAYEEYFCGYDEDPADHLRRTFEEVAGYDDMVLVRGIAFDSHCEHHLAPIQGLAHVAYVPSGRIVGLSKLARVVELYARRLQVQEKLTAQVADALEDSLAPLGVAVQVEATHGCMSCRGVRKVGADTVTTVMRGLFRTDARLERRFLDAASQTGRGR

SEQ ID NO: 13993 - protein, 207 aa, Rhodothalassium salexigens
  misc_feature (1)..(207): tr|A0A4R2PU09|A0A4R2PU09_RHOSA GTP cyclohydrolase 1 OS= Rhodothalassium salexigens DSM 2132 OX=1188247 GN=folE PE=3 SV=1
MTDQSSRPQPTVSDDGAFDPSPEADRAREAVRELLRWSGDDPEREGLRDTPDRVIRAFREYFRGYDENPVDYLQRTFEEVNSYDEVVLLRGIPFVSHCEHHIAPIEGKAHVAYLPTSRVVGISKLARVVHAYARRLQIQERLTAEIGDCIQQVLNPQGVAVVLQATHGCMTCRGVETPDVTMVTSRMTGAFRDDEKARREILALMGF

SEQ ID NO: 13994 - protein, 225 aa, Rhodothermaceae bacterium
  misc_feature (1)..(225): tr|A0A1V0DFB0|A0A1V0DFB0_9BACT GTP cyclohydrolase 1 OS= Rhodothermaceae bacterium RA OX=1779382 GN=folE PE=3 SV =1
MKNDTLEANGALTPAHQADAHHADDEFPTLYERKDQYAGEATDVIARRVRDILVTLGEDADREGLVKTPERVARAYQFLTHGYAMDPRAILESALFDEDYSEMILVKDIEVYSLCEHHMLPFFGKAHVAYIPNGKIVGLSKIPRVVDVFARRLQVQERLTLQVRDAIQDVLKPLGVAVVIEAQHLCMMMRGAEKQNSWTTTSAMSGEFMRESTRAEFMRLIRPRA

SEQ ID NO: 13995 - protein, 228 aa, Rhodothermaceae bacterium
  misc_feature (1)..(228): tr|A0A424HJV9|A0A424HJV9_9BACT GTP cyclohydrolase 1 OS= Rhodothermaceae bacterium TMED105 OX=1986665 GN=folE PE =3 SV=1
MSRDETTILKETFEAQGDDHFSEGLQTPMHEDAFLMSNEEKMEQIAHHFEKIMHTLGLDTQNESLRGTPHRVAKMYVEEIFGGLNPMEAPDTRTFANPYDYGHLVVEKNIRLVSFCEHHFLPFIGKAHVAYIAEGEVIGLSKINRLVDYYARRPQVQERLTLQIAEAFESALKTKDVAVVIDSKHLCVSTRGIKDESSSTVTAEYRGAFKEAATQQRFIDYIRMETDL

SEQ ID NO: 13996 - protein, 220 aa, Rhodothermaeota bacterium; identical to SEQ ID NO: 8117
  misc_feature (1)..(220): tr|A0A2A5X9J8|A0A2A5X9J8_9BACT GTP cyclohydrolase 1 OS= Rhodothermaeota bacterium MED-G18 OX=1986239 GN=folE PE =3 SV=1

SEQ ID NO: 13997 - protein, 228 aa, Rhodothermaeota bacterium
  misc_feature (1)..(228): tr|A0A2A5Y4U5|A0A2A5Y4U5_9BACT GTP cyclohydrolase 1 OS= Rhodothermaeota bacterium MED-G12 OX=1986237 GN=folE PE =3 SV=1
MKEPIDTLDQQEEFDQMGEAHAGSSELTPIRSDAFELSDDEKIKQIEHHFAKIMDILGLDLTDDSLKGTPRRVAKMYVKEVFNGLNPANRPEARTFNNNYDYSDVVIEKNIQVNSFCEHHFLPFIGKAHVAYISKGKVIGLSKINRLVDYYSRRPQVQERLTLQIADAISDAMNTEDVAVYIDSKHLCVSMRGIKDHASSTITSEFRGAFRDKDTQQKFIDFIRTPSE

SEQ ID NO: 13998 - protein, 220 aa, Rhodothermus marinus
  misc_feature (1)..(220): tr|G2SED1|G2SED1_RHOMG GTP cyclohydrolase 1 OS=Rhodothe rmus marinus (strain SG0.5JP17-172) OX=762570 GN=folE P E=3 SV=1
MAKNKSTGVLVRSGAHLELDSHPIDHFERVDRYPAEATEAIQQHMREILRWIGEDPDREGLRRTPERVALALQYLTQGYHQDPRAILESALFEEDYSEMILVRDIQIYSLCEHHLLPFFGKAHVAYIPNKKIVGLSKIPRVVDVFARRLQVQERLTIQIRDALEEVLQPLGVAVVIEAQHLCMMMRGVEKQHAITTTSAMSGEFLKEATRAEFMRLINGG

SEQ ID NO: 13999 - protein, 220 aa, Rhodothermus marinus
  misc_feature (1)..(220): tr|D0MCY9|D0MCY9_RHOM4 GTP cyclohydrolase 1 OS=Rhodothe rmus marinus (strain ATCC 43812 / DSM 4252 / R-10) OX=5 18766 GN=folE PE=3 SV=1
MAKNKSTGVLVRSGAHLELDSHPIDHYERVDRYPAEATEAIQQHVREILRWIGEDPDREGLRRTPERVALALQYLTQGYHQDPRAILEAALFEEDYSEMILVRDIQIYSLCEHHLLPFFGKAHVAYIPNKKIVGLSKIPRVVDVFARRLQVQERLTIQIRDALEEVLQPLGVAVVIEAQHLCMMMRGVEKQHAITTTSAMSGEFLKEATRAEFMRLINGG

SEQ ID NO: 14000 - protein, 220 aa, Rhodothermus profundi
  misc_feature (1)..(220): tr|A0A1M6TV79|A0A1M6TV79_9BACT GTP cyclohydrolase 1 OS= Rhodothermus profundi OX=633813 GN=folE PE=3 SV=1
MAKNKSARVLTTATASLDLDDYPVGRYERIDRYAPEVTEAIQQHVREILRWLGEDPDREGLQRTPERVALAFQYLTQGYHQDPRAILESALFEEDYSEMILVRDIQIYSLCEHHLLPFFGKAHVAYIPNRKIVGLSKIPRVVDVFARRLQVQERLTIQIRDALEEVLQPLGVAVVIEAQHLCMMMRGVEKQHAVTTTSAMSGEFLKEATRAEFMRLINGG

SEQ ID NO: 14001 - protein, 211 aa, Rhodovarius sp.
  misc_feature (1)..(211): tr|A0A437MCL4|A0A437MCL4_9PROT GTP cyclohydrolase 1 OS= Rhodovarius sp. CCP-6 OX=1979269 GN=folE PE=3 SV=1
MNEVTPPHRLSQNPIQRPSRAEAEAAVRTLLLWAGDDPDREGLVDTPARVARAYEEFFQGYADDPVEMLARSFEETDGYDEMVVLRDIRLESHCEHHMVPIIGKAHVAYLPNGRVVGISKLARVVETYAKRLQIQEKLTAQIANTIESVLQPKGVAVVIEAAHQCMTTRGIHKPGVTMVTSRMLGAFRENLSTRKEFLSMIQGSRGGGIEG

SEQ ID NO: 14002 - protein, 366 aa, Rhodovulum adriaticum
  misc_feature (1)..(366): tr|A0A4R2NK95|A0A4R2NK95_RHOAD GTP cyclohydrolase FolE2 OS=Rhodovulum adriaticum OX=35804 GN=folE2 PE=3 SV=1
MNMHNREIDRQPTRDEAEHALAVLRQWAAGASAAERNTLDPAVEGLMPGPVSDYPALSRSYPADFKADAAYKDTLPDLQNGPSSLIRGARRAIQHVGISNFRLPIRFHTRDNGDLTLETSVTGSVSLEAEKKGINMSRIMRSFYAHAERTFSFEVIEAALDSYKADLDSLDARIAMRFSFPMKVGSLRSGLSGYQYYDIALELVEQAGVARKIMHLDYVYSSTCPCSLELSEHARQARGQLATPHSQRSVARISVALDPEAECLWFEDLIEICRAAVPTETQVMVKREDEQAFAELNAANPIFVEDAARLFAEGLQRDPRIGDFRVLASHQESLHSHDAISVLTEGETFAADSLDPKLFATLIHAG

SEQ ID NO: 14003 - protein, 367 aa, Rhodovulum bhavnagarense
  misc_feature (1)..(367): tr|A0A4R2RDU8|A0A4R2RDU8_9RHOB GTP cyclohydrolase FolE2 OS=Rhodovulum bhavnagarense OX=992286 GN=folE2 PE=3 SV =1
MNIHNREIDRQPTRDDAERALAVLRQWASVVTEAERHTLDPAVDGLVPGRPVPDYPALSRSYPERFVADAAYKATLPDLQNGPSSLIRGARREIQHVGISNFRLPIRFHTRDNGDLTLETSVTGSVSLEAEKKGINMSRIMRSFYAHAERTFSFEVIEAALDSYKADLDSLDARISMRFSFPMKVRSLRSGLSGYQYYDIALELVEQAGVARKIMHLDYVYSSTCPCSLELSEHARQARGQLATPHSQRSVARISVALEPDVGCLWFEDLIEICRAAVPTETQVMVKREDEQAFAELNAANPIFVEDAARLFAEGLQRDPRIGDFRVVASHQESLHSHDAISVLTEGPTFAGESLDPKLFATLIHAG

SEQ ID NO: 14004 - protein, 367 aa, Rhodovulum euryhalinum
  misc_feature (1)..(367): tr|A0A4R2KI48|A0A4R2KI48_9RHOB GTP cyclohydrolase FolE2 OS=Rhodovulum euryhalinum OX=35805 GN=folE2 PE=3 SV=1
MNVHNREIEPSPGREDAERALELLRLWATRATEDELATVDPGLAALVPGHPASAYPVFSRAYPHGFEADAAYKATMPDLQNGPASLIRGSMRPIQHVGISNFRLPIRFHSRDNGDLTLETSVTGTVSLEAEKKGINMSRIMRSFYAHAERTFSFEVIEAALDSYKADLESFDARIMMRFSFPMKVRSLRSGLEGFQYYDFALELVETRGVARKIMHMDYVYSSTCPCSLELSEHARRERGQLATPHSQRSVARISVVLDPAAGCLWFEDLIEICQSAVPTETQVMVKREDEQAFAELNAAHPIFVEDAARLFCEALERDPRIGDFRVIASHQESLHSHDAVSVLTEGPTFAAESLDPKLFATLIHHG

SEQ ID NO: 14005 - protein, 366 aa, Rhodovulum imhoffii
  misc_feature (1)..(366): tr|A0A2T5BQM7|A0A2T5BQM7_9RHOB GTP cyclohydrolase FolE2 OS=Rhodovulum imhoffii OX=365340 GN=folE2 PE=3 SV=1
MNMHDRDPDRLPSLDEARDALELLRSWAAAATEDERGMLDPALRNILPGRGTNYPPLSRRYPEEFVADSAYKDTMPDLQNGPASLIRGARQQIQHVGISNFRLPIRFHTRDNGDLTLETSVTGTVSLEAEKKGINMSRIIRSFYGHAERTFSFEVIEAALESYKADLDSFDARIMMRFSFPVKVPSLRSGLEGYQYYDIALELVEQAGVSRKIMHLDYVYSSTCPCSLELSEHARQMRGQLATPHSQRSVARLSVVLDETGGCLWFEDLIDICRAAVPTETQVMVKREDEQAFAELNAAHPVFVEDAARLFCEGLQNDPRVGDFRVVASHQESLHSHDAVSVLSEGETFATQSLDPRLFQSLYHGG

SEQ ID NO: 14006 - protein, 367 aa, Rhodovulum kholense
  misc_feature (1)..(367): tr|A0A2T5UIJ1|A0A2T5UIJ1_9RHOB GTP cyclohydrolase FolE2 OS=Rhodovulum kholense OX=453584 GN=folE2 PE=3 SV=1
MNVFSRDMDREPTRAEAERALALLRDWAGSASDTEIETLDPALARLLPGRLVSDYPALSRAYPEAFVADDTYKATLPDLQNGPASLIRGARRPIQHVGISNFRLPIRFHTRDNGDLTLETSVTGTVSLEAEKKGINMSRIMRSFYAHAERTFSFQVIEAALASYKTDLETFDARIMMRFSFPMTVRSLRSGLEGFQYYDFGLELVDMAGTACQIMHLDYVYSSTCPCSLELSEHARRERGQLATPHSQRSVARISVALEPGGDCLWFEDLVELCRSAVPTETQVMVKREDEQAFAELNAANPIFVEDAARLFAEALSTDPRIGDFRVIASHQESLHSHDAVSVLTEGPTFASGSLDPKLFSTLIHAR

SEQ ID NO: 14007 - protein, 368 aa, Rhodovulum marinum
  misc_feature (1)..(368): tr|A0A4R2Q5X3|A0A4R2Q5X3_9RHOB GTP cyclohydrolase FolE2 OS=Rhodovulum marinum OX=320662 GN=folE2 PE=3 SV=1
MNVHSREIERSPDREDAERALELLRRWADRASEAELAALDPGLAALLPGGRPAGDYPVLSRDYPHGFEADAAYKATMPDLQNGPASLIRGSRRPIQHVGISNFRLPIRFHTRDNGDLTLETSVTGTVSLEAEKKGINMSRIMRSFYAHAERTFSFEVIEAALESYKSDLESFDARILMRFSFPMKMRSLRSGLDGFQYYDFALELVEQAGVAKKIMHMDYVYSSTCPCSLELSEHARRERGQLATPHSQRSVARISVALDPDAPCLWFEDLIELCRSAVPTETQVMVKREDEQAFAELNAAHPIFVEDAARLFCEALERDPRIGDFRVIASHQESLHSHDAVSVLTEGPTFAAESLDPKLFATLIHRG

SEQ ID NO: 14008 - protein, 367 aa, Rhodovulum robiginosum
  misc_feature (1)..(367): tr|A0A428JNP5|A0A428JNP5_9RHOB GTP cyclohydrolase FolE2 OS=Rhodovulum robiginosum OX=68292 GN=folE2 PE=3 SV=1
MNIHNRDIERQPTREEAERALSLLRNWAGSVTPAELATLDPAVARLLPGQEVSNYPALSRTYPHDFEADAAYKASMPDLQNGPASLIRGARRAIQHVGISNFRLPIRFHTRDNGDLTLETSVTGTVSLEAEKKGINMSRIMRSFYAHAERTFSFEVVEAALESYKSDLESFDARIMMRFSFPMKMRALRSGLDGFQYYDFALELVEQAGVAKKIMHLDYVYSSTCPCSLELSEHARQVRGQLATPHSQRSVARISVVQEPGAGCLWFEDLIDICRAAVPTETQVMVKREDEQAFAELNAANPIFVEDAARLFSEGLQRDPRIGDYRVIASHQESLHSHDAVSVLTEGETFAADSLDPKLFSTLVHPG

SEQ ID NO: 14009 - protein, 211 aa, Rhodovulum sp.
  misc_feature (1)..(211): tr|J6J003|J6J003_9RHOB GTP cyclohydrolase 1 OS=Rhodovul um sp. PH10 OX=1187851 GN=folE PE=3 SV=1
MRTVDETAKVKATATDIGDGRAGPQRPSRAEAEAAFRTIIRWAGDDPDREGLRETPARAARAYEEFFRGYDEDPAAVLRKTFEETGGYDEMVMLRGVRFESHCEHHIVPIIGRAWVAYVPAGRVVGISKLARLVEIFAKRLQIQEKMTAQIADTIQEVLEPQGVAVVIKAVHHCMTTRGVRQPATDLVTSRMLGVFRDNRSTRQEFLALID

SEQ ID NO: 14010 - protein, 367 aa, Rhodovulum sp.
  misc_feature (1)..(367): tr|A0A1V0PT76|A0A1V0PT76_9RHOB GTP cyclohydrolase FolE2 OS=Rhodovulum sp. P5 OX=1564506 GN=folE2 PE=3 SV=1
MNIYSREIDRHPTRDDAERALETLRNWAESASDVERDTLDPTISALMGTRGLNAYPDLSRSYPHRFEADAAYKATMPDLQNGPASLIRGAKRPIQHVGISNFRLPIRFHTRHNGDLTLETSVTGTVSLEAEKKGINMSRIMRSFYAHAERTFSFEVIEAALESYKADLESLDARIMMRFSFPMKVSSLRSGLDGYQYYDFALELVETAGAVKKIVHLDYVYSSTCPCSLELSEHARQERGQLATPHSQRSVARLSVELDPAGDCLWFEDLIEMCRSAVPTETQVMVKREDEQAFAELNAANPIFVEDAARLFAEALERDPRVGDFRVIASHQESLHSHDAVSVLTEGDTFASESLDPKLFTTLIHAR

SEQ ID NO: 14011 - protein, 367 aa, Rhodovulum steppense
  misc_feature (1)..(367): tr|A0A4R1Z364|A0A4R1Z364_9RHOB GTP cyclohydrolase FolE2 OS=Rhodovulum steppense OX=540251 GN=folE2 PE=3 SV=1
MNVHNREIDARPGREEAERALEILRRWADAASESDLATADPALAALVAGRPAGGYPAFSRAYPHGFQADDAYKATMPDLQNGPASLIRGAKRPIQHVGISNFRLPIRFHTRDNGDLTLETSVTGTVSLEAEKKGINMSRIMRSFYAHAERTFSFEVIEAALDSYKSDLDSFDARIMMRFSFPMKVRSLRSGLEGFQYYDFALELVEQAGVVKKIMHMDYVYSSTCPCSLELSEHARRERGQLATPHSQRSVARISVVLDADAPCLWFEDLIELCRSAVPTETQVMVKREDEQAFAELNAAHPIFVEDAARLFCEALERDPRIGDFRVVASHQESLHSHDAVSVLTEGPTFAAESLDPKLFATLIHHG

SEQ ID NO: 14012 - protein, 367 aa, Rhodovulum sulfidophilum
  misc_feature (1)..(367): tr|A0A0D6B0A5|A0A0D6B0A5_RHOSU GTP cyclohydrolase FolE2 OS=Rhodovulum sulfidophilum OX=35806 GN=folE2 PE=3 SV= 1
MNVFNRDIDREPTRAEAERALALLRDWAGAASDGEIETLDPALSALCPGRAVSDYPTLSRTYPDGFEADAAYKASLPDLQNGPASLIRGARRQIQHVGISNFRLPIRFHTRENGDLTLETSVTGTVSLEAEKKGINMSRIMRSFYAHAERTFSFQVIEAALASYKADLDSFDARIMMCFSFPMKVRSLRSGLDGFQYYDFALELVETAGVPLKIMHLDYVYSSTCPCSLELSEHARRERGQLATPHSQRSVARISVALEPGGDCLWFEDLIDLCRKAVPTETQVMVKREDEQAFAELNAANPIFVEDAARLFAEALLTDPRIGDFRVIASHQESLHSHDAVSVLTEGATFAADSLDPKLFSTLVHGR

SEQ ID NO: 14013 - protein, 367 aa, Rhodovulum sulfidophilum
  misc_feature (1)..(367): tr|A0A1Q9QJY3|A0A1Q9QJY3_RHOSU GTP cyclohydrolase FolE2 OS=Rhodovulum sulfidophilum OX=35806 GN=folE2 PE=3 SV= 1
MNVFNRDIDREPTRAEAERALALLRDWAGAASDGEIETLDPALSALCPGRAVSDYPTLSRTYPDGFEADAAYKASLPDLQNGPASLIRGARRQIQHVGISNFRLPIRFHTRENGDLTLETSVTGTVSLEAEKKGINMSRIMRSFYAHAERTFSFQVIEAALASYKADLDSFDARIMMCFSFPMKMRSLRSGLDGFQYYDFALELVETAGVPLKIMHLDYVYSSTCPCSLELSEHARRERGQLATPHSQRSVARISVALEPGGDCLWFEDLIDLCRKAVPTETQVMVKREDEQAFAELNAANPIFVEDAARLFAEALLTDPRIGDFRVVASHQESLHSHDAVSVLTEGATFAADSLDPKLFSTLVHGR

SEQ ID NO: 14014 - protein, 367 aa, Rhodovulum visakhapatnamense
  misc_feature (1)..(367): tr|A0A4R8G005|A0A4R8G005_9RHOB GTP cyclohydrolase FolE2 OS=Rhodovulum visakhapatnamense OX=364297 GN=folE2 PE= 3 SV=1
MNVFSRDLDREPTRAEAERALALLRDWAGSASDAEIETLDPALARLLPGRPVSDYPALSRAYPEAFVADDTYKATLPDLQNGPASLIRGARRPIQHVGISNFRLPIRFHTRDNGDLTLETAVTGTVSLEAEKKGINMSRIMRSFYAHAERTFSFQVIEAALASYKTDLEAFDARIMMRFSFPMSVRSLRSGLDGFQYYDFGLELVETAGNTRQIMHLDYVYSSTCPCSLELSEHARRERGQLATPHSQRSVARISVALEPGGDCLWFEDLVELCRSAVPTETQVMVKREDEQAFAELNAANPIFVEDAARLFAEALSADLRIGDFRVIASHQESLHSHDAVSVLTEGPTFAAESLDPKLFSTLIHAR

SEQ ID NO: 14015 - protein, 236 aa, Richelia intracellularis
  misc_feature (1)..(236): tr|M1X421|M1X421_9NOST GTP cyclohydrolase 1 OS=Richelia intracellularis HM01 OX=1165095 GN=folE PE=3 SV=1
MTIAGSESFKSSQPPLNTSLPKAVNVTRPDRNTNNGKQASFNQPTEKDMERMQEAIEILLLGLGEDPQREGLLKTPKRVAEAMIFLTSGYRQSLEELVNGAIFDEGHNEMVLLRDINIFSLCEHHMLPFMGKAHVAYIPNQKVVGLSKLARIAEMYSRRLQVQERLTRQIAEAIQEILNPQGVAVVIEASHMCMVMRGVQKPGSWTVTSAMLGAFQQEQKTREEFLSLIRHKPGFS

SEQ ID NO: 14016 - protein, 236 aa, Richelia intracellularis
  misc_feature (1)..(236): tr|M1WZK6|M1WZK6_9NOST GTP cyclohydrolase 1 OS=Richelia intracellularis HH01 OX=1165094 GN=folE PE=3 SV=1
MTIAGSESFKSSQPPLNTSLPKAVNGTRPDRNTNNGKQASFNQPTEKDMERMQEAIEILLLGLGEDPQREGLLKTPKRVAEAMIFLTSGYRQSLEELVNGAIFDEGHNEMVLVRDIDIFSLCEHHMLPFMGKAHVAYIPNQKVVGLSKLARIAEMYSRRLQVQERLTRQIAEAIQEILNPQGVAVVIEASHMCMVMRGVQKPGSWTVTSAMLGAFQQEQKTREEFLSLIRHKPGFS

SEQ ID NO: 14017 - protein, 189 aa, Rickettsia africae
  misc_feature (1)..(189): sp|C3PNA0|GCH1_RICAE GTP cyclohydrolase 1 OS=Rickettsia africae (strain ESF-5) OX=347255 GN=folE PE=3 SV=1
MSKPTREEATEAVRTLLKFIGEDPSREGLLQTPDRVINSYVEIFSGYGKDVAEILNTKFYETCNFQDFILLNIKFTSFCEHHILPFNGTVDIAYIPDNCIVGISKLARIVNIFARRLQIQEKMTVQIAESVQENLKPLGVAVKISAVHSCMSMRGVMQDNSVMNTMHYTGIFAEQQKYRHEFLNLTAKR

SEQ ID NO: 14018 - protein, 190 aa, Rickettsia akari
  misc_feature (1)..(190): sp|A8GN89|GCH1_RICAH GTP cyclohydrolase 1 OS=Rickettsia akari (strain Hartford) OX=293614 GN=folE PE=3 SV=1
MSKPTREEATEAVRTLLKFIGEDPTREGLLKTPDRVINSYTEIFSGYGKDVEEILNTKFYDTCNFQDFISLEGIKFTSFCEHHMLPFNGTVHIAYIPDNCIVGISKLARIVNIFAKRLQIQEKMTVQIAESVQENLKPLGVAVKIAALHSCMSMRGVMQDHSIMNTMHYTGIFAEQQKYRHEFLNLTTKR

SEQ ID NO: 14019 - protein, 189 aa, Rickettsia amblyommatis
  misc_feature (1)..(189): tr|A0A0F3QS82|A0A0F3QS82_RICAM GTP cyclohydrolase 1 OS= Rickettsia amblyommatis str. Darkwater OX=1359166 GN=fo lE PE=3 SV=1
MSKPTREEAKEAVRTLLKFIGEDPSREGLLKTPDRVINSYAEIFSGYGKDVAEILNTKFYETCNFQDFILLNIKFTSFCEHHILPFNGTVDIAYVPDNCIVGISKLVRIVNIFARRLQIQEKMTVQIAESVQENLKPLGVAVKISAVHSCMSMRGVMQDNSVMNTMHYTGIFAEQQKYRHEFLNLTAKR

SEQ ID NO: 14020 - protein, 189 aa, Rickettsia amblyommatis; identical to SEQ ID NO: 14019
  misc_feature (1)..(189): tr|H8K541|H8K541_RICAG GTP cyclohydrolase 1 OS=Ricketts ia amblyommatis (strain GAT-30V) OX=1105111 GN=folE PE= 3 SV=1

SEQ ID NO: 14021 - protein, 189 aa, Rickettsia argasii
  misc_feature (1)..(189): tr|A0A0F3RI51|A0A0F3RI51_9RICK GTP cyclohydrolase 1 OS= Rickettsia argasii T170-B OX=1268837 GN=folE PE=3 SV=1
MSKPTREEAKDAVRTLLKFIGEDPSREGLLKTPDRVINSYAEIFSGYGKDVAEILNTKFYETCNFQDFILLNIKFTSFCEHHILPFNGTVDIAYVPDNCIVGISKLARIVNIFARRLQIQEKMTVQIAESVQENLKPLGVAVKISAVHSCMSMRGVMQDNSVMNTMHYTGIFAEQQKYRHEFLNLTAKR

SEQ ID NO: 14022 - protein, 190 aa, Rickettsia asembonensis
  misc_feature (1)..(190): tr|A0A0C2M0B1|A0A0C2M0B1_9RICK GTP cyclohydrolase 1 OS= Rickettsia asembonensis OX=1068590 GN=folE PE=3 SV=1
MSKPTREEAKEAVRTLLKFIGEDPNREGLLKTPERVINSYEEIFSGYEKDIAEILSTKFYDTCNFQDFISLEGIKFTSFCEHHMLPFNGTVHIAYVPDNCIIGISKLARIVNIFARRLQIQEKMTVQIAESVQENLKTLGVAVKISALHSCMSMRGVMQDNSVMNTMHYTGIFAEQQKYRHEFLNLTLKR

SEQ ID NO: 14023 - protein, 200 aa, Rickettsia asiatica
  misc_feature (1)..(200): tr|A0A510GA16|A0A510GA16_9RICK GTP cyclohydrolase 1 OS= Rickettsia asiatica OX=238800 GN=folE PE=3 SV=1
MKLEKPSREEAKEAVRTLLKFIGEDPNREGLLKTPDRVINSYRELFSGYEKDIAEILSTKFYDTCNFQDFILLKDIKFTSFCEHHMLPFIGTVDIAYIPDNCIIGISKLARIVNVFARRLQIQEKMTVQIAESVQENLKPLGVAVKISALHSCMTMRGVMQDSMMQDSDINITMNTMHYTGIFAEQQKYRHEFLNLTSKR

SEQ ID NO: 14024 - protein, 190 aa, Rickettsia australis
  misc_feature (1)..(190): tr|H8K7T5|H8K7T5_RICAC GTP cyclohydrolase 1 OS=Ricketts ia australis (strain Cutlack) OX=1105110 GN=folE PE=3 S V=1
MSKPTREEATEAVRTLLKFIGEDPTREGLLKTPDRVINSYTEIFSGYGKDVEEILNTKFYDTCNFQGFISLEGIKFTSFCEHHMLPFNGTVHIAYIPDNCIVGISKLARIVNIFARRLQIQEKMTVQIAESVQENLRPLGVAVKISALHSCTSMRGVMQDHSIMNTIHYTGIFAEQQKYRHEFLNLTTKR

SEQ ID NO: 14025 - protein, 192 aa, Rickettsia bellii
  misc_feature (1)..(192): sp|A8GUB6|GCH1_RICB8 GTP cyclohydrolase 1 OS=Rickettsia bellii (strain OSU 85-389) OX=391896 GN=folE PE=3 SV=1
MTIKKPTKEEAKEAVRTLLRFIGEDPNREGLFKTPDRVIKSYEEIFSGYGKNIEEILETKFSDTGNFQDFISLEGIKFTSFCEHHMLPFSGTVHIAYIPDNCIVGISKLARIVNAFAKRLQIQEKMTVQIAESVQENLKPLGVAVKISALHSCMSMRGVMQDNSIMNTMHYTGIFAEQQKYRHEFLNLTSKK

SEQ ID NO: 14026 - protein, 192 aa, Rickettsia bellii; identical to SEQ ID NO: 14025
  misc_feature (1)..(192): tr|A0A0F3QBI5|A0A0F3QBI5_RICBE GTP cyclohydrolase 1 OS= Rickettsia bellii str. RML An4 OX=1359193 GN=folE PE=3 SV=1

SEQ ID NO: 14027 - protein, 190 aa, Rickettsia buchneri
  misc_feature (1)..(190): tr|A0A067AJI7|A0A067AJI7_9RICK GTP cyclohydrolase 1 OS= Rickettsia buchneri OX=1462938 GN=folE PE=3 SV=1
MSKPTREEAKEAVRTLLKFIGEDPNREGLLKTPERVINSYEEIFSGYEKDIAEILSTKFFDTCNFQDFISLEGIKFTSFCEHHMLPFNGTVYIAYIPDNCIIGISKLARIVNIFARRLQIQEKMTVQIAESVQENLKPLGVAVKISALHSCMSMRGVMQDNSVMNTMHCTGIFAEQQKYRHEFLNLTSKR

SEQ ID NO: 14028 - protein, 219 aa, Rickettsia canadensis
  misc_feature (1)..(219): tr|A8EZ52|A8EZ52_RICCK GTP cyclohydrolase 1 OS=Ricketts ia canadensis (strain McKiel) OX=293613 GN=folE PE=3 SV =1
MALIAIVGGLMFVYFYGKTMFLKTNKLMKLEKPSREEAKEAVRTLLKFIGEDPNREGLLKTPDRVINSYMEIFSGYEKDVAEILSTKFYDTCNFQDFISLDGIRFTSFCEHHMLPFNGTVHISYIPDNCIIGISKLARIVNVFARRLQIQEKMTVQIAESVQDNLKPLGVAVRISALHSCMSIRGVIQDNSIMNTMHYTGIFAEQQKYRHEFLNLTATR

SEQ ID NO: 14029 - protein, 189 aa, Rickettsia conorii
  misc_feature (1)..(189): sp|Q92I93|GCH1_RICCN GTP cyclohydrolase 1 OS=Rickettsia conorii (strain ATCC VR-613 / Malish 7) OX=272944 GN=f olE PE=3 SV=1
MSKPTREEAKEAVRTLLKFIGEDPSREGLLQTPDRVINSYVEIFSGYGKDVAEILNTKFYETCNFRDFILLNIKFTSFCEHHILPFNGTVDIAYVPDNCIVGISKLARIVNIFARRLQIQEKMTVQIAESVQENLKPLGVAVKISAVHSCMSMRGVMQDNSVMNTMHYTGIFAEQQKYRHEFLNLTAKR

SEQ ID NO: 14030 - protein, 190 aa, Rickettsia endosymbiont; identical to SEQ ID NO: 14027
  misc_feature (1)..(190): tr|C4YYZ1|C4YYZ1_9RICK GTP cyclohydrolase 1 OS=Ricketts ia endosymbiont of Ixodes scapularis OX=444612 GN=folE PE=3 SV=1

SEQ ID NO: 14031 - protein, 190 aa, Rickettsia endosymbiont
  misc_feature (1)..(190): tr|A0A0F3R9D1|A0A0F3R9D1_9RICK GTP cyclohydrolase 1 OS= Rickettsia endosymbiont of Ixodes pacificus OX=1133329 GN=folE PE=3 SV=1
MSKPTREEAKEAVRTLLKFIGEDPNREGLLKTPERVINSYEEIFSGYEKDIAEILSTKFYDTCNFQDFISLEGIKFTSFCEHHMLPFNGTVYIAYIPDNCIIGISKLARIVNIFARRLQIQEKMTVQIAESVQENLKPLGVAVKISALHSCMSMRGVMQDNSVMNTMHCTGIFAEQQKYRHEFLNLTSKR

SEQ ID NO: 14032 - protein, 190 aa, Rickettsia felis
  misc_feature (1)..(190): sp|Q4ULX3|GCH1_RICFE GTP cyclohydrolase 1 OS=Rickettsia felis (strain ATCC VR-1525 / URRWXCal2) OX=315456 GN=f olE PE=3 SV=1
MSKPTREEAKEAVRTLLKFIGEDPTREGLLKTPDRVVNSYTEIFSGYGKDVAEILNTKFYDTCNFQDFILLKDIKFTSFCEHHMLPFIGTVDIAYIPDNCIVGISKLARIVNAFSKRLQIQEKMTVQIAESVQENLKPLGVAVKISALHSCMSMRGVMQDNSVMNTMHYTGIFAEQQKYRYDFLNLTAKR

SEQ ID NO: 14033 - protein, 190 aa, Rickettsia felis; identical to SEQ ID NO: 14032
  misc_feature (1)..(190): tr|A0A0F3MQ02|A0A0F3MQ02_RICFI GTP cyclohydrolase 1 OS= Rickettsia felis str. Pedreira OX=1359196 GN=folE PE=3 SV=1

SEQ ID NO: 14034 - protein, 189 aa, Rickettsia heilongjiangensis; identical to SEQ ID NO: 14021
  misc_feature (1)..(189): tr|G0GXW1|G0GXW1_RICH0 GTP cyclohydrolase 1 OS=Ricketts ia heilongjiangensis (strain ATCC VR-1524 / 054) OX=103 2845 GN=folE PE=3 SV=1

SEQ ID NO: 14035 - protein, 189 aa, Rickettsia japonica
  misc_feature (1)..(189): tr|A0A3B7DEJ5|A0A3B7DEJ5_RICJA GTP cyclohydrolase 1 OS= Rickettsia japonica OX=35790 GN=folE PE=3 SV=1
MSKPTREAAKDAVRTLLKFIGEDPSREGLLKTPDRVINSYAEIFSGYGKDVAEILNTKFYETCNFQDFILLNIKFTSFCEHHILPFNGTVDIAYVPDNCIVGISKLARIVNIFARRLQIQEKMTVQIAESVQENLKPLGVAVKISAVHSCMSMRGVMQDNSVMNTMHYTGIFAEQQKYRHEFLNLTAKR

SEQ ID NO: 14036 - protein, 189 aa, Rickettsia japonica; identical to SEQ ID NO: 14035
  misc_feature (1)..(189): tr|G4KMW8|G4KMW8_RICJY GTP cyclohydrolase 1 OS=Ricketts ia japonica (strain ATCC VR-1363 / YH) OX=652620 GN=fol E PE=3 SV=1

SEQ ID NO: 14037 - protein, 189 aa, Rickettsia massiliae
  misc_feature (1)..(189): sp|A8F1F2|GCH1_RICM5 GTP cyclohydrolase 1 OS=Rickettsia massiliae (strain Mtu5) OX=416276 GN=folE PE=3 SV=1
MSKPTREEAKEAVRTLLKFIGEDPSREGLLKTPDRVINSYAEIFSGYGKDVAKILNTKFYETCNFQDFILLNIKFTSFCEHHILPFNGTVDIAYVPDNCIVGISKLARIVNIFARRLQIQEKMTVQIAESVQENLKPLGVAVKISAVHSCMSMRGVMQDNSVMNTMHYTGIFAEQQKYRHEFLNLTAKR

SEQ ID NO: 14038 - protein, 189 aa, Rickettsia massiliae
  misc_feature (1)..(189): tr|H6QJI9|H6QJI9_RICMA GTP cyclohydrolase 1 OS=Ricketts ia massiliae str. AZT80 OX=1105112 GN=folE PE=3 SV=1
MSKPTREEAKEAIRTLLKFIGEDPSREGLLKTPDRVINSYAEIFSGYGKDVAKILNTKFYETCNFQDFIVLNIKFTSFCEHHILPFNGTVDIAYVPDNCIVGISKLARIVNIFARRLQIQEKMTVQIAESVQKNLKPLGVAVKISAVHSCMSMRGVMQDNSVMNTMHYTGIFAEQQKYRHEFLNLTAKR

SEQ ID NO: 14039 - protein, 190 aa, Rickettsia monacensis; identical to SEQ ID NO: 14031
  misc_feature (1)..(190): tr|A0A0B7J0J3|A0A0B7J0J3_9RICK GTP cyclohydrolase 1 OS= Rickettsia monacensis OX=109232 GN=folE PE=3 SV=1

SEQ ID NO: 14040 - protein, 189 aa, Rickettsia montanensis
  misc_feature (1)..(189): tr|H8KDG1|H8KDG1_RICMS GTP cyclohydrolase 1 OS=Ricketts ia montanensis (strain OSU 85-930) OX=1105114 GN=folE P E=3 SV=1
MSKPTREEAKEAVRTLLKFIGEDPSREGLLKTPDRVINSYAEIFSGYGKDVAEILNTKFYETCNFQDFILLNIKFTSFCEHHILPFNGTVDIAYVPDNCIVGISKLARIVNIFARRLQIQEKMTVQIAESVQENLKPLGVAVKISAVHSCMSMRGVMQDNSVMNTMHYTGIFAEQQKYRHEFLNLTAKR

SEQ ID NO: 14041 - protein, 189 aa, Rickettsia parkeri; identical to SEQ ID NO: 14029
  misc_feature (1)..(189): tr|A0A0F3QMF1|A0A0F3QMF1_RICPA GTP cyclohydrolase 1 OS= Rickettsia parkeri str. Grand Bay OX=1359203 GN=folE PE =3 SV=1

SEQ ID NO: 14042 - protein, 189 aa, Rickettsia peacockii
  misc_feature (1)..(189): sp|C4K2D8|GCH1_RICPU GTP cyclohydrolase 1 OS=Rickettsia peacockii (strain Rustic) OX=562019 GN=folE PE=3 SV=1
MSKPTREEAKEAVRTLLKFIGEDPSREGLLKTPDRVINSYAEIFSGYGKDVAEILNTKFYETCNFRDFILLNIKFTSFCEHHILPFNGTVDIAYVPDNCIVGISKLARIVNIFARRLQIQEKMTVQIAESVQENLKPLGVAVKISAVHSCMSMRGVMQDNSVMNTMHYTGIFAEQQKYRHEFLNFTAKR

SEQ ID NO: 14043 - protein, 189 aa, Rickettsia philipii
  misc_feature (1)..(189): tr|H6PTG5|H6PTG5_RICP3 GTP cyclohydrolase 1 OS=Ricketts ia philipii (strain 364D) OX=481009 GN=folE PE=3 SV=1
MSKPTREEAKEAVRTLLKFIGEDPSREGLLKTPDRVINSYAEIFSGYGKDVAEILNTKFYETCNFRDFILLNIKFTSFCEHHILPFNGTVDIAYVPDNCIVGISKLARIVNIFARRLQIQEKMTVQIAESVQENLKPLGVAVKISAVHSCMSMRGVMQDNSVMNTMHYTGIFAEQQKYRHEFLNLTAKR

SEQ ID NO: 14044 - protein, 190 aa, Rickettsia prowazekii
  misc_feature (1)..(190): sp|Q9ZDE8|GCH1_RICPR GTP cyclohydrolase 1 OS=Rickettsia prowazekii (strain Madrid E) OX=272947 GN=folE PE=3 SV =1
MSKPTREEAKEAVRTLLKFIGEDPNREGLLKTPDRVINSYTEIFSGYGKDAQEILNTKFYDICNFQDLISLEGIKFTSFCEHHILPFNGTVHIAYIPDNCIIGVSKLARIVNIFARRLQIQEKMTLEIAESVQENLKPLGVAVKISALHSCMSMRGVMHDNSVMNTMYYTGIFAEQQKYRYEFLNLIAKR

SEQ ID NO: 14045 - protein, 190 aa, Rickettsia prowazekii; identical to SEQ ID NO: 14044
  misc_feature (1)..(190): tr|D5AWW6|D5AWW6_RICPP GTP cyclohydrolase 1 OS=Ricketts ia prowazekii (strain Rp22) OX=449216 GN=folE PE=3 SV=1

SEQ ID NO: 14046 - protein, 189 aa, Rickettsia raoultii
  misc_feature (1)..(189): tr|A0A126E9G7|A0A126E9G7_9RICK GTP cyclohydrolase 1 OS= Rickettsia raoultii OX=369822 GN=folE PE=3 SV=1
MSKPTREEAKEAVRTLLKFIGEDLSREGLLKTPDRVINSYTEIFSGYGKDVAEILNTKFYETCNFQDFILLNIKFTSFCEHHILPFNGTVDIAYVPDNCIVGISKLARIVNIFARRLQIQEKMTVQIAESVQENLKPLGVAVKISAVHSCMSMRGVMQDNSVMNTMHYTGIFAEQQKYRHEFLNLTAKR

SEQ ID NO: 14047 - protein, 189 aa, Rickettsia rhipicephali; identical to SEQ ID NO: 14037
  misc_feature (1)..(189): tr|A0A0S2C9U4|A0A0S2C9U4_RICRH GTP cyclohydrolase 1 OS= Rickettsia rhipicephali OX=33992 GN=folE PE=3 SV=1

SEQ ID NO: 14048 - protein, 189 aa, Rickettsia rhipicephali; identical to SEQ ID NO: 14038
  misc_feature (1)..(189): tr|A0A0F3PGH5|A0A0F3PGH5_RICRH GTP cyclohydrolase 1 OS= Rickettsia rhipicephali str. Ect OX=1359199 GN=folE PE= 3 SV=1

SEQ ID NO: 14049 - protein, 189 aa, Rickettsia rickettsii; identical to SEQ ID NO: 14043
  misc_feature (1)..(189): sp|B0BXB8|GCH1_RICRO GTP cyclohydrolase 1 OS=Rickettsia rickettsii (strain Iowa) OX=452659 GN=folE PE=3 SV=1

SEQ ID NO: 14050 - protein, 189 aa, Rickettsia rickettsii; identical to SEQ ID NO: 14043
  misc_feature (1)..(189): sp|A8GRW0|GCH1_RICRS GTP cyclohydrolase 1 OS=Rickettsia rickettsii (strain Sheila Smith) OX=392021 GN=folE PE= 3 SV=1

SEQ ID NO: 14051 - protein, 189 aa, Rickettsia sibirica; identical to SEQ ID NO: 14029
  misc_feature (1)..(189): tr|Q7PBN9|Q7PBN9_RICS2 GTP cyclohydrolase 1 OS=Ricketts ia sibirica (strain ATCC VR-151 / 246) OX=272951 GN=fol E PE=3 SV=1

SEQ ID NO: 14052 - protein, 189 aa, Rickettsia slovaca; identical to SEQ ID NO: 14029
  misc_feature (1)..(189): tr|H8LND6|H8LND6_RICSL GTP cyclohydrolase 1 OS=Ricketts ia slovaca str. D-CWPP OX=1105109 GN=folE PE=3 SV=1

SEQ ID NO: 14053 - protein, 190 aa, Rickettsia sp.
  misc_feature (1)..(190): tr|A0A1C3EZ42|A0A1C3EZ42_9RICK GTP cyclohydrolase 1 OS= Rickettsia sp. wb OX=1851512 GN=folE PE=3 SV=1
MKKPTKEEAKEAVRTLLRFIGEDPNREGLFKTPDRVIKSYEEIFSGYGKNIEEILETKFSDTGNFQDFISLEGIKFTSFCEHHMLPFSGTVHIAYIPDNCIVGISKLARIVNTFAKRLQIQEKMTVQIAESVQENLKPLGVAVKISALHSCMSMRGVMQDNSIMNTMNYTGIFAEQQKYRHEFLNLTSKK

SEQ ID NO: 14054 - protein, 190 aa, Rickettsia sp.; identical to SEQ ID NO: 14053
  misc_feature (1)..(190): tr|A0A249E422|A0A249E422_9RICK GTP cyclohydrolase 1 OS= Rickettsia sp. MEAM1 (Bemisia tabaci) OX=1182263 GN=fol E PE=3 SV=1

SEQ ID NO: 14055 - protein, 190 aa, Rickettsia typhi
  misc_feature (1)..(190): sp|Q68WZ4|GCH1_RICTY GTP cyclohydrolase 1 OS=Rickettsia typhi (strain ATCC VR-144 / Wilmington) OX=257363 GN=f olE PE=3 SV=1
MNKPTREEAKEAVRTLLRFIGEDPTREGLLKTPDRVINSYMEIFSGYGKDVQEILNTKFYDTYNFQDLISLEGIKFTSFCEHHILPFNGTVHIAYIPDNCIIGVSKLARIVNIFSRRLQIQEKMTVQIAESIQESLKPLGVAIKISAFHSCMSMRGVMHDNSVMNTMYYTGIFAEQQKYRHEFLNFIAKR

SEQ ID NO: 14056 - protein, 202 aa, Rickettsiales bacterium; identical to SEQ ID NO: 12505
  misc_feature (1)..(202): tr|A0A2D7GHS3|A0A2D7GHS3_9RICK GTP cyclohydrolase 1 OS= Rickettsiales bacterium OX=2026788 GN=folE PE=3 SV=1

SEQ ID NO: 14057 - protein, 193 aa, Rickettsiales bacterium
  misc_feature (1)..(193): tr|A0A077FIS8|A0A077FIS8_9RICK GTP cyclohydrolase 1 OS= Rickettsiales bacterium Ac37b OX=1528098 GN=folE PE=3 S V=1
MRNNTPTREEAKEAVRILIKWIGDNPDRVELLNTPARVVDSMKQMFPGYLIRPEDVFNNTMEMVEDYNDIILLRNIKFVSYCEHHILPIIGVANIAYLPDKKMVGIGKLAKIVEIFASRLQIQERMTVQIAEAIEDVLLPKGVAVTVEAAHYCMCKENNMHLLESKMYTSHMRGIFNTDQGMKDKLRDLKFYS

SEQ ID NO: 14058 - protein, 204 aa, Rickettsiales endosymbiont
  misc_feature (1)..(204): tr|A0A4Q7DJ00|A0A4Q7DJ00_9RICK GTP cyclohydrolase 1 OS= Rickettsiales endosymbiont of Peranema trichophorum OX= 2486577 GN=folE PE=3 SV=1
MQHTVSDSQDTLNSNSNISKDEAINAIRVLLGWIGEDPSRQDLIETPNRVLNSFNEFFSGYKIQPATLLQKTFQNTYRYTEPVILKDIAINSYCEHHMVPFTGVAHIAYIPNERIVGISKLARVAEAYARRLQVQERLTMEIARTVEEALQPHGVAVIIEALHQCIATRGAHQPNVKMVTTAMLGRFDSDQKLRAEFFNMCIKK

SEQ ID NO: 14059 - protein, 190 aa, Rickettsiales endosymbiont
  misc_feature (1)..(190): tr|A0A3Q8T8N6|A0A3Q8T8N6_9RICK GTP cyclohydrolase 1 OS= Rickettsiales endosymbiont of Stachyamoeba lipophora OX =2486578 GN=folE PE=3 SV=1
MSIIKEEDALQAIRTLLKWIGEDPEREGLIDTPKRVINSYKELFAGYHKDPEQILSRTFEETENYNDIILLKDISFKSFCEHHMLPIIGTANIAYLPNQKVVGISKLARIVDCFAMRLQIQERMTVQIAETIEKILKPKGVAVMITATHQCMSQRGTNKDGVSMQTSHYTGCFKSQDYLSRLMNMMLHSK

SEQ ID NO: 14060 - protein, 179 aa, Rickettsiella grylli
  misc_feature (1)..(179): tr|A8PMI8|A8PMI8_9COXI GTP cyclohydrolase 1 OS=Ricketts iella grylli OX=59196 GN=folE PE=3 SV=1
MEKHIKAILTALGENPEREGLKNTPMRVSQSLRYLTGGLHESLDEILNGAVFCSAMEEMIVVKDIELYSLCEHHLLPFIGVCHIAYIPNGKIIGLSKIPRIINFYARRLQIQENLTRQIAESLIKILDAKGVAIIIEAKHLCMMMRGVEKQRASMKTSVMLGLFREDLRTRSEFLSLIT

SEQ ID NO: 14061 - protein, 221 aa, Riemerella anatipestifer
  misc_feature (1)..(221): tr|A0A314ZVR3|A0A314ZVR3_RIEAN GTP cyclohydrolase 1 OS= Riemerella anatipestifer OX=34085 GN=folE PE=3 SV=1
MNNHFDNDDDVFTGKEHTPLRADAFEKTPEEKIAIIEKHFAEIMQTLGLDMTDDSLKDSPKRVAKMYVNEIFGGLLPENKPGISTFSNKYKYRQMLIEKDITVYSFCEHHFLPIIGRAHVAYISNGEVIGLSKINRIVDYYAKRPQVQERLTMQIVDALKEALGTNDVACIIDAKHLCVNCRGIKDTASSTITAELSGIFRTNPITRQEFLHYVGSHAKLD

SEQ ID NO: 14062 - protein, 221 aa, Riemerella anatipestifer
  misc_feature (1)..(221): tr|J9R5K9|J9R5K9_RIEAN GTP cyclohydrolase 1 OS=Riemerel la anatipestifer RA-CH-1 OX=1228997 GN=folE PE=3 SV=1
MNNHFDNDDDVFTGKEHTPLRADAFEKTPEEKIAIIEKHFAEIMQTLGLDMTDDSLKDSPKRVAKMYVNEIFGGLLPENKPGISTFSNKYKYRQMLVEKDITVYSFCEHHFLPIIGRAHVAYISNGEVIGLSKINRIVDYYAKRPQVQERLTMQIVDALKEALGTNDVACIIDAKHLCVNCRGIKDTASSTITAELSGIFRTNPITRQEFLHYVGSHTKLD

SEQ ID NO: 14063 - protein, 221 aa, Riemerella columbipharyngis
  misc_feature (1)..(221): tr|A0A1G7DLL4|A0A1G7DLL4_9FLAO GTP cyclohydrolase 1 OS= Riemerella columbipharyngis OX=1071918 GN=folE PE=3 SV= 1
MSHFFDNDDDVFTGKEHTPLRKDAFEKTPEEKIKIIEKHFAEIMRTLGLDMTDDSLKDSPKRVAKMYVNEIFGGLLPENKPGISTFSNKYKYRQMLVEKDITVYSFCEHHFLPIIGKAHVAYISNGEVIGLSKINRIVDYYAKRPQVQERLTMQIVDALKEALGTKDVACIIDAKHLCVNCRGIKDTASSTITAELSGIFRTNPITRQEFLHYVGSHAKLD

SEQ ID NO: 14064 - protein, 221 aa, Riemerella sp.
  misc_feature (1)..(221): tr|A0A496P3U9|A0A496P3U9_9FLAO GTP cyclohydrolase 1 OS= Riemerella sp. OX=2382126 GN=folE PE=3 SV=1
MTDFSDIEDDFFTGKEHTPLHKDAFLLSPDEKIEKIEKLFGEIMHTLGLDMTDDSLKDSPKRVAKMYVNEIFGGLLPENKPGISTFKNQYRYRQMLVEKDITVYSFCEHHFLPIIGRAHVAYISNGEVIGLSKINRIVNYYASRPQVQERLTMQIVQAMKEALGTEDVACIIDAKHLCVNCRGIKDTASSTITAELSGLFRKNPTTRKEFLHYVGSHTKLD

SEQ ID NO: 14065 - protein, 221 aa, Riemerella sp.
  misc_feature (1)..(221): tr|A0A496P3L9|A0A496P3L9_9FLAO GTP cyclohydrolase 1 OS= Riemerella sp. OX=2382126 GN=folE PE=3 SV=1
MNDFSDIEDDFFTGKEHTPLREDAFLLSPNQKIEKIEALFGEIMHTLGLDMTDDSLKDSPKRVAKMYVNEIFGGLLPENKPSISTFKNQYKYRQMLVEKDITVYSFCEHHFLPIIGRAHVAYISNGEVIGLSKINRIVDYYSKRPQVQERLTMQIAQAMKEALGTEDVACIIDAKHLCVNCRGIKDTASSTITAELSGLFRKNPTTRKEFLHYVGSHAKLD

SEQ ID NO: 14066 - protein, 191 aa, Riesia pediculicola
  misc_feature (1)..(191): tr|D4G8Z4|D4G8Z4_RIEPU GTP cyclohydrolase 1 OS=Riesia p ediculicola (strain USDA) OX=515618 GN=RIEPE_0570 PE=3 SV=1
MSFSNEKSSMIQKKLQMNGVNVQSEINIDQSLKHLSQEYAKMFSKSGYNHFPKIDLMKNDTRSDQMIMINNIQFISFCEHHLLVIDGFSTVAYVPKKYIVGFSKISQIVHFFSKRPQLQERLTRQILISLKTILDIEDVAVFVRAVHYCMKLKTQDGSSDVITTELSGSFLSNHSLKNNFFRSCYSFNKGG

SEQ ID NO: 14067 - protein, 193 aa, Rikenella microfusus
  misc_feature (1)..(193): tr|A0A379MW49|A0A379MW49_9BACT GTP cyclohydrolase 1 OS= Rikenella microfusus OX=28139 GN=folE PE=3 SV=1
MEYDEEKIAQLAQHYKAILELLGEDPRREGLLKTPERVAKAISFMTQGYEQDPIQILLSARFREEYKQMVVVKDIELYSLCEHHMVPFYGKAHVAYIPNGFITGLSKIPRVVDCFARRLQVQERLTVQIRDCIQQALNPLGVAVVIEASHMCMQMRGVEKQNSATTTSAFTGAFLTQLQTREEFMNLISHKLR

SEQ ID NO: 14068 - protein, 199 aa, Rikenellaceae bacterium
  misc_feature (1)..(199): tr|A0A3D4XI61|A0A3D4XI61_9BACT GTP cyclohydrolase 1 OS= Rikenellaceae bacterium OX=2049048 GN=folE PE=3 SV=1
MAYTKIEQYDEETTQELAKNYKNVLDLIGEDSAREGLELTPVRVARSIQFLTQGYQMDGKAILNSAKFKEEYQQIVLVKDIELYSMCEHHMLPFYGKAHVAYIPNGYITGLSKIARVVEAYARRLQVQERLTVQIRDCIQETLNPLGVAVVIEASHMCMQIRGVQKLHSITTTSAFTGAFLKDMRTREEFLHLIGVSSH

SEQ ID NO: 14069 - protein, 193 aa, Rikenellaceae bacterium
  misc_feature (1)..(193): tr|A0A351NGB5|A0A351NGB5_9BACT GTP cyclohydrolase 1 OS= Rikenellaceae bacterium OX=2049048 GN=DCW53_03210 PE=3 SV=1
MITEEKAIQNIRELFEYIGEDPYRVGLKDTPERMLRMFKEVFRGYDLGQKPLITTFPNGQDGIIYDNMVVDSGTFYSLCEHHCRTFFGEYWFAYLPNPHGRILGLSKIGRVVDYCAARLQVQERLVHDVVEMLTEALGDENPPFGMALMMRGRHMCKESRGARKSGEMTTTCLTGAFRKSASVRAEFLSYVKE

SEQ ID NO: 14070 - protein, 214 aa, Rippkaea orientalis
  misc_feature (1)..(214): tr|B7JYS2|B7JYS2_RIPO1 GTP cyclohydrolase 1 OS=Rippkaea orientalis (strain PCC 8801) OX=41431 GN=folE PE=3 SV= 1
MTLSQPKELNPTLPKLITQSQPPVTEEEMRQAVRTLLLGLGEDPDREGLRDTPKRVVKALKFLTSGYHQSLDELLNGAVFHENTDEMVLVRDIDLFSSCEHHILPILGRAHIAYIPDGKVIGLSKIARICEMYGRRLQVQERLTAQIADALQGLLQPKGVAVVVEATHMCMVMRGVQKAGSWTVTSAVRGLFAEDAKTRQEFMSLIRHSATFHH

SEQ ID NO: 14071 - protein, 239 aa, Rippkaea orientalis
  misc_feature (1)..(239): tr|B7JZP6|B7JZP6_RIPO1 GTP cyclohydrolase 1 OS=Rippkaea orientalis (strain PCC 8801) OX=41431 GN=folE PE=3 SV= 1
MTIASSNGFNRLNANGSNTLSPNLAERVSTRPDRNTHNGQPAQLHPISDSSKEKMMEAVRTMLEALGEDPEREGLLKTPKRVAEAMAFLTEGYSQSLETLVNGAIFDEGHNEMVLVRDINFFSLCEHHMLPFMGRAHVAYIPNQKVVGLSKLARIVEMYSRRLQVQERLTRQIAEAVQEILDPRGVAVVMEASHMCMVMRGVQKPGSWTVTSAMLGVFQDEQKTREEFLNLIRHQPNFF

SEQ ID NO: 14072 - protein, 275 aa, Rivibacter subsaxonicus
  misc_feature (1)..(275): tr|A0A4Q7W0R3|A0A4Q7W0R3_9BURK GTP cyclohydrolase FolE2 OS=Rivibacter subsaxonicus OX=457575 GN=folE2 PE=3 SV= 1
MTDLSNPNPSAIGSSLLHIPDTQSERDERHLAIQRVGVRELRYPLTVRIDGRAQGAAATWSLDVALPAERKGTHMSRFVAWLDALAQSGTALDAAGLQRGFAEMLDKLHADEGRVEARFSFFIRKQAPVSGVSSLLDYQGAFIIERRGAATTLWLEMAAPVKSLCPCSKEISDYGAHNQRSMVTIRAEVKDPALAFEDLVRIAETSASSEIWGLLKRPDEKWITERAYENPKFVEDLVRDVALRLNADARIGRYRATVENFESIHNHSAFAVIER

SEQ ID NO: 14073 - protein, 265 aa, Rivicola pingtungensis
  misc_feature (1)..(265): tr|A0A318KUF7|A0A318KUF7_9NEIS GTP cyclohydrolase FolE2 OS=Rivicola pingtungensis OX=1054498 GN=folE2 PE=3 SV= 1
MGAPETLPDVQGMLADFGFTIDQVGVKSVKFPLQVASADGGAQATVATLDMYVALPPTQKGTHMSRFLEQLHAHQGPLDGRALHGFVRDMAQRLNAESAEVSLRFPYFVRKTAPVSGAVSLLDVEAAMRGEWRADRGWTLTLTVTTPVTSLCPCSKEISRYGAHNQRSAITLSVELAADADMSLEHLVRVAEHSASCELFGLLKRPDEKWVTERAYDNPKFVEDLVRDIARALVADPRVQAFVVESENFESIHNHSAFARIRHRR

SEQ ID NO: 14074 - protein, 268 aa, Rivicola pingtungensis
  misc_feature (1)..(268): tr|A0A318KKA8|A0A318KKA8_9NEIS GTP cyclohydrolase FolE2 OS=Rivicola pingtungensis OX=1054498 GN=folE2 PE=3 SV= 1
MTVESTAAAMPDVQASADIRNIAINKVGIKSIRHPVLVADRSGGVQHSVGVFDMYVHLPQHFKGTHMSRFVEILNAQERELSVASFEQIVRQMVERLEAPSGYLEMRFPYFVNKTAPVSGVQSLLDYDVTLIGELRDGQYRFTMKVLIPVTSLCPCSKKISERGAHNQRSHITITARTAQHVWIEELIDIAERQASCELYGLLKRPDEKYVTERAYDNPKFVEDLVRDVAAALTADARIDAYVVESENFESIHNHSAYALIEFERPQA

SEQ ID NO: 14075 - protein, 216 aa, Rivularia sp.
  misc_feature (1)..(216): tr|K9RBH1|K9RBH1_9CYAN GTP cyclohydrolase 1 OS=Rivulari a sp. PCC 7116 OX=373994 GN=folE PE=3 SV=1
MTLSFRPELNSAEEVVSSLSTQNKPKVTDEEMMQAVRTLLLGLGEDPDREGLKDTPKRVVKALQFLTKGYNESLDELLNGAVFTEDANEMVLVRDIDIFSSCEHHILPILGRAHVAYIPNGKVIGLSKIARICEMYGRRLQVQERLTLQIAEALEGLLKPQGVAVVVEASHMCMVMRGVQKPGSWTVTSAMRGVFAEDAKTREEFMNLIRHKANFH

SEQ ID NO: 14076 - protein, 235 aa, Rivularia sp.
  misc_feature (1)..(235): tr|K9RGN4|K9RGN4_9CYAN GTP cyclohydrolase 1 OS=Rivulari a sp. PCC 7116 OX=373994 GN=folE PE=3 SV=1
MTIASSNGSNYSQSPLIPNLEDAVNPRPDRNTKGGSQPSLYPPSEEQMEQMKDAVRTMLLGVGEDPEREGLLKTPKRVAEAMRFLTSGYSQSLDDLVNGAIFDEGHNEMVLVRDINFFSLCEHHMLPFMGKAHVAYIPNQKVVGLSKLARIVEMYSRRLQVQERLNRQIAEAIQEILDPQGVAVVMEATHMCMAMRGVQKPGSWTVTSAMLGVFEQEQKTREEFFSLIRHQPAFF

SEQ ID NO: 14077 - protein, 203 aa, Robbsia andropogonis
  misc_feature (1)..(203): tr|A0A0F5JVC5|A0A0F5JVC5_9BURK GTP cyclohydrolase 1 OS= Robbsia andropogonis OX=28092 GN=folE PE=3 SV=1
MGMTDTIKPTREEAEKAVRTLIRWAGDDPDREGLLDTPSRVVRSYDEFFAGYAIDPATLLSTTFSEVDGYDEMVVLKDIRFESYCEHHMVPIIGKAHVAYLPNQRVVGLSKLARLVDAYAKRLQIQEKMTVQIADTLNATLEPKGVAVILEAAHQCMSTRGVHKAGSTMVTSRMLGAFREDASTRREFLSIVGKNASILAPYA

SEQ ID NO: 14078 - protein, 226 aa, Robertkochia marina
  misc_feature (1)..(226): tr|A0A4S3LX96|A0A4S3LX96_9FLAO GTP cyclohydrolase 1 OS= Robertkochia marina OX=1227945 GN=folE PE=3 SV=1
MKIDKALEEQYEELGNEHIGSSANTPLRDDAFEASDDEKIEGIETQVYNIMETLGLDLTDDSLRGTPRRVAKMFVKEIFAGLHPDRKPKASTFENKYKYGEMLVEKNITVYSTCEHHLLPIVGRAHVAYISNGTVIGLSKMNRIVDYYAKRPQVQERMTMQIVQELQQALGTKDVACVVDAKHLCVNSRGIRDIESSTVTAEFGGKFKDAAVRREFLDYINLDTEF

SEQ ID NO: 14079 - protein, 198 aa, Robertkochia marina
  misc_feature (1)..(198): tr|A0A4S3M1E2|A0A4S3M1E2_9FLAO GTP cyclohydrolase 1 OS= Robertkochia marina OX=1227945 GN=folE PE=3 SV=1
MPYKTFEEYNMKITDEVRDRYKQIITELGEDADREGLIKTPERAAKAMQFLTQGYYQDASAIMKSAMFKESYNEMVIVKDIELYSLCEHHILPFFGKAHIAYIPDGYIVGLSKLPRVVDVFARRLQVQERLTHDILECINETLKPKGVAVVIEASHMCMMMRGVQKQNSVTTTSGFRGQFEKIETRNEFLKLISSDLT

SEQ ID NO: 14080 - protein, 227 aa, Robiginitalea biformata
  misc_feature (1)..(227): tr|A4CM58|A4CM58_ROBBH GTP cyclohydrolase 1 OS=Robigini talea biformata (strain ATCC BAA-864 / HTCC2501 / KCTC 12146) OX=313596 GN=folE PE=3 SV=1
MKTDPALETSRESFMEDHFTGKEETPLREDAFRLSDEEKIDRIRQNVRDILLTLGMDLNDDSLRGTPDRVAKMYVKEIFAGLHPDRRPKSSTFDNKYKYGEMLVEKNITVYSTCEHHLLPIVGKAHIAYISGGSVVGLSKMNRIVDYYARRPQVQERMNIQIVRELQRVLGTEDVACVIDAKHLCVNSRGIRDVDSSTVTSEYGGRFKEEESLRREFLEYINLDTEF

SEQ ID NO: 14081 - protein, 176 aa, Robiginitalea biformata
  misc_feature (1)..(176): tr|A4CGT7|A4CGT7_ROBBH GTP cyclohydrolase 1 OS=Robigini talea biformata (strain ATCC BAA-864 / HTCC2501 / KCTC 12146) OX=313596 GN=folE PE=3 SV=1
MQALGMDLSDTSLADTPMRVARMYVNETFRGLSAKNFPRISFFEKAPGTPEMIVVNDITLYSYCEHHFVPFFGKVHVAYIPGDRLLGLSKVNRVVDYLSRKPHLQERLTREIADTLSELLQTRHVAVFVEAQHLCVASRGVRDAKSITRTGCYLGQFQNTHTRAEFMASLKMQGSL

SEQ ID NO: 14082 - protein, 199 aa, Robiginitalea myxolifaciens
  misc_feature (1)..(199): tr|A0A1I6GW15|A0A1I6GW15_9FLAO GTP cyclohydrolase 1 OS= Robiginitalea myxolifaciens OX=400055 GN=folE PE=3 SV=1
MSPFRQLEEYDIELTQEIKERYLRILDEIGEDVEREGLEKTPERAAKAMLFLTQGYQQDAVKILKGAMFKEDYNEMVIIKDIELYSLCEHHMLPFFGKAHVAYIPNGQIVGLSKIPRVVDVFSRRLQVQERLTHDILECINTTLKPKGVAVVIEAAHMCMMMRGVQKQNSVTTTSGFRGQFEKIETRNEFLKLISSDLS

SEQ ID NO: 14083 - protein, 226 aa, Robiginitalea myxolifaciens
  misc_feature (1)..(226): tr|A0A1I6HE90|A0A1I6HE90_9FLAO GTP cyclohydrolase 1 OS= Robiginitalea myxolifaciens OX=400055 GN=folE PE=3 SV=1
MKGDTTLQMSEDSLGEDHFSASEETPLRDDAFRLTDEEKIDRITDSVRDILLTLGMDLDDDSLKGTPLRVAKMFVKETFGGLHPDRRPKSSTFDNKYKYGEMLVEKNITLYSTCEHHLLPIVGKAHIAYISNGSVVGLSKMNRIVDYYAKRPQVQERLNIQIVRELQEVLGTPDVACVIDAKHLCVNSRGIRDVASSTVTAEYGGKFKEEAVRKEFLEYINLETEF

SEQ ID NO: 14084 - protein, 107 aa, Robiginitomaculum sp.
  misc_feature (1)..(107): tr|A0A2G2M5G8|A0A2G2M5G8_9RHOB GTP cyclohydrolase 1 OS= Robiginitomaculum sp. OX=2030823 GN=COA85_00590 PE=3 SV =1
MAPFMGVAHVAYLPTDRVVGLSKIARLVEMYAKRLQTQENLTAQITKAMMDALKPRGVAVMITAEHQCMSTRGVHHGGVDTVTTRFDGVFKDCAEMRERFLRLAEKA

SEQ ID NO: 14085 - protein, 207 aa, Robiginitomaculum sp.
  misc_feature (1)..(207): tr|A0A2G2LR48|A0A2G2LR48_9RHOB GTP cyclohydrolase 1 OS= Robiginitomaculum sp. OX=2030823 GN=folE PE=3 SV=1
MDAYTNKAATLRAVNDDQAKPSRDEAEAAVRTLLAWAGDDPTREGLLETPKRVTRAFGEWFSGYEGDAADILSRTFKEVSGYDDIVMLRNIEVQSHCEHHMAPFMGVAHVAYLPVGRVVGLSKIARLVEMFARRLQTQENLTAQITKAMMDELRPRGVAVMISAQHQCMSTRGVHHHDVDTITTRFDGVFKDCAEMRERFLRLAEKA

SEQ ID NO: 14086 - protein, 184 aa, Robinsoniella peoriensis
  misc_feature (1)..(184): tr|A0A4U8Q3A6|A0A4U8Q3A6_9FIRM GTP cyclohydrolase 1 OS= Robinsoniella peoriensis OX=180332 GN=folE PE=3 SV=1
MIDQSKIKEGVRLILEGIGEDTTREGLIETPDRIARMYTEIVGGMEEDAAEHLSKRFHVKNNEMVLEKDITFYSTCEHHMLPFFGKAHIAYVPNGSVVGLSKIARTVEVFAKRLQLQEQLTAQIADAFMDNLAPQGVMVMVEAEHMCMTMRGIKKPGSKTVTVVTRGIFKDNEKLQNTFYQMLR

SEQ ID NO: 14087 - protein, 194 aa, Robinsoniella sp.
  misc_feature (1)..(194): tr|A0A371AXI8|A0A371AXI8_9FIRM GTP cyclohydrolase 1 OS= Robinsoniella sp. MCWD5 OX=1812858 GN=folE PE=3 SV=1
MAIDKSKIEEHIRGILIALGEDPQREGLIDTPKRVADMYAEVFEGINYTNDEIADMFKKTFEDDLFIQKGKDMVLMKDIEIMSHCEHHLALMYNMKVAVAYIPNDKVIGLSKIARVADMVGRRLQLQERIGSDILEIIKKITNSEDVAVLVEGEHGCMTFRGIKKVNAKTVTTTLSGKFQSDPMLHQKFITLVK

SEQ ID NO: 14088 - protein, 184 aa, Robinsoniella sp.; identical to SEQ ID NO: 14086
  misc_feature (1)..(184): tr|A0A0J1GEV1|A0A0J1GEV1_9FIRM GTP cyclohydrolase 1 OS= Robinsoniella sp. RHS OX=1504536 GN=folE PE=3 SV=1

SEQ ID NO: 14089 - protein, 218 aa, Rodentibacter genomosp.
  misc_feature (1)..(218): tr|A0A1V3JEF4|A0A1V3JEF4_9PAST GTP cyclohydrolase 1 OS= Rodentibacter genomosp. 2 OX=1908266 GN=folE PE=3 SV=1
MSNISQDALNVRDALIAKGIETPMITPNPNKDERRSGIASHMREVMKLIGLDLGDDSLEETPNRLAKMFVDEIFSGMDYANFPKMTKIKNQMKVSEMVQVNDITLTSTCEHHFVTIDGNVAVAYYPKDWVIGLSKINRIVAFFAQRPQVQERLTEQLLTAFQTILETDDVAVYVKATHFCVKARGVKDTNSYTVTSAYGGVFLEDRETRKEFLASIQK

SEQ ID NO: 14090 - protein, 218 aa, Rodentibacter genomosp.
  misc_feature (1)..(218): tr|A0A1V3JCN2|A0A1V3JCN2_9PAST GTP cyclohydrolase 1 OS= Rodentibacter genomosp. 2 OX=1908266 GN=folE PE=3 SV=1
MSNISQDALNVRDALIAKGIETPMMTPNPNKDERRSGIASHMREVMKLIGLDLGDDSLEETPNRLAKMFVDEIFSGMDYANFPKMTKIKNQMKVSEMVQVNDITLTSTCEHHFVTIDGSVAVAYYPKDWVIGLSKINRIVAFFAQRPQVQERLTEQLLTAFQTILETDDVAVYVKATHFCVKARGVKDTNSYTVTSAYGGVFLEDRETRKEFLASIQK

SEQ ID NO: 14091 - protein, 218 aa, Rodentibacter heidelbergensis
  misc_feature (1)..(218): tr|A0A1V3I8P7|A0A1V3I8P7_9PAST GTP cyclohydrolase 1 OS= Rodentibacter heidelbergensis OX=1908258 GN=folE PE=3 S V=1
MSEISPDALSVRNALREKGIETPMIDPSKNKDERRISIAKHMNEVMKLIGLDLADDSLEETPHRLAKMFIDEIFSGMDYANFPKMTKIKNQMKVSEMVQVNDITLTSTCEHHFVTIDGKVCVAYYPKDWVIGLSKINRIVSFFAQRPQVQERLTEQLLTAFQTILETDDVAVYVKATHFCVKARGIKDTHSYTVTSAYGGVFLEDRDTRKEFLATVQK

SEQ ID NO: 14092 - protein, 218 aa, Rodentibacter heylii
  misc_feature (1)..(218): tr|A0A1V3KG14|A0A1V3KG14_9PAST GTP cyclohydrolase 1 OS= Rodentibacter heylii OX=1906744 GN=folE PE=3 SV=1
MSNISQDALNVRDALVAKGIETPMITLNPNKDERRSGIASHMREVMKLIGLDLGDDSLEETPNRLAKMFVDEIFSGMDYANFPKMTKIKNQMKVSEMVQVNDITLTSTCEHHFVTIDGNVAVAYYPKDWVIGLSKINRIVAFFAQRPQVQERLTEQLLTAFQTILETDDVAVYVKATHFCVKARGVKDTNSYTVTSAYGGVFLEDRETRKEFLASIQK

SEQ ID NO: 14093 - protein, 218 aa, Rodentibacter heylii; identical to SEQ ID NO: 14089
  misc_feature (1)..(218): tr|A0A1V3KG23|A0A1V3KG23_9PAST GTP cyclohydrolase 1 OS= Rodentibacter heylii OX=1906744 GN=folE PE=3 SV=1

SEQ ID NO: 14094 - protein, 218 aa, Rodentibacter mrazii
  misc_feature (1)..(218): tr|A0A1V3IGK7|A0A1V3IGK7_9PAST GTP cyclohydrolase 1 OS= Rodentibacter mrazii OX=1908257 GN=folE PE=3 SV=1
MSDISQDALNVRNALIAKGIETPMISPNQNKDERRSGISKHMREVMKLIGLDLRDDSLEETPNRLAKMFIDEIFSGMDYANFPKMTKIKNQMKVSEMVQVNDITLTSTCEHHFVTIDGNVAVAYYPKDWVIGLSKINRIVAFFAQRPQVQERLTEQLLTAFQTILETDDVAVYVKATHFCVKARGVKDTNSYTVTSAYGGVFLEDRETRKEFLASIQK

SEQ ID NO: 14095 - protein, 218 aa, Rodentibacter myodis
  misc_feature (1)..(218): tr|A0A1V3JQX7|A0A1V3JQX7_9PAST GTP cyclohydrolase 1 OS= Rodentibacter myodis OX=1907939 GN=folE PE=3 SV=1
MNEISPDALSVRNALIAKGIETPMIDPAQDKNARRADIAKHMHEVMKLIGLDLRDDSLEETPNRLAKMFIDEIFSGMDYANFPKMTKIKNQMKVSEMVQVNDITLTSTCEHHFVTIDGKVCVAYYPKDWVIGLSKINRIVSFFAQRPQVQERLTEQLLTAFQTILETDDVAVYVKATHFCVKARGIKDTHSYTVTSAYGGVFLEDRDTRKEFLATVQK

SEQ ID NO: 14096 - protein, 218 aa, Rodentibacter pneumotropicus
  misc_feature (1)..(218): tr|A0A1V3K834|A0A1V3K834_9PAST GTP cyclohydrolase 1 OS= Rodentibacter pneumotropicus OX=758 GN=folE PE=3 SV=1
MSDISQDALNVRDALIAKGIETPMITPCQNKDERRSGISKHMREVMKLIGLDLGDDSLEETPNRLAKMFIDEIFSGMDYANFPKMTKIKNQMKVSEMVQVNDITLTSTCEHHFVTIDGSVAVAYYPKDWVIGLSKINRIVAFFAQRPQVQERLTEQLLTAFQTILETDDVAVYVKATHFCVKARGVKDTSSYTVTSAYGGVFLEDRETRKEFLASIQK

SEQ ID NO: 14097 - protein, 230 aa, Rodentibacter pneumotropicus
  misc_feature (1)..(230): tr|A0A448MN22|A0A448MN22_9PAST GTP cyclohydrolase 1 OS= Rodentibacter pneumotropicus OX=758 GN=folE PE=3 SV=1
MSDISQDALNVRDALIAKGIETPMITPCQNKDERRSGISKHMREVMKLIGLDLGDDSLEETPNRLAKMFIDEIFSGMDYANFPKMTKIKNQMKVSEMVQVNDITLTSTCEHHFVTIDGSVAVAYYPKDWVIGLSKINRIVAFFAQRPQVQERLTEQLLTAFQTILETDDVAVYVKATHFCVKARGVKDTNSYTVTSAYGGVFLEDRETRKEFLASIQNKNVKRNDRTLSH

SEQ ID NO: 14098 - protein, 218 aa, Rodentibacter rarus
  misc_feature (1)..(218): tr|A0A1V3IN99|A0A1V3IN99_9PAST GTP cyclohydrolase 1 OS= Rodentibacter rarus OX=1908260 GN=folE PE=3 SV=1
MSEISPDALSVRNALREKGIETPMIDPNQNKDERRIGIAKHMNEVMKLIGLDLADDSLEETPHRLAKMFIDEIFSGMDYANFPKMTKIKNQMKVSEMVQVNDITLTSTCEHHFVTIDGKVCVAYYPKDWVIGLSKINRIVSFFAQRPQVQERLTEQLLTAFQTILETDDVAVYVKATHFCVKARGIKDTHSYTVTSAYGGVFLEDRDTRKEFLATVQK

SEQ ID NO: 14099 - protein, 218 aa, Rodentibacter ratti
  misc_feature (1)..(218): tr|A0A1V3KUB5|A0A1V3KUB5_9PAST GTP cyclohydrolase 1 OS= Rodentibacter ratti OX=1906745 GN=folE PE=3 SV=1
MSDISQDALNVRDALIAKGIETPMIISNQNKDERRSGISNHMREVMKLIGLDLRDDSLEETPNRLAKMFIDEIFSGMDYANFPKMTKIKNQMKVSEMVQVNDITLTSTCEHHFVTIDGKVAVAYYPKDWVIGLSKINRIVAFFAQRPQVQERLTEQLLTAFQTILETDDVAVYVKATHFCVKARGVKDTNSYTVTSAYGGVFLEDRETRKEFLASIQK

SEQ ID NO: 14100 - protein, 218 aa, Rodentibacter sp.
  misc_feature (1)..(218): tr|A0A1V3JZL9|A0A1V3JZL9_9PAST GTP cyclohydrolase 1 OS= Rodentibacter sp. Ppn85 OX=1908525 GN=folE PE=3 SV=1
MSNISQDALNVHEALIAKGIETPMITPNQNKDERRSGIAGHMREVMKLIGLDLGDDSLEETPNRLAKMFIDEIFSGMDYANFPKMTKIKNQMKVSEMVQVNDITLTSTCEHHFVTIDGSVAVAYYPKDWVIGLSKINRIVTFFAQRPQVQERLTEQLLTAFQTILETDDVAVYVKATHFCVKARGVKDTNSYTVTSAYGGVFLEDRETRKEFLASIQK

SEQ ID NO: 14101 - protein, 218 aa, Rodentibacter trehalosifermentans
  misc_feature (1)..(218): tr|A0A1V3IU17|A0A1V3IU17_9PAST GTP cyclohydrolase 1 OS= Rodentibacter trehalosifermentans OX=1908263 GN=folE PE =3 SV=1
MSEISPDALSVRNALRDKGIETPMIDPIKNQDERRIGIAKHMNEVMKLIGLDLADDSLEETPNRLAKMFIDEIFSGMDYANFPKITKIKNQMKVSEMVQVNDITLTSTCEHHFVTIDGKVCVAYYPKDWVIGLSKINRIVSFFAQRPQVQERLTEQLLTAFQTILETDDVAVYVKATHFCVKARGIKDTHSYTVTSAYGGVFLEDRDTRKEFLATVQK

SEQ ID NO: 14102 - protein, 190 aa, Romboutsia hominis
  misc_feature (1)..(190): tr|A0A2P2BT08|A0A2P2BT08_9FIRM GTP cyclohydrolase 1 OS= Romboutsia hominis OX=1507512 GN=folE PE=3 SV=1
MSKVDKDKIRKAVRDILEAIGEDPNREGLIGTPDRVARMYEEIFAGLHQDPSEHLKVIFQDESHEELVLVRDIPFYSCCEHHIVPFFGKAHIAYIPKDGKLTGLSKLARVVETFAKRPQLQERITKGIADIIMQELEPYGVIVVVEAEHMCMTMRGVKKPGSKTITSAVRGIFEKDIAARAEAMSLITMK

SEQ ID NO: 14103 - protein, 190 aa, Romboutsia ilealis
  misc_feature (1)..(190): tr|A0A1V1I2F5|A0A1V1I2F5_9FIRM GTP cyclohydrolase 1 OS= Romboutsia ilealis OX=1115758 GN=folE PE=3 SV=1
MSNVDKDKIKRAVRDILEAIGEDPDREGLLDTPDRVARMYEEIYSGIHQDPREHLKVIFQDEKHEELVLVRDVSFYSCCEHHLVPFFGKAHIAYLPKDGRLTGLSKLARVIETLAKRPQLQERITKSAADIIMEELNPYGVIVVVEAEHMCMTMRGVKKPGSKTITSAVRGIFEKDIAARAEAMSLITMK

SEQ ID NO: 14104 - protein, 190 aa, Romboutsia lituseburensis
  misc_feature (1)..(190): tr|A0A1G9L409|A0A1G9L409_9FIRM GTP cyclohydrolase 1 OS= Romboutsia lituseburensis DSM 797 OX=1121325 GN=folE PE =3 SV=1
MSKVDKDKIKNAVRDILEAIGEDPDREGLIGTPDRVARMYEEIFAGLHQDPSEHLKVIFQDESHEELVLVRDIPFYSCCEHHIVPFFGKAHIAYIPKDGKLTGLSKLARVVETFAKRPQLQERITKGVADIIMKELEPYGVIVVVEAEHMCMTMRGVKKPGSKTTTSAVRGIFEKDIAARAEAMSLITMR

SEQ ID NO: 14105 - protein, 190 aa, Romboutsia maritimum
  misc_feature (1)..(190): tr|A0A371IVY8|A0A371IVY8_9FIRM GTP cyclohydrolase 1 OS= Romboutsia maritimum OX=2020948 GN=folE PE=3 SV=1
MSNVDKDKIKRAVRDILEAIGENPDREGLVNTPDRVARMYEEIYSGLHKDPREHLKVIFQDEKHEELVLVKDIPFYSCCEHHLVPFFGKAHIAYIPKGGRLTGLSKLARVIDTLAKRPQLQERITKEAADIIMKELQPYGVIVVVEAEHMCMTMRGVKKPGSKTITSAVRGVFETDMSTRAEAMSLINMR

SEQ ID NO: 14106 - protein, 190 aa, Romboutsia weinsteinii
  misc_feature (1)..(190): tr|A0A371J9M6|A0A371J9M6_9FIRM GTP cyclohydrolase 1 OS= Romboutsia weinsteinii OX=2020949 GN=folE PE=3 SV=1
MSNVDRDKIKRAVRDILEAIGENPDREGLIDTPDRVARMYEEIFSGIHEDPKDHLKVLFQDEKHEEMVVVKDISFYSCCEHHLVPFFGKAHIAYIPKGGKLTGLSKLARVIETLAKKPQLQERITKDAADIIMKELEPYGVVVVVEAEHMCMTMRGVKKPGSKTVTSAVRGIFEKDISSRSEALSLINMR

SEQ ID NO: 14107 - protein, 184 aa, Roseburia inulinivorans
  misc_feature (1)..(184): tr|A0A174BCC0|A0A174BCC0_9FIRM GTP cyclohydrolase 1 OS= Roseburia inulinivorans OX=360807 GN=folE PE=3 SV=1
MDKEKIEAGVKLILEGIGENPDREGLIDTPDRIARMYEEIFGGLTQTAEEPLSKTFHVKDNAMVLEKDITFYSTCEHHFMPFYGKAHIAYIPDGKVVGLSKLARTVEVYAKRPQIQEQLTAQIADALMEYLKPQGAMVMLEAEHMCMTMRGVKKPGSKTVTFVTRGVFDRDERLQRQFFELVRG

SEQ ID NO: 14108 - protein, 184 aa, Roseburia inulinivorans
  misc_feature (1)..(184): tr|A0A3R5WUG5|A0A3R5WUG5_9FIRM GTP cyclohydrolase 1 OS= Roseburia inulinivorans OX=360807 GN=folE PE=3 SV=1
MDKEKIEAGVRLILEGIGEDPHREGLLDTPDRIARMYEEIFGGLTLTAEEPLSKTFHVKDNAMVLEKDITFYSTCEHHFMPFYGKAHIAYIPDGKVVGLSKLARTVEVYAKRPQIQEQLTAQIADALMEYLKPQGAMVMLEAEHMCMTMRGVKKPGSRTVTFVTRGVFDRDERLQRQFFELVRG

SEQ ID NO: 14109 - protein, 201 aa, Roseburia sp.
  misc_feature (1)..(201): tr|A0A1Q6U1A4|A0A1Q6U1A4_9FIRM GTP cyclohydrolase 1 OS= Roseburia sp. CAG:197_41_10 OX=1897018 GN=folE PE=3 SV= 1
MENKKKIDTEAIAYHIREILKALGDDPEREGLKDTPKRVAKMYEEVFEGMNYTNKEIADMFNKTFVLNECDEYDGIEKMQNMVVVRDIDIFSYCEHHLALMYDMKVTVAYIPKDRVIGISKIARIADMVSKRLQLQERIGTDIADIVQMVTGAEDIAVFIEGCHSCMTARGIKKVNAKTYTQTLKGRFNNESNGFIQWWNR

SEQ ID NO: 14110 - protein, 184 aa, Roseburia sp.
  misc_feature (1)..(184): tr|R6Z5J6|R6Z5J6_9FIRM GTP cyclohydrolase 1 OS=Roseburi a sp. CAG:309 OX=1262945 GN=folE PE=3 SV=1
MDKDKIKKAVSLFLEGIGENPEREGFLETPDRIAKMCEELFGGYEADAADHLEKTFSSTQKGLVLEKDITFYSVCEHHLLPFYGKVHIGYIPDGKVVGLSKLARTVEVFARRAQIQEQLTDQIADAMMDILAPKGVIVMVEAEHMCMTMRGIKKPGSKTITLSTRGCAKEEESWKREFLELLRL

SEQ ID NO: 14111 - protein, 208 aa, Roseiarcus fermentans
  misc_feature (1)..(208): tr|A0A366FGP9|A0A366FGP9_9RHIZ GTP cyclohydrolase 1 OS= Roseiarcus fermentans OX=1473586 GN=folE PE=3 SV=1
MYEVVKLKPAATAPAHPAGRPSREQAEAAVRTLIAWAGDDPDREGLIDTPRRVAKAYEELFGGYREDAVKPLKRVFREVSGYKDLVLVRDIAFVSHCEHHILPVFGKAHIGYYPKGGVVGLSKFARIVDTFARRLQTQEALSAQIVEAIEETLETRGVAVMLEAEHTCMAMRGVRKHGTSTVTTQFGGVFRDDPDQQTRFLGLLRGAR

SEQ ID NO: 14112 - protein, 201 aa, Roseiarcus fermentans
  misc_feature (1)..(201): tr|A0A366ET03|A0A366ET03_9RHIZ GTP cyclohydrolase 1 OS= Roseiarcus fermentans OX=1473586 GN=folE PE=3 SV=1
MIHKLETGGHGVSDPEVEEAFRTVLRWIGEDPERDGLRETPNRLKRAFREYFAGYDEDPEQVLRKTFSEVDGYDEMIVLRGVTFESHCEHHVAPIIGRAWVGYIPDKRVVGISKLARVVEIFAKRLQIQERLTAQIANTIEDVLKPQGVAVVVKAAHHCMISRGVHKRGADLVTSRMLGVFRDSPVTRGEFLSLVNADRTE

SEQ ID NO: 14113 - protein, 363 aa, Roseibaca calidilacus
  misc_feature (1)..(363): tr|A0A0P7WWX7|A0A0P7WWX7_9RHOB GTP cyclohydrolase FolE2 OS=Roseibaca calidilacus OX=1666912 GN=folE PE=3 SV=1
MNVHVPGLEQTPSEAEAQAALETLRRFADGAADDARARVEAAATSLLPALTYPDLNRDYPQGFRADADYKAGLPDLQNGPASLIVGAKAPIQHVGISNFRLPIRYHTRDNGDLMLETSVTGSVSLEAEKKGINMSRIMRSFYGHAERTFSADVVRAALDDYKADLDSFDARIMMRFSFPVKVESLRSGLQGYQYYDIAMEVVDRAGVRQTFMHLDYVYSSTCPCSLELSEHARATRGQLATPHSQRSVARVSVQVLPGNKLWFEDLIDLCRAAVPTETQVMVKREDEQAFAELNAANPIFVEDAARSFCAQLDADPRIGDFRVLASHQESLHSHDAVSVLTRGETFDADSLDPRLFASLFHVG

SEQ ID NO: 14114 - protein, 363 aa, Roseibaca ekhonensis
  misc_feature (1)..(363): tr|A0A3B0M3U7|A0A3B0M3U7_9RHOB GTP cyclohydrolase FolE2 OS=Roseibaca ekhonensis OX=254356 GN=folE2 PE=3 SV=1
MNVHVPGLEQTPSEAEAEAALETLRRFADGASGDARARVEAAATSLLPATSYPDLNRDYPEGFRADAAYKAGLPDLQNGPASLIVGAKAPIQHVGISNFRLPIRYHTRDNGDLTLETSVTGSVSLEAEKKGINMSRIMRSFYGHAERTFSADVVRAALEDYKADLESFDARIMMRFSFPVKVESLRSGLHGYQYYDIAMEVVDRAGVRQTFMHLDYVYSSTCPCSLELSEHARATRGQLATPHSQRSVARVSVQVLPGNKLWFEDLIDLCRAAVPTETQVMVKREDEQAFAELNAANPIFVEDAARSFCEQLDGDARIGDFRVVASHQESLHSHDAVSVLTHGDTFESESLDPRLFASLFHVG

SEQ ID NO: 14115 - protein, 259 aa, Roseibacillus sp.
  misc_feature (1)..(259): tr|A0A2E5D929|A0A2E5D929_9BACT GTP cyclohydrolase FolE2 OS=Roseibacillus sp. OX=2024856 GN=folE2 PE=3 SV=1
MQDLIDTQNEKDDRNLPIDRVGIKSLKHPCGVVGRDGEIQHTVADVSLAVNLPHDERGTHMSRFVEVLNEHGNCLNVKEPGLVPRELQRRLRAETAWVTYQFPFFRSKRAPVTEKEGNLCYEVRFEIEAGETEDFALTVMVPVTTLCPCSKAISERGAHNQRGIVTYSIRSSQVIWIEDAIEIVEESASSELYSLLKRPDEKAVTERAYDHPVFVEDLVRNVARRSEEQGSISWYRVEAENFESIHNHSAYAEIENELG

SEQ ID NO: 14116 - protein, 259 aa, Roseibacillus sp.
  misc_feature (1)..(259): tr|A0A2D6DYD8|A0A2D6DYD8_9BACT GTP cyclohydrolase FolE2 OS=Roseibacillus sp. OX=2024856 GN=folE2 PE=3 SV=1
MQELTDTQNERDYRNLPIDRVGIKSLKHPVVVVGRDGDLQHTVADVSMAVNLPHEQRGTHMSRFVEVLNEHGNCLDVREPGMVSRELQRRLKAERAWVSYQFPFFRSKRAPVTEKESSLSYEVRFEIEAGKTEDFVLTVMVPVTTLCPCSKAISERGAHNQRGIVTYSLRSPQVIWIEDAIETVEESASSELYSLLKRPDEKAVTERAYDNPVFVEDLVRNVARRSVEQGSISWYRVEAENFESIHNHSAYAEIENKPG

SEQ ID NO: 14117 - protein, 365 aa, Roseibacterium elongatum
  misc_feature (1)..(365): tr|W8RWM0|W8RWM0_9RHOB GTP cyclohydrolase FolE2 OS=Rose ibacterium elongatum DSM 19469 OX=1294273 GN=folE2 PE=3 SV=1
MNMHVTTTPEDPTREDAAEALRLLRLWAANATEAERAELDPDVARLLAGQGDYPSFSRDYPQDFTVDEAYKAGLPDLQNGPSSLIRGSQRQIQHVGISNFRLPILYHTRDNGDLTLETSVTGTVSLEAEKKGINMSRIMRSFYAHADKTFSFEVIEAALDDYKTDLESFDARIQMRLSFPMRVNSLRSGLSGYQYYDIALELVERNNVRQKIIHLDYVYSSTCPCSLELSEHARATRNQLATPHSQRSVARISVELAEGQSCLWFEDLIDMARAAVPTETQVMVKREDEQAFAELNAANPIFVEDAARLFAEQLENDARVGDFRVLASHQESLHSHDAVSVLTEGPTFEAASLDPRLFQSLIHVG

SEQ ID NO: 14118 - protein, 211 aa, Roseibium hamelinense
  misc_feature (1)..(211): tr|A0A562TA88|A0A562TA88_9RHOB GTP cyclohydrolase 1 OS= Roseibium hamelinense OX=150831 GN=folE PE=3 SV=1
MDAVLKPVQKKVDRKTPDQLQRPSKEEAEAAVKTLLAWTGDDPDREGLLETPKRVVKAFTQLYGGYFEDPIEHLERTFEDVGGYQDIVMVRGIPFHSHCEHHMLPFIGQAHIAYYPAEGVVGLSKLARVVDIYAKRLQTQENLTAQITSAIDDTLAPRGMAVMLEAEHQCMTMRGVQKPGVSTITTQFTGVFHDDPAEQAKFMTMVRGGMR

SEQ ID NO: 14119 - protein, 229 aa, Roseibium sp.
  misc_feature (1)..(229): tr|E2CSH6|E2CSH6_9RHOB GTP cyclohydrolase 1 OS=Roseibiu m sp. TrichSKD4 OX=744980 GN=folE_2 PE=3 SV=1
MSVRASQPTYSEVLKIMNYAATVAAMADYRKEHGLRPSRADAEAAVRVLLEWSGDDPDREGLVDTPARVVRAYEEFFEGYKIDPAELLARTFEETNDYDDLIVLRNMRLESHCEHHVVPIIGKVHVAYLPANRVVGISKLARVVEVYAKRLQIQETLTSQIADTIQDVLQPRGVAVVVEAAHMCMTTRGIKKPGVSMLTRRLLGEFQTEPELRRDFLSSISGANGGAFS

SEQ ID NO: 14120 - protein, 211 aa, Roseibium sp.
  misc_feature (1)..(211): tr|E2CM47|E2CM47_9RHOB GTP cyclohydrolase 1 OS=Roseibiu m sp. TrichSKD4 OX=744980 GN=folE_1 PE=3 SV=1
MDAVLKSVGKTFERKSPDKLSRPSRAEAEAAVRTLLAWTGDDPEREGLLDTPKRVAKAFEQLYAGYFEDASEHLERTFDDVGGYQDIVLVRGIPFHSHCEHHMLPFIGEAHIAYYPAEGVVGLSKLARVVDIYAKRLQTQENLTSEIVSAIDDALAPRGLAVMLEAEHQCMTMRGVQKPGVSTITTQFTGVFQDDPAEQAKFMTLLRGGAR

SEQ ID NO: 14121 - protein, 366 aa, Roseicitreum antarcticum
  misc_feature (1)..(366): tr|A0A1H2SJB4|A0A1H2SJB4_9RHOB GTP cyclohydrolase FolE2 OS=Roseicitreum antarcticum OX=564137 GN=folE2 PE=3 SV =1
MNIYTPEMDRQPSQDEAEAALAVLKRWAGKASDAEIAHLEPALARLLPGAGDAAYPVLNRDYPAAFTVDDAYKRGLPDLQNGPASLIVGARAQIQHVGISNFRLPIRFHTRDNGDLTLETSVTGTVSLEAEKKGINMSRIMRTFYGHAERTFSFGVIEAALDDYKADLDSFDARIQMRFSFPMKVESLRSGLSGYQYYDIALELVERAGVRRRFMHLDYVYSSTCPCSLELSEHARATRGQLATPHSQRSVARISVELLPGATLWFEDLIGLCRAAVPTETQVMVKREDEQAFAELNAANPIFVEDAARSFCARLQADARIGDFRVVASHQESLHSHDAVSVLSMGDTFAAESLDPKLFNTLFHVG

SEQ ID NO: 14122 - protein, 363 aa, Roseicyclus mahoneyensis
  misc_feature (1)..(363): tr|A0A316GPW8|A0A316GPW8_9RHOB GTP cyclohydrolase FolE2 OS=Roseicyclus mahoneyensis OX=164332 GN=folE2 PE=3 SV =1
MNIHVTEMTEAPSRAEVETALARLRAWAATASTEEIAALDPTIGRLAAAPYPVFERHYPTEFRADAAYKDTLPDLQNGPSSLIRGANRQIQHVGISNFRLPIRYHTRDNGDLTLETSVTGTVSLEADKKGINMSRIMRSFYVHAEKTFSFEVIEAALDDYKSDLESFDARIQMRLSFPARVQSLRSGLSGYQYYDIALELVERAGVRQKIVHLDYVYSSTCPCSLELSEHARATRSQLATPHSQRSVARISVELKDGEGCLWFEDLIEMARAAVPTETQVMVKREDEQAFAELNAANPIFVEDAARLYAEQLHADTRVGDFRVVASHQESLHSHDAVSVLTEGNTFAQASLDPHLFSSLIHRG

SEQ ID NO: 14123 - protein, 225 aa, Roseiflexus castenholzii
  misc_feature (1)..(225): tr|A7NG47|A7NG47_ROSCS GTP cyclohydrolase 1 OS=Roseifle xus castenholzii (strain DSM 13941 / HLO8) OX=383372 GN =folE PE=3 SV=1
MTYHNGNNGHHDHALADVDEREYETLIIQGRGKLEGMSYHSDAAIEDAVRVILKQIGENPEREGLQKTPSRVAKMYAELTAGYHIDPDALINEAVFSVGYDEMVLVKNIEFSSLCEHHMLPFMGRVHVAYIPNGRVVGLSKIPRIVEMFARRLQVQERMTVQIADFINQRLEPLGVAVVAEGVHMCAVMRGVKKAGATMVTSAMRGVFRDDPKTRSEFMAHIERG

SEQ ID NO: 14124 - protein, 226 aa, Roseiflexus sp.
  misc_feature (1)..(226): tr|A5UR68|A5UR68_ROSS1 GTP cyclohydrolase 1 OS=Roseifle xus sp. (strain RS-1) OX=357808 GN=folE PE=3 SV=1
MAFRNSTNGYHTDHALADDDGQEYETLIVQGRGKLEGVSYQSDPAIEDAVRVILKQIGENPEREGLLKTPSRVAKMYAELTAGYHIDPDALINDAIFSVSYDEMVLVKNIEFASLCEHHMLPFMGRVHVAYIPNGKVVGLSKIPRIVEMFARRLQVQERMTVQIADFINQRLEPLGVAVVAEGVHMCAVMRGVKKAGATMVTSAMRGVFRDDPKTRSEFMAHIERA

SEQ ID NO: 14125 - protein, 276 aa, Roseimaritima ulvae
  misc_feature (1)..(276): tr|A0A5B9R9U2|A0A5B9R9U2_9PLAN GTP cyclohydrolase 1 typ e 2 OS=Roseimaritima ulvae OX=980254 GN=UC8_58570 PE=4 SV=1
MSETIQHVCQTLAQLAPLPLAESWDNVGLLVGDRRQPVQRVMVCLTITPAVVAEAVERRADLIVSHHPLPFKPLARITRDTVAGGMLLDLIRGGVAVYSAHTAWDSAVDGINQQLADCLQLDDVAPLKLIEWDAEPSALADSPSVEVPHGAGRQGRAAEGTTLGHVAQAVAAKTSASGVRLVGSPDQLVRKVALACGSGGSFLDVAVQRGCNAMVTGEATFHTCLDAEARGVGLVLLGHYASERFAMEELAGRLAALHDRLTIWASENDRDPIANL

SEQ ID NO: 14126 - protein, 218 aa, Roseimaritima ulvae
  misc_feature (1)..(218): tr|A0A5B9QNE1|A0A5B9QNE1_9PLAN GTP cyclohydrolase 1 OS= Roseimaritima ulvae OX=980254 GN=folE PE=3 SV=1
MEASALSKSNNQDDNHRGASPYVDRNEPRPQGVDLKRIEAAVREILDAVGEDPDREGLLETPARVARMYAEMFAGLKHDAGRHLAKVFTEKYDEIVLVRDISFCSMCEHHLLPFTGTAHIAYLPSGKVVGLSKLARVVEEVARRPQVQERMTETVADLIEQRLEARGVAVVCEATHSCMTMRGVRKPGSLCITSSMRGVFRDDSSSRAEVLGLINRGA

SEQ ID NO: 14127 - protein, 263 aa, Roseimicrobium gellanilyticum
  misc_feature (1)..(263): tr|A0A366HVV9|A0A366HVV9_9BACT GTP cyclohydrolase FolE2 OS=Roseimicrobium gellanilyticum OX=748857 GN=folE2 PE =3 SV=1
MPASKLHDTQNQSDARGIPIDRVGVKGLRFPLKIRDRDQAEQSTVAVVSLAVDLPHHFKGTHMSRFVEVLHSHGQVLTVADIAGMPRELLKKLHADKAHVEFRFPWFRMKKAPATKAEGLMDYGIIFEVNAEGEKVDFVVTVEVAVTTLCPCSKAISVHGAHNQRGVVTFSVRFTKPVWIEELVELVEASASSELYSLLKRPDEKVVTERAYENPVFVEDLVRNVALRAKQHPQITWFKVEAENFESIHNHNAYALIEQTVER

SEQ ID NO: 14128 - protein, 363 aa, Roseinatronobacter monicus
  misc_feature (1)..(363): tr|A0A543KAZ8|A0A543KAZ8_9RHOB GTP cyclohydrolase FolE2 OS=Roseinatronobacter monicus OX=393481 GN=folE2 PE=3 SV=1
MNLHVPSLEETPSREEAEAALDVLRRFTDEAPEAERGALEAAVTSLLPAAGYPVLNRDYPAEFSVDSVYKEGLPDLQNGPASLIVGAKAAIQHVGISNFRLPIGYHTRDNGDLTLETSVTGTVSLEAEKKGINMSRIMRSFYAHAERTFSTDVICAALDDYKSDLDSFDARIMMRFSFPMKVESLRSGLSGYQYYDIALELVDLGGSRQVFMHLDYVYSSTCPCSLELSEHARATRGQLATPHSQRSVARVSVEVLSGRTLWFEDLVELCRNAVPTETQVMVKREDEQAFAELNAANPIFVEDAARSFCEQLDADERIGDFRVVASHQESLHSHDAVSVLTRGPSFEAASLDPRLFSTLFHVG

SEQ ID NO: 14129 - protein, 363 aa, Roseinatronobacter thiooxidans
  misc_feature (1)..(363): tr|A0A2W7QFG5|A0A2W7QFG5_9RHOB GTP cyclohydrolase FolE2 OS=Roseinatronobacter thiooxidans OX=121821 GN=folE2 P E=3 SV=1
MNLHVSSLEKTPSREEAEAALDLLRRFTDTAPEAERVELETAVTSLLPAAGYPVLNRDYPSDFAVDGAYKDGLPDLQNGPASLIVGAKAAIQHVGISNFRLPIRYHTRDNGDLTLETSVTGTVSLEAEKKGINMSRIMRSFYAHAERTFSTDVITAALDDYKADLESFDARIMMRFSFPLKVQSLRSGLSGYQYYDIALELVDLGGSRQVFMHLDYVYSSTCPCSLELSEHARATRGQLATPHSQRSVARVSVEVLAGGTLWFEDLVELCRAAVPTETQVMVKREDEQAFAELNAANPIFVEDAARSFCAQLEGDARIGDFRVVASHQESLHSHDAVSVLTRGPSFEAASLDPRLFSTLFHVG

SEQ ID NO: 14130 - protein, 368 aa, Roseisalinus antarcticus
  misc_feature (1)..(368): tr|A0A1Y5TL43|A0A1Y5TL43_9RHOB GTP cyclohydrolase FolE2 OS=Roseisalinus antarcticus OX=254357 GN=folE2 PE=3 SV =1
MNLHAPDFDREPTRSEAEAALAVLRRWAGEASADEVATLDPTVAALLPGHAGAEYPALTRAYPEAFEADAAYRATMPDLQNGPASLIRGCATQIQHVGISNFRLPIRFHTRDNGDLTLETSVTGTVSLEAEKKGINMSRIMRTFYKHANETFSFEVIERALDAYKSDLESFDARIQMRFSFPMQVQSLRSGLEGFQYYDIALELVERDGIRKKIIHLDFVYSSTCPCSLELSEHARQVRGQLATPHSQRSVARISVEVDGSAPGCLWFEDLIDMARAAVPTETQVMVKREDEQAFAELNAANPIFVEDAARLFCEQLKADPRVGDFRIVASHQESLHSHDAVSVLTEGPTFAAESLDPRLFMTLFHVG

SEQ ID NO: 14131 - protein, 201 aa, Roseitalea porphyridii
  misc_feature (1)..(201): tr|A0A4P6V1C2|A0A4P6V1C2_9RHIZ GTP cyclohydrolase 1 OS= Roseitalea porphyridii OX=1852022 GN=folE PE=3 SV=1
MDAIAPATANPADERPSREEAEAAVLTLLKWIGDDPAREGLRETPSRVVKAYEEMFGGYENDPADILGRTFEEVAGYDDIVLVRDIDFHSHCEHHMVPIIGKAHVAYLPHDRVLGLSKIVRVVDIFARRLQTQETMTAQIATAIDDALAPRGVAVMLEAEHMCMAMRGVRKNGSTTITTRFTGSFEDQAWQSRFTDLVRQR

SEQ ID NO: 14132 - protein, 230 aa, Roseivirga echinicomitans
  misc_feature (1)..(230): tr|A0A150X2S1|A0A150X2S1_9BACT GTP cyclohydrolase 1 OS= Roseivirga echinicomitans OX=296218 GN=folE PE=3 SV=1
MKNKNGKSSEDLLKQIEEMGDDHMMSSIETPMREGAFDLSDEEKIAIIQGHFEKIMHTLGLDLTDDSLSGTPKRVAKLYVKELFKGLKPENKPSLSTFQNKYEYSEMLVEKNITLYSNCEHHFLPIVGKAHVAYIPNGKVIGLSKINRIVDYYSRRPQVQERLAIQILDEMKRALNTEDVAVYIDAEHMCVSSRGVSDQSSSTVTVEYSGKFKEEETKREFLTYVNDKLK

SEQ ID NO: 14133 - protein, 228 aa, Roseivirga echinicomitans
  misc_feature (1)..(228): tr|A0A150XJJ1|A0A150XJJ1_9BACT GTP cyclohydrolase 1 OS= Roseivirga echinicomitans OX=296218 GN=folE PE=3 SV=1
MKQNGTLSSTPLNVYSSIEEIGDEHVGTSYETPMVPNAFDMDDDLKQELIEKKFKEIMEIMGLDLSDDSLSGTPKRVAKMYIKEIFSGLSPANKPKVTLFENKYQYNEMLVEKNITFHSNCEHHFVPIIGKAHVAYISSGKVIGLSKINRIVEYYAKRPQVQERLTVQIANELKTLLDTEDVAVIIDADHLCVQSRGVKDVNSSTVTAQFHGKFKEEATRSEFLKYIK

SEQ ID NO: 14134 - protein, 230 aa, Roseivirga ehrenbergii
  misc_feature (1)..(230): tr|A0A150X8L8|A0A150X8L8_9BACT GTP cyclohydrolase 1 OS= Roseivirga ehrenbergii OX=279360 GN=folE PE=3 SV=1
MKNKNGKSSEDLLKQIEEMGDDHVMSSIETPMREGAFDLSDEEKIAIIQGHFEKIMHTLGLDLTDDSLSGTPKRVAKLYVKELFKGLKPENKPSLSTFQNKYEYSEMLVEKNITLYSNCEHHFLPIVGKAHVAYIPNGNVIGLSKINRIVDYYSRRPQVQERLALQILDEMKRALNTEDVAVYIDAEHMCVSSRGVSDQSSSTVTVEYSGKFKEEETKREFLTYVNDKLK

SEQ ID NO: 14135 - protein, 231 aa, Roseivirga ehrenbergii
  misc_feature (1)..(231): tr|A0A150XPK9|A0A150XPK9_9BACT GTP cyclohydrolase 1 OS= Roseivirga ehrenbergii OX=279360 GN=folE PE=3 SV=1
MKQNGTLSSTPLNVYSSIEEIGDEHVGTSYETPMVPNAFDMDDDLKQELIEKKFKEIMEIMGLDLSDDSLSGTPKRVAKMYIKEIFSGLSPANKPKVTLFENKYQYNEMLVEKNITFYSNCEHHFVPIIGKAHVAYISSGKVIGLSKINRIVEYYAKRPQVQERLTVQIANELKTLLETEDVAVIIDADHLCVQSRGVKDVNSSTVTAQFHGKFKENSTKKELMSYINTKA

SEQ ID NO: 14136 - protein, 230 aa, Roseivirga seohaensis; identical to SEQ ID NO: 14134
  misc_feature (1)..(230): tr|A0A150XNX6|A0A150XNX6_9BACT GTP cyclohydrolase 1 OS= Roseivirga seohaensis OX=1914963 GN=folE PE=3 SV=1

SEQ ID NO: 14137 - protein, 231 aa, Roseivirga seohaensis
  misc_feature (1)..(231): tr|A0A0L8AM42|A0A0L8AM42_9BACT GTP cyclohydrolase 1 OS= Roseivirga seohaensis subsp. aquiponti OX=1566026 GN=fo lE PE=3 SV=1
MKQNGTLSSTPLNVLSRIEEIGDEHVGTSYETPMVPNAFDMDDDLKQELIEKKFKEIMEIMGLDLSDDSLSGTPKRVAKMYIKEIFSGLSPANKPKVTLFENKYQYNEMLVEKNITFYSNCEHHFVPIIGKAHVAYISSGKVIGLSKINRIVEYYAKRPQVQERLTVQIANELKTLLETEDVAVIIDADHLCVQSRGVKDVNSSTVTAQFHGKFQENSTKKELMSYINTKS

SEQ ID NO: 14138 - protein, 230 aa, Roseivirga sp.
  misc_feature (1)..(230): tr|A0A316KJT0|A0A316KJT0_9BACT GTP cyclohydrolase 1 OS= Roseivirga sp. XM-24bin3 OX=2133949 GN=folE PE=3 SV=1
MKQKETLLSTQLNGLTVEEIGDEHVGTSYDTPMKADAFDMDDELKMNLIEDKFRDIMEIMGLDLTDDSLSGTPKRVAKMYIKEIFSGLNPANKPKVALFENKYKYNEMLVEKDITFYSNCEHHFVPIIGKAHVAYISTGNVIGLSKINRIVEYYAKRPQVQERLTVQIANELKEVMGTEDVAVVIDAEHLCVSSRGVKDVNSSTVTAQFHGKFKEEATRREFLGYINTKK

SEQ ID NO: 14139 - protein, 230 aa, Roseivirga sp.
  misc_feature (1)..(230): tr|A0A316KKR6|A0A316KKR6_9BACT GTP cyclohydrolase 1 OS= Roseivirga sp. XM-24bin3 OX=2133949 GN=folE PE=3 SV=1
MEDKSTKVSDELLKEVDEIGDNHIMTSIATPMREDAFELSDEEKIEKIQGYFEKIMHTLGLDLTDDSLKGTPKRVAKLYIKDLFKGLDPANKPSMSTFENKYNYNQMLVEKNITVYSNCEHHFLPIVGRAHVAYIPNGNVIGLSKINRIVDYYARRPQVQERLALQVLNELKEALNTEDVAVYVDAEHMCISSRGVSDQHSSTVTVEYSGKFQEEATKKEFLTYINDKLK

SEQ ID NO: 14140 - protein, 230 aa, Roseivirga spongicola; identical to SEQ ID NO: 14138
  misc_feature (1)..(230): tr|A0A150X5T8|A0A150X5T8_9BACT GTP cyclohydrolase 1 OS= Roseivirga spongicola OX=333140 GN=folE PE=3 SV=1

SEQ ID NO: 14141 - protein, 230 aa, Roseivirga spongicola; identical to SEQ ID NO: 14139
  misc_feature (1)..(230): tr|A0A150WZL2|A0A150WZL2_9BACT GTP cyclohydrolase 1 OS= Roseivirga spongicola OX=333140 GN=folE PE=3 SV=1

SEQ ID NO: 14142 - protein, 367 aa, Roseivivax halodurans
  misc_feature (1)..(367): tr|X7EJ20|X7EJ20_9RHOB GTP cyclohydrolase FolE2 OS=Rose ivivax halodurans JCM 10272 OX=1449350 GN=folE2 PE=3 SV =1
MNVHTPDIDRKPSREEAEKALALLRQWAGKAHDSEIADLEPALAGLVPGADARPAYPPLTRSYDHDFRVDASYKATLPDLQNGPSSLIRGAKRAIQHVGISNFRLPVHYHTRDNGDVVLETSVTGSVSLEADKKGINMSRIIRSFYAHAEKTFSFETIEAALNDYKTDLESFDARINMRLRFPVAVESLRSGLSGYQYYDIALELVETDGVRRKIMHLDFVYSSTCPCSLELSEHARRERGVLATPHSQRSVARISVELTGDDCLWFEDLIELCRSAVPTETQVMVKREDEQAFAELNGANPIFVEDAARLFAEALQGDARIADFRVIASHQESLHSHDAVSVLTEGDLFAAESLDPKLFATLVHVG

SEQ ID NO: 14143 - protein, 364 aa, Roseivivax halotolerans
  misc_feature (1)..(364): tr|A0A1I5XUS8|A0A1I5XUS8_9RHOB GTP cyclohydrolase FolE2 OS=Roseivivax halotolerans OX=93684 GN=folE2 PE=3 SV=1
MNVHTPELERKPSREAAREALALLRDWAGASDDDEIAELDPAIARLVSGADAYPDLAREYDAAFDVDAEYKDTLPDLQNGPSSLIRGARRAIQHVGISNFRLPVTFRTRDNGNVTLETSVTGSVSLDADKKGINMSRIMRSFYKHGEKTFSFEVIESALDDYKSDLESFDARINMRLRFPLRVESLRSGLEGFQYYDIALELVETAGQRRKIMHLDYVYSSTCPCSLELSEHARRERGVLATPHSQRSVARISVETTGDDCLWFEDLIELCRKAVPTETQVMVKREDEQAFAELNGANPIFVEDAARLFAEQLQKDARIGDFRVVASHQESLHSHDAVSVLTEGPLFEQESLDPKLFSTLFHVG

SEQ ID NO: 14144 - protein, 366 aa, Roseivivax isoporae
  misc_feature (1)..(366): tr|X7FG71|X7FG71_9RHOB GTP cyclohydrolase FolE2 OS=Rose ivivax isoporae LMG 25204 OX=1449351 GN=folE2 PE=3 SV=1
MNVHTPDIDRKPSREEAEEALALLRKWTGKAQDREIADLDPALMALLGEPAPAAYPDLARRYDAGFAPDAAYRATLPDLQNGPSSLIRGANRAIQHVGISNFRLPLRYRTRDNGDLVLETSVTGSVSLDADKKGINMSRIIRSFYRHAEETFSFGTIEAALDDYKSDLESFDARIHMRLRFPVAVESLRSGLTGYQYYDIALELVERDGVRRKVMHLDYVYSSTCPCSLELSEHARRERGVLATPHSQRSVARLSVELTEAGCLWFEDLIELCRGAVPTETQVMVKREDEQAFAELNAANPIFVEDAARLFAEALSGDARIGDYRVVASHQESLHSHDAVSVLTEGDLFAADSLDPRLFASLYHVG

SEQ ID NO: 14145 - protein, 367 aa, Roseivivax jejudonensis
  misc_feature (1)..(367): tr|A0A1X6ZGY4|A0A1X6ZGY4_9RHOB GTP cyclohydrolase FolE2 OS=Roseivivax jejudonensis OX=1529041 GN=folE2 PE=3 SV =1
MNVHTPDIDRGPSREEAEAALETLRHWAGRAHDSEIADLDPALARLVPGVDGGAPYPALARHYDTGFEADADYKLTLPDLQNGPASLIRGARRAIQHVGISNFRLPVQFRTRDNGNLVLETSVTGSVSLDADKKGINMSRIMRSFYVHAEKTFSFETIEAALDDYKSDLESFDARIAMALRFPMAVESLRSGLTGYQYYDITLELVDRDGARRKIMHLDYVYSSTCPCSLELSEHARRERGVLATPHSQRSVARISVEVTGDDCLWFEDLVELCRRAVPTETQVMVKREDEQAFAELNAANPIFVEDAARLFAAELQDDARIGDFRVVASHQESLHSHDAVSVLTEGDLFAAESLDPKLFATLIHAG

SEQ ID NO: 14146 - protein, 364 aa, Roseivivax lentus
  misc_feature (1)..(364): tr|A0A1N7NGU0|A0A1N7NGU0_9RHOB GTP cyclohydrolase FolE2 OS=Roseivivax lentus OX=633194 GN=folE2 PE=3 SV=1
MNVYDPEFDRKPSREEAEAALAVLRQWADRAHEAEIEALDPAVQKLLPGADSYPILARDYDSGFDVDTAYKDTLPDLQNGPSSLIRGANRPIQHVGISNFRLPIAYHTRDNGDLHLETSVTGTVSLDADKKGINMSRIMRSFYKHAEKTFSFEVIEAALDDYKTDLESFDARINMRLRFPVKVDSLRSGLSGFQYYDIALELVELEGVRRKVMHLDYVYSSTCPCSLELSEHARRERGVLATPHSQRSVARISVELKGEDVLWFEDLIDLCRAAVPTETQVMVKREDEQAFAELNAANPIFVEDAARLFADQLQRDGRIGDYRVLASHQESLHSHDAVSVLTEGDLFAQESLDPQLFSTLFHVG

SEQ ID NO: 14147 - protein, 364 aa, Roseivivax marinus
  misc_feature (1)..(364): tr|W4HPM9|W4HPM9_9RHOB GTP cyclohydrolase FolE2 OS=Rose ivivax marinus OX=1379903 GN=folE2 PE=3 SV=1
MNVHLPEFDREPSRDEAEAALRLLRHWADTAESAEIDALDPAIARLLSGKVDYPALERRYDHEFDADDAYRRTLPDLQNGPASLIRGAKRSIQHVGISNFRLPLRYRTRDNGALVLETSVTGSVSLDADKKGINMSRIIRSFYAHAEQTFSIGTVEAALDDYKQDLESFDARIALALRFPMRVESLRSGLEGWQYYDVAMELVERDGVRRKVMHLDYVYSSTCPCSLELSEHARQERNVLATPHSQRSVARISVELIGDDVLWIEDLVELCRKAVPTETQVMVKREDEQAFAELNGANPIFVEDAARLFAEALQSDARIGDFRVAASHQESLHSHDAVSVLSEGELFDAESFDPKFFETLIHRG

SEQ ID NO: 14148 - protein, 364 aa, Roseivivax pacificus
  misc_feature (1)..(364): tr|A0A2T6ATN2|A0A2T6ATN2_9RHOB GTP cyclohydrolase FolE2 OS=Roseivivax pacificus OX=1267769 GN=folE2 PE=3 SV=1
MNMHTPEIDRKPSREEAERALELLRRWAGKAKDTEIAELDPAVKRLVEGADDYPALRREYPDGFTVDADYKETLPDLQNGPAALIRGENRGIQHVGISNFRLPIAYHTRDNGDLVLETSVTGTVSLEADKKGINMSRIMRSFYAHSEKTFSFEVIEAALDDYKSDLESFDARINMRLSFPMKVDSLRSGLAGYQYYDIALELVEVDGVRRKIMHLDYVYSSTCPCSLELSEHARRERGQLATPHSQRSVARVSVELSGDDCLWFEDLVDMCRRAVPTETQVMVKREDEQAFAELNAANPIFVEDAARLFAEQLQADARVGDYRIVASHQESLHSHDAVSVLTEGDLFSADSLDPKLFSTLFHVG

SEQ ID NO: 14149 - protein, 367 aa, Roseivivax roseus
  misc_feature (1)..(367): tr|A0A1H9WFP1|A0A1H9WFP1_9RHOB GTP cyclohydrolase FolE2 OS=Roseivivax roseus OX=641238 GN=folE2 PE=3 SV=1
MNIHTPEIERQPEREDAAAALRTLRAWAATASDAEIETLDPSIARLLTDRPTGTYPDLSRQYPEGFTADSDYKATLPDLQNGPQSLIRGARRPIQHVGISNFRLPIHFRTRDNGDLTLETSVTGTVSLEAEKKGINMSRIMRTFYTYAEETFSFEVIEAALDSYKSDLESFDARIQMRFSFPMRVESLRSGLAGFQYYDIALELVEREGVRRKIVHLDYVYSSTCPCSLELSEHARRERGQLATPHSQRSVARISVALNPEAECLWFEDLVELCRAAVPTETQVMVKREDEQAFAELNAANPIFVEDAARLFAERLQAEPRIGDFRVIASHQESLHSHDAVSVLTEGDTFDQESLDPKAFATLFHVG

SEQ ID NO: 14150 - protein, 366 aa, Roseivivax roseus
  misc_feature (1)..(366): tr|A0A1H9W262|A0A1H9W262_9RHOB GTP cyclohydrolase FolE2 OS=Roseivivax roseus OX=641238 GN=folE2 PE=3 SV=1
MPISPANVRAWELIKAEQRSIPEKIRKAADTLTNRAVASERTQLERQAKTAEVAYPLFKRTYETDFEADAAYRDTLPDLQNGPESLIKGARRSIQHVGISNFRLPIRFHSRNAEDLTLETSVTGTVSLEAEKKGINMSRIMRSFYRFAESLFSFEVAEGVIDAYKADLGSFDARLQMRFSYPMKVSSLRSGLEGYQYYDIALEVVERNGHRQKIVHLDYVYSSTCPCSLELSEHARRTRMQLATPHSQRSVARISVELADEAGFWFEDLIELCRQAVQTETQVMVKREDEQAFAELNAANPIFVEDAVRLFGEALAGDDRIADFRVIASHQESLHSHDAVSVLTEGETFAQASFDPRLFSTLFHVG

SEQ ID NO: 14151 - protein, 366 aa, Roseivivax sediminis
  misc_feature (1)..(366): tr|A0A1I1TDL2|A0A1I1TDL2_9RHOB GTP cyclohydrolase FolE2 OS=Roseivivax sediminis OX=936889 GN=folE2 PE=3 SV=1
MNVHTPEIDRKPSRKEAERALATLRHWAGQSHEAEIAALDPAVAALAPDAEKVSYPPLARHYDAGFEADADYRDTLPDLQNGPSSLIRGARRAIQHVGISNFRLPIRFRSRDNGALVLETSVTGSVSLDADKKGINMSRIIRSFYAHAEKTFSFETIEAALDDYKTDLESFDARINMGLRFPVAVESLRSGLTGYQYYDISLELVETAGVRRKIMHLDYVYSSTCPCSLELSEHARQARGVLATPHSQRSVARVSVELVGSRCLWFEDLIELCRRAVPTETQVMVKREDEQAFAELNAANPIFVEDAARLFAEELQAEERIGDFRVVASHQESLHSHDAVSVLTEGTLFAADSLDPKLFSTLFHVG

SEQ ID NO: 14152 - protein, 221 aa, Rosenbergiella nectarea; identical to SEQ ID NO: 5172
  misc_feature (1)..(221): tr|A0A1H9M3N8|A0A1H9M3N8_9ENTR GTP cyclohydrolase 1 OS= Rosenbergiella nectarea OX=988801 GN=folE PE=3 SV=1

SEQ ID NO: 14153 - protein, 367 aa, Roseobacter denitrificans
  misc_feature (1)..(367): sp|Q168P4|GCH4_ROSDO GTP cyclohydrolase FolE2 OS=Roseob acter denitrificans (strain ATCC 33942 / OCh 114) OX=37 5451 GN=folE2 PE=3 SV=2
MNIHTPGLELTPDRDEAQAALDVLRQWAKQATPAEISELDPSVARLVPGMDGVEYPALSREYPSDFSLDDGYKETLPDLQNGPSSLIRGTKQQIQHVGISNFRLPIRFHTRSGGDITLETSVTGSVSLEADKKGINMSRIMRSFYKHAEETFSFEVIEAALDAYINDLESFDARIQMRFSFPMKVDSLRSGLSGYQYYDIALELVDQGGVRKKIMHLDYVYSSTCPCSLELSEHARATRGQLATPHSQRSVARISVEVENDGQCLWFEDLIEACRRAVPTETQVMVKREDEQAFAELNAANPIFVEDAARLFCEQLHSDTRIGDFRVIASHQESLHSHDAVSVLMEGETFKSESLDPKLFNTLFHVG

SEQ ID NO: 14154 - protein, 367 aa, Roseobacter litoralis
  misc_feature (1)..(367): tr|F7ZB52|F7ZB52_ROSLO GTP cyclohydrolase FolE2 OS=Rose obacter litoralis (strain ATCC 49566 / DSM 6996 / JCM 2 1268 / NBRC 15278 / OCh 149) OX=391595 GN=folE2 PE=3 SV =1
MNIHTPGLQVTPDRDEAQAALDVLRQWAKQATPTEISELDPSVARLIPGMDGVEYPALSREYPGDFAIDDSYKETLPDLQNGPSSLIRGTKQQIQHVGISNFRLPIRFHTRTGGDITLETSVTGSVSLEADKKGINMSRIMRSFYKHAEETFSFEVIEAALDAYINDLESFDARIQMRFSFPMKVDSLRSGLSGYQYYDIALELVDQGGVRKKIMHLDYVYSSTCPCSLELSEHARATRGQLATPHSQRSVARVSVEVENDGQCLWFEDLIETCRRAVPTETQVMVKREDEQAFAELNAANPIFVEDAARLFCEQLHADTRIGDFRVIASHQESLHSHDAVSILMEGDTFKSESLDPKLFNTLFHVG

SEQ ID NO: 14155 - protein, 367 aa, Roseobacter sp.
  misc_feature (1)..(367): tr|A3X4I2|A3X4I2_9RHOB GTP cyclohydrolase FolE2 OS=Rose obacter sp. MED193 OX=314262 GN=folE2 PE=3 SV=1
MNIQTRDLSEAPDRHAAETALALLRQWAEAADPSEVAQLDPAIARLLPGRELGNYPELSRDYPEEFVSDAAYRATLPDLQNGPASLIRGAKEQIQHVGISNFRLPIRFHSRDGHDQTLETSITGSVSLEADKKGINMSRIMRSFYKHAEKTFSFEVMESALSDYLTDLESMDARLQMRFSFPVRIESLRSGLSGYQYYDIALELVQSEGQRHKVIHLDYVYSSTCPCSLELSEHARKARGQLATPHSQRSVARLSVSVDPDGECLWFEDLIEHCRRAVPTETQVMVKREDEQAFAELNAANPIFVEDAARLFCEALQNDARIKDFRVVASHQESLHSHDAISILTQGPLFANKSLDPRLFSSLIHQG

SEQ ID NO: 14156 - protein, 367 aa, Roseobacter sp.
  misc_feature (1)..(367): tr|A4EY36|A4EY36_9RHOB GTP cyclohydrolase FolE2 OS=Rose obacter sp. SK209-2-6 OX=388739 GN=folE2 PE=3 SV=1
MNVHSGEIDETPDRAAAEAALELLRSWAGTATETEIAQLEPAVARLLPGREVGNYPDLSRNYPEDFKSDEAYRETLPDLQNGPSSLIRGAKEQIQHVGISNFRLPIRFHTRDGGDLMLETSITGSVSLEPGKKGINMSRIMRTFYKHAEKTFSFEVMEAALDDYLSDLGSLDARIQMRFSFPAKVQSLRSGLSGYQYYDFALELVDHDGVREKIMHLDYVYSSTCPCSLELSEHARQSRGQLATPHSQRSVARISVQADPAGECLWFEDLIDHCRAAVPTETQVMVKREDEQAFAELNAANPIFVEDAARLFCEVLQNDTRIGDFRVVASHQESLHSHDAISVLTKGQLFSSTSLDPRLFSTLIHQG

SEQ ID NO: 14157 - protein, 212 aa, Roseococcus sp.
  misc_feature (1)..(212): tr|A0A4R0YF35|A0A4R0YF35_9PROT GTP cyclohydrolase 1 OS= Roseococcus sp. SYP-B2431 OX=2496640 GN=folE PE=3 SV=1
MNIQAPPERKAEEGQSPVKPTREEAEAAVRVLLRWAGDDPDREGLLDTPARVVRSYEEFFAGYDTDPVELLARSFEETDGYDEMVVLRDIRLESYCEHHMVPIIGKAHVAYLPDGKVVGISKLARVIDAYSKRLQIQEKLTAQIANTIESVLHPKGVAVVIEAGHQCMTTRGVHKTGVSMVTSRMLGAFRHNDATRREFLSMITGPRGSGEA

SEQ ID NO: 14158 - protein, 238 aa, Roseofilum reptotaenium
  misc_feature (1)..(238): tr|A0A1L9QNX6|A0A1L9QNX6_9CYAN GTP cyclohydrolase 1 OS= Roseofilum reptotaenium AO1-A OX=1925591 GN=folE PE=3 S V=1
MTIASSNGSPSLSYSSDKDAKEHQPLSSRPDRSTTHGAESKISHPSSDVSNEALMNSVQTMLAELGEDPEREGLLKTPKRVAEAMRFLTNGYHQSLEDLVNGAIFDEGHDEMVLVRDINLFSLCEHHMLPFMGKAHVAYIPNQKVVGLSKLARIVEMYSRRLQVQERLTRQVAEAIQEILDPQGVAVVVEANHMCMVMRGVQKPGSWTVTSSMVGVFKEDQKVREEFLNLIRHQPSFF

SEQ ID NO: 14159 - protein, 216 aa, Roseofilum reptotaenium
  misc_feature (1)..(216): tr|A0A1L9QJP6|A0A1L9QJP6_9CYAN GTP cyclohydrolase 1 OS= Roseofilum reptotaenium AO1-A OX=1925591 GN=folE PE=3 S V=1
MTAQIPAHNLSVDQTIAAISAQPQPRVSQAEMEQAVRTLLLGLGEDPDREGLRDTPKRVVKALQFLTSGYHQSLDELLNGAVFHEDTDEMVLVRDIDLFSSCEHHILPILGRAHIAYIPNGKVIGLSKIARICEMYARRLQVQERLTQQIANALQGLLKPQGVAVVVESTHICMVMRGVQKPGSWTVTSSMQGIFAEDAKARQEFMSLIRHNPSFH

SEQ ID NO: 14160 - protein, 216 aa, Roseomonas aestuarii
  misc_feature (1)..(216): tr|A0A2U1V580|A0A2U1V580_9PROT GTP cyclohydrolase 1 OS= Roseomonas aestuarii OX=568898 GN=folE PE=3 SV=1
MTFPPARPLADPASTDRDAAPRRPSRAEAEEAVRTLLLWAGDDPGREGLADTPARVARAYEEFFSGYKEDPVALLARSFEETDGYDEMVVLRDIRLESHCEHHMVPIIGRAHVAYLPAGRVVGISKLARVVEAYARRLQIQEKLTAQIANSIDSVLRPRGVAVIIEASHQCMTTRGVHKPGVAMITSRMLGEFRTDPAMRREFLALTQNGRPVPEA

SEQ ID NO: 14161 - protein, 219 aa, Roseomonas cervicalis
  misc_feature (1)..(219): tr|D5RT60|D5RT60_9PROT GTP cyclohydrolase 1 OS=Roseomon as cervicalis ATCC 49957 OX=525371 GN=folE PE=3 SV=1
MMHRNAALNLPLPPAAKRALPEITAPRPSREQAEEAVRTLLLWAGDDPGREGLRDTPARVARAYEEFFSGYQEDPVALLARSFEETEGYDEMVVLRDIRVESHCEHHMVPIIGRAHVAYLPEGRVVGISKLARVVEAYARRLQIQEKLTAQVANSIQEVLRPRGVAVVIEASHQCMTTRGVHKPGVSMITSRMLGAFREDAGLRREFLAMTRGAAAPEA

SEQ ID NO: 14162 - protein, 213 aa, Roseomonas deserti
  misc_feature (1)..(213): tr|A0A1V2GXG0|A0A1V2GXG0_9PROT GTP cyclohydrolase 1 OS= Roseomonas deserti OX=1817963 GN=folE PE=3 SV=1
MNLPLPTAAKLAKPDLTAERPSRAEAEAAIRTLLLWAGDDPEREGLLDTPARVARAYEEFFSGYKEDPMALLARSFEETDGYDEMVVLRDIRLESHCEHHMVPIIGRVHVAYLPKDRVVGISKLARVVEAYARRLQIQEKLTAQIANCIQETLQPRGVAVVIEAAHQCMTTRGVHKPGVTMMTSRMLGEFREDAGLRREFLALVKNGAPAPEA

SEQ ID NO: 14163 - protein, 209 aa, Roseomonas gilardii
  misc_feature (1)..(209): tr|A0A1L7ACL4|A0A1L7ACL4_9PROT GTP cyclohydrolase 1 OS= Roseomonas gilardii OX=257708 GN=folE PE=3 SV=1
MISTPFPPYQEPDEPLPTQQDAENAIRTLLRWAGDNPGREGLLDTPKRVAKAYREWFAGYEEDPVELLQRSFEEVEGYDEMVVLRDIRLESTCEHHMAPIIGRAHVGYLPRGRVVGISKLARVVDAYGKRLQIQEKLTAQIANSIQDVLNPYGVAVVVEAAHQCMTTRGAHKPGVTMVTSRMLGAFRDQRSTRQEFLAMIGAPRATPII

SEQ ID NO: 14164 - protein, 209 aa, Roseomonas gilardii
  misc_feature (1)..(209): tr|A0A379NE37|A0A379NE37_9PROT GTP cyclohydrolase 1 OS= Roseomonas gilardii subsp. rosea OX=243956 GN=folE PE=3 SV=1
MTSTPFPPYQEPDEVRPTQRDAEEAIRTLLRWAGDNPGREGLLDTPKRVAKAYREWFAGYEEDPVELLQRSFEEVEGYDEMVILRDIRLESTCEHHMAPIIGRAHVGYLPRGRVVGISKLARVVDAYGKRLQIQEKLTAQIANSIQDVLNPYGVAVVVEAAHQCMTTRGAHKPGVTMVTSRMLGAFRDQRSTRQEFLAMIGAPRATPII

SEQ ID NO: 14165 - protein, 209 aa, Roseomonas mucosa
  misc_feature (1)..(209): tr|A0A379N159|A0A379N159_9PROT GTP cyclohydrolase 1 OS= Roseomonas mucosa OX=207340 GN=folE PE=3 SV=1
MTSTPFPPYQEPDEPRPTQQDAEDAIRTLLRWAGDNPGREGLLDTPKRVAKAYREWFAGYEEDPVELLQRSFEEVEGYDEMVILRDIRLESTCEHHMAPIIGRAHVGYLPRGRVIGISKLARVVDAYGKRLQIQEKLTAQIANSIQEVLNPYGVAVVVEAAHQCMTTRGAHKPGVTMVTSRMLGAFRDQRSTRQEFLAMIGAPRATPII

SEQ ID NO: 14166 - protein, 209 aa, Roseomonas mucosa
  misc_feature (1)..(209): tr|A0A1S8D9N3|A0A1S8D9N3_9PROT GTP cyclohydrolase 1 OS= Roseomonas mucosa OX=207340 GN=folE PE=3 SV=1
MTSTPFPPYQEPGEPRPTQQDAEDAIRTLLRWAGDNPGREGLLDTPKRVAKAYREWFAGYEEDPVELLQRSFEEVEGYDEMVILRDIRLESTCEHHMAPIIGRAHVGYLPRGRVIGISKLARVVDAYGKRLQIQEKLTAQIANSIQEVLNPYGVAVVVEAAHQCMTTRGAHKPGVTMVTSRMLGAFRDQRSTRQEFLAMIGAPRATPII

SEQ ID NO: 14167 - protein, 217 aa, Roseomonas nepalensis
  misc_feature (1)..(217): tr|A0A502G6K0|A0A502G6K0_9PROT GTP cyclohydrolase 1 OS= Roseomonas nepalensis OX=1854500 GN=folE PE=3 SV=1
MTEQNPPSPDRTSARSRLRAELVRPSQAEAEAAVRTLLLWAGDDPDREGLVDTPARVARSYRELFAGYDVDPVQLLQRSFEEVAGYDEMVVLRDIRLESHCEHHMVPIIGRAHIGYLPRGRVVGISKLARVVDAFAKRLQIQEKLTAQIANAIQDVLDPVGVAVVLEGSHQCMTTRGVHKTGVAMVTSTMLGAFREDHATRREFLSIINGRANTFEG

SEQ ID NO: 14168 - protein, 214 aa, Roseomonas oryzae
  misc_feature (1)..(214): tr|A0A5B2TNR2|A0A5B2TNR2_9PROT GTP cyclohydrolase 1 OS= Roseomonas oryzae OX=1608942 GN=folE PE=3 SV=1
MTPARKPTQPTATSPVEAPRRPSRAEAEAAVRTLLLWAGDDPEREGLLDTPARVARAYEEFFSGYAEDPVELLARSFAETDGYDEMVVLRDIRLESHCEHHMVPIIGRAHVAYLPAGRVVGISKLARVVEAYSRRLQIQEKLTAQIANSIQEVLQPRGVAVVIEAGHQCMTTRGVHKPGVAMITSRMLGEFRSDASLRREFLAMVNSGRPVPEA

SEQ ID NO: 14169 - protein, 220 aa, Roseomonas rosea
  misc_feature (1)..(220): tr|A0A1M6B1M7|A0A1M6B1M7_9PROT GTP cyclohydrolase 1 OS= Roseomonas rosea OX=198092 GN=folE PE=3 SV=1
MTEPHPDTQAAAEAGAACPADLAGHKRPTQAEAEAAVRTLLLWAGDDPDREGLVDTPKRVAKSYRELFVGYGTDPVQLLQRSFEEVAGYDEMVVLRDIRLESHCEHHMVPIIGRAHVGYLPRGRVVGISKLARVVDAFAKRLQIQEKLTAQIANAINDVLDPVGVAVVLEAAHQCMTTRGVHKHGVTMVTSTMLGAFRDDHATRREFLSIINGRSGTFEG

SEQ ID NO: 14170 - protein, 209 aa, Roseomonas sp.; identical to SEQ ID NO: 14166
  misc_feature (1)..(209): tr|A0A2D2H4V9|A0A2D2H4V9_9PROT GTP cyclohydrolase 1 OS= Roseomonas sp. FDAARGOS_362 OX=2018065 GN=folE PE=3 SV= 1

SEQ ID NO: 14171 - protein, 221 aa, Roseomonas sp.
  misc_feature (1)..(221): tr|A0A317FLQ2|A0A317FLQ2_9PROT GTP cyclohydrolase 1 OS= Roseomonas sp. CQN31 OX=2184016 GN=folE PE=3 SV=1
MTPKDSHAVNIQTPPRHLAKANPAAEPPPTREDAEAAIRTLLRWAGDDPSREGLQDTPARVARAYREWFCGYEEDPVELLARSFEETDGYDEMVLLRDIRLESTCEHHMAPILGKVHVAYLPNGRVVGISKLARVVEAYAKRLQIQEKMTAQIANTINDVLKPKGVAVVVEAAHQCMTTRGVHKPGVTMVTSRMLGAFRDDASTRREFLAMVAAPRPGTEG

SEQ ID NO: 14172 - protein, 212 aa, Roseomonas stagni
  misc_feature (1)..(212): tr|A0A1I4DX41|A0A1I4DX41_9PROT GTP cyclohydrolase 1 OS= Roseomonas stagni DSM 19981 OX=1123062 GN=folE PE=3 SV= 1
MNIQTPASLADPQASTIQRPSRAEAEAAVRTLLLWAGDDPNREGLVDTPARVARAYEEFFGGYEVDPVELLARSFEETDGYDEMVVLRDIRLESHCEHHLVPIIGRAHIAYIPDGRVVGISKLARVLEAYAKRLQIQEKLTAQVANTIETVLKPKGVAVVIEAQHQCMTTRGIHKPGVSMVTSRMLGAFRDDASTRREFLAMIGSPRLGAEG

SEQ ID NO: 14173 - protein, 224 aa, Roseospirillum parvum
  misc_feature (1)..(224): tr|A0A1G7ZFT4|A0A1G7ZFT4_9RHIZ GTP cyclohydrolase 1 OS= Roseospirillum parvum OX=83401 GN=folE PE=3 SV=1
MFDPARPARLDPAHIAPARDYRDPAAAQPATITGEPRPSRAEAEAAVRTLLRWAGDDPDREGLVGTPDRVVRAYEEFFAGYQEDPADILRRTFEETDGYDEMVLLKDIRLESHCEHHMVPIIGVAHIAYLPDHRVVGISKLARIVEVFAKRLQIQEKMTAQIANTINEVLEPKGVAVVIEAAHQCMTTRGVKKPGVNMVTSRMLGAFRDDPTTRKEFLHMIGPR

SEQ ID NO: 14174 - protein, 366 aa, Roseovarius aestuarii
  misc_feature (1)..(366): tr|A0A1X7BVV9|A0A1X7BVV9_9RHOB GTP cyclohydrolase FolE2 OS=Roseovarius aestuarii OX=475083 GN=folE2 PE=3 SV=1
MNMQRPDVDTFPQRDDANKALAVLRAWARSATPEEVADLDPAIARLLPESEVSNYPALARAFPEDFAVDEAYRASLPDLQNGPSSLIRGAKQHLQHVGISNFRLPIRFHARDDDDLRLETSVTGTVSLEAGKKGINMSRIMRSFYKHAQKTFSFEVIEAALKDYISDLDSFDARIQMRFSYPMKIKSLRSDLEGFQYYDIALELVEKNGQHRKFMHLDYVYSSTCPCSLELSEHARQTRGQLATPHSQRSVARLSVEVLGHDCLWFEDLIDMARAAVPTETQVMVKREDEQAFAELNAANPIFVEDAARLFCQRFLADERIGDFRIVASHQESLHSHDAVSVLTEGPTFAADSLDPKLFNTLFHAG

SEQ ID NO: 14175 - protein, 366 aa, Roseovarius albus
  misc_feature (1)..(366): tr|A0A1X6YJU7|A0A1X6YJU7_9RHOB GTP cyclohydrolase FolE2 OS=Roseovarius albus OX=1247867 GN=folE2 PE=4 SV=1
MNIHASELEKQREREAAEAALALLREWAENASPEEVADLDPTVARLLPDAPLPNYPQMHREYPEDFVPDDAYRALMPDLQNGPSSLIKGAKQHLQHVGISNFHLPIRFHTRDAGDLTLETSVTGTVSLEASKKGINMSRIMRSFYKHAQKTFSFDVISDALDDYIADLGSVDARLMMKFRYPAEVKSLRSGLVGYQYYDIALELVDAGGVRRKFMHLDYVYSSTCPCSLELSEHARETRGQLATPHSQRSVARISLEYSGEDFLWFEDVIDMAREMVPTETQVMVKREDEQAFAELNAANPIFVEDAARLFCEPLLKDKRIGDFRIVASHQESLHSHDAVSILTEGPTFASDSIDPKLFSTLFHVG

SEQ ID NO: 14176 - protein, 366 aa, Roseovarius atlanticus
  misc_feature (1)..(366): tr|A0A0T5NU36|A0A0T5NU36_9RHOB GTP cyclohydrolase FolE2 OS=Roseovarius atlanticus OX=1641875 GN=folE2 PE=3 SV= 1
MNVHPSDMKKVADRGDAKEALDILRAWAETATPEEIADLDPAISRLLPQGEVSNYPALRRDYPEEFRPDAAYRASMPDLQNGPSSLIKGARQQLQHVGISNFRLPINFHTRENGDLTLETSVTGSVSLEAEKKGINMSRIMRSFYKHAERTFSFEVIEAALDDYISDLDSIDARIQMRFSFPMKITSLRSGLEGYQYYDIAMELVEHDGVRRKFMHLDYVYSSTCPCSLELSEHARQARGQLATPHSQRSVARISVEVVGEACLWFEDLIELARTAVATETQVMVKREDEQAFAELNAANPIFVEDAARLFSEQLLNDARIGDFRVIASHQESLHSHDAVSITTEGETFASESLDPKLFTTLFHVG

SEQ ID NO: 14177 - protein, 366 aa, Roseovarius azorensis
  misc_feature (1)..(366): tr|A0A1H7MB27|A0A1H7MB27_9RHOB GTP cyclohydrolase FolE2 OS=Roseovarius azorensis OX=1287727 GN=folE2 PE=3 SV=1
MNLHTSEMKPKPDRDDAREALALLRAWAGSASPEEVADLDPAIARLLTSGEVSNYPLLRRDYPEDFVVDARYRASLPDLQNGPASLIRGTRQQLQHVGISNFRLPIRFHTRDNGDLTLETSVTGTVSLEAGRKGINMSRIMRSFYKHAEKTFSLEVMEAALADYITDLDSVDARLQMRISYPAKVRSLRSGLEGFQYYDIAMELVETGGAKRKFMHLDYVYSSTCPCSLELSEHARAARGQLATPHSQRSVARISVEVLEGDCLWFEDLIDLARRAVPTETQVMVKREDEQAFAELNAANPVFVEDAARLFCEQLLADPRVGDFRVIASHQESLHSHDAVSVLTEGDTFAAQSLDPKLFQTLLHGR

SEQ ID NO: 14178 - protein, 366 aa, Roseovarius gaetbuli
  misc_feature (1)..(366): tr|A0A1X6Z696|A0A1X6Z696_9RHOB GTP cyclohydrolase FolE2 OS=Roseovarius gaetbuli OX=1356575 GN=folE2 PE=3 SV=1
MNVHPPKMNSAPDRDDAKQALALLRAWAHTATPEEVADLEPSIARLLPTGEMSNYPALTRHYPEDFTVDAAYRTTLPDLQNGPSSLIRGSKQHLQHVGISNFRLPIGFHTRDNGDLTLETAVTGTVSLEADRKGINMSRIMRSFYKHAEKTFSFEVMEAALNDYITDLDSLDARLQMRLSYPARVRSLRSGLDGFQYYDIALELVETGGARRKFMHLDYVYSSTCPCSLELSEHARSARGQLATPHSQRSVARISVEVMPGDCLWFEDLIELARRAVPTETQVMVKREDEQAFAELNAANPIFVEDAARLFCEQLLAEPRIGDFRVVASHQESLHSHDAVSVLTEGEAFASDSIDPKLFHTLIHGR

SEQ ID NO: 14179 - protein, 366 aa, Roseovarius halotolerans
  misc_feature (1)..(366): tr|A0A1X6ZEH9|A0A1X6ZEH9_9RHOB GTP cyclohydrolase FolE2 OS=Roseovarius halotolerans OX=505353 GN=folE2 PE=3 SV =1
MNIHTREMSDMPDRDEAKAALERLRAWAGQATPEEVADLDPAISRLLPGRDRVNYPDLSRTYPESFEVDTAYRNSMPDLQNGPSSLIRGAKQHLQHVGISNFRLPIRFHTRDNGDLTLQTSVTGTVSLEAGKKGINMSRIMRSFYRHAEKTFSYEVMEAALDDYISDLDTIDARLQMRFSYPVKLSSLRSGLEGYQYYDIAMELAESGGVRRKFMHFDYVYSSTCPCSLELSEHARQTRGQLATPHSQRSVARISVEIAGDAMLWFEDLIEIARKAVPTETQVMVKREDEQAFAELNAANPIFVEDAARLFCEQLLKDERIGDFRIVASHQESLHSHDAVSLLTEGDTFASDSIDPRLFSTLFHVG

SEQ ID NO: 14180 - protein, 367 aa, Roseovarius indicus
  misc_feature (1)..(367): tr|A0A0T5P8M4|A0A0T5P8M4_9RHOB GTP cyclohydrolase FolE2 OS=Roseovarius indicus OX=540747 GN=folE2 PE=3 SV=1
MNIQTKLAQALDRDDAEQALSVLRAWAASASPEEVADLDPAIARLLPQGEVSNYPALSRTYDEDFEPDAAYRKSMPDLQNGPASLIRGAKQHLEHVGISNFRLPISFHTRDNGDLTLETSVTGTVSLEPGKKGINMSRIMRSFYKHAEKTFSFEVIEAALDDYMSDLDSLDARIQMRFSYPMKIKSLRSGLEGFQYYDIALELVETAGVRRKFMHLDYVYSSTCPCSLELSEHARQARGQLATPHSQRSVARISVEINCDTGGCLWFEDLIEMARAGVPTETQVMVKREDEQAFAELNAANPIFVEDAARLFCEQLQQDERIGDFRIMASHQESLHSHDAVSILTEGDTFAAQSIDPKIFKTLFHVG

SEQ ID NO: 14181 - protein, 366 aa, Roseovarius litoreus
  misc_feature (1)..(366): tr|A0A1M7FF68|A0A1M7FF68_9RHOB GTP cyclohydrolase FolE2 OS=Roseovarius litoreus OX=1155722 GN=folE2 PE=3 SV=1
MNIHTRELSDMPDRDEAKAALERLRSWAAQATPEEVADLDPAIARLLPGRSLSNYPDLSRDYPDEFKVSDAYKASLPDLQNGPSSLIRGARQQLQHVGISNFRLPIQFHTRDNGDLTLETSVTGTVSLEAGKKGINMSRIMRSFYRHAEKTFSFEVMEAALDDYITDLDTIDARLQMRFSYPAKVTSLRSGLQGYQYYDIAMELVEQDGVRRKFMHLDYIYSSTCPCSLELSEHARQTRGQLATPHSQRSVARLSIEIEGPQILWFEDLIDMARAAVPTETQVMVKREDEQAFAELNAANPIFVEDAARLFCEQLLKDPRIGDFRVVASHQESLHSHDAVSVLTEGETFASDSIDPRMFSSLFHVG

SEQ ID NO: 14182 - protein, 366 aa, Roseovarius lutimaris
  misc_feature (1)..(366): tr|A0A1I5DPQ7|A0A1I5DPQ7_9RHOB GTP cyclohydrolase FolE2 OS=Roseovarius lutimaris OX=1005928 GN=folE2 PE=3 SV=1
MNVHPSEMNGTPDRDEAKQALAVLRVWAQTATPEEVADLDPSIARLLPTGQVSNYPVLRRDYPTDFSVDAAYRASLPDLQNGPSSLIRGTKQHLQHVGISNFRLPIGFHTRDNGDLTLETAVTGSVSLEAERKGINMSRIMRSFYKHAEKTFSFEVMEAALNDYITDLDSVDARLQMRLSYPARVRSLRSGLEGFQYYDIALELVETGGLRRKFMHLDYVYSSTCPCSLELSEHARSARGQLATPHSQRSVARLSVEVMAGDCLWFEDLIELARRAVPTETQVMVKREDEQAFAELNAANPIFVEDAARLFCEQLLADPRIGDFRVIASHQESLHSHDAVSVLTEGDTFASDSLDPKLFHTLVHGR

SEQ ID NO: 14183 - protein, 366 aa, Roseovarius marisflavi
  misc_feature (1)..(366): tr|A0A1M6YNY9|A0A1M6YNY9_9RHOB GTP cyclohydrolase FolE2 OS=Roseovarius marisflavi OX=1054996 GN=folE2 PE=3 SV= 1
MNVHPPKMNSAPDRDDAKQALALLRAWAQTATPEEVADLEPSIARLLPTGRMSNYPALTRHYPEDFTVDGAYRATLPDLQNGPSSLIRGSKQHLQHVGISNFRLPIGFHTRDNGDLTLETAVTGTVSLEADRKGINMSRIMRSFYKHAEKTFSFEVMEAALNDYITDLDSLDARLQMRLSYPARVRSLRSGLDGFQYYDIALELVETGGARRKFMHLDYVYSSTCPCSLELSEHARSARGQLATPHSQRSVARLSVEVMPGDCLWFEDLIELARRAVPTETQVMVKREDEQAFAELNAANPIFVEDAARLFCEQLLGDPRIGDFRVIASHQESLHSHDAVSVLTEGETFASDSIDPKLFHTLIHGR

SEQ ID NO: 14184 - protein, 366 aa, Roseovarius mucosus
  misc_feature (1)..(366): tr|A0A1V0RTM9|A0A1V0RTM9_9RHOB GTP cyclohydrolase FolE2 OS=Roseovarius mucosus OX=215743 GN=folE2 PE=3 SV=1
MNVHPSEMKPAPDRDEAKEALALLRSWARAASPEEVADLDPAIARLLPSGEVANYPLLAREYPESFATSAAYLASLPDLQNGPASLIRGTRQQLQHVGISNFRLPIRYHTRENGDLTLETSVTGTVSLDAGKKGINMSRIMRSFYKHAEKTFSADVMEAALSDYITDLDSVDARLQMRLSYPARVRSLRSGLEGYQYYDIAMELVKNAGVTRKFMHLDYVYSSTCPCSLELSEHARSARGQLATPHSQRSVARISVELVEDDCLWFEDLIELARRAVPTETQVMVKREDEQAFAELNAANPIFVEDAARLFCEQLLADPRIGDFRVVASHQESLHSHDAVSVLTEGETFAAQSLDPRLFQTLIHGR

SEQ ID NO: 14185 - protein, 366 aa, Roseovarius mucosus
  misc_feature (1)..(366): tr|A0A0A0HIR1|A0A0A0HIR1_9RHOB GTP cyclohydrolase FolE2 OS=Roseovarius mucosus DSM 17069 OX=1288298 GN=folE2 P E=3 SV=1
MNVHPSEMKPAPDRDEAKEALALLRSWARAASPEEVADLDPAIARLLPSGEVSNYPVLAREYPEDFATSAAYLASLPDLQNGPASLIRGTRQQLQHVGISNFRLPIRYHTRDNGDLTLETSVTGTVSLDAGKKGINMSRIMRSFYKHAEKTFSADVMEAALSDYITDLESLDARLQMRLSYPARVRSLRSGLEGYQYYDIAMELVKNAGVTRKFMHLDYVYSSTCPCSLELSEHARAARGQLATPHSQRSVARISVELVEEDCLWFEDLIELARRAVPTETQVMVKREDEQAFAELNAANPIFVEDAARLFCEQLLADPRIGDFRVVASHQESLHSHDAVSVLTEGETFAAQSLDPRLFQTLIHGR

SEQ ID NO: 14186 - protein, 366 aa, Roseovarius nanhaiticus
  misc_feature (1)..(366): tr|A0A1N7EC26|A0A1N7EC26_9RHOB GTP cyclohydrolase FolE2 OS=Roseovarius nanhaiticus OX=573024 GN=folE2 PE=3 SV= 1
MTHHTPGMEAAPDRDDAQDALALLRRWAAAATPEEVADLDPSISRLLPRGEVSNYPALSRAYPHDFDADVGYRKTMPDLQNGPASLIRGARQQLQHVGISNFRLPIRFHTRDNGDLTLETSVTGTVSLEANKKGINMSRIMRSFYKHAEKTFSFEVIEAALDDYIADLGSVDARIQMRFSYPAKVRSLRSGLEGYQYYDIALELVETAGVRRKFMHLDYVYSSTCPCSLELSEHARQARGQLATPHSQRSVARISLEACCNDCLWFEDLIELARAAVPTETQVMVKREDEQAFAELNAANPVFVEDAARLFCERLLADERIGDFRVVASHQESLHSHDAVSVLTEGETFASQSLDPKLFSTLFHVG

SEQ ID NO: 14187 - protein, 366 aa, Roseovarius nubinhibens
  misc_feature (1)..(366): tr|A0A348WA65|A0A348WA65_9RHOB GTP cyclohydrolase FolE2 OS=Roseovarius nubinhibens OX=314263 GN=folE2 PE=3 SV= 1
MNMHPSHVQSSPDRDDAQDALDTLRTWAMSATPEEVADLDPAVARLLPGQEVSNYPALARAYPEEFEVDDAYRATMPDLQNGPTSLIRGARQQLQHVGISNFRLPVRFHRRDESDLTLESSVTGTVSLEAGKKGINMSRIMRSFYKHAEKTFSFEVIEAALDDYITDLDSIDARIQMRFSYPMKIRSLRSGLEGYQYYDFALELIETEGVRRKFMHLDYVYSSTCPCSLELSEHARRERGQLATPHSQRSVARISVELVGEDCLWFEDLIDLARRAVPTETQVMVKREDEQAFAELNAANPIFVEDAARLFCKELLADGRVGDFRVVASHQESLHSHDAVSILTEGPTFAAQSLDPKLFNTLFHVG

SEQ ID NO: 14188 - protein, 366 aa, Roseovarius nubinhibens
  misc_feature (1)..(366): tr|A3SJN5|A3SJN5_ROSNI GTP cyclohydrolase FolE2 OS=Rose ovarius nubinhibens (strain ATCC BAA-591 / DSM 15170 / ISM) OX=89187 GN=folE2 PE=3 SV=1
MNMHPSQVQSSPDRDDAQDALDTLRTWAMSATPEEVADLDPAVARLLPGQEVSNYPALARAYPEEFEVDDAYRATMPDLQNGPTSLIRGARQQLQHVGISNFRLPVRFHRRDESDLTLESSVTGTVSLEAGKKGINMSRIMRSFYKHAEKTFSFEVIEAALDDYITDLDSIDARIQMRFSYPMKIRSLRSGLEGYQYYDFALELVETEGVRRKFMHLDYVYSSTCPCSLELSEHARRERGQLATPHSQRSVARISVELVGEDCLWFEDLIDLARRAVPTETQVMVKREDEQAFAELNAANPIFVEDAARLFCKELLADGRVGDFRVVASHQESLHSHDAVSILTEGPTFAAQSLDPKLFNTLFHVG

SEQ ID NO: 14189 - protein, 366 aa, Roseovarius pacificus
  misc_feature (1)..(366): tr|A0A1M7DA94|A0A1M7DA94_9RHOB GTP cyclohydrolase FolE2 OS=Roseovarius pacificus OX=337701 GN=folE2 PE=3 SV=1
MNVHTREPSDMPDREEARAALERLRAWAEKVTPEEVADLDPAIARLLPGRQSVNYPDLVRVYDDGFEAGDAYRATMPDLQNGPSSLIRGAKKQLQHVGISNFRLPIRFHTRDDGDLSLETSVTGTVSLEAGKKGINMSRIMRSFYRHAEKTFSFEVMEAALDDYISDLETIDARLQMRFSYPARVKSLRSGLEGYQYYDIAMELVERDGQRRKFMHLDYVYSSTCPCSLELSEHARQARGRLATPHSQRSVARISVESKGDDILWFEDLIDIARSAVPTETQVMVKREDEQAFAELNAANPIFVEDATRLFCEKLHNEPRIGDFRVIASHQESLHSHDAVSVLTEGTTFAADSIDPKLFNTLFHVG

SEQ ID NO: 14190 - protein, 366 aa, Roseovarius sp.
  misc_feature (1)..(366): tr|A0A365U4I6|A0A365U4I6_9RHOB GTP cyclohydrolase FolE2 OS=Roseovarius sp. TE539 OX=2249812 GN=folE2 PE=3 SV=1
MNFHSKDLDSAPEREEARDALALLRRWASSASEDEIADLDPAIARLLPGGAPSDYPDLSREYPGEFTVTDDYRRSLPDLQNGPSSLIRGARQHLQHVGISNFRLPIRFHSRDGSDLTLETSVTGTVSLEAGKKGINMSRIMRSFYKHAGKTFSFEVMEAALDDYIADLQSIDARLQMRFSYPTEIRSLRSGISGYQYYDIALELVEHEGRRHHYMHLDYVYSSTCPCSLELSEHARQTRGQLATPHSQRSVARISVAVEPGSLLWFEDLIDAARSAVPTETQVMVKREDEQAFAELNAANPIFVEDAARLFCAELLKDQRIGDFRVIASHQESLHSHDAVSIVTEGETFAAGSIDPKLFGTLVHGG

SEQ ID NO: 14191 - protein, 365 aa, Roseovarius sp.
  misc_feature (1)..(365): tr|A0A4Q9XPR4|A0A4Q9XPR4_9RHOB GTP cyclohydrolase FolE2 OS=Roseovarius sp. JS7-11 OX=1607786 GN=folE2 PE=3 SV= 1
MNLQLNDLATAPDSDEARKALDTLRAWAATASAEELAALDPSITGLLRNAPEYPVFNRDYPKDFTVDAEYKAGLPDLQNGPASLIKGQKRVIQHVGISNFRLPIRYHTRDDGDLTLETSVTGTVSLEAEKKGINMSRIMRSFYNHAERTFSFEVMEAALDAYKTDLDSFDARIQMRFSFPMKIESLRSGLTGYQYYDIALELVEQGGSRKKILHLDYVYSSTCPCSLELSEHAREFRNQLATPHSQRSVARISVEVPFGRDCLWFEDLIDLARHAVPTETQVMVKREDEQAFAELNAANPIFVEDAARLFAQALHDEPRVGDFRIVASHQESLHSHDAVSVLTEGDTFAATSLDPKLFKTLFHIG

SEQ ID NO: 14192 - protein, 366 aa, Roseovarius tolerans
  misc_feature (1)..(366): tr|A0A0L6D035|A0A0L6D035_9RHOB GTP cyclohydrolase FolE2 OS=Roseovarius tolerans OX=74031 GN=folE2 PE=3 SV=1
MNMHPSEMNPTPDRDAAKAALDVLRDWARAASPEEVADLDPAIARLLPDAEMSNYPALSRTYPEGFEVTDAYRASLPDLQNGPASLIRGTKQQLQHVGISNFRLPIRFHARDNGDLTLETSVTGTVSLEAGKKGINMSRIMRSFYKHAEKTFSFEVMEAALADYITDLDSLDARLQMRISYPMKVQSLRSGLEGYQYYDIALELVEQAGVKRKFMHLDFVYSSTCPCSLELSEHARATRGQLATPHSQRSVARISVELIEGDCLWFEDLIELARRAVPTETQVMVKREDEQAFAELNAANAIFVEDAARLFCEQLLADPRIGDFRVVASHQESLHSHDAVSVLTEGETFAAQSLDPRLFQTLVHGG

SEQ ID NO: 14193 - protein, 366 aa, Roseovarius tolerans
  misc_feature (1)..(366): tr|A0A1H8FN36|A0A1H8FN36_9RHOB GTP cyclohydrolase FolE2 OS=Roseovarius tolerans OX=74031 GN=folE2 PE=3 SV=1
MNMHPSEMNPTPDRDAAKAALDVLRDWARTASPEEVADLDPAIARLLPDAEMSNYPALSRTYPEGFEVTDAYRASLPDLQNGPASLIRGTKQQLQHVGISNFRLPIRFHARDNGDLTLETSVTGTVSLEAGKKGINMSRIMRSFYKHAEKTFSFEVMEAALADYITDLDSLDARLQMRISYPMKVQSLRSGLEGYQYYDIALELVEQAGVKRKFMHLDFVYSSTCPCSLELSEHARATRGQLATPHSQRSVARISVELIEGDCLWFEDIIELARRAVPTETQVMVKREDEQAFAELNAANAIFVEDAARLFCEQLLADPRIGDFRVVASHQESLHSHDAVSVLTEGETFAAQSLDPRLFQTLVHGG

SEQ ID NO: 14194 - protein, 195 aa, Rothia aeria
  misc_feature (1)..(195): tr|I0US30|I0US30_9MICC GTP cyclohydrolase 1 OS=Rothia a eria F0474 OX=1125724 GN=folE PE=3 SV=1
MSEANGSAVDKPRIEAAVREILLAIGEDPDRDGLQDTPARVARAYEEFFSGLHADPADVLGTTFDIAHSEMVLVKDIPFYSTCEHHLVPFHGVAHVGYIPGADGKVTGLSKLARVLEVYARRPQVQERLTTQVVEALEEHLSPRGAIVVIEAEHMCMSMRGVRKPGAKTVTSAVRGQLKNAATRAEAMSLIFSKQ

SEQ ID NO: 14195 - protein, 195 aa, Rothia aeria; identical to SEQ ID NO: 14194
  misc_feature (1)..(195): tr|U7V5J2|U7V5J2_9MICC GTP cyclohydrolase 1 OS=Rothia a eria F0184 OX=888019 GN=folE PE=3 SV=1

SEQ ID NO: 14196 - protein, 199 aa, Rothia dentocariosa
  misc_feature (1)..(199): tr|E3H1W2|E3H1W2_ROTDC GTP cyclohydrolase 1 OS=Rothia d entocariosa (strain ATCC 17931 / CDC X599 / XDIA) OX=76 2948 GN=folE PE=3 SV=1
MEGRMSEDNGSGVDKPRIEAAVREILLAIGEDPDRDGLQNTPARVARAYEEFFSGLHADPADVLGTTFDIAHSEMVLVKDIPFYSTCEHHLVPFHGVAHVGYIPGADGKVTGLSKLARVLEVYARRPQVQERLTTQVVEALEEHLNPRGAIVVIEAEHMCMSMRGVRKPGAKTVTSAVRGQLKNAATRAEAMSLIFSKH

SEQ ID NO: 14197 - protein, 216 aa, Rothia dentocariosa
  misc_feature (1)..(216): tr|D8UNA4|D8UNA4_9MICC GTP cyclohydrolase 1 OS=Rothia d entocariosa M567 OX=563032 GN=folE PE=3 SV=1
MSSSRTRTRITTRTRTPMEGRMSEDNGSGVDKPRIEAAVREILLAIGEDPDRDGLQNTPARVARAYEEFFSGLHADPADVLGTTFDIAHSEMVLVKDIPFYSMCEHHLVPFHGVAHVGYIPGADGKVTGLSKLARVLEVYARRPQVQERLTTQVVEALEEHLSPRGAIVVIEAEHMCMSMRGVRKPGAKTVTSAVRGQLKNAATRAEAMSLIFSKH

SEQ ID NO: 14198 - protein, 189 aa, Rothia kristinae
  misc_feature (1)..(189): tr|A0A147E2L6|A0A147E2L6_9MICC GTP cyclohydrolase 1 OS= Rothia kristinae OX=37923 GN=folE PE=3 SV=1
MDLPRIEAAVREILLAVGEDPDRDGLRETPARVARSYAEVFSGLGQDPADLLATTFDIGHSEMVLVKDITFHSMCEHHLVPFFGTAHIGYIPGADGRVTGLSKLARLVDLYARRPQVQERLTTQIVEAMEQFLRPAGAIVVVEAEHLCMAMRGVAKPGAHTVTSAVRGQLRDPATRAEAMGLIRGGERR

SEQ ID NO: 14199 - protein, 191 aa, Rothia kristinae
  misc_feature (1)..(191): tr|A0A199NTT6|A0A199NTT6_9MICC GTP cyclohydrolase 1 OS= Rothia kristinae OX=37923 GN=folE PE=3 SV=1
MPMDLPRIEAAVREILLAVGEDPDRDGLRETPARVARSYAEVFSGLGQDPADLLATTFDIGHSEMVLVKDITFHSMCEHHLVPFFGTAHIGYIPGADGRVTGLSKLARLVDLYARRPQVQERLTTQIVEAMEQFLRPAGAIVVVEAEHLCMAMRGVAKPGAHTVTSAVRGQLRDPATRAEAMGLIRGGERR

SEQ ID NO: 14200 - protein, 146 aa, Rothia mucilaginosa
  misc_feature (1)..(146): tr|A0A525HEH0|A0A525HEH0_9MICC GTP cyclohydrolase 1 (Fr agment) OS=Rothia mucilaginosa OX=43675 GN=DI608_05455 PE=3 SV=1
MSEVKNAVDQPRIEAAVREILLAIGEDPDRDGLQQTPARVARAYAEFFSGLHQDAGEILGTTFDIAHSEMVLVKDIPFYSTCEHHLVPFHGVAHVGYIPGPDGKVTGLSKLARVVDMYARRPQVQERLTTQVVEALEEHLNPRGAI

SEQ ID NO: 14201 - protein, 194 aa, Rothia mucilaginosa
  misc_feature (1)..(194): tr|A0A291DFT5|A0A291DFT5_9MICC GTP cyclohydrolase 1 OS= Rothia mucilaginosa OX=43675 GN=folE PE=3 SV=1
MSEAKNAVDQPRIEAAVREILLAIGEDPDRDGLQQTPARVARAYAEFFSGLHQDAGEILGTTFDIAHSEMVLVKDIPFYSTCEHHLVPFHGVAHVGYIPGPDGKVTGLSKLARVVDLYARRPQVQERLTTQVVEALEEHLNPRGAIVVIEAEHMCMSMRGVRKPGAKTVTSAVRGALMNGATRAEAMSLIFSQR

SEQ ID NO: 14202 - protein, 188 aa, Rothia nasimurium
  misc_feature (1)..(188): tr|A0A4Y9F6Q1|A0A4Y9F6Q1_9MICC GTP cyclohydrolase 1 OS= Rothia nasimurium OX=85336 GN=folE PE=3 SV=1
MAVDQPRIEAAVREILLAIGEDPTRDGLLDTPARVARAYDEIFAGLHQSAGDILGTTFDIDHSELVLVKDIPFYSICEHHLVPFVGHAHIGYIPGGDGKVTGLSKLARLVDVYAKRPQVQERLTTQVIEALEEHLQPTGAIVVIQAEHMCMSMRGVRKPGAKTVTSAVRGALRDPATRAEAMSLINAS

SEQ ID NO: 14203 - protein, 188 aa, Rothia nasimurium
  misc_feature (1)..(188): tr|A0A1Y1RQ80|A0A1Y1RQ80_9MICC GTP cyclohydrolase 1 OS= Rothia nasimurium OX=85336 GN=folE PE=3 SV=1
MAVDQPRIEAAVREILLAIGENPDRDGLLDTPARVARAYDEMFAGLHQSAGDILGTTFDIDHSELVLVKDIPFYSTCEHHLVPFYGHAHIGYIPGGEGRVTGLSKLARLVDVYAKRPQVQERLTTQVIEALEEHLQPTGAIVVIQAEHMCMSMRGVRKPGTKTVTSAVRGALRDPATRAEAMSLINAS

SEQ ID NO: 14204 - protein, 194 aa, Rothia sp.; identical to SEQ ID NO: 14201
  misc_feature (1)..(194): tr|A0A1F0Y2G5|A0A1F0Y2G5_9MICC GTP cyclohydrolase 1 OS= Rothia sp. HMSC072B04 OX=1739432 GN=folE PE=3 SV=1

SEQ ID NO: 14205 - protein, 194 aa, Rothia sp.
  misc_feature (1)..(194): tr|A0A1E9ZD17|A0A1E9ZD17_9MICC GTP cyclohydrolase 1 OS= Rothia sp. HMSC071B01 OX=1715007 GN=folE PE=3 SV=1
MSEVKNAVDQPRIEAAVREILLAIGEDPDRDGLQQTPARVARAYAEFFSGLHQDAGEILGTTFDIAHSEMVLVKDIPFYSTCEHHLVPFHGVAHVGYIPGPDGKVTGLSKLARVVDLYARRPQVQERLTTQVVEALEEHLNPRGAIVVIEAEHMCMSMRGVRKPGAKTVTSAVRGALMNGATRAEAMSLIFSQR

SEQ ID NO: 14206 - protein, 220 aa, Rouxiella badensis
  misc_feature (1)..(220): tr|A0A1X0WDT4|A0A1X0WDT4_9GAMM GTP cyclohydrolase 1 OS= Rouxiella badensis OX=1646377 GN=folE PE=3 SV=1
MATLSKEAVLVHEALIARGLETPLREEPSLDAETRKARIEEHMTGIMQLLNLDLNDDSLAETPKRIAKMYVDEIFSGLDYANFPKITVITNKMKVDEMISVRDITLTSTCEHHFVTIDGKATVAYIPKDSVIGLSKINRIVQFFSQRPQVQERLTQQILVALQTLLGTNNVAVSIDAVHYCVKARGIRDATSATTTTSLGGLFKTSQNTRQEFLRTIRHN

SEQ ID NO: 14207 - protein, 220 aa, Rouxiella silvae
  misc_feature (1)..(220): tr|A0A1X0W8Y9|A0A1X0W8Y9_9GAMM GTP cyclohydrolase 1 OS= Rouxiella silvae OX=1646373 GN=folE PE=3 SV=1
MATLSKEAVLVHEALLARGLETPLRDEPSLDAATRKQRIKEHMTGIMQLLNLDLNDDSLAETPTRIAKMYVDEIFSGLDYANFPKITVITNKMKVDEMISVRDITLTSTCEHHFVTIDGKATVAYIPKDSVIGLSKINRIVQFFSQRPQVQERLTQQILIALQTLLGTNNVAVSIDAVHYCVKARGIRDATSATTTTSLGGLFKTSQNTRQEFLRTIRHN

SEQ ID NO: 14208 - protein, 188 aa, Ruaniaceae bacterium
  misc_feature (1)..(188): tr|A0A239QTL5|A0A239QTL5_9MICO GTP cyclohydrolase 1 OS= Ruaniaceae bacterium KH17 OX=1945888 GN=folE PE=3 SV=1
MYDQAGVERAIRDLLIAIGEDPERDGIKGTPERIARSYREIFGGLERDPGDVLETVFDIGHSELILVRDIPMYSMCEHHLLPFHGVAHVGYIPGAGGQVTGLSKLARLVEGYARRPQVQERLTTQIADTLVERLQPAGVIVVVEAEHLCMSMRGVRKPGSRTLTSAVRGQLRAPATRAEAMSLILRGV

SEQ ID NO: 14209 - protein, 367 aa, Rubellimicrobium mesophilum
  misc_feature (1)..(367): tr|A0A017HTF5|A0A017HTF5_9RHOB GTP cyclohydrolase I typ e 2 OS=Rubellimicrobium mesophilum DSM 19309 OX=442562 GN=Rumeso_00832 PE=4 SV=1
MNVHSPELDRDPARSDAAEALALLRRWAARATPEEVADLDPAVARLLPGREVSNYPDLARAYPDEFAPDALYRATLPDLQNGPESLIRGARAPIQHVGISGFRLPIRFHSRDNGDVTLETSVTGTVSLEAGKKGINMSRLMRSFYRFAEETFSFDVMERALDSYKADLGSCDARIQMRFRFPLKVESLRSGLWGYQYYDIALELVDQEGLRKKIFHLDYVYASTCPCSLELSEHARQTRGQLAVPHAQRSVARLSVEVVPGQGKLWFEDLIDMARRAVPTETQVMVKREDEQAFAELNAAHPIFVEDAARLFAAEFLSDSRIGDFRVVASHQESLHSHDAVSLLIEGETFRAESLDPRLFASLVHLP

SEQ ID NO: 14210 - protein, 367 aa, Rubellimicrobium thermophilum
  misc_feature (1)..(367): tr|S9R7G0|S9R7G0_9RHOB GTP cyclohydrolase FolE2 OS=Rube llimicrobium thermophilum DSM 16684 OX=1123069 GN=folE2 PE=3 SV=1
MNLHQPDFERDLTRAEAEDALATLRRWATRASPEEVADLDPAIARLLPGRELSNYPDLSRSYPEGFQADACYRATLPDLQNGPESLIRGARAPIQHVGISGFRLPVRFRTRDDGEVTLETAVTGTVSLEAGKKGINMSRLMRSFYLYAEETFSFDVMERALDRYKADLASCDARLQMRFRYPLRVASLRSGLSGWQYYDIALELVETGGVRKKLFHLDYVYSSTCPCSLELSEHARQMRGQLAVPHAQRSVARLSVEVLPGQARLWFEDLIEMARRAVPTETQVMVKREDEQAFGELNAAHPVFVEDAARLFAAELLADPRIGDFRVIASHQESLHSHDAVSILVEGETFAAQSLDPRLFGTLIHVP

SEQ ID NO: 14211 - protein, 212 aa, Rubidibacter lacunae
  misc_feature (1)..(212): tr|U5D9N2|U5D9N2_9CHRO GTP cyclohydrolase 1 OS=Rubidiba cter lacunae KORDI 51-2 OX=582515 GN=folE PE=3 SV=1
MDFSNLPDDIRKQAILTEPKAPVSEEEMQQAVRTLLLGLGEDPDREGLRDTPKRVVKALKFLTSGYNQSLDELLNGAIFHEDANEMVLVRDIDLFSSCEHHILPILGRAHVAYIPNGKVIGLSKIARICEMYARRLQVQERLTQQIASALQGLLRPQGVAVVVEATHMCMVMRGVQKPGSWTVTSSMQGVFAENDSTRQEFMNLIRHTPPLR

SEQ ID NO: 14212 - protein, 256 aa, Rubidibacter lacunae
  misc_feature (1)..(256): tr|U5D5M5|U5D5M5_9CHRO GTP cyclohydrolase 1 OS=Rubidiba cter lacunae KORDI 51-2 OX=582515 GN=folE PE=3 SV=1
MTMAASNGSNGSKGARASYGKGQSIGNGNGKISPMAEASALAQQVADGQGGGVRADAPSPVEADVDATLGVMKSAVRELLVGVGENPEREGLLRTPQRVAEAMRFLTQGYNQSLETLVNGAIFDEGHNEMVLVRDIDLFSLCEHHMLPFLGKAHVAYIPNQKVVGLSKLARIVEMYARRLQVQERLTRQVAEAVETILEPRGVAVVVEATHMCMVMRGVQKPSSWTVTSAMLGVFQDDQKTREEFLNLIRHQPSFH

SEQ ID NO: 14213 - protein, 231 aa, Rubinisphaera brasiliensis
  misc_feature (1)..(231): tr|F0SFP3|F0SFP3_RUBBR GTP cyclohydrolase 1 OS=Rubinisp haera brasiliensis (strain ATCC 49424 / DSM 5305 / JCM 21570 / NBRC 103401 / IFAM 1448) OX=756272 GN=folE PE=3 SV=1
MISSRQDSAVAEISNRDAAAATLNKSQSIEVMPEQNEEKSAANQPVDLESIKDAVRVILKAVGEDPDRDGLLETPRRVAKMYAEMFAGLHKDAGRHLEVTFPETYDEMVLVRDISFTSMCEHHLLPFSGVAHVAYLPDGAVTGLSKLARVVEEVSRRPQVQERMTQTVAELIETRLECRGVAVVVEAEHSCMTIRGIRKPGSKTITSALRGEFKTNPASRAEVMSLINERR

SEQ ID NO: 14214 - protein, 203 aa, Rubinisphaera sp.
  misc_feature (1)..(203): tr|A0A2E9VMB2|A0A2E9VMB2_9PLAN GTP cyclohydrolase 1 OS= Rubinisphaera sp. OX=2024857 GN=folE PE=3 SV=1
MNPSCNLTNDHEDALPETTVDLEAIQGAVRTILAAVGEDPDRPGLLETPRRVAKMYAEMFSGLKLDPGRHLQTTFPETYDEMVLVRDIHFASMCEHHLLPFTGVAHVAYLPNGKVTGLSKLARVVEEVSRRPQVQERMTQTIADLVEKELGSKGVAVVVEAEHSCMSIRGIRKAGSMTVTSALRGQFKNNQASRSEVMSLINQ

SEQ ID NO: 14215 - protein, 189 aa, Rubneribacter badeniensis; identical to SEQ ID NO: 7013
  misc_feature (1)..(189): tr|A0A2K2U218|A0A2K2U218_9ACTN GTP cyclohydrolase 1 OS= Rubneribacter badeniensis OX=2070688 GN=folE PE=3 SV=1

SEQ ID NO: 14216 - protein, 189 aa, Rubricoccus marinus
  misc_feature (1)..(189): tr|A0A259U3Z3|A0A259U3Z3_9BACT GTP cyclohydrolase 1 OS= Rubricoccus marinus OX=716817 GN=folE PE=3 SV=1
MYHEATTRELSTLTHRQLQLVGEDPEREGLLKTPERVAKAMQFLTHGYQLDPEAILRSAVFEESYSEMVLVKDIEVYSLCEHHMLPFFGKAHVAYIPNGKIVGLSKIPRIVDVFARRLQVQERLTIQIRDAIERVLEPEGVAVVIEAQHLCMMMRGAEKQNSSTTTSAMSGAFLDNDNTRAEFMRLAVR

SEQ ID NO: 14217 - protein, 210 aa, Rubrimonas cliftonensis
  misc_feature (1)..(210): tr|A0A1H4E585|A0A1H4E585_9RHOB GTP cyclohydrolase 1 OS= Rubrimonas cliftonensis OX=89524 GN=folE PE=3 SV=1
MNVHRPDLPREAPSPQLRPTREEAEEAVRTLLRWAGDDPGREGLIDTPSRVARAYGEWFRGYDEDPHADLQRVFEEVEGYDEMVILRDIRFESYCEHHLAPIIGRAHVGYMPDRRVVGISKLARVVDSFAKRLQVQEKMTAQVANAIRDVLQPKGVAVVLEAEHQCMSTRGVHKHGVSMVTSTMLGVFRDDHATRREFLTMVGNPVNRGG

SEQ ID NO: 14218 - protein, 273 aa, Rubripirellula obstinata
  misc_feature (1)..(273): tr|A0A5B1CTL1|A0A5B1CTL1_9PLAN GTP cyclohydrolase 1 typ e 2 OS=Rubripirellula obstinata OX=406547 GN=LF1_51310 PE=4 SV=1
MTPGESLGRICSVLAQIAPLRLAEDWDNVGLLVGDRGADVSRAMTCLTITPDVVKEAVESKVDLIIAHHPLPFKPLAKLTTDTVPGTMLLGLASHKIAVYSAHTAFDSAADGINNQWAKLIGIDDSLPLITSENGSGGVSEGRVNEGSGRMGRFESPRSLGQIVKQAADAVGQPSARIVGSPDLSVSKVAIACGSGGSFLAAAKRQGCDMLLTGEATFHTCLEARSLGIGLGLLGHYHSERFAMERLAKQLADEVDAIEVWASKVESDPVQML

SEQ ID NO: 14219 - protein, 278 aa, Rubripirellula obstinata
  misc_feature (1)..(278): tr|A0A5B1CMD7|A0A5B1CMD7_9PLAN GTP cyclohydrolase FolE2 OS=Rubripirellula obstinata OX=406547 GN=folE2 PE=3 SV =1
MIQTNNSEETTQLPDIQSTGDVRKVAINKVGVTNVRYPISLRTPGEGEGNTFLHTVATINMFVSLPHHEKGTHMSRFLEVLNEYHEELCSDTLVEICASMREKLKSQDAFLDLTFPYFIDKKAPVTGQSGKLDFDVRFEIAAGTIDDFIMTLKVPATSLCPCSKEISEYGAHNQRCEMTVKVRIADGVHLWIEELFAMIEKCASTQVFSVLKRPDEKWVTERAYENPKFVEDIVRDMAVTLNADDRIEWYQCFSENFESIHNHNAYAFIENDKREKTD

SEQ ID NO: 14220 - protein, 264 aa, Rubritalea profundi
  misc_feature (1)..(264): tr|A0A2S7TZ04|A0A2S7TZ04_9BACT GTP cyclohydrolase FolE2 OS=Rubritalea profundi OX=1658618 GN=folE2 PE=3 SV=1
MPARIQPLTDTQNERDDRNIAIDRVGVKALRFPVEVREKEGGSQRTVAITALAVDLPEHFKGTHMSRFVEVLNSHGNCLDVREMKKVPEELLGRLDASRAHVEFEFPFFRTKAAPVTGKGGVLDYNIRFEVEACSNGDSDFICTVMVPVATLCPCSKAISEYGAHNQRGLVTFAVRAKQPVWVEDLIDLVESCASCELYSLLKRPDEKFVTEKAYENPVFVEDLVRNIAGKANAQENIVWYKVEAENFESIHNHNAYAMIEKHV

SEQ ID NO: 14221 - protein, 265 aa, Rubritalea squalenifaciens
  misc_feature (1)..(265): tr|A0A1M6LMF7|A0A1M6LMF7_9BACT GTP cyclohydrolase FolE2 OS=Rubritalea squalenifaciens DSM 18772 OX=1123071 GN= folE2 PE=3 SV=1
MPEQIMPLKDTQNERDHRNIAIDRVGVKALRFPVEVREKEGGSQRTVATTALAVDLPEHFKGTHMSRFVEVLNSHGNCLDVREMKKVPEELLERLEASKAHVEFEFPFFRTKPAPVTGKGGVLDYTVRFEVEACANGDSDFVCTVMVPVATLCPCSKAISDYGAHNQRGLVTFAVRAKRPIWVEDLIDLVESSASCELYSLLKRPDEKYVTERAYDNPVFVEDLVRNVASKANAQDNIVWYRVEAENFESIHNHNAYAMIEKHAE

SEQ ID NO: 14222 - protein, 217 aa, Rubrivirga marina
  misc_feature (1)..(217): tr|A0A271IXF4|A0A271IXF4_9BACT GTP cyclohydrolase 1 OS= Rubrivirga marina OX=1196024 GN=folE PE=3 SV=1
MASNEQHEGGASDLAVKDASPLLYERQDVYHDDTTAELAALSKRQLELVGEDPEREGLLKTPERVAKAWQFLTHGYGLDPDKVLRSALFAEDYSEMVLVKDIEVYSLCEHHALPFFGKAHVAYIPNGHIVGLSKIPRVVDVFARRLQVQERLTLEIRDAVDRVLKPEGVAVVIEAQHLCMMMRGAEKQNSMTTTSAMSGVFLDNANTRSEFMRLISG

SEQ ID NO: 14223 - protein, 189 aa, Rubrivirga sp.
  misc_feature (1)..(189): tr|A0A271J6F7|A0A271J6F7_9BACT GTP cyclohydrolase 1 OS= Rubrivirga sp. SAORIC476 OX=1961794 GN=folE PE=3 SV=1
MYHAETTDQLAALTERQLELIGEDPTREGLLKTPERVAKAWQFLTHGYGLDPEAILRSALFAEDYSQMVLVKDIEVYSLCEHHALPFFGKAHVAYIPNGHIVGLSKIPRVVDVFARRLQVQERLTLQIRDAIDAVLKPEGVAVVIEAQHLCMMMRGAEKQNSHTTTSAMSGVFLDQPDTRAEFMRLISG

SEQ ID NO: 14224 - protein, 193 aa, Rubrivirga sp.
  misc_feature (1)..(193): tr|A0A2E8PD09|A0A2E8PD09_9BACT GTP cyclohydrolase 1 (Fr agment) OS=Rubrivirga sp. OX=1885344 GN=folE PE=3 SV=1
MAIDPVDTGSGSAAGEYDADAVAAAIRQLLIAIGEDPDRDGLRETPERVARSYAEMFGGLRQDPEDVLTTVFNVGHEELVIVKDIQLYSTCEHHLLPFYGVTHVGYIPNASGQITGLSKLARLVDVFARRPQVQERLTTEIADAIVRILQPRGAIVVVEAEHTCMSVRGVRKAGSMTVTSAMRGTLLNAATRA

SEQ ID NO: 14225 - protein, 266 aa, Rubrivivax benzoatilyticus
  misc_feature (1)..(266): tr|F3LKC4|F3LKC4_9BURK GTP cyclohydrolase FolE2 OS=Rubr ivivax benzoatilyticus JA2 = ATCC BAA-35 OX=987059 GN=f olE2 PE=3 SV=1
MTNLTDALHIPDTQSARDERHVAIQRVGVKDVRYPLQLRVAGAVQATAASWTLDVALPAEQKGTHMSRFVAWLDALDEPLDAAALARRHAAMLDKLGAREGRVEASFSFFLRKRAPVSGLQSLLDYQGRWIAETRLDGDTPKTTLWAEVAVPVKSLCPCSKEISDYGAHNQRSIVTIRVELLQPVEWHELVRFAEDEASSEIWPMLKRTDEKWVTERAYENPKFVEDLVRDVALRLNREPRIGRYVVDVENFESIHNHSAWARIER

SEQ ID NO: 14226 - protein, 249 aa, Rubrivivax gelatinosus
  misc_feature (1)..(249): tr|I0HXR4|I0HXR4_RUBGI GTP cyclohydrolase I FolE OS=Rub rivivax gelatinosus (strain NBRC 100245 / IL144) OX=983 917 GN=folE PE=4 SV=1
MAKTVLPPEPATPRLLRSEDELATLPVSERIRYRLVCADKRFHANDNIADFVREGELPELKKEVQAKLEELLRALVIDTESDHNTQETAKRVAKMYIDEVFRGRFHPMPSVTEFPNAERLNELMIVGPITVRSACSHHLCPIFGKVWIGLLPNEHSNLIGLSKYARITDWIMSRPQIQEEAVTMLANELQERVRPDGLAIVMEADHFCMHWRGVKDTDSAMVNSVMRGAFLKDPNLRREFLSLLPRKQD

SEQ ID NO: 14227 - protein, 266 aa, Rubrivivax gelatinosus
  misc_feature (1)..(266): tr|A0A4R2M4Q8|A0A4R2M4Q8_RUBGE GTP cyclohydrolase FolE2 OS=Rubrivivax gelatinosus OX=28068 GN=folE2 PE=3 SV=1
MTNLTDALHIPDTQSARDERHVAIQRVGVKDVRYPLQLRVAGAVQAATASWTLDVALPAEQKGTHMSRFVAWLDALDEPLDAAALARRHAAMLDKLGASEGRVEASFSFFLRKRAPVSGLQSLLDYQGRWIAETRLDGDSPRTTLWAEVAVPVKSLCPCSKEISDYGAHNQRSIVTIRVELLQPVEWHELVRFAEDEASSEIWPMLKRSDEKWVTERAYENPKFVEDLVRDVALRLNREPRIGRYVVDVENFESIHNHSAWARIER

SEQ ID NO: 14228 - protein, 263 aa, Rubrivivax sp.
  misc_feature (1)..(263): tr|A0A1E4IE00|A0A1E4IE00_9BURK GTP cyclohydrolase FolE2 OS=Rubrivivax sp. SCN 71-131 OX=1660138 GN=folE2 PE=3 SV=1
MNKLTDALHIPDTQSERDERHLAIQRVGVKALRYPLQLRVAGAVQPATGEWTLDVALPAEQKGTHMSRFVAWLEQNTEPLDAAVLRARHARMLELLHAREGQIEVAFTFFLKKRAPVSGLASLLDVQGRWVAQTRAGATTVWAEVGVPVKSLCPCSKEISDYGAHNQRSLVTIRVELLQSIEWHELVRFAEESASSEIWPMLKRSDEKWVTERAYENPKFVEDLVRDVALRLNQDARIGRYAVEVENFESIHNHSAYARIERA

SEQ ID NO: 14229 - protein, 304 aa, Rubrivivax sp.
  misc_feature (1)..(304): tr|A0A1E4Q0H1|A0A1E4Q0H1_9BURK GTP cyclohydrolase FolE2 OS=Rubrivivax sp. SCN 70-15 OX=1660139 GN=folE2 PE=3 S V=1
MNAALPDVSLTDIAPRLSPLAWVGMQGIDLPITVAEPGYRRELHAHADVQVDLPAPHVKGIHMSRLYRLLDALGQGEGLSPAGLRHLLQAMIDSHQDCDTRSARLRLNLDLLVRRPALVTQGLSGWKSYPIRLDASLVKGEFRCRVQVTAGYSSTCPCSAALSRHIIEQGFLKAFGRQTPVEPADVAAWLHQHATLATPHSQRSEAQVTVDVAGDCDSLGLLALIDRIEQAVGTPVQTAVKRADEQAFAALNGQNLMFVEDAARRIEAALSGYVRPSIHVRHLESLHPHDAVAWATPMSEGVSA

SEQ ID NO: 14230 - protein, 200 aa, Rubrobacter radiotolerans
  misc_feature (1)..(200): tr|A0A023X2Z7|A0A023X2Z7_9ACTN GTP cyclohydrolase 1 OS= Rubrobacter radiotolerans OX=42256 GN=folE PE=3 SV=1
MSEGELPGRPEAPGGTDFGRLEAALGEALLALGLGPQSAPGMRETPERTAKALDSFFSGLRTDPEVYLEETFPGGTGDPVVLRDIPLYSMCEHHLVPFVGRAHVGYVPDRRVLGLSEIAGVVEAYARRPQLQERLTAQVADLLFEPLGSKGSFVVIEAEQLCMTMRGAQKPGTLTVTRAARGVYAQDASLREEFTRLLGR

SEQ ID NO: 14231 - protein, 198 aa, Rubrobacter xylanophilus
  misc_feature (1)..(198): tr|Q1AWU1|Q1AWU1_RUBXD GTP cyclohydrolase 1 OS=Rubrobac ter xylanophilus (strain DSM 9941 / NBRC 16129) OX=2661 17 GN=folE PE=3 SV=1
MTEAYPPRGRVDRERIQRAVREILVAVGEDPEREGLLGTPRRVAEAYEYLFSGLREDPLRHLQVGFMEDYRDLIIVRDIYLASLCEHHLLPFIGRAHVAYAPRGKVVGISKLARLVEGYARRPQLQERLTSQIADALYEGLGSRGSLVIVEADHSCMTMRGVQKPGSVTVTSASRGIYREDGALRSELTDLILRGREI

SEQ ID NO: 14232 - protein, 198 aa, Rubrobacter xylanophilus
  misc_feature (1)..(198): tr|A0A510HFB8|A0A510HFB8_9ACTN GTP cyclohydrolase 1 OS= Rubrobacter xylanophilus OX=49319 GN=folE PE=3 SV=1
MTEAYPPRGRVDRERIERAVREILVAIGEDPEREGLLGTPRRVAEAYEYLFSGLREDPRRHLEVGFMEDYRDLILVRDIYLASLCEHHLLPFIGRAHVAYAPRGKVVGISKLARLVEGYARRPQLQERLTSQIADALYEGLGSRGSLVIIEADHSCMTMRGVQKPGSVTVTSASRGIYREDGALRSELTDLILRGREI

SEQ ID NO: 14233 - protein, 195 aa, Rudaeicoccus suwonensis
  misc_feature (1)..(195): tr|A0A561E2Y2|A0A561E2Y2_9MICO GTP cyclohydrolase 1 OS= Rudaeicoccus suwonensis OX=657409 GN=folE PE=3 SV=1
MSIPPTVDLERAAAAVRELLLALGEDPDREGLRDTPGRVARAYAETFAGLWQEPADVLNRTFDVDHSELVIVRDIEVYSTCEHHLVPFHGVAHVGYIPAEDGRVTGLSKIARLVDVFAKRPQVQERLTTQIADSLVEHLRAQGVIVVVECEHLCMSMRGVHKPGATTITSAVRGQLRHAATRAEAMSLIQAQPRR

SEQ ID NO: 14234 - protein, 367 aa, Ruegeria arenilitoris
  misc_feature (1)..(367): tr|A0A238JY41|A0A238JY41_9RHOB GTP cyclohydrolase FolE2 OS=Ruegeria arenilitoris OX=1173585 GN=folE2 PE=3 SV=1
MNIHSRDIDEKPDRDEAAEALKVLRKWAKGASVAEISQLDPAVARLVPGLMPDNYPAMSREYPEDFKVDEAYKSALPDLQNGPSSLIRGAKQQIQHVGISNFRLPIRFHSKNGPDLTLETSVTGTVSLEAEKKGINMSRIMRSFYKHAERTFSFEVMESALSDYLTDLDSFDARLQMRFSYPDRVKSLRSGLEGYQYYDIALELVEQGGVRQKIMHLDYVYSSTCPCSLELSEHARSVRGQLATPHSQRSVARISVVVDCDADCLWFEDLIALCRRAVPTETQVMVKREDEQAFAELNAANPIFVEDAARLFCAELLADHHVGDFRVIASHQESLHSHDAVSILTEGPTFASTSLDPRLFTTLFHVG

SEQ ID NO: 14235 - protein, 367 aa, Ruegeria atlantica
  misc_feature (1)..(367): tr|A0A0P1EQF7|A0A0P1EQF7_9RHOB GTP cyclohydrolase folE2 OS=Ruegeria atlantica OX=81569 GN=folE2 PE=4 SV=1
MNVHPRDIEDTPDNDEAAAALKTLRKWAESATEAEISQLDPAIARLVPGLVPVNYPSLSREYPDGFTVDSAYRATLPDLQNGPSSLIRGAKQQIQHVGISNFRLPIRFHRKRGDDLTLETSVTGTVSLDAEKKGINMSRIMRSFYKHAERTFSFEVMEAALDDYMTDLDSFDARIQMLFSYPDRVQSLRSGLEGYQYYDIALELVEQGGVRQKIMHLDYVYSSTCPCSLELSEHARATRGQLATPHSQRSVARISVVVDCDTDCLWFEDLIALCRRAVPTETQVMVKREDEQAFAELNAANPIFVEDAARLFCAELLADHHIGDFRVVASHQESLHSHDAVSVLTEGPTFVSPSLDPRLFTTLFHVG

SEQ ID NO: 14236 - protein, 367 aa, Ruegeria atlantica
  misc_feature (1)..(367): tr|A0A0P1F123|A0A0P1F123_9RHOB GTP cyclohydrolase FolE2 OS=Ruegeria atlantica OX=81569 GN=folE2 PE=3 SV=1
MNVHPRDIEDMPDNDEAAAALKTLRKWAESATEAEISQLDPAIARLVPGLVPINYPSLSREYPEGFAVDSAYRATLPDLQNGPSSLIRGAKQQIQHVGISNFRLPIRFHRKRGDDLTLETSVTGTVSLDAEKKGINMSRIMRSFYKHAERTFSFEVMEAALDDYMTDLDSFDARIQMRFSYPDRVQSLRSGLEGYQYYDIALELVEQGGVRQKIMHLDYVYSSTCPCSLELSEHARATRGQLATPHSQRSVARISVVVDCDTDCLWFEDLIALCRRAVPTETQVMVKREDEQAFAELNAANPIFVEDAARLFCAELLADHHIGDFRVVASHQESLHSHDAVSVLTEGPTFVSPSLDPRLFTTLFHVG

SEQ ID NO: 14237 - protein, 367 aa, Ruegeria conchae
  misc_feature (1)..(367): tr|A0A497ZX66|A0A497ZX66_9RHOB GTP cyclohydrolase FolE2 OS=Ruegeria conchae OX=981384 GN=folE2 PE=3 SV=1
MNIHPRDINETPDHDQAAAALKVLREWAKSASAVEISQLDPAVAQLVPGLSQAEYPALSRDYPESFEADVAYRATLPDLQNGPSSLIRGSKQQIQHVGISNFRLPIRFHRKSGAELTLETSVTGSVSLEAEKKGINMSRIMRSFYKHAERTFSFEVMEAALNDYLSDLDSLDARIQMRFSYPDRIESLRSGLSGYQYYDIALELVDRGGERLKIMHLDYVYSSTCPCSLELSEHARATRGQLATPHSQRSVARISVVVDCNADCLWFEDLIALCRRAVPTETQVMVKREDEQAFAELNAANPIFVEDAARLFCAELQADHHVGDFRVIASHQESLHSHDAVSILTEGPTFETASLDPRLFTTLFHVG

SEQ ID NO: 14238 - protein, 367 aa, Ruegeria denitrificans
  misc_feature (1)..(367): tr|A0A0N7M8W7|A0A0N7M8W7_9RHOB GTP cyclohydrolase FolE2 OS=Ruegeria denitrificans OX=1715692 GN=folE2 PE=3 SV= 1
MNVHPRSIEDAPDKDDAAAALKTLRKWAESATEAEISQLDPAVARLVPGVVPVNYPSLSREYAENFKVDAAYRASLPDLQNGPSSLIRGAKQQIQHVGISNFRLPIRFHRKHGDDLTLETSVTGTVSLEAEKKGINMSRIMRSFYKHAERTFSFEVIEAALNDYMTDLDSFDARIQMRFSYPDRVESLRSGLAGYQYYDIALELVEQNGVRQKIIHLDYVYSSTCPCSLELSEHARSTRGQLATPHSQRSVARISVVLDCEADCLWFEDLIALCRRAVPTETQVMVKREDEQAFAELNAANPIFVEDAARLFCAELLADHHVGDFRVVASHQESLHSHDAVSVLTEGPTFVSPSLDPRLFTTLFHVG

SEQ ID NO: 14239 - protein, 367 aa, Ruegeria faecimaris
  misc_feature (1)..(367): tr|A0A521BMM0|A0A521BMM0_9RHOB GTP cyclohydrolase FolE2 OS=Ruegeria faecimaris OX=686389 GN=folE2 PE=3 SV=1
MNVYPRDIDDAPNNDEAAAALKTLRKWAENATEAEIGQLDPAVARLVPGLLPVNYPSLSRHYPEGFAVDEAYRASLPDLQNGPSSLIRGAKQQIQHVGISNFRLPIRFHRKQGDDLTLETSVTGTVSLDAEKKGINMSRIMRSFYKHAERTFSFEVIEAALNDYMTDLDSFDARIQMRFSYPDRTQSLRSGLEGYQYYDIALELVEQNGVRQKIMHLDYVYSSTCPCSLELSEHARSTRGQLATPHSQRSVARISVAVDCDADCLWFEDLIALCRRAVPTETQVMVKREDEQAFAELNAANPIFVEDAARLFCAELLADHHIGDFRVIASHQESLHSHDAVSVLTEGPTFVSSSLDPRLFTTLFHVG

SEQ ID NO: 14240 - protein, 367 aa, Ruegeria intermedia
  misc_feature (1)..(367): tr|A0A1M4XX62|A0A1M4XX62_9RHOB GTP cyclohydrolase FolE2 OS=Ruegeria intermedia OX=996115 GN=folE2 PE=3 SV=1
MNIHSRDMDEKPDRDAAAEALKVLRKWAKGASAAEISQLDPAVARLVPGLMPDNYPSMSREYPEDFKVDEAYKAALPDLQNGPSSLIRGAKQQIQHVGISNFRLPIRFHSKNGPDLTLETSVTGTVSLEAEKKGINMSRIMRSFYKHAERTFSFEVMEAALSDYLTDLDSFDARLQMRFSYPERVKSLRSGLEGYQYYDIALELVEQGGVRQKIMHLDYVYSSTCPCSLELSEHARSVRGQLATPHSQRSVARVSVVVDSDADCLWFEDLIALCRRAVPTETQVMVKREDEQAFAELNAANPIFVEDAARLFCAELQANHHVGDFRVIASHQESLHSHDAVSILTEGPTFAASSLDPRLFSTLFHVG

SEQ ID NO: 14241 - protein, 367 aa, Ruegeria litorea
  misc_feature (1)..(367): tr|A0A1Y5T9A5|A0A1Y5T9A5_9RHOB GTP cyclohydrolase FolE2 OS=Ruegeria litorea R37 OX=1200284 GN=folE2 PE=3 SV=1
MNFHTRDMNETPDREEAAAALDVLRAWAKTATEAEIAQLDPSVARLVPGLVPVNYPPLSRSYPEEFEVDDAYKASLPDLQNGPSSLIRGAKQQIQHVGISNFRLPIRFHRKEGADLTLETSVTGTVSLEAEKKGINMSRIMRSFYKHAERTFSFEVIEAALDDYKSDLESFDARIQMRFSYPVKVESLRSGLSGYQYYDIALELVEQNGVRQKIMHLDYVYSSTCPCSLELSEHARMSRGQLATPHSQRSVARISVVVDCDADCLWFEDLIALCRRAVPTETQVMVKREDEQAFAELNAANPIFVEDAARSFCAELLADHHVGDFRVIASHQESLHSHDAVSVLTEGPTFAAASLDPKLFNTLFHVG

SEQ ID NO: 14242 - protein, 367 aa, Ruegeria marisrubri
  misc_feature (1)..(367): tr|A0A101CYC9|A0A101CYC9_9RHOB GTP cyclohydrolase FolE2 OS=Ruegeria marisrubri OX=1685379 GN=folE2 PE=3 SV=1
MNFLSRNIDETPDREEAEAALALLRKWAEAASEVEISQLDPAIARLVPGLVPTNYPPLSRDYAGDFVVDEAYKASLPDLQNGPSSLIRGAKQQIQHVGISNFRLPIRFHSKNGPDLTLETSVTGTVSLEAEKKGINMSRIMRSFYKHAERTFSFEVMEAALDDYMTDLDSFDARIQMRFSYPVRLKSLRSGLEGYQYYDIALELVEQGGVRQKIIHLDYVYSSTCPCSLELSEHARSQRGRLATPHSQRSVARISVVVDTHADCLWFEDLIALCRRAVPTETQVMVKREDEQAFAELNASNPIFVEDAARLFCAELQADHHIGDFRVIASHQESLHSHDAVSILTEGPTFAASSLDPKLFNTLFHVG

SEQ ID NO: 14243 - protein, 367 aa, Ruegeria mediterranea
  misc_feature (1)..(367): tr|A0A2R8C4W4|A0A2R8C4W4_9RHOB GTP cyclohydrolase FolE2 OS=Ruegeria mediterranea M17 OX=1200281 GN=folE2 PE=3 SV=1
MNFHTRDLNETPDREDAAAALDVLRAWAKTASEAEISQLDPSVARLVPGLVPEDYPTLSREYPADFTVDADYKAALPDLQNGPSSLIRGAKQQIQHVGISNFRLPIRFHRKEGEDLTLETSVTGTVSLEAEKKGINMSRIMRSFYKHAERTFSFEVIEAALDDYKSDLESFDARIQMRFSYPVKVESLRSGLSGYQYYDIALELVEQNGVRQKIMHLDYVYSSTCPCSLELSEHARMSRGQLATPHSQRSVARVSVVVDCDADCLWFEDLIALCRRAVPTETQVMVKREDEQAFAELNAANPIFVEDAARSFCAELLADHHVGDFRIIASHQESLHSHDAVSVLTEGPTFAADSLDPKLFNTLFHVG

SEQ ID NO: 14244 - protein, 367 aa, Ruegeria meonggei
  misc_feature (1)..(367): tr|A0A1X6YSY8|A0A1X6YSY8_9RHOB GTP cyclohydrolase FolE2 OS=Ruegeria meonggei OX=1446476 GN=folE2 PE=3 SV=1
MNVQPRDIDDAPDHDEAAAALKTLRKWAETATEAEISQLDPAIARLVPGLASTNYPAFSREYPEGFTVNEAYRASLPDLQNGPSSLIRGAKQQIQHVGISNFRLPIRFHRKDDEDLTLETSITGTVSLEAEKKGINMSRIMRSFYKHAERTFSFEVMEAALDDYMSDLDSFDARIQMRFSYPDRVKSLRSGLEGYQYYDIALELVEQNGVRQKIMHLDYVYSSTCPCSLELSEHARATRGQLATPHSQRSVARISVVVDCDADCLWFEDLIGLCRRAVPTETQVMVKREDEQAFAELNAANPIFVEDAARLFCAELLADHHVGDFRVVASHQESLHSHDAVSVLTKGPTFVSASLDPRLFTTLFHVG

SEQ ID NO: 14245 - protein, 367 aa, Ruegeria pomeroyi
  misc_feature (1)..(367): sp|Q5LTR1|GCH4_RUEPO GTP cyclohydrolase FolE2 OS=Rueger ia pomeroyi (strain ATCC 700808 / DSM 15171 / DSS-3) OX =246200 GN=folE2 PE=3 SV=1
MNLHPRDIDETPDRDAAAAALAVLRRWASGATSTEISELDPSVARLLPDAALSNYPDLSRQYPEDFTVDATYRAGLPDLQNGPSSLIRGAKQQIQHVGISNFRLPIRFHRKEGDDLTLETSVTGTVSLEAGKKGINMSRIMRSFYKHAERTFSFEVIEAALDDYMTDLDSFDARIQMRFSYPERIESLRSGLSGYQYYDIALELVEQGGERLKIMHLDYVYSSTCPCSLELSEHARSSRGQLATPHSQRSVARLSVVVDGDASCLWFEDLIALCRRAVPTETQVMVKREDEQAFAELNAANPIFVEDAARLFCAELLADHRIGDFRVVASHQESLHSHDAVSVLTEGATFATASLDPRLFATLFHVG

SEQ ID NO: 14246 - protein, 367 aa, Ruegeria profundi
  misc_feature (1)..(367): tr|A0A0X3TW34|A0A0X3TW34_9RHOB GTP cyclohydrolase FolE2 OS=Ruegeria profundi OX=1685378 GN=folE2 PE=3 SV=1
MNVHPRNIDDAPDTDEATAALKTLRKWAQTATEAEISQLDPAIARLVPGLVPMNYPTLSRDYPEGFQVDKAYRATLPDLQNGPSSLIRGAKQQIQHVGISNFRLPIRFHRKHGEDLTLETSVTGTVSLDADKKGINMSRIMRSFYKHAERTFSFEVMEAALDDYLTDLDSFDARLQMRFSYPDRVKSLRSGLEGYQYYDIALELVEQNGVRQKIMHLDYVYSSTCPCSLELSEHARATRGQLATPHSQRSVARISVVLDCDADCLWFEDLIALCRRAVPTETQVMVKREDEQAFAELNAANPIFVEDAARLFCAELLADHHVGDFRVVASHQESLHSHDAVSVLTEGLTFVSASLDPRLFSTLFHVG

SEQ ID NO: 14247 - protein, 367 aa, Ruegeria sp.
  misc_feature (1)..(367): sp|Q1GF96|GCH4_RUEST GTP cyclohydrolase FolE2 OS=Rueger ia sp. (strain TM1040) OX=292414 GN=folE2 PE=3 SV=1
MNIHSRDVNETPDRSDAEQALAVLRRWAGEASETEVAQLDPAIARLLPGQELQNYPDLKRQYPDDFDANESYRATLPDLQNGPSSLIRGAKEQIQHVGISNFRLPIRFHTRDNGDLTLETSVTGTVSLDAEKKGINMSRIMRSFYKHAEKVFSFDVMEAALEDYLSDLESGDARLQMRFSFPVKVQSLRSGLSGYQYYDVALELVQMAGQRHRIVHLDYVYSSTCPCSLELSEHARQARGQLATPHSQRSVARISVQMEQDGGCLWFEDLIDHCRRAVPTETQVMVKREDEQAFAELNAANPIFVEDAARLFCEALQSDARVGDFRVVASHQESLHSHDAVSVLTQGTMFAAPSLDPQLFSTLIHRG

SEQ ID NO: 14248 - protein, 367 aa, Ruegeria sp.; identical to SEQ ID NO: 12574
  misc_feature (1)..(367): tr|B7QX88|B7QX88_9RHOB GTP cyclohydrolase FolE2 OS=Rueg eria sp. R11 OX=439497 GN=folE2 PE=3 SV=1

SEQ ID NO: 14249 - protein, 221 aa, Rufibacter immobilis
  misc_feature (1)..(221): tr|A0A3M9N6F2|A0A3M9N6F2_9BACT GTP cyclohydrolase 1 OS= Rufibacter immobilis OX=1348778 GN=folE PE=3 SV=1
MDRRDWNEEDPEEEHLAGSLDTPLRPDAFDLTDEQKINGIEHHFREIMQLLGLDLEDDSLKGTPRRVAKMYVKEIFDGLNPENRPNARLFENKYGYRQMLVERDITLYSSCEHHFVPIIGKAHVAYIPNEHVIGLSKLNRIVQYYGRRPQVQERLTRQIAQELRDVLKTENVAVYIEADHLCVMSRGVNDVSSSTITSEYSGLFEQEAYRLEFLQAIRHHK

SEQ ID NO: 14250 - protein, 221 aa, Rufibacter sp.
  misc_feature (1)..(221): tr|A0A3M9MKB8|A0A3M9MKB8_9BACT GTP cyclohydrolase 1 OS= Rufibacter sp. R-22-1c-1 OX=2487040 GN=folE PE=3 SV=1
MDRRDWNEEDPAEEHVAGSLDTPLRADAFDLTDEQKIDGIAHHFREIMTLLGLDLEDDSLKGTPRRVAKMYVKEIFDGLNPENRPVARLFENKYGYRQMLVERNITLYSSCEHHFVPIIGKAHVAYIPEGHVIGLSKLNRIVQYFGRRPQVQERLTRQIAQELRDVLKSDNVAVYIEADHLCVMSRGVNDVSSSTITSEYSGLFEQDAYRLEFLQAIRRNG

SEQ ID NO: 14251 - protein, 222 aa, Rufibacter sp.
  misc_feature (1)..(222): tr|A0A127B257|A0A127B257_9BACT GTP cyclohydrolase 1 OS= Rufibacter sp. DG15C OX=1379909 GN=folE PE=3 SV=1
MDRREDNDQDPEEDHMTGSLDTPLRPDAFALTDEQKIEGIEYHFKEIMQLLGLDLEDDSLKGTPRRVAKMYVKEIFDGLKPENRPAARLFENRYGYRQMLVERDITLYSSCEHHFVPIIGKAHVAYIPNEHVIGLSKLNRIVQYFGRRPQVQERLTRQIAQELRDVLKTENVAVLIEADHLCVMSRGVNDVSSSTITSEYSGLFEQEAYRLEFMQAIRHNKS

SEQ ID NO: 14252 - protein, 221 aa, Rufibacter tibetensis
  misc_feature (1)..(221): tr|A0A0P0C808|A0A0P0C808_9BACT GTP cyclohydrolase 1 OS= Rufibacter tibetensis OX=512763 GN=folE PE=3 SV=1
MDRRDWNEEDPEEEHLAGSLDTPLRPDAFDLTDEQKIEGIAHHFREIMQILGLDLEDDSLKGTPKRVAKMYVKEIFDGLNPENRPTARLFENKYGYRQMLVERDITLYSSCEHHFVPIIGKAHVAYIPSEHVIGLSKLNRIVQYFGRRPQVQERLTRQIAQELRDVLKSKNVAVLIEADHLCVMSRGVNDVSSSTITSEYSGLFEQDTYRLEFLQAIRHNK

SEQ ID NO: 14253 - protein, 188 aa, Rugamonas rubra
  misc_feature (1)..(188): tr|A0A1I4TVT3|A0A1I4TVT3_9GAMM GTP cyclohydrolase 1 OS= Rugamonas rubra OX=758825 GN=folE PE=3 SV=1
MSKEEFSENDWRRLLTSLGEDPDRPGLAETPHRVAKAWKHWTSGYGQDPVELLKAFEDGAEQYNELIVVRGIPVYSHCEHHLAPFFGKATIGYVPNGKIVGLSKLTRLVDCFAKRLQVQERMTIQIANAMMEVLEPKAVGVVVRCRHMCMESRGIRTPGEETITSAMLGELQPNLALRTEFLALAREQ

SEQ ID NO: 14254 - protein, 189 aa, Rugosibacter aromaticivorans
  misc_feature (1)..(189): tr|A0A0C5JLP1|A0A0C5JLP1_9RHOO GTP cyclohydrolase 1 OS= Rugosibacter aromaticivorans OX=1565605 GN=folE PE=3 SV =1
MELNTEKIGRLVRELLVEIGEDPAREGLLDTPKRVAKALEFLTSGYRTDAKELINGACFTQETSSMVIVKGIEFYSMCEHHMLPFFGHCHIGYIPSGTVFGVSKLARLVDMYARRLQLQERLTEQISNVVMESVNAKGVGVIIEARHLCMMMRGVEKQNSTMVTSSVLGEFRDSFATREEFFSLIGRRT

SEQ ID NO: 14255 - protein, 268 aa, Rugosibacter aromaticivorans
  misc_feature (1)..(268): tr|A0A0C5J7A6|A0A0C5J7A6_9RHOO GTP cyclohydrolase FolE2 OS=Rugosibacter aromaticivorans OX=1565605 GN=folE2 PE =3 SV=1
MPDQNKAVIPDVQSSEDLRHLPINRVGIKSIRHPFKVLDKSGGVRHTIADFNMYVGLPHNFKGTHMSRFVEILNSHEDEISVESFETMLREMVRRLEAQMGYLEMSFPYFVNKTAPVSGVKSLMDYDVTFIGEILSNGEYRQTIKVLVPVTSLCPCSKKISDRGAHNQRSHVTITATTNTLVWIEDLINIAESQASCELYGLLKRPDEKFVTERAYDNPKFVEDLVRDVASVLNVDQRIDAYSVESENFESIHNHSAYAMIEKDKKAH

SEQ ID NO: 14256 - protein, 274 aa, Rugosibacter sp.
  misc_feature (1)..(274): tr|A0A522YCV9|A0A522YCV9_9RHOO GTP cyclohydrolase FolE2 OS=Rugosibacter sp. OX=1914450 GN=folE2 PE=3 SV=1
MNSRVPMPDQNKAVIPDVQSSEDLRHLPINRVGIKSIRHPFKVLDKSGGVRHTIADFNMYVGLPHNFKGTHMSRFVEILNSHEDEISVESFETMLREMVRRLEAQMGYLEMSFPYFVNKTAPVSGVKSLMDYDVTFIGEILSNGEYRQTIKVLVPVTSLCPCSKKISDRGAHNQRSHVTITATTNTLVWIEDLINIAESQASCELYGLLKRPDEKFVTERAYDNPKFVEDLVRDVASVLNVDQRIDAYSVESENFESIHNHSAYAMIEKDKKAH

SEQ ID NO: 14257 - protein, 189 aa, Rugosibacter sp.
  misc_feature (1)..(189): tr|A0A521KKV2|A0A521KKV2_9RHOO GTP cyclohydrolase 1 OS= Rugosibacter sp. OX=1914450 GN=folE PE=3 SV=1
MELNTEKISRLVRELLVEIGEDPAREGLLDTPQRVAKALEFLTSGYRTDTKELINGACFTQETSSMVIVKDIELYSMCEHHMLPFFGHCHIGYIPSGTVFGVSKLARLVDMYARRLQLQERLTEQISNAVMKAVNAKGAGVIIEARHLCMMMRGVEKQNSTMVTSSVLGEFRNSFATREEFFSLIGRRT

SEQ ID NO: 14258 - protein, 195 aa, Ruminiclostridium cellobioparum
  misc_feature (1)..(195): tr|S0FFV1|S0FFV1_RUMCE GTP cyclohydrolase 1 OS=Ruminicl ostridium cellobioparum subsp. termitidis CT1112 OX=119 5236 GN=folE PE=3 SV=1
MAVDIKKVQEHIRGILSAIGEDPDREGLKDTPLRVAHMYEEIFEGIGYSNDDIAEMFNKTFEDDLIIPEDNREIVLVKDMDIFSYCEHHLALMYNMKAAIAYIPVGKVLGLSKIARIADMVGKRLQLQERIGSDIAEIMHKITGSEDIAVIIEGKHACMTTRGIKNTGSLTATTTLRGKFNTDSNLVNRLMLLLK

SEQ ID NO: 14259 - protein, 195 aa, Ruminiclostridium cellulolyticum
  misc_feature (1)..(195): sp|B8I184|GCH1_RUMCH GTP cyclohydrolase 1 OS=Ruminiclos tridium cellulolyticum (strain ATCC 35319 / DSM 5812 / JCM 6584 / H10) OX=394503 GN=folE PE=3 SV=1
MSIDRKKVEEHIRGLLVAIGENPDREGLKETPSRVAQMYQEVFEGISYTNDEIAEMFNKTFEEDLVIPKDNKEIVLVKDIDIFSYCEHHMALMYNMKVAVAYIPNDKILGLSKIARIADMVGKRLQLQERIGSDIAEIMQKITDSEDVAVIVEGQHACMTTRGIKNTGSRTTTTTLRGAFKTDTNLTNRLMMLYK

SEQ ID NO: 14260 - protein, 264 aa, Ruminiclostridium hungatei
  misc_feature (1)..(264): tr|A0A1V4SI29|A0A1V4SI29_RUMHU GTP cyclohydrolase 1 typ e 2 OS=Ruminiclostridium hungatei OX=48256 GN=CLHUN_290 60 PE=4 SV=1
MKVGEILEYINELAPWGYAESWDNVGLMLGSRQSQVNRILLSMDVTSKVIKEAVDCGAELIVSHHPFFFGKLNRLDFDTMKGRQVQTLVTRNISVISAHTNLDVAEGGVNDTLAETIGLVDPEPLKPYSPSGSKVDLGLGKVGTLKHETEFSSFLASVKAGLNIGSLRIIGAQPEKVQKVGVFCGSFDVELEYLKGLGLDAVITGDIKYHTAADAREMGICILDVGHFASEHVILEELRKKLSGRFEAVEAVCSKMESDPFIFA

SEQ ID NO: 14261 - protein, 194 aa, Ruminiclostridium papyrosolvens
  misc_feature (1)..(194): tr|F1T924|F1T924_9FIRM GTP cyclohydrolase 1 OS=Ruminicl ostridium papyrosolvens DSM 2782 OX=588581 GN=folE PE=3 SV=1
MSIDRKKVEEHIRGLLIAIGEDPDREGLKETPSRVARMYEEIFEGISYTNDDIADMYNKTFEDDLVIPKDNKEMVLVKDIDIFSYCEHHMALMYNMKVAVAYVPNGKILGLSKIARIADMVGKRLQLQERIGSDIAEIMQKITDSEDVAIIIEGQHACMTARGIKNTGSRTTTTTFRGKFNTDSNLTKRLMILL

SEQ ID NO: 14262 - protein, 195 aa, Ruminiclostridium papyrosolvens
  misc_feature (1)..(195): tr|U4QXP2|U4QXP2_9FIRM GTP cyclohydrolase 1 OS=Ruminicl ostridium papyrosolvens C7 OX=1330534 GN=folE PE=3 SV=1
MSIDRKKVEEHIRGLLIAIGEDPDREGLKETPSRVARMYEEIFEGISYTNDEIAEMYNKTFEDDLVIPKDNKEMVLVKDIDIFSYCEHHMALMYNMKVAVAYVPNGKILGLSKIARIADMVGKRLQLQERIGSDIAEITQKITDSEDVAVIIEGQHACMTARGIKNTGSRTTTTTFRGKFNTDTNLTKRLMILYK

SEQ ID NO: 14263 - protein, 187 aa, Ruminiclostridium sp.; identical to SEQ ID NO: 9054
  misc_feature (1)..(187): tr|A0A3B8KN76|A0A3B8KN76_9FIRM GTP cyclohydrolase 1 OS= Ruminiclostridium sp. OX=2053608 GN=folE PE=3 SV=1

SEQ ID NO: 14264 - protein, 194 aa, Ruminiclostridium sp.
  misc_feature (1)..(194): tr|A0A4U7JKV8|A0A4U7JKV8_9FIRM GTP cyclohydrolase 1 OS= Ruminiclostridium sp. MA18 OX=2488810 GN=folE PE=3 SV=1
MIDRAKIEEHIRGILLAIGENPNREGLVDTPARVAKMYEEIFEGIGYTNNEIAEMFNKTFEEDLEIPEDNKEMVIMKDIEIFSYCEHHLALMYNMKATIAYIPNKKIIGLSKIARIADMVSRRLQLQERIGSDIAEIMQKVTGSEDVAVIIEGQHACMTARGIKNTKAVTKTTTLRGKFESDDSINSKLFMMLK

SEQ ID NO: 14265 - protein, 195 aa, Ruminiclostridium sufflavum
  misc_feature (1)..(195): tr|A0A318Y556|A0A318Y556_9FIRM GTP cyclohydrolase 1 OS= Ruminiclostridium sufflavum DSM 19573 OX=1121337 GN=fol E PE=3 SV=1
MINKEKIEEHIKGILLAIGENPDREGLADTPARVAKMYEEIFEGIGYSNNEIAERFNKTFEEDLTIPDNNKEIVIMKDIEIFSYCEHHLALMYNMRVAIAYIPCGKIIGLSKIARIADMVSKRLQLQERIGSDIAEIMQKVTGSEDVAVIIEGQHACMTARGIKSTKAVTATTTLRGKFDTDGDIASKLFIMLGR

SEQ ID NO: 14266 - protein, 189 aa, Ruminococcaceae bacterium
  misc_feature (1)..(189): tr|A0A1G4W4A3|A0A1G4W4A3_9FIRM GTP cyclohydrolase 1 OS= Ruminococcaceae bacterium P7 OX=1200751 GN=folE PE=3 SV =1
MDTKKIEEHVLGILEAIGEDPNREGLRETPARVARMLEEVLEGTAYSNHEIAEMFGKTFTEESIKDSENAVVIKDITVFSYCEHHLALMYDMHVNVAYVPHGRVLGLSKIARICDMAAKRLQLQERLGRDIAEIISEAAGTTDVGVMIRGCHSCMTARGIKNVSANTVTATYIGAFRDNAELKQLVKFD

SEQ ID NO: 14267 - protein, 186 aa, Ruminococcaceae bacterium
  misc_feature (1)..(186): tr|A0A351EGB8|A0A351EGB8_9FIRM GTP cyclohydrolase 1 OS= Ruminococcaceae bacterium OX=1898205 GN=folE PE=3 SV=1
MDLERIEKAVREILLAVGEDPEREGLQETPNRVARMYAEIFSGLKSDPKQHLKIFHEEGEHDELVFVRDIPLYSVCEHHLLPFIGKCHIAYIPRDGKIIGLSKFARIVDCFARRPQVQERLTAQIADFIEENLNPRGVAVFIEAEHLCMTMRGARAAGALTQTSALRGCMRTEAKTRNEVMLLLAK

SEQ ID NO: 14268 - protein, 186 aa, Ruminococcus albus
  misc_feature (1)..(186): tr|A0A011UEB3|A0A011UEB3_RUMAL GTP cyclohydrolase 1 OS= Ruminococcus albus SY3 OX=1341156 GN=folE PE=3 SV=1
MDKEKIMFHIKGLLEAIGEDPEREGLKETPARVANMLAEVLEGTAYTNHEIAEMFGKTFTSEDIDADEAIIMKDITVFSYCEHHMALMYDMTVNVGYIPRGKVLGLSKIARICEMAAKRLQLQEKLGRDIAEIISEAAGTPDVGVKISGCHSCMTARGIKNASSHTETRTYLGTFKTDSDLKKLLD

SEQ ID NO: 14269 - protein, 186 aa, Ruminococcus albus
  misc_feature (1)..(186): tr|E9S9P2|E9S9P2_RUMAL GTP cyclohydrolase 1 OS=Ruminoco ccus albus 8 OX=246199 GN=folE PE=3 SV=1
MDREKIEYHIRGLLEAIGEDPDREGLKETPARVARMMEEVLEGTKYSNHEIAQMFSKTFAEEGSSADEAVVMKDITVFSYCEHHMALMYDMTVNVGYIPHGKVLGLSKIARICDMAAKRLQLQERLGRDIAEIISEAAGTPDVGVKIVGSHSCMTARGIKNVSARTETRTYLGQFKERQELKDMLI

SEQ ID NO: 14270 - protein, 186 aa, Ruminococcus callidus
  misc_feature (1)..(186): tr|U2K9L0|U2K9L0_9FIRM GTP cyclohydrolase 1 OS=Ruminoco ccus callidus ATCC 27760 OX=411473 GN=folE PE=3 SV=1
MDTKAIETHIRGILEAIGEDPDREGLRETPQRVARMYEEIFAGISYSNHEIAEMFGKTFEAPSPSQSQTAVVMKDISVFSYCEHHMALMYDMNVNVAYVPRGRVIGLSKIARICDMASKRLQLQERLGQDIAEILMEAVGTPDVGVVITGSHSCMTARGIRNVSSRTTTKTFCGAFQTDRSLQELL

SEQ ID NO: 14271 - protein, 183 aa, Ruminococcus champanellensis
  misc_feature (1)..(183): tr|D4L9T8|D4L9T8_RUMC1 GTP cyclohydrolase 1 OS=Ruminoco ccus champanellensis (strain DSM 18848 / JCM 17042 / KC TC 15320 / 18P13) OX=213810 GN=folE PE=3 SV=1
MDAEKIRQGVRLLLEGIGEDPEREGLRDTPDRVARMYAELFAGYADSASTHLSTTFASPDSEMVLEKDITFYSTCEHHLLPFFGKVHIAYIPDGRVVGISKLARTVEVFARRLQIQEQMTAQIADALMAELHPKGAMVAVDAEHTCMTMRGIKKPGTRTLTYCSRGAFAKDPELKREFFSLVR

SEQ ID NO: 14272 - protein, 189 aa, Ruminococcus flavefaciens
  misc_feature (1)..(189): tr|A0A1H6KTZ5|A0A1H6KTZ5_RUMFL GTP cyclohydrolase 1 OS= Ruminococcus flavefaciens OX=1265 GN=folE PE=3 SV=1
MDREAIEYHVLGILKAIGEDPEREGLKETPARVARMLEEVLEGTAYTNHQIAEMFGKTFEADYDADMDSAVVMKDITVFSYCEHHIALMYDMSVNVAYIPHGKVLGLSKIARICDMAAKRLQLQERLGRDIAEIISEAAGTPDVGVMIRGSHSCMTARGIRNPNAKTVTGTFMGAFRDSAELKDLVKFD

SEQ ID NO: 14273 - protein, 184 aa, Ruminococcus flavefaciens
  misc_feature (1)..(184): tr|W7UKV8|W7UKV8_RUMFL GTP cyclohydrolase 1 OS=Ruminoco ccus flavefaciens 007c OX=1341157 GN=folE PE=3 SV=1
MDTKAIELHIKGILEALGEDPEREGLKETPQRVARMMEEVFEGIGYTNHEIARMFGKTFEAADDSTAVVMKDITVFSYCEHHMALMYDMTVDVAYIPRGRVLGLSKIARICDMAAKRLQLQERLGSDIAEIIAEASGSPDVGVVIKGSHSCMTARGIRNPSSRTVTKTWRGEFRNDPELRKLLD

SEQ ID NO: 14274 - protein, 186 aa, Ruminococcus gnavus
  misc_feature (1)..(186): tr|A0A415S6D5|A0A415S6D5_RUMGN GTP cyclohydrolase 1 OS= Ruminococcus gnavus OX=33038 GN=folE PE=3 SV=1
MIDQEKVKKAVRLLLEGIGEDADREGLIETPDRIARMCEEIYGGYEEDAKEHLCKTFHVENSDMVVEKDITFYSMCEHHLLPFYGKAHIAYIPDGKVAGLSKLARTVEVFARRLQLQEQLTGQIADALMNELKAKGAAVVIEAEHMCMTMRGIKKPGSRTVTFAKRGLFETDPALEERFFRMLERG

SEQ ID NO: 14275 - protein, 253 aa, Ruminococcus gnavus
  misc_feature (1)..(253): tr|A0A415S9D3|A0A415S9D3_RUMGN GTP cyclohydrolase FolE2 OS=Ruminococcus gnavus OX=33038 GN=folE2 PE=3 SV=1
MIDIQKSLENRGIFLDKVGIRGFQRPIQLQIGTEVCPTVANLNAYVSLKADERAIHMSRLIEILQMWDGTVNNQTILHLLSSMRKRLESDNSYLEIMFPYFMKKSAPVSQKIGFMNYDCIISARLNHEQVHFDITVITQITSVCPCSKAISQYGAHNQRGKVKVKINDFDICDLKKVIEIIEESGSSQLYSVLKRKDEKFVTEAAFNSPKFVEDIARDVNINIKNKTNWNISDLSVENYESIHNHNAYSEICR

SEQ ID NO: 14276 - protein, 189 aa, Ruminococcus lactaris
  misc_feature (1)..(189): tr|V8BL86|V8BL86_9FIRM GTP cyclohydrolase 1 OS=Ruminoco ccus lactaris CC59_002D OX=1073376 GN=folE PE=3 SV=1
MIDTKAIEEHIRGILVALGDDPEREGLKDTPKRVAKMYEEVFLGMNYSNHEIAQMFDKTFEDGIEELDTSKVVVMKDIDLFSYCEHHMALMYDMKATVAYIPNGKVIGLSKIARICDMVGRRLQLQERIGQDIADIMAEITGSEDVAVVLEGYHSCVSARGIKKNNTRTMTVELRGSFKDDAALQMYLR

SEQ ID NO: 14277 - protein, 185 aa, Ruminococcus lactaris
  misc_feature (1)..(185): tr|A0A3E4LPQ0|A0A3E4LPQ0_9FIRM GTP cyclohydrolase 1 OS= Ruminococcus lactaris OX=46228 GN=folE PE=3 SV=1
MIDHEKIEQAVRLLLEGIGEDVNREGLLETPDRIARMYEEIYGGMEEDAGIHLSKTFTVESREMVIEKDITFYSTCEHHLLPFYGKAHIAYIPDGKVVGLSKLARTVEVFARRLQLQEQLTGQIADALMEYMQPKGALVMIEAEHMCMTMRGIKKPGSQTVTLARRGVFETDPSLEERFFRMLGR

SEQ ID NO: 14278 - protein, 185 aa, Ruminococcus obeum; identical to SEQ ID NO: 5599
  misc_feature (1)..(185): tr|R7D7Y6|R7D7Y6_9FIRM GTP cyclohydrolase 1 OS=Ruminoco ccus obeum CAG:39 OX=1263107 GN=folE PE=3 SV=1

SEQ ID NO: 14279 - protein, 185 aa, Ruminococcus sp.; identical to SEQ ID NO: 5605
  misc_feature (1)..(185): tr|A0A417L5P4|A0A417L5P4_9FIRM GTP cyclohydrolase 1 OS= Ruminococcus sp. TM09-4 OX=2293244 GN=folE PE=3 SV=1

SEQ ID NO: 14280 - protein, 185 aa, Ruminococcus sp.
  misc_feature (1)..(185): tr|A0A416J194|A0A416J194_9FIRM GTP cyclohydrolase 1 OS= Ruminococcus sp. AM54-14NS OX=2293225 GN=folE PE=3 SV=1
MVDKAKIEQAVRLLLEGIGEDITREGLIDTPDRIARMCEEIYGGLGHEADQHLLKQFPVENNEIVLEKDITFYSMCEHHLMPFYGKAHLAYIPNGKVTGLSKLARTVEVYSRRPQIQERLTVQIADALERTLDPKGIMVMLEAEHTCMTMRGIKKPGSKTITTVTRGAFTEDKELQKMFLSMVKG

SEQ ID NO: 14281 - protein, 185 aa, [Ruminococcus] torques
  misc_feature (1)..(185): tr|D4M1W6|D4M1W6_9FIRM GTP cyclohydrolase 1 OS=[Ruminoc occus] torques L2-14 OX=657313 GN=folE PE=3 SV=1
MIDHEKVEQAVRLLLEGIGEDVNREGLIDTPDRIARMYEEIYGGMEEDAGVHLMKTFTVESSEMVIEKDITFYSTCEHHLLPFYGKAHIAYIPDGKVVGLSKLARTVEVFARRLQLQEQLTGQIADALMEYMQPKGALVMVEAEHMCMTMRGIKKPGSQTVTLARRGVFETDPTLEERFFRMLGR

SEQ ID NO: 14282 - protein, 186 aa, [Ruminococcus] torques
  misc_feature (1)..(186): tr|A0A174A061|A0A174A061_9FIRM GTP cyclohydrolase 1 OS= [Ruminococcus] torques OX=33039 GN=folE PE=3 SV=1
MIDQEKVKKAVRLLLEGIGEDADREGLIETPDRIARMCEEIYGGYEEDAKEHLCKTFHVENSDMVVEKDITFYSMCEHHLLPFYGKAHIAYIPDGKVAGLSKLARTVEGFARRLQLQEQLTGQIADALMNELKAKGAAVVIEAEHMCMTMRGIKKPGSRTVTFAKRGLFETDPALEERFFRMLERG

SEQ ID NO: 14283 - protein, 202 aa, Rummeliibacillus sp.
  misc_feature (1)..(202): tr|A0A3N5ZQC8|A0A3N5ZQC8_9BACL GTP cyclohydrolase 1 OS= Rummeliibacillus sp. TYF005 OX=2058214 GN=folE PE=3 SV= 1
MLIEKNFEKIDQVSTDVDLKKIETAVTMILEAVGENPLREGLLDTPKRVAKMYAEMFQGLHEDPRQYFETVFHEGHDELVLVKDIPFYSMCEHHLVPFYGKAHIAYIPQNGVVAGLSKLARTVETVSHRPQLQERITGTIADTLMEMLNPKGVYVVVEAEHMCMTMRGIKKPGAKTVTSVAKGIFEEDEVKRSEILSFIQMS

SEQ ID NO: 14284 - protein, 201 aa, Rummeliibacillus stabekisii
  misc_feature (1)..(201): tr|A0A511BV06|A0A511BV06_9BACL GTP cyclohydrolase 1 OS= Rummeliibacillus stabekisii OX=241244 GN=folE PE=3 SV=1
MINIKEEKIDHSNSNVDLNKIEQAVKMILEAVGENPDREGLLDTPKRVAKMYAEMFQGLHIDAREYFKTVFHEEHNEVVLVKDIPFYSMCEHHLVPFYGKAHIAYLPKDGVVAGLSKLARTVETISHRPQLQERITSEIAETMMEMLEPEGVYVVVEAEHMCMTMRGIKKPGAKTVTSSAKGIFSEDDVKRQEILSFIKMA

SEQ ID NO: 14285 - protein, 201 aa, Rummeliibacillus stabekisii
  misc_feature (1)..(201): tr|A0A143HAW6|A0A143HAW6_9BACL GTP cyclohydrolase 1 OS= Rummeliibacillus stabekisii OX=241244 GN=folE PE=3 SV=1
MINIKEEKIDHSNSNVDLNKIEQAVKMILEAVGENPDREGLLDTPKRVAKMYAEMFQGLHIDARDYFKTVFHEEHNEVVLVKDIPFYSMCEHHLVPFYGKAHIAYLPKGGVVAGLSKLARTVETISHRPQLQERITSEIAETMMEMLEPEGVYVVVEAEHMCMTMRGIKKPGAKTVTSSAKGIFSEDDVKRQEILSFIKMA

SEQ ID NO: 14286 - protein, 232 aa, Runella sp.
  misc_feature (1)..(232): tr|A0A3C1THV6|A0A3C1THV6_9BACT GTP cyclohydrolase 1 OS= Runella sp. OX=1960881 GN=folE PE=3 SV=1
MKQNETLWNTLPNHADLGELNIDDWGDDHLFSAYNTPLREDAFELSDVEKVAKIEGHFRAIMETLGLDLTDDSLNGTPHRVAKMYVKELFSGLNPANKPKATLFENKYKYNEMLVEKDISFYSNCEHHFVPIFGKAHVAYISSGKVIGLSKLNRIVQYFAKRPQVQERLTVQIAKELQQILQTEDVAIIMDAKHLCVASRGVQDDSSSTVTAFYGGKFQEDSTKSEFLKYLA

SEQ ID NO: 14287 - protein, 231 aa, Runella sp.
  misc_feature (1)..(231): tr|A0A344TRI5|A0A344TRI5_9BACT GTP cyclohydrolase 1 OS= Runella sp. HYN0085 OX=2259595 GN=folE PE=3 SV=1
MKPNETLWNTPREAADFVDLNIDEWGDDHSLSAYDTPMREDAFELSDVEKVAKIELHFKEIMETLGLDLTDDSLKGTPHRVAKMYVKEIFSGLNPKNKPKATLFENKYNYNEMLVEKDISFYSNCEHHFVPIFGKAHVAYISSGKVIGLSKLNRIVQYFAKRPQVQERLTVQIGKELQQILQTEDVAVVMDAKHLCVASRGIQDDTSTTITSFYGGKFKEDATKNEFLKYL

SEQ ID NO: 14288 - protein, 264 aa, Ruthia magnifica
  misc_feature (1)..(264): sp|A1AVX5|GCH4_RUTMC GTP cyclohydrolase FolE2 OS=Ruthia magnifica subsp. Calyptogena magnifica OX=413404 GN=fo lE2 PE=3 SV=1
MSAIHLPDTQNSADTRQIIIDKVGIKDITHPITYIDCDGNKIPTIGIFTMTVSLSERVKGTHMSRFIEILNEGPCEFSAHNFDKIIDKVRKRLESDIAHITLNFTFFRRKKAPSSGVESMMDYQVTLYGTLNKDEVQVMMKVVVPVTSLCPCSKSISKYGAHNQRSHITIKAKAAKDKTLHIEDLIDLAERKASCELYAILKRDDEKVVTERAYDNPAFVEDLVRDIAVDLNADDKISYYRLESENFESIHNHSAYALIENQKC

SEQ ID NO: 14289 - protein, 197 aa, Saccharibacillus sp.
  misc_feature (1)..(197): tr|A0A209DIB1|A0A209DIB1_9BACL GTP cyclohydrolase 1 OS= Saccharibacillus sp. O16 OX=1978120 GN=folE PE=3 SV=1
MSGVNDYTNKQVGDNREQIEHHIAKILELIGENPQREGLLETPARVTRMYEEIFAGYSVDPREALGVTFDEHHEELVIVKDIVYYSQCEHHMAPFFGKIHIGYIPNGRIAGLSKFARLAEAVTRRLQVQERITTQIADLLVEVLQPKGVMVVVEGEHLCMCARGVKKPGSKTVTTAVRGVLRNDAAQRAECLALIKD

SEQ ID NO: 14290 - protein, 306 aa, Saccharibacillus sp.
  misc_feature (1)..(306): tr|A0A254NM38|A0A254NM38_9BACL GTP cyclohydrolase FolE2 OS=Saccharibacillus sp. O23 OX=2009338 GN=folE2 PE=3 S V=1
MPHPSFPSKKERHRRFGSVPPTPGSKATRKEDMTDLQNALDDYLFDIQSVGVAAVKHPILFLSPLAPYEQMPIATLELTTTLDRSSKGINMSRLTEQLEMYRDFDFTSDSGKLGQFARDLAQNMNQRGATVKLAFPWFYERTAPESGQTGLAYCDLYMEMSYEQGIESPFRLTVGLDASVTTLCPCSKEISEYGAHNQRGTVHIRTEVDLKQFHENWCQVLLDAAESNASSMLYPILKRTDEKKVTERAYENPRFVEDLARLVAADLIECPFARQFTVECRNEESIHQHNAIARIVWTEEDQKRRY

SEQ ID NO: 14291 - protein, 213 aa, Saccharibacter sp.; identical to SEQ ID NO: 12369
  misc_feature (1)..(213): tr|A0A060QFD8|A0A060QFD8_9PROT GTP cyclohydrolase 1 OS= Saccharibacter sp. AM169 OX=1343158 GN=folE PE=3 SV=1

SEQ ID NO: 14292 - protein, 190 aa, Saccharomonospora azurea
  misc_feature (1)..(190): tr|H0K9I0|H0K9I0_9PSEU GTP cyclohydrolase 1 OS=Saccharo monospora azurea SZMC 14600 OX=1114959 GN=folE PE=3 SV= 1
MFDQERAERAVRELLLACGEDPDRDGLRETPARVARAYREMFAGLYSDPDHVLDRTFDESHEELVLVTDIPMFSLCEHHLTPFHGVAHVGYIPNGQGKVTGLSKLGRLVDLYAKRPQVQERLTSQVADALNRRLRPRGVIVVMEAEHLCMSMRGVRKPGARTITSAVRGLLQTSASSRAEALELIKGGRR

SEQ ID NO: 14293 - protein, 211 aa, Saccharomonospora azurea
  misc_feature (1)..(211): tr|H8G5P4|H8G5P4_9PSEU GTP cyclohydrolase 1 OS=Saccharo monospora azurea NA-128 OX=882081 GN=folE PE=3 SV=1
MTGNGYSPLEVDAELPRAGHAVFDQERAERAVRELLLACGEDPDRDGLRETPARVARAYREMFAGLYSDPDHVLDRTFDESHEELVLVTDIPMFSLCEHHLTPFHGVAHVGYIPNGQGKVTGLSKLGRLVDLYAKRPQVQERLTSQVADALNRRLRPRGVIVVMEAEHLCMSMRGVRKPGARTITSAVRGLLQTSASSRAEALELIKGGRR

SEQ ID NO: 14294 - protein, 217 aa, Saccharomonospora cyanea
  misc_feature (1)..(217): tr|H5XK68|H5XK68_9PSEU GTP cyclohydrolase 1 OS=Saccharo monospora cyanea NA-134 OX=882082 GN=folE PE=3 SV=1
MIGEGRDVTGNGHSPLGVDAELPRAGHAVFDQERAERAIRELLLACGEDPERDGLRETPARVARAYREMFAGLYTEPDHVLDRTFDESHEELVLVTDIPMFSLCEHHLTPFHGVAHIGYIPNGQGKVTGLSKLARLVDLYAKRPQVQERLTSQVADALNRKLRPRGVIVVIEAEHLCMSMRGVRKPGARTTTSAVRGLLQTSASSRAEALQLIKGRR

SEQ ID NO: 14295 - protein, 217 aa, Saccharomonospora glauca
  misc_feature (1)..(217): tr|I1D772|I1D772_9PSEU GTP cyclohydrolase 1 OS=Saccharo monospora glauca K62 OX=928724 GN=folE PE=3 SV=1
MIGEGSDVRANGHSPLEVDAELPRSGHAVFDQERAERAIRELLLACGEDPEREGLRETPARVARAYREMFAGLYTDPDHVLDRTFDESHEEMVLVTDIPMFSLCEHHLTPFHGVAHVGYIPNGQGKVTGLSKLARLVDLYAKRPQVQERLTSQVADALNRKLRPRGVIVVIEAEHLCMSMRGVRKPGARTTTSAVRGLLQTSASSRAEALQLIKGRR

SEQ ID NO: 14296 - protein, 215 aa, Saccharomonospora marina
  misc_feature (1)..(215): tr|H5X6L2|H5X6L2_9PSEU GTP cyclohydrolase 1 OS=Saccharo monospora marina XMU15 OX=882083 GN=folE PE=3 SV=1
MSVSELEHSGQAGRLAVAGRRGPRVAGERAEPDLAAAERAVADLLLALGKDPDSEHLADTPRRVASSYAELLRPREFELTTFGNDEGYDELVVARDIPVQSLCEHHLLPFRGVAHIGYLPGERILGLSKLARVIELFARDLQVQERLTKQVADWLQQRLAPNGVGVVIEAEHLCMSLRGVRAQGALTVTSALHGALREDAASREEFFALTLRHTR

SEQ ID NO: 14297 - protein, 217 aa, Saccharomonospora marina
  misc_feature (1)..(217): tr|H5X225|H5X225_9PSEU GTP cyclohydrolase 1 OS=Saccharo monospora marina XMU15 OX=882083 GN=folE PE=3 SV=1
MTGKGSDVSGNGHGFLDVDAELPRVEGRVFDQARAERAVRELLLACGEDPDRDGLRETPARVARAYREMFAGLYSEPDHVLDRTFDESHEELVLVTDIPMFSMCEHHLTPFHGVAHVGYIPNGQGKVTGLSKLARLVDLYAKRPQVQERLTSQVADALYRKLRPRGVIVVIEAEHLCMAMRGIRKPGARTTTSAVRGLLQSSASSRAEALDLIKGRR

SEQ ID NO: 14298 - protein, 232 aa, Saccharomonospora sp.
  misc_feature (1)..(232): tr|A0A4P7CC03|A0A4P7CC03_9PSEU GTP cyclohydrolase 1 OS= Saccharomonospora sp. 31sw OX=2528243 GN=folE PE=3 SV=1
MIGEGSDVSDVSDVSDVPDVTGGTGNGYSPFEVDAELPRAGHAVFDEERAERAVRELLLACGEDPERDGLRETPARVARAYREMFAGLYTDPDHVLDRTFDESHEELVLVTDIPMFSLCEHHLTPFHGVAHVGYIPNGQGKVTGLSKLARLVDLYAKRPQVQERLTSQVADALNRKLRPRGVIVVIEAEHLCMSMRGVRKPGARTTTSAVRGLLQTSASSRAEALELIKGRR

SEQ ID NO: 14299 - protein, 214 aa, Saccharomonospora sp.
  misc_feature (1)..(214): tr|A0A1V9A706|A0A1V9A706_9PSEU GTP cyclohydrolase 1 OS= Saccharomonospora sp. LRS4.154 OX=1962155 GN=folE PE=3 SV=1
MTGDVTGNGHSPLEVDAELPRTGHAVFDQARAEHAIRELLLACGEDPERDGLRETPGRVARAYREMFAGLYSDPDHVLDRTFDESHEELVLVTDIPMYSLCEHHLTPFHGVAHVGYIPNGQGKVTGLSKLARLVDLYAKRPQVQERLTSQVADALNRKLRPRGVIVVVEAEHLCMAMRGVRKPGARTTTSAVRGLLQTSASSRAEALDLIKGRR

SEQ ID NO: 14300 - protein, 222 aa, Saccharomonospora viridis
  misc_feature (1)..(222): tr|C7MQJ3|C7MQJ3_SACVD GTP cyclohydrolase 1 OS=Saccharo monospora viridis (strain ATCC 15386 / DSM 43017 / JCM 3036 / NBRC 12207 / P101) OX=471857 GN=folE PE=3 SV=1
MIGEGSDVTTNGSSPLEVDPFEVDAERPEAGHAVFDQERAERAVREFLLACGEDPDRDGLRETPARVARAYRELFAGLYCDPDHVLDRTFDESHEELVLVTDIPIFSLCEHHLLPFHGVAHVGYIPNGQGKVTGLSKLARLVDMYAKRPQVQERLTSQVADALNRKLRPRGVIVVVEAEHLCMSMRGVRKPGSRTTTSAVRGLLQSSASSRAEALELIKGRR

SEQ ID NO: 14301 - protein, 215 aa, Saccharomonospora viridis
  misc_feature (1)..(215): tr|A0A1I5RSZ4|A0A1I5RSZ4_9PSEU GTP cyclohydrolase 1 OS= Saccharomonospora viridis OX=1852 GN=folE PE=3 SV=1
MTTNGSSPLEVDPFEVDAERPEAGHAVFDQERAERAVREFLLACGEDPDRDGLRETPARVARAYRELFAGLYCDPDHVLDRTFDESHEELVLVTDIPIFSLCEHHLLPFHGVAHVGYIPNGQGKVTGLSKLARLVDMYAKRPQVQERLTSQVADALNRKLRPRGVIVVVEAEHLCMSMRGVRKPGSRTTTSAVRGLLQSSASSRAEALELIKGRR

SEQ ID NO: 14302 - protein, 235 aa, Saccharomonospora xinjiangensis
  misc_feature (1)..(235): tr|I0V3P5|I0V3P5_9PSEU GTP cyclohydrolase 1 OS=Saccharo monospora xinjiangensis XJ-54 OX=882086 GN=folE PE=3 SV =1
MIGEGSDVSDVSDVADVADVTGGTGGTGNGYSPFEVDAELPRAGRAVFDQERAERAVRELLLACGEDPERDGLRETPARVARAYREMFAGLYTDPDHVLDRTFDESHEELVLVTDIPMFSLCEHHLTPFHGVAHVGYIPNGQGKVTGLSKLARLVDLYAKRPQVQERLTSQVADALNRKLRPRGVIVVIEAEHLCMSMRGVRKPGARTTTSAVRGLLQTSASSRAEALELIKGRR

SEQ ID NO: 14303 - protein, 179 aa, Saccharophagus degradans
  misc_feature (1)..(179): tr|Q21IX6|Q21IX6_SACD2 GTP cyclohydrolase 1 OS=Saccharo phagus degradans (strain 2-40 / ATCC 43961 / DSM 17024) OX=203122 GN=folE PE=3 SV=1
MKEYFAKIIESVGEDLTRPGLLDTPQRAATAMEFLTSGYKQTLDEVVNDALFPSDSNDMVIVKDIELFSMCEHHMLPFIGKAHVGYIPTGKVLGLSKIARIVDMYSRRLQIQEQLTKQIAETIQSVTGAAGVGVIIEAKHLCMMMRGVEKQNSSMRTSSMMGCFRSNLSTRSEFLSLLK

SEQ ID NO: 14304 - protein, 199 aa, Saccharopolyspora antimicrobica
  misc_feature (1)..(199): tr|A0A1I4U155|A0A1I4U155_9PSEU GTP cyclohydrolase 1 OS= Saccharopolyspora antimicrobica OX=455193 GN=folE PE=3 SV=1
MTSAPALRVAHEPAGEIDLGAAERAAGDLLRALGISTDSESLRGTPGRMARAYAELFTPRPFDLTTFPNDEGYDELVLARAIPVRSVCEHHLLPFVGTAHVGYLPGERILGLSKLARVVEHFSCRPQVQERLTKQVADWLCEHLRPQGVGVVIEAEHTCMTLRGVQATGSSTVTSTLLGTLRSDARSRQEFFALTGVNA

SEQ ID NO: 14305 - protein, 212 aa, Saccharopolyspora antimicrobica
  misc_feature (1)..(212): tr|A0A1I5G4X9|A0A1I5G4X9_9PSEU GTP cyclohydrolase 1 OS= Saccharopolyspora antimicrobica OX=455193 GN=folE PE=3 SV=1
MTSSVDEPIGTGDDSRPDGSFHAPQFDHARAEAAVRELLLAAGEDPEREGLRDTPARVARAYQELFAGLYTNPDEVLDKTFDEAHEELVLVRDIPVYSQCEHHLLPFHGYAHVGYIPNEKGRVTGLSKLARLVDLYAKRPQVQERLTSQIADALVRRLEPRGVIVVIDAEHLCMGMRGVRKAGSTTTTSAVRGQFRSSASSRSEALSLIRGR

SEQ ID NO: 14306 - protein, 535 aa, Saccharopolyspora dendranthemae
  misc_feature (1)..(535): tr|A0A561TZ39|A0A561TZ39_9PSEU GTP cyclohydrolase 1 OS= Saccharopolyspora dendranthemae OX=1181886 GN=folE PE=3 SV=1
MTNTVDEPIGAGDSRPDGSFHIPQFDQARAEAAVRELLLAAGENPERDGLKETPQRVARAYRELFAGLYTDPDEVLDKTFDEAHEELVLVRDIPVYSQCVPSKQTVNLVGGAKRARDVQLGDRFWTLVDGKVEQTEVVGVSSHEKRELVEVVTEKGRFQVTPDHPLATPQGWQEAKDVEGTYIEWTPPRKLCRQRWQPMVGYEFGYVLGALCSDGTVGDTCVSLVVNDRDFAKQFAYALDQAFGINASIEEVERPSGYLQRQVEGFRVRVVSSYLADLVRQYVGGDAHHQRQRFPRVVMSNEITFRGFLNGYVDGDGFRSKSGRGRMLTSMNAGFLADVAQVLGARFTQKSPDVSRLWVADDWPLRHGFSQESHRTDLIESQWVKVESVQRLEANGAKPYTVYSYKCEPHPTFLISGHLTHNCEHHLLPFHGNAHIGYIPNSQGRVTGLSKLARLVDLYAKRPQVQERLTSQVADALVRKLEPRGVIVVIDAEHLCMGMRGVRKAGSTTTTSAVRGIFRSSASSRSEALSLIRGR

SEQ ID NO: 14307 - protein, 199 aa, Saccharopolyspora dendranthemae
  misc_feature (1)..(199): tr|A0A561V797|A0A561V797_9PSEU GTP cyclohydrolase 1 OS= Saccharopolyspora dendranthemae OX=1181886 GN=folE PE=3 SV=1
MTHSTALRVVHQPDTGIDLEAAERAAGQLLRALGISTDSESLSGTPGRIARAYAELFTPRPFDLTTFPNDEGYDEMVLARSIPVRSVCEHHLLPFVGVAHVGYLPGERILGLSKLARIVEHFACRPQVQERLTKQVADWLSEHLQPKGVGVVIEAEHTCMTLRGARATGASTVTSTLLGTLRDDARSRQEFFSLTGVHR

SEQ ID NO: 14308 - protein, 198 aa, Saccharopolyspora erythraea
  misc_feature (1)..(198): tr|A4FIT5|A4FIT5_SACEN GTP cyclohydrolase 1 OS=Saccharo polyspora erythraea (strain ATCC 11635 / DSM 40517 / JC M 4748 / NBRC 13426 / NCIMB 8594 / NRRL 2338) OX=405948 GN=folE2 PE=3 SV=1
MSAPALHVVHQPEAEIDLAAAEKAAADMLRALGISTDSESLRGTPGRMARAYAELFSPRPFDLTTFPNEEGYDELVLARSIPVRSVCEHHLLPFVGTAHVGYLPGERILGLSKLARVVEHFACRPQVQERLTKQVADWLSEQLEPKGVGVVIEAEHTCMTLRGVQATGSNTVTSTMLGTLRQDARSRQEFFALTGVNA

SEQ ID NO: 14309 - protein, 213 aa, Saccharopolyspora erythraea
  misc_feature (1)..(213): tr|A4F6S1|A4F6S1_SACEN GTP cyclohydrolase 1 OS=Saccharo polyspora erythraea (strain ATCC 11635 / DSM 40517 / JC M 4748 / NBRC 13426 / NCIMB 8594 / NRRL 2338) OX=405948 GN=folE PE=3 SV=1
MTSTVGEPVGPEEDSGPGRSAFHNPVFDQERAEAAIRELLLAAGEDPDREGLRETPARVARAYRELFAGLYTDPDQVLDRTFDEAHEELVLVREIPMYSQCEHHLLPFHGVAHVGYIPNEKGRVTGLSKLARLVDLYAKRPQVQERLTSQVADALMRRLEPRGVIVVIEAEHLCMGMRGIRKAGSMTTTSAVRGIFRSSASSRSEALSLIRGT

SEQ ID NO: 14310 - protein, 211 aa, Saccharopolyspora flava
  misc_feature (1)..(211): tr|A0A1I6QXG9|A0A1I6QXG9_9PSEU GTP cyclohydrolase 1 OS= Saccharopolyspora flava OX=95161 GN=folE PE=3 SV=1
MTNAVDEPIGAGDSRPDGSFHMPQFDQARAEAAIRELLIAAGEDPDRDGLRETPQRVARAYRELFAGLYTNPDEVLDKTFDEAHEELVLVRDIPVYSQCEHHLLPFHGTAHIGYIPNEQGRVTGLSKLARLVDLYAKRPQVQERLTSQVADALVRRLEPRGVIVVIDAEHLCMGMRGVRKAGSTTTTSAVRGIFRSSASSRSEALSLIRGR

SEQ ID NO: 14311 - protein, 212 aa, Saccharopolyspora hirsuta
  misc_feature (1)..(212): tr|A0A1H6ELG9|A0A1H6ELG9_SACHI GTP cyclohydrolase 1 OS= Saccharopolyspora hirsuta OX=1837 GN=folE PE=3 SV=1
MTSSVDEPIGAGGDSRPDGSFHAPQFDHARAEAAVRELLLAAGEDPEREGLRDTPARVARAYQELFAGLYTNPDEVLDKTFDEAHEELVLVRDIPVYSQCEHHLLPFHGYAHVGYIPNEKGRVTGLSKLARLVDLYAKRPQVQERLTSQVADALVRRLEPRGVIVVIDAEHLCMGMRGVRKAGSTTTTSAVRGQFRSSASSRSEALSLIRGR

SEQ ID NO: 14312 - protein, 199 aa, Saccharopolyspora hirsuta
  misc_feature (1)..(199): tr|A0A1H5ZEB9|A0A1H5ZEB9_SACHI GTP cyclohydrolase 1 OS= Saccharopolyspora hirsuta OX=1837 GN=folE PE=3 SV=1
MTSAPALRVAHEPAGEIDLGAAERAAGDLLRALGISTDSESLRGTPGRMARAYAELFTPRPFDLTTFPNDEGYDELVLARSIPVRSVCEHHLLPFVGTAHVGYLPGERILGLSKLARVVEHFSCRPQVQERLTKQVADWLCEHLRPQGVGVVVEAEHTCMTLRGVQATGSSTVTSTLLGTLRSDARSRQEFFSLTGVNA

SEQ ID NO: 14313 - protein, 199 aa, Saccharopolyspora jiangxiensis; identical to SEQ ID NO: 14312
  misc_feature (1)..(199): tr|A0A1I2GIN8|A0A1I2GIN8_9PSEU GTP cyclohydrolase 1 OS= Saccharopolyspora jiangxiensis OX=418522 GN=folE PE=3 S V=1

SEQ ID NO: 14314 - protein, 212 aa, Saccharopolyspora jiangxiensis; identical to SEQ ID NO: 14311
  misc_feature (1)..(212): tr|A0A1I2EJ46|A0A1I2EJ46_9PSEU GTP cyclohydrolase 1 OS= Saccharopolyspora jiangxiensis OX=418522 GN=folE PE=3 S V=1

SEQ ID NO: 14315 - protein, 214 aa, Saccharopolyspora rectivirgula
  misc_feature (1)..(214): tr|A0A073B7R1|A0A073B7R1_9PSEU GTP cyclohydrolase 1 OS= Saccharopolyspora rectivirgula OX=28042 GN=folE PE=3 SV =1
MTSVVGEPFGLDDEDELQPDGSANVREFDQQRAEAAIRELLLAVGEDPDREGLQETPARVARAYRELFAGLHTNPDRVLDKTFDESHEELVLVREIPVYSTCEHHLLPFHGMAHIGYIPNDQGRVTGLSKLARLVDLYAKRPQVQERLTSQVADALVRRLQPRGVIVVIEAEHLCMGMRGVRKAGAITTTSAVRGIFRSSTSSRAEALSLIRGK

SEQ ID NO: 14316 - protein, 198 aa, Saccharopolyspora shandongensis
  misc_feature (1)..(198): tr|A0A1H3RIC3|A0A1H3RIC3_9PSEU GTP cyclohydrolase 1 OS= Saccharopolyspora shandongensis OX=418495 GN=folE PE=3 SV=1
MSALAQHVVHQPEGEIDLAAAEKAAGDLLRALGISTDSESLLGTPGRMARAYAELFSPRPFDLTTFPNEEEYDELVLARSIPVRSVCEHHLLPFVGVAHVGYLPGDRILGLSKLARVVEHFACRPQVQERLTKQVADWLCEQLNPKGVGVVIEAEHTCMTLRGVQATGSNTVTSTLLGTLRQDARSRQEFFALTGVNA

SEQ ID NO: 14317 - protein, 212 aa, Saccharopolyspora shandongensis
  misc_feature (1)..(212): tr|A0A1H3HAT4|A0A1H3HAT4_9PSEU GTP cyclohydrolase 1 OS= Saccharopolyspora shandongensis OX=418495 GN=folE PE=3 SV=1
MTSTVDEPIGAEGDFRPDGSFHTPHFDQARAEAAVRELLIAAGEDPDREGLRDTPARVARAYRELFAGLYTNPDEVLDRTFDEAHEELVLVRDIPVYSQCEHHLLPFHGNAHVGYIPNEQGRVTGLSKLARLVDLYAKRPQVQERLTSQVADALVRRLDPRGVIVVIDAEHLCMGMRGVRKAGSTTTTSAVRGIFRSSASSRSEALSLIRGR

SEQ ID NO: 14318 - protein, 211 aa, Saccharopolyspora sp.
  misc_feature (1)..(211): tr|A0A4R4UC73|A0A4R4UC73_9PSEU GTP cyclohydrolase 1 OS= Saccharopolyspora sp. 16K404 OX=2530385 GN=folE PE=3 SV =1
MTSAVDEPFGAGDSRPDGSSHLPQFDQARAEAAIRELLIAAGEDPEREGLRETPQRVARAYQELFAGLYTDPDEVLDKTFDEAHEELVLVRDIPVYSQCEHHLLPFHGTAHIGYIPNSQGRVTGLSKLARLVDLYAKRPQVQERLTSQVADALVRRLEPRGVIVVIDAEHLCMGMRGVRKAGSTTTTSAVRGIFRSSASSRSEALSLIRGR

SEQ ID NO: 14319 - protein, 211 aa, Saccharopolyspora sp.
  misc_feature (1)..(211): tr|A0A4R4VU32|A0A4R4VU32_9PSEU GTP cyclohydrolase 1 OS= Saccharopolyspora sp. 16K309 OX=2530384 GN=folE PE=3 SV =1
MTSAVDEPIGAGDSRPDGSSHLPQFDQARAEAAIRELLIAAGEDPERDGLRETPQRVARAYQELFAGLYTDPDEVLDKTFDEAHEELVLVRDIPVYSQCEHHLLPFHGTAHIGYIPNSQGRVTGLSKLARLVDLYAKRPQVQERLTSQVADALVRRLEPRGVIVVIDAEHLCMGMRGVRKAGSTTTTSAVRGIFRSSASSRSEALSLIRGR

SEQ ID NO: 14320 - protein, 536 aa, Saccharopolyspora spinosa
  misc_feature (1)..(536): tr|A0A2N3XT32|A0A2N3XT32_SACSN GTP cyclohydrolase 1 OS= Saccharopolyspora spinosa OX=60894 GN=folE PE=3 SV=1
MTSTVDEPIGAGGDSRPDGSFHIPQFDHARAEAAVRELLLAAGEDPDREGLRDTPARVARAYHELFAGLYTNPDEVLDKTFDEAHEELVLVRDIPVYSQCVPSKQTVNLVGGAKPARDVRIGDRFWTLVDGKVEQTEVVEVSSHQKRELVEVVTEKGRFQVTPDHPLATPQGWQEAKDVAGTYIEWTPPKKLCRQRWQPKIGYEFGYALGALCSDGTVGDHYVSLVVNDRDVAKNFAYALDQAFGTDAAIEEIERPSGHLQRQVEGFRVRVVSSYLADLVRQYVGGDAHHQRQRFPRVVMSNETTFRGFLDGCVDGDGCRMSSRRFRVITGRNVPFLDDIARVISARFTPSLTQASELYVSDDWILRHGFAQESHRTDLIESQWVKVESVRSLEASGAEPYTVHSFKCDPHPTFLINGHLTHNCEHHLLPFHGVAHIGYIPNEMGRVTGLSKLARLVDLYAKRPQVQERLTSQVADALVRRLEPRGVIVVIDAEHLCMGMRGVRKAGSTTTTSAVRGQFRSSASSRSEALSLIRGR

SEQ ID NO: 14321 - protein, 198 aa, Saccharopolyspora spinosa
  misc_feature (1)..(198): tr|A0A2N3XVR9|A0A2N3XVR9_SACSN GTP cyclohydrolase 1 OS= Saccharopolyspora spinosa OX=60894 GN=folE PE=3 SV=1
MSAPVLHVAHQPDGEIDLAAAEKAAGDLLRALGISTDSESLSGTPGRMARAYAELFTPRPFDLTTFPNEEQYDELVLARAIPVRSVCEHHLLPFVGTAHVGYLPGDRILGLSKLARVVEHFACRPQVQERLTKQVADWLCEQLEPKGVGVVIEAEHTCMTLRGVQATGSNTVTSTLLGTLRQDARSRQEFFALTGVNA

SEQ ID NO: 14322 - protein, 186 aa, Saccharospirillum sp.
  misc_feature (1)..(186): tr|A0A2T6E6B0|A0A2T6E6B0_9GAMM GTP cyclohydrolase 1 OS= Saccharospirillum sp. MSK14-1 OX=1897632 GN=folE PE=3 S V=1
MPPSLSDHYRNIILELGEDPERNGLQKTPERAAKAMSFLTEGYGQSLETVTNDAVFEADNDEMVVVKDIEFYSLCEHHLLPFFGKAHIAYIPNGKVLGLSKFARITDMYARRLQIQEQLTKQIADAIQTVTDAKGVGVILEAKHMCMTMRGVQKQNSWMTTSMMLGGLRHSQNTRNEFLNLIGQHS

SEQ ID NO: 14323 - protein, 213 aa, Saccharospirillum sp.
  misc_feature (1)..(213): tr|A0A2T6E2P5|A0A2T6E2P5_9GAMM GTP cyclohydrolase 1 OS= Saccharospirillum sp. MSK14-1 OX=1897632 GN=folE PE=3 S V=1
MLSNEALAVQEALIARGLETPMVPNDLNRDQKVDRIERLMAEVAGTLGLDLADDSLAETPLRIAKMYVDEVFSGLDYQHFPKITQIDNKMNVSEMVRVRDIEVLSTCEHHFITIDGLATVAYLPKQTVIGLSKINRIVRFFAQRPQIQERLTQQVLVALQTLLGTDDVAVQIDATHYCVKARGVRDAQSRTETQALGGVFLQDAARRREFLGA

SEQ ID NO: 14324 - protein, 196 aa, Saccharothrix australiensis
  misc_feature (1)..(196): tr|A0A495VWN3|A0A495VWN3_9PSEU GTP cyclohydrolase 1 OS= Saccharothrix australiensis OX=2072 GN=C8E97_2403 PE=3 SV=1
MSFTIPEVVDGVELVGGAAPARTPDPLEGLARQLLVEIGEDPDRDGLRGTPARYARWWREFTDYDPGRIETVFQSVGSDQLVEVNDIKVWSLCEHHLLPFWCEVSIAYVARGRLLGLSKFARIAHDHAHRLQIQERLTQGIADAVVEASGSPDVAVRATGEHLCMTMRGIRTGARMNTSVLRGVFQSDPQMRARLS

SEQ ID NO: 14325 - protein, 210 aa, Saccharothrix australiensis
  misc_feature (1)..(210): tr|A0A495VSF5|A0A495VSF5_9PSEU GTP cyclohydrolase 1 OS= Saccharothrix australiensis OX=2072 GN=folE PE=3 SV=1
MTEIDQTGLPASGEAGSTRRAFDQRRAEAAVRELLLACGEDPEREGLRETPARVARAYRELFAGLYTDPDSVLAKTFDESHEELVLVTDIPMFSFCEHHLLPFHGVAHVGYIPNEHGRVTGLSKLARLVDLYAKRPQVQERLTSQIADALVRRLEPGGVIVVVEAEHLCMGMRGVRKPGSRTTTSAVRGLLRSSSSTRAEAIELIRGRTR

SEQ ID NO: 14326 - protein, 214 aa, Saccharothrix carnea
  misc_feature (1)..(214): tr|A0A2P8IB58|A0A2P8IB58_9PSEU GTP cyclohydrolase 1 OS= Saccharothrix carnea OX=1280637 GN=folE PE=3 SV=1
MTEHDTALDQTGLSANGGAGLARRPFDQKRAEAAVRELLLACGEDPEREGLRDTPARVARAYRELFAGLHTDPDSVLARTFDESHEELVLVTDIPMFSFCEHHLLPFHGVAHVGYIPNEHGRVTGLSKLARLVDLYAKRPQVQERLTSQVADALMRRLDPRGVIVVVEAEHLCMAMRGVRKPGSRTTTSAVRGLLRDSATSRSEAIELIKGRLR

SEQ ID NO: 14327 - protein, 210 aa, Saccharothrix espanaensis
  misc_feature (1)..(210): tr|K0JR27|K0JR27_SACES GTP cyclohydrolase 1 OS=Saccharo thrix espanaensis (strain ATCC 51144 / DSM 44229 / JCM 9112 / NBRC 15066 / NRRL 15764) OX=1179773 GN=folE PE=3 SV=1
MTEIDQAGLSVTGEAGSTRRTFDQKRAEAAVRELLLACGEDPDREGLQETPARVARAYRELFAGLYTDPDSVLAKTFDESHEELVLVTDIPMFSFCEHHLLPFHGVAHVGYIPNEHGRVTGLSKLARLVDLYSKRPQVQERLTSQVADALVRRLEPRGVIVVIEAEHLCMGMRGVRKPGSRTTTSAVRGILRSSASSRAEAIELIRGRTR

SEQ ID NO: 14328 - protein, 211 aa, Saccharothrix saharensis
  misc_feature (1)..(211): tr|A0A543JQ42|A0A543JQ42_9PSEU GTP cyclohydrolase 1 OS= Saccharothrix saharensis OX=571190 GN=folE PE=3 SV=1
MTTLARQPSFDPPAGSHRRPHPVHGRPGVDVEAARRAVADLLVALGKDPASEHLADTPRRVAHAYAEMLTPREFDLTTFPNEEGYDELVLARGIPVQSLCEHHMLPFQGVAHVGYLPGERILGLSKLARVVELFARDLQVQERLTKQVAGWLLEHLAPRGVGVVVEAEHLCLSLRGVRAAGSRTVTSAMLGALRDDARTRQEFFALTGVRA

SEQ ID NO: 14329 - protein, 214 aa, Saccharothrix saharensis
  misc_feature (1)..(214): tr|A0A543JFJ6|A0A543JFJ6_9PSEU GTP cyclohydrolase 1 OS= Saccharothrix saharensis OX=571190 GN=folE PE=3 SV=1
MTEHGTAIDQTGLSVNGGAGLARRPFDQKRAEAAVRELLLACGEDPEREGLRDTPARVARAYRELFAGLHTDPDGVLARTFDESHEELVLVTDIPMFSFCEHHLLPFHGVAHVGYIPNEHGRVTGLSKLARLVDLYAKRPQVQERLTSQVADALMRRLEPRGVIVVVEAEHLCMAMRGVRKPGSRTTTSAVRGLLRNSASTRSEAIELIKGRLR

SEQ ID NO: 14330 - protein, 201 aa, Saccharothrix sp.
  misc_feature (1)..(201): tr|A0A0F0HKH4|A0A0F0HKH4_9PSEU GTP cyclohydrolase 1 OS= Saccharothrix sp. ST-888 OX=1427391 GN=folE PE=3 SV=1
MIDPVTLDQPTAVGAFDQERAEKAVRELLIAVGEDPDREGLQETPARVARAYKEIFAGLWQQPEDVLTTTFDLGHDEMVLVKDIEVFSTCEHHLVPFQGVAHVGYIPSASGKITGLSKLARLVDVYARRPQVQERLTSQVADSLMRILEPRGAIVVVECEHMCMSMRGIRKPGAKTLTSAVRGQLRDPATRAEAMSLIIGR

SEQ ID NO: 14331 - protein, 214 aa, Saccharothrix sp.
  misc_feature (1)..(214): tr|A0A1V2Q0U7|A0A1V2Q0U7_9PSEU GTP cyclohydrolase 1 OS= Saccharothrix sp. ALI-22-I OX=1933778 GN=folE PE=3 SV=1
MTEHVTEHDQTGLSGNGGAGLARRPFDQKRAEAAVRELLLACGENPEREGLRDTPARVARAYRELFAGLYTDPDSVLRKTFDESHEELVLVTDIPMFSFCEHHLLPFHGVAHVGYIPNEHGRVTGLSKIARLVDLYAKRPQVQERLTSQVADALVRRLEPRGVIVVVEAEHLCMGMRGVRKPGSRTTTSAVRGQLRSSATSRAEAIELIRGRLR

SEQ ID NO: 14332 - protein, 214 aa, Saccharothrix texasensis
  misc_feature (1)..(214): tr|A0A3N1H8T6|A0A3N1H8T6_9PSEU GTP cyclohydrolase 1 OS= Saccharothrix texasensis OX=103734 GN=folE PE=3 SV=1
MTEHGTAIDQTGLSANGGAGLARRPFDQKRAETAVRELLLACGEDPEREGLRDTPGRVARAYRELFAGLHTDPDSVLAKTFDESHEELVLVTDIPMFSFCEHHLLPFHGVAHVGYIPNEHGRVTGLSKLARLVDLYAKRPQVQERLTSQVADALMRRLDPRGVIVVVEAEHLCMAMRGVRKPGSRTTTSAVRGLLRDSASSRAEAIDLIKGRLR

SEQ ID NO: 14333 - protein, 208 aa, Saccharothrix variisporea
  misc_feature (1)..(208): tr|A0A495X7T8|A0A495X7T8_9PSEU GTP cyclohydrolase 1 OS= Saccharothrix variisporea OX=543527 GN=folE PE=3 SV=1
MTNTLDRLAPSESQDLVSPGEVDTERVVDLVGQLLAAIGEDPGREGLADTPARVAAWWRSFFSPEPSAAPTSFPEQHVSGQLVVIGGMSVWSLCEHHLLPMNLDVAVGYVPDGEVIGLSKFGRIAQRYAGRLQVQERFTRQVVDEIAVVLGSTDVAVAVRGTHLCMSSRGVRMEAARTTTLQAGGRFESDPVLSQQFLALATDRWRVA

SEQ ID NO: 14334 - protein, 211 aa, Saccharothrix variisporea
  misc_feature (1)..(211): tr|A0A495XF06|A0A495XF06_9PSEU GTP cyclohydrolase 1 OS= Saccharothrix variisporea OX=543527 GN=folE PE=3 SV=1
MTDIDQAGPSVVNGGAGLARRPFDQKRAEAAVRELLLACGEDPDREGLMDTPARVARAYRELFAGLYTDPDSVLAKTFDESHEELVLVTDIPMFSFCEHHLLPFHGVAHVGYIPNEQGRVTGLSKLARLVDLYAKRPQVQERLTSQVADALVRRLEPRGVIVVVEAEHLCMGMRGVRKPGSRTTTSAVRGLLRTSASSRAEAIELIKGRTR

SEQ ID NO: 14335 - protein, 366 aa, Sagittula sp.
  misc_feature (1)..(366): tr|A0A2K8WEY2|A0A2K8WEY2_9RHOB GTP cyclohydrolase FolE2 OS=Sagittula sp. P11 OX=2009329 GN=folE2 PE=3 SV=1
MNVHTPEIDRKPSREEAEAALAVLRQWTGKAHDSEIDALDPALKRLAPDAEVDGYPDLSRTFPEGFEVDADYRASLPDLQNGPSSLIRGANRVIQHVGISNFRLPIHYRTRDNGALMLETSVTGTVSLDADKKGINMSRIMRSFYAHAEKTFSFGVIEAALDDYKTDLESFDARIDMAFSFPVKVESLRSGLSGYQYYDIALELVETDGVRRKIFHLDYVYSSTCPCSLELSEHARRERGQLATPHSQRSVARLSVEVKPGDCLWFEDLIDMCRRAVPTETQVMVKREDEQAFAELNAANPIFVEDAARLFAEQLLADSRVGDFRVVASHQESLHSHDAVSVLTEGDLFKAESLDPRLFSTLFHVG

SEQ ID NO: 14336 - protein, 373 aa, Sagittula stellata
  misc_feature (1)..(373): tr|A3K0Q6|A3K0Q6_9RHOB GTP cyclohydrolase FolE2 OS=Sagi ttula stellata E-37 OX=388399 GN=folE2 PE=3 SV=1
MGRGQPFMNVHTPEIDRKLSREDAEAALAVLRQWTGKAHDSEIDALDPALKHLAPDAVADGYPDLSRAFPEDFQTDGDYIASLPDLQNGPSSLIRGAKRMIQHVGISNFRLPIRYRTRDNGALMLETSVTGTVSLDADKKGINMSRIMRSFYTHADETFSFGVIEAALDDYKADLDSFDARINMAFSFPVKVESLRSGLSGYQYYDIALELVEKDGVRCKIIHLDYVYSSTCPCSLELSEHARRERGQLATPHSQRSVARVSVDVKPGDCLWFEDLIDMCRRAVPTETQVMVKREDEQAFAELNAANPIFVEDAARLFAEQMLADPRVGDFRVVASHQESLHSHDAVSVLTEGDLFEAESLDPRLFSTLFHVS

SEQ ID NO: 14337 - protein, 198 aa, Salegentibacter agarivorans
  misc_feature (1)..(198): tr|A0A1I2N421|A0A1I2N421_9FLAO GTP cyclohydrolase 1 OS= Salegentibacter agarivorans OX=345907 GN=folE PE=3 SV=1
MAYKFKEEYNIEVTDGLQQNYKNILEGIGEDISREGIENTPERAAKAMQFLTQGYKMDAKTILEKAMFKESYDEMVVVKDIELYSLCEHHMLPFFGKAHIAYIPNGHIVGLSKLPRVVDVFARRLQVQERLTHDILECINNTLKPKGVAVVIEAVHMCMMMRGVQKQNSATTTSGFRGQFEKIETRNEFLKLISSDLK

SEQ ID NO: 14338 - protein, 225 aa, Salegentibacter agarivorans
  misc_feature (1)..(225): tr|A0A1I2LTL1|A0A1I2LTL1_9FLAO GTP cyclohydrolase 1 OS= Salegentibacter agarivorans OX=345907 GN=folE PE=3 SV=1
MKIDKILNEIDEQGDAHVGSSAETPIREDAFELSDIEKVALINKDVKHIMETLGLDLTDDSLKGTPQRVAKMFVNEIFAGLDPEKKPIASTFENKYKYGEMLVEKNITVYSTCEHHLLPIVGKAHVAYISKGRVIGLSKMNRIVDYFAKRPQVQERMTMQIVQELQKALGTPDVACVVDAKHLCVNSRGIRDIDSSTVTSEFGGAFKEKSVKREFLDYIKLDTTF

SEQ ID NO: 14339 - protein, 197 aa, Salegentibacter echinorum
  misc_feature (1)..(197): tr|A0A1M5M5Z5|A0A1M5M5Z5_9FLAO GTP cyclohydrolase 1 OS= Salegentibacter echinorum OX=1073325 GN=folE PE=3 SV=1
MYKFKEEYNLEVTDGLQEKYQGILERIGEDVNREGIEKTPERAAKAMQFLTQGYKMDPEAILKKAMFKEDYNEMVVVKDIELYSLCEHHLLPFFGKAHIAYIPNGHIVGLSKLPRLVDVFARRLQVQERLTHNILECINKTLKPKGVAVVIEAEHLCMMMRGVQKQNSATTTSGFRGQFQKIETRNEFLKLISANLK

SEQ ID NO: 14340 - protein, 225 aa, Salegentibacter echinorum
  misc_feature (1)..(225): tr|A0A1M5C3Q5|A0A1M5C3Q5_9FLAO GTP cyclohydrolase 1 OS= Salegentibacter echinorum OX=1073325 GN=folE PE=3 SV=1
MKIDKILNDIDEQGDAHAGGSAKNPIREDAFELSDIEKVALINKDVKRIMETLGLDLTDDSLKGTPQRVAKMFVNEIFAGLDPEKKPVASTFDNNYKYGEMLVEKNITVYSTCEHHLLPIVGKAHVAYISKGRVIGLSKMNRIVDYFAKRPQVQERMTMQIVQELQKALGTPDVACVVDAKHLCVNSRGIRDIDSSTVTSEFGGAFKEQSVKREFLDYIKLDTTF

SEQ ID NO: 14341 - protein, 226 aa, Salegentibacter flavus
  misc_feature (1)..(226): tr|A0A1I4XU84|A0A1I4XU84_9FLAO GTP cyclohydrolase 1 OS= Salegentibacter flavus OX=287099 GN=folE PE=3 SV=1
MKIDKILTEIDEMGDAHAGSSADTPIREDAFELSDIEKVALIKDDVKKIMETLGLDLTDDSLQGTPQRVAKMFVNEIFSGLDPANKPKASTFENKYKYGEMLVEKNITVYSTCEHHLLPIVGKAHVAYISKGRVIGLSKMNRIVDYFAKRPQVQERMTMQIVQELQRALGTPDVACVIDAKHLCVNSRGIRDIESSTVTSEFGGAFKNKEVKREFLDYIKLDTTFS

SEQ ID NO: 14342 - protein, 225 aa, Salegentibacter holothuriorum
  misc_feature (1)..(225): tr|A0A1T5CI52|A0A1T5CI52_9FLAO GTP cyclohydrolase 1 OS= Salegentibacter holothuriorum OX=241145 GN=folE PE=3 SV =1
MKIDKILNEIDEQGDAHAGSSAENPIREDAFELSDIEKVALINKDVKKIMETLGLDLTDDSLKGTPQRVAKMFVNEIFAGLNPDKKPIASTFENKYKYGEMLVEKNITVYSTCEHHLLPIVGKAHVAYISKGRVIGLSKMNRIVDYFAKRPQVQERMTMQIVQELQKALGTPDVACVVDAKHLCVNSRGIRDIDSSTVTSEFGGAFKEQSVKREFLDYIKLDTTF

SEQ ID NO: 14343 - protein, 198 aa, Salegentibacter holothuriorum
  misc_feature (1)..(198): tr|A0A1T5AGX5|A0A1T5AGX5_9FLAO GTP cyclohydrolase 1 OS= Salegentibacter holothuriorum OX=241145 GN=folE PE=3 SV =1
MAYKFKEEYNIEVTDGLQENYKNILEGIGEDVQREGIEKTPERAAKAMQFLTQGYKMDAEAILKKAMFKESYDEMVVVKDIELYSMCEHHMLPFFGKAHIAYIPDGHIVGLSKLPRVVDVFARRLQVQERLTHDILECINKTMKPKGVAVVIEAVHMCMMMRGVQKQNSATTTSGFRGQFEKIETRNEFLKLISSNLK

SEQ ID NO: 14344 - protein, 225 aa, Salegentibacter mishustinae
  misc_feature (1)..(225): tr|A0A0Q9Z9E8|A0A0Q9Z9E8_9FLAO GTP cyclohydrolase 1 OS= Salegentibacter mishustinae OX=270918 GN=folE PE=3 SV=1
MKIDKILNEIDEQGDAHVGSSAETPIREDAFELSDIEKVALINKDVKHIMETLGLDLTDDSLKGTPQRVAKMFVNEIFAGLNPERKPIASTFENKYKYGEMLVEKNITVYSTCEHHLLPIVGKAHVAYISKGRVIGLSKMNRIVDYFAKRPQVQERMTMQIVQELQKALGTPDVACVVDAKHLCVNSRGIRDIDSSTVTSEFGGAFKEQSVKREFLDYIKLDTTF

SEQ ID NO: 14345 - protein, 198 aa, Salegentibacter mishustinae
  misc_feature (1)..(198): tr|A0A0Q9ZGF7|A0A0Q9ZGF7_9FLAO GTP cyclohydrolase 1 OS= Salegentibacter mishustinae OX=270918 GN=folE PE=3 SV=1
MAYKFKEEYNIEVTDGLQENYRNILEGIGEDISREGIEKTPERASKAMQFLTQGYKMDGETILKEAMFRESYDEMVVVKDIELYSMCEHHMLPFFGKAHIAYIPNGHIVGLSKLPRVVDVFARRLQVQERLTHDILECINKTMKPKGVAVVIEAVHMCMMMRGVQKQNSATTTSGFRGQFEKIETRNEFLKLISSNLK

SEQ ID NO: 14346 - protein, 225 aa, Salegentibacter salarius
  misc_feature (1)..(225): tr|A0A2N0U0R7|A0A2N0U0R7_9FLAO GTP cyclohydrolase 1 OS= Salegentibacter salarius OX=435906 GN=folE PE=3 SV=1
MKIDKILNEIDEQGDAHVGSSAQTPIREDAFELSDIEKVALINKDVKHIMETLGLDLTDDSLKGTPQRVAKMFVNEIFAGLNPERKPIASTFENKYKYGEMLVEKNITVYSTCEHHLLPIVGKAHVAYISKGRVIGLSKMNRIVDYFAKRPQVQERMTMQIVQELQKALGTPDVACVVDAKHLCVNSRGIRDIDSSTVTSEFGGAFKEKSVKREFLDYIKLDTIF

SEQ ID NO: 14347 - protein, 198 aa, Salegentibacter salarius
  misc_feature (1)..(198): tr|A0A2N0U2V7|A0A2N0U2V7_9FLAO GTP cyclohydrolase 1 OS= Salegentibacter salarius OX=435906 GN=folE PE=3 SV=1
MAYKFKEEYNIEVTDGLQENYRNILEGIGEDISREGIEKTPERAAKAMQFLTQGYKMDGETILKEAMFKESYDEMVVVKDIELYSMCEHHMLPFFGKAHIAYIPNGHIVGLSKLPRVVDVFARRLQVQERLTNDILECINNTIKPKGAAVVIEAVHMCMMMRGVQKQNSATTTSGFRGQFEKIETRNEFLKLISSNLK

SEQ ID NO: 14348 - protein, 225 aa, Salegentibacter salegens
  misc_feature (1)..(225): tr|A0A1M7I487|A0A1M7I487_9FLAO GTP cyclohydrolase 1 OS= Salegentibacter salegens OX=143223 GN=folE PE=3 SV=1
MKIDKILNEIDEQGDAHVGTSAETPLREDAFELSDIEKVALINKDVKKIMETLGLDLTDDSLKGTPQRVAKMFVNEIFAGLDPEKKPIASTFENKYKYGEMLVEKNITVYSTCEHHLLPIVGKAHVAYISKGRVIGLSKMNRIVDYFAKRPQVQERMTMQIVQELQKALGTPDVACVVDAKHLCVNSRGIRDIDSSTVTSEFGGAFKDKSVKREFLDYIKLDTSF

SEQ ID NO: 14349 - protein, 198 aa, Salegentibacter salegens
  misc_feature (1)..(198): tr|A0A1M7ISZ0|A0A1M7ISZ0_9FLAO GTP cyclohydrolase 1 OS= Salegentibacter salegens OX=143223 GN=folE PE=3 SV=1
MAYKFKEEYNIEVTDGLQKNYKNILEGIGEDISREGIANTPERAAKAMQFLTQGYKMDAETILKKAMFKESYDEMVVVKDIELYSLCEHHMLPFFGKAHIAYIPNGHIVGLSKLPRVVDVFARRLQVQERLTHDILECINSTLKPKGVAVVIEAVHMCMMMRGVQKQNSATTTSGFRGQFEKIETRNEFLKLISSNLK

SEQ ID NO: 14350 - protein, 225 aa, Salegentibacter salinarum
  misc_feature (1)..(225): tr|A0A2N0TMG4|A0A2N0TMG4_9FLAO GTP cyclohydrolase 1 OS= Salegentibacter salinarum OX=447422 GN=folE PE=3 SV=1
MKIDKILNEIDEQGDAHVGSSAQTPIREDAFELSDIEKVALINKDVKHIMETLGLDLTDDSLKGTPQRVAKMFVNEIFAGLNPDKKPIASTFENKYKYGEMLVEKNITVYSTCEHHLLPIVGKAHVAYISKGRVIGLSKMNRIVDYFAKRPQVQERMTMQIVQELQKALGTPDVACVVDAKHLCVNSRGIRDIDSSTVTSEFGGAFKEQSVKREFLDYIKLDTSF

SEQ ID NO: 14351 - protein, 198 aa, Salegentibacter salinarum
  misc_feature (1)..(198): tr|A0A2N0TQQ2|A0A2N0TQQ2_9FLAO GTP cyclohydrolase 1 OS= Salegentibacter salinarum OX=447422 GN=folE PE=3 SV=1
MAYKFKEEYNIEVTDGLQENYKNILEGIGEDISREGIENTPERAAKAMQFLTQGYKMDAETILKKAMFKESYDEMVVVKDIELYSLCEHHMLPFFGKAHIAYIPNGHIVGLSKLPRVVDVFARRLQVQERLTHDILECINNTLKPKGVAVVIEAVHMCMMMRGVQKQNSATTTSGFRGQFEKIETRNEFLKLISSDLK

SEQ ID NO: 14352 - protein, 197 aa, Salegentibacter sp.
  misc_feature (1)..(197): tr|A0A4R6FWZ5|A0A4R6FWZ5_9FLAO GTP cyclohydrolase 1 OS= Salegentibacter sp. 24 OX=2183986 GN=folE PE=3 SV=1
MYKFKEEYNIEVTDGLQKNYQAILEGIGEDISREGIEKTPERAAKAMQFLTQGYKMDAETILKEAMFKESYDEMVVVKDIELYSLCEHHMLPFFGKAHIAYIPNGHIVGLSKLPRVVDVFARRLQVQERLTHNILECINNTLQPKGVAVVIEAVHMCMMMRGVQKQNSATTTSGFRGQFEKIETRNEFLKLISSNLK

SEQ ID NO: 14353 - protein, 225 aa, Salegentibacter sp.; identical to SEQ ID NO: 14338
  misc_feature (1)..(225): tr|A0A1L6QZ83|A0A1L6QZ83_9FLAO GTP cyclohydrolase 1 OS= Salegentibacter sp. T436 OX=1729720 GN=folE PE=3 SV=1

SEQ ID NO: 14354 - protein, 189 aa, Salibacterium halotolerans
  misc_feature (1)..(189): tr|A0A1I5Q4W5|A0A1I5Q4W5_9BACI GTP cyclohydrolase 1 OS= Salibacterium halotolerans OX=1884432 GN=folE PE=3 SV=1
MSDVNHDKIEQAVYSILEAVGEDPDRDGLRDTPKRVARMYEEVFQGLSQDPSEHLHTVFGEEHEELVLVRDIPFYSMCEHHLVPFYGKAHVGYIPKEGQVTGLSKLARTVETVAKRPQLQERITSTVADSILQTLTPHGVIVVVEAEHMCMTMRGIQKPGTETVTSAVRGSFEQDEASRAEVLTLINRS

SEQ ID NO: 14355 - protein, 96 aa, Salibacterium qingdaonense
  misc_feature (1)..(96): tr|A0A1I4R1D7|A0A1I4R1D7_9BACI GTP cyclohydrolase 1 OS= Salibacterium qingdaonense OX=266892 GN=SAMN04488054_15 72 PE=3 SV=1
MNSFDHEKIKQGVPLLLEGIGEDPRREGLLETPDRVARFYKEIFSGLNKPSHTYLETSFTDDHEELVLVKDISFFSVCEHHLVPFFGQAHVAYIPK

SEQ ID NO: 14356 - protein, 189 aa, Salibacterium qingdaonense
  misc_feature (1)..(189): tr|A0A1I4M4C8|A0A1I4M4C8_9BACI GTP cyclohydrolase 1 OS= Salibacterium qingdaonense OX=266892 GN=folE PE=3 SV=1
MSTVNHDKIEKAVYSILEAVGENPDRDGLLDTPKRVARMYEEVFQGLSQDPAEHLQTVFGEEHEELVLVRDIPFYSMCEHHLVPFYGKAHVGYIPKEGQVTGLSKLARTVETVAKRPQLQERITSTVADSILETLNPHGVIVVVEAEHMCMTMRGIQKPGTETVTSAVRGSFENDEASRAEVLTLINRS

SEQ ID NO: 14357 - protein, 184 aa, Salilacibacter sp.
  misc_feature (1)..(184): tr|A0A514LEF3|A0A514LEF3_9ACTN GTP cyclohydrolase 1 OS= Salilacibacter sp. NKC3-5 OX=2502791 GN=folE PE=3 SV=1
MDHAKIQTAVRQLLEAVGEDPDREGVQETPARVARMYEEIFSGINEDPETHLRTVFGEEHEELVLVKDITFYSMCEHHLLPFFGQAHIGYIPKNGTVTGLSKLARAVETVARRPQLQERITSNVADALVETLDPHGVIVVVEAEHMCMTMRGIKKPGSTTVTSAVRGVFEKDASSRSEVMTLLK

SEQ ID NO: 14358 - protein, 310 aa, Salimicrobium flavidum
  misc_feature (1)..(310): tr|A0A1N7IJW3|A0A1N7IJW3_9BACI GTP cyclohydrolase FolE2 OS=Salimicrobium flavidum OX=570947 GN=folE2 PE=3 SV=1
MNKTDIDTPASLPPKQERHKLFGSIDPGPKTKPVDKDKMADLQNAKQDYLFDIDVVGINNVKHPIKVKSFMTPEEQTTIGTFTFSSSIAKGSKGTNMSRFTEQLTKYYEQGFTVTIASLKEFARELAGRLKRDDAFIKVDFPWFFERKGPSSELAGMNHADAFISVSYSRTDGFDIQTGLTGKITTLCPCSKEISEYSAHNQRGNVSMAVTLEEDFDEARTDWKEALLEAAESNASARIHPVLKRPDEKMVTEQAYENPRFVEDMVRLVAADLYEHPFVEAFEVSCRNEESIHLHDAVASLTFDKRTDEL

SEQ ID NO: 14359 - protein, 311 aa, Salimicrobium halophilum
  misc_feature (1)..(311): tr|A0A1G8Q584|A0A1G8Q584_9BACI GTP cyclohydrolase FolE2 OS=Salimicrobium halophilum OX=86666 GN=folE2 PE=3 SV= 1
MHNTYKQQSTSLPTKEERHKLFGSVDPGPKYKPTDKSEMPDLQNSKQDFLFSIDVVGINNVKHPIKVNSSLTPHEQTTIGTFTFSSSVARGSKGTNMSRFTEQLTKYSENGFTVDMETLKEFTQELAGRLKQNDAFVQVEFPWFFERKGPSSELAGMNHADAYITVSYSADTGFDIEAGLTGKITTLCPCSKEISEYSAHNQRGNVSMSVELSDDFDETTMDWKEALLEAAESNASARIHPVLKRPDEKMVTEQAYENPRFVEDMVRLVAADLYEYTFVEAFEVSCQNEESIHLHDAIATISFDKRIDELG

SEQ ID NO: 14360 - protein, 310 aa, Salimicrobium jeotgali
  misc_feature (1)..(310): tr|K2FPB8|K2FPB8_9BACI GTP cyclohydrolase FolE2 OS=Sali microbium jeotgali OX=1230341 GN=folE2 PE=3 SV=1
MNKIESHITDTMPSKDERHKLFGSVPPGPKTKPVEKDQMADLQNSRQDFLFDLDVVGINNVKHPITIESSMKPSTQTTIGTFTFSSSIAKGSKGTNMSRFTEQLTSYYEQGFTVTIESLKQFAEELAGRLKREDAFIKVEFPWFFEREGPSSGLAGMNHADAFISVTWSKAGGFDIQTGLTGKITTLCPCSKEISEYSAHNQRGNVSMAVTLTEDFNEDMVDWKEVLLEAAESNASARIHPVLKRPDEKMVTEQAYENPRFVEDMVRLVAADLYETPFIHAFEVSCRNEESIHLHDALASLRFDKRTDER

SEQ ID NO: 14361 - protein, 310 aa, Salimicrobium salexigens; identical to SEQ ID NO: 14360
  misc_feature (1)..(310): tr|A0A1N7KV12|A0A1N7KV12_9BACI GTP cyclohydrolase FolE2 OS=Salimicrobium salexigens OX=908941 GN=folE2 PE=3 SV =1

SEQ ID NO: 14362 - protein, 310 aa, Salimicrobium sp.
  misc_feature (1)..(310): tr|A0A2A3A5M2|A0A2A3A5M2_9BACI GTP cyclohydrolase FolE2 OS=Salimicrobium sp. WN024 OX=2029857 GN=folE2 PE=3 SV =1
MNKTESHITDTIPSKDERHKLFGSVPPGPKTKPVEKDQMADLQNSRQDFLFDLDVVGINNVKHPITIESSMKPSTQTTIGTFTFSSSIAKGSKGTNMSRFTEQLTSYYEQGFTVTIESLKQFAEELAGRLKREDAFIKVEFPWFFEREGPSSGLAGMNHADAFISVTWSKADGFDIQTGLTGKITTLCPCSKEISEYSAHNQRGNVSMAVTLTEDFDEDTLDWKEVLLEAAESNASARIHPVLKRPDEKMVTEQAYENPRFVEDMVRLVAADLYETPFIHAFEVSCRNEESIHLHDALASLHFDKRTDER

SEQ ID NO: 14363 - protein, 215 aa, Salinarimonadaceae bacterium
  misc_feature (1)..(215): tr|A0A0P8BKZ5|A0A0P8BKZ5_9RHIZ GTP cyclohydrolase 1 OS= Salinarimonadaceae bacterium HL-109 OX=1653334 GN=folE PE=3 SV=1
MDAVVKSLSTRETSVDADKREMQRPSREEAEAAVRTLIRWAGDDPEREGLLETPKRVAKAYRELFAGYEEDAGDVLAKVFEDVEGYGDMVLVRDIPFHSHCEHHMVPFHGKAHIAYFPSQGVVGLSKLARLVDVYARRLQTQETMTAQITDAIEDSLKPRGIAVMIEAEHMCMSMRGVMKAGSSTVTTSFTGIFKDEPAEQVRFFTQLRAGKEYR

SEQ ID NO: 14364 - protein, 213 aa, Salinarimonas sp.
  misc_feature (1)..(213): tr|A0A5B2VFW9|A0A5B2VFW9_9RHIZ GTP cyclohydrolase 1 OS= Salinarimonas sp. BN140002 OX=1638099 GN=folE PE=3 SV=1
MDAVVKSLSARVTEVAADKPKIEKPTREEAEAAVRTLIRWAGDDPEREGLRDTPRRVAKAYGQLFAGYGEDAREILNKVFEEVEGYGDMVLVRDIPFHAHCEHHMVPFMGKAHVAYYPSAGVVGLSKLARVVDVFARRLQTQETMTAQIAEVIDEVLRPRGVAVMVDAEHMCMTMRGVQKPGASTLTTQFTGVFRQDPAEQARFFTLLRAGRS

SEQ ID NO: 14365 - protein, 309 aa, Salinibacillus kushneri
  misc_feature (1)..(309): tr|A0A1I0DZW3|A0A1I0DZW3_9BACI GTP cyclohydrolase FolE2 OS=Salinibacillus kushneri OX=237682 GN=folE2 PE=3 SV= 1
MSKVQKQKKQLPSKKERHQLFGSVPPGPRTKPTEKDKMPDLQNTNKDFLFELDAVGIQNVKHPIVIHSKMKPYNQTTIGTFTFSSSIRQESKGTNMSRFTEQLNRYYENGFTLDIKMMKSFTKELAERLKQKDATMEVTFPWFFERKGPDSELPGMNHATASIRVEYHAEEDFDIKVSLEGTITTLCPCSKEISEYSAHNQRGKVSMVTDLTDDFDEEEIDWKQALLEAAESNASARIHPVLKRPDEKMVTETAYENPRFVEDIVRLVAADLYEMPFVKVFDVKCVNEESIHLHDAMASIHYDKTKMID

SEQ ID NO: 14366 - protein, 218 aa, Salinibacter ruber
  misc_feature (1)..(218): tr|D5HD27|D5HD27_SALRM GTP cyclohydrolase 1 OS=Saliniba cter ruber (strain M8) OX=761659 GN=folE PE=3 SV=1
MAEKKIQSSGLRTNGSADGMPPKLYERRDIYDEETSEALSEHIEAILDILGEDADREGLADTPERVARAYQFLMHGYALDPKDILRQALFEEAYDEMILVKDIEVYSMCEHHMLPFYGKAHVAYIPDGQIVGLSKIPRTVEVFARRLQVQERLTLQIRNAIDEVVDPMGTAVVIEAKHLCMMMRGAEKQNSATTTSSVSGEFNNHATRDEFMRLIDAE

SEQ ID NO: 14367 - protein, 199 aa, Salinibacter ruber
  misc_feature (1)..(199): tr|Q2RYU5|Q2RYU5_SALRD GTP cyclohydrolase 1 OS=Saliniba cter ruber (strain DSM 13855 / M31) OX=309807 GN=folE P E=3 SV=1
MPPKLYERRDIYDEETSEALSEHIEAILDILGEDADREGLADTPERVARAYQFLMHGYALDPKDILRQALFEEAYDEMILVKDIEVYSMCEHHMLPFYGKAHVAYIPDGQIVGLSKIPRTVEVFARRLQVQERLTLQIRNAIDEVVDPMGTAVVIEAKHLCMMMRGAEKQNSATTTSSVSGEFNNHATRDEFMRLIDAE

SEQ ID NO: 14368 - protein, 219 aa, Salinibacter sp.
  misc_feature (1)..(219): tr|A0A2P6C3F4|A0A2P6C3F4_9BACT GTP cyclohydrolase 1 OS= Salinibacter sp. 10B OX=1923971 GN=folE PE=3 SV=1
MAEKKIASDELRENGTPVGGPPKLYERRDVYDEATTEALSDHVSSMLDILGEDPSRDGLKDTPERVARAYQFLMHGYALNPKEILQQALFEEAYDEMILVKDIEVYSLCEHHMLPFFGKAHVAYIPDGKIVGLSKIPRTVDVFARRLQVQERLTLQIRDAIDEVLDPLGTAVVIEAKHLCMMMRGAEKQNSMTTTSSVSGEFDEHATRAEFMRLIHATE

SEQ ID NO: 14369 - protein, 194 aa, Salinibacterium amurskyense
  misc_feature (1)..(194): tr|A0A2M9D6R4|A0A2M9D6R4_9MICO GTP cyclohydrolase 1 OS= Salinibacterium amurskyense OX=205941 GN=folE PE=3 SV=1
MSIDLARIEAAVAEILAAVGEDPNRAGLTATPRRVASAYAEFFAGNEIDPLTHLSDSIEFTAKADQTGELVLLRDIEFRSMCEHHLLPFLGVAHVAYIPDERIIGLGNIARVVETIAARAQLQERLTEEIADAFDEGLSPRGVLVVVDAMHGCVSARGPRQTASSTVTLASRGALSDPVERAEVMALIGRGRDA

SEQ ID NO: 14370 - protein, 208 aa, Salinibacterium sp.
  misc_feature (1)..(208): tr|A0A5B9GAJ8|A0A5B9GAJ8_9MICO GTP cyclohydrolase 1 OS= Salinibacterium sp. dk2585 OX=2603292 GN=folE PE=3 SV=1
MPGGSAASRASVDRPRIEAAVSELLAAIGADASRLAETPRRVAESYAEYFSGMGVDPAVHLGDLIDLEDGREGGLVIMRDIAFRSMCEHHLLPFVGLAHIAYLPGRRVVGLGALPRVVDTLASRPQLQERLTDEIADALSDALDARGVLVVLDARQDCVSTRGTRQVGSTTVTLASRGELADSGQKAAVLALVGGAAAAGDDAGGPHA

SEQ ID NO: 14371 - protein, 196 aa, Salinibacterium sp.
  misc_feature (1)..(196): tr|A0A522DQV8|A0A522DQV8_9MICO GTP cyclohydrolase 1 OS= Salinibacterium sp. OX=1915057 GN=folE PE=3 SV=1
MAIDSGRVEAAIAEILLAIGENPERPGLATTPQRVAEAYQEFFSGLGVDPLDHLRESSEFPPGAEELADVVLMRDIEFRSMCEHHLLPFVGVAHLAYRPGTRIVGLGRLPRVVETLAARPQLQERLTEEIAEALDAGLSPLGVLVVVDAVHGCVASRGARQASSSTVTMASRGTLSDPQARAEIIALIGARATEAS

SEQ ID NO: 14372 - protein, 188 aa, Salinibacterium xinjiangense
  misc_feature (1)..(188): tr|A0A2C8Z4L9|A0A2C8Z4L9_9MICO GTP cyclohydrolase 1 OS= Salinibacterium xinjiangense OX=386302 GN=folE PE=3 SV= 1
MAVDSGRIEAAIAEILAAIGEDAARPGLRSTPKRVAQAYTEFFAGVGVDPSAVLADSVASGGLGELVLLRDIEFRSICEHHLLPFLGAAHVAYVPGERIVGLGRLATVVATAAARPQLQEQLTEQIADAIQSGLAPQGVLVVVDAVHGCVTARGPRQTGSSTVTMASRGSLSDPVQRAGVLAMIGGPS

SEQ ID NO: 14373 - protein, 292 aa, Salinicoccus alkaliphilus
  misc_feature (1)..(292): tr|A0A1M7HZY5|A0A1M7HZY5_9STAP GTP cyclohydrolase FolE2 OS=Salinicoccus alkaliphilus DSM 16010 OX=1123231 GN=f olE2 PE=3 SV=1
MEELDLTTREGRFKHFGSVEPVKGTKPTEKAEMADLQNSKKDFLFAVESVGINNLSYPVVIGDFQSVGNFELATSLRREEKGVNMSRLLEALETENRNGVRLDFATLEQVLKVLRDRMRQENAEVTADGKWYFSKPSPGTNLHGMAHADVKYSLALDEGGLTRKQFGMTAMVTTLCPCSKEISEYSAHNQRGYVKVLIDVDPGADLPENHKEIVYELLEINASSQLYPILKRTDEKMVTERAYENPRFVEDLIRLIAYDIAELDWVKGFELECRNEESIHQHDAFSRMKHQK

SEQ ID NO: 14374 - protein, 292 aa, Salinicoccus halodurans
  misc_feature (1)..(292): tr|A0A0F7HPG7|A0A0F7HPG7_9STAP GTP cyclohydrolase FolE2 OS=Salinicoccus halodurans OX=407035 GN=folE2 PE=3 SV= 1
MEELDLTTREGRFKHFGSTDPIEGTKPIEKELMVDLQSSKKDFLFEVDSVGINNLSYPVVIGDFQSVGNFELATSLRRNEKGINMSRILESLETKNNGGIKLDFTTLESVLGTLRDRMHQESAEVTADGKWYFSKPSPHTQLSGMAHADVKYSLEMGESGTTRKQLGMTAMVTTLCPCSKEISEYSAHNQRGYVKALLDIDPDAELPENHKEQLYEVLEINASSQLYPILKRTDEKMVTERAYENPRFVEDLIRLIAYDLVELDWVSGFELECRNEESIHQHDAFSRMKYQK

SEQ ID NO: 14375 - protein, 292 aa, Salinicoccus kekensis
  misc_feature (1)..(292): tr|A0A285UM97|A0A285UM97_9STAP GTP cyclohydrolase FolE2 OS=Salinicoccus kekensis OX=714307 GN=folE2 PE=3 SV=1
MEELDLTTREGRFKHFGSVEPVEGTKPTEKAEMADLQNSKKDFLFAVESVGINNLSYPVVIGDYQSVGNFELATSLRREEKGVNMSRLLEALETENKNGVSLDFETLEQVLKVLRDRMRQENAEVTADGKWYFSKPSPGTNLHGMAHADVKYSLALDEGGLTRKQFGMTAMVTTLCPCSKEISEYSAHNQRGYVKVLIDVDPDAEVPENHKEIVYELLEINASSQLYPILKRTDEKIVTERAYENPRFVEDLIRLIAYDIAELDWVKGFELECRNEESIHQHDAFSRMKYQK

SEQ ID NO: 14376 - protein, 292 aa, Salinicoccus qingdaonensis
  misc_feature (1)..(292): tr|A0A1G9D5A5|A0A1G9D5A5_9STAP GTP cyclohydrolase FolE2 OS=Salinicoccus qingdaonensis OX=576118 GN=folE2 PE=3 SV=1
MEELDLTTREGRFKHFGSVEPVKGTKPTDKAEMADLQNSKKDFLFSVESVGINNLSYPVVIGDFQSVGNFELATSLRRDEKGVNMSRLLEALETENNNGVTLDFETLEQVLLVLRDRMRQDNAEVTADGKWYFSKPSPGTNLHGIAHADVKYSLALDESGLTRKQFGMTAMVTTLCPCSKEISEYGAHNQRGYIKVMIDVDPDAELPENHKEIVYELLEINASSQLYPILKRTDEKMVTERAYENPRFVEDLIRLVAYDIAELDWVKGFELECRNEESIHQHDAFSRMTYNK

SEQ ID NO: 14377 - protein, 292 aa, Salinicoccus roseus
  misc_feature (1)..(292): tr|A0A265E7J8|A0A265E7J8_9STAP GTP cyclohydrolase FolE2 OS=Salinicoccus roseus OX=45670 GN=folE2 PE=3 SV=1
MEQLDLSTREARFRHFGSVEPIEGTKPVEKEMMVDLQSSKKDFLFEVDSVGINNLSYPVVIGDFQSVGTFELATSLRRNEKGINMSRILESLETENDGGVPLTFETLENVLEILRVRMHQDEAEVTGSGKWYFSKPSPHTLLSGMAHADVEYSMRISGAGVLHKQLGMTAMVTTLCPCSKEISEYSAHNQRGYVKVLLDIDPEAELPDDHKEQLYELLEINASSQLYPILKRTDEKMVTERAYENPRFVEDLIRLIAYDLVELDWVKGFELECRNEESIHQHDAFSRMSYQK

SEQ ID NO: 14378 - protein, 292 aa, Salinicoccus sediminis
  misc_feature (1)..(292): tr|A0A0M2SJN1|A0A0M2SJN1_9STAP GTP cyclohydrolase FolE2 OS=Salinicoccus sediminis OX=1432562 GN=folE2 PE=3 SV= 1
MEELDLTTREGRFKHFGSVDPVEGTKPIEKELMVDLQSSKKDFLFEVDSVGINNLSYPVVIGDFQSVGNFELATSLRKNEKGINMSRILESLETQNDGGVRLDFGTLETVLGTLRDRMDQESAEVTADGKWYFAKQSPHTQLSGMAHADVKYSLEIGESGTTRKQLGMTAMVTTLCPCSKGISEYSAHNQRGYVKVLLDIDPEKELPDDHREQLYEVLEINASSQLYPILKRTDEKMVTERAYENPRFVEDLIRLIAYDLVELDWVKGFELECRNEESIHQHDAFSRMRYQK

SEQ ID NO: 14379 - protein, 292 aa, Salinicoccus sp.
  misc_feature (1)..(292): tr|A0A558ARZ1|A0A558ARZ1_9STAP GTP cyclohydrolase FolE2 OS=Salinicoccus sp. CT19 OX=2493691 GN=folE2 PE=3 SV=1
MEELDLTTREGRFRHFGSVDPIEGMKPVEKEMMVDLQSSKKDFLFEVDSVGINNLSYPVVIGDFQSVGTFELATSLRKNEKGINMSRILESLETENNAGVPLEFETLQRVLEILRARMHQEEAEMTADGKWYFSKPSPHTQLSGMAHADVKYSMRISESGVERKQLGMTAMVTTLCPCSKEISEYSAHNQRGYVKVLLDIDPEAELPEDHKEQLYEVLEINASSQLYPILKRTDEKMVTERAYENPRFVEDLIRLIAYDLVELDWVKGFELECRNEESIHQHDAFSRMSYQK

SEQ ID NO: 14380 - protein, 185 aa, Salinicola socius
  misc_feature (1)..(185): tr|A0A1Q8SRN2|A0A1Q8SRN2_9GAMM GTP cyclohydrolase 1 OS= Salinicola socius OX=404433 GN=folE PE=3 SV=1
MTEQLAGHFHGILEKLGEDPEREGLRDTPMRAAKAMQFLTQGYGQSLEALINGAVFASDTDEMVLIKDIEMYSMCEHHVLPFIGKCHIAYLPQGKVLGLSKFARIVDMYARRLQIQENLTREIAEAVMQVTEARGVGVVIEAQHMCMMMRGVEKQNSSMTTSVMLGSFRKNQTTRQEFLMLVNGR

SEQ ID NO: 14381 - protein, 185 aa, Salinicola sp.
  misc_feature (1)..(185): tr|A0A1Q8SYE6|A0A1Q8SYE6_9GAMM GTP cyclohydrolase 1 OS= Salinicola sp. MH3R3-1 OX=1928762 GN=folE PE=3 SV=1
MTEQLAGHYHGILEKLGEDPEREGLRDTPMRAAKAMQFLTQGYHQSLEELINGAVFASDTDEMVLVKDIEMYSMCEHHVLPFIGKCHIAYLPQGKVLGLSKFARIVDMYARRLQIQENLTREIAEAVMQVTEARGVGVVIEAQHMCMMMRGVEKQNSSMTTSVMLGSFRKNQTTRQEFLMLVNGR

SEQ ID NO: 14382 - protein, 306 aa, Salinicola sp.
  misc_feature (1)..(306): tr|A0A1Q8T7I4|A0A1Q8T7I4_9GAMM GTP cyclohydrolase FolE2 OS=Salinicola sp. MH3R3-1 OX=1928762 GN=folE2 PE=3 SV= 1
MNLTVPPLPDVAAGREPEPSRASAYRALQHVGMQGIATRLQWEDGTRLPATADVSVDLAAGQRGIHMSRLYRLLDRLDESPLTPAGLTTLGNALLDSQQGISQALALTLRFDLPLRRPALLSGESGWRHYPCRLELKGSREALETILTLSIDYASTCPCSTALARHAMARDWRHWVEEQRHADIDAGTVADWIEHQGAFPTPHSQRSRAALSLTLSPRAAFAAADRIDTFERLLQTPVQTLVKRIDEQAFAERNGANLMFCEDAARRLAEGCDAQPDVTGYRIEIVHAESLHAHDAIAVVERDLPA

SEQ ID NO: 14383 - protein, 363 aa, Salinihabitans flavidus
  misc_feature (1)..(363): tr|A0A1H8LC77|A0A1H8LC77_9RHOB GTP cyclohydrolase FolE2 OS=Salinihabitans flavidus OX=569882 GN=folE2 PE=3 SV= 1
MNIHYRDTPSRDEAKDALARLRAWAETASPTEIAELDPAVARLLPEREVGNYPELSRDYPEEFEADDAYRATLPDLQNGPTSLIRGARQTIQHVGISNFRLPISYHTRDNGDLTLETSVTGTVSLEAGKKGINMSRIMRSFYRHAEKTFSFEVMEAALADYITDLDSIDARLQMRFSYPMKIESLRSGLEGYQYYDIALEKIQIGGRRQKIMHLDYVYSSTCPCSLELAEHARQTRGQLATPHSQRSVARISVVVHPGRILWFEDLIDMARAAVPTETQVMVKREDEQAFAELNAANPIFVEDAARLFCEQLLADSRVGDFRVVASHQESLHSHDAVSILTEGDTFDAGSIDPKMFTTLFHTG

SEQ ID NO: 14384 - protein, 225 aa, Salinimicrobium catena
  misc_feature (1)..(225): tr|A0A1H5NG49|A0A1H5NG49_9FLAO GTP cyclohydrolase 1 OS= Salinimicrobium catena OX=390640 GN=folE PE=3 SV=1
MKKNNIDEAIDEMGDAFVSPNTDTPMRKDAFDKTDAEKVEIIQENVKNIMDALGLDLNDDSLKGTPKRVAKMFVHEIFGGLNPKYKPKASTFQNKYKYGEMLVEKDITLYSTCEHHLLPIVGKAHVGYISNGTVVGLSKMNRIVDFYAKRPQVQERLTMQIVKELQEVLGTEDVACVIDAKHLCVNSRGIRDVASSTVTSEYGGRFKDPEARRDFLDYINLETDF

SEQ ID NO: 14385 - protein, 225 aa, Salinimicrobium sediminis
  misc_feature (1)..(225): tr|A0A285X6A5|A0A285X6A5_9FLAO GTP cyclohydrolase 1 OS= Salinimicrobium sediminis OX=1343891 GN=folE PE=3 SV=1
MKKDNIDEAIDEMGDAFVSPNTDTPMRSDAFDLSDDEKIEKIQEDVRNILNTLGLDLTDDSLKGTPKRVAKMFVREIFGGLHPQGKPKASTFQNKYKYGEMLVEKNITLYSTCEHHLLPIVGKAHVGYISNGTVVGLSKMNRIVDYYAKRPQVQERLTMQIVKELQEVLGTEDVACVIDAKHLCVNSRGIRDIESSTVTSEYGGRFKDPEARRDFLDYINLETEF

SEQ ID NO: 14386 - protein, 228 aa, Salinimonas sediminis
  misc_feature (1)..(228): tr|A0A346NR39|A0A346NR39_9ALTE GTP cyclohydrolase 1 OS= Salinimonas sediminis OX=2303538 GN=folE PE=3 SV=1
MFAKEAVVVCDALEAAISEEARIVRQALVDHGLETPMLENRLSDEDKRTRIARAMTDIMNTLGLDLADDSLADTPQRIAKMYVDEIFGGLDYAKFPKITQIENKMKLNQPVQVSDISLTSTCEHHFVTIDGTATVAYIPKETVLGLSKINRLVGFFAQRPQVQERLTQQVMVAIQALTGSPDVAVSINATHYCVKARGIRDTNSFTRTSALGGAFNTDANLRREFFGL

SEQ ID NO: 14387 - protein, 228 aa, Salinimonas sp.
  misc_feature (1)..(228): tr|A0A5B7YCF5|A0A5B7YCF5_9ALTE GTP cyclohydrolase 1 OS= Salinimonas sp. KX18D6 OX=2572577 GN=folE PE=3 SV=1
MLANEAVVVRDAIEPVIAKEAQIVRQALIEKGLETPLVDNSLSGQEKRDRIEAAMTDIMDTLGLDRSDDSLTETPKRIAKMYVDEIFGGLDYGNFPKITTIENKMQLNQPVQVSDISLTSTCEHHFVTIDGTASVAYIPKDTVLGLSKINRLVGFFSQRPQVQERLTQQVMVAIQALTGTDDVAVTINATHYCVKARGIRDNNSFTRTSALGGQFATDANLRREFFAG

SEQ ID NO: 14388 - protein, 184 aa, Saliniradius amylolyticus
  misc_feature (1)..(184): tr|A0A2S2E680|A0A2S2E680_9ALTE GTP cyclohydrolase 1 OS= Saliniradius amylolyticus OX=2183582 GN=gch1 PE=3 SV=1
MSDELANHYHAIIEKLGEDPKRGGLLDTPKRAARAMEYLTDGYQKSLDEVVNGAVFESDMDEMVVVQDIEFYSLCEHHMLPFIGRCHIAYLPQGTVLGLSKFARIVDMYARRLQIQEGLTKQIANAVQEITGAKGVGVVMEGKHMCMMMRGVQKQNSSMVTSVMLGSMRSSQATRDEFLRLIGK

SEQ ID NO: 14389 - protein, 287 aa, Salinisphaera halophila
  misc_feature (1)..(287): tr|A0A423PHZ6|A0A423PHZ6_9GAMM GTP cyclohydrolase FolE2 OS=Salinisphaera halophila YIM 95161 OX=1051139 GN=fol E2 PE=3 SV=1
MSTVAKSQSADGRSAATRSGRAAGPQIEDVQGRADARRLAINKVGICDIRHPVSIAQRVGGHQSTVATFGMYVNLPHHFKGTHMSRFVQILNAHEHQITVDSFKCMLGEMTERLEADNGHIEMSFPYFIDKFAPVTGEKGVMDYEVTFLGDQRGDKIDLYVEVAVPVTTLCPCSKDISDYGAHNQRSLVTLRVRAEKFFWLEELIDIAESEASSELYGILKRVDEKAVTERAYENPKFVEDVVRDIATRLNADERFRHYRVASENFESIHNHSAYALIEHDKDAPAE

SEQ ID NO: 14390 - protein, 287 aa, Salinisphaera hydrothermalis
  misc_feature (1)..(287): tr|A0A084IK97|A0A084IK97_SALHC GTP cyclohydrolase FolE2 OS=Salinisphaera hydrothermalis (strain C41B8) OX=1304 275 GN=folE2 PE=3 SV=1
MSTTSKSANADARGARGNGSAATASEIEDVQGRADPRNLAINKVGICDIRHPVSIAQRVGGHQSTVATFGMYVNLPHEFKGTHMSRFVEILNAHEHQITLESFKAMLGEMTERLESDNGHIEMTFPYFIDKYAPITGEKGVMDYEVSFIGDRIGDRIDMHVEVKVPVTTLCPCSKDISDYGAHNQRSLVTIRVKAHEFFWAEELIDIAESEASCELFGILKRIDEKAVTERAYENPKFVEDVVRDIATRLNEDDRFRSYRVESENFESIHNHSAYAMIERDKDQPNG

SEQ ID NO: 14391 - protein, 273 aa, Salinisphaera japonica
  misc_feature (1)..(273): tr|A0A423PWU4|A0A423PWU4_9GAMM GTP cyclohydrolase FolE2 OS=Salinisphaera japonica YTM-1 OX=1209778 GN=folE2 PE =3 SV=1
MNSNSQHASPRPAPIEDVQGRTDPRRLAINKVGICDIRHPVSIAQRVGGHQSTVATFAMYVNLPHEFKGTHMSRFVEILNAHEQQITPDSFQLMLEEMAERLEANNGHIEMYFPYFVDKYAPVTGEKGVMDYEVGFIGDRVDGVSTLYVEVQVPVTTLCPCSKDISDYGAHNQRSLVTIRVRADAFFWAEELIDIAESEGSCELYGVLKRIDEKAVTERAYENPKFVEDVVRDIATRLNDDDRFRSYRVTSENFESIHNHSAYAMIEHDKDAE

SEQ ID NO: 14392 - protein, 287 aa, Salinisphaera orenii; identical to SEQ ID NO: 14389
  misc_feature (1)..(287): tr|A0A423PVP7|A0A423PVP7_9GAMM GTP cyclohydrolase FolE2 OS=Salinisphaera orenii MK-B5 OX=856730 GN=folE2 PE=3 SV=1

SEQ ID NO: 14393 - protein, 261 aa, Salinisphaera sp.
  misc_feature (1)..(261): tr|A0A2E9AKU8|A0A2E9AKU8_9GAMM GTP cyclohydrolase FolE2 OS=Salinisphaera sp. OX=1914330 GN=folE2 PE=3 SV=1
MEDVQSRADQRHLAINKVGICDIRHPVSIEQRVGGHQSTVATFGMYVNLPHHFKGTHMSRFVQILNAHEHQITVDSFRAMLGEMTERLEADNGHIEMSFPYFIDKYAPVTREKGVMDYNVTFIGDQRGERTDLYVEVKVPVTTLCPCSKDISDYGAHNQRSLITIRVRATEFFWLEELIEIAESQASSELYGILKRVDEKSVTERAYENPKFVEDVVRDVAQCLNDDPRFRYYVVESENFESIHNHSAYAMIEHDKDRPTG

SEQ ID NO: 14394 - protein, 286 aa, Salinisphaera sp.
  misc_feature (1)..(286): tr|A0A3A5J5Z5|A0A3A5J5Z5_9GAMM GTP cyclohydrolase FolE2 OS=Salinisphaera sp. Q1T1-3 OX=2321229 GN=folE2 PE=3 S V=1
MSTTAKTGQASAALSGAGEANTPRDIEDVQGRADPRRLAIDKVGICDIRHPVSIAQRVGGHQSTVATFGMYVNLPHEFKGTHMSRFVEILNAHEHQITLDSFKLMLTEMTDRLESRNGHIEMTFPYFVDKYAPVTGEKGVMDYEVGFIGDRVGDVSTLHVEVKVPVTTLCPCSKDISDYGAHNQRSLVSIRVRADAFFWAEELIDIAESEGSCELYGVLKRIDEKAVTERAYENPKFVEDVVRDIATRLNEDDRFRSYRVASENYESIHNHSAYAMIEHDKDAPQA

SEQ ID NO: 14395 - protein, 275 aa, Salinisphaeraceae bacterium
  misc_feature (1)..(275): tr|A0A2D4SAV2|A0A2D4SAV2_9GAMM GTP cyclohydrolase FolE2 OS=Salinisphaeraceae bacterium OX=2026789 GN=folE2 PE= 3 SV=1
MSVSSPEKLRSTASRLEDVQGREDKRRLAINKVGICDISHPVRIRQRTGEDQHTVANFAMYVNLPHQFKGTHMSRFVEILHAHEREITVASFREMLEEVTTRLEAENGHIEMRFPYFVEKSAPSSGVKSLMDYQVSFIGERKADHSELFVKVVVPVTTLCPCSKDISEYGAHNQRSHVTITARADEFFWLEDLIDVAEAEASSELYGILKRPDEKFVTERAYENPKFVEDLVRDVAARLNEDERILFYVVEAENFESIHNHSAYAKIERDKTTEV

SEQ ID NO: 14396 - protein, 198 aa, Salinisphaeraceae bacterium
  misc_feature (1)..(198): tr|A0A2D4SFF3|A0A2D4SFF3_9GAMM GTP cyclohydrolase 1 OS= Salinisphaeraceae bacterium OX=2026789 GN=folE PE=3 SV= 1
MPDDEMNAARTTTREEAMDAVKVLLRWAGEDPDREGLLDTPARVADAYREYFRGYEEDPTAYLQRTFEQVGGYDEIVLLRDIPFHSHCEHHMALIAGKAHVAYLPRDRVVGISKLARVVHAFAHRLQVQERLTAEIADCIQTALEPYGVAVIVEATHACMSCRGVETPGVSMKTSRMMGVFRKSDKSRSEVLQLINNR

SEQ ID NO: 14397 - protein, 292 aa, Salinispira pacifica
  misc_feature (1)..(292): tr|V5WHD8|V5WHD8_9SPIO GTP cyclohydrolase FolE2 OS=Sali nispira pacifica OX=1307761 GN=folE2 PE=3 SV=1
MEHTPVSKAQHPPNLKQFKGRKMMKDIQNTPDTRNLPLDKVGVKNIKYPITILDKEESIQHTSAEVDLFVNLPHHFKGTHMSRFIEVFHAHSDDIRMNNFLNMLEKIKHVLDAEKSLGEIRFPFFMEKHAPVSGQPSKTEYNCKFIGEVNSTYREFFVGIEVPVLTLCPCSKEISAYGAHNQRSYIRILVELGEFFWIEDMISEIESCASAPLYTLLKREDEKYITEYSYDHPVFVEDLVREVTVRLEQNYNFPWFSVEAENMESIHNHEAYAYIERGVKTYEHRTKGSRSD

SEQ ID NO: 14398 - protein, 219 aa, Salinispora arenicola
  misc_feature (1)..(219): tr|A0A542XLB3|A0A542XLB3_9ACTN GTP cyclohydrolase 1 OS= Salinispora arenicola OX=168697 GN=folE PE=3 SV=1
MAASATEPDSDLDHVAARLVSGRLTGRPVEDSIDLARVEKAVREILIAVGEDPDRDGLQQTPARVARAYAELFAGLRVDPAQVLVTTFEANHDELVLVRDIDVMSLCEHHLLPFRGSAHIGYIPGSNGRITGLSKLARLVEVFARRPQVQERLTAQIADLLMEQLQPRGVIVVLECEHMCMAMRGIQKSGAQTITSAVRGSLQQDAKSRAEAMALINSR

SEQ ID NO: 14399 - protein, 219 aa, Salinispora arenicola
  misc_feature (1)..(219): tr|A8M8H8|A8M8H8_SALAI GTP cyclohydrolase 1 OS=Salinisp ora arenicola (strain CNS-205) OX=391037 GN=folE PE=3 S V=1
MAASATEPDSDLDHVAARLVSGRLTGRPVEDSIDLVRVENAVREILIAVGEDPDRDGLQQTPARVARAYAELFAGLRVDPAQVLVTTFEANHDELVLVRDIDVMSLCEHHLLPFRGSAHIGYIPGSNGRITGLSKLARLVEVFARRPQVQERLTAQIADLLMEQLQPRGVIVVLECEHMCMAMRGIQKSGAQTITSAVRGSLQQDAKSRAEAMALINSR

SEQ ID NO: 14400 - protein, 219 aa, Salinispora tropica
  misc_feature (1)..(219): tr|A4XCS8|A4XCS8_SALTO GTP cyclohydrolase 1 OS=Salinisp ora tropica (strain ATCC BAA-916 / DSM 44818 / CNB-440) OX=369723 GN=folE PE=3 SV=1
MAASATEPDGDLDHVAARLVSGRLTGRPVEESVDLARLEKAVREILIAVGEDPDRDGLQQTPARVARAYAELLAGLRVDPAQVLTTTFEAGHDELVLVRDIDVMSLCEHHLLPFRGSAHIGYIPGANGRITGLSKLARLVEVFARRPQVQERLTVQVADLLMAQLQPRGVIVVLECEHMCMAMRGIQKSGACTITSAVRGSLQEDARTRAEAMALINSR

SEQ ID NO: 14401 - protein, 218 aa, Salinivibrio kushneri
  misc_feature (1)..(218): tr|A0A4P8H2B3|A0A4P8H2B3_9GAMM GTP cyclohydrolase 1 OS= Salinivibrio kushneri OX=1908198 GN=folE PE=3 SV=1
MMALSDAAKKVQEALIARGIETPMTAKSAMSSEERKEKIEFHMREILQSIDLDLTDDSLAETPARIAKMYVDEIFSGLDYSQFPKVTMIDNKMGCDEMVRVKDISVTSTCEHHLVTIDGRATVAYLPNNKVLGLSKINRIVRFFSQRPQVQERLTRQVLVALQTLLETEDVAVRIEATHYCVKSRGVMDANSETTTTALGGLFKKNAATRAEFLHGIQ

SEQ ID NO: 14402 - protein, 218 aa, Salinivibrio kushneri
  misc_feature (1)..(218): tr|A0A1V3GGG8|A0A1V3GGG8_9GAMM GTP cyclohydrolase 1 OS= Salinivibrio kushneri OX=1908198 GN=folE PE=3 SV=1
MMALSDAAKKVQEALIARGIETPMTAKSAMSSEERKEKIEFHMREILQSIDLDLTDDSLAETPARIAKMYVDEIFSGLDYSQFPKVTMIDNKMGCDEMVRVKDISVTSTCEHHLVTIDGRATVAYLPDNKVLGLSKINRIVRFFSQRPQVQERLTRQVLVALQTLLETEDVAVRIEATHYCVKSRGVMDANSETTTTALGGLFKKNAATRAEFLHGIQ

SEQ ID NO: 14403 - protein, 218 aa, Salinivibrio sharmensis
  misc_feature (1)..(218): tr|A0A1V3H0Y2|A0A1V3H0Y2_9GAMM GTP cyclohydrolase 1 OS= Salinivibrio sharmensis OX=390883 GN=folE PE=3 SV=1
MMALSDAAKKVQEALVARGIETPMTATSAMSSEERKEKIEFHMREILQLIDLDLTDDSLAETPARIAKMYVDEIFSGLDYSQFPKVTMIENKMGCDEMVRVKDISVTSTCEHHLVTIDGRATVAYLPNHKVLGLSKINRIVRFFSQRPQVQERLTRQVLVALQTLLETEDVAVRIEATHYCVKSRGVMDANSETTTTALGGLFKKNAATRAEFLHGIQ

SEQ ID NO: 14404 - protein, 218 aa, Salinivibrio sp.
  misc_feature (1)..(218): tr|A0A1V3I3L8|A0A1V3I3L8_9GAMM GTP cyclohydrolase 1 OS= Salinivibrio sp. IB872 OX=1766123 GN=folE PE=3 SV=1
MMALSDAAKKVQEALVARGIETPMTAKSALSAAERKEKIEFHMREILQSIDLDLTDDSLAETPARIAKMYVDEIFSGLDYTQFPKVTMIENKMGCDEMVRVKDISVTSTCEHHLVTIDGRATVAYLPDKKVIGLSKINRIVRFFAQRPQVQERLTRQVLVALQTLLETDNVAVRIEATHYCVKSRGVMDANSETTTTALGGQFKKNAATRAEFLHGIN

SEQ ID NO: 14405 - protein, 218 aa, Salinivibrio sp.; identical to SEQ ID NO: 14404
  misc_feature (1)..(218): tr|A0A2A4GHW6|A0A2A4GHW6_9GAMM GTP cyclohydrolase 1 OS= Salinivibrio sp. YCSC6 OX=2003370 GN=folE PE=3 SV=1

SEQ ID NO: 14406 - protein, 210 aa, Salinivirga cyanobacteriivorans
  misc_feature (1)..(210): tr|A0A0S2I2Y0|A0A0S2I2Y0_9BACT GTP cyclohydrolase 1 OS= Salinivirga cyanobacteriivorans OX=1307839 GN=folE PE=3 SV=1
MRIKANGTQMEDGYTRIDQFNDKATAKLAKHYKGVLEGLGEDPEREGLQDTPKRVAQSMQFLTQGYHQSAEEILNSAKFKEDYRHMVLVKNIDLFSMCEHHMIPFIGKAHVAYIPNGYITGLSKIARVVEVYARRLQVQERMTNQIRDSIQNALDPLGVAVVIEAQHLCMQMRGIQKQNSVTTTSAFTGAFLEKEATREEFIHLIGSKLS

SEQ ID NO: 14407 - protein, 210 aa, Salinivirgaceae bacterium
  misc_feature (1)..(210): tr|A0A2N5ZH33|A0A2N5ZH33_9BACT GTP cyclohydrolase 1 OS= Salinivirgaceae bacterium OX=2053305 GN=folE PE=3 SV=1
MDIRFNGTNSDDGYSRIDQYNDEATEKLAKYYHGVLGAIGEDPDREGLQQTPIRVAKAMQFLTQGYHKSPEDILNSAKFKEDYKHMVLVKNIELYSMCEHHMLPFFGKAHVAYIPDGYITGLSKIARVVEVFARRLQVQERLTNQIRDSIQNALNPIGVAVVIEAQHMCMQMRGIQKQSSITTTSAFTGAFLEKMSTREEFIHLVGAKLS

SEQ ID NO: 14408 - protein, 188 aa, Salipaludibacillus aurantiacus
  misc_feature (1)..(188): tr|A0A1H9P8W6|A0A1H9P8W6_9BACI GTP cyclohydrolase 1 OS= Salipaludibacillus aurantiacus OX=1601833 GN=folE PE=3 SV=1
MSEVNHAKIEEAVTMILEAIGEDPSREGLLDTPKRVARMYEEVFQGISQDPKEHFKTVFGEDHEELVLVKDIPFYSMCEHHLVPFFGKVHIGYIPKGGKVTGLSKLARAVEAVTRRPQLQERITSTIADSIVDTLTPRGVIVVIEAEHMCMTMRGVRKPGSKTVTSAVRGAFERSDAARAEVLSLIKE

SEQ ID NO: 14409 - protein, 188 aa, Salipaludibacillus keqinensis
  misc_feature (1)..(188): tr|A0A323TH93|A0A323TH93_9BACI GTP cyclohydrolase 1 OS= Salipaludibacillus keqinensis OX=2045207 GN=folE PE=3 S V=1
MSSVDHEKIEQAVTMILEAIGEDPNREGLLDTPKRVARMYDEVFQGLRQDPKEHFKTVFGEDHEELVLVKDIPFYSMCEHHLVPFFGKAHIGYLPRGGKVTGLSKLARAVEAVTRRPQLQERITSTIADSMVDTLDPRGVMVVIEAEHMCMTMRGVRKPGSKTVTSAVRGAFEKNDAARAEVLSLIKE

SEQ ID NO: 14410 - protein, 188 aa, Salipaludibacillus neizhouensis
  misc_feature (1)..(188): tr|A0A3A9K7X5|A0A3A9K7X5_9BACI GTP cyclohydrolase 1 OS= Salipaludibacillus neizhouensis OX=885475 GN=folE PE=3 SV=1
MSQVDHEKIEKAVTMILEAVGEDPTREGLLDTPKRVARMYEEVFQGLNQDPREHFKTVFGEDHEELVLVKDIPFYSMCEHHLVPFFGKVHIGYIPKGGKVTGLSKLARAVEAVCRRPQLQERITSTVANSIVETLDPRGVIVVVEAEHMCMTMRGVRKPGSKTVTSAVRGAFERSDAARAEVLSLIKD

SEQ ID NO: 14411 - protein, 363 aa, Salipiger bermudensis
  misc_feature (1)..(363): tr|Q0FNC7|Q0FNC7_SALBH GTP cyclohydrolase FolE2 OS=Sali piger bermudensis (strain DSM 26914 / JCM 13377 / KCTC 12554 / HTCC2601) OX=314265 GN=folE2 PE=3 SV=1
MNVHTPEIDSKPSEEQVRAALDLLRRFADKAQDTEIDAVDPALALLRDGSGYPDLSRIFPQDFEADAAYRETLPDLQNGPASLIRGANRAIQHVGISNFRLPIKFHTRDNGDLTLETSVTGTVSLDADKKGINMSRIMRSFYVHADKTFSFEVIEAALDDYKSDLESFDARIELAFSFPVKVESLRSGLWGFQYYDIALELVETAGVRRKIVHLDYVYSSTCPCSLELSEHARRERNQLATPHSQRSVARVSVELKEGECLWFEDLIDLCRAAVPTETQVMVKREDEQAFAELNAANPIFVEDAARLFAAQLQADPRIGDYRVLASHQESLHSHDAVSVLTEGTTFAHDSLGPKLFPTLIHSH

SEQ ID NO: 14412 - protein, 365 aa, Salipiger marinus; identical to SEQ ID NO: 6748
  misc_feature (1)..(365): tr|A0A1G8JSK5|A0A1G8JSK5_9RHOB GTP cyclohydrolase FolE2 OS=Salipiger marinus OX=555512 GN=folE2 PE=3 SV=1

SEQ ID NO: 14413 - protein, 364 aa, Salipiger mucosus
  misc_feature (1)..(364): tr|S9RDN7|S9RDN7_9RHOB GTP cyclohydrolase FolE2 OS=Sali piger mucosus DSM 16094 OX=1123237 GN=folE2 PE=3 SV=1
MNLHTPEIDRKPSEEEARAALELLRRYTSKAQDAEIEALDPALGALVPGASAYPELSRDYPEGFDADADYKATLPDLQNGPSALIRGENRAIQHVGISNFRLPIHYHTRDNGDLMLETSVTGTVSLEADKKGINMSRIMRSFYRHAEKTFSFEVIEAALDDYKSDLESFDARIQMRFSFPMKVESLRSGLSGYQYYDIALELVETAGVRRKIMHLDYVYSSTCPCSLELSEHARRERGQLATPHSQRSVARISVELAEGDCLWFEDVIDMCRAAVPTETQVMVKREDEQAFAELNAANPIFVEDAARLFAERLQAEPRVGDFRVLASHQESLHSHDAVSVLTEGETFASESLDPRLFSSLFHVG

SEQ ID NO: 14414 - protein, 363 aa, Salipiger profundus
  misc_feature (1)..(363): tr|A0A1U7D7D9|A0A1U7D7D9_9RHOB GTP cyclohydrolase FolE2 OS=Salipiger profundus OX=1229727 GN=folE2 PE=3 SV=1
MNVHTPEIDRKPSREEAAEALALLRRFADTAQDGEIDALDPAIAALRDGVVYPELSRDYPHGFSVDEAYRDTLPDLQNGPASLIKGEDRAIQHVGISNFRLPIRYRSRDNGDLTLETSVTGTVSLDAGKKGINMSRIMRSFYAHAEKTFSFEVIEAALDDYKTDLGSFDARIQMRLSFPMMMQSLRSGLSGYQYYDIALELVETAGVRRKILHLDYVYSSTCPCSLELSEHARRERGQLATPHSQRSVARVSVELTEDGCLWFEDLIDLCRKAVATETQVMVKREDEQAFAELNAANPIFVEDAARLFAGQLQADPRIGDYRVLASHQESLHSHDAVSVLTEGTTFANESLDPKLFASLFHVG

SEQ ID NO: 14415 - protein, 366 aa, Salipiger sp.
  misc_feature (1)..(366): tr|A0A4Q3Z472|A0A4Q3Z472_9RHOB GTP cyclohydrolase FolE2 OS=Salipiger sp. IMCC34102 OX=2510647 GN=folE2 PE=3 SV =1
MNKITRDAPGPTRAQAEEALQLLRDWAARAAPGEAIPLDPELADLVEAPRASDYPVLAHAYPEDFKIDAAYRAGLPDLQNGPTSLIRGARTAIQHVGISNFRLPIRYLARAGGERTLETSVTGTVSLEAEKKGINMSRIMRTFYDYAEETFSFDVMARTLDSYLGDLDSVDARLQMRLSYPMKVESLRSGLAGYQYYDIALEVVDRGGERLRIVHLDYVYSSTCPCSLELSEHARRTRGQLATPHSQRSVARLSAVIAPDQPVLWFEDLIELARAAVPTETQVMVKREDEQAFAELNAANPIFVEDAARLFTEQLRADPRIGDFRVMASHQESLHSHDAVSVLTEGPTFAAVSLDPRTFATLAHGA

SEQ ID NO: 14416 - protein, 365 aa, Salipiger thiooxidans
  misc_feature (1)..(365): tr|A0A1G7IE81|A0A1G7IE81_9RHOB GTP cyclohydrolase FolE2 OS=Salipiger thiooxidans OX=282683 GN=folE2 PE=3 SV=1
MNVFTPEIDRKPSKEEAAKALEVLRSFAEKALDYEIDALDPGIAALRDGGVPYPDLSRVYPTAFRADEAYRETLPDLQNGPSSLIKGENRLIQHVGISNFRLPIHYRTRDHGELTLETSVTGTVSLEADKKGINMSRIMRSFYAHAEKTFSFEVIEAALDDYKSDLESFDARIMMRLSFPVRRDSLRSGLSGYQYYDIALELVELDGVRRKILHLDYVYSSTCPCSLELSEHARRTRGQLATPHSQRSVARVSAVLANEGDCLWFEDLIGLCRKAVPTETQVMVKREDEQAFAELNAANPIFVEDAARLFAEQLQADPRIGDFRVLASHQESLHSHDAVSVLTEGTTFADDSLDPKLFSTLFHVG

SEQ ID NO: 14417 - protein, 188 aa, Salisediminibacterium haloalkalitolerans
  misc_feature (1)..(188): tr|A0A1H9P3W1|A0A1H9P3W1_9BACI GTP cyclohydrolase 1 OS= Salisediminibacterium haloalkalitolerans OX=1464123 GN= folE PE=3 SV=1
MEQIDQDKIQEAVKMILEAIGDDPEREGIQDTPKRVAKMYSEVFAGMFQDPKEHLKTVFGEDHEELVLVKDIPFYSMCEHHLVPFFGKAHIGYLPQGGKVTGLSKIARALESVASRPQLQERITSTVADSMVETLNPRGVIVVVEAEHMCMTMRGVNKPGSKTVTSAVRGAFENSEAARSEVLSLIKE

SEQ ID NO: 14418 - protein, 305 aa, Saliterribacillus persicus
  misc_feature (1)..(305): tr|A0A368X7V9|A0A368X7V9_9BACI GTP cyclohydrolase FolE2 OS=Saliterribacillus persicus OX=930114 GN=folE2 PE=3 SV=1
MNDNEFNPINLPSKIDRHKLFGSVNPGPKSKPTEKNEMADLQNTKKDFMFDIDAVGITNVKHPITVVSNIAPTEQSTIGEFTFTSSIHKEHKGTNMSRFTEQLTEVYNENGFTIRIENLKNFVLNLAKRLEQKDASMTLKFPWFYERKGPYSKLSGMNHAEASITVTFKERQGFKLEVGLEGKVTTLCPCSKEISEYSAHNQRGVVKVNAELTEDFDEQETDWKEALLEAMESNASARLHPVLKRPDEKIVTELAYENPRFVEDMVRLVAADLYEMDFVSKFSVTCQNEESIHLHDAIATINFEK

SEQ ID NO: 14419 - protein, 222 aa, Salmonella abony
  misc_feature (1)..(222): tr|A0A5J0E293|A0A5J0E293_SALAB GTP cyclohydrolase I Fol E OS=Salmonella abony OX=29482 GN=folE PE=4 SV=1
MPSLSKEAALVHDALVARGLETPLRPPMDELDNETRKSLIAGHMTEIMQLLNLDLSDDSLMETPHRIAKMYVDEIFAGLDYANFPKITLIENKMKVDEMVTVRDITLTSTCEHHFVTIDGKATVAYIPKDSVIGLSKINRIVQFFAQRPQVQERLTQQILTALQTLLGTNNVAVSIDAVHYCVKARGIRDATSATTTTSLGGLFKSSQNTRQEFLRAVRHHP

SEQ ID NO: 14420 - protein, 222 aa, Salmonella agona; identical to SEQ ID NO: 14419
  misc_feature (1)..(222): sp|B5EYP3|GCH1_SALA4 GTP cyclohydrolase 1 OS=Salmonella agona (strain SL483) OX=454166 GN=folE PE=3 SV=1

SEQ ID NO: 14421 - protein, 222 aa, Salmonella anatum; identical to SEQ ID NO: 14419
  misc_feature (1)..(222): tr|A0A2T8LXK8|A0A2T8LXK8_SALAN GTP cyclohydrolase 1 OS= Salmonella anatum OX=58712 GN=folE PE=3 SV=1

SEQ ID NO: 14422 - protein, 222 aa, Salmonella arizonae; identical to SEQ ID NO: 14419
  misc_feature (1)..(222): sp|A9MK63|GCH1_SALAR GTP cyclohydrolase 1 OS=Salmonella arizonae (strain ATCC BAA-731 / CDC346-86 / RSK2980) O X=41514 GN=folE PE=3 SV=1

SEQ ID NO: 14423 - protein, 222 aa, Salmonella berta; identical to SEQ ID NO: 14419
  misc_feature (1)..(222): tr|A0A3V6R1S7|A0A3V6R1S7_SALBE GTP cyclohydrolase 1 OS= Salmonella berta OX=28142 GN=folE PE=3 SV=1

SEQ ID NO: 14424 - protein, 222 aa, Salmonella blockley; identical to SEQ ID NO: 14419
  misc_feature (1)..(222): tr|A0A5I2JXM9|A0A5I2JXM9_SALBL GTP cyclohydrolase I Fol E OS=Salmonella blockley OX=57741 GN=folE PE=4 SV=1

SEQ ID NO: 14425 - protein, 222 aa, Salmonella bongori
  misc_feature (1)..(222): tr|A0A248K7T1|A0A248K7T1_SALBN GTP cyclohydrolase 1 OS= Salmonella bongori serovar 66:z41:- str. SA19983605 OX= 1243617 GN=folE PE=3 SV=1
MPSLSKEAALVHDALVARGLETPLRPAVDELDNETRKRLIAGHMTEIMQLLNLDLSDDSLMETPHRIAKMYVDEIFAGLDYTNFPKITLIENKMKVDEMVTVRDITLTSTCEHHFVTIDGKATVAYIPKDAVIGLSKINRIVQFFAQRPQVQERLTQQILTALQTLLGTNNVAVSIDAVHYCVKARGIRDATSATTTTSLGGLFKSSQNTRQEFLRAVRHHS

SEQ ID NO: 14426 - protein, 222 aa, Salmonella bongori; identical to SEQ ID NO: 14425
  misc_feature (1)..(222): tr|A0A5I6N0A3|A0A5I6N0A3_SALBN GTP cyclohydrolase I Fol E OS=Salmonella bongori CFSAN000510 OX=1299282 GN=folE PE=4 SV=1

SEQ ID NO: 14427 - protein, 222 aa, Salmonella choleraesuis
  misc_feature (1)..(222): sp|Q57ME6|GCH1_SALCH GTP cyclohydrolase 1 OS=Salmonella choleraesuis (strain SC-B67) OX=321314 GN=folE PE=3 SV =1
MPSLSKEAALVHDALVARGLETPLRPPMDELDNETRKSLIAGHMTEIMQLLNLDLSDDSLMETPHRIAKMYVDEIFAGLDYANFPKITLIENKMKVDEMVTVRDITLTSTCEHHFVTIDGKATVAYIPKDSVIGLSKINRIVQFFAQRPQVQERLTQQILTVLQTLLGTNNVAVSIDAVHYCVKARGIRDATSATTTTSLGGLFKSSQNTRQEFLRAVRHHP

SEQ ID NO: 14428 - protein, 222 aa, Salmonella derby; identical to SEQ ID NO: 14419
  misc_feature (1)..(222): tr|A0A3V8R203|A0A3V8R203_SALDE GTP cyclohydrolase 1 OS= Salmonella derby OX=28144 GN=folE PE=3 SV=1

SEQ ID NO: 14429 - protein, 170 aa, Salmonella diarizonae
  misc_feature (1)..(170): tr|A0A379TWH4|A0A379TWH4_SALDZ GTP cyclohydrolase 1 OS= Salmonella diarizonae OX=59204 GN=folE PE=3 SV=1
MPSLSKEAALVHEALVARGLETPLRPPMDELDNETRKSLIAGHMTEIMLLLNLDLSDDSLMETPHRIAKMYVDEIFAGLDYANFPKITLIENKMKVDEMVTVRDITLTSTCEHHFVTIDGKATVAYIPKDSVIGLSKINRIVQFFAQRPQVQERLTQQILTALQTLLRHQ

SEQ ID NO: 14430 - protein, 222 aa, Salmonella diarizonae
  misc_feature (1)..(222): tr|A0A2I5HEJ5|A0A2I5HEJ5_SALDZ GTP cyclohydrolase 1 OS= Salmonella diarizonae OX=59204 GN=folE PE=3 SV=1
MPSLSKEAALVHEALVARGLETPLRPPMDELDNETRKSLIAGHMTEIMLLLNLDLSDDSLMETPHRIAKMYVDEIFAGLDYANFPKITLIENKMKVDEMVTVRDITLTSTCEHHFVTIDGKATVAYIPKDSVIGLSKINRIVQFFAQRPQVQERLTQQILTALQTLLGTNNVAVSIDAVHYCVKARGIRDATSATTTTSLGGLFKSSQNTRQEFLRAVRHHH

SEQ ID NO: 14431 - protein, 222 aa, Salmonella dublin; identical to SEQ ID NO: 14419
  misc_feature (1)..(222): sp|B5FNJ7|GCH1_SALDC GTP cyclohydrolase 1 OS=Salmonella dublin (strain CT_02021853) OX=439851 GN=folE PE=3 SV= 1

SEQ ID NO: 14432 - protein, 222 aa, Salmonella dublin; identical to SEQ ID NO: 14419
  misc_feature (1)..(222): tr|A0A3T3IM37|A0A3T3IM37_SALDU GTP cyclohydrolase 1 OS= Salmonella dublin OX=98360 GN=folE PE=3 SV=1

SEQ ID NO: 14433 - protein, 222 aa, Salmonella enterica; identical to SEQ ID NO: 14419
  misc_feature (1)..(222): tr|G5QLJ2|G5QLJ2_SALRU GTP cyclohydrolase 1 OS=Salmonel la enterica subsp. enterica serovar Rubislaw str. A4-65 3 OX=913081 GN=folE PE=3 SV=1

SEQ ID NO: 14434 - protein, 222 aa, Salmonella enterica
  misc_feature (1)..(222): tr|A0A379Q1J6|A0A379Q1J6_SALER GTP cyclohydrolase 1 OS= Salmonella enterica OX=28901 GN=folE PE=3 SV=1
MPSLSKEAALVHDALVARGLETPLRPPMDELDNETRKSLIAGHMTEIMQLLNLDLSDDSLMETPHRIAKMYVDEIFAGLDYANFPKITLIENKMKVDEMVTVRDITLTSTCEHHFVIIDGKATVAYIPKDSVIGLSKINRIVQFFAQRPQVQERLTQQILTALQTLLGTNNVAVSIDAVHYCVKARGIRDATSATTTTSLGGLFKSSQNTRQEFLRAVRHHP

SEQ ID NO: 14435 - protein, 222 aa, Salmonella enteritidis; identical to SEQ ID NO: 14419
  misc_feature (1)..(222): sp|B5R163|GCH1_SALEP GTP cyclohydrolase 1 OS=Salmonella enteritidis PT4 (strain P125109) OX=550537 GN=folE PE= 3 SV=1

SEQ ID NO: 14436 - protein, 222 aa, Salmonella enteritidis; identical to SEQ ID NO: 14430
  misc_feature (1)..(222): tr|A0A3R0QB36|A0A3R0QB36_SALEN GTP cyclohydrolase 1 OS= Salmonella enteritidis OX=149539 GN=folE PE=3 SV=1

SEQ ID NO: 14437 - protein, 222 aa, Salmonella gallinarum
  misc_feature (1)..(222): sp|B5RC32|GCH1_SALG2 GTP cyclohydrolase 1 OS=Salmonella gallinarum (strain 287/91 / NCTC 13346) OX=550538 GN=f olE PE=3 SV=1
MPSLSKEAALVHDALVARGLETPLRPPMDELDNETRKSLIAGHMTEIMQLLNLDLSDDSLMETPHRIAKMYVDEIFAGLDYANFPKITLIENKMKVDEMVTVRDITLTSTCEHHFVTIDGKATVAYIPKDYVIGLSKINRIVQFFAQRPQVQERLTQQILTALQTLLGTNNVAVSIDAVHYCVKARGIRDATSATTTTSLGGLFKSSQNTRQEFLRAVRHHP

SEQ ID NO: 14438 - protein, 222 aa, Salmonella gallinarum; identical to SEQ ID NO: 14437
  misc_feature (1)..(222): tr|A0A3V9NKN5|A0A3V9NKN5_SALGL GTP cyclohydrolase 1 OS= Salmonella gallinarum OX=594 GN=folE PE=3 SV=1

SEQ ID NO: 14439 - protein, 222 aa, Salmonella hadar; identical to SEQ ID NO: 14419
  misc_feature (1)..(222): tr|A0A3V2W8F8|A0A3V2W8F8_SALHA GTP cyclohydrolase 1 OS= Salmonella hadar OX=149385 GN=folE PE=3 SV=1

SEQ ID NO: 14440 - protein, 222 aa, Salmonella heidelberg; identical to SEQ ID NO: 14419
  misc_feature (1)..(222): sp|B4TAL5|GCH1_SALHS GTP cyclohydrolase 1 OS=Salmonella heidelberg (strain SL476) OX=454169 GN=folE PE=3 SV=1

SEQ ID NO: 14441 - protein, 222 aa, Salmonella houtenae
  misc_feature (1)..(222): tr|A0A1J6YLX8|A0A1J6YLX8_SALHO GTP cyclohydrolase 1 OS= Salmonella houtenae OX=59205 GN=folE PE=3 SV=1
MPSLSKEAALVHDALVARGLETPLRPPMDELDNETRKRLIAGHMTEIMQLLNLDLSDDSLMETPHRIAKMYVDEIFAGLDYANFPKITLIENKMKVDEMVTVRDITLTSTCEHHFVTIDGKATVAYIPKDSVIGLSKINRIVQFFAQRPQVQERLTQQILTALQTLLGTNNVAVSIDAVHYCVKARGIRDATSATTTTSLGGLFKSSQNTRQEFLRAVRHHH

SEQ ID NO: 14442 - protein, 195 aa, Salmonella houtenae
  misc_feature (1)..(195): tr|A0A484W132|A0A484W132_SALHO GTP cyclohydrolase 1 OS= Salmonella houtenae OX=59205 GN=folE PE=3 SV=1
MDELDNETRKRLIAGHMTEIMQLLNLDLSDDSLMETPHRIAKMYVDEIFAGLDYANFPKITLIENKMKVDEMVTVRDITLTSTCEHHFVTIDGKATVAYIPKDSVIGLSKINRIVQFFAQRPQVQERLTQQILTALQTLLGTNNVAVSIDAVHYCVKARGIRDATSATTTTSLGGLFKSSQNTRQEFLRAVRHHH

SEQ ID NO: 14443 - protein, 222 aa, Salmonella infantis; identical to SEQ ID NO: 14419
  misc_feature (1)..(222): tr|A0A5F1JIC5|A0A5F1JIC5_SALIN GTP cyclohydrolase 1 OS= Salmonella infantis OX=595 GN=folE PE=3 SV=1

SEQ ID NO: 14444 - protein, 222 aa, Salmonella infantis
  misc_feature (1)..(222): tr|A0A3R0D282|A0A3R0D282_SALIN GTP cyclohydrolase 1 OS= Salmonella infantis OX=595 GN=folE PE=3 SV=1
MPSLSKESALVHDALVARGLETPLRPPMDELDNETRKSLIAGHMTEIMQLLNLDLSDDSLMETPHRIAKMYVDEIFAGLDYANFPKITLIENKMKVDEMVTVRDITLTSTCEHHFVTIDGKATVAYIPKDSVIGLSKINRIVQFFAQRPQVQERLTQQILTALQTLLGTNNVAVSIDAVHYCVKARGIRDATSATTTTSLGGLFKSSQNTRQEFLRAVRHHP

SEQ ID NO: 14445 - protein, 222 aa, Salmonella montevideo; identical to SEQ ID NO: 14419
  misc_feature (1)..(222): tr|A0A3A3JTU5|A0A3A3JTU5_SALMO GTP cyclohydrolase 1 OS= Salmonella montevideo OX=115981 GN=folE PE=3 SV=1

SEQ ID NO: 14446 - protein, 222 aa, Salmonella moscow; identical to SEQ ID NO: 14419
  misc_feature (1)..(222): tr|A0A5H7LMA5|A0A5H7LMA5_SALMC GTP cyclohydrolase I Fol E OS=Salmonella moscow OX=28146 GN=folE PE=4 SV=1

SEQ ID NO: 14447 - protein, 222 aa, Salmonella muenchen; identical to SEQ ID NO: 14419
  misc_feature (1)..(222): tr|A0A3T3EUP9|A0A3T3EUP9_SALMU GTP cyclohydrolase 1 OS= Salmonella muenchen OX=596 GN=folE PE=3 SV=1

SEQ ID NO: 14448 - protein, 222 aa, Salmonella muenster; identical to SEQ ID NO: 14419
  misc_feature (1)..(222): tr|A0A5H9DTK9|A0A5H9DTK9_SALMS GTP cyclohydrolase I Fol E OS=Salmonella muenster OX=82689 GN=folE PE=3 SV=1

SEQ ID NO: 14449 - protein, 222 aa, Salmonella newport; identical to SEQ ID NO: 14419
  misc_feature (1)..(222): sp|B4SY26|GCH1_SALNS GTP cyclohydrolase 1 OS=Salmonella newport (strain SL254) OX=423368 GN=folE PE=3 SV=1

SEQ ID NO: 14450 - protein, 222 aa, Salmonella newport; identical to SEQ ID NO: 14419
  misc_feature (1)..(222): tr|A0A0R9NC57|A0A0R9NC57_SALNE GTP cyclohydrolase 1 OS= Salmonella newport OX=108619 GN=folE PE=3 SV=1

SEQ ID NO: 14451 - protein, 222 aa, Salmonella oranienberg; identical to SEQ ID NO: 14419
  misc_feature (1)..(222): tr|A0A3Z0YT95|A0A3Z0YT95_SALON GTP cyclohydrolase 1 OS= Salmonella oranienberg OX=28147 GN=folE PE=3 SV=1

SEQ ID NO: 14452 - protein, 222 aa, Salmonella paratyphi; identical to SEQ ID NO: 14419
  misc_feature (1)..(222): sp|B5BE43|GCH1_SALPK GTP cyclohydrolase 1 OS=Salmonella paratyphi A (strain AKU_12601) OX=554290 GN=folE PE=3 SV=1

SEQ ID NO: 14453 - protein, 222 aa, Salmonella paratyphi; identical to SEQ ID NO: 14419
  misc_feature (1)..(222): tr|A0A5I3LKH2|A0A5I3LKH2_SALPT GTP cyclohydrolase I Fol E OS=Salmonella paratyphi A OX=54388 GN=folE PE=3 SV=1

SEQ ID NO: 14454 - protein, 222 aa, Salmonella potsdam; identical to SEQ ID NO: 14419
  misc_feature (1)..(222): tr|A0A5I6S1Y8|A0A5I6S1Y8_SALPO GTP cyclohydrolase I Fol E OS=Salmonella potsdam OX=597 GN=folE PE=4 SV=1

SEQ ID NO: 14455 - protein, 222 aa, Salmonella rubislaw; identical to SEQ ID NO: 14419
  misc_feature (1)..(222): tr|A0A3V7IN71|A0A3V7IN71_SALRU GTP cyclohydrolase 1 OS= Salmonella rubislaw OX=598 GN=folE PE=3 SV=1

SEQ ID NO: 14456 - protein, 222 aa, Salmonella schwarzengrund; identical to SEQ ID NO: 14419
  misc_feature (1)..(222): sp|B4TNQ0|GCH1_SALSV GTP cyclohydrolase 1 OS=Salmonella schwarzengrund (strain CVM19633) OX=439843 GN=folE PE= 3 SV=1

SEQ ID NO: 14457 - protein, 222 aa, Salmonella senftenberg
  misc_feature (1)..(222): tr|A0A3V2LLV6|A0A3V2LLV6_SALSE GTP cyclohydrolase 1 OS= Salmonella senftenberg OX=28150 GN=folE PE=3 SV=1
MPSLSKEAALVHDALVARGLETPLRPPMDELDNEKRKSLIAGHMTEIMQLLNLDLSDDSLMETPHRIAKMYVDEIFAGLDYANFPKITLIENKMKVDEMVTVRDITLTSTCEHHFVTIDGKATVAYIPKDSVIGLSKINRIVQFFAQRPQVQERLTQQILTALQTLLGTNNVAVSIDAVHYCVKARGIRDATSATTTTSLGGLFKSSQNTRQEFLRAVRHHP

SEQ ID NO: 14458 - protein, 222 aa, Salmonella senftenberg; identical to SEQ ID NO: 14419
  misc_feature (1)..(222): tr|A0A3V9FKQ7|A0A3V9FKQ7_SALSE GTP cyclohydrolase 1 OS= Salmonella senftenberg OX=28150 GN=folE PE=3 SV=1

SEQ ID NO: 14459 - protein, 222 aa, Salmonella sp.; identical to SEQ ID NO: 14419
  misc_feature (1)..(222): tr|A0A509BW66|A0A509BW66_9ENTR GTP cyclohydrolase 1 OS= Salmonella sp. NCTC 6947 OX=2583581 GN=folE PE=3 SV=1

SEQ ID NO: 14460 - protein, 222 aa, Salmonella sp.; identical to SEQ ID NO: 14419
  misc_feature (1)..(222): tr|A0A509BAI9|A0A509BAI9_9ENTR GTP cyclohydrolase 1 OS= Salmonella sp. NCTC 3046 OX=2583580 GN=folE PE=3 SV=1

SEQ ID NO: 14461 - protein, 222 aa, Salmonella thompson; identical to SEQ ID NO: 14419
  misc_feature (1)..(222): tr|A0A403SLA8|A0A403SLA8_SALTH GTP cyclohydrolase 1 OS= Salmonella thompson OX=600 GN=folE PE=3 SV=1

SEQ ID NO: 14462 - protein, 222 aa, Salmonella typhi; identical to SEQ ID NO: 14419
  misc_feature (1)..(222): sp|P64210|GCH1_SALTI GTP cyclohydrolase 1 OS=Salmonella typhi OX=90370 GN=folE PE=3 SV=2

SEQ ID NO: 14463 - protein, 222 aa, Salmonella typhi; identical to SEQ ID NO: 14419
  misc_feature (1)..(222): tr|A0A4V6HLV5|A0A4V6HLV5_SALTI GTP cyclohydrolase 1 OS= Salmonella typhi OX=90370 GN=folE PE=3 SV=1

SEQ ID NO: 14464 - protein, 222 aa, Salmonella typhimurium; identical to SEQ ID NO: 14419
  misc_feature (1)..(222): sp|P64209|GCH1_SALTY GTP cyclohydrolase 1 OS=Salmonella typhimurium (strain LT2 / SGSC1412 / ATCC 700720) OX=9 9287 GN=folE PE=3 SV=2

SEQ ID NO: 14465 - protein, 222 aa, Salmonella typhimurium; identical to SEQ ID NO: 14419
  misc_feature (1)..(222): tr|A0A3Z6P083|A0A3Z6P083_SALTU GTP cyclohydrolase 1 OS= Salmonella typhimurium (strain ATCC 68169 / UK-1) OX=99 0282 GN=folE PE=3 SV=1

SEQ ID NO: 14466 - protein, 222 aa, Salmonella virchow; identical to SEQ ID NO: 14419
  misc_feature (1)..(222): tr|A0A3V4BFA9|A0A3V4BFA9_SALVI GTP cyclohydrolase 1 OS= Salmonella virchow OX=48409 GN=folE PE=3 SV=1

SEQ ID NO: 14467 - protein, 194 aa, Salsuginibacillus halophilus
  misc_feature (1)..(194): tr|A0A2P8HWD5|A0A2P8HWD5_9BACI GTP cyclohydrolase 1 OS= Salsuginibacillus halophilus OX=517424 GN=folE PE=3 SV= 1
MSSFDHEKIQQAVRMMLEGIGEDPDREGLLDTPKRVAKMYEEVFQGLYESPEEHLMTVFGEDHEELVLVKDIPFYSMCEHHLVPFYGHAHVGYIPKDGKVTGLSKLARTVEAVTRRPQLQERITSSVAEAIRETLAPHGVMVVVEAEHMCMTMRGVKKPGAVTVTSAVRGSFETDAAARSEVLAFLDRNSKPGG

SEQ ID NO: 14468 - protein, 220 aa, Samsonia erythrinae
  misc_feature (1)..(220): tr|A0A4R3VUW6|A0A4R3VUW6_9GAMM GTP cyclohydrolase 1 OS= Samsonia erythrinae OX=160434 GN=folE PE=3 SV=1
MSSLSKEAVMVHEALLARGLETPLRGALLERDMRKQRISEHMTEIMKLLSLDLSDDSLAETPTRIAKMYVDEIFSGLDYANFPKITIIENKMKVDEMVTVRDITLTSTCEHHFVTIDGKATVAYIPKDGVIGLSKLNRIVQFFSQRPQVQERLTQQILVALQTLLGTNNVAVSIDAVHYCVKARGIRDATSATTTTSLGGLFKSSQNTRQEFLRAVRHHN

SEQ ID NO: 14469 - protein, 209 aa, Sandaracinobacter sp.
  misc_feature (1)..(209): tr|A0A501XEV2|A0A501XEV2_9SPHN GTP cyclohydrolase 1 OS= Sandaracinobacter sp. PAMC 28131 OX=1715348 GN=folE PE= 3 SV=1
MMMADYQMQQDDPPVADRDAAIPDTVLDAVRTLITWAGDDPTREGLLDTPGRVARAYKEYFRGYGEDPREHLLRTFREVGGYDEIVLLRDIPFHSHCEHHMAPIIGKVHIAYLPTDRVVGLSKLARVALGFARRLQVQERLTAEIADAIQEVLNPRGVAVVVEASHACMSARGVMTTGATMTTSRMMGVFREDERSRKEVLALMGAGSR

SEQ ID NO: 14470 - protein, 261 aa, Sandaracinus sp.; identical to SEQ ID NO: 11399
  misc_feature (1)..(261): tr|A0A2E0TGI0|A0A2E0TGI0_9DELT GTP cyclohydrolase FolE2 OS=Sandaracinus sp. OX=2024858 GN=folE2 PE=3 SV=1

SEQ ID NO: 14471 - protein, 252 aa, Sandaracinus sp.
  misc_feature (1)..(252): tr|A0A2D9T1H7|A0A2D9T1H7_9DELT GTP cyclohydrolase FolE2 OS=Sandaracinus sp. OX=2024858 GN=folE2 PE=3 SV=1
MRDVQNEPEERGLTLDAVGVAGVRLPVVAFGGPTVAVADLEVSLAADRRGTHMSRLVELLHQHRETVDFAGVEALLEATADRLEAEEVRVTLRFAHFVTRTAPVSGTAGLLDLDVAFVGRRAGGRNTVQLEVTVPVQSLCPCSKAVSDYGAHNQRGRVTVQITPTGPGLEPDALAALVEAEASAPIYPIIKRGDERHVTMQAYDNPVFVEDLTRGVAAALEAHPLVGAYRVRVVNEESIHNHQAVAERSGGR

SEQ ID NO: 14472 - protein, 197 aa, Sandarakinorhabdus cyanobacteriorum
  misc_feature (1)..(197): tr|A0A255YLF9|A0A255YLF9_9SPHN GTP cyclohydrolase 1 OS= Sandarakinorhabdus cyanobacteriorum OX=1981098 GN=folE PE=3 SV=1
MDAPAPADFVTIPQAEAEEAVRTLIRWTGDDPTREGLLDTPKRVAKAWREYTKGYAEDPGQHLSRTFAEVGGYDEIVILRDIPFQSHCEHHMAPIIGKGHIAYLPRSRVVGISKLARVLHGYARRLQVQERLTAEVADCIQTHLDPVGVAVVIEATHACMSARGVMTPGVVMTTSRMMGVFRDEPSSRSEVLRLMGK

SEQ ID NO: 14473 - protein, 207 aa, Sandarakinorhabdus sp.
  misc_feature (1)..(207): tr|A0A552UFH8|A0A552UFH8_9SPHN GTP cyclohydrolase 1 OS= Sandarakinorhabdus sp. LB1R16 OX=2593303 GN=folE PE=3 S V=1
MDDFLDDGPERSVQAMGHEPIPQARAEDAVRELLRWAGDDPEREGLLDTPARVARAFREYFRGYLEDPGIHLSRTFGEVGGYDEIVLLKDIPFQSHCEHHMAPIIGKAHIAYLPRDRVVGISKLARVLHGYARRLQVQERLTAEVADCIQHHLDPVGVAVVIEATHACMSARGVMTAGVVMTTSRMMGVFRDDDRSRKEVLALMGRG

SEQ ID NO: 14474 - protein, 201 aa, Sanguibacter antarcticus
  misc_feature (1)..(201): tr|A0A2A9E862|A0A2A9E862_9MICO GTP cyclohydrolase 1 OS= Sanguibacter antarcticus OX=372484 GN=folE PE=3 SV=1
MTPTGAPASPADAGEVDLERAAAAVRELLLAIGEDPDRDGLRDTPARVARACTEIFSGLRQSPADVLNAVFDIGHEEMILVKDIEVYSTCEHHLVPFHGVAHVGYIPGPDGRVTGLSKLARLVDVFARRPQIQERLTAQVADSLVEALSPAGVIVVVECEHLCMSMRGVRKPGSRTVTSAVRGQMRNPATRAEAMSLIIGR

SEQ ID NO: 14475 - protein, 200 aa, Sanguibacter gelidistatuariae
  misc_feature (1)..(200): tr|A0A1G6HSX5|A0A1G6HSX5_9MICO GTP cyclohydrolase 1 OS= Sanguibacter gelidistatuariae OX=1814289 GN=folE PE=3 S V=1
MTDPNESPMPAAEVDFARAEAAVRELLIAVGEDPDREGLLDTPGRVARAYAETFAGLRQNPGDVLNAVFDIGGHEEMILVKDIEVYSTCEHHLVPFHGVAHVGYIPGLDGRVTGLSKLARLVDVFARRPQVQERLTAQIADALVEFLAPRGVIVVIECEHLCMSMRGVRKAGSRTVTSAVRGQMRDGATRAEAMSLIIGR

SEQ ID NO: 14476 - protein, 219 aa, Sanguibacter keddieii
  misc_feature (1)..(219): tr|D1BDA0|D1BDA0_SANKS GTP cyclohydrolase 1 OS=Sanguiba cter keddieii (strain ATCC 51767 / DSM 10542 / NCFB 302 5 / ST-74) OX=446469 GN=folE PE=3 SV=1
MSDATGHLDASGAPAEAAGVDLDGAGVHAEHAQVDLPRAAAAVRELLIAVGEDPDREGLVDTPARVARAYAETFAGLRQDPADVLNAVFDIGHEEMILVRDIELYSTCEHHLVPFHGVAHVGYIPGEDGRVTGLSKLARLVDVYAKRPQVQERLTAQVADALVEHLSPRGVIVVIECEHLCMSMRGVRKPGSRTLTSAVRGQMRDGATRAEAMSLITGR

SEQ ID NO: 14477 - protein, 188 aa, Sanguibacter marinus
  misc_feature (1)..(188): tr|A0A1I2GWW1|A0A1I2GWW1_9MICO GTP cyclohydrolase 1 OS= Sanguibacter marinus OX=285351 GN=folE PE=3 SV=1
MSVDLARAEAAVRELLLAVGEDPDRDGLTDTPGRVARMYAETFAGLDQDPETILGTTFDIDHEEMILVRDIEVYSTCEHHLVPFHGVAHVGYIPGADGRVTGLSKLARLVDLYARRPQVQERLTTQVADALVQHLAPRGVIVVIEAEHLCMSMRGVRKPGSRTLTSAVRGQMRDGATRAEAMSLITGR

SEQ ID NO: 14478 - protein, 203 aa, Sanguibacter soli
  misc_feature (1)..(203): tr|A0A2A9EEG2|A0A2A9EEG2_9MICO GTP cyclohydrolase 1 OS= Sanguibacter soli OX=442709 GN=folE PE=3 SV=1
MSEHLMPEAGAAVAAGHVDLARAEAAVRELLLAVGEDPDREGLLETPARVARAYAETFAGLHQDPADVLSTTFDIGHDEMVLVKDIELYSTCEHHLVPFHGVAHVGYIPNVDGRVTGLSKLARLVDVFARRPQVQERLTSQVADALVEHLQPRGVIVVIECEHLCMSMRGVRKPGSRTVTSAVRGQMRNGTTRAEAMSLILGH

SEQ ID NO: 14479 - protein, 202 aa, Sanguibacter sp.
  misc_feature (1)..(202): tr|A0A0Q6FYM6|A0A0Q6FYM6_9MICO GTP cyclohydrolase 1 OS= Sanguibacter sp. Leaf3 OX=1736209 GN=folE PE=3 SV=1
MSDVTDESGVHAEHGQVDLPRAAAAVRELLIAVGEDPDREGLLDTPARVARAYAETFAGLRQDPADVLNAVFDIGHEEMILVRDIEVYSTCEHHLVPFHGVAHVGYIPGVDGRVTGLSKLARLVDVFAKRPQVQERLTAQVADALVEHLAPRGVIVVIECEHLCMSMRGVRKPGSRTVTSAVRGQMREAATRAEAMSLIVGR

SEQ ID NO: 14480 - protein, 207 aa, Sanguibacteroides justesenii
  misc_feature (1)..(207): tr|A0A0C3RJT4|A0A0C3RJT4_9PORP GTP cyclohydrolase 1 OS= Sanguibacteroides justesenii OX=1547597 GN=folE PE=3 SV =1
MDFETDNNNEFYHKIECFNKERTEKLSYHYNEIIKLLGEDPCREGLVKTPYRVAKAMQFMTQGYTQDPEKILRSALFKEDYRQMVIVKDIEIYSLCEHHMLPFIGRAHVAYIPNGYITGLSKIARVVEAFARRLQVQERLTHDIKTCIQNTLNPLGVAVVIEAQHMCMILRGVQKQHSVTTTSDFSGAFEKLATREEFIRLISNKFH

SEQ ID NO: 14481 - protein, 208 aa, Sanguibacteroides justesenii
  misc_feature (1)..(208): tr|A0A318N7X9|A0A318N7X9_9PORP GTP cyclohydrolase 1 OS= Sanguibacteroides justesenii OX=1547597 GN=folE PE=3 SV =1
MMDFETDNNNEFYHKIECFNKERTEKLSYHYNEIIKLLGEDPCREGLVKTPYRVAKAMQFMTQGYTQDPEKILRSALFKEDYRQMVIVKDIEIYSLCEHHMLPFIGRAHVAYIPNGYITGLSKIARVVEAFARRLQVQERLTHDIKTCIQNTLNPLGVAVVIEAQHMCMILRGVQKQHSVTTTSDFSGAFEKLATREEFIRLISNKFH

SEQ ID NO: 14482 - protein, 231 aa, Saprospira grandis
  misc_feature (1)..(231): tr|H6L144|H6L144_SAPGL GTP cyclohydrolase 1 OS=Saprospi ra grandis (strain Lewin) OX=984262 GN=folE PE=3 SV=1
MNQSVKTLTAEEQALFDEMGDQHILSSIDTPMREDAFLLSDEEKVEQIQAYFKAIMEIMGLDLNDDSLKGTPYRVAKMYVKEIFSGLNPANKPKIALFENKYQYEEMLIEKNILLQSTCEHHFLPIYGKAHVAYIPNGKVIGLSKINRLVQYYAKRPQVQERLSRQILEELKTSLGTNDVAVYIDAKHMCVSTRGIQDISSSTVTTAYSGQFEKEQFRKEFLAAIHHDVRY

SEQ ID NO: 14483 - protein, 231 aa, Saprospira grandis
  misc_feature (1)..(231): tr|J0XT47|J0XT47_9BACT GTP cyclohydrolase 1 OS=Saprospi ra grandis DSM 2844 OX=694433 GN=folE PE=3 SV=1
MNQSVKTLTAKEQALFDEMGDQHILSSIDTPMREDAFLLSDEEKVEQIQTHFKAIMEIMGLDLSDDSLKGTPYRVAKMYVKEIFSGLNPANKPKIALFKNKYQYEEMLIEKNILLQSTCEHHFLPIYGKAHVAYIPNGKVIGLSKINRLVQYYAKRPQVQERLSRQILEELKTSLGTNDVAVYIDAKHMCVSSRGIQDISSSTVTTAYSGQFEKEQFRKEFLAAIHHDVRY

SEQ ID NO: 14484 - protein, 198 aa, Saprospiraceae bacterium
  misc_feature (1)..(198): tr|A0A521UJM0|A0A521UJM0_9BACT GTP cyclohydrolase 1 OS= Saprospiraceae bacterium OX=2202734 GN=folE PE=3 SV=1
MSYSRKDKYNAEMTDNLTHDYRSILAKTGEDAHREGLSKTPERAAKAMQFLTQGYGMDAEAILRSAMFKEEYSEMVLVKDIEIYSLCEHHLLPFFGKAHVAYIPNGHIVGLSKIPRVVDVFARRLQVQERLTLEILNSIQNTLKPLGVAVVIEAMHLCMMMRGVQKQNSVTTTSAFTGAFENHETRTEFMHLIGAKLH

SEQ ID NO: 14485 - protein, 273 aa, Saprospirales bacterium
  misc_feature (1)..(273): tr|A0A1Z9NAB5|A0A1Z9NAB5_9BACT GTP cyclohydrolase FolE2 OS=Saprospirales bacterium TMED214 OX=1986670 GN=folE2 PE=3 SV=1
MTSEKTSKEGLPDIQSSVDDRNIAISKVGVTSIRWPIRFVSSSQGGTAEQSTTASFDMFVSLPANRKGTHMSRFLQLLSGWDACFSLESLKKFCQTICDKLDSDDAHVTLRFPYFVDRRAPVTGEAGKIQLEVTIDVKSGSQNDLVMTVTGPATSLCPCSKEISARGAHNQRCKLAVSFRCKPQTEISIEELYEMMEQSASTQIFPILKRSDEKWVTEAAYDNPKFVEDIVRDLALALSGDDRIAWYRCSSENYESIHQHNAYGEIESDMSSA

SEQ ID NO: 14486 - protein, 180 aa, Saprospirales bacterium
  misc_feature (1)..(180): tr|A0A3C0HBI5|A0A3C0HBI5_9BACT GTP cyclohydrolase 1 (Fr agment) OS=Saprospirales bacterium OX=2026790 GN=folE P E=3 SV=1
ERYADILDFVGEDKEREGLLKTPERASKAMQFLTSGYDLDAEEILKGAIFKEDYSEMVLVKDIELYSLCEHHMLPFFGKAHIAYIPNGHIVGLSKIPRIVDVFARRLQVQERLTHQILDAIQKTLNPLGAAIVIEASHMCMMMRGVQKQNSMTTTSAFTGQFLNAETRAEFLSLIPSRSR

SEQ ID NO: 14487 - protein, 205 aa, Unknown
  misc_feature (1)..(205): tr|A0A2A5YCV5|A0A2A5YCV5_9PROT GTP cyclohydrolase 1 OS= SAR116 cluster bacterium MED-G04 OX=1986233 GN=folE PE= 3 SV=1
MNPYEANEISLAHDNETRPSREEAEEAVRTLIRWAGDSPEREGLTDTPSRVVRSYEEFFAGYREDAVGMLARTFEEVEGYDDLVMLRNIRVESYCEHHIVPILGTAHIAYLPDQRVVGISKLARVIDIFAKRMQTQETMTAQIADTIQSVLMPKGVALLVDATHQCMTTRGVHKSDVSMVTTRFTGVFNDDHNLRDRFLTQIGQQ

SEQ ID NO: 14488 - protein, 220 aa, Unknown
  misc_feature (1)..(220): tr|A0A2D7UCE0|A0A2D7UCE0_9PROT GTP cyclohydrolase 1 OS= SAR116 cluster bacterium OX=2024888 GN=folE PE=3 SV=1
MTPYDNGTDRNGSDRNGTGKAAKPANARQAAARPTRDEAEAAVETLLRWMGESPAREGLVDTPARVVRAWEEFCSGYGEDPAALLNSTFEEVEGYDDMVMLRSIRMESHCEHHLVPILGTAHIAYLPDQRVVGISKLARVLDSFAHRLQTQETLTAQVADCIQTALQPRGVAVLIDAQHQCMTTRGVHKPDVSMVTTSFTGAFQDDRDLRDRFLSEARRG

SEQ ID NO: 14489 - protein, 191 aa, Unknown
  misc_feature (1)..(191): tr|A0A2N0M0E0|A0A2N0M0E0_9CHLR GTP cyclohydrolase 1 OS= SAR202 cluster bacterium MP-SAtl-SRR3965592-G1 OX=19266 19 GN=folE PE=3 SV=1
MEANKTVQKQRIKEAVAEILAAIGDDPSREGLLNTPDRVARMYEGLFSGIGIDTEDAIDTVFEAEGNDPVIVNGLVFYSVCEHHLLPFFGEARLGYVPNGKIAGISKLARALEIAAHRPQVQERLTADVANAIFNVLKPDGVVVELEAEHLCMAMRGVKKSGTRVLTSATRGEFENYPSGREGLLALMHSR

SEQ ID NO: 14490 - protein, 185 aa, Unknown
  misc_feature (1)..(185): tr|A0A2N0KGR8|A0A2N0KGR8_9CHLR GTP cyclohydrolase 1 OS= SAR202 cluster bacterium Casp-Chloro-G3 OX=1926605 GN=f olE PE=3 SV=1
MIQQQRIEKAVSDILEAIGDDPQREGLRDTPNRVASMYLELFSGIGLDPAEAIDAVFEEDHHDPVILKNVTFYSVCEHHLLPFFGLAHLAYVPSGKVAGISKLVRSLEVVARRPQVQERLTRQWADAVFTALSPRGLVAQIEAEHLCMSMRGVQKPGSQVVTTAIRGVFTDSSFDSERLLSLLKR

SEQ ID NO: 14491 - protein, 224 aa, Unknown
  misc_feature (1)..(224): tr|A0A2D6YLW2|A0A2D6YLW2_9DELT GTP cyclohydrolase 1 OS= SAR324 cluster bacterium OX=2024889 GN=folE PE=3 SV=1
  misc_feature (27)..(27): Xaa can be any naturally occurring amino acid
  misc_feature (40)..(40): Xaa can be any naturally occurring amino acid
  misc_feature (44)..(44): Xaa can be any naturally occurring amino acid
  misc_feature (60)..(60): Xaa can be any naturally occurring amino acid
  misc_feature (73)..(73): Xaa can be any naturally occurring amino acid
MERSYEEFEILGDCHHSTSLETPIRAXAWELSSETKIHRXEEHXREIMHTLGLDLNDDSXQGTPRRVAKMLVXEIFIGLNPEKKPEIRLFQNTYRYQNVLLEKNISFRSFCEHHFLPIVGEAHVAYIPKNGVIGLSKINRIVDYYSRRPQVQERLTRQIAEELERALGTPDIAVLLDAKHFCVMMRGIEDQTSSTITTEYRGCFQKVERREEFLRYIHSKSKPA

SEQ ID NO: 14492 - protein, 200 aa, Unknown
  misc_feature (1)..(200): tr|A0A2A4T6H0|A0A2A4T6H0_9DELT GTP cyclohydrolase 1 OS= SAR324 cluster bacterium OX=2024889 GN=folE PE=3 SV=1
MNQRNLVKSVVSREEALECVRKLIQYIGDDPDREGLLDTPERVVRSYDELFSGYHLDPHQILQKTFPTASKEMVVLSNIEIYSTCEHHMIPFVGKCHIAYLPNDRVIGLSKLARMMEVFSRRLQIQEELTLEIAKTLNEHVHAFGVAVMIEAKHMCMSARGVNKQHSVMTTTAMLGRFQEDRELKNDFFRLVDKQSARMH

SEQ ID NO: 14493 - protein, 173 aa, Unknown
  misc_feature (1)..(173): tr|A0A0R2UVE1|A0A0R2UVE1_9GAMM GTP cyclohydrolase 1 OS= SAR86 cluster bacterium BACL1 MAG-120619-bin26 OX=16556 11 GN=folE PE=3 SV=1
MIKDIGEDPARDGLLETPKRAAAAFKFLNHGYKMSLDKVVNNALFDSDIEDMVLVRDIEFYSLCEHHMLPFNGRCHVAYIPNGKVLGLSKIARIVDMFARRLQIQERLTHQVAEAITKTTGCKGCAVVVEAQHMCMVMRGVQKQNSVMKTSSMLGAFRNNPSTRAEFLALLPS

SEQ ID NO: 14494 - protein, 173 aa, Unknown; identical to SEQ ID NO: 14493
  misc_feature (1)..(173): tr|A0A0R2U606|A0A0R2U606_9GAMM GTP cyclohydrolase 1 OS= SAR86 cluster bacterium BACL1 MAG-120820-bin45 OX=16556 12 GN=folE PE=3 SV=1

SEQ ID NO: 14495 - protein, 231 aa, Unknown
  misc_feature (1)..(231): tr|A0A2A5W1U2|A0A2A5W1U2_9GAMM GTP cyclohydrolase 1 OS= SAR92 bacterium MED-G29 OX=1986232 GN=folE PE=3 SV=1
MPTTAIAGNDINFRSNLSKEAQLVRNALIERGLETPMSGLQLSRDEKYARIRDAMTQVVTALGLDLTDDSLEETPHRIAKMYVDEIFSGLNYEKFPKISLIQNKMNTEEMVKVKAIKVISTCEHHFVTIDGLANVAYLPGKKIIGLSKINRIVAFFAQRPQVQERLTQQVLVALQTLLETEDVAVFMDATHYCVKARGIMDASSRTETSALGGHFKSDQSLRDNFLNSQVR

SEQ ID NO: 14496 - protein, 181 aa, Unknown
  misc_feature (1)..(181): tr|A0A0R2TVH4|A0A0R2TVH4_9GAMM GTP cyclohydrolase 1 OS= SAR92 bacterium BACL26 MAG-121220-bin70 OX=1655626 GN=f olE PE=3 SV=1
MNNHFAKIIQSTGEDLNRPGLLDTPARAAKAFAYLTSGYQMDLDTVINNALFPSDSEEMVMVKDIELFSLCEHHMLPFIGKCHVAYIPNGKVLGLSKIARVVDMFSRRLQIQETLAQQIASTIQKVTKAQGVGVIIEAKHMCMMMRGVEKQNSSMKTSAMLGTFRSSQATRTEFFSLLGNS

SEQ ID NO: 14497 - protein, 230 aa, Unknown
  misc_feature (1)..(230): tr|A0A520MGD7|A0A520MGD7_9GAMM GTP cyclohydrolase 1 OS= SAR92 clade bacterium OX=2315479 GN=folE PE=3 SV=1
MPSTAIAENKVAFHSRLSNEAQLVRNALIERGLETPLSGQQLTRDEKYSRIKDAMTQVVSALGLDLTDDSLEETPHRIAKMYVDEIFSGLDYAEFPKISLIDNKMAADEMVKVKAVKVISTCEHHFVTIDGLANVAYLPADKIIGLSKINRIVKFFAQRPQVQERLTQQILVALQTLLETEDVAVFMDATHYCVKARGIMDASSRTETSAMGGRFKSDTNLRQNFLNTLR

SEQ ID NO: 14498 - protein, 211 aa, Scardovia inopinata
  misc_feature (1)..(211): tr|W5IJ43|W5IJ43_SCAIO GTP cyclohydrolase 1 OS=Scardovi a inopinata F0304 OX=641146 GN=folE PE=3 SV=1
MSRTTNSEDSSLSSSLPAPAQHIDSEGVRRAVRDYLIAIGEDPDREGLKGTPDRIARASQELFAGLRQDPQDVLSARFDVKTEDLIVVRDIEFFSVCEHHLLPFHGLAHIGYIPTKDKVVGLSKLARLVQVYARRPQIQERMTQQIADALMDVLEAKGAIVITDCEHMCMSMRGVKQSQARTVTSAVRGYLRQSDTRSEALRLILDAPALH

SEQ ID NO: 14499 - protein, 188 aa, Schaalia canis
  misc_feature (1)..(188): tr|A0A3P1SF63|A0A3P1SF63_9ACTO GTP cyclohydrolase 1 OS= Schaalia canis OX=100469 GN=folE PE=3 SV=1
MYNEEAVVAAVKDLLVAVGEDPTREGIQDTPARMGRAWKELLSGMNEDPREHLRTTFETGTDELVLVRDIEFHSVCEHHLLPFYGRAHVGYIPSQGRVTGLSKLARVVEGYARRPQVQERLTSQIADALHEVLAPQGTIVVMEAEHMCMTMRGIRKPGASTVTSALRGIMNHPATRAEMMALVMGGPR

SEQ ID NO: 14500 - protein, 189 aa, Schaalia cardiffensis
  misc_feature (1)..(189): tr|N6W617|N6W617_9ACTO GTP cyclohydrolase 1 OS=Schaalia cardiffensis F0333 OX=888050 GN=folE PE=3 SV=1
MGYDEARAEAATRELIAAIGEDPDREGLRDTPTRVAKAWKEILNGLNEDPRDYLRTQFEAGTDELVLVRDIVFHSVCEHHLLPFYGRAHVGYIPRGGRVTGLSKLARVVEGYSRRPQVQERLTAQIADAIDEVLHPQGVIVVIEAEHMCMSMRGVSKPGSSTVTSALRGIMNDGATRAEMMSLVLGGRR

SEQ ID NO: 14501 - protein, 189 aa, Schaalia georgiae
  misc_feature (1)..(189): tr|J0NMG2|J0NMG2_9ACTO GTP cyclohydrolase 1 OS=Schaalia georgiae F0490 OX=1125717 GN=folE PE=3 SV=1
MTFDADAVERACRDLLVAVGEDPGREGLVGTPGRMARAWRELLAGVDLDPRDCLRTQFHAGTDELVLVRDIVFHSVCEHHLLPFYGRAHVGYIPRGGVVTGLSKLARLVEGYARRPQVQERLTAQIADALNEVLRPQGVIVVIEAEHMCMSMRGVRKPGSSTVTSALRGIMNDGTTRAEMMALVLGGKR

SEQ ID NO: 14502 - protein, 189 aa, Schaalia georgiae
  misc_feature (1)..(189): tr|A0A3R8QUC2|A0A3R8QUC2_9ACTO GTP cyclohydrolase 1 OS= Schaalia georgiae OX=52768 GN=folE PE=3 SV=1
MTFDADAVERACRDLLVAVGEDPGREGLVGTPGRMARAWRELLAGADLDPRDYLRTQFHAGTDELVLVRDIVFHSVCEHHLLPFYGRAHVGYIPRGGVVTGLSKLARLVEGYARRPQVQERLTAQIADALNEVLHPQGVIVVIEAEHMCMSMRGVCKPGSSTVTSALRGIMNDGTTRAEMMALVLGGKR

SEQ ID NO: 14503 - protein, 189 aa, Schaalia meyeri
  misc_feature (1)..(189): tr|A0A1H1LM00|A0A1H1LM00_9ACTO GTP cyclohydrolase 1 OS= Schaalia meyeri OX=52773 GN=folE PE=3 SV=1
MTYDPAGVSRASHDLLVAIGEDPAREGLVGTPERMARAWQQMCSGLTEDPCEHLRTQFRAGTDELVLVRDIPFHSVCEHHLLPFFGRAHVGYIPRGGVVVGLSKLARVVEGYARRPQVQERLTAQVADAIDQVLAPQGVIVVIEAEHLCMSMRGVSKPGSSTVTSALRGIMSDGATRAEMMALVLSGSR

SEQ ID NO: 14504 - protein, 189 aa, Schaalia odontolytica
  misc_feature (1)..(189): tr|D4TZX2|D4TZX2_9ACTO GTP cyclohydrolase 1 OS=Schaalia odontolytica F0309 OX=649742 GN=folE PE=3 SV=1
MTYDPAGVEKASRDLLVAIGEDPEREGLVGTPDRMARAWREMCKGLTEDPREHLHTQFHAGTDELVLVRDITFFSVCEHHLLPFYGRAHVGYIPRGGVVTGLSKLARVVEGYARRPQVQERLTAQVADAIDEILDPQGVIVVIEAEHMCMSMRGISKPGSSTVTSALRGIMSDGATRAEMMALVLSGSR

SEQ ID NO: 14505 - protein, 189 aa, Schaalia odontolytica
  misc_feature (1)..(189): tr|A0A2X0U6W8|A0A2X0U6W8_9ACTO GTP cyclohydrolase 1 OS= Schaalia odontolytica OX=1660 GN=folE PE=3 SV=1
MTYDPAGVEKASRDLLVAIGEDTEREGLVGTPDRMARAWREMCKGLSEDPREHLRTQFHAGTDELVLVRDITFFSVCEHHLLPFYGRAHVGYIPRGGVVTGLSKLARVVEGYARRPQVQERLTAQVADAIDEILNPQGVIVVIEAEHMCMSMRGISKPGSSTVTSALRGIMNDGATRAEMMALVLSGSR

SEQ ID NO: 14506 - protein, 188 aa, Schaalia radingae
  misc_feature (1)..(188): tr|A0A1H2F5N5|A0A1H2F5N5_9ACTO GTP cyclohydrolase 1 OS= Schaalia radingae OX=131110 GN=folE PE=3 SV=1
MYDQAGVEQAIRDLLVAIGEDPERDGLKDTPARMGRSFRELVGGLAEDPREHLRTTFTTGTNEMVLVRDIEFFSLCEHHLLPFHGKAHVGYIPSDGTVTGLSKLARLVEGYARRPQVQERLTSQIADAMVEILHPQGVTVILEAEHMCMTMRGVSKPGCSTVTSAMRGVMNNAATRSEMMALVMRGRP

SEQ ID NO: 14507 - protein, 190 aa, Schaalia turicensis
  misc_feature (1)..(190): tr|A0A2I1I4S0|A0A2I1I4S0_9ACTO GTP cyclohydrolase 1 OS= Schaalia turicensis OX=131111 GN=folE PE=3 SV=1
MAYDAAGVEKASRDLLIAIGEDPTREGLAGTPDRMARAWREMLSGLEEDPRDYLRTQFEAGTDELVLVRDITFHSICEHHLLPFYGRAHVGYIPCGGKVTGLSKLARVVEGYARRPQVQERLTAQIADAIDEVLHPQGVIVVMEAEHMCMSMRGITKPGSSTVTSALRGIMNDGTTRAEMMALVLGGDRS

SEQ ID NO: 14508 - protein, 190 aa, Schaalia turicensis
  misc_feature (1)..(190): tr|K0ZHC5|K0ZHC5_9ACTO GTP cyclohydrolase 1 OS=Schaalia turicensis ACS-279-V-Col4 OX=883077 GN=folE PE=3 SV=1
MAYDAAGVEKASRDLLIAIGEDPTREGMAGTPERMARAWREMLSGLEEDPRDYLRTQFEAGTDELVLVRDITFHSICEHHLLPFYGRAHVGYIPCGGKVTGLSKLARVVEGYARRPQVQERLTAQIADAIDEVLCPQGVIVVMEAEHMCMSMRGITKPGSSTVTSALRGIMNDGTTRAEMMALVLGGDRS

SEQ ID NO: 14509 - protein, 271 aa, Schlegelella thermodepolymerans
  misc_feature (1)..(271): tr|A0A2S5T9F1|A0A2S5T9F1_9BURK GTP cyclohydrolase FolE2 OS=Schlegelella thermodepolymerans OX=215580 GN=folE2 PE=3 SV=1
MNDMTSLKNLVPASEAMPDVQSSRDERRLAIQRVGVKDVRYPIQLRVGGQVQPGVALWSLDVALPAEQKGTHMSRFVAWLNEQHGKPMDASGLREDLAGMLRLLNASEGRIEASFSFFIRKTAPVSGVESLLDYQGKWIAETRAGRTTVWAEVVVPVKSLCPCSKEISDFGAHNQRSHVTIRAELLGDLDWHEFVRFAEESASSEIWPLLKRTDEKWITERAYQNPKFVEDLVRDVALRLNAEPRIGRYRVEVENFESIHNHSAFAVIDRE

SEQ ID NO: 14510 - protein, 228 aa, Schleiferia sp.
  misc_feature (1)..(228): tr|A0A401XN83|A0A401XN83_9FLAO GTP cyclohydrolase 1 OS= Schleiferia sp. LA OX=2173829 GN=folE2_1 PE=3 SV=1
MELTPLKDNTDDYYGDTHSSNNPENPLRPDAFDISSEEKIQRIQHHFRAIMETLGLDLTDDSLRGTPKRVAEMMVNELFSGLDPANMPSMSTFENKYKYGEMLVEKNIVVYSTCEHHFLPIVGRAHIAYISAGRVIGLSKMNRIVDYFARRPQVQERMTKQIVHAMQKALGTEDVACVIDAKHLCVNSRGIRDIESSTVTAEYGGRFQQENVKREFLELIGLNTQFGV

SEQ ID NO: 14511 - protein, 247 aa, Schleiferia sp.
  misc_feature (1)..(247): tr|A0A401XNG0|A0A401XNG0_9FLAO GTP cyclohydrolase 1 OS= Schleiferia sp. LA OX=2173829 GN=folE2_2 PE=3 SV=1
MKRQEIMLNTQEKKRNGVPHLNGNTAHALHIHDDDTCCDDHVCTGKETPLRPDAFELTDDEKIESIAEKFADILHILGLDLDDDSLKDTPRRVAKMYVKEIFSGLHPARKPSVQLFDNPYQYNQMLVEKNITVHSYCEHHLVPIIGVAHVAYISSGKVIGLSKINRIVRYFSKRPQVQERLTEQIAEELKKVLQTEDVAVYIDAEHFCVKTRGIEDTQSTTVTTHYSGKFLTDNQVRQEFLSIISKK

SEQ ID NO: 14512 - protein, 256 aa, Schleiferia thermophila
  misc_feature (1)..(256): tr|A0A369A7C2|A0A369A7C2_9FLAO GTP cyclohydrolase 1 OS= Schleiferia thermophila OX=884107 GN=folE PE=3 SV=1
MKRPEILLNTPEKKINGNGVKHLKGSSDVHSLCIDNLHDTCCDCDHDHDHISTSKQTPLREDAFKLTDEEKIEIITEKFTEILHTLGLDLNDDSLKDTPRRVAKMYVKEIFAGLHPERKPLIQLFENPYQYHQMLVEKNITVHSYCEHHLVPIIGTAHVAYISNGKVIGLSKINRMVRYYSKRPQVQERLTEQIAEELKNVLQTDDVAVYIDAEHFCVKTRGIEDSQSSTVTVHYGGRFLSDPQVKQEFLSIIHNK

SEQ ID NO: 14513 - protein, 228 aa, Schleiferia thermophila; identical to SEQ ID NO: 8098
  misc_feature (1)..(228): tr|A0A085L1P4|A0A085L1P4_9FLAO GTP cyclohydrolase 1 OS= Schleiferia thermophila str. Yellowstone OX=1453500 GN= folE PE=3 SV=1

SEQ ID NO: 14514 - protein, 199 aa, Schumannella sp.
  misc_feature (1)..(199): tr|A0A506XXA7|A0A506XXA7_9MICO GTP cyclohydrolase 1 OS= Schumannella sp. 10F1D-1 OX=2590779 GN=folE PE=3 SV=1
MTPSEAVPDAVPFDLPSGERAVAELLRALGQDPDEERLRRTPERFVQMLANAIQRDPLPPASFIDGPASRDLVVVHGIPFRSLCEHHLLPFRGVAHVGYLPGERLVGVSLPVRVVEHFARGLQLQERLTEQVADWLDANLEARGVGVVIEAEHQCMSFRGIGDAGTTLLTSAFRGEVTALPSPFGAIATAAGDAAPAAE

SEQ ID NO: 14515 - protein, 215 aa, Schumannella sp.
  misc_feature (1)..(215): tr|A0A506XP38|A0A506XP38_9MICO GTP cyclohydrolase 1 OS= Schumannella sp. 10F1B-5-1 OX=2590780 GN=folE PE=3 SV=1
MAIDTGRIEAAVSELIRAIGDDPDRPELASTPARVATAYTEFFAGIGVDPLEVLGDPTEIDLGAGETGEIVALRDIEFRSVCEHHLLPFTGVAHVAYLPDQHVVGLGRIPRVVEVLSSRPQLQERLTEQIASALDAGLSPRGVLVVMDARHACVGARGVRQSGSSTVTVASRGELRDPVARAEVMGMFALSRGVDGVGAAPAAPAAPAAGAGSDS

SEQ ID NO: 14516 - protein, 187 aa, Scopulibacillus darangshiensis
  misc_feature (1)..(187): tr|A0A4R2P9D1|A0A4R2P9D1_9BACL GTP cyclohydrolase 1 OS= Scopulibacillus darangshiensis OX=442528 GN=folE PE=3 S V=1
MSVNHKKIEEAVTMIIEAIGEDPNREGLLDTPKRVARMYGEVFQGLEQDPEEYFATVFGEDHEELVLVKDIPFYSMCEHHLVPFYGKAHVGYIPRGGRVTGLSKLARAVEAVAKRPQLQERITTTIADSIVNTLEPHGVIVVVEAEHMCMTMRGVKKPGAKTITSAVRGIFQKDQSARAEAMMLIKE

SEQ ID NO: 14517 - protein, 235 aa, Scytonema hofmannii
  misc_feature (1)..(235): tr|A0A139X745|A0A139X745_9CYAN GTP cyclohydrolase 1 OS= Scytonema hofmannii PCC 7110 OX=128403 GN=folE PE=3 SV= 1
MTIARSNGTNRSQSPLIPDLTESITPRPDRNTHNGRQADLHPQTEEQMEEMMEAVRTLLVGVGEDPEREGLLKTPKRVAEAMRFLTSGYNQSLEDLVNGAIFDEGHNEMVLVRDINLFSLCEHHMLPFMGRAHVAYIPNQKVVGLSKLARIVEMYSRRLQVQERLTRQIAEAVQQILEPQGVAVVIEASHMCMVMRGVQKPGSWTVTSALLGVFQEEQKTREEYFNLIRHQASFF

SEQ ID NO: 14518 - protein, 241 aa, Scytonema millei; identical to SEQ ID NO: 6646
  misc_feature (1)..(241): tr|A0A4R4IN41|A0A4R4IN41_9CYAN GTP cyclohydrolase 1 OS= Scytonema millei VB511283 OX=1245923 GN=folE PE=3 SV=1

SEQ ID NO: 14519 - protein, 169 aa, Scytonema millei
  misc_feature (1)..(169): tr|A0A1D2PEN7|A0A1D2PEN7_9CYAN GTP cyclohydrolase 1 (Fr agment) OS=Scytonema millei VB511283 OX=1245923 GN=QH73 _004110 PE=3 SV=1
EREGLLKTPKRVAEAMRFLTSGYNQSLEEIVNGAIFDEGHNEMVLVRDINVFSMCEHHMLPFMGKAHVAYIPNQKVVGLSKLARIVEMYSRRLQVQERLTRQIAEAVQTILEPQGVAVVMEATHMCMVMRGVQKPGSWTVTSAMLGLFQEEQKTREEFFNLIRHQSSFF

SEQ ID NO: 14520 - protein, 248 aa, Scytonema sp.
  misc_feature (1)..(248): tr|A0A1Z4IMY7|A0A1Z4IMY7_9CYAN GTP cyclohydrolase 1 OS= Scytonema sp. HK-05 OX=1137095 GN=folE PE=3 SV=1
MISTTETLTNTDIMTIASSNGTNSSQSPLIPDLTEAITPRPDRNTHNGRQADLHPQTEEQFEQMTDAVRTLLVGVGEDPEREGLLKTPKRVAEAMRFLTSGYNQSLEEIVNGAIFDEGHNEMVLVRDINFFSMCEHHMLPFMGKAHVAYIPNQKVVGLSKLARIVEMYSRRLQVQERLTRQIAEAVQTVLEPQGVAVVMEATHMCMVMRGVQKPGSWTVTSAMLGVFQEEQKTREEFFNLIRHQSSFF

SEQ ID NO: 14521 - protein, 248 aa, Scytonema sp.
  misc_feature (1)..(248): tr|A0A1Z4QAE0|A0A1Z4QAE0_9CYAN GTP cyclohydrolase 1 OS= Scytonema sp. NIES-4073 OX=2005464 GN=folE PE=3 SV=1
MISTTETLTNTDIMTTASSNGTNSSQSPLIPDLTEAIIPRPDRNTHNGRQAALHPQTEEQMEQMTDAVRTLLVGVGEDPEREGLLKTPKRVAEAMRFLTSGYNQSLEEIVNGAIFDEGHNEMVLVRDINFFSMCEHHMLPFMGKAHVAYIPNQKVVGLSKLARIVEMYSRRLQVQERLTRQIAEAVQTVLEPQGVAVVMEATHMCMVMRGVQKPGSWTVTSAMLGLFQEEQKTREEFFNLIRHQSSFF

SEQ ID NO: 14522 - protein, 236 aa, Scytonema tolypothrichoides
  misc_feature (1)..(236): tr|A0A0C2LC85|A0A0C2LC85_9CYAN GTP cyclohydrolase 1 OS= Scytonema tolypothrichoides VB-61278 OX=1233231 GN=folE PE=3 SV=1
MTIARSNGTNCSQQSPLVPDLTEAITPRPDRNTHNGRQADLHPQTEEQMEQMTDAVRTLLVGVGEDPQREGLLKTPKRVAEAMRFLTSGYNQSLEEIVNEAIFDEGHNEMVLVRDINVFSLCEHHMLPFMGKAHVAYIPNQKVVGLSKLARIVEMYSRRLQVQERLTRQIAEAVQTILEPQGVAVVMEATHMCMVMRGVQKPGSWTVTSAMLGVFQEEHKTREEFFNLIRHQSSFF

SEQ ID NO: 14523 - protein, 216 aa, Scytonema tolypothrichoides
  misc_feature (1)..(216): tr|A0A0C2QLS1|A0A0C2QLS1_9CYAN GTP cyclohydrolase 1 OS= Scytonema tolypothrichoides VB-61278 OX=1233231 GN=folE PE=3 SV=1
MTLSIRPDFTSANHIVSSLPTQQQPQVTESEMMQAVRTLLIGLGEDPDRQGLKDTPKRVVKALQFLTKGYHESLDELLNGAVFTEDANEMVLVRDIDIFSSCEHHILPIIGRAHVAYIPNGKVIGLSKIARICEMYARRLQVQERLTLQIADALQGLLKPQGVAVVVEATHMCMVMRGVQKPGSWTVTSAMRGVFAEDARTREEFMNLIRHNARFQ

SEQ ID NO: 14524 - protein, 184 aa, Sebaldella termitidis
  misc_feature (1)..(184): tr|D1AJ48|D1AJ48_SEBTE GTP cyclohydrolase 1 OS=Sebaldel la termitidis (strain ATCC 33386 / NCTC 11300) OX=52621 8 GN=folE PE=3 SV=1
MDKKNLEKLTYEMLEAIGEDADREGLKDTPKRIPVVYGEIFSGVGKKPEDIIKKVFTVEKNNIVIEKNIDFYSMCEHDLLPFFGQIHVAYIPDGKVLGFGDIIKITEIYSRRLQIQERLTNEICDAVIDMTKCQGVMVIVKARHLCIEMKGSRKTNSEIVTSAVRGIFEKEESKKNEILALLSI

SEQ ID NO: 14525 - protein, 221 aa, Unknown
  misc_feature (1)..(221): tr|J3VRM0|J3VRM0_9ENTR GTP cyclohydrolase 1 OS=secondar y endosymbiont of Ctenarytaina eucalypti OX=1199245 GN= folE PE=3 SV=1
MVILTKEALQVREALMICGLETPLRGEVQDKAVRKRLIAEHMQAIMTLLNLDWTDDSLAKTPNRIAKMYVEELFAGLDYVNFPKITFIKNKMNVDEMVTVHDITLTSTCEHHFLMIDGKATVSYIPKNFVIGLSKINRIVQFFSQRPQLQERLTQQILLTLQTLLGINSVAVSIDAVHYCVKAQGIRHGDSTTTTTSLGGLFKSSNNIRQEFLRAATRHKG

SEQ ID NO: 14526 - protein, 221 aa, Unknown
  misc_feature (1)..(221): tr|J3TZ70|J3TZ70_9ENTR GTP cyclohydrolase 1 OS=secondar y endosymbiont of Heteropsylla cubana OX=134287 GN=folE PE=3 SV=1
MLTLTKEASQVREALVAAGLESLPQDIALTNIVRQELIAGHMMEIMAILNLDLSDDSLKKTPHRIAKMYIEEIFLGLNYANFPKITLIENKMQIHEMVTICNITLTSTCEHHFILIDGKASVSYIPEYSIIGLSKINRIVHFFSQRPQIQERLTKQILLALQTLLETNNVAVSIDAIHYCVKGRGICDATSTTTTISCGGLFKSNQNTREEFLRTIKSYCN

SEQ ID NO: 14527 - protein, 186 aa, Sedimentibacter saalensis
  misc_feature (1)..(186): tr|A0A562JEM4|A0A562JEM4_9FIRM GTP cyclohydrolase 1 OS= Sedimentibacter saalensis OX=130788 GN=folE PE=3 SV=1
MDKERIEKAVREILFAVGEDPDREGLKDTPRRMAKMYEEIFAGLHENPAKHLEIYFQEEKYEELVLVKDIPFYSVCEHHLVPFFGKAHVAYLPKNGRLTGLSKLARVVETVAKRPQLQERITSTVADTIMEKLDPYGVIVVIEAEHMCMTMRGVKKPGSKTMTSAVRGMFRTDPKSRAEVMSMINK

SEQ ID NO: 14528 - protein, 185 aa, Sedimentibacter sp.
  misc_feature (1)..(185): tr|A0A252CLB1|A0A252CLB1_9FIRM GTP cyclohydrolase 1 OS= Sedimentibacter sp. SX930 OX=1955060 GN=folE PE=3 SV=1
MDLEKIETAVHMILEAIGEDPNRSGLQDTPKRVARMYAEIFSGVEKDPADHAKVVFHEDTDEIVLVKDIPFYSTCEHHLVPFFGVGHIAYMPKDGQVIGLSKLARILDEVSKKPQIQERITTTVADILMEHLEPQGVMVVLEAEHMCMTMRGVKKPGSKTVTSAVRGAFKQSFKSRSEVLELIKL

SEQ ID NO: 14529 - protein, 203 aa, Sedimentibacter sp.
  misc_feature (1)..(203): tr|A0A252CIZ0|A0A252CIZ0_9FIRM GTP cyclohydrolase 1 OS= Sedimentibacter sp. SX930 OX=1955060 GN=folE PE=3 SV=1
MAIDVQAIEEHIKGILIALGDNPEREGLKDTPKRVAKMYEVIYKGMCYTNAEIAEMLNTTFEDDLALDNAENDVVFMKDIEIFSHCEHHLALMYNMKVAVAYVPKQKVIGLSKIARIADMAGRRLQLQERIGSDIAEILQKITESEDVAVIIQGEHGCMTTRGIQKPGAKTITTTLRGRFNTDSMLNNKLMMLYAKDSSNQFG

SEQ ID NO: 14530 - protein, 259 aa, Sedimenticola selenatireducens
  misc_feature (1)..(259): tr|A0A2N6CUU4|A0A2N6CUU4_9GAMM GTP cyclohydrolase FolE2 OS=Sedimenticola selenatireducens OX=191960 GN=folE2 P E=3 SV=1
MADVQSSVDTRQIAINKVGIKDIRHPVRVKDRSDGEQHTIATFNMYVNLPHNFKGTHMSRFVEILNSHEKEISISNFKVMLAEMAEKLEAESGHIEMNFPYFINKTAPISGVQSLLDYDVTFIGEVHGGKPITYIKVQVPVTSLCPCSKKISDRGAHNQRSHVTVQVRTCGFVWVEEIIDLVESQASCELYGLLKRPDEKFVTERAYDNPKFVEDMVRDVAGMLDRDERFCAYIVESENFESIHNHSAYALIERDKEAE

SEQ ID NO: 14531 - protein, 265 aa, Sedimenticola selenatireducens
  misc_feature (1)..(265): tr|A0A558DX65|A0A558DX65_9GAMM GTP cyclohydrolase FolE2 OS=Sedimenticola selenatireducens OX=191960 GN=folE2 P E=3 SV=1
MTTTPEIADVQNSIDTRQIAINKVGIKDIRHPVRVKDRSDGEQHTIANFNMYVNLPHNFKGTHMSRFVEILNSHEKEISISNFKVMLAEMAEKLEAKSGHIEMNFPYFINKTAPVSGVQSLLDYDVTFIGEVHDGKPTTYIKVQVPVTSLCPCSKKISDRGAHNQRSHVTVQVRTCGFVWIEEIIDLVESQASCELYGLLKRPDEKFVTERAYDNPKFVEDMVRDVAGKLDEDDRYCAYVVESENFESIHNHSAYALIERDKEAE

SEQ ID NO: 14532 - protein, 271 aa, Sedimenticola sp.
  misc_feature (1)..(271): tr|A0A2N6GA96|A0A2N6GA96_9GAMM GTP cyclohydrolase FolE2 OS=Sedimenticola sp. OX=1940285 GN=folE2 PE=3 SV=1
MIVTDCVENQCEIADVQSSRDTRRIAINKVGIKDIRHPVRVKDRSDGEQHTVATFNMYVNLPHNFKGTHMSRFVEILNSHEKEISVESFKGMLTEMAERLEADSGHIEMSFPYFINKRAPVSGVNSLMDYDVSLIGEIHNGQPIMQIKVVVPVTSLCPCSKKISERGAHNQRSHVTVQARTNGFIWIEEIIDLVEKEASCELYGLLKRPDEKYVTERAYDNPKFVEDMVRDVADRLNHDDRFSAYVVESENFESIHNHSAYALIERDKTQD

SEQ ID NO: 14533 - protein, 271 aa, Sedimenticola thiotaurini
  misc_feature (1)..(271): tr|A0A558CXL8|A0A558CXL8_9GAMM GTP cyclohydrolase FolE2 OS=Sedimenticola thiotaurini OX=1543721 GN=folE2 PE=3 SV=1
MSSSALALEDVQNSADERRIPINKVGVKGIRHPALVKDRSGGEQRTIADFSLYVSLPHNFKGTHMSRFIEILNEHEKEITVRSFHEMLFEISDRLEAKTSHIEMHFPYFVEKSAPISGVKSLMDYDISFIGELNEDEMAVSIKVAVPATSLCPCSKGISEYGAHNQRSMITVTARIGGFIWIEELIDLIENEASCDLFSVLKRPDEKYVTEKAYDNPKFVEDIVRDIADRLNNEKRITAYSVESENFESIHNHSAYAIITKDKTDPENIAA

SEQ ID NO: 14534 - protein, 269 aa, Sedimenticola thiotaurini
  misc_feature (1)..(269): tr|A0A0F7K2H4|A0A0F7K2H4_9GAMM GTP cyclohydrolase FolE2 OS=Sedimenticola thiotaurini OX=1543721 GN=folE2 PE=3 SV=1
MTTTTEIADVQNSVDTRQIAINKVGIKDIRHPVRVKDRSDGEQHTIATFNMYVNLPHNFKGTHMSRFVEILNSHEKEISISNFKVMLAEMAEKLEANSGHIEMNFPYFINKTAPVSGVQSLLDYDVTFIGEVHNGEPTTYIKVLVPVTSLCPCSKKISERGAHNQRSHVTVQVRTCGFVWVEEIIDLVESQASCELYGLLKRPDEKFVTERAYDNPKFVEDMVRDVAGMLDQDERFCAYIVESENFESIHNHSAYALIERDKEAEQANA

SEQ ID NO: 14535 - protein, 197 aa, Sedimentisphaera cyanobacteriorum
  misc_feature (1)..(197): tr|A0A1Q2HND5|A0A1Q2HND5_9BACT GTP cyclohydrolase 1 OS= Sedimentisphaera cyanobacteriorum OX=1940790 GN=folE PE =3 SV=1
MSEDKNKTIDHKRIEAAVREILLAIGEDPDREGLAETPQRVARMYEEVFSGLGHQPSEHTDKLFHEDYNEIVVLRDIAFSSTCEHHLMPFSGKAHIAYLPDKHIIGLSKLARVFDCFAKRPQVQERLTIQAADFLMERLRPKGVAVVVEASHSCMTVRGAKKPGSFMVTSALRGIFIKDQRSRSEVMSLIRGAGGVQ

SEQ ID NO: 14536 - protein, 197 aa, Sedimentisphaera salicampi
  misc_feature (1)..(197): tr|A0A1W6LJK0|A0A1W6LJK0_9BACT GTP cyclohydrolase 1 OS= Sedimentisphaera salicampi OX=1941349 GN=folE PE=3 SV=1
MSEEKNKTIDHKRIEAAVREILLAIGENPDREGLAETPQRVARMYEEVFSGLGHQPSEHTEKLFHEDYNEIVVLRDIAFSSTCEHHLMPFSGKAHIAYLPDKHIIGLSKLARVFDCFAKRPQVQERLTIQAADFLMERLNPKGVAVVVEASHSCMTVRGAKKPGSFMVTSALRGIFIKDQRSRSEVMSLIRGAGGVQ

SEQ ID NO: 14537 - protein, 366 aa, Sedimentitalea nanhaiensis
  misc_feature (1)..(366): tr|A0A1I6YCV7|A0A1I6YCV7_9RHOB GTP cyclohydrolase FolE2 OS=Sedimentitalea nanhaiensis OX=999627 GN=folE2 PE=3 SV=1
MNIHTPEREQLPDRSEAEAALNVLRAWARQASEAEILALDPSVARLLPQTGLNYPSLSRSYPQDFVVDAAYRDSLPDLQNGPSSLIRGSRQQIQHVGISNFRLPIRFHTRDSGDLTLETSITGTVSLEADKKGINMSRIMRSFYAHSERTFSFEVMEAALDGYKSDLDSFDARIQMRFSFPMKVESLRSGLSGYQYYDIALELVETGGVRQKIMHLDYVYSSTCPCSLELSEHARAMRGQLATPHSQRSVARISVQLDRESDCLWFEDLIDACRRAVPTETQVMVKREDEQAFAELNAANPIFVEDAARLFCEQLQADHRIADFRVVASHQESLHSHDAVSILIQGETFASGSLDPKLFSTLVHPG

SEQ ID NO: 14538 - protein, 367 aa, Sedimentitalea sp.
  misc_feature (1)..(367): tr|A0A3T0N4U3|A0A3T0N4U3_9RHOB GTP cyclohydrolase FolE2 OS=Sedimentitalea sp. W43 OX=2483033 GN=folE2 PE=3 SV= 1
MNIHSGETDTAPDRDAAAAALALLRNWAAGATATEIAQLDPAVTRLLPDVELRNYPDLSRQYPKDFKSDEAYRDTLPDLQNGPASLIRGARQQIQHVGISNFRLPIRFHTRDDGDLTLETSITGTVSLEGEKKGINMSRIMRSFYKHADRTFSFEVMAAALDDYLTDLDSPDARIQMRFSFPARVNSLRSGLSGYQYYDLTLELVDHDGIREKIIHLDYVYSSTCPCSLELSEHARETRGQLATPHSQRSVARLSVQVKPGGDCLWFEDLIDHCRRAVPTETQVMVKREDEQAFAELNAANPIFVEDAARLFCEALQSDPRIGDFRVLASHQESLHSHDAVSVLTSGETFVARSLDPQLFSTLIHRG

SEQ ID NO: 14539 - protein, 311 aa, Sediminibacillus albus
  misc_feature (1)..(311): tr|A0A1G8VVL4|A0A1G8VVL4_9BACI GTP cyclohydrolase FolE2 OS=Sediminibacillus albus OX=407036 GN=folE2 PE=3 SV=1
MNNTEQVIKKTLPSKVERHKLFGSVNPGPRTKPVEKEQMADLQNSKKDFLFDIDAVGIANVKNPINISSNIKPLNQTTIGTFSFTSRIDKDSKGTNMSRFTEQLNEYYLNNYTIDIETLKIFTKDLATRLNQQDAQMEVCFPWFFERKGPSSELAGLNHANASIRVDFDQEKGHHVEVSLSGTITTLCPCSKEISEYSAHNQRGIVTMTANLSEEFDEREIDWKEALLEAAESNASARIHPVLKRPDEKMVTEQAYENPRFVEDIVRLVAADLYELPYVEKFSVYCKNEESIHLHDAVASLTYDKRQEAHV

SEQ ID NO: 14540 - protein, 309 aa, Sediminibacillus halophilus
  misc_feature (1)..(309): tr|A0A1G9M8V9|A0A1G9M8V9_9BACI GTP cyclohydrolase FolE2 OS=Sediminibacillus halophilus OX=482461 GN=folE2 PE=3 SV=1
MNNTELKNKKTLPSKAERHKLFGSVEPGPKTKPVDKEKMVDLQNSKKDFLFDIDAVGIANVKNPINITSHLIPNNQTTIGTFRFTSRIDKDSKGTNMSRFTEQLDAYYKNNYSIDIDTLKRFTKDLAIRLKQKDAQMEVNFPWFFERKGPSSGLAGLNHADAGIKVTYDQDKGHHIEVTLAGTITTLCPCSKEISEYSAHNQRGRVEMTAVLSEDFDENETDWKEALLEAAESNASARIHPVLKRPDEKIVTEQAYENPRFVEDIVRLVAADLYELPFVEKFTISCKNEESIHLHDAVATLSFDKNTDA

SEQ ID NO: 14541 - protein, 198 aa, Sediminibacterium ginsengisoli
  misc_feature (1)..(198): tr|A0A1T4MZ87|A0A1T4MZ87_9BACT GTP cyclohydrolase 1 OS= Sediminibacterium ginsengisoli OX=413434 GN=folE PE=3 S V=1
MAYVKKEMYDEDVTQGLMTNYHSVLQLLGEDAEREGLVKTPERIAKAMQFLTQGYQQDARAIINSAKFSEDVSEMVIVKDIELFSMCEHHMLPFFGKAHIAYIPNGYITGLSKLARVVDVYSRRLQVQERLTTQILEAIKDALNPIGVAVVIEAKHLCMMMRGVQKQNSVTTTSAFDGEFLKNSTRSEFLKLITAKLD

SEQ ID NO: 14542 - protein, 239 aa, Sediminibacterium goheungense
  misc_feature (1)..(239): tr|A0A4R6IWQ8|A0A4R6IWQ8_9BACT GTP cyclohydrolase 1 OS= Sediminibacterium goheungense OX=1086393 GN=folE PE=3 S V=1
MKQNETLLNIRLNGEQIELSDLHIDDMGDDHISTSVDTPMREDAFVKTDDEKVVEIEAHFRSIMEILGLDLTDDSLKGTPRRVAKMYVKEIFQGLNPANKPAIALFENKYKYNEMLVEKNISFYSNCEHHFVPIIGKAHVAYISNGKVIGLSKLNRLVEYFAKRPQVQERLTMQIGKELQKDLGTEDVAIVIDAKHLCVASRGVEDDTSSTITAFYGGKFKEDKVKEEFLKYLELKTEF

SEQ ID NO: 14543 - protein, 240 aa, Sediminibacterium sp.
  misc_feature (1)..(240): tr|A0A2M8JYU4|A0A2M8JYU4_9BACT GTP cyclohydrolase 1 OS= Sediminibacterium sp. FEMGT703S OX=2080766 GN=folE PE=3 SV=1
MKQNEILSNIRLNGDKIVFTDEDLVDEMGDNHISTSVDTPMVAGAFDKSDDEKIAIIQDHFKAIMETLGLDLTDDSLKGTPKRVAKMYVKEIFSGLNPANKPAVALFDNKYKYNEMLVEKNISFYSNCEHHFVPIIGKAHLAYISNGRVIGLSKLNRLVEFYAKRPQVQERLTMQIAKELQQELGTEDVAIVIDAKHLCVASRGVEDDTSSTITSFYGGKFKEEKRKEEFLRYLELKTEF

SEQ ID NO: 14544 - protein, 198 aa, Sediminicola luteus
  misc_feature (1)..(198): tr|A0A2A4G5S2|A0A2A4G5S2_9FLAO GTP cyclohydrolase 1 OS= Sediminicola luteus OX=319238 GN=folE PE=3 SV=1
MAYRNFEEYNIELTQEVKERYAGIINELGEDPFREGLVKTPERAAKAMMFLTQGYHQNAEEILRGAMFKEDYDDMVIVKDIELYSLCEHHMLPFFGKAHVAYIPNGQIVGLSKIPRIVDVFARRLQVQERLTHDILECLNNTLQPQGVAVVIEASHMCMMMRGVQKQNSVTTTSGFRGQFEKIETRNEFLKLISSDLS

SEQ ID NO: 14545 - protein, 227 aa, Sediminicola luteus
  misc_feature (1)..(227): tr|A0A2A4G860|A0A2A4G860_9FLAO GTP cyclohydrolase 1 OS= Sediminicola luteus OX=319238 GN=folE PE=3 SV=1
MWNTLIEKQTLNGFSEDEIGDDHIYMGLETPMRPDAFVLGDEEKKIKIADLFGQIMEVMGLDLTDDSLKGTPNRVAKMYIDEIFSGLNPMNKPKVALFDNKYQYQQMLVEKNITFYSNCEHHFVPIIGKAHVAYISSGKVIGLSKLNRLVQYYAKRPQVQERLTNQIAREMVQTLGTEDVAVIIDAKHLCVSSRGVKDDTSATVTSYYGGVFNTPQKIMELQNYLNE

SEQ ID NO: 14546 - protein, 226 aa, Sediminicola sp.
  misc_feature (1)..(226): tr|A0A0S1S4P8|A0A0S1S4P8_9FLAO GTP cyclohydrolase 1 OS= Sediminicola sp. YIK13 OX=1453352 GN=folE PE=3 SV=1
MKVDSALEEHFEEMGDNHASSAEETPLREDAFVLSDEEKIKRIKGSIKEIMLTLGLDLEDDSLKGTPNRVAKMFVDEIFGGLHPNRRPKASTFENKYKYGEMLVEKNITLYSTCEHHLLPIVGRAHVAYISNGTVVGLSKMNRIVDYFAKRPQVQERLNIQIVRELQKVLGTEDVACVIDAKHLCVNSRGIRDIESSTVTAEYGGKFKDDAVRKEFLNFINLDTNF

SEQ ID NO: 14547 - protein, 196 aa, Sediminicola sp.
  misc_feature (1)..(196): tr|A0A0S1S378|A0A0S1S378_9FLAO GTP cyclohydrolase 1 OS= Sediminicola sp. YIK13 OX=1453352 GN=folE PE=3 SV=1
MSPYKSLEEYNFEIKAEVQERYSRIIDEIGEDIHREGLVKTPERAAKAMLFLTQGYKQDAEEILKGAMFKEDYDDMVIIRDIELYSLCEHHMLPFFGKAHIAYIPNGHIVGLSKIPRVVDVFARRLQVQERLTHDILECINNTLKPKGVAVVIEASHMCMMMRGVQKQNSVTTTSGFRGQFEKQETRNEFLNLIGR

SEQ ID NO: 14548 - protein, 206 aa, Sediminihabitans luteus
  misc_feature (1)..(206): tr|A0A2M9CEE9|A0A2M9CEE9_9CELL GTP cyclohydrolase 1 OS= Sediminihabitans luteus OX=1138585 GN=folE PE=3 SV=1
MADVGHDAGADLPSAAEIGPYDEARVEAAVRELLLGVGENPDREGLRETPARVARAYREIFAGLHQDATDVLTTTFDLGHEEMVLVKDIELYSTCEHHLVPFHGVAHVGYIPNVDGRITGLSKLARLVEVYARRPQVQERLTTQIADALVEHLDARGVIVVVECEHLCMSMRGVRKPGSRTVTSAVRGQMRDGATRAEAMSLILGR

SEQ ID NO: 14549 - protein, 248 aa, Sediminitomix flava
  misc_feature (1)..(248): tr|A0A315Z7K3|A0A315Z7K3_9BACT GTP cyclohydrolase 1 OS= Sediminitomix flava OX=379075 GN=folE PE=3 SV=1
MKQNETLWNIQQSDGQDAGQGSTNNLSEKQMEEIDQLGDMHIGTSIETPMRADAFDLDDTTKVAKIAEHFESIMNLLGLDLNDDSLKGTPHRVAKMYVKEIFSGLNPENRPDIKLFENKYQYNEMLVEKDIHFFSNCEHHFVPIMGKAHVAYISNGKVIGLSKINRLVQYYAKRPQVQERLTVQILEDLKKTLETEDVAIIIDAKHLCVSMRGVEDTSSSTVTSAYSGKFQDEATRNEFLKYLSLSSD

SEQ ID NO: 14550 - protein, 217 aa, Sediminitomix flava
  misc_feature (1)..(217): tr|A0A315ZD15|A0A315ZD15_9BACT GTP cyclohydrolase 1 OS= Sediminitomix flava OX=379075 GN=folE PE=3 SV=1
MENKEIELIGDNHLSSNIETPLRPDAFEKSDEEKIQNIEGHFAKIMEELGLDLTDSSLSGTPYRFAKMYVKELFYGLDPKNKPRMSTFENKYGYHKMLIEQNITLNSSCEHHFLPIVGHAHIGYIPKDKVVGLSKINRLVDYYAHRPQVQERLCSQILNDLQQLLGTDDVIVVVNAQHLCVSSRGIKDQNSSTVSIEYGGRFEDITYRNEFFTSLKK

SEQ ID NO: 14551 - protein, 198 aa, Segetibacter aerophilus
  misc_feature (1)..(198): tr|A0A512BBF6|A0A512BBF6_9BACT GTP cyclohydrolase 1 OS= Segetibacter aerophilus OX=670293 GN=folE PE=3 SV=1
MAYNKKEEYDEAVTQGLMKNYRESIALLGEDPDREGLLKTPERMAKAMQFITQGYQQDAQAILNSAKFHEDVSEMVVVKDIELYSMCEHHMLPFYGKAHIAYIPNGWITGLSKMARVVDVYSRRLQVQERLTTQILDAIVESLQPLGAAVVIEASHLCMMMRGVSKQNSVTTTSAFFGEFEKYPTRNEFLKLISSKLH

SEQ ID NO: 14552 - protein, 197 aa, Segniliparus rotundus
  misc_feature (1)..(197): tr|D6ZBT1|D6ZBT1_SEGRD GTP cyclohydrolase 1 OS=Segnilip arus rotundus (strain ATCC BAA-972 / CDC 1076 / CIP 108 378 / DSM 44985 / JCM 13578) OX=640132 GN=folE PE=3 SV= 1
MESFEQTKSAFDDNRAEAAVRELLIAVGEDPDRPGLSRTPARVAKLYRELFSGLEQNPEDVLGESFAADHDELVLVKDIRVQSVCEHHLLSFHGNAHVGYIPGVGGSVVGFSALSRLVDLYARRPQIQERLTSQVADALMEHLRPRGVIVVVEAEHLCMQVRADRQQSARVTTSAVRGLLRTNPSSRAEALGFILRA

SEQ ID NO: 14553 - protein, 190 aa, Segniliparus rugosus
  misc_feature (1)..(190): tr|E5XQV5|E5XQV5_9ACTN GTP cyclohydrolase 1 OS=Segnilip arus rugosus ATCC BAA-974 OX=679197 GN=folE PE=3 SV=1
MQSFDEQRAQAAVRELLIAVGEDPDRPGLAGTPLRVAKLYRELFSGLGQDPKDVLGESFAADHDELVLVKDITVQSVCEHHLLSFHGAAHVGYIPGVGGSVVGFSTLSRLVGLYSRRPQIQERLTSQVADALMEHLRPRGVIVVVEAEHLCMRVRADRQQSAKVTTSAVRGLLRTNASSRAEALGFILRQ

SEQ ID NO: 14554 - protein, 188 aa, Seinonella peptonophila
  misc_feature (1)..(188): tr|A0A1M4TGQ9|A0A1M4TGQ9_9BACL GTP cyclohydrolase 1 OS= Seinonella peptonophila OX=112248 GN=folE PE=3 SV=1
MRVDQQKIEQAVRMILEAVGENPDREGLIGTPARVARMYEELFQGMDEDPRKHFDVVFSEEHEELVLVKDIPFFSLCEHHLVPFYGHAHVAYIPRSGRVTGLSKLARAVETVARRPQLQERITSTIAESIMEKLDPYGVMVVVDAEHMCMTMRGIKKPGAKTVTTAVRGRMAEESDIRFEVLKLIKMQ

SEQ ID NO: 14555 - protein, 186 aa, Selenihalanaerobacter shriftii
  misc_feature (1)..(186): tr|A0A1T4JMH4|A0A1T4JMH4_9FIRM GTP cyclohydrolase 1 OS= Selenihalanaerobacter shriftii OX=142842 GN=folE PE=3 S V=1
MVDKEKIREAVEMILEAIGEDPDREGLLETPDRVARMYEDIFSGLHKDPSDDLQIYFSEEHEELVLVKDISFYSMCEHHLLPFYGKAHVGYIPKSGKVTGLSKLARVVDSFAKRPQLQERLTSQIADLIMENIDARGVIVVIEAEHMCMTMRGVRKPGSFTTTSAVRGVLYQDQAVRAEALKLIKG

SEQ ID NO: 14556 - protein, 260 aa, Seleniivibrio woodruffii
  misc_feature (1)..(260): tr|A0A4R1KC40|A0A4R1KC40_9BACT GTP cyclohydrolase FolE2 OS=Seleniivibrio woodruffii OX=1078050 GN=folE2 PE=3 S V=1
MKDIQNLRDNRNLDVDRVGIKDLQYPVILSDRNKGKQNTIARINMYVRLPHDFKGTHMSRFVEILSRHSDDINLYSVGHILDEMKERLDSEEAFIELAFNYFVRKKAPVSGQEAMMDYYCEYFGSSGPKGRDAVMSVRVPVMTLCPCSKEISQYGAHNQRGYVTISVRMKKLMWIEEIIEIAETSASSPVYPLLKREDEKYVTEHSYENPTFVEDVVRNAATKLMADERVVWFEVSSENMESIHNHSAYAVITRDKRTQS

SEQ ID NO: 14557 - protein, 263 aa, Selenomonas artemidis
  misc_feature (1)..(263): tr|E7N2X9|E7N2X9_9FIRM GTP cyclohydrolase FolE2 OS=Sele nomonas artemidis F0399 OX=749551 GN=folE2 PE=3 SV=1
MLDVQSREDARGIAIQRVGVKEVKLPFLIKKQAGGYQQVLARITFTVALPMEFKGTHMSRFLEILLPWREQPLAEEEMEAMLTEALERLHAEEAEVSLAFTYFLEKIAPVSGKVSLLDVEASFTGRKRRGMPMRFELGLAMPFTSLCPCSKEISAYGAHNQRSVARVRLRYAEGVPCIYIEELAALLERQGSAPIYPLLKRADEKYVTEAAYENPKFVEDILRDTVLALRALPGLAYFSLECENEESIHSHNAFAAHEEFLRD

SEQ ID NO: 14558 - protein, 196 aa, Selenomonas artemidis
  misc_feature (1)..(196): tr|E7N077|E7N077_9FIRM GTP cyclohydrolase 1 OS=Selenomo nas artemidis F0399 OX=749551 GN=folE PE=3 SV=1
MKKQTRGGAPDLPRAAAAMREFLAALGVDAMSCGMSETPTRTAELYAELFAGLRNDPAALWAETMTEDTAGLVAVRDIPFYSMCEHHLLPFFGTVDIVYRPQGGRVAGFGVFAQLAALYAARPQLQERLTAQIADEIMRGLGAAGVLVVVRARQLCMMMRGERAHGTQTVTAECRGAFRSDAAESAAAWQMLGVHE

SEQ ID NO: 14559 - protein, 262 aa, Selenomonas flueggei
  misc_feature (1)..(262): tr|C4V0P9|C4V0P9_9FIRM GTP cyclohydrolase FolE2 OS=Sele nomonas flueggei ATCC 43531 OX=638302 GN=folE2 PE=3 SV= 1
MQDVQSREDGRGIAIQRVGVKDVRLPFLIKKQAGGYQQVLATITFTVSLPMEFKGTHMSRFLEILLPWREKPLAEEEMDAMLTEALDRLQAEAAEVRLAFTYFLEKSAPVSGRTSLLDVDASFTGRKRRGMPMEFELGLSMPFTSLCPCSKEISSYGAHNQRSRARVRLRFHEGVPCIYIEDLASLLEQQGSAPIYPLLKRADEKYVTEEAYEHPKFVEDILRDTVLALRQLPGLAYFSLACENEESIHSHNAFAAHEEYLN

SEQ ID NO: 14560 - protein, 191 aa, Selenomonas flueggei
  misc_feature (1)..(191): tr|C4V3M7|C4V3M7_9FIRM GTP cyclohydrolase 1 OS=Selenomo nas flueggei ATCC 43531 OX=638302 GN=folE PE=3 SV=1
MREFLTALGVDTAAQGMEETPQRAAQLYAELFAGLHEDTAELWADVLTEETDGLVAVRAIPFYSMCEHHLLPFFGTAHIVYQPHAGHVAGFGVFARLVASMARRPQLQERLTGDIAREIECGLGAEGVLVVLDAQQLCMMMRGARAHGAQTTTSASCGIFRTDAASRMQAWTMLGMERGAQDDGESTLSLC

SEQ ID NO: 14561 - protein, 201 aa, Selenomonas infelix
  misc_feature (1)..(201): tr|G5GRW8|G5GRW8_9FIRM GTP cyclohydrolase 1 OS=Selenomo nas infelix ATCC 43532 OX=679201 GN=folE PE=3 SV=1
MTEDKVDLARAECAMREFLTAVGVDLAAQGMEETPARAAALYAELFAGLHTDTQDLWADVLTEKTDGLVAVRSISFHSICEHHLLPFFGTAHIVYRPHAGRVAGFGVFARLVARMAQRPQLQERLTEDIAREIEQGLGAEGVLVVLDARQLCMTMRGAHAHGTRTTTSTCRGGFREDKMMELQAWQMLGERNHGAENISLS

SEQ ID NO: 14562 - protein, 263 aa, Selenomonas infelix
  misc_feature (1)..(263): tr|G5GS77|G5GS77_9FIRM GTP cyclohydrolase FolE2 OS=Sele nomonas infelix ATCC 43532 OX=679201 GN=folE2 PE=3 SV=1
MLDVQNREDERGIAIQRVGVKEVRLPFLIKKQAGGYQQVLARIAFTVSLPMEFKGTHMSRFLEILLPWSEKPLAEEEMDAMLTEALDRLHAEAAEVSLTFTYFLEKKAPVSGRASLLDVDASFTGRKRRGEPMQFELGLSMPFTSLCPCSKEISAYGAHNQRSTARVRLRYHEGVPCIYIEELAELLERQGSAPIYPLLKRADEKHVTEAAYENPKFVEDILRDTILALRALPGLAYFSLECENEESIHSHNAFAAHEEYLSE

SEQ ID NO: 14563 - protein, 202 aa, Selenomonas noxia
  misc_feature (1)..(202): tr|D4S4K5|D4S4K5_9FIRM GTP cyclohydrolase 1 OS=Selenomo nas noxia ATCC 43541 OX=585503 GN=folE PE=3 SV=1
MADAQTEIDLARAEHAMREFLAAVGLDLTAQGMKDTPARAAELYAELFSGLRSDPQKLWTNAMTEETDGLVAVRTIPFHSVCEHHLLPFFGTAHIVYRPHAGRVAGFGIFTQLVDLMARRPQLQERLTEDIAREIERGLGAEGVLVVLDARQLCMTMRGERAHGTRTTTSACRGIFREDKAKELQAWQMLGEWDSAENISIP

SEQ ID NO: 14564 - protein, 263 aa, Selenomonas noxia
  misc_feature (1)..(263): tr|G5H4W5|G5H4W5_9FIRM GTP cyclohydrolase FolE2 OS=Sele nomonas noxia F0398 OX=702437 GN=folE2 PE=3 SV=1
MLDVQNREDSRGIAIQRVGVKELRLPFLIKKQTGGYQQVLARISFTVSLPMEFKGTHMSRFLEILLPWSEKPLAEEEMEAMLTEALDRLHAEAAEVTLAFTYFLEKKAPVSGRVSLLDVDASFTGRKQRGASMLFELGLAMPFTSLCPCSKEISAYGAHNQRSIARVRLRYREGVPCIYIEELAALLEQQGSAPIYPLLKRADEKYVTEEAYENPKFVEDILRDTVLALRRLPGLAYFSLECENEESIHRHNAFAAHEEYLSE

SEQ ID NO: 14565 - protein, 267 aa, Selenomonas ruminantium
  misc_feature (1)..(267): tr|I0GRS2|I0GRS2_SELRL GTP cyclohydrolase FolE2 OS=Sele nomonas ruminantium subsp. lactilytica (strain NBRC 103 574 / TAM6421) OX=927704 GN=folE2 PE=3 SV=1
MKRGTKMQDVQNRKDQRGIAIQKVGIKEAHLPFLIKTKEGGYQQVLARVRFTVALPSQYKGTHMSRFLEILMPWSKKPLAEPEMEAMLAEALERLEAHAAEVELSFKYFVDKTAPVSGKTSVLDLDCCFTGRKEKGKPMEFQLGVEVPFTSLCPCSKEISSYGAHNQRSVARIQLRFKDGYDCIYIEDLAELVEKQGSSPIYPLLKREDEKFVTEAAYENPKFVEDILRDTVLALREIEGLGWFSVECENYESIHNHSAYAAHEEEL

SEQ ID NO: 14566 - protein, 190 aa, Selenomonas ruminantium
  misc_feature (1)..(190): tr|A0A1I3IDR9|A0A1I3IDR9_SELRU GTP cyclohydrolase 1 OS= Selenomonas ruminantium OX=971 GN=folE PE=3 SV=1
MGEKNDRAVRAMREFLEAVGVDLTARGMEKTPERVAQMYQYLFSGIGKDTFSIWGETFDAGSDGIVAVRHIPFYSMCEHHLVPFFGEVSIVYLPENGRVAGFSKFARLVDILSHQPQLQERLTAQIAAAVWHDLGARGVLVTVEAQQLCMTMRGDLAHGTRTVTSECTGVFQTDSALYHQAWMILGGEKS

SEQ ID NO: 14567 - protein, 264 aa, Selenomonas sp.
  misc_feature (1)..(264): tr|L1MVS8|L1MVS8_9FIRM GTP cyclohydrolase FolE2 OS=Sele nomonas sp. oral taxon 138 str. F0429 OX=1127695 GN=fol E2 PE=3 SV=1
MMLDVQNREDERGIAIQRVGVKEVRLPFLIKKQAGGYQQVLARIAFTVSLPMEFKGTHMSRFLEILLPWSEKPLAEEEMDAMLTEALDRLHAEAAEVSLAFTYFLEKKAPVSGRPSLLDVDASFTGRKRCGEPMQFELGLAMPFTSLCPCSKEISAYGAHNQRSTARVRLRYRERVPCIYIEDLAELLERQGSAPIYPLLKRVDEKYVTEAAYENPKFVEDILRDTVLALRELPGLAYFSLECENEESIHSHNAFAAHEEYLNE

SEQ ID NO: 14568 - protein, 206 aa, Selenomonas sp.
  misc_feature (1)..(206): tr|A0A0X8K9D6|A0A0X8K9D6_9FIRM GTP cyclohydrolase 1 OS= Selenomonas sp. oral taxon 136 OX=713030 GN=folE PE=3 S V=1
METEYAADLPRAVRAMREFLAALGVDTAAQGMEETPLRAAQLYAELFAGLHEDTAELWADVLTEEMDGLVAVRAIPFYSMCEHHLLPFFGTAHIVYQPHAGRVAGFGVFARLVASMARRPQLQERLTGDIAREIECGLGAEGVLVVLDAQQLCMMMRGARAHGARTTTSASCGIFRTDAASRMQAWTMLGMERGAQDDSESTLSLC

SEQ ID NO: 14569 - protein, 273 aa, Selenomonas sputigena
  misc_feature (1)..(273): tr|F4EUQ3|F4EUQ3_SELS3 GTP cyclohydrolase FolE2 OS=Sele nomonas sputigena (strain ATCC 35185 / DSM 20758 / VPI D19B-28) OX=546271 GN=folE2 PE=3 SV=1
MMKDIQKSADMRGIDIQHVGIKDAHLPFRIKTKAGDFQQVTARIRFTVSLPKEYKGTHMSRFLEILQQWCDKPVAEEEMEAMLQDALHRLEAETAKLRLSFKYFIEKEAPASGKKSVLDLDCFFEGEKRAGEAMSFRLGVTVPATSLCPCSKAISRYGAHNQRSLLQAVVEFKPPAPCIFIEDLAALMEEQASCPIYPLLKREDEKYVTEKAYEQPKFVEDILRDLVLALRPLPGLFWFSLSCENFESIHNHSAYASHEEYVNCEARTAGKEQ

SEQ ID NO: 14570 - protein, 189 aa, Selenomonas sputigena
  misc_feature (1)..(189): tr|C9LYD3|C9LYD3_SELS3 GTP cyclohydrolase 1 OS=Selenomo nas sputigena (strain ATCC 35185 / DSM 20758 / VPI D19B -28) OX=546271 GN=folE PE=3 SV=1
MNEKASAAMRRFLEAMGLDLAACGMEKTPERVTEMFELLFSGCGEDASSAWGELFETKARGLTAVQHIPFYSLCEHHLVPFFGEVHIAYLPKDGRIAGFSRFVHVVNLLARRPQLQERFTREIADAVLDGLSAEGVLVIVEARQLCMMMRGELAPGTRTLTSETGGTITADAALGKEAWDLLMRGAKEG

SEQ ID NO: 14571 - protein, 193 aa, Senegalimassilia anaerobia
  misc_feature (1)..(193): tr|A0A369L7X4|A0A369L7X4_9ACTN GTP cyclohydrolase 1 OS= Senegalimassilia anaerobia OX=1473216 GN=folE PE=3 SV=1
MDTAKIEAGVRMILEGVGENPDREGLKETPARVARMYEEVFAGLTEDPAVHFATTFDEHCSEMVLVRDIYFYSMCEHHLVPFFGKAHIAYIPAADGRVCGLSKLARLVEVYAKRPQVQERLTSQIADTLVEQLNPQGVVVVLEAEHMCMSMRGVKKPGSHTVTSAVRGVFAGSTDAARASRSEAMSLILRETR

SEQ ID NO: 14572 - protein, 193 aa, Senegalimassilia sp.
  misc_feature (1)..(193): tr|A0A4Q2K263|A0A4Q2K263_9ACTN GTP cyclohydrolase 1 OS= Senegalimassilia sp. KGMB04484 OX=2509433 GN=folE PE=3 SV=1
MDTAKIEAGVRMILEGVGEDPDREGLQETPARVARMYEEVFAGLTEDPAVHFEKTFDEHCNEMVLVRDISFYSMCEHHLVPFFGKAHIAYIPAPDGRVCGLSKLARLVEVYAKRPQVQERLTGQIADTLVEQLHPQGVAVVLEAEHMCMSMRGVKKPGSRTVTSAVRGVFAGSTDAARASRSEVMSLILRDAR

SEQ ID NO: 14573 - protein, 225 aa, Seonamhaeicola algicola
  misc_feature (1)..(225): tr|A0A5C7AMW6|A0A5C7AMW6_9FLAO GTP cyclohydrolase 1 OS= Seonamhaeicola algicola OX=1719036 GN=folE PE=3 SV=1
MKLDNNFDDFDALGDEHIGTSQDTPMRSDAFKLTNEEKIDIIKDDVRHIMETLGLDLTDDSLKGTPNRVAKMFVNEIFGGLNPNKKPSASTFDNKYKYGEMLVEKNITVYSTCEHHLLPIVGRAHVAYISNGSVVGLSKMNRIVDYYAKRPQVQERLTIQIVKELQQVLNTKDVACVIDAKHLCVNSRGIRDIESSTVTSEFGGKFKDMATRKEFLDYIKLDTKF

SEQ ID NO: 14574 - protein, 229 aa, Seonamhaeicola algicola
  misc_feature (1)..(229): tr|A0A5C7B4W9|A0A5C7B4W9_9FLAO GTP cyclohydrolase 1 OS= Seonamhaeicola algicola OX=1719036 GN=folE PE=3 SV=1
MQKENIEIKNGHLNGLTIEDIGDEHLFTGIETPLRKDAFKLTDTEKKERIAILFEEIMQVMGLDLTDDSLKGTPQRVAKMYIDEIFSGLNPENKPKVALFDNKYQYNQMLVEKNITFYSNCEHHFVPIIGKAHVAYISSGKVIGLSKLNRIVQYYAKRPQVQERLTNQIANELKATLNTEDIAVIIDAKHLCVSSRGIKDDTSATVTAYYGGKFNTTEKIVELQNYLKN

SEQ ID NO: 14575 - protein, 225 aa, Seonamhaeicola aphaedonensis
  misc_feature (1)..(225): tr|A0A3D9H995|A0A3D9H995_9FLAO GTP cyclohydrolase 1 OS= Seonamhaeicola aphaedonensis OX=1461338 GN=folE PE=3 SV =1
MKFDKDFEDFDALGNEHIGTSQDTPMRSDAFKLSNEEKIDIIKDDVRHIMETLGLDLNDDSLKGTPNRVAKMFVKEIFGGLDPEKKPSASTFDNKYKYGEMLVEKNITVYSTCEHHLLPIVGKAHIAYISNGTVVGLSKMNRIVDYYAKRPQVQERLTIQIVKELQEVLDTKDVACVIDAKHLCVNSRGIRDIESSTVTSEFGGRFKDKATRREFLDYIKLDTKF

SEQ ID NO: 14576 - protein, 195 aa, Seonamhaeicola aphaedonensis
  misc_feature (1)..(195): tr|A0A3D9H8Q5|A0A3D9H8Q5_9FLAO GTP cyclohydrolase 1 OS= Seonamhaeicola aphaedonensis OX=1461338 GN=folE PE=3 SV =1
MPYRKFEEYNIQVTDDVKDRYKKIIEDLGEDTERDGLLKTPERAAKAMQFLTQGYHQDPVEILKSAMFKESYDEMVIVKDIELYSLCEHHILPFFGKVHIAYIPNGQIVGLSKLPRIVDVFARRLQVQERLTEQILDCINYTLKPQGVAVVIEASHMCMMMRGVQKQNSITTTSGFRGQFEKIETRNEFLKLIGK

SEQ ID NO: 14577 - protein, 231 aa, Seonamhaeicola marinus
  misc_feature (1)..(231): tr|A0A5D0IAI7|A0A5D0IAI7_9FLAO GTP cyclohydrolase 1 OS= Seonamhaeicola marinus OX=1912246 GN=folE PE=3 SV=1
MQIEKEKQQINGHHLNGFSIEDIGDDHLFTGLETPMREDAFKLSDSEKKERIAILFEEIMQVMGLDLTDDSLKGTPERVAKMYIDEIFSGLNPKNKPKVALFDNKYQYNQMLIEKNITFYSNCEHHFVPIIGKAHVAYISSGMVIGLSKLNRIVQYYAKRPQVQERLTNQIANELKTILDTEDVAVIIEAKHLCVSSRGVKDDTSETITAYYGGSFNTSEKITELQNYLKS

SEQ ID NO: 14578 - protein, 150 aa, Seonamhaeicola marinus
  misc_feature (1)..(150): tr|A0A5D0J5J8|A0A5D0J5J8_9FLAO GTP cyclohydrolase 1 (Fr agment) OS=Seonamhaeicola marinus OX=1912246 GN=folE PE =3 SV=1
MPYKKFEEYSMQVTDDVKDRYKKIIEDLGEDTKRDGLLKTPERAAKAMQFLTQGYEQDPVEILTSAMFKESYNEMVIVKDIELYSLCEHHILPFFGKVHIAYIPNGHIVGLSKLPRIVDVFARRLQVQERLTEQILDCINDTLKPQGVAV

SEQ ID NO: 14579 - protein, 231 aa, Seonamhaeicola sp.
  misc_feature (1)..(231): tr|A0A562YB79|A0A562YB79_9FLAO GTP cyclohydrolase 1 OS= Seonamhaeicola sp. W255 OX=2528206 GN=folE PE=3 SV=1
MQLERLKTKANGHKLNGFTIEDIGDDHLFTGLETPMRKDAFKLSDTEKKERIAILFEEIMEVMGLDLTDDSLKGTPKRVAKMYIDEIFSGLNPENKPKVALFDNKYQYNQMLVEKNITFYSNCEHHFVPIIGKAHVAYISSGKVIGLSKLNRIVQYYAKRPQVQERLTNQIANELKSILDTEDVAVIIDAKHLCVSSRGIKDDTSATVTAYYGGKFNNSDKIKELQNYLNG

SEQ ID NO: 14580 - protein, 217 aa, Seonamhaeicola sp.
  misc_feature (1)..(217): tr|A0A1U7DW05|A0A1U7DW05_9FLAO GTP cyclohydrolase 1 OS= Seonamhaeicola sp. S2-3 OX=1936081 GN=folE PE=3 SV=1
MNRKERHEINIFSNHEIQNLEAISKHEEKLKTIEYHFAKIMEALGLKLDNPSLKETPKRVAKMYINEVFKGLNEKNFPSISFFENVSSYREMILVDNIKVYSYCEHHFVPFFGKAAVAYIPKDRVIGLSKINRIVQFYASKPQIQEKLTVEIGEKLKILLKTDDIAIHIEANHLCVASRGVGDENSYTKTNFFSGKFLKEKEKSRFLNSINKTKLLI

SEQ ID NO: 14581 - protein, 205 aa, Serinicoccus chungangensis
  misc_feature (1)..(205): tr|A0A0W8I2Q0|A0A0W8I2Q0_9MICO GTP cyclohydrolase 1 OS= Serinicoccus chungangensis OX=767452 GN=folE PE=3 SV=1
MSTPATPEAGAGEPPATRPVDHARIEAAVREILLAVGEDPDRDGLQGTPARVARSYAEIFGGLQQDAREVLGTTFDVDHDEMILVKDIELYSVCEHHLVPFHGSAHVAYIPGRDGRVVGLSKLARLVDVYARRPQVQERLTTQVADALVEHLAPRGVLVVVEAEHLCMSMRGVRRPGARTVTSTVRGQLRNQATRAEAMSLITGR

SEQ ID NO: 14582 - protein, 212 aa, Serinicoccus sp.
  misc_feature (1)..(212): tr|A0A1Q9V0S3|A0A1Q9V0S3_9MICO GTP cyclohydrolase 1 OS= Serinicoccus sp. CNJ-927 OX=1904970 GN=folE PE=3 SV=1
MRPAPAGAGPDPDEDAPGPQDAVSRAVDHARIEAAVREILLAVGEDPDRDGLLHTPARVARSYAEIFSGIDQDPSAVLGTTFDVDHDEMILVKDIELYSVCEHHLVPFHGSAHVAYIPGPHGRVVGLSKLARLVDVYARRPQVQERLTTQVADALVDHLAPRGVLVVVEAEHLCMSMRGVRRPGARTITSTVRGHLRNQATRAEAMSLITGR

SEQ ID NO: 14583 - protein, 210 aa, Serinicoccus sp.
  misc_feature (1)..(210): tr|A0A5J6V1V5|A0A5J6V1V5_9MICO GTP cyclohydrolase I Fol E OS=Serinicoccus sp. W204 OX=2593973 GN=folE PE=4 SV=1
MSSPGAEPDPVTPDPATAMAHQVDQPRIEAAVREILEAIGEDPQRDGLLDTPARVARAYAEIFGGLHQDPSDVLGTTFDVDHNEMILVRDIELYSVCEHHLLPFHGVAHLVYIPAKDGRVAGLSKMARLVDLFARRPQVQERLTTEIADALEAHLSPRGVLVVVEAEHLCMSMRGIRRPGARTVTSTVRGQLRNSATRAEAMSLVTGGRS

SEQ ID NO: 14584 - protein, 196 aa, Serpentinicella alkaliphila
  misc_feature (1)..(196): tr|A0A4R2TMC3|A0A4R2TMC3_9CLOT GTP cyclohydrolase 1 OS= Serpentinicella alkaliphila OX=1734049 GN=folE PE=3 SV= 1
MSIDLKAIEQHIRGILIAIGDNPDREGLKDTPKRAAKMFEEVFKGMCYTNDEIAQMHDTTFEEDIYIQDNFNDIVFMKDIEIFSHCEHHLALMYNMKVAIAYIPNKKIIGLSKMARIADLVGRRLQLQERIGSDIAEILQKITESEDVAVIIQGEHGCMTTRGIEKPGSKTITITTRGRFNSDPVLNNKLMILYTK

SEQ ID NO: 14585 - protein, 220 aa, Serratia ficaria
  misc_feature (1)..(220): tr|A0A240BRI3|A0A240BRI3_SERFI GTP cyclohydrolase 1 OS= Serratia ficaria OX=61651 GN=folE PE=3 SV=1
MTSLSKEAALVHAALEERGLETPLRGEVLDRETRKRRIKEHMTEIMQLLNLDLSDDSLAETPHRIAKMYVDEIFSGLDYANFPKITVIENKMKVDEMVTVRDITLTSTCEHHFVTIDGKATVAYIPKDSVIGLSKINRIVQFFSQRPQVQERLTQQILVALQTLLGTNNVAVSIDAVHYCVKARGIRDATSATTTTSLGGLFKSSQNTRQEFLRAVRHHQ

SEQ ID NO: 14586 - protein, 308 aa, Serratia ficaria
  misc_feature (1)..(308): tr|A0A240C2L2|A0A240C2L2_SERFI GTP cyclohydrolase FolE2 OS=Serratia ficaria OX=61651 GN=folE2 PE=3 SV=1
MNQIALPPRQPLPDAQAWRGEMSEVGLDWVGMQGIALPLELAGKPLQAKVDAGINLRPSAAGARGIHMSRLYLALDELTQGELTPRRIENTLRAFLASQPEHSDSASLRIGGELLLSRSAMLSPQRGWKAYPLRIDAALTHRLALSLQIGVPYSSTCPSSAALSRQLAQQQFQFDFEQAASVSPQQVLDWLAEHGMPATPHSQRSWAWVTVWQTDGGSAFNPVNLIDRIEHTLGTPLQTLVKRRDEQAFALANGQNLMFCEDAARRLYQMLRSQCDVGAFSVRVEHQESLHAHNAVAELSWREGGDAA

SEQ ID NO: 14587 - protein, 221 aa, Serratia fonticola
  misc_feature (1)..(221): tr|A0A0F7D2G2|A0A0F7D2G2_SERFO GTP cyclohydrolase 1 OS= Serratia fonticola OX=47917 GN=folE PE=3 SV=1
MTSLSNEAALVHAALEARGLETPLCGEVLDRETRKRRIKEHMTEIMQLLNLDLSDDSLAETPHRIAKMYVDEIFSGLDYANFPKITVIENKMKVDEMVTVRDITLTSTCEHHFVTIDGKATVAYIPKDSVIGLSKINRIVQFFARRPQVQERLTQQILVALQTLLGTNNVAVSIDAVHYCVKARGIRDATSATTTTSLGGLFKSSQNTRQEFLRAVRHHHG

SEQ ID NO: 14588 - protein, 126 aa, Serratia fonticola
  misc_feature (1)..(126): tr|A0A4U9TEP7|A0A4U9TEP7_SERFO GTP cyclohydrolase 1 OS= Serratia fonticola OX=47917 GN=folE_2 PE=3 SV=1
MTSLSNEAALVHAALEARAWKPPLCGEVLDRETRKRRIKEHMTEIMQLLNLDLSDDSLAETPHRIAKMYVDEIFSGLDYANFPKITVIENKMKVDEMVTVRDITLTSTCEHHFVTIDGKSHRGVYS

SEQ ID NO: 14589 - protein, 222 aa, Serratia liquefaciens
  misc_feature (1)..(222): tr|A0A515CY17|A0A515CY17_SERLI GTP cyclohydrolase 1 OS= Serratia liquefaciens OX=614 GN=folE PE=3 SV=1
MTSSLSKEAALVHAALEERGLETPLRGEVLDRETRKRRIKEHMTEIMQLLNLDLSDDSLAETPHRIAKMYVDEIFSGLDYANFPKITVIENKMKVDEMVTVRDITLTSTCEHHFVTIDGKATVAYIPKDAVIGLSKINRIVQFFSQRPQVQERLTQQILVALQTLLGTNNVAVSIDAVHYCVKARGIRDATSATTTTSLGGLFKSSQNTRQEFLRAVRHHQS

SEQ ID NO: 14590 - protein, 73 aa, Serratia liquefaciens
  misc_feature (1)..(73): tr|A0A484XT04|A0A484XT04_SERLI GTP cyclohydrolase 1 OS= Serratia liquefaciens OX=614 GN=folE_1 PE=4 SV=1
MSSLSKEAVLVHEALVARGLETPMRAPVQEIDNETRKRLITGHMTEIMQLLNLDLSDDSLMETPHRIAKNVCR

SEQ ID NO: 14591 - protein, 221 aa, Serratia marcescens
  misc_feature (1)..(221): tr|A0A3E2EN04|A0A3E2EN04_SERMA GTP cyclohydrolase 1 OS= Serratia marcescens subsp. sakuensis OX=211760 GN=folE PE=3 SV=1
MTSLSKEAALVHAALEERGLETPLRGEVLDRETRKRRIKEHMTEIMQLLNLDLSDDSLAETPHRIAKMYVDEIFSGLDYANFPKITVIENKMKVDEMVTVRDITLTSTCEHHFVTIDGKATVAYIPKDSVIGLSKINRIVQFFSQRPQVQERLTQQILVALQTLLGTNNVAVSIDAVHYCVKARGIRDATSATTTTSLGGLFKSSQNTRQEFLRAVRHHQG

SEQ ID NO: 14592 - protein, 246 aa, Serratia marcescens
  misc_feature (1)..(246): tr|A0A380AB63|A0A380AB63_SERMA GTP cyclohydrolase 1 OS= Serratia marcescens OX=615 GN=folE PE=3 SV=1
MTSLSKEAALVHAALEERGLETPLRGEVLDRETRKRRIKEHMTEIMQLLNLDLSDDSLAETPHRIAKMYVDEIFSGLDYANFPKITVIENKMKVDEMVTVRDITLTSTCEHHFVTIDGKATVAYIPKDSVIGLSKINRIVQFFSQRPQVQERLTQQILVALQTLLGTNNVAVSIDAVHYCVKARGIRDATSATTTTSLGGCSSPARIPARSSCVRCVITRGDGVAGRPARRQQAPAGAFFMSGRQR

SEQ ID NO: 14593 - protein, 308 aa, Serratia nematodiphila
  misc_feature (1)..(308): tr|A0A5C7D2D0|A0A5C7D2D0_9GAMM GTP cyclohydrolase FolE2 OS=Serratia nematodiphila OX=458197 GN=folE2 PE=3 SV=1
MNEVALPPRRSLPDAQAWRGEMSDVGLDWVGMQGIALPLELAGKPLMAKVDAGINLRAEAAGERGIHMSRLYLALDELTQGELTPQRIGRTLQAFLASQPEHSDRASLSISGELLLSRPALLSPQRGWKAYPLRIEATLTDTLTLALTVGVPYSSTCPSSAALSRQLAQQQFQFDFEQAAERVSQRQVSEWLLEQGMPATPHSQRSWAWITVTPENERAFEPVKLVDRIEHALGTPVQTLVKRRDEQAFALANGQNLMFCEDAARRLYRMLRSQCDYRAFSLRVEHQESLHAHNAVAELSWRGEHHAA

SEQ ID NO: 14594 - protein, 200 aa, Serratia nematodiphila
  misc_feature (1)..(200): tr|A0A1W9F2I2|A0A1W9F2I2_9GAMM GTP cyclohydrolase 1 (Fr agment) OS=Serratia nematodiphila DZ0503SBS1 OX=1449981 GN=folE PE=3 SV=1
MTSLSKEAALVHAALEERGLETPLRGEVLDRETRKRRIKEHMTEIMQLLNLDLSDDSLAETPHRIAKMYVDEIFSGLDYANFPKITVIENKMKVDEMVTVRDITLTSTCEHHFVTIDGKATVAYIPKDSVIGLSKINRIVQFFSQRPQVQERLTQQILVALQTLLGTNNVAVSIDAVHYCVKARGIRDATSATTTTSLGG

SEQ ID NO: 14595 - protein, 309 aa, Serratia odorifera
  misc_feature (1)..(309): tr|D4E601|D4E601_SEROD GTP cyclohydrolase FolE2 OS=Serr atia odorifera DSM 4582 OX=667129 GN=folE2 PE=3 SV=1
MEKTVSSNLPPLPDAQAWRTERGVIDLDWVGMQGIALPLELAGRPLAAQINASINLRGSRDGARGIHMSRLYAALDGLTQGELTPRRIITTLNDFLHSQPAHSDRAQLTISGDLLLSRPALVSAQRGWKSYPLCIEAQLATVPRLTLKVGVAYSSTCPSSAALSRQAAQQQFLVDFDAESTSLSRQRVAEWLGLHGMPATPHSQRSWAWVTVELSPDEQTVPVMTLIERIEHALGTPVQTLVKRLDEQAFALVNGQNLMFCEDAARRLYNALQASCRYRAGQVVVEHQESLHAHNAVAQLSWQEDDDVA

SEQ ID NO: 14596 - protein, 309 aa, Serratia odorifera; identical to SEQ ID NO: 14595
  misc_feature (1)..(309): tr|A0A447KY78|A0A447KY78_SEROD GTP cyclohydrolase FolE2 OS=Serratia odorifera OX=618 GN=folE2 PE=3 SV=1

SEQ ID NO: 14597 - protein, 221 aa, Serratia oryzae
  misc_feature (1)..(221): tr|A0A1S8CN70|A0A1S8CN70_9GAMM GTP cyclohydrolase 1 OS= Serratia oryzae OX=2034155 GN=folE PE=3 SV=1
MTSLSNEAALVHAALEARGLETPLCGEMLDRETRKSRIKEHMTEIMKLLNLDLSDDSLAETPHRIAKMYVDEIFSGLDYANFPKITVIENKMKVDEMVTVRDITLTSTCEHHFVTIDGKATVAYIPKDAVIGLSKINRIVQFFAQRPQVQERLTQQILVALQTLLGTNNVAVSIDAVHYCVKARGIRDATSATTTTSLGGLFKSSQNTRQEFLRAVRHHQG

SEQ ID NO: 14598 - protein, 309 aa, Serratia plymuthica
  misc_feature (1)..(309): tr|A0A447Q7R3|A0A447Q7R3_SERPL GTP cyclohydrolase FolE2 OS=Serratia plymuthica OX=82996 GN=folE2 PE=3 SV=1
MNKIALPPPQPLPDVQDWQGEMSEVGLDWVGMQEIALPLELAGKPLMTKVNVGINLLANRQGSRGIHMSRLYLALDELTQGELTPQRIGQTLNAILASQPEHSDRASLSIRGELLLSRPALLSPHRGWKAYPLRIDARLTKALALSLTVGVPYSSTCPSSAALSRQLAQQQFQFDFEQESDRVDRQQVIDWLGEQGMPATPHSQRSWAWVTLMLSGSEPALPVINLIDRIEHALGTPSQTLVKRHDEQAFALANGQNLMFCEDAARRLYLMLRSQCGLRGFSLRVEHQESLHAHNAVAELSWREEGDAA

SEQ ID NO: 14599 - protein, 221 aa, Serratia plymuthica
  misc_feature (1)..(221): tr|A0A2X4U7L1|A0A2X4U7L1_SERPL GTP cyclohydrolase 1 OS= Serratia plymuthica OX=82996 GN=folE PE=3 SV=1
MTSLSKEAALVHAALEERGLETPLRGEVLDRETRKRRIKEHMTEIMQLLNLDLSDDSLAETPHRIAKMYVDEIFSGLDYANFPKITVIENKMKVDEMVTVRDITLTSTCEHHFVTIDGKATVAYIPKDAVIGLSKINRIVQFFSQRPQVQERLTQQILVALQTLLGTNNVAVSIDAVHYCVKARGIRDATSATTTTSLGGLFKSSQNTRQEFLRAVRHHQG

SEQ ID NO: 14600 - protein, 221 aa, Serratia proteamaculans
  misc_feature (1)..(221): sp|A8GC24|GCH1_SERP5 GTP cyclohydrolase 1 OS=Serratia p roteamaculans (strain 568) OX=399741 GN=folE PE=3 SV=1
MTSLSKEAVLVHAALEERGLETPLRGEVLDRETRKRRIKEHMTEIMQLLNLDLSDDSLAETPHRIAKMYVDEIFSGLDYANFPKITVIENKMKVDEMVTVRDITLTSTCEHHFVTIDGKATVAYIPKDAVIGLSKINRIVQFFSQRPQVQERLTQQILVALQTLLGTNNVAVSIDAVHYCVKARGIRDATSATTTTSLGGLFKSSQNTRQEFLRAVRHHQG

SEQ ID NO: 14601 - protein, 221 aa, Serratia proteamaculans; identical to SEQ ID NO: 14600
  misc_feature (1)..(221): tr|A0A1W5DHL9|A0A1W5DHL9_9GAMM GTP cyclohydrolase 1 OS= Serratia proteamaculans OX=28151 GN=folE PE=3 SV=1

SEQ ID NO: 14602 - protein, 221 aa, Serratia quinivorans; identical to SEQ ID NO: 14600
  misc_feature (1)..(221): tr|A0A2X2I764|A0A2X2I764_9GAMM GTP cyclohydrolase 1 OS= Serratia quinivorans OX=137545 GN=folE PE=3 SV=1

SEQ ID NO: 14603 - protein, 309 aa, Serratia quinivorans
  misc_feature (1)..(309): tr|A0A2X2GNX6|A0A2X2GNX6_9GAMM GTP cyclohydrolase FolE2 OS=Serratia quinivorans OX=137545 GN=folE2 PE=3 SV=1
MNMVALPPRQPLPDAQAWQGTMSEVGLDWVGMQGIALPLELAGKPLMAKVNAGINLRASRQGARGIHMSRLYLALDELTQGELTPQRISDQLQAFLASQPENSDRANLNISGELLLSRPALLSPQRGWKAYPLKIDATLTSELTLSLTVGVPYSSTCPSSAALSRQLAQQQFQFDFEQSPEKVDQQQVIDWLGEQGMPATPHSQRSWAWVTVTLNEEAVALPVVNLIDRIEHALGTPLQTLVKRQDEQAFALANGQNLMFCEDAARRLYRMLRSQCNQRAFSLRVEHQESLHAHNAVAELSWQEPGNAA

SEQ ID NO: 14604 - protein, 242 aa, Serratia rubidaea
  misc_feature (1)..(242): tr|A0A4U9HJV1|A0A4U9HJV1_SERRU GTP cyclohydrolase folE2 OS=Serratia rubidaea OX=61652 GN=folE2 PE=4 SV=1
MSRLYLTLDALTQGELTPRRIINTLAACLQSQTADSERVRLEIGGELLLSRAALLSPQRGWKSYPLHISATLERRPMLTLQVGVPYSSTCPASAALSRQAAQQQFLVDIETDDGALEVQQVFDWLGAHGMPATPHSQRSWAWVTVTLSGDEKVLPAISLIDRIEQALGTPVQTLVKRQDEQAFALANGRNLMFCEDAARRLHDALRRACCYRAFSVRVEHQESLHAHNAVAQLSWREGADAA

SEQ ID NO: 14605 - protein, 220 aa, Serratia rubidaea
  misc_feature (1)..(220): tr|A0A140EZ88|A0A140EZ88_SERRU GTP cyclohydrolase 1 OS= Serratia rubidaea OX=61652 GN=folE PE=3 SV=1
MTTLSKEAALVHAALEARGLETPLRGEMLDRETRKRRIQEHMTEIMQLLNLDLSDDSLAETPHRIAKMYVDEIFSGLDYANFPKITVIENKMKVDEMVTVRDITLTSTCEHHFVTIDGKATVAYIPKDGVIGLSKINRIVQFFAQRPQVQERLTQQILIALQTLLGTNNVAVSIDAVHYCVKARGIRDATSATTTTSLGGLFKSSQNTRQEFLRAVRHHQ

SEQ ID NO: 14606 - protein, 221 aa, Serratia sp.; identical to SEQ ID NO: 14591
  misc_feature (1)..(221): tr|A0A1B3F9T2|A0A1B3F9T2_9GAMM GTP cyclohydrolase 1 OS= Serratia sp. YD25 OX=1759437 GN=folE PE=3 SV=1

SEQ ID NO: 14607 - protein, 220 aa, Serratia sp.
  misc_feature (1)..(220): tr|A0A2R3GZL7|A0A2R3GZL7_9GAMM GTP cyclohydrolase 1 OS= Serratia sp. MYb239 OX=2033438 GN=folE PE=3 SV=1
MTTLSKEAALVHAALEARGLETPLRGEMLDRETRKRRIQEHMTEIMQLLNLDLTDDSLAETPHRIAKMYVDEIFSGLDYANFPKITVIENKMKVDEMVTVRDITLTSTCEHHFVTIDGKATVAYIPKDGVIGLSKINRIVQFFAQRPQVQERLTQQILIALQTLLGTNNVAVSIDAVHYCVKARGIRDATSATTTTSLGGLFKSSQNTRQEFLRAVRHHQ

SEQ ID NO: 14608 - protein, 222 aa, Serratia symbiotica
  misc_feature (1)..(222): tr|A0A455VS60|A0A455VS60_9GAMM GTP cyclohydrolase 1 OS= Serratia symbiotica OX=138074 GN=folE PE=3 SV=1
MTSRLSKEAALVHAALEACGLETPLWGDVLDRETRKRRIKEHMTEIMQLLNLDLSDDSLAETPHRIAKMYVDEIFSGLDYANFPKITVIENKMQVDEMVTVRDITLTSTCEHHFVTIDGKATVAYIPKDAVIGLSKINRIVRFFSQRPQVQERLTQQILVALQTLLGTNNVAVSIDAVHYCVKARGIRDATSATATTALGGLFKSSQNTRQEFLRAVRYCQK

SEQ ID NO: 14609 - protein, 222 aa, Serratia symbiotica
  misc_feature (1)..(222): tr|A0A068R8L7|A0A068R8L7_9GAMM GTP cyclohydrolase 1 OS= Serratia symbiotica SCt-VLC OX=1347341 GN=folE PE=3 SV= 1
MTSRLSKEAALVHAALEACGLETPLWGDVLDPETRKRRIKEHMTEIMQLLNLDLSDDSLAETPHRIAKMYVDEIFSGLDYANFPKITVIENKMQVDEMVTVRDITLTSTCEHHFVTIDGKATVAYIPKDAVIGLSKINRIVRFFSQRPQVQERLTQQILVALQTLLGTNNVAVSIDAVHYCVKARGIRDATSATATTALGGLFKSSQNTRQEFLRAVRYCQK

SEQ ID NO: 14610 - protein, 221 aa, Serratia ureilytica; identical to SEQ ID NO: 14591
  misc_feature (1)..(221): tr|A0A5C7CCN4|A0A5C7CCN4_9GAMM GTP cyclohydrolase 1 OS= Serratia ureilytica OX=300181 GN=folE PE=3 SV=1

SEQ ID NO: 14611 - protein, 308 aa, Serratia ureilytica
  misc_feature (1)..(308): tr|A0A5C7CDS2|A0A5C7CDS2_9GAMM GTP cyclohydrolase FolE2 OS=Serratia ureilytica OX=300181 GN=folE2 PE=3 SV=1
MNEVALPPRRSLPDAQAWRGEMSDVGLDWVGMQGIALPLELAGKPLMAKVDAGINLRAEAAGERGIHMSRLYLALDELTQGELTPQRIGRTLQAFLASQPERSDRASLSIGGELLLSRPALLSPQRGWKAYPLRIEATLTDTLTLALTVGVPYSSTCPSSAALSRQLAQQQFQFDFEQAAERVSQRQVSEWLLEQGMPATPHSQRSWAWITVTPENERAFEPVKLIDRIEHALGTSVQTLVKRRDEQAFALANGQNLMFCEDAARRLYRMLRSQCDYRAFSLRVEHQESLHAHNAVAELSWRGEHHAA

SEQ ID NO: 14612 - protein, 216 aa, Shewanella algae
  misc_feature (1)..(216): tr|A0A1S2TVJ5|A0A1S2TVJ5_9GAMM GTP cyclohydrolase 1 OS= Shewanella algae OX=38313 GN=folE PE=3 SV=1
MALSEAALMVQTALLERGLETPMVPCGLSAEERKEKIEAHMKAILTLMSLDLSDDSLMDTPKRIAKMYVDEIFSGLDYANFPKITVIDNKMGFDEMVRVQDISLTSTCEHHLVTIDGTATVAYLPRKKIIGLSKINRIVRFFAQRPQVQERLTQQVLVALQTLLETKDVAVKMDAVHYCVKSRGVMDSTSSTTTTALGGVFKSNPATRAEFLHQAK

SEQ ID NO: 14613 - protein, 216 aa, Shewanella amazonensis
  misc_feature (1)..(216): sp|A1S2C7|GCH1_SHEAM GTP cyclohydrolase 1 OS=Shewanella amazonensis (strain ATCC BAA-1098 / SB2B) OX=326297 GN =folE PE=3 SV=1
MALSEAAQKVQAALLERGLETPMVPCGLSREERKDKIEQHMRAILGLMSLDLTDDSLADTPRRIAKMYVDEIFSGLDYENFPKITVIDNKMGVDEMVRVQDISLTSTCEHHLVTIDGTATVAYLPRKKIIGLSKINRIVRFFAQRPQVQERLTQQVLVALQALLETKDVAVKIDAVHYCVKSRGVMDATSSTTTTALGGIFKSNPATRAEFLHQPR

SEQ ID NO: 14614 - protein, 219 aa, Shewanella atlantica
  misc_feature (1)..(219): tr|A0A431W1G2|A0A431W1G2_9GAMM GTP cyclohydrolase 1 OS= Shewanella atlantica OX=271099 GN=folE PE=3 SV=1
MTSKEAVLSESALLVQSALLARGLETPMLPSELSADERKDQIEQHMRAILNLMSLDLTDDSLADTPRRIAKMYVDEIFSGLDYRNFPKITVIENKMGFDEMIKVNDISLTSTCEHHLVTIDGLARVAYLPRKNIIGLSKINRIVQFFAQRPQVQERLTQQVLVALQTLLETKDVAVKMDAVHYCVKSRGVMDSTSSTTTTALGGIFKSNPATRAEFLSN

SEQ ID NO: 14615 - protein, 216 aa, Shewanella baltica
  misc_feature (1)..(216): sp|A9KXZ9|GCH1_SHEB9 GTP cyclohydrolase 1 OS=Shewanella baltica (strain OS195) OX=399599 GN=folE PE=3 SV=1
MALSEAAVKVQAALLERGLETPMLPSVYSSEERKDKIEHHMKEILTLMSLDLSDDSLADTPRRIAKMYVDEIFSGLDYANFPKITVIDNKMGFDEMVRVQDISLTSTCEHHLVTIDGTATIAYLPRKKIIGLSKINRIVRFFAQRPQVQERLTQQVLVALQTLLETKDVAVKMDAVHYCVKSRGVMDSTSSTTTTALGGIFKSNPATRAEFLHQSK

SEQ ID NO: 14616 - protein, 216 aa, Shewanella baltica; identical to SEQ ID NO: 14615
  misc_feature (1)..(216): tr|A0A161USZ8|A0A161USZ8_9GAMM GTP cyclohydrolase 1 OS= Shewanella baltica OX=62322 GN=folE PE=3 SV=1

SEQ ID NO: 14617 - protein, 219 aa, Shewanella benthica
  misc_feature (1)..(219): tr|A9DBA9|A9DBA9_9GAMM GTP cyclohydrolase 1 OS=Shewanel la benthica KT99 OX=314608 GN=folE PE=3 SV=1
MTSKEAQLSESAVQVQTALLARGLETPMLPSEFSAEERKERIEHHMREILTLISLDLTDDSLVDTPRRVAKMYVDEIFSGLDYANFPKITVIENKMGFDEMVKVKDISLTSTCEHHLVTIDGLATVAYLPRKNIIGLSKINRIVRFFAQRPQVQERLTQQVLVALQTLLETKDVAVKMDAVHYCVKSRGIMDSTSSTTTTALGGIFKSNPATRAEFLSN

SEQ ID NO: 14618 - protein, 219 aa, Shewanella benthica
  misc_feature (1)..(219): tr|A0A330LVC5|A0A330LVC5_9GAMM GTP cyclohydrolase 1 OS= Shewanella benthica OX=43661 GN=folE PE=3 SV=1
MTSKEAQLSESAVQVQTALLARGLETPMLPSEFSAEERKERIEHHMREILTLMSLDLTDDSLVDTPRRVAKMYVDEIFSGLDYANFPKITVIENKMGFDEMVKVKDISLTSTCEHHLVTIDGLATVAYLPRKNIIGLSKINRIVRFFAQRPQVQERLTQQVLVALQTLLETKDVAVKMDAVHYCVKSRGIMDSTSSTTTTALGGIFKSNPATRAEFLSN

SEQ ID NO: 14619 - protein, 216 aa, Shewanella bicestrii
  misc_feature (1)..(216): tr|A0A220UHS5|A0A220UHS5_9GAMM GTP cyclohydrolase 1 OS= Shewanella bicestrii OX=2018305 GN=folE PE=3 SV=1
MALSEAAVKVQAALQERGLETPMLPNVFTPEERKDKIEFHMKEILTLMSLDLSDDSLADTPRRIAKMYVDEIFSGLDYENFPKITVIDNKMGFDEMVRVQDISLTSTCEHHLVTIDGTATIAYIPRKKIIGLSKINRIVRFFSQRPQVQERLTQQVLVALQTLLETKDVAVKMDAVHYCVKSRGVMDSTSSTTTTALGGIFKSNPATRAEFLNQSK

SEQ ID NO: 14620 - protein, 219 aa, Shewanella canadensis
  misc_feature (1)..(219): tr|A0A431WNL6|A0A431WNL6_9GAMM GTP cyclohydrolase 1 OS= Shewanella canadensis OX=271096 GN=folE PE=3 SV=1
MTSKDAVLSESAQLVQSALLTRGLETPMLPCELSADERKDQIEQHMRAILNLMSLDLTDDSLADTPRRIAKMYVDEIFSGLDYQNFPKITVIENKMGFDEMIKVNDISLTSTCEHHLVTIDGLATVAYLPRKNIIGLSKINRIVQFFAQRPQVQERLTQQVLVALQTLLETKDVAVKMDAVHYCVKSRGVMDSTSSTTTTALGGIFKSNPATRAEFLSN

SEQ ID NO: 14621 - protein, 216 aa, Shewanella chilikensis; identical to SEQ ID NO: 14612
  misc_feature (1)..(216): tr|A0A2V4W4N3|A0A2V4W4N3_9GAMM GTP cyclohydrolase 1 OS= Shewanella chilikensis OX=558541 GN=folE PE=3 SV=1

SEQ ID NO: 14622 - protein, 212 aa, Shewanella colwelliana
  misc_feature (1)..(212): tr|A0A1E5IU54|A0A1E5IU54_SHECO GTP cyclohydrolase 1 OS= Shewanella colwelliana OX=23 GN=folE PE=3 SV=1
MMHSSAEQVKQALIERGLETPLVASQLNSQQKYERIKGLMTEVVATLGLDLNDDSLQETPHRIAKMYVNEVFAGLDYNNFPAIAQIDNKMGVDEMVKVSDISLTSTCEHHFITIDGMAKVAYIPKEKIIGLSKINRIVRFFSQRPQVQERLTQQILVALQTLLNTQDVAVSIAATHYCVKSRGIMDSQSSTQTTALGGCFKTNSHTRAEFLG

SEQ ID NO: 14623 - protein, 214 aa, Shewanella colwelliana
  misc_feature (1)..(214): tr|A0A1E5ITI4|A0A1E5ITI4_SHECO GTP cyclohydrolase 1 OS= Shewanella colwelliana OX=23 GN=folE PE=3 SV=1
MALSEAAQQVQTALLARGLETPMLPCELSSEERKDKIEHHMREILTLMSLDLRDDSLVETPKRIAKMYVDEIFSGLDYANFPKITVIENKMGFDEMVKVKDISLTSTCEHHLVTIDGVATVAYLPRKNIIGLSKINRIVRFFAQRPQVQERLTQQVLVALQTLLETQDVAVKMDAVHYCVKSRGVMDSTSSTTTTALGGIFKSNPATRAEFLSN

SEQ ID NO: 14624 - protein, 216 aa, Shewanella decolorationis
  misc_feature (1)..(216): tr|A0A5B8R184|A0A5B8R184_9GAMM GTP cyclohydrolase 1 OS= Shewanella decolorationis OX=256839 GN=folE PE=3 SV=1
MALSEAAVKVQAALQERGLETPMLPSVFTPEERKDKIEHHMKEILTLMSLDLSDDSLADTPRRIAKMYVDEIFSGLDYENFPKITVIDNKMGFDEMVRVQDISLTSTCEHHLVTIDGTATIAYLPRKKIIGLSKINRIVRFFAQRPQVQERLTQQVLVALQTLLETKDVAVKMDAVHYCVKSRGVMDSTSSTTTTALGGIFKSNPATRAEFLNQSK

SEQ ID NO: 14625 - protein, 216 aa, Shewanella decolorationis; identical to SEQ ID NO: 14624
  misc_feature (1)..(216): tr|V1DI77|V1DI77_9GAMM GTP cyclohydrolase 1 OS=Shewanel la decolorationis S12 OX=1353536 GN=folE PE=3 SV=1

SEQ ID NO: 14626 - protein, 217 aa, Shewanella denitrificans
  misc_feature (1)..(217): sp|Q12SG0|GCH1_SHEDO GTP cyclohydrolase 1 OS=Shewanella denitrificans (strain OS217 / ATCC BAA-1090 / DSM 1501 3) OX=318161 GN=folE PE=3 SV=1
MALSDAAIKVQAALNERGLETPMLPKTSTPEERKIKIEHHMREILTLMSLDLTDDSLMDTPRRIAKMYVDEIFSGLDYDNFPKITVIDNKMGFDEMVRVQDISLTSTCEHHLVTIDGLATVAYLPRAKIIGLSKINRIVRFFAQRPQVQERLTQQILVALQTLLETKDVAVKIDAVHFCVKSRGVMDSTSSTTTTSLGGIFKSNPATRAEFLQQAKF

SEQ ID NO: 14627 - protein, 214 aa, Shewanella fodinae
  misc_feature (1)..(214): tr|A0A4R2FFF0|A0A4R2FFF0_9GAMM GTP cyclohydrolase 1 OS= Shewanella fodinae OX=552357 GN=folE PE=3 SV=1
MALSEAAKTVQAALLAKGLETPMVPCKLSNDERKLQIEGHIRDILQLMSLDLTDDSLADTPKRIAKMYVDEIFSGLDYQNFPKITVIDNKMGFDEMVRVQDISLTSTCEHHLVTIDGTATIAYLPRKKIIGLSKINRIVRFFSQRPQVQERLTQQVLVALQALLETKDVAVKIDAVHYCVKARGVMDSTSSTTTTALGGIFKSNPATRAEFLHP

SEQ ID NO: 14628 - protein, 222 aa, Shewanella frigidimarina
  misc_feature (1)..(222): tr|A0A106C0Y2|A0A106C0Y2_SHEFR GTP cyclohydrolase 1 OS= Shewanella frigidimarina OX=56812 GN=folE PE=3 SV=1
MTTINDITRAELSAEALKVQQALVAHGLETPLVPSDMTSEQKYQRIKGLMTEVVSTLGLDLTDDSLAETPHRIAKMYVNEIFSGLDYANFPKITQIDNKMGVEEMVKISNISVVSTCEHHFITIDGFAKVAYIPKDNIIGLSKINRIVRFFAQRPQVQERLTQQILVALQTLLATDDVAVSINATHYCVKSRGIMDTSSSTQTTALGGCFKANPASRAEFLT

SEQ ID NO: 14629 - protein, 216 aa, Shewanella frigidimarina
  misc_feature (1)..(216): tr|Q07WF5|Q07WF5_SHEFN GTP cyclohydrolase 1 OS=Shewanel la frigidimarina (strain NCIMB 400) OX=318167 GN=folE P E=3 SV=1
MALSEAAIKVQAALKDRGLETPMLPKTSTPEERKVKIEHHMREILTLMSLDLTDDSLVDTPRRIAKMYVDEIFSGLDYENFPKITVIENKMGVDEMVRVQDISLTSTCEHHLVTIDGFATVAYLPRTKIIGLSKINRIVRFFSQRPQVQERLTQQVLVALQTLLETKDVAVKMDAVHYCVKSRGVMDSTSSTTTTALGGIFKSNPATRAEFLHQVK

SEQ ID NO: 14630 - protein, 219 aa, Shewanella halifaxensis
  misc_feature (1)..(219): tr|B0TQK6|B0TQK6_SHEHH GTP cyclohydrolase 1 OS=Shewanel la halifaxensis (strain HAW-EB4) OX=458817 GN=folE PE=3 SV=1
MTSKNAILSESAQIVKSALIERGLETPMLPSELTAEERKDKIEQHMREILTLMSLDLSDDSLADTPRRVAKMYVDEIFSGLDYANFPKITVIENKMGFDEMVKVNGINLTSTCEHHLVTIDGLATVAYLPRKNIIGLSKINRIVRFFAQRPQVQERLTQQVLVALQALLGTKDVAVKMDAVHYCVKSRGVMDSTSSTTTTALGGIFKSNPATRAEFLSN

SEQ ID NO: 14631 - protein, 219 aa, Shewanella hanedai
  misc_feature (1)..(219): tr|A0A553JR49|A0A553JR49_SHEHA GTP cyclohydrolase 1 OS= Shewanella hanedai OX=25 GN=folE PE=3 SV=1
MTSKEAILSESALLVQKALLERGLETPMLPTEFSAEERKVKIEQHMREILTLMSLDLSDDSLTDTPRRIAKMYVDEIFSGLDYANFPKITVIENKMGFDEMVKVNGISLTSTCEHHLVTIDGLATVAYLPRKNIIGLSKINRIVRFFAQRPQVQERLTQQVLVALQTLLETQDVAVKMDAVHYCVKSRGVMDSTSSTTTTALGGVFKSNPSTRAEFLSN

SEQ ID NO: 14632 - protein, 216 aa, Shewanella livingstonensis
  misc_feature (1)..(216): tr|A0A3G8LQE9|A0A3G8LQE9_9GAMM GTP cyclohydrolase 1 OS= Shewanella livingstonensis OX=150120 GN=folE PE=3 SV=1
MALSEAAIKVQAALKDRGLETPMLPKTSTPEQRKVKIEHHMREILTLMSLDLSDDSLIDTPRRIAKMYVDEIFSGLDYENFPKITVIENKMGVDEMVRVQDISLTSTCEHHLVTIDGFATVAYLPRTKIIGLSKINRIVRFFSQRPQVQERLTQQVLVALQTLLETKDVAVKMDAVHYCVKSRGVMDSTSSTTTTALGGIFKSNPATRAEFLHLVK

SEQ ID NO: 14633 - protein, 222 aa, Shewanella livingstonensis
  misc_feature (1)..(222): tr|A0A3G8LQZ7|A0A3G8LQZ7_9GAMM GTP cyclohydrolase 1 OS= Shewanella livingstonensis OX=150120 GN=folE PE=3 SV=1
MTTINDITRAELSAEALKVQQALVAHGLETPLIPNDMTSEQKYQRIKGLMTEVVSTLGLDLTDDSLAETPHRIAKMYVNEIFSGLDYANFPKITQINNKMGVEEMIKISDISVVSTCEHHFITIDGLAKVAYIPKDNIIGLSKINRIVRFFAQRPQVQERLTQQILVALQTLLVTDDVAVSINATHYCVKSRGIMDTSSSTQTTALGGCFKANPATRAEFLA

SEQ ID NO: 14634 - protein, 214 aa, Shewanella loihica
  misc_feature (1)..(214): sp|A3QIQ4|GCH1_SHELP GTP cyclohydrolase 1 OS=Shewanella loihica (strain ATCC BAA-1088 / PV-4) OX=323850 GN=fol E PE=3 SV=1
MALSEAAKQVQTALLERGLETPMVPCGLSSEARKEKIEHHMREILTLMSLDLRDDSLVETPKRIAKMYVDEIFSGLDYENFPKITVIENKMGFDEMVKVNDISLTSTCEHHLVTIDGVATVAYLPRKNIIGLSKINRIVRFFAQRPQVQERLTQQVLVALQTLLETKDVAVKMDAVHYCVKSRGVMDSTSTTTTTALGGIFKSNPATRAEFLSN

SEQ ID NO: 14635 - protein, 215 aa, Shewanella mangrovi
  misc_feature (1)..(215): tr|A0A094LML4|A0A094LML4_9GAMM GTP cyclohydrolase 1 OS= Shewanella mangrovi OX=1515746 GN=folE PE=3 SV=1
MSLSEAAITVRSALEERGLETPMVPCTLSADERKVAIESHFSEIMKLMSLDLSDDSLADTPKRIAKMYVDEIFSGLDYANFPKITVIENKMGFDEMVRVQDISLTSTCEHHLVTIDGTATVAYLPRKKIIGLSKINRIVRFFAQRPQVQERLTQQVLVALQALLETKDVAVKMDAVHYCVKARGVMDSTSSTTTTALGGVFKSNPATRAEFLHQV

SEQ ID NO: 14636 - protein, 214 aa, Shewanella marisflavi
  misc_feature (1)..(214): tr|A0A4Y6J481|A0A4Y6J481_9GAMM GTP cyclohydrolase 1 OS= Shewanella marisflavi OX=260364 GN=folE PE=3 SV=1
MALSEAAQQVQTALLERGLETPMVPCGLSSEARKEKIEHHMREILTLMSLDLRDDSLIETPKRIAKMYVDEIFSGLDYANFPKITVIENKMGFDEMVKVNDISLTSTCEHHLVTIDGVATVAYLPRKNIIGLSKINRIVRFFAQRPQVQERLTQQVLVALQTLLETKDVAVKMDAVHYCVKSRGVMDSTSTTTTTALGGIFKSNPATRAEFLSN

SEQ ID NO: 14637 - protein, 216 aa, Shewanella morhuae
  misc_feature (1)..(216): tr|A0A1N6UJR6|A0A1N6UJR6_9GAMM GTP cyclohydrolase 1 OS= Shewanella morhuae OX=365591 GN=folE PE=3 SV=1
MSLSEAAVKVQAALSERGLETPMLPSVYSSEERKDKIEHHMKEILTLMSLDLSDDSLADTPRRIAKMYVDEIFSGLDYANFPKITVIDNKMGFDEMVRVQDISLTSTCEHHLVTIDGTATIAYLPRKKIIGLSKINRIVRFFAQRPQVQERLTQQVLVALQTLLETKDVAVKMDAVHYCVKSRGVMDSTSSTTTTALGGVFKSNPATRAEFLHQSK

SEQ ID NO: 14638 - protein, 216 aa, Shewanella oneidensis
  misc_feature (1)..(216): sp|Q8E9L6|GCH1_SHEON GTP cyclohydrolase 1 OS=Shewanella oneidensis (strain MR-1) OX=211586 GN=folE PE=3 SV=1
MPLSEAAVKVQAALQERGLETPMLPSVFTPEERKDKIEHHMKEILTLMSLDLSDDSLADTPRRIAKMYVDEIFSGLDYANFPKITVIDNKMGFDEMVRVQDISLTSTCEHHLVTIDGTATIAYLPRKKIIGLSKINRIVRFFAQRPQVQERLTQQVLVALQTLLETKDVAVKMDAVHYCVKSRGVMDSTSSTTTTALGGIFKSNPATRAEFLHQSK

SEQ ID NO: 14639 - protein, 216 aa, Shewanella oneidensis
  misc_feature (1)..(216): tr|A0A2W5DHL9|A0A2W5DHL9_SHEOE GTP cyclohydrolase 1 OS= Shewanella oneidensis OX=70863 GN=folE PE=3 SV=1
MSLSEAAVKVQAALQERGLETPMLPSVFTPEERKDKIEHHMKEILTLMSLDLSDDSLADTPRRIAKMYVDEIFSGLDYANFPKITVIDNKMGFDEMVRVQDISLTSTCEHHLVTIDGTATIAYLPRKKIIGLSKINRIVRFFAQRPQVQERLTQQVLVALQTLLETKDVAVKMDAVHYCVKSRGVMDSTSSTTTTALGGIFKSNPATRAEFLHQSK

SEQ ID NO: 14640 - protein, 219 aa, Shewanella pealeana
  misc_feature (1)..(219): tr|A8H9B5|A8H9B5_SHEPA GTP cyclohydrolase 1 OS=Shewanel la pealeana (strain ATCC 700345 / ANG-SQ1) OX=398579 GN =folE PE=3 SV=1
MTSKEAILSESAQIVQSALIERGLETPMLPSELSAEVRKDKIEHHMREILTLMSLDLSDDSLADTPRRIAKMYVDEIFSGLDYANFPKITVIENKMGFDEMVKVNDISLTSTCEHHLVTIDGLATVAYLPRKNIIGLSKINRIVRFFAQRPQVQERLTQQVLVALQALLGTKDVAVKMDAVHYCVKSRGVMDSTSSTTTTALGGIFKSNPATRAEFLSN

SEQ ID NO: 14641 - protein, 212 aa, Shewanella piezotolerans
  misc_feature (1)..(212): tr|B8CGZ6|B8CGZ6_SHEPW GTP cyclohydrolase 1 OS=Shewanel la piezotolerans (strain WP3 / JCM 13877) OX=225849 GN= folE PE=3 SV=1
MDVPQAQQVRDALIEQGLETPLIPSDMTAEQKYERIKGLMTEVVSTLGLDLSDDSLQETPHRIAKMYVNEIFSGLDYDNFPKIAQIENKMAVDEMVRITDISVVSTCEHHFVTIDGLARVAYIPNRTIIGLSKINRIVRFFAQRPQVQERLTKQILVALQTLLATDNVAVSIDATHYCVKSRGVMDTQSQTQTTALGGEFKTSAATRAEFFR

SEQ ID NO: 14642 - protein, 219 aa, Shewanella piezotolerans
  misc_feature (1)..(219): tr|B8CM24|B8CM24_SHEPW GTP cyclohydrolase 1 OS=Shewanel la piezotolerans (strain WP3 / JCM 13877) OX=225849 GN= folE PE=3 SV=1
MTSKEAILSESAQLVQTALLERGLETPMLPSEFTREERKDKIEHHMREILTLMSLDLRDDSLEETPRRIAKMYVDEIFSGLDYANFPKITVIENKMGFDEMVKVNDISLTSTCEHHLVTIDGLARVAYLPRKNIIGLSKINRIVRFFAQRPQVQERLTQQVLVALQTLLETKDVAVKMDAVHYCVKSRGVMDSTSSTTTTALGGIFKSNPATRAEFLSN

SEQ ID NO: 14643 - protein, 219 aa, Shewanella psychrophila
  misc_feature (1)..(219): tr|A0A1S6HSG1|A0A1S6HSG1_9GAMM GTP cyclohydrolase 1 OS= Shewanella psychrophila OX=225848 GN=folE PE=3 SV=1
MTSKEAQLSESALQVQTALLARGLETPMLPSEFSAEERKERIEHHMREILTLMSLDLTDDSLVDTPRRIAKMYVDEIFSGLDYANFPKITVIENKMGFDEMVKVKDISLTSTCEHHLVTIDGFATVAYLPRKNIIGLSKINRIVRFFAQRPQVQERLTQQVLVALQTLLETKDVAVKMDAVHYCVKSRGIMDSTSSTTTTALGGIFKSNPATRAEFLSN

SEQ ID NO: 14644 - protein, 214 aa, Shewanella putrefaciens
  misc_feature (1)..(214): sp|A4Y2K7|GCH1_SHEPC GTP cyclohydrolase 1 OS=Shewanella putrefaciens (strain CN-32 / ATCC BAA-453) OX=319224 G N=folE PE=3 SV=1
MALSEAAVKVQAALLERGLETPMLPSVYSSEERKDKIEHHMKEILTLMSLDLSDDSLADTPRRIAKMYVDEIFSGLDYENFPKITVIDNKMGFDEMVRVQDISLTSTCEHHLVTIDGTATIAYLPRKKIIGLSKINRIVRFFAQRPQVQERLTQQVLVALQTLLETKDVAVKMDAVHYCVKSRGVMDSTSSTTTTALGGIFKSNPATRAEFLHQ

SEQ ID NO: 14645 - protein, 216 aa, Shewanella putrefaciens; identical to SEQ ID NO: 14619
  misc_feature (1)..(216): tr|A0A252EW16|A0A252EW16_SHEPU GTP cyclohydrolase 1 OS= Shewanella putrefaciens OX=24 GN=folE PE=3 SV=1

SEQ ID NO: 14646 - protein, 219 aa, Shewanella sediminis
  misc_feature (1)..(219): tr|A8FQ70|A8FQ70_SHESH GTP cyclohydrolase 1 OS=Shewanel la sediminis (strain HAW-EB3) OX=425104 GN=folE PE=3 SV =1
MTSKDAVLSESAQLVQSALLTRGLETPMLPSELSADERKDQIEQHMRAILNLMSLDLTDDSLADTPRRIAKMYVDEIFSGLDYQNFPKITVIENKMGFDEMIKVNDISLTSTCEHHLVTIDGLATVAYLPRKNIIGLSKINRIVQFFAQRPQVQERLTQQVLVALQTLLETKDVAVKMDAVHYCVKSRGVMDSTSSTTTTALGGIFKSNPATRAEFLSN

SEQ ID NO: 14647 - protein, 216 aa, Shewanella sp.; identical to SEQ ID NO: 14619
  misc_feature (1)..(216): sp|Q0HE51|GCH1_SHESM GTP cyclohydrolase 1 OS=Shewanella sp. (strain MR-4) OX=60480 GN=folE PE=3 SV=1

SEQ ID NO: 14648 - protein, 216 aa, Shewanella sp.
  misc_feature (1)..(216): tr|A0A2M7LPQ8|A0A2M7LPQ8_9GAMM GTP cyclohydrolase 1 OS= Shewanella sp. CG_4_10_14_3_um_filter_42_91 OX=1975535 GN=folE PE=3 SV=1
MALSEAAIKVQAALKDRGLETPMLPKTSTPEQRKVKIEHHMREILTLMSLDLTDDSLADTPRRIAKMYVDEIFSGLDYENFPKITVIENKMGVDEMVRVQDISLTSTCEHHLVTIDGFATVAYLPRSKIIGLSKINRIVRFFAQRPQVQERLTQQVLVALQTLLETKDVAVKMDAVHYCVKSRGVMDSTSSTTTTALGGIFKSNPATRAEFLHQVK

SEQ ID NO: 14649 - protein, 219 aa, Shewanella violacea
  misc_feature (1)..(219): tr|D4ZDX4|D4ZDX4_SHEVD GTP cyclohydrolase 1 OS=Shewanel la violacea (strain JCM 10179 / CIP 106290 / LMG 19151 / DSS12) OX=637905 GN=folE PE=3 SV=1
MTSKEAQLSESAIQVQTALLARGLETPMLPSKFSAEERKERIEHHMREILTLMSLDLTDDSLIDTPRRIAKMYVDEIFSGLDYANFPKITVIENKMGFDEMVKVKDISLTSTCEHHLVTIDGFATVAYLPRKNIIGLSKINRIVRFFAQRPQVQERLTQQVLVALQTLLETKDVAVKMDAVHYCVKSRGIMDSTSSTTTTALGGIFKSNPATRAEFLSN

SEQ ID NO: 14650 - protein, 219 aa, Shewanella woodyi
  misc_feature (1)..(219): tr|B1KL10|B1KL10_SHEWM GTP cyclohydrolase 1 OS=Shewanel la woodyi (strain ATCC 51908 / MS32) OX=392500 GN=folE PE=3 SV=1
MTSKEAILSESAQLVQAALLERGLETPMLPSEFSAEDRKVKIEQHMREILTLMSLDLTDDSLADTPKRIAKMYVDEIFSGLDYANFPKITVIENKMGFDEMVKVNDISLTSTCEHHLVTIDGLARVAYLPRKNIIGLSKINRIVRFFAQRPQVQERLTQQVLVALQTLLETKDVAVKMDAVHYCVKSRGVMDSTSSTTTTALGGIFKSNPATRAEFLSN

SEQ ID NO: 14651 - protein, 216 aa, Shewanella xiamenensis; identical to SEQ ID NO: 14638
  misc_feature (1)..(216): tr|A0A1E3UWF0|A0A1E3UWF0_9GAMM GTP cyclohydrolase 1 OS= Shewanella xiamenensis OX=332186 GN=folE PE=3 SV=1

SEQ ID NO: 14652 - protein, 216 aa, Shewanella xiamenensis; identical to SEQ ID NO: 14639
  misc_feature (1)..(216): tr|A0A073KKC1|A0A073KKC1_9GAMM GTP cyclohydrolase 1 OS= Shewanella xiamenensis OX=332186 GN=folE PE=3 SV=1

SEQ ID NO: 14653 - protein, 222 aa, Shigella boydii; identical to SEQ ID NO: 7955
  misc_feature (1)..(222): sp|Q31YW1|GCH1_SHIBS GTP cyclohydrolase 1 OS=Shigella b oydii serotype 4 (strain Sb227) OX=300268 GN=folE PE=3 SV=1

SEQ ID NO: 14654 - protein, 222 aa, Shigella boydii; identical to SEQ ID NO: 7955
  misc_feature (1)..(222): tr|A0A1Q8MQY8|A0A1Q8MQY8_SHIBO GTP cyclohydrolase 1 OS= Shigella boydii OX=621 GN=folE PE=3 SV=1

SEQ ID NO: 14655 - protein, 222 aa, Shigella dysenteriae; identical to SEQ ID NO: 7955
  misc_feature (1)..(222): sp|Q32EN8|GCH1_SHIDS GTP cyclohydrolase 1 OS=Shigella d ysenteriae serotype 1 (strain Sd197) OX=300267 GN=folE PE=3 SV=1

SEQ ID NO: 14656 - protein, 222 aa, Shigella dysenteriae; identical to SEQ ID NO: 7955
  misc_feature (1)..(222): tr|A0A2S8DHJ9|A0A2S8DHJ9_SHIDY GTP cyclohydrolase 1 OS= Shigella dysenteriae OX=622 GN=folE PE=3 SV=1

SEQ ID NO: 14657 - protein, 222 aa, Shigella flexneri; identical to SEQ ID NO: 7955
  misc_feature (1)..(222): sp|Q0T2X1|GCH1_SHIF8 GTP cyclohydrolase 1 OS=Shigella f lexneri serotype 5b (strain 8401) OX=373384 GN=folE PE= 3 SV=1

SEQ ID NO: 14658 - protein, 222 aa, Shigella flexneri; identical to SEQ ID NO: 7955
  misc_feature (1)..(222): tr|A0A2A2XM76|A0A2A2XM76_SHIFL GTP cyclohydrolase 1 OS= Shigella flexneri OX=623 GN=folE PE=3 SV=1

SEQ ID NO: 14659 - protein, 222 aa, Shigella sonnei; identical to SEQ ID NO: 7955
  misc_feature (1)..(222): sp|Q3Z053|GCH1_SHISS GTP cyclohydrolase 1 OS=Shigella s onnei (strain Ss046) OX=300269 GN=folE PE=3 SV=1

SEQ ID NO: 14660 - protein, 222 aa, Shigella sonnei; identical to SEQ ID NO: 7955
  misc_feature (1)..(222): tr|A0A0H7L3Y5|A0A0H7L3Y5_SHISO GTP cyclohydrolase 1 OS= Shigella sonnei OX=624 GN=folE PE=3 SV=1

SEQ ID NO: 14661 - protein, 219 aa, Shigella sp.
  misc_feature (1)..(219): tr|A0A1D3DJY2|A0A1D3DJY2_9ENTR GTP cyclohydrolase 1 OS= Shigella sp. FC1655 OX=1898038 GN=folE PE=3 SV=1
MSSLSKEAQWVHAALVERGLETPLREPKLSPSESKQQIEHHMTEVMKLLNLDLSDDSLAETPRRIAKMYVDEIFSGLDYHNFPKITLIENKMQVDEMVTVRDITLTSTCEHHFVTIDGKATVAYIPKDKVIGLSKINRIVQFFAQRPQVQERLTQQILIALQTLLGTKNVAVSIDAVHYCVKARGIRDATSATTTTSLGGLFKSSQNTRQEFLRAVRHL

SEQ ID NO: 14662 - protein, 222 aa, Shigella sp.
  misc_feature (1)..(222): tr|A0A1E3MZC7|A0A1E3MZC7_9ENTR GTP cyclohydrolase 1 OS= Shigella sp. FC569 OX=1892897 GN=folE PE=3 SV=1
MPSLSKEAALVHEALVARGLETPLRPPVHEMDNETRKSLIAGHMTEIMQLLNLDLADDSLMETPHRIAKMYVDEIFSGLDYANFPKITLIENKMKVDEMVTVCDITLTSTCEHHFVTIDGKATVAYIPKDSVIGLSKINRIVQFFAQRPQVQERLTQQILIALQTLLGTNNVAVSIDAVHYCVKARGIRDATSATTTTSLGGLFKSSQNTRHEFLRAVRHHN

SEQ ID NO: 14663 - protein, 366 aa, Shimia abyssi
  misc_feature (1)..(366): tr|A0A2P8FB16|A0A2P8FB16_9RHOB GTP cyclohydrolase FolE2 OS=Shimia abyssi OX=1662395 GN=folE2 PE=3 SV=1
MNMQTPKGSDNMSFDEARDALERLRTWATSASVTEIAELDPAIARLLPERPMTNYPDLLRNYPEDFVADEAYRATLPDLQNGPSSLIKGEKQQIQHVGISNFRLPIRFRTRDNGDITLETSVTGTVSLEADKKGINMSRIMRSFYKHAEKTFSFEVMEAALADYITDLESFDARLQMRFSYPMKIESLRSGLSGFQYYDIALEKVQRGEKLHKIMHLDYVYSSTCPCSLELSEHARISRGQLATPHSQRSVARISVETLGEDCLWFEDLIELARTAVPSETQVMVKREDEQAFAELNAANPIFVEDAARLFCEQLKNDPRIGDFRVIASHQESLHSHDAVSVLTDGTLFATDSIDPKLFKTLFHVG

SEQ ID NO: 14664 - protein, 389 aa, Shimia aestuarii
  misc_feature (1)..(389): tr|A0A1I4J364|A0A1I4J364_9RHOB GTP cyclohydrolase FolE2 OS=Shimia aestuarii OX=254406 GN=folE2 PE=3 SV=1
MVILPGFAYISLATGRETKGTPPMNMQTPKGSDSLSRDDAREALERLRAWAAQATVTEIAELDPAVARLLPDQPLSNYPDLSRDYPEDFEVDAAYRASLPDLQNGPSSLIKGEKQQIQHVGISNFRLPIRFHTRDNGDITLETSVTGTVSLEADKKGINMSRIMRSFYKHAEKTFSFEVMEAALADYITDLESFDARLQMRFSYPMKIDSLRSGLQGYQYYDIALEKVQMNGELHKVMHLDYVYSSTCPCSLELSEHARMARGQLATPHSQRSVARISVEIIGDDCLWFEDLIDLARAAVPTETQVMVKREDEQAFAELNAANPIFVEDAARLFCEQLKNDPRIGDFRVIASHQESLHSHDAVSVLTEGPFFAGQSLDPKLFTTLFHVG

SEQ ID NO: 14665 - protein, 365 aa, Shimia haliotis
  misc_feature (1)..(365): tr|A0A1I4CQ77|A0A1I4CQ77_9RHOB GTP cyclohydrolase FolE2 OS=Shimia haliotis OX=1280847 GN=folE2 PE=3 SV=1
MNMQTPKSNDEISRKEAEAALETLRAWAKVASVTEIAELDPSVARLLPDQLKANYPALSRHYDENFEVTPEYRKSLPDLQNGPSSLIKGEKQQIQHVGISNFRLPIRFHTRDNGDISLQTSVTGTVSLEADKKGINMSRIMRSFYKHAEKTFSFEVMEAALADYITDLESFDARLQMRFSYPMKINSLRSGLQGYQYYDFALEKVQQDGQLHKVMHLDYVYSSTCPCSLELSEHARSERGQLATPHSQRSVARISVNVTDGMLWFEDLIDLARAAVPTETQVMVKREDEQAFAELNAANPIFVEDAARLFCEQLKADPRIGDFRVIASHQESLHSHDAVSILTDGPFFEAQSLDPKLFSTLFHVG

SEQ ID NO: 14666 - protein, 365 aa, Shimia isoporae
  misc_feature (1)..(365): tr|A0A4R1NTM0|A0A4R1NTM0_9RHOB GTP cyclohydrolase FolE2 OS=Shimia isoporae OX=647720 GN=folE2 PE=3 SV=1
MNMQTPKANDEITREEAETALEKLRAWAQSASVTEIAELDPSVARLLPDQPKANYPDLARNYDADFEVTPEYRKSLPDLQNGPSSLIKGEKQQIQHVGISNFRLPIRFHTRDNGDITLQTSVTGTVSLEADKKGINMSRIMRSFYKHAEKTFSFEVMEAALADYITDLETFDARLQMRFSYPMKINSLRSGLEGYQYYDFALEKVQQDGELHKVMHLDYVYSSTCPCSLELSEHARSERGQLATPHSQRSVARISVKVTDGMLWFEDLIDLARAAVPTETQVMVKREDEQAFAELNAANPIFVEDAARLFCEQLKADPRIGDFRVIASHQESLHSHDAVSVLTDGPFFEAQSLDPKLFSSLFHVG

SEQ ID NO: 14667 - protein, 366 aa, Shimia marina
  misc_feature (1)..(366): tr|A0A0P1EQP6|A0A0P1EQP6_9RHOB GTP cyclohydrolase FolE2 OS=Shimia marina OX=321267 GN=folE2 PE=3 SV=1
MNIQTSASNGNVTRDDAEEALAQLRAWAKTASVTEIAELDPAISRLLPDQPLANYPSLSRDYPTDFEATPEYRATLPDLQNGPSSLIKGEKQQIQHVGISNFRLPIRFHTRDNGDITLETSVTGTVSLEADKKGINMSRIMRSFYKHAEKTFSFSVMEAALADYITDLESFDARLQMRFSYPMKIQSLRSGLEGYQYYDIALEKVQQGGVMHKIMHLDYVYSSTCPCSLELSEHARMARGQLATPHSQRSVARISVQVVDRPKLWFEDLIDLARAAVPTETQVMVKREDEQAFAELNAANPIFVEDAARLFCEQLKADDRIGDFRVIASHQESLHSHDAVSVLTDGTLFASDSLDPKLFTTLFHVG

SEQ ID NO: 14668 - protein, 365 aa, Shimia sp.
  misc_feature (1)..(365): tr|A0A0M9EI25|A0A0M9EI25_9RHOB GTP cyclohydrolase FolE2 OS=Shimia sp. SK013 OX=1389006 GN=folE2 PE=3 SV=1
MNLQTPKAHDEITRDDAAAALEKLRAWAADASVTEIAELDPAIARLLPDQPKANYPALSRTYDPEFAVSPEYRATLPDLQNGPSSLIKGEKQQIQHVGISNFRLPIRFHTRDNGDIALQTSVTGTVSLEADKKGINMSRIMRSFYKHAEKTFSFEVMEAALADYITDLESFDARLQMRFSYPMKITSLRSGLEGYQYYEIALEKVQLDGVLHKVMHLDYVYSSTCPCSLELSEHARSERGQLATPHSQRSVARISVQVTEGMLWFEDLIDLARAAVPTETQVMVKREDEQAFAELNAANPIFVEDAARLFCEQLKADPRIGDFRVIASHQESLHSHDAVSVLTDGPFFEAQSLDPKLFTTLFHVG

SEQ ID NO: 14669 - protein, 222 aa, Shimwellia blattae
  misc_feature (1)..(222): tr|I2B7F5|I2B7F5_SHIBC GTP cyclohydrolase 1 OS=Shimwell ia blattae (strain ATCC 29907 / DSM 4481 / JCM 1650 / N BRC 105725 / CDC 9005-74) OX=630626 GN=folE PE=3 SV=1
MPSLSKEAALVHEALVARGLETPLRPPVNELDNETRKRLISGHMTEIMQLLNLDLSDDSLMETPHRIAKMYVDEIFSGLDYANFPKITLIENKMKVDEMVTVRDITLTSTCEHHFVTIDGKATVAYIPKDAVIGLSKINRIVQFFAQRPQVQERLTQQVLVALQTLLGTSNVAVSIDAVHYCVKARGIRDATSATTTTSLGGLFKSSQNTRQEFLRAVRHHN

SEQ ID NO: 14670 - protein, 203 aa, Shinella granuli
  misc_feature (1)..(203): tr|A0A4R2CQH0|A0A4R2CQH0_9RHIZ GTP cyclohydrolase 1 OS= Shinella granuli OX=323621 GN=folE PE=3 SV=1
MDAIVTNFPRVDDQSGRPSQKEAEDAVRVLLRWAGDDPEREGLLDTPARVAKSYRELFSGYDLAAEDVLGRTFEEVAGYDDMVLVKDIPFFSHCEHHMVPIIGKAHVAYLPNGRVLGLSKIARVVEIYGRRLQTQETMTAQIAKSIDETLNPRGVAVMIEAEHMCMAMRGIQKQGSTTLTTTFTGAFKTEPAEQVRFMTMIRS

SEQ ID NO: 14671 - protein, 203 aa, Shinella sp.
  misc_feature (1)..(203): tr|A0A4Y8QF00|A0A4Y8QF00_9RHIZ GTP cyclohydrolase 1 OS= Shinella sp. MEC087 OX=1967501 GN=folE PE=3 SV=1
MDAIVTNFPRPEDQTDRPSQKEAEDAVRVLLRWAGDDPEREGLLDTPKRVAKAYRELFSGYDLAAEDVLGRTFEEVAGYDDMVLVRDIPFFSHCEHHMVPIIGKAHVAYLPNGRVLGLSKIARVVEIYGRRLQTQETMTAQIAKSIDETLNPRGVAVMIEAEHMCMAMRGIQKQGSTTLTTTFTGAFKTEPTEQVRFMTMIRS

SEQ ID NO: 14672 - protein, 203 aa, Shinella sp.
  misc_feature (1)..(203): tr|A0A021X8P5|A0A021X8P5_9RHIZ GTP cyclohydrolase 1 OS= Shinella sp. DD12 OX=1410620 GN=folE PE=3 SV=1
MDAIVTNFPRVDDPSGRPSQKEAEDAVRVLLRWAGDDPEREGLLDTPKRVAKAYRELFSGYDLAAEDVLGRTFEEVAGYDDMVLVKDIPFFSHCEHHMVPIIGKAHVAYLPNGRVLGLSKIARVVEIYGRRLQTQETMTAQIARSIDETLNPRGVAVMIEAEHMCMAMRGIQKQGSTTLTTTFTGAFKTEPTEQVRFMTMIRS

SEQ ID NO: 14673 - protein, 231 aa, Siansivirga zeaxanthinifaciens
  misc_feature (1)..(231): tr|A0A0C5WM24|A0A0C5WM24_9FLAO GTP cyclohydrolase 1 OS= Siansivirga zeaxanthinifaciens CC-SAMT-1 OX=1454006 GN= folE PE=3 SV=1
MNLETLDAKKKNKNKLNGISHETIGDDHLYTGLETPMRKDAFKLTDKEKKEKISLLFEEIMHVMGLDLTDDSLKGTPDRVAKMYIDEIFSGLNPANKPQVALFENKYQYNQMLVEKDITFYSNCEHHFVPIIGKAHVAYISSGKVIGLSKLNRIVQYYAKRPQVQERLTNQIAEALKDILETEDVAVIIDAKHLCVSSRGIKDDTSSTVTVYYGGKFNTTEKITELQNYLK

SEQ ID NO: 14674 - protein, 195 aa, Siansivirga zeaxanthinifaciens
  misc_feature (1)..(195): tr|A0A0C5WMA7|A0A0C5WMA7_9FLAO GTP cyclohydrolase 1 OS= Siansivirga zeaxanthinifaciens CC-SAMT-1 OX=1454006 GN= folE PE=3 SV=1
MPYKKFEEYNIQVTDDVKDRYKNIIEDLGENTSREGLLKTPERAAKAMQFLTQGYHQDPVEILKGAMFKESYNEMVIVKDIELYSLCEHHILPFFGKAHIAYIPNGYIVGLSKLPRIVDVFARRLQVQERLTEQILDCINDTLKPQGVAVVIEASHMCMMMRGVQKQNSLTTTSGFRGQFEKIETRNEFLKLIGK

SEQ ID NO: 14675 - protein, 219 aa, Siccationidurans arizonensis
  misc_feature (1)..(219): tr|A0A1I6B0H0|A0A1I6B0H0_9BACT GTP cyclohydrolase 1 OS= Siccationidurans arizonensis OX=1227077 GN=folE PE=3 SV =1
MDNPSGLAPATDAHLPTGLRTPLRDDAFDQADEAKIAAISGHFEAIMRELGLDLTDDSLAGTPRRVAKMYVQEWFKGLDPRNRPEVRMFDNRYNYHQLLVERDITLFSCCEHHFVPIIGKAHVAYLPGANVVGLSKLNRVVQYYARRPQVQERLTRQIAEELKQSLGTDDVAVLIEADHLCVMSRGVNDTSSSTLTSEYGGRFATDEALRGEFLRQIGK

SEQ ID NO: 14676 - protein, 223 aa, Siccibacter turicensis
  misc_feature (1)..(223): tr|A0A2P8VJG9|A0A2P8VJG9_9ENTR GTP cyclohydrolase 1 OS= Siccibacter turicensis OX=357233 GN=folE PE=3 SV=1
MPSLSKEAALVHEALVARGLETPLRPPVQELDNETRRSLIAGHMTEIMQLLNLDLSDDSLAETPHRIAKMYVNEIFSGLDYANFPKITIIENKMKVDEMVTVRDITFTSTCEHHFVTIDGKATVAYIPKDGVIGLSKINRIVQFFAQRPQVQERLTQQVLIALQTLLGTNNVAVSMDAVHYCVKARGVRDATSATTTTSLGGLFKSSQNTRQEFLRAVRHHTN

SEQ ID NO: 14677 - protein, 209 aa, Siculibacillus lacustris
  misc_feature (1)..(209): tr|A0A4V2KSJ7|A0A4V2KSJ7_9RHIZ GTP cyclohydrolase 1 OS= Siculibacillus lacustris OX=1549641 GN=folE PE=3 SV=1
MDAVVDARREKGAASFAPVPRPSREEAEAAVRTLLRWSGDDPEREGLIDTPKRVVKAYEELYRGYRESPADVLDRVFEEVEGYGSIVLVRDIPFFSHCEHHMVPFVGRAHIAYYPSKGVIGLSKLARLVDVYARRLQTQESLTAQIVTALEDHLKPRGIAVMIEAEHMCMSMRGVQKSGVSTLTTDFTGVFRDDAAEQAKFMMMVKGLR

SEQ ID NO: 14678 - protein, 265 aa, Sideroxydans lithotrophicus
  misc_feature (1)..(265): tr|D5CNN3|D5CNN3_SIDLE GTP cyclohydrolase FolE2 OS=Side roxydans lithotrophicus (strain ES-1) OX=580332 GN=folE 2 PE=3 SV=1
MNSIETIADVQNSADTRQLAINKVGIKSIRHPVVVKDKSEGVQHTIATFNMYVHLPHNFKGTHMSRFVQILNQHGREISVESFEGILREMTEKLEAKSGYIEMSFPYFVNKTAPISEVQSLLDYDVTFIGEIVDGNYRFNMKVQIPVTSLCPCSKEISERGAHNQRSHVTITVRTRRSVWIEEVVRFAEEQASSELYGLLKRPDEKFVTERAYDNPKFVEDMVRDVAAVLNADERIEAYIVESENFESIHNHSAYALIERDKTKD

SEQ ID NO: 14679 - protein, 232 aa, Sideroxydans sp.
  misc_feature (1)..(232): tr|A0A1G3IQV3|A0A1G3IQV3_9PROT GTP cyclohydrolase I (Fr agment) OS=Sideroxydans sp. RIFOXYB12_FULL_59_6 OX=1802 155 GN=A3J87_03410 PE=3 SV=1
VVSDKSEGVQHTIATFNMYVRLPHNFKGTHMSRFVQILNDHGREISVESFESILREMVEKLEAKSGYIEMAFPYFVNKTAPISGVQSLLDYDVTFIGEVVDGKYRFTMKVLVPVTSLCPCSKEISERGAHNQRSHVTLTVRTKGSVWIEDVVRIAEEQASSELYGLLKRPDEKFVTERAYDNPKFVEDMVRDVAAALNADERIEAYIVESENFESIHNHSAYALIERDKTQG

SEQ ID NO: 14680 - protein, 265 aa, Sideroxydans sp.; identical to SEQ ID NO: 8440
  misc_feature (1)..(265): tr|A0A1G3IKI2|A0A1G3IKI2_9PROT GTP cyclohydrolase FolE2 OS=Sideroxydans sp. GWF2_59_14 OX=1802154 GN=folE2 PE= 3 SV=1

SEQ ID NO: 14681 - protein, 367 aa, Silicibacter sp.
  misc_feature (1)..(367): tr|C9CWD7|C9CWD7_9RHOB GTP cyclohydrolase FolE2 OS=Sili cibacter sp. TrichCH4B OX=644076 GN=folE2 PE=3 SV=1
MNIHSRDVNDTPDRSDAEEALAVLRRWADEASETEVAQLDPAIARLLPGREVQNYPDLKRQYPEEFDASETYRATLPDLQNGPSSLIRGAKEQIQHVGISNFRLPIRFHTRDNGDLTLETSVTGTVSLDAEKKGINMSRIMRSFYKHAEKVFSFDVMEAALEDYLSDLESGDARLQMRFSFPVKVESLRSGLSGYQYYDVALELVQMGGQRHRIVHLDYVYSSTCPCSLELSEHARQARGQLATPHSQRSVARISVQMEQDSGCLWFEDLIDHCRRAVPTETQVMVKREDEQAFAELNAANPIFVEDAARLFCEALQSDARVGDFRVVASHQESLHSHDAVSVLTQGVMFAAPSLDPQLFSTLIHRG

SEQ ID NO: 14682 - protein, 261 aa, Silvanigrella aquatica
  misc_feature (1)..(261): tr|A0A1L4CZA1|A0A1L4CZA1_9PROT GTP cyclohydrolase FolE2 OS=Silvanigrella aquatica OX=1915309 GN=folE2 PE=3 SV= 1
MQDTQNIRDQRMVKISKVGIKEVSHPLFFYDRDEKESAALPSTGVFSFFVELPAEKKGTHMSRFPSILYEFAPYFNLKKFEHMAHEINEKLQSDTAFIETKFTYFYEKFAPVSKTRGLTDIKVALKIKAKKNSKNTETQLTLQIPVTSLCPCSKAISENGAHSQRSHMTLSLWNPKLSIKECIEVAEKAASCAIYPVLKRVDEKFVTEKAYNTPRFVEDLVREAAIQLKEKNCALRFEVSAENFESIHNHNAWAMVKSDDL

SEQ ID NO: 14683 - protein, 198 aa, Silvanigrella aquatica
  misc_feature (1)..(198): tr|A0A1L4D139|A0A1L4D139_9PROT GTP cyclohydrolase 1 OS= Silvanigrella aquatica OX=1915309 GN=folE PE=3 SV=1
MSSNFKKAVSANNVSAEAATEAVKTLLRYIGENPKRDGLLDTPDRFCRSLIEMTEGYALNPEEILATTFESDSDEMVLLKDIEFNSLCEHHLLSFAGKAHIAYLPSGGRIVGLSKLARIVDVYAQRLQVQERLTQQIANAINKYLKPDGVAVVVEGIHSCMCVRGVRKQNSTMITSSMLGQFRESMASRNEFMSLITK

SEQ ID NO: 14684 - protein, 259 aa, Silvanigrellales bacterium
  misc_feature (1)..(259): tr|A0A4V0P2A5|A0A4V0P2A5_9PROT GTP cyclohydrolase FolE2 OS=Silvanigrellales bacterium RF1110005 OX=2493639 GN= folE2 PE=3 SV=1
MQDTQNFLDNRKIKIAKVGIKDVKYPIYYQDINNISQIPSVADFSFYVELPADKKGTHMSRFPTLLYEFAPFFSLQKFEEMSVKMLEILECNKTFLNADFIYFYEKEAPVSKIKGMTDIAVSIEIAVTRNETALTKISLRIPIKSLCPCSKAISEFGAHSQRSHMTITLWNPQISVLDCIEIADNSASSAIYPVLKRADEKYVTEKAYNNPRFVEDLVREAAVLLKKKSPNLRFEVSAENFESIHNHNAYAIVRSDDIF

SEQ ID NO: 14685 - protein, 199 aa, Silvanigrellales bacterium
  misc_feature (1)..(199): tr|A0A4P2VV16|A0A4P2VV16_9PROT GTP cyclohydrolase 1 OS= Silvanigrellales bacterium RF1110005 OX=2493639 GN=folE PE=3 SV=1
MSPFFKKAVSSNNVTAQEATEAVRTLLRYIGENPNREGLIETPDRYCRALLELTEGYSAKPEEILSTTFESQSDEMVLLKDIEFSSTCEHHLLSFSGKAHVAYIPSEGRIVGLSKLARIVDTFSQRLQVQERLTQQVAEAIQTHLKPQGVAVVFEGMHSCMCVRGVRKQSAKMVTSTMLGLFRESPASRNEFMSFITRN

SEQ ID NO: 14686 - protein, 211 aa, Simiduia agarivorans
  misc_feature (1)..(211): tr|K4L147|K4L147_SIMAS GTP cyclohydrolase 1 OS=Simiduia agarivorans (strain DSM 21679 / JCM 13881 / BCRC 17597 / SA1) OX=1117647 GN=folE PE=3 SV=2
MSPIAEQVRQALITRGLETPMVGNSLPPSQKREAIAGHVRGILTTLGLDLADDSLCETPERMAKLYVDELFAGLDYGQFPKISQIENKMGVSEMVRVQDISVISTCEHHLITIDGRAKVAYIPGDKVLGLSKINRIVRFFAQRPQVQERLTQQILVALQTILGTEDVAVHMAATHYCVKARGVRDAESFTETQALAGAFKRDPGLRAEFLR

SEQ ID NO: 14687 - protein, 179 aa, Simiduia agarivorans
  misc_feature (1)..(179): tr|K4KUB5|K4KUB5_SIMAS GTP cyclohydrolase 1 OS=Simiduia agarivorans (strain DSM 21679 / JCM 13881 / BCRC 17597 / SA1) OX=1117647 GN=folE PE=3 SV=1
MKEQFAQIISAIGEDLNRPGLQDTPARAAKAFEFLTRGYHQDLDEVINGALFPSDSSEMIIVKDIELYSMCEHHLLPFIGKAHVAYIPTGKVLGLSKVARIVDMFARRLQIQEQLTVQIAETIKSVTGAEGVGVIVEAKHMCMMMRGVEKQNSAMKTSAMLGSFRDEHATRAEFLSLIR

SEQ ID NO: 14688 - protein, 256 aa, Simonsiella muelleri
  misc_feature (1)..(256): tr|V9H8C5|V9H8C5_9NEIS GTP cyclohydrolase FolE2 OS=Simo nsiella muelleri ATCC 29453 OX=641147 GN=folE2 PE=3 SV= 1
MNIPDIQSTRDLRNLPINQVGIKDLRFPISVQSQSGIQNTIARMTMTVFLPAHQKGTHMSRFVALMEEQTATLNYTQLQHLTHEMLTRLQSDSGKISISFPFFRQKTAPVSGIKSLMDYDVTLCSEMKNGEYSHILKVMIPVTSLCPCSKEISQYGAHNQRSHVTLSLRCTQEVQIEEVIDLVENNASCQLYGLLKRPDEKYVTEKAYENPKFVEDMVRDMALALKNDSRIQSFEIESENFESIHNHSAYAYLAYP

SEQ ID NO: 14689 - protein, 279 aa, Simplicispira sp.
  misc_feature (1)..(279): tr|A0A398CBL4|A0A398CBL4_9BURK GTP cyclohydrolase FolE2 OS=Simplicispira sp. NY-02 OX=2315688 GN=folE2 PE=3 SV =1
MNAPEKNRLLPDIQSSADVRGIEIGAVGIQGLRYPIKVRSGGRVAATVAQWAMTVTVPATVKGTHMSRFVELLQAQSDALDAAGFRALLRDMLGRLNAQAGTIEMRFPWFVEKTAPVSGVRSLLDHDVQWRASVSAQGQQSLWLKVVVPVTSLCPCSREISVYGAHNQRSHVAIEVEVLDPIEVEDLIAIAERSSSCEVYGLLKRADEKYVTERAYENPKFVEDMVRDVAAALNQERRVGAYTVEVENFESIHNHSAFARIARPAGAAVGVQVRHGAGS

SEQ ID NO: 14690 - protein, 222 aa, Singulisphaera acidiphila
  misc_feature (1)..(222): tr|L0DEJ6|L0DEJ6_SINAD GTP cyclohydrolase 1 OS=Singulis phaera acidiphila (strain ATCC BAA-1392 / DSM 18658 / V KM B-2454 / MOB10) OX=886293 GN=folE PE=3 SV=1
MSEAFPSERSAYDCGDGAFDDDNEDENASVSETKMDLERIRGAVREILIAVGEDPDREGLRDTPDRVARMYAEVFRGLHQDPKVHLQKLFTQKYDEMVLVKDIRFESFCEHHLLPFIGQAHVAYLPNGKVIGLSKIPRVIDVLAKRPQMQERLTEDVADLLMKELDARGVAVVIEASHSCMTVRGVHKPGSSFVTSAMRGAFKERLATRHEVLSLIFGGKPT

SEQ ID NO: 14691 - protein, 222 aa, Singulisphaera sp.
  misc_feature (1)..(222): tr|A0A1N6KT42|A0A1N6KT42_9BACT GTP cyclohydrolase 1 OS= Singulisphaera sp. GP187 OX=1882752 GN=folE PE=3 SV=1
MSEAFPSERSGYDCGDSAFDDDKEDEIARVADTKIDLERIRGAVREILIAVGEDPDREGLRDTPDRVARMYAEVFQGLHQDPKVHLQKLFTQKYDEMVLIKDIRFESFCEHHLLPFIGQAHVAYLPNGKVIGLSKIPRVIDVLAKRPQMQERLTEDVADLLMKELDARGVAVVIEASHSCMTVRGVHKPGSSFVTSAMRGAFKERLATRHEVLSLIFGGKQT

SEQ ID NO: 14692 - protein, 280 aa, Singulisphaera sp.
  misc_feature (1)..(280): tr|A0A1N6L3B4|A0A1N6L3B4_9BACT GTP cyclohydrolase FolE2 OS=Singulisphaera sp. GP187 OX=1882752 GN=folE2 PE=3 S V=1
MLDLTGGVNDTRGTEPLVDVQNHADDRCVPIDQVGVSNLRYPIVVLDRANQKQPTVASLSMSVNLPHHFKGTHMSRFVEVLNEHRGEVTMFTLPAILDGLRSRLQAESARIEVRFPYFLERVAPVSGARALMGYDCSFIGEASEAGEDFVLGVRIPVTSLCPCSKAISDYGAHNQRGHVTIEVRGGQNGGTGPELIWIEELVEVAERSASAPVFALLKREDERFVTMQAYDNPAFVEDIVRNAALILRVDERITWFRVHAENQESIHNHDAFAQVEWARI

SEQ ID NO: 14693 - protein, 183 aa, Sinimarinibacterium flocculans
  misc_feature (1)..(183): tr|A0A318EAC5|A0A318EAC5_9GAMM GTP cyclohydrolase 1 OS= Sinimarinibacterium flocculans OX=985250 GN=folE PE=3 S V=1
MEEHYRAIIESVGENPDREGLLRTPHRAARAMEFLTQGYEQDLGEIVNGAVFESGNDEMVIVKDIELYSLCEHHLLPFFGRAHVAYLPSGKVIGLSKIPRIVDMYARRLQIQENLTQQIGQSIEEVTGAVGVAVVIEAKHLCAMMRGVEKQNSSMITSVMLGRFRDDPRTRQEFLELIRSSGR

SEQ ID NO: 14694 - protein, 183 aa, Sinimarinibacterium sp.
  misc_feature (1)..(183): tr|A0A4U0GZR4|A0A4U0GZR4_9GAMM GTP cyclohydrolase 1 OS= Sinimarinibacterium sp. CAU 1509 OX=2562283 GN=folE PE= 3 SV=1
MEENYRAIIEAIGENPDREGLLRTPYRAARAMEFLTQGYEQDINEIINGAVFESSNDEMVIVKDIEMYSMCEHHLLPFIGKAHVAYLPSGKVIGLSKIPRIVDMFARRLQIQENLTQQIGECIAEVTHAVGVAVVIEAKHLCAMMRGVEKQNSSMITSVMLGRFREDPTTRKEFLDLIRQRGC

SEQ ID NO: 14695 - protein, 271 aa, Sinimarinibacterium sp.
  misc_feature (1)..(271): tr|A0A4U0GC11|A0A4U0GC11_9GAMM GTP cyclohydrolase FolE2 OS=Sinimarinibacterium sp. CAU 1509 OX=2562283 GN=folE 2 PE=3 SV=1
MNLPVAVLPDLQSSIDERDLAIDAVGIKDLRYPVQIREGASCQSTVANFTMTVALPARVKGTHMSRFVELLEAHSQPLEPSALRNLVMEMVERLGARHGELAIRFPFFIRKAAPISGAQSLVDYEITWRARASDGEYRQSVEVLVPATSLCPCSKEISSYGAHNQRSHIRISAELLEIIDVADLIGVAERSASCEVFGLLKRPDEKYVTERAYDNPRFVEDLVRCVAQSLRADPRVAAFTVEAENFESIHNHSAFARITYSPERHSMWRAE

SEQ ID NO: 14696 - protein, 369 aa, Sinirhodobacter ferrireducens
  misc_feature (1)..(369): tr|A0A443LCZ3|A0A443LCZ3_9RHOB GTP cyclohydrolase FolE2 OS=Sinirhodobacter ferrireducens OX=1215032 GN=folE2 P E=3 SV=1
MNMHDRSNSPDTEAAKAALATLRAWAERADPVEVARLDPAIARLLPGHALSNYPDLARTYDAEFRPDAAYKDGMPDLQNGPASLITGAHASIAHVGISNFRLPIRYRLRPGTDNPPGEVTLETSVTGTVSLDAEKKGINMSRIIRSFYGHAEREFSFEVMAAALDGYKDDLDSFDARLMMRFSYPVRVESLRSGLSGWQYYDIALEMADQGGRRLKAIHLDYVYSSTCPCSLELSEHARASRGRLATPHSQRSVARISVAVEPGKVLWFEDLIDIARAAVPTETQVMVKREDEQAFAELNAAHPIFVEDAVRVFAAGLLAEPRVGDFRVVASHQESLHSHDAVAVLTEGPTFAAASLDPRFFASLVHAG

SEQ ID NO: 14697 - protein, 369 aa, Sinirhodobacter hungdaonensis
  misc_feature (1)..(369): tr|A0A3S3LEI0|A0A3S3LEI0_9RHOB GTP cyclohydrolase FolE2 OS=Sinirhodobacter hungdaonensis OX=2501515 GN=folE2 P E=3 SV=1
MKMHERSNSPDTEAAKAALATLRDWALRADPVEIARLDPAIARLLPGHALSNYPDLVRSYDTGFQPDAAYKDGMPDLQNGPASLITGAHAPIAHVGISNFRLPIRYRLRPGTDNPAGEVTLETSVTGTVSLDAEKKGINMSRIIRSFYGHAEREFSFEVMAAALDGYKDHLDSFDARLMMRFSYPVRVESLRSGLSGWQYYDIALEMADQGGRRLKAIHLDYVYSSTCPCSLELSEHARRDRGRLATPHSQRSVARISVAVEPGAPLWFEDLIDIARAAVPTETQVMVKREDEQAFAELNAAHPIFVEDAVRVFAAGLLAEPRVGDFRVVASHQESLHSHDAVAVLTEGPTFAAASLDPRFFASLVHSG

SEQ ID NO: 14698 - protein, 364 aa, Sinirhodobacter populi
  misc_feature (1)..(364): tr|A0A443KQ99|A0A443KQ99_9RHOB GTP cyclohydrolase FolE2 OS=Sinirhodobacter populi OX=2306993 GN=folE2 PE=3 SV= 1
MNLQTRLTPDGEEAKAALDVLRAWAAQADPAEVARLDPAIARLLPGHEVSNYPDLSRHYDPDFTVDEAYRATLPDLQNGPASLIVGAKARIEHVGISNFRLPLRYRTRSGGEVTLETSVTGTVSLDANKKGINMSRVMRSFYTHAGKEFSFEVMAAALDDYRDKLDSFDARLMMRFSFPAEIESLRSGLKGWQYYEIGLEMVDQNGTRQKMIHLDYVYSSTCPCSLELSEHARRTRGQLATPHSQRSVARISVVLDETGGCLWFEDLIDIARRAVPTETQVMVKREDEQAFAELNAANPIFVEDAVRAFAGGLLADPRVGDFRVAASHQESLHSHDAVAVLTEGATFASASLDPRFFASLSHGG

SEQ ID NO: 14699 - protein, 364 aa, Sinirhodobacter populi
  misc_feature (1)..(364): tr|A0A443KIW2|A0A443KIW2_9RHOB GTP cyclohydrolase FolE2 OS=Sinirhodobacter populi OX=2306993 GN=folE2 PE=3 SV= 1
MNLQTRLTPDGEEAKAALDVLRAWAAQADPAEVARLDPAIARLLPGHEVSNYPDLSRHYDPDFTVDEAYRATLPDLQNGPASLIVGAKARIEHVGISNFRLPLRYRTRSGGEVTLETSVTGTVSLDANKKGINMSRVMRSFYTHAGKEFSFEVMAAALDDYRDKLDSFDARLMMRFSFPAEIESLRSGLRGWQYYEIGLEMVDQNGTRQKMIHLDYVYSSTCPCSLELSEHARRTRGQLATPHSQRSVARISVVLDETGGCLWFEDLIDIARRAVPTETQVMVKREDEQAFAELNAANPIFVEDAVRAFAGGLLADPRVGDFRVAASHQESLHSHDAVAVLTEGATFASASLDPRFFASLSHGG

SEQ ID NO: 14700 - protein, 189 aa, Sinobaca qinghaiensis
  misc_feature (1)..(189): tr|A0A419V2V9|A0A419V2V9_9BACL GTP cyclohydrolase 1 OS= Sinobaca qinghaiensis OX=342944 GN=folE PE=3 SV=1
MAPFDHKKIEQAVTLILEAVGEDPNREGLEDTPKRVARMYQEVFKGIHEDPSTHLKTVFGEQHEELVLVKDITFYSMCEHHLVPFYGKAHVGYIPKGGKVTGLSKLARTVESVASKPQLQERITSTIANTIVETLQPHGAIVVIEAEHMCMAMRGVKKPGSMTVTSAVRGSLQKDAAARAEVFSLINTR

SEQ ID NO: 14701 - protein, 227 aa, Sinobacteraceae bacterium
  misc_feature (1)..(227): tr|A0A2T5MBQ2|A0A2T5MBQ2_9GAMM GTP cyclohydrolase 1 OS= Sinobacteraceae bacterium GT1R17 OX=2029166 GN=folE PE= 3 SV=1
MPTRLLGPGTNQVDRDFFNDGIWTLGHEPRAEQVWDNLRRNQKTSAAMEAQFRAIIEAVGENPEREGLVRTPLRAAKAMQYLTQGYEQDINEIVNGAIFESENDQMVIVRHIEMYSLCEHHLLPFIGKCHVAYLPDGKVIGLSKIPRIVDMFARRLQIQENLTKQIGECVQNVTGAKGVAVVIEAKHLCAMMRGVGKQNSDMVTSVMLGRFREDSRTRQEFLDLIRS

SEQ ID NO: 14702 - protein, 180 aa, Sinobacteraceae bacterium
  misc_feature (1)..(180): tr|A0A522KMX1|A0A522KMX1_9GAMM GTP cyclohydrolase 1 OS= Sinobacteraceae bacterium OX=1969813 GN=folE PE=3 SV=1
MEAEYRSILQAVGEDPTREGLLNTPQRAAKAMKFLTQGYRQSLDELINGALFATTNNEMVIVKDIELYSMCEHHLLPFFGRAHIGYIPDGKVLGLSKIPRIVDMFARRLQIQEQLTKQIGDCILEVTDAKGVAVVIEARHMCAMMRGVEKQNSSMTTSMMEGRFRDDSRTRQEFLTLIKS

SEQ ID NO: 14703 - protein, 180 aa, Sinobacterium caligoides
  misc_feature (1)..(180): tr|A0A3N2DNU5|A0A3N2DNU5_9GAMM GTP cyclohydrolase 1 OS= Sinobacterium caligoides OX=933926 GN=folE PE=3 SV=1
MEKAFAQIITAVGEDLTRPGLVDTPKRAAKAFEFLNKGYHQNIDEVVNNALFPSDASEMVIVKDIELYSMCEHHLLPFIGKVHVAYIPNGMVLGLSKVARIVDMFGRRMQIQENLTTQIAETIQQVTGAAGVGVIVEAKHMCMMMRGVEKQNSVMKTSSMLGCFRDNQATRAEFLTLVKD

SEQ ID NO: 14704 - protein, 198 aa, Sinomicrobium oceani
  misc_feature (1)..(198): tr|A0A1K1RU76|A0A1K1RU76_9FLAO GTP cyclohydrolase 1 OS= Sinomicrobium oceani OX=1150368 GN=folE PE=3 SV=1
MGYKRFEEYNLKVTDEIKGSYNTILNELGEDPGREGLQKTPERAAKAMQYLTQGYHQDAARILKSAMFKEGYNDMVVVKDIELYSLCEHHMLPFFGKAHVAYIPDGQIVGLSKIPRVVDVFARRLQVQERLTHDILECINNTLKPQGVAVVIEAAHMCMMMRGIQKQNSVTTTSGFRGVFEKVETRTEFLRLIGSDLS

SEQ ID NO: 14705 - protein, 226 aa, Sinomicrobium oceani
  misc_feature (1)..(226): tr|A0A1K1RT79|A0A1K1RT79_9FLAO GTP cyclohydrolase 1 OS= Sinomicrobium oceani OX=1150368 GN=folE PE=3 SV=1
MKIDKALEEHFEEIGDDHVSSSADTPLREDAFELSDDEKIEKIQQDVYNIMETLGLDLTDDSLRGTPRRVAKMFVKEIFAGLHPERKPKASTFQNKYKYGEMLVEKNITVYSTCEHHLLPIVGRAHVAYISKGNVIGLSKMNRIVDYFAKRPQVQERMTMQIVQELQQALGTKDVACVIDAKHLCVNSRGIRDIESSTVTAEFGGKFKDPAVRREFLDYIKLETEF

SEQ ID NO: 14706 - protein, 198 aa, Sinomicrobium pectinilyticum
  misc_feature (1)..(198): tr|A0A3N0DYI6|A0A3N0DYI6_9FLAO GTP cyclohydrolase 1 OS= Sinomicrobium pectinilyticum OX=1084421 GN=folE PE=3 SV =1
MGYKRFEEYNLKVTDEIKNSYHTIIAELGEDSGREGLQKTPERAAKAMQFLTQGYHQDAAKILKSAMFREGYNDMVVVKDIELYSLCEHHMLPFFGKAHVAYIPKGHIVGLSKIPRVVDVFARRLQVQERLTHDILECINNTLKPQGVAVVIEASHMCMMMRGIQKQNSVTTTSGFRGVFETVETRTEFLRLIGSDLS

SEQ ID NO: 14707 - protein, 226 aa, Sinomicrobium pectinilyticum
  misc_feature (1)..(226): tr|A0A3N0ECS2|A0A3N0ECS2_9FLAO GTP cyclohydrolase 1 OS= Sinomicrobium pectinilyticum OX=1084421 GN=folE PE=3 SV =1
MKIDKALEEHFEEIGDNHVSSSADTPLREDAFDLSDDEKIEKIQQDVYNIMETLGLDLTDDSLRGTPRRVAKMFVKEIFGGLHPERKPKASTFQNKYKYGEMLVEKNITVYSTCEHHLLPIVGRAHVAYISKGNVIGLSKMNRIVDYYAKRPQVQERMTMQIVQELQKALGTKDVACVIDAKHLCVNSRGIRDIESSTVTAEFGGKFKDPAVRREFLDYIKLETEF

SEQ ID NO: 14708 - protein, 198 aa, Sinomicrobium sp.
  misc_feature (1)..(198): tr|A0A329MUM4|A0A329MUM4_9FLAO GTP cyclohydrolase 1 OS= Sinomicrobium sp. N-1-3-6 OX=2219864 GN=folE PE=3 SV=1
MGYRRFEEYNLQVTDVIKQSYQTIISDLGENPEREGLLKTPERAAKAMQFLTQGYHQDPEEILKEATFREGYNDMVVVKDIEVYSLCEHHMLPFFGKAHVAYIPDGQIVGLSKIPRVVDVFARRLQVQERLTHDILECINTTLRPQGVAVVIEACHMCMMMRGVQKQNSVTTTSGFRGIFEKVETRTEFLRLIGSDLS

SEQ ID NO: 14709 - protein, 226 aa, Sinomicrobium sp.
  misc_feature (1)..(226): tr|A0A329N067|A0A329N067_9FLAO GTP cyclohydrolase 1 OS= Sinomicrobium sp. N-1-3-6 OX=2219864 GN=folE PE=3 SV=1
MKIDKALEEQFEEIGDNHVSSSADTPLREDAFELSDDEKMERIEQDVYHIMETLGLDLTDDSLRGTPRRVAKMFVKEIFGGLHPDRKPKASTFQNKYRYGEMLVEKNITVYSTCEHHLLPIVGRAHVAYISKGNVIGLSKMNRIVDYYAKRPQVQERMTMQIVQELQKALGTDDVACVVDAKHLCVNSRGIRDIESSTVTAEFGGRFKDPAVRREFLDYIKLDTEF

SEQ ID NO: 14710 - protein, 204 aa, Sinomonas atrocyanea
  misc_feature (1)..(204): tr|A0A126ZV63|A0A126ZV63_9MICC GTP cyclohydrolase 1 OS= Sinomonas atrocyanea OX=37927 GN=folE PE=3 SV=1
MTHFDDDDVSALPAEAEKMDLPRIEAAVREILLAVGEDPDRSGLKDTPQRVARAYAETFAGLHHDAEEILGVTFDMDHEELVLVKDIPFYSTCEHHLVPFHGVAHVGYIPSHDGRVTGLSKLARLVDVYARRPQVQERLTSQVADAIVSHLKPRGVIVVVDCEHMCMSMRGVRKPGAHTVTSAVRGQLHDPATRAEAMSLILGK

SEQ ID NO: 14711 - protein, 204 aa, Sinomonas humi
  misc_feature (1)..(204): tr|A0A0B2AHP9|A0A0B2AHP9_9MICC GTP cyclohydrolase 1 OS= Sinomonas humi OX=1338436 GN=folE PE=3 SV=1
MTHIDDDDVAAAADFDSRMDLPRIEAAVREILLAVGEDPDRHGLRDTPKRVARSFAETFAGLHQTPEDVLGVTFDLDHEELVLVKDIPFYSTCEHHLVPFHGVAHVGYIPSHDGRVTGLSKLARLVDIYARRPQVQERLTTDVAEALVKHLKPRGVIVVVECEHMCMSMRGVRKPGAKTVTSAVRGQLHDPATRAEAMSLILGR

SEQ ID NO: 14712 - protein, 186 aa, Sinomonas sp.
  misc_feature (1)..(186): tr|A0A221RB49|A0A221RB49_9MICC GTP cyclohydrolase 1 OS= Sinomonas sp. R1AF57 OX=2020377 GN=folE PE=3 SV=1
MDLPRIEAAVREILLAVGEDPDRSGLKDTPKRVAKAYAETFAGLHMDPEDVLGVTFDLDHEELVLVKDIPFYSTCEHHLVPFHGVAHVGYIPSHDGRVTGLSKLARLVDIYARRPQVQERLTTQVADAIVHHLKPRGVIVVISCEHMCMSMRGVRKPGAHTVTSAVRGQLHDPATRAEAMSLILGR

SEQ ID NO: 14713 - protein, 205 aa, Sinorhizobium americanum
  misc_feature (1)..(205): tr|A0A1L3LL80|A0A1L3LL80_9RHIZ GTP cyclohydrolase 1 OS= Sinorhizobium americanum OX=194963 GN=folE PE=3 SV=1
MDAIVKNFPVLDDTSGRPTQKEAEEAVRVLLRWAGEDPTREGLKDTPARVVKSYREIFGGYDLVAEDVLGRTFEEVSGYDDIVLEKDIPFYSHCEHHMVPIIGKAHVAYLPNGRVLGLSKIARVVDIYARRLQTQESMTAQIAKAIDETLAPRGVAVLIEAEHLCMAMRGIKKQGATTLTTTFTGAFKTEPAEQARFMTMLRGFK

SEQ ID NO: 14714 - protein, 205 aa, Sinorhizobium americanum
  misc_feature (1)..(205): tr|A0A2S3YW60|A0A2S3YW60_9RHIZ GTP cyclohydrolase 1 OS= Sinorhizobium americanum OX=194963 GN=folE PE=3 SV=1
MDAIVKNFPVLDDTSGRPTQKEAEEAVRVLLRWAGEDPTREGLKDTPARVVKSYREIFGGYDLVAEDVLGRTFEEVSGYDDIVLEKDIPFYSHCEHHMVPIIGKAHVAYLPSGRVLGLSKIARVVDIYARRLQTQESMTAQIAKAIDETLAPRGVAVLIEAEHLCMAMRGIKKQGATTLTTTFTGAFKKEPAEQARFMTMLRGFK

SEQ ID NO: 14715 - protein, 205 aa, Sinorhizobium fredii
  misc_feature (1)..(205): sp|C3MB45|GCH1_SINFN GTP cyclohydrolase 1 OS=Sinorhizob ium fredii (strain NBRC 101917 / NGR234) OX=394 GN=folE PE=3 SV=1
MDAIVKNFPLLDDTSGRPTQKEAEEAVRVLLRWAGEDPTREGLKDTPARVIKSYREIFGGYDLVAEDVLGRTFEEVSGYDDIVLEKDVPFYSHCEHHMVPIIGKAHVAYLPNGRVLGLSKIARVVDIYARRLQTQEAMTAQIARAIDETLAPRGVAVMIEAEHLCMAMRGIKKHGSTTLTTTFTGAFKTEPAEQARFMTLLRGFK

SEQ ID NO: 14716 - protein, 205 aa, Sinorhizobium fredii; identical to SEQ ID NO: 13800
  misc_feature (1)..(205): tr|A0A2Z3G0H5|A0A2Z3G0H5_RHIFR GTP cyclohydrolase 1 OS= Sinorhizobium fredii CCBAU 25509 OX=1128330 GN=folE PE= 3 SV=1

SEQ ID NO: 14717 - protein, 205 aa, Sinorhizobium medicae
  misc_feature (1)..(205): sp|A6U8C2|GCH1_SINMW GTP cyclohydrolase 1 OS=Sinorhizob ium medicae (strain WSM419) OX=366394 GN=folE PE=3 SV=1
MDAIVKNFPVLDDTSGRPTQKEAEEAVRVLLRWAGEDPAREGLKDTPARVAKAYREIFGGYDLAAEDVLGRTFEEVSGYDDIVLEKDIPFYSHCEHHMVPIIGKAHIAYLPNGRVLGLSKIARVVDIYARRLQTQEAMTAQIARAIDETLVPRGVAVMIEAEHLCMAMRGIKKQGATTMTTTFTGEFKSEPAEQVRFMTMLRGFK

SEQ ID NO: 14718 - protein, 205 aa, Sinorhizobium medicae; identical to SEQ ID NO: 14717
  misc_feature (1)..(205): tr|A0A508WWB4|A0A508WWB4_9RHIZ GTP cyclohydrolase 1 OS= Sinorhizobium medicae OX=110321 GN=folE PE=3 SV=1

SEQ ID NO: 14719 - protein, 204 aa, Sinorhizobium meliloti; identical to SEQ ID NO: 13820
  misc_feature (1)..(204): tr|A0A0E0UBX3|A0A0E0UBX3_SINMB GTP cyclohydrolase 1 OS= Sinorhizobium meliloti (strain BL225C) OX=698936 GN=fol E PE=3 SV=1

SEQ ID NO: 14720 - protein, 204 aa, Sinorhizobium meliloti; identical to SEQ ID NO: 13820
  misc_feature (1)..(204): tr|H0G7Y2|H0G7Y2_RHIML GTP cyclohydrolase 1 OS=Sinorhiz obium meliloti CCNWSX0020 OX=1107881 GN=folE PE=3 SV=1

SEQ ID NO: 14721 - protein, 205 aa, Sinorhizobium saheli
  misc_feature (1)..(205): tr|A0A178YET6|A0A178YET6_SINSA GTP cyclohydrolase 1 OS= Sinorhizobium saheli OX=36856 GN=folE PE=3 SV=1
MDAIVKNFPVLDDKIGRPTQKEAEEAVRVLLRWAGEDPTREGLRDTPARVAKSYREIFGGYDLVAEDVLGRTFEEVSGYDDIVLEKDIPFYSHCEHHMVPIIGKAHVAYLPNGRVLGLSKIARVVDIYARRLQTQEAMTAQIAKAIDETLAPRGVAVMIEAEHLCMAMRGIKKQGALTLTTTFTGAFKSEPAEQARFMTLLRGFK

SEQ ID NO: 14722 - protein, 205 aa, Sinorhizobium sp.
  misc_feature (1)..(205): tr|A0A2A6MK93|A0A2A6MK93_9RHIZ GTP cyclohydrolase 1 OS= Sinorhizobium sp. NG07B OX=1538174 GN=folE PE=3 SV=1
MDAIVKNFPVLDDTSGRPTQKEAEEAVRVLLRWAGEDPTREGLKDTPARVVKSYREIFGGYDLVAEDVLGRTFEEVSGYDDIVLEKDIPFYSHCEHHMVPIIGKAHVAYLPSGRVLGLSKIARVVDIYARRLQTQESMTAQIAKAIDETLAPRGVAVLIEAEHLCMAMRGIKKQGATTLTTTFTGAFKTEPAEQARFMTMLRGFK

SEQ ID NO: 14723 - protein, 205 aa, Sinorhizobium sp.; identical to SEQ ID NO: 7832
  misc_feature (1)..(205): tr|A0A0T6Y0A8|A0A0T6Y0A8_9RHIZ GTP cyclohydrolase 1 OS= Sinorhizobium sp. GW3 OX=647869 GN=folE PE=3 SV=1

SEQ ID NO: 14724 - protein, 194 aa, Sinosporangium album
  misc_feature (1)..(194): tr|A0A1G8FD49|A0A1G8FD49_9ACTN GTP cyclohydrolase 1 OS= Sinosporangium album OX=504805 GN=folE PE=3 SV=1
MANQHHLVDSDRIEKAVREILLAIGEDPDRDGLRATPARVARAYAEQFAGLGLTPEDVLTTVFDADHDEMILVKDIEVFSTCEHHLLPFHGVAHVGYVPNEKGQITGLSKLARLVDVYARRPQVQERMTSQIADGLMRVLEPRGVIVVIEAEHMCMTIRGVRKPGAKTTTSAVRGSFRDSDKTRAEAMSLIIGR

SEQ ID NO: 14725 - protein, 230 aa, Siphonobacter aquaeclarae
  misc_feature (1)..(230): tr|A0A1G9RVP4|A0A1G9RVP4_9BACT GTP cyclohydrolase 1 OS= Siphonobacter aquaeclarae OX=563176 GN=folE PE=3 SV=1
MKPNEISLNTLLVDDTPLDDELGNEHVSTSVETPLRPDAFELSDDQKIAKIQEHFREIMLTLGLDLNDDSLKGTPKRVAKMYVKEIFSGLNPANFPKATLFENKYRYQEMLVEKDIQFYSNCEHHFVPIIGKAHVAYISSGKVIGLSKLNRIVQYFSRRPQVQERLTMQIARALQKILETEDVAVVMDASHLCVSMRGVQDPTSSTVTSFYGGKFAEDDRKKEFLGYLNL

SEQ ID NO: 14726 - protein, 232 aa, Siphonobacter curvatus
  misc_feature (1)..(232): tr|A0A2S7IQC6|A0A2S7IQC6_9BACT GTP cyclohydrolase 1 OS= Siphonobacter curvatus OX=2094562 GN=folE PE=3 SV=1
MKPNEISLNTLLSDNSIVFSDEEIGEDHIATSVQTPLRADAFDLTDEQKIDKIQEHFREIMLTLGLDLNDDSLKGTPRRVAKMYVQEIFSGLNPKNMPAATLFDNKYRYQEMLVERDIQFYSNCEHHFVPIIGKAHVAYISNGKVIGLSKLNRLVQHFAKRPQVQERMTVQIARELQRVLETPDVAVLMDARHLCVSMRGIEDPTSSTVTSFYGGKFEEEAKKQEFLKYLQL

SEQ ID NO: 14727 - protein, 232 aa, Siphonobacter sp.
  misc_feature (1)..(232): tr|A0A2N7BGA5|A0A2N7BGA5_9BACT GTP cyclohydrolase 1 OS= Siphonobacter sp. BAB-5405 OX=1864825 GN=folE PE=3 SV=1
MKPNEISLNTLLSDNSIVFSDEEIGEDHIATSIQTPLRADAFDLTDEQKIDKIQEHFREIMLTLGLDLNDDSLKGTPRRVAKMYVQEIFSGLNPKNMPAATLFDNKYRYQEMLVERDIQFYSNCEHHFVPIIGKAHVAYISNGKVIGLSKLNRLVQHFAKRPQVQERMTVQIARELQRVLETPDVAVLMDARHLCVSMRGIEDPTSSTVTSFYGGKFEEEAKKQEFLKYLQL

SEQ ID NO: 14728 - protein, 232 aa, Siphonobacter sp.
  misc_feature (1)..(232): tr|A0A261Q8W8|A0A261Q8W8_9BACT GTP cyclohydrolase 1 OS= Siphonobacter sp. BAB-5385 OX=1864822 GN=folE PE=3 SV=1
MKPNEISLNTLLSDNSIVFSDEEIGEDHIATSIQTPLRADAFDLTDEQKIDKIQEHFREIMLTLGLDLNDDSLKGTPRRVAKMYVQEIFSGLNPKNMPAATLFDNKYRYQEMLVERDIQFYSNCEHHFVPIIGKAHVAYISNGKVIGLSKLNRLVQHFAKRPQVQERMTVQIARELQRVLETPDVAVLVDARHLCVSMRGIEDPTSSTVTSFYGGKFEEEAKKQEFLKYLQL

SEQ ID NO: 14729 - protein, 216 aa, Skermanella aerolata
  misc_feature (1)..(216): tr|A0A512DT80|A0A512DT80_9PROT GTP cyclohydrolase 1 OS= Skermanella aerolata OX=393310 GN=folE_1 PE=3 SV=1
MIADTLADAISDDRSLTGNLADASLRPAYPSRADAEEAVRTLLLWAGDNPDREGLLGTPDRVVRSYEEFFAGYKVDPVDLLQRTFEETDGYDEMVVLKDIRFESYCEHHMVPIIGKAHVAYLPRHRVVGISKLARVVDVYAKRLQIQEKMTSQIANTLEEVLQPLGVAVVLEGEHQCMTTRGIHKPGVSMVSSRMLGAFRTDPATRREFLDLIRSS

SEQ ID NO: 14730 - protein, 210 aa, Skermanella aerolata
  misc_feature (1)..(210): tr|A0A0D2UKF5|A0A0D2UKF5_9PROT GTP cyclohydrolase 1 OS= Skermanella aerolata KACC 11604 OX=1385368 GN=folE PE=3 SV=1
MARNPDHSIPPAISQAGPRPSRAEAEEAVRTLLRWAGDDPSREGLAETPARVARAFDEFFAGYAIDPGLLLARTFEEVDGYDEMVLLRDIRFESYCEHHMVPIIGKVHVAYLPRHRVVGISKLARVIEVFAKRLQIQEKMTAQIANTIDEVLQPEGVAVVIEGEHQCMTTRGVHKPGVGMITSRMLGAFRTNPSTRQEFLSLVGNPGIHG

SEQ ID NO: 14731 - protein, 219 aa, Skermanella stibiiresistens
  misc_feature (1)..(219): tr|W9GXA1|W9GXA1_9PROT GTP cyclohydrolase 1 OS=Skermane lla stibiiresistens SB22 OX=1385369 GN=folE PE=3 SV=1
MSASKSLTADHSVRGPSHHGRSAPGIARPSRAEAEEAVRTLLLWAGDDPDREGLLGTPDRVVRSYEEFFAGYAVDPVELLQRTFEETDGYDEMVVLKGIRFESYCEHHMVPIIGKAHVAYLPQRRVVGISKLARVVEAYAKRLQIQEKMTSQIANTIEDVLQPLGVAVVLEGEHQCMTTRGIHKPGVSMVTSRMLGAFRTDPTTRREFLAMIGGASGIG

SEQ ID NO: 14732 - protein, 195 aa, Skermania sp.
  misc_feature (1)..(195): tr|A0A554V2D8|A0A554V2D8_9ACTN GTP cyclohydrolase 1 OS= Skermania sp. ID1734 OX=2597516 GN=folE PE=3 SV=1
MTQTVLNLLDCGLPDLAAAEEAAAAFLRALGVATDTENMRETPARMARAYAELFSSDPFEPTTFPNDEGYDELVVARDIPLRSVCEHHLLPFTGTACVGYLPGERILGLSKLARVVEHFACRPQVQERLTKQIADWLTTELNPRAVGVVIRAEHTCMTLRGVQATGSTTLTSALLGRLRTDASSRQEFFALAGIG

SEQ ID NO: 14733 - protein, 209 aa, Skermania sp.
  misc_feature (1)..(209): tr|A0A554USD5|A0A554USD5_9ACTN GTP cyclohydrolase 1 OS= Skermania sp. ID1734 OX=2597516 GN=folE PE=3 SV=1
MSQDGRAGRDHHELTALETGRRFDQARAEAAIRELLLAVGEDPDRPGLVDTPARVARSYREVFAGLYVEPDSVLDTTFDEGHQELVLVRDIPLYSTCEHHLVSFHGVAHVGYIPGPSGRVTGLSKLARLVDLYAKRPQVQERLTSQIADAVMRKLDPRGAIVVIEAEHLCMAMRGIRKPGASTTTSAVRGLLQSSAVSRAEALDLILRR

SEQ ID NO: 14734 - protein, 186 aa, Slackia equolifaciens
  misc_feature (1)..(186): tr|A0A3N0AV80|A0A3N0AV80_9ACTN GTP cyclohydrolase 1 OS= Slackia equolifaciens OX=498718 GN=folE PE=3 SV=1
MFDQEKIQQATRLLLEAIGEDPQREGLLDTPARVARMYEEICGGMQQDAAEHLSTTFEASEAGMVVERDIPFYSLCEHHLLPFFGRAHIAYLPSGRVAGLSKLARTVEVFARRLQLQERLSAQVADALMEHLGAKGVIVMMEAEHMCMSMRGVCKPGTQTVTLVKRGAFEQDPALVDEFFRMVGQR

SEQ ID NO: 14735 - protein, 188 aa, Slackia exigua
  misc_feature (1)..(188): tr|D0WHK7|D0WHK7_SLAES GTP cyclohydrolase 1 OS=Slackia exigua (strain ATCC 700122 / DSM 15923 / CIP 105133 / J CM 11022 / KCTC 5966 / S-7) OX=649764 GN=folE PE=3 SV=1
MRGAMIDQQKIEAATRLLLEGIGEDPDREGLLETPERVARMYAEVCGGLDQSAEKHLSTTFTVDSDEVVLERDIPFHSLCEHHLLPFFGRAHIAYLPNGKVVGLSKLARTVEVYARRPQLQERLTAQVADAIMEHTGARGAIVMIEAEHMCMSMRGVSKPGTKTVTVAKRGEYTTDSSLVTEFFAMVR

SEQ ID NO: 14736 - protein, 184 aa, Slackia faecicanis
  misc_feature (1)..(184): tr|A0A3N0AFA1|A0A3N0AFA1_9ACTN GTP cyclohydrolase 1 OS= Slackia faecicanis OX=255723 GN=folE PE=3 SV=1
MVDHQKAQQAVAMLLEAIGEDPSREGLVETPARVARMYEEVCGGYDENAAEHLSTTFHVDGSEMVVERDIRFYSLCEHHLLPFFGTAHVAYIPDGEVTGLSKLARTVEVFARRLQLQERLTAQVADALMDDLHAKGAIVMVQAEHMCMSMRGVRKPGSQTVTLAKRGLFAQDERLVDDFFRMVR

SEQ ID NO: 14737 - protein, 195 aa, Slackia heliotrinireducens
  misc_feature (1)..(195): tr|C7N868|C7N868_SLAHD GTP cyclohydrolase 1 OS=Slackia heliotrinireducens (strain ATCC 29202 / DSM 20476 / NCT C 11029 / RHS 1) OX=471855 GN=folE PE=3 SV=1
MTDPIKPYGELDQARAEAAIREFLIAIGEDPDREGIRETPNRVARACAEIFGGLQSDPCEPLRKQFQEEHHEEMVIVKDIPFASMCEHHLLPFTGKVHVAYIPRKGRITGLSKIARCVEGYARRPQLQERLTSQVADAMMSTLEPRGVLVVAEAEHSCMTMRGVRKPGSVTVTSAVRGCFADLPTREEALRLLGL

SEQ ID NO: 14738 - protein, 194 aa, Slackia heliotrinireducens
  misc_feature (1)..(194): tr|C7N2I8|C7N2I8_SLAHD GTP cyclohydrolase 1 OS=Slackia heliotrinireducens (strain ATCC 29202 / DSM 20476 / NCT C 11029 / RHS 1) OX=471855 GN=folE PE=3 SV=1
MTESEYRKLDQPRAEAAIREFLYAIGEDPDREGLLETPSRVARACAEIFAGLQENPADHLKKQFHEADHEEMVIVKDIPFNSMCEHHLLPFSGRAHVAYIPRKGRITGLSKIARCVEGFARRPQVQERLASQVADALMEALDPLGAIVVIEAEHMCMTARGIRKPGSLTVTSAVRGVFKEDQKTRAEALALFRD

SEQ ID NO: 14739 - protein, 185 aa, Slackia isoflavoniconvertens
  misc_feature (1)..(185): tr|A0A369L4S2|A0A369L4S2_9ACTN GTP cyclohydrolase 1 OS= Slackia isoflavoniconvertens OX=572010 GN=folE PE=3 SV= 1
MVDQEKIQQAVRLLLEGMGEDVEREGLLETPQRVGRMYAEICRGMDGSASEHLSTTFSIDSDDMVVERDIQFYSLCEHHLLPFYGKVHLAYIPNGRVTGLSKLARTVEVFSRRLQLQERLTSQIADALMDDLGAKGAIVMVEGEHMCMSMRGVSKPGASTATLAKRGVFEGDQALVDEFFRLIGK

SEQ ID NO: 14740 - protein, 185 aa, Slackia isoflavoniconvertens
  misc_feature (1)..(185): tr|A0A3N0IEC5|A0A3N0IEC5_9ACTN GTP cyclohydrolase 1 OS= Slackia isoflavoniconvertens OX=572010 GN=folE PE=3 SV= 1
MVDQEKIQQAVRLLLEGMGEDVEREGLLETPQRVGRMYAEICRGMDESASEHLSTTFSIDSDDMVVERDIQFYSLCEHHLLPFYGKVHLAYIPNGRVTGLSKLARTVEVFSRRLQLQERLTSQIADALMDDLGAKGAIVMVEGEHMCMSMRGVSKPGASTATLAKRGVFEGDQALVDEFFRLIGK

SEQ ID NO: 14741 - protein, 185 aa, Slackia piriformis
  misc_feature (1)..(185): tr|K0YV41|K0YV41_9ACTN GTP cyclohydrolase 1 OS=Slackia piriformis YIT 12062 OX=742818 GN=folE PE=3 SV=1
MFDQEKIQQATRLLLEGIGEDPQREGLLETPARVARMYEEICGGMNQDPAEYLSTTFEVSDGGMVVERDIPFHSLCEHHLLPFVGKAHIAYMPNGRVTGLSKLARTVEVYARRLQLQERLTAQVADALMKELDAKGALVMIEAEHMCMSMRGVQKPGTQTVTLVKRGVFETDSQLVDDFFRMVRR

SEQ ID NO: 14742 - protein, 184 aa, Slackia sp.
  misc_feature (1)..(184): tr|J6II80|J6II80_9ACTN GTP cyclohydrolase 1 OS=Slackia sp. CM382 OX=1111137 GN=folE PE=3 SV=1
MIDQQKIEAATRLLLEGIGEDPDREGLLETPERVARMYAEVCGGLDQSAEKHLSTTFTVDSDEVVLERDIPFHSLCEHHLLPFFGRAHIAYLPNGRVVGLSKLARTVEVYARRPQLQERLTAQVADAIMAHTGARGAIVMIEAEHMCMSMRGVSKPGTKTVTVAKRGEYTTDSSLVTEFFAMVR

SEQ ID NO: 14743 - protein, 255 aa, Smithella sp.
  misc_feature (1)..(255): tr|A0A091AFZ5|A0A091AFZ5_9DELT GTP cyclohydrolase FolE2 OS=Smithella sp. F21 OX=1538640 GN=folE2 PE=3 SV=1
MIDIQNQKDFRNIDIKKVGVKNIKYPIIVLDRVRGTQPVNATINMYVNLPHHFKGTHMSRFVEVLNDFRGQINIKTFQTILEKMRQKLRAQSAHMEIEFPYFLKKTAPVSKARSMMEYRCLFAGENSAEKTDFLVGVVVPVTTLCPCSKEISAFGAHNQRSIVTVKVRFRKFFWIEDLIKAVEDSASGEVYSLLKRVDEKFVTEKAYKNPKFVEDLVRGVAVKLNADDNFIWYSIEAENFESIHNHSAYACVEKG

SEQ ID NO: 14744 - protein, 255 aa, Smithella sp.
  misc_feature (1)..(255): tr|A0A354H226|A0A354H226_9DELT GTP cyclohydrolase FolE2 OS=Smithella sp. OX=2053614 GN=folE2 PE=3 SV=1
MIDIQNQKDFRNIDIKKVGVKNIKYPIIVLDRAKGTQLVNATINMYVNLPHHFKGTHMSRFIEALNEFKGQISIKTFQSILEKTRQKLHAHSAHMEIEFAYFLEKTAPVSKAKSLMEYRCIFSGESNADKSDFQVGVVVPVTTVCPCSREISKFGAHNQRSIVTTKVRFKKFFWIEDLIKIVENSASGEVYSLLKRVDEKYVTEKAYENPKFVEDVVRSVAVKLNKDDNFTWYCVEAENFESIHNHSAYALVEKG

SEQ ID NO: 14745 - protein, 201 aa, Sneathiella sp.
  misc_feature (1)..(201): tr|A0A2G1Z583|A0A2G1Z583_9PROT GTP cyclohydrolase 1 OS= Sneathiella sp. OX=1964365 GN=folE PE=3 SV=1
MNKHFKPDDPTSKPPTKEEVEDAVRTLIRWAGDDPSREGLLGTPDRVARSYLEFFAGYKEDADAYLSKTFEEVNGYDEMVVLKDIRIESYCEHHMVPIIGHAHVAYMPNNRVVGISKLARVVDAYAKRLQIQEKLTRQIAETINRTLQPKGVAVIIESTHQCMTTRGVHKDGVTMVTSTMLGVFRSSDITRGELLAFIGKG

SEQ ID NO: 14746 - protein, 201 aa, Sneathiella sp.
  misc_feature (1)..(201): tr|A0A2D8HIB3|A0A2D8HIB3_9PROT GTP cyclohydrolase 1 OS= Sneathiella sp. OX=1964365 GN=folE PE=3 SV=1
MNKHTHPGTPAKDRPTKAEAEDAVRTLIRWAGDDPAREGLRGTPDRVVRSYLEFFAGYNEDPDAYLARTFEEVNGYDEMVVLKDIRVESYCEHHMVPIIGVAHVAYMPSNRVVGISKLARVVDAYAKRLQIQEKLTRQIAETIERALQPKGVAVIIESAHQCMTTRGVHKDGVTMVTSTMLGVFRRSDITRRELLSFIDKG

SEQ ID NO: 14747 - protein, 257 aa, Snodgrassella alvi
  misc_feature (1)..(257): tr|A0A2N9WZC1|A0A2N9WZC1_9NEIS GTP cyclohydrolase FolE2 OS=Snodgrassella alvi OX=1196083 GN=folE2 PE=3 SV=1
MDTIADVQSSVDKRNMPINQVGVKGLRLPLCIISAAGEQHTVADLTMTVSLPAEQKGTHMSRFIELMQEQQCNIDFAALQQLTIAMLQKLQAKAGKISMRFPFFRRKQAPVTAISSLLDYEVMLSGEIQAGVYQHSLQVIIPVTSLCPCSKEISAYGAHNQRSHVTVTLVSTEAVTIEEIIDLVEQEGSCQLYGLLKRPDEKYVTEYAYDNPKFVEDMVRDVATALKADARIQSFTVESENFESIHNHSAYALIQYP

SEQ ID NO: 14748 - protein, 257 aa, Snodgrassella alvi
  misc_feature (1)..(257): tr|A0A2N9XV30|A0A2N9XV30_9NEIS GTP cyclohydrolase FolE2 OS=Snodgrassella alvi OX=1196083 GN=folE2 PE=3 SV=1
MDIIADVQSSVDKRNMPINQVGVKGLRLPLSIICAAGEQHTVADLTMTVSLPAEQKGTHMSRFIELMQAQHGSIDFVALQQLTADMLQKLQATAGKISIRFPFFRRKQAPVTAISSLLDYEVMLSGEINDGVYQHSLQVIIPVTSLCPCSKEISAYGAHNQRSHVTVTLISTEAIAVEEVIDLVEQQGSCQLYGLLKRPDEKFVTEYAYDNPKFVEDMVRDVATALKADARIQSFTVESENFESIHNHSAYALIQYP

SEQ ID NO: 14749 - protein, 257 aa, Snodgrassella sp.
  misc_feature (1)..(257): tr|A0A1C4C524|A0A1C4C524_9NEIS GTP cyclohydrolase FolE2 OS=Snodgrassella sp. R-53583 OX=1798181 GN=folE2 PE=3 SV=1
MDTIADVQSSVDKRNMPINQVGVKGLRLPLSIISAAGEQHTVADLTMTVALPAEQKGTHMSRFIELMLAQQGSMDFAALQRLTGDMLLKLQATAGRISIRFPFFRRKLAPVTAISSLLDYEVMLCGEILAGVYQHSLQVVIPVTSLCPCSKEISAYGAHNQRSHVTVTLISTEAVAIEEIIDLVEQQGSCQLYGLLKRPDEKYVTEYAYDNPKFVEDMVRDVATALKADARIQSFTVESENFESIHNHSAYALIQYP

SEQ ID NO: 14750 - protein, 238 aa, Snowella sp.
  misc_feature (1)..(238): tr|A0A2W7B782|A0A2W7B782_9CYAN GTP cyclohydrolase 1 OS= Snowella sp. OX=2164131 GN=folE PE=3 SV=1
MTIASSPNSDINNGKDLLNTQLTERIQTRPDRNTHDGQMAKVHPEALEISKEKMMDSVRGILEAVGEDPEREGLLKTPKRVAEAMQFLTQGYNQSLEKLVNGAIFNEGHNEMVLVRDIDFFSLCEHHMLPFMGKAHVAYIPNEKVVGLSKLARIVEMYSRRLQVQERLTRQIAEAVQEILEPRGVAVVMEATHMCMVMRGVQKPGSWTVTSAMIGSFQDEQKTREEFLNLIRHQPKFY

SEQ ID NO: 14751 - protein, 216 aa, Snowella sp.
  misc_feature (1)..(216): tr|A0A2W7B9L5|A0A2W7B9L5_9CYAN GTP cyclohydrolase 1 OS= Snowella sp. OX=2164131 GN=folE PE=3 SV=1
MTSLISSQKLTVDQAIAALPTQAAPPVSEAEMQAAVRTLLLGMGEDPDREGLRDTPKRVVKALKFLTSGYQQSLDELLNGAIFSENANEMVLIRDIDLFSSCEHHILPIIGRAHVAYIPNGKVIGLSKIARICEMYGRRLQVQERLTAQIADALQGLLQPQGVAVMVEATHMCMVMRGVQKPGSWTVTSSMQGIFADDAKTRDEFMNLIRHSPSFY

SEQ ID NO: 14752 - protein, 220 aa, Sodalis endosymbiont
  misc_feature (1)..(220): tr|A0A2C8CWH0|A0A2C8CWH0_9GAMM GTP cyclohydrolase 1 OS= Sodalis endosymbiont of Henestaris halophilus OX=192924 6 GN=folE PE=3 SV=1
MVTMTKEASQVREALLACGLETQLQGKVLDNEVRKSLIADHMTAIMTLLNLDLTDDSLAKTPHRIAKLYVKEVFAGLDYANFPKITVLENKMQVNEMVTVRNITLTSTCEHHFVIIDGKATVSYIPKDYVIGLSKINRIVQFFSQRPQVQERLTQQILVALQMLLGTNNVAVSIGAVHYCVKARGIRDATSTTTTTSLGGLFKSSQNTRQEFLRAIMHTS

SEQ ID NO: 14753 - protein, 247 aa, Sodalis endosymbiont
  misc_feature (1)..(247): tr|A0A2C8CXU7|A0A2C8CXU7_9GAMM GTP cyclohydrolase 1 typ e 2 OS=Sodalis endosymbiont of Henestaris halophilus OX =1929246 GN=ybgI PE=4 SV=1
MLNIELENLINHKLNSSELQDYAPNGLQVEGRKDVKRIVTGVTACQALLDIALTHDVDAVIVHHGYFWKNEAPVIIGMKRRRLKTLLANDINLYSWHFPLDVHPELGNNAQLAVALDIRVTGSLDPMVLQGELAAPLSSEGLRKRLKQILGRSVFHFGESGPAQIKRLAWCSGGGQDFIELAARADVDAFITGEVSEQTIHIAREQGLHFYAAGHHATERGGIRALGEWLVQQYGFSVTFIDIPNPA

SEQ ID NO: 14754 - protein, 221 aa, Sodalis glossinidius
  misc_feature (1)..(221): sp|Q2NUE3|GCH1_SODGM GTP cyclohydrolase 1 OS=Sodalis gl ossinidius (strain morsitans) OX=343509 GN=folE PE=3 SV =1
MVTLTKEASQVRDALLARGLETPLRGEVLDNEVRKRLIAEHMTEIMTLLNLDLTDDSLAETPHRIAKMYVEEIFAGLDYANFPKITVIENKMKVDEMVTVRDITLTSTCEHHFVIIDGKATVSYIPKHCVIGLSKINRIVQFFAQRPQVQERLTQQIMLALQTLLGTNNVAVSIDAVHYCVKARGIRDATSTTTITSLGGLFKSSQNTRQEFLRAVTHYNG

SEQ ID NO: 14755 - protein, 221 aa, Sodalis glossinidius; identical to SEQ ID NO: 14754
  misc_feature (1)..(221): tr|A0A193QI21|A0A193QI21_SODGM GTP cyclohydrolase 1 OS= Sodalis glossinidius (strain morsitans) OX=343509 GN=fo lE PE=3 SV=1

SEQ ID NO: 14756 - protein, 221 aa, Sodalis praecaptivus
  misc_feature (1)..(221): tr|K7SK67|K7SK67_9GAMM GTP cyclohydrolase 1 OS=Sodalis praecaptivus OX=1239307 GN=folE PE=3 SV=1
MVTLTKEASQVREALLARGLETPLRGEVLDNEVRKRLIAEHMTEIMTLLNLDLTDDSLAETPHRIAKMYVEEVFAGLDYANFPKITVIENKMKVDEMVTVRDITLTSTCEHHFVIIDGKATVSYIPKHCVIGLSKINRIVQFFAQRPQVQERLTQQILLALQTLLGTNNVAVSIDAVHYCVKARGIRDATSTTTTTSLGGLFKSSQNTRQEFLRAVTHHNG

SEQ ID NO: 14757 - protein, 221 aa, Sodalis sp.
  misc_feature (1)..(221): tr|A0A1J7C6Q8|A0A1J7C6Q8_9GAMM GTP cyclohydrolase 1 OS= Sodalis sp. TME1 OX=1912097 GN=folE PE=3 SV=1
MVTLTKEASQVREALLARGLETPLRGEVLDNEVRKRLIVEHMTAIMTLLNLDLTDDSLAETPHRIAKMYVEEVFAGLDYANFPKITVIENKMKVDEMVTVRDITLTSTCEHHFVIIDGKATVSYIPKHCVIGLSKINRIVQFFAQRPQVQERLTQQILLALQTLLGTNNVAVSIDAVHYCVKARGIRDATSTTTTTSLGGLFKSSRNTRQEFLRAVTHHNG

SEQ ID NO: 14758 - protein, 221 aa, Sodalis sp.
  misc_feature (1)..(221): tr|A0A4R1NHR7|A0A4R1NHR7_9GAMM GTP cyclohydrolase 1 OS= Sodalis sp. 159R OX=2529856 GN=folE PE=3 SV=1
MVSLTKEASLVHETLLARGLETPLRGEALDGEIRKRRIAEHMTGIMQLLNLDLSDDSLAETPHRIAKMYVDEIFSGLDYANFPKITLIQNKMKVDEMVAVRNITLTSTCEHHFVIIDGKATVAYIPKESVIGLSKINRIVQFFAQRPQVQERLTQQILIALQTLLGTNNVAVSIDAVHYCVKARGIRDATSATTTTSLGGLFKSSQNTRQEFLRAVRHHDD

SEQ ID NO: 14759 - protein, 221 aa, Unknown
  misc_feature (1)..(221): tr|A0A151UJ28|A0A151UJ28_9GAMM GTP cyclohydrolase 1 OS= Sodalis-like endosymbiont of Proechinophthirus fluctus OX=1462730 GN=folE PE=3 SV=1
MVTLTKEASQVREALLDRGLETPLWGEVLDNEVRKRLIAEHMTAIMTLLNLDLADDSLAETPHRIAKMYVEEVFAGLDYANFPKITVIENKMKVDEMVTVRDITLTSTCEHHFVIIDGKATVSYIPKHCVIGLSKVNRIVQFFSQRPQVQERLTQQILLALQTLLGTNNVAVSVDAVHFCIKARGIRDATTTTTTTSLGGLFKSSQNTRQEFLRAVTHHNS

SEQ ID NO: 14760 - protein, 221 aa, Unknown
  misc_feature (1)..(221): tr|A0A261QRN0|A0A261QRN0_9GAMM GTP cyclohydrolase 1 OS= Sodalis-like symbiont of Philaenus spumarius OX=1189304 GN=folE PE=3 SV=1
MVTLTKEASQVRDALLARSLETPLGSEVLDNEVRKRLIAEHMTEIMTLLNLDLTDDSLAETPHRIAKMYVEEIFAGLDYANFPKITVIENKMKVDEMVTVRDITLTSTCEHHFIIIDGKATVSYIPKHCVIGLSKINRIVQFFAQRPQVQERLTQQILLALQTLLGTNNVAVSIDAVHYCVKARGILDATSTTTTTSLGGLFKSSQNTRQEFLRAVTHHNG

SEQ ID NO: 14761 - protein, 275 aa, Solemya elarraichensis
  misc_feature (1)..(275): tr|A0A1T2LCU6|A0A1T2LCU6_9GAMM GTP cyclohydrolase FolE2 OS=Solemya elarraichensis gill symbiont OX=1918949 GN= folE2 PE=3 SV=1
MSSATDIAKPVTAADIEDVQGSADTRQIAINKVGIKDIRHPVKVADRSGNEQHTVANFNMSVYLPHNFKGTHMSRFVGILNNHEREITVASFKDMLSEMAQLLESEVGHIEMSFPFFVNKKAPVSGVESLMDYEVTLIGEIRDSIPEMSTRVLVPATSLCPCSKKISERGAHNQRSHVTVTVCAEDFFWIEDLIDLVEKEASSELYGLLKRPDEKFVTERAYDNPKFVEDMVRDVAQRLNEDGRICAYTVEAENFESIHNHSAYAMIEHDKREAS

SEQ ID NO: 14762 - protein, 268 aa, Solemya pervernicosa
  misc_feature (1)..(268): tr|A0A1T2L152|A0A1T2L152_9GAMM GTP cyclohydrolase FolE2 OS=Solemya pervernicosa gill symbiont OX=642797 GN=fol E2 PE=3 SV=1
MNQSAKPIADVQNSADTRQIAINKVGIKDIRHPIRVKDRSEGDQHTIANFNMYVNLPHNFKGTHMSRFVEILNHQDREISVESFETMLSEMVELLEAGSGHIEMNFPYFINKTAPISGVQSLLDYDVTLIGEIHDGKIDTNIKVVVPVTSLCPCSKKISERGAHNQRSHVTVNVRTSQFMWIEEVIELVEQEASCELFGLLKRPDEKFVTERAYDNPKFVEDMVRDVAARLNADERINYYVVESENFESIHNHSAYALIERDKAADPV

SEQ ID NO: 14763 - protein, 270 aa, Solemya velesiana
  misc_feature (1)..(270): tr|A0A1T2KVG2|A0A1T2KVG2_9GAMM GTP cyclohydrolase FolE2 OS=Solemya velesiana gill symbiont OX=1918948 GN=folE2 PE=3 SV=1
MTEGVETKSEIADVQSSADTRQIAINKVGIKDIRHPVQVKDRSDGIQHTIATFNMYVNLPHNFKGTHMSRFVEILNSHEKEISVESFKGMLGEMAERLEAASGHIEMNFPYFINKTAPVSGVQSLMDYDVTLIGEVHDGTPTMFIKVVVPVTSLCPCSKKISDRGAHNQRSHVTVQVRTNGFVWIEEIIDLVEKEASCELYGLLKRPDEKHVTEHAYDNPKFVEDMVRDVAGRLNEEERFSAYIVESENFESIHNHSAYALIEKDKEAEV

SEQ ID NO: 14764 - protein, 286 aa, Solemya velum
  misc_feature (1)..(286): tr|A0A0B0H9J2|A0A0B0H9J2_SOVGS GTP cyclohydrolase FolE2 OS=Solemya velum gill symbiont OX=2340 GN=folE2 PE=3 S V=1
MSGSNPTADAQMSSATDIAKPTTAADIEDVQGSADTRQIAINKVGIKDIRHPVKVADRSGNEQHTVANFNMSVYLPHNFKGTHMSRFVGILNNHEREITVASFKDMLSEMAQLLESEVGHIEMSFPFFVNKKAPVSGVESLMDYEVTLIGEIRDSIPEMSTRVLVPATSLCPCSKSISERGAHNQRSHVTVTVCAEDFFWIEDLIDLVEREASSELYGLLKRPDEKFVTERAYDNPKFVEDMVRDVAQRLNEDERICAYTVEAENFESIHNHSAYAMIEHDKREAS

SEQ ID NO: 14765 - protein, 184 aa, Solemya velum
  misc_feature (1)..(184): tr|A0A1T2F130|A0A1T2F130_SOVGS GTP cyclohydrolase 1 OS= Solemya velum gill symbiont OX=2340 GN=folE PE=3 SV=1
MSLDKLTDHYAGIIENVGENLERDGLIRTPERAAQAMQFLCRGYSQSLDDVVNEAIFDSDADDMIIVKDIELYSLCEHHMLPFIGKAHIAYLPQGKVIGLSKIARIVDMYARRLQIQENMTIQIADAIEQAINPAGVAVTIEAEHLCMKMRGVEKQNSVMKTSVMLGAFRKSQATRMEYLNLIK

SEQ ID NO: 14766 - protein, 189 aa, Solibacillus isronensis
  misc_feature (1)..(189): tr|K1L5X8|K1L5X8_9BACL GTP cyclohydrolase 1 OS=Solibaci llus isronensis B3W22 OX=1224748 GN=folE PE=3 SV=1
MSNVDLNKIEEAVKMILEAVGEDVTREGLLDTPKRVSKMYAEMFSGLQEDPRDYFSTVFHEDHEELVLVKDIPFFSMCEHHLVPFYGTAHIAYIPKDGKVAGLSKLGRCLESVARRPQLQERITSTVADTIMEMLNPKGVYVVVEAEHMCMTMRGLKKPGAKTVTAVARGIYEQDVVKRNEVNTFIQMK

SEQ ID NO: 14767 - protein, 189 aa, Solibacillus silvestris
  misc_feature (1)..(189): tr|F2F6U9|F2F6U9_SOLSS GTP cyclohydrolase 1 OS=Solibaci llus silvestris (strain StLB046) OX=1002809 GN=folE PE= 3 SV=1
MSNVDLNKIEEAVKMILEAVGEDVTREGLLDTPKRVSKMYAEMFSGLQEDPRDYFSTVFHEDHEELVLVKDIPFFSMCEHHLVPFYGTAHIAYIPKDGKVAGLSKLGRCLESVARRPQLQERITSTVADTIMEMLNPKGVYVVVEAEHMCMTMRGLKKPGAKTVTAVARGIYEQDAVKRNEVNTFIQMK

SEQ ID NO: 14768 - protein, 189 aa, Solibacillus silvestris; identical to SEQ ID NO: 14767
  misc_feature (1)..(189): tr|A0A1A7LRB1|A0A1A7LRB1_9BACL GTP cyclohydrolase 1 OS= Solibacillus silvestris OX=76853 GN=folE PE=3 SV=1

SEQ ID NO: 14769 - protein, 189 aa, Solibacillus sp.
  misc_feature (1)..(189): tr|A0A2D1SR99|A0A2D1SR99_9BACL GTP cyclohydrolase 1 OS= Solibacillus sp. R5-41 OX=2048654 GN=folE PE=3 SV=1
MTNVDLKKIEEAVKMILEAVGEDVEREGLLDTPKRVSKMYAEMFSGLKEDPREYFNTVFHEDHEELVLVKDIPFFSMCEHHLVPFYGKAHIAYIPKDGKVAGLSKLGRCLESVARRPQLQERITSTVADTIMEMLDPKGVYVIIEAEHMCMTMRGLKKPGAKTITSVARGIYEQDDVKRNEVITFVQMS

SEQ ID NO: 14770 - protein, 194 aa, Solibacter usitatus
  misc_feature (1)..(194): tr|Q028J6|Q028J6_SOLUE GTP cyclohydrolase 1 OS=Solibact er usitatus (strain Ellin6076) OX=234267 GN=folE PE=3 S V=1
MNPKPEEAPIAPLIEDLLGRLGEDPKRDGLLRTPQRVDKSLRFLTSGYRMDIDKILNGALYEVKYDEMVVVKDIEFFSLCEHHMLPFYGKMHVAYLPQKKVIGLSKIPRLVDMFARRLQIQERLTQQVAQTIQEVIRPLGVGVICEAKHFCMMMRGVEKQHSGAMTSAMLGAFRDRKETRDEFLALVNHRSNGF

SEQ ID NO: 14771 - protein, 268 aa, Solimicrobium silvestre
  misc_feature (1)..(268): tr|A0A2S9GV01|A0A2S9GV01_9BURK GTP cyclohydrolase FolE2 OS=Solimicrobium silvestre OX=2099400 GN=folE2 PE=3 SV =1
MNTRDLTLSIPDIQSTPDTRKIAIARVGVKGVRYPLVVKTSSGTQATVGHWNMYVHLDETQKGTHMSRFIALLEELNQQGAMDMPIFVGLMEKMTQLLDATAGRIELTFPYFINKTAPVSGVQSLMDYEVGITGEIKNGQVETTIKVMVPVTSLCPCSKKISAYGAHNQRSHINISALVSTDISVDELIANVEAQASCELYGLLKRPDEKYVTERAYDNPKFVEDLVRDVAGVLNADPRILAYTLEAENFESIHNHSAYALIENDKRA

SEQ ID NO: 14772 - protein, 181 aa, Solimonas aquatica
  misc_feature (1)..(181): tr|A0A1H9JX18|A0A1H9JX18_9GAMM GTP cyclohydrolase 1 OS= Solimonas aquatica OX=489703 GN=folE PE=3 SV=1
MEEHFRAIIEAIGEDPQRNGLLRTPHRAAKAMGFLTHGYRQDLGEIVNGAIFESSNDEMVLVRNIELYSLCEHHLLPFIGKAHVAYLPAGRVIGLSKIPRIVDMYARRLQIQENLTQQIGNCIAEVTGANGVAVVIEAQHLCAMMRGVQKQNSSMVTSMMLGRFREDARTREEFLSLVRGG

SEQ ID NO: 14773 - protein, 215 aa, Solimonas fluminis
  misc_feature (1)..(215): tr|A0A2S5TGS1|A0A2S5TGS1_9GAMM GTP cyclohydrolase 1 OS= Solimonas fluminis OX=2086571 GN=folE PE=3 SV=1
MDDLHPFSTESKEFETAGPEGEVDAPQEHRLAGLYRELMRGIGEDVRREGLVGTPNRAAKAFEFLTRGYREDIESLVNGAVFQSTSQDMVLVRNIEFYSLCEHHILPFFGKVHVAYLPAGKVIGLSKIPRIVDVFARRLQIQENLTEQIAQCIEQVTLARGVAVIVEARHMCMLMRGVEKQAASMLTSSLRGKFQQDESLRNQLLRFLPASAGES

SEQ ID NO: 14774 - protein, 188 aa, Solimonas fluminis
  misc_feature (1)..(188): tr|A0A2S5TIP0|A0A2S5TIP0_9GAMM GTP cyclohydrolase 1 OS= Solimonas fluminis OX=2086571 GN=folE PE=3 SV=1
MKENNGMEEQFRAIIEAIGENPEREGLLRTPHRAARAMEFLTQGYEQDVGEIVNGAVFESHNDEMVIVKDIELYSMCEHHMLPFIGRAHVAYLPNGKVIGLSKIPRIVDMFARRLQIQENLTQQIGQCLQDTIDAKGVGVVIEAKHLCAMMRGVQKQNSSMVTSFMLGRFREDHRTRQEFLDLIRRQN

SEQ ID NO: 14775 - protein, 180 aa, Solimonas sp.
  misc_feature (1)..(180): tr|A0A346N6M2|A0A346N6M2_9GAMM GTP cyclohydrolase 1 OS= Solimonas sp. K1W22B-7 OX=2303331 GN=folE PE=3 SV=1
MEEQFRAIIEAIGENPEREGLLRTPHRAAKAMEFLTQGYEQDIGEIVNGAVFESHNDEMVIVKDIELYSMCEHHMLPFIGRAHVAYLPNGKVIGLSKIPRIVDMFARRLQIQENLTQQIGQCLQDTIDAKGVGVVIEAKHLCAMMRGVQKQNSSMVTSFMLGRFREDHRTRQEFLDLIRR

SEQ ID NO: 14776 - protein, 221 aa, Solirubrum puertoriconensis
  misc_feature (1)..(221): tr|A0A0W8EDC6|A0A0W8EDC6_9BACT GTP cyclohydrolase 1 OS= Solirubrum puertoriconensis OX=1751427 GN=folE PE=3 SV= 1
MAKQPDPAALPGADDRLDAELRTPLRPDAFALSEEDKIAGITAHFREIMHLLGLDLTDDSLNGTPRRVAKMFVNEWFRGLDPQHRPEVRLFENRYQYNHILVERDITLFSCCEHHFVPIIGKAHVAYLPGEHVVGLSKLNRVVQYYARRPQVQERLTRQIAEELKQSLRTDDVAVLIEADHLCVMSRGVNDTSSSTITAEYGGAFGRDEQLRREFLRLIGK

SEQ ID NO: 14777 - protein, 216 aa, Solitalea canadensis
  misc_feature (1)..(216): tr|H8KM92|H8KM92_SOLCM GTP cyclohydrolase 1 OS=Solitale a canadensis (strain ATCC 29591 / DSM 3403 / NBRC 15130 / NCIMB 12057 / USAM 9D) OX=929556 GN=folE PE=3 SV=1
MEELKKFSSEMMEENEMDGYQKIDRYNPEKIKDISSKYYDILKDIGEDPDREGLLKTPERVAKALQYLTHGYDLKPDEILKSAMFTEEYSQMVLVKDIEVYSMCEHHLLPFFGKAHVAYIPNGKVVGLSKIPRVVDAYARRLQVQERLTNEIRDCIQDTLSPLGVAVVIECKHMCMSMRGIQKQNSVTTTSAFTGEFISNEKTRFEFMQLIASHLS

SEQ ID NO: 14778 - protein, 215 aa, Solitalea koreensis
  misc_feature (1)..(215): tr|A0A521AYU4|A0A521AYU4_9SPHI GTP cyclohydrolase 1 OS= Solitalea koreensis OX=543615 GN=folE PE=3 SV=1
MEQYKDHTPSMMEENEMDGYEKIDRYNAGKIKRIADKYHDILKDIGENPDREGLNKTPERVAKALQFLTHGYDLNPTEILKSAMFTEDYSQMVIVKDIEVYSMCEHHMLPFFGKAHVAYIPNGKVVGLSKIPRVVDAFSRRLQVQERLTNEIRDCIESTLKPLGVAVVIECKHMCMSMRGIQKQNSVTTTSAFTGEFVNENTRMEFMQLIAAKLS

SEQ ID NO: 14779 - protein, 216 aa, Solitalea longa
  misc_feature (1)..(216): tr|A0A2S5A9G9|A0A2S5A9G9_9SPHI GTP cyclohydrolase 1 OS= Solitalea longa OX=2079460 GN=folE PE=3 SV=1
MDDLKKLASSMMEENEMDGYQKIDRYNEEKIKDISDKYYDILKDLGEDPNREGLLKTPERVAKALQFLTHGYDLNPSEILKSAMFTEEYSQMVLVKDIEVYSMCEHHMLPFFGKAHVAYIPNGKVVGLSKIPRVVDAFSRRLQVQERLTNEIRDCIQETLNPLGVAVVIECKHMCMSMRGIQKQNSVTTTSAFTGEFINNEKTRYEFMQLIAAHLS

SEQ ID NO: 14780 - protein, 221 aa, Soonwooa buanensis
  misc_feature (1)..(221): tr|A0A1T5DID5|A0A1T5DID5_9FLAO GTP cyclohydrolase 1 OS= Soonwooa buanensis OX=619805 GN=folE PE=3 SV=1
MTEHFDNDDDLFTGKEHTPLREDAFALSPDEKIEKIQGLFGEIMQTLGLDMTDDSLKDSPKRVAKMYVNEIFGGLLPENKPGISTFSNKYKYRQMLVEKDITVYSFCEHHFLPIIGRAHVAYISNGEVIGLSKINRIVDYYAKRPQVQERLTMQIVEALKVALGTKDVACIIDAKHLCVNCRGIKDTASSTITAELSGIFRTNPITRQEFLHYVGSHAKLD

SEQ ID NO: 14781 - protein, 158 aa, Sorangium cellulosum
  misc_feature (1)..(158): tr|A0A150P8L7|A0A150P8L7_SORCE GTP cyclohydrolase 1 (Fr agment) OS=Sorangium cellulosum OX=56 GN=BE04_09335 PE= 3 SV=1
MIDRQRAARAIEEFLRALGRDVEGELAGTGERVADAWADDLIEGEAIDAAAVLREGAMETGPFERGLVVARDLSVTTMCPHHLLPGHGTGVVAYLPGARVAGIGTIAHVLDALARRLTLQERIGGQLVDLLVGELGARGALCKLTLTHTCLIARGERK

SEQ ID NO: 14782 - protein, 191 aa, Sorangium cellulosum
  misc_feature (1)..(191): tr|A9GEC7|A9GEC7_SORC5 GTP cyclohydrolase 1 OS=Sorangiu m cellulosum (strain So ce56) OX=448385 GN=folE PE=3 SV =1
MIDRKRAAWAIEEFLRALGRDVEGDLAGTGERVADAWADDLIEGEAIDAAAVLREGAMETGPFERGLVVARDLAVTTMCPHHLLPGHGTGIIVYLPGARVAGIGTLAHVLDALARRLTLQERIGGQLVELLVRELGARGALCKLTLTHTCLIARGERKAGALIETVAAAGELAEPGPERDLALAALSGGRA

SEQ ID NO: 14783 - protein, 262 aa, Spartobacteria bacterium
  misc_feature (1)..(262): tr|A0A2A2XUD7|A0A2A2XUD7_9BACT GTP cyclohydrolase FolE2 OS=Spartobacteria bacterium AMD-G4 OX=1982325 GN=folE2 PE=3 SV=1
MLKDTQNERDDRQLPIDRVGVKSLRYPLQVRDKEHSVQSTVASIQLTVDLPHHFKGTHMSRFIEVLVAHGPVIHVENIRDILQEMCRRLESRCAHLEIEFPFFLGKKAPVSGAVGLMDYTVRFNATLENGEMDFVVTTVVPVTTLCPCSKAISAAGAHNQRGHVTLSVCCKRPMWIEDMVRLAEESASAELYSLLKRPDEKHVTEQAYANPVFVEDLVRNVAVRCEADENIIRYRVEVENFESIHNHSAYALIEKKGALPRG

SEQ ID NO: 14784 - protein, 258 aa, Spartobacteria bacterium
  misc_feature (1)..(258): tr|A0A2T6CZ30|A0A2T6CZ30_9BACT GTP cyclohydrolase FolE2 OS=Spartobacteria bacterium LR76 OX=2161866 GN=folE2 P E=3 SV=1
MTLQDTQNQRDERRLPIDRVGVKDLRYPIQIRDKDHSLQSTIATVQLTVDLPHHFKGTHMSRFVEVLNSHGPILHVDNIRDVLEQLTKKLQSACAHVDFEFPFFLEKKAPVTGAVGLIDYVARFNATMENGRMDFVVTTVVPVTTLCPCSKAISARGAHNQRGHVTLAVRCTKPMWIEDMIRLVEDSASSELYSLLKRPDEKAVTERAYDNPVFVEDLVRNVASRCENDANIRWYRVEAENFESIHNHNAYALIEKHG

SEQ ID NO: 14785 - protein, 195 aa, Sphaerisporangium album
  misc_feature (1)..(195): tr|A0A367FG92|A0A367FG92_9ACTN GTP cyclohydrolase 1 OS= Sphaerisporangium album OX=509200 GN=folE PE=3 SV=1
MSVNPLKVDSARIEKAVREILLAIGEDPDRDGLVDTPARVARAYAEQFAGLGQSPEDVLTTVFDADHDEMVLVKDIEVFSTCEHHLVPFHGVAHVGYVPNEKGQITGLSKLARLVDVYARRPQVQERMTSQIADALMDVLAPRGVIVVIEAEHLCMTMRGVRKPGAKTITSAVRGDFRDSDKTRAEAMALILGRR

SEQ ID NO: 14786 - protein, 204 aa, Sphaerisporangium cinnabarinum; identical to SEQ ID NO: 6518
  misc_feature (1)..(204): tr|A0A2T5N537|A0A2T5N537_9ACTN GTP cyclohydrolase 1 OS= Sphaerisporangium cinnabarinum OX=47482 GN=folE PE=3 SV =1

SEQ ID NO: 14787 - protein, 182 aa, Sphaerisporangium sp.
  misc_feature (1)..(182): tr|A0A366LVV2|A0A366LVV2_9ACTN GTP cyclohydrolase 1 OS= Sphaerisporangium sp. LHW63015 OX=2248750 GN=folE PE=3 SV=1
MTMDEARIQALYRELLIAIGEDPDREGLRDTPRRAAAFWRDFLTYQPDRIDTTFRHEPAGEQFVQVNGISTWSLCEHHLLPIHLLVNIAYLPAGAVLGLSKLVRVTELAARRLQIQERIVEQVADELQKITGTDDVAVVAAGHHLCMSMRGTRAQGSRTLTRTLRGRFLQDPRLVSALGAGP

SEQ ID NO: 14788 - protein, 198 aa, Sphaerisporangium sp.
  misc_feature (1)..(198): tr|A0A2W2GPZ0|A0A2W2GPZ0_9ACTN GTP cyclohydrolase 1 OS= Sphaerisporangium sp. 7K107 OX=2070365 GN=folE PE=3 SV= 1
MGDAYREEPLKVDSARIEGAVREILIAIGEDPDRDGLRDTPARVARAYAEQFAGLGQRPEDVLTTVFDADHDEMVLVRDIEVYSTCEHHLVPFHGVAHVGYIPNARGQITGLSKLARLIDVYARRPQVQERMTSQIADALMSVLEPRGVIVVVQCEHLCMTMRGVRKPGAKTITSAVRGSFRDSDKTRAEAMSLILGR

SEQ ID NO: 14789 - protein, 183 aa, Sphaerobacter thermophilus
  misc_feature (1)..(183): tr|D1C535|D1C535_SPHTD GTP cyclohydrolase 1 OS=Sphaerob acter thermophilus (strain DSM 20745 / S 6022) OX=47943 4 GN=folE PE=3 SV=1
MDRERIAAAVAEILRAIGEDPDRPDLRRTPRRVADLFAEMFGGLAIDPRTYLAGALPEEHGELVVIHDVTVRSMCEHHLVPMVGLAHVAYLPAGRIAGFDRIVKVVDAYARRPQIQERLTRQVADTIDEMLSPAGVAVRFELEHMCMTIRGSRRPGSRVVTTAYRGVFRDDPAWRAEFHAALE

SEQ ID NO: 14790 - protein, 202 aa, Sphaerochaeta halotolerans
  misc_feature (1)..(202): tr|A0A372MLC6|A0A372MLC6_9SPIO GTP cyclohydrolase 1 OS= Sphaerochaeta halotolerans OX=2293840 GN=folE PE=3 SV=1
MAIDSAKIEEHVRGILLALGENPDREGLLDTPKRVAQMYEELFKGIAYSNEEIAQMFDKTFEDDLYLPQNNNEIVMMRDISFFSHCEHHMALMYNMKATIAYVPNKKILGLSKIARILDMVGKRLQLQERIGSDIAQIMQQATGSEDVAVIIEGQHACVTTRGIKNTNSVTVTTTMRGKFNTDQNFMNRLMIMYGKELHENH

SEQ ID NO: 14791 - protein, 198 aa, Sphaerochaeta pleomorpha
  misc_feature (1)..(198): tr|G8QRN3|G8QRN3_SPHPG GTP cyclohydrolase 1 OS=Sphaeroc haeta pleomorpha (strain ATCC BAA-1885 / DSM 22778 / Gr apes) OX=158190 GN=folE PE=3 SV=1
MAIDTVKIEEHIRGILQALGENPDREGLKATPKRVAHMYEELFEGIQYSNDDIAKMFDKTFEEDLYIAQGNNEIVMMRDIELFSFCEHHMALMYNMKASVAYIPNGKILGLSKIARIVDMVSKRLQLQERIGSDIAEVIQKVTGSEDVAVIIEGQHACITTRGIKNTKSVTATTTLRGRFHTDQNFMNKLMLLYRKEV

SEQ ID NO: 14792 - protein, 235 aa, Sphaerospermopsis kisseleviana
  misc_feature (1)..(235): tr|A0A1Z4ULX9|A0A1Z4ULX9_9CYAN GTP cyclohydrolase 1 OS= Sphaerospermopsis kisseleviana NIES-73 OX=1973480 GN=fo lE PE=3 SV=1
MTIASSNGSNRSQSPLIPDLAQVISSRPDRNTHNGKQADLHPPSEESTEQMMEAVRTMLIGVGEDPEREGLLKTPKRVAEAMKFLTSGYNQSLEELVNGAIFDEGHEEMVLVRDINFFSLCEHHMLPFMGRAHVAYIPNQKVVGLSKLARIVEMYARRLQVQERLTRQIAEAVQTILEPKGVAVVMEATHMCMVMRGVQKPGSWTVTSSMVGVFQDEQKTREEFLNLIRHQAAFF

SEQ ID NO: 14793 - protein, 216 aa, Sphaerospermopsis kisseleviana
  misc_feature (1)..(216): tr|A0A1Z4UNG3|A0A1Z4UNG3_9CYAN GTP cyclohydrolase 1 OS= Sphaerospermopsis kisseleviana NIES-73 OX=1973480 GN=fo lE PE=3 SV=1
MTLSISPVLNSADQVVSSLSTQQQPKVTEAEMMQAVRTLLIGLGENPDREGLKDTPKRVVKALQFLTKGYHESLDELLNGAVFTESADEMVLVRDIDIFSSCEHHILPVIGRAHVAYIPNGKVIGLSKIARICEMYARRLQVQERLTLQIADALQGLLKPKGVAVVIEATHMCMVMRGVQKPGSWTVTSAMRGVFSEDARTREEFMNLIRHNANFH

SEQ ID NO: 14794 - protein, 235 aa, Sphaerospermopsis reniformis; identical to SEQ ID NO: 14792
  misc_feature (1)..(235): tr|A0A480A2K8|A0A480A2K8_9CYAN GTP cyclohydrolase 1 OS= Sphaerospermopsis reniformis OX=531300 GN=folE PE=3 SV= 1

SEQ ID NO: 14795 - protein, 216 aa, Sphaerospermopsis reniformis; identical to SEQ ID NO: 14793
  misc_feature (1)..(216): tr|A0A479ZZW9|A0A479ZZW9_9CYAN GTP cyclohydrolase 1 OS= Sphaerospermopsis reniformis OX=531300 GN=folE PE=3 SV= 1

SEQ ID NO: 14796 - protein, 267 aa, Sphaerotilus hippei
  misc_feature (1)..(267): tr|A0A318GWX4|A0A318GWX4_9BURK GTP cyclohydrolase FolE2 OS=Sphaerotilus hippei OX=744406 GN=folE2 PE=3 SV=1
MNDRTFPSLPPALAIPDTQSERDERHLAIQRVGVRSLRYPLLVDVGGEVSRTVAQWCLDVALPAEQKGTHMSRFVAWLEALDRPLDADNLRTELAGMLDKLHATEGTIEARFPFFIRKHAPVSGVASLMDYQGGWTAEVRDGRMSIWAEAVVPVKSLCPCSKEISDYGAHNQRSNVTLKLELLQPVAWTEIVRFAEESASSEIWGLLKRPDEKWITERAYENPKFVEDLVRDVALRLNADARIGRYVAEVENFESIHNHSAWARIER

SEQ ID NO: 14797 - protein, 132 aa, Sphingobacteriaceae bacterium
  misc_feature (1)..(132): tr|A0A4Q5SN54|A0A4Q5SN54_9SPHI GTP cyclohydrolase 1 OS= Sphingobacteriaceae bacterium OX=2021370 GN=folE PE=3 S V=1
MFKEEYSQMVVVKDIEVYSMCEHHMLPFFGKAHIAYIPNGHVVGLSKIPRIVDVFARRLQVQERLTNEIRDCIQKTLNPIGVGVVIECRHLCMSMRGVQKQNSATTTSAFTGEFLKEKTRTEFLNLISSRLS

SEQ ID NO: 14798 - protein, 211 aa, Sphingobacteriaceae bacterium; identical to SEQ ID NO: 12463
  misc_feature (1)..(211): tr|A0A1X9ZB28|A0A1X9ZB28_9SPHI GTP cyclohydrolase 1 OS= Sphingobacteriaceae bacterium GW460-11-11-14-LB5 OX=198 6952 GN=folE PE=3 SV=1

SEQ ID NO: 14799 - protein, 211 aa, Sphingobacteriales bacterium
  misc_feature (1)..(211): tr|A0A258WWC4|A0A258WWC4_9SPHI GTP cyclohydrolase 1 OS= Sphingobacteriales bacterium 16-39-50 OX=1970581 GN=fol E PE=3 SV=1
MGLKNNNSEIDKIDGYVKIDSYDQEKIERIASHYKAILADLGEDPSREGLLQTPVRVAKALQFLTHGYDAKPEEILRGAMFKEDYSQMVVVKDIEVFSMCEHHMLPFFGKAHIAYIPNGHIVGLSKIPRVVDAFARRLQVQERLTNEIRDCIQETLNPVGVAVVIECKHLCMSMRGIQKQNSVTTTSAFTGEFVNETTRSEFLRLITASLS

SEQ ID NO: 14800 - protein, 198 aa, Sphingobacteriales bacterium
  misc_feature (1)..(198): tr|A0A1Q3JVK6|A0A1Q3JVK6_9SPHI GTP cyclohydrolase 1 OS= Sphingobacteriales bacterium 41-5 OX=1895836 GN=folE PE =3 SV=1
MAFKRKEEYDEQATQNLMHHYEGILNLIGEDTEREGLIKTPERKAKAIQYLTQGYNLDAHAIINSAKFHEEVSEMIIVKDIELYSLCEHHILPFFGKAHIAYIPNGWITGLSKIARVVDVFSRRLQVQERLTVQIMNAIKETLNPLGVAVVIEAKHMCMMMRGVQKQNSITTTSAFDGEFQKNSTRSEFLKLISADLY

SEQ ID NO: 14801 - protein, 240 aa, Sphingobacteriia bacterium
  misc_feature (1)..(240): tr|A0A1G3J2N9|A0A1G3J2N9_9BACT GTP cyclohydrolase 1 OS= Sphingobacteriia bacterium RIFOXYD2_FULL_35_12 OX=18021 67 GN=folE PE=3 SV=1
MKQNETLSNIRLNGDKIVFTDDELMEEMGDNHISTSVDTPMVPGAFDKSDEEKIAIIQDHFKAIMETLGLDLSDDSLKGTPKRVAKMYVKEIFSGLNPANKPSVALFDNKYKYNEMLVEKNISFYSNCEHHFVPIIGKAHLAYISNGRVIGLSKLNRLVEFYAKRPQVQERLTMQIAKELQKELGTEDVAIVIDAKHLCVASRGVEDDTSSTITSFYGGKFKEEKRKEEFLRYLELKTEF

SEQ ID NO: 14802 - protein, 240 aa, Sphingobacteriia bacterium
  misc_feature (1)..(240): tr|A0A258UB92|A0A258UB92_9BACT GTP cyclohydrolase 1 OS= Sphingobacteriia bacterium 28-36-52 OX=1970573 GN=folE PE=3 SV=1
MKQNETLSNIRLNGDKIIFTDDELMEEMGDNHISTSVDTPMVAGAFDKSDEEKIAIIQDHFKAIMETLGLDLTDDSLKGTPKRVAKMYVKEIFSGLNPANKPAVALFDNKYKYNEMLVEKNISFYSNCEHHFVPIIGKAHLAYISNGRVIGLSKLNRLVEYYAKRPQVQERLTMQIAKELQKELGTEDVAIVIDAKHLCVASRGVEDDTSSTITSFYGGKFKDEKRKEEFLRYLELKTEF

SEQ ID NO: 14803 - protein, 209 aa, Sphingobacterium alimentarium
  misc_feature (1)..(209): tr|A0A4R3VZH8|A0A4R3VZH8_9SPHI GTP cyclohydrolase 1 OS= Sphingobacterium alimentarium OX=797292 GN=folE PE=3 SV =1
MINPTDFSEELDGYKKIDQYNEEHVDRIAHHYSDILEALGENPNREGLIKTPERVAKALQFLTHGYDIDAAEVLRSAMFEEDYSQMVVVKDIEVYSMCEHHMLPFFGKAHIAYIPNGHIVGLSKIPRVVDAYARRLQVQERLTNEIRDCIQQTLNPAGVAVVIECKHMCMAMRGVQKQNSVTTTSAFTGAFQNDVTRSEFLRLITASLD

SEQ ID NO: 14804 - protein, 209 aa, Sphingobacterium alkalisoli
  misc_feature (1)..(209): tr|A0A4V6WF79|A0A4V6WF79_9SPHI GTP cyclohydrolase 1 OS= Sphingobacterium alkalisoli OX=1874115 GN=folE PE=3 SV= 1
MSNPTDFNEELDGYVKIDQYNTQHVERIADHYKDILAALGENPNREGLLKTPERVAKALQFLTHGYDIDAAAVLRGAMFEEEYSQMVVVKDIEVYSMCEHHMLPFFGKAHIAYIPNGHIVGLSKIPRVVDIYARRLQVQERLTNEIRDCIQQTLNPAGVAVVIECKHMCMAMRGVQKQNSVTTTSAFTGAFQSDVTRSEFLRLITASLD

SEQ ID NO: 14805 - protein, 210 aa, Sphingobacterium cellulitidis
  misc_feature (1)..(210): tr|A0A235DWR3|A0A235DWR3_9SPHI GTP cyclohydrolase 1 OS= Sphingobacterium cellulitidis OX=1768011 GN=folE PE=3 S V=1
MSKFQQFDDDEQDGYLKIDQYNEKNVERIAEHYKDILQALGEDPNREGLIKTPERVAKALQFLTHGYDVNPAELLRAAMFEEEYSQMVVVKDIEVYSMCEHHMLPFFGKAHIAYIPNGHIVGLSKIPRVVDVFSRRLQVQERLTNEIRDCIQETLKPAGVAVVIECKHMCMAMRGVQKQNSVTTTSAFTGAFQNDVTRSEFLRLITASLD

SEQ ID NO: 14806 - protein, 210 aa, Sphingobacterium daejeonense
  misc_feature (1)..(210): tr|A0A4U9KY82|A0A4U9KY82_9SPHI GTP cyclohydrolase 1 OS= Sphingobacterium daejeonense OX=371142 GN=folE PE=3 SV= 1
MSKFQQFEEEEQDGYLKIDQYNEKNVERIAEHYKDILQALGEDPNREGLIKTPERVAKALQFLTHGYDVDPAAVLRGAMFEEEYSQMVVVKDIEVYSMCEHHMLPFFGKAHIAYIPNGHIVGLSKIPRVVDIFARRLQVQERLTNEIRDCIQDTLKPAGVAVVIECKHMCMAMRGVQKQNSVTTTSAFTGAFQNDVTRSEFLRLITASLD

SEQ ID NO: 14807 - protein, 210 aa, Sphingobacterium deserti
  misc_feature (1)..(210): tr|A0A0B8T121|A0A0B8T121_9SPHI GTP cyclohydrolase 1 OS= Sphingobacterium deserti OX=1229276 GN=folE PE=3 SV=1
MSDLTSFEDEEQDGYIKIDRYNEKRVEKIAAHYPAILESLGENPAREGLVKTPERVAKALQYLTHGYDIDAAKVLRSAMFEEDYSQMVVVKDIEVYSMCEHHMLPFFGKAHIAYIPNGHIVGLSKIPRVVDAFARRLQVQERLTNEIRDCIQDTLKPAGVAVVMECKHMCMAMRGVQKQNSVTTTSAFTGAFQNDVTRSEFLRLITASLD

SEQ ID NO: 14808 - protein, 221 aa, Sphingobacterium detergens
  misc_feature (1)..(221): tr|A0A420BKX4|A0A420BKX4_9SPHI GTP cyclohydrolase 1 OS= Sphingobacterium detergens OX=1145106 GN=folE PE=3 SV=1
MNTLKDKNTSIDDIGDSHVMTSIETPMRSDAFAVSTSEKINRIAKLFYGIMHELGLDLTDDSLSGTPHRVAKMYINELFYGLNPLNKPNLSTFSNKYGYNKILIEKDIQVNSACEHHFLPIVGKAHIGYLAKEKVIGLSKLNRIVDYYAHRPQVQERLTIQIFNELKSILQTDDIIVVIEADHLCVSARGVKDITSSTLTVEHGGIFSTADKRAEFFNLIK

SEQ ID NO: 14809 - protein, 209 aa, Sphingobacterium detergens
  misc_feature (1)..(209): tr|A0A420AMA2|A0A420AMA2_9SPHI GTP cyclohydrolase 1 OS= Sphingobacterium detergens OX=1145106 GN=folE PE=3 SV=1
MSQHSFDNEELDGYIKIDKYNTEKVDRIASHYTDILECLGEDPKREGLVKTPERVAKALQFLTHGYDIDAAEVLRGAMFEEDYSQMVVVKDIEVYSLCEHHMLPFFGKAHIAYIPNGHIVGLSKIPRVVDIFARRLQVQERLTNEIRDCIQETLGARGVAVVMECKHMCMAMRGVQKQNSVTTTSAFTGAFQNDVTRSEFLRLITADLA

SEQ ID NO: 14810 - protein, 220 aa, Sphingobacterium faecium
  misc_feature (1)..(220): tr|A0A2T5YCB2|A0A2T5YCB2_9SPHI GTP cyclohydrolase 1 OS= Sphingobacterium faecium OX=34087 GN=folE PE=3 SV=1
MDKVLETLIVDEIGDSHLMTSIDTPLREDAFEKSDEEKIHCIARYFKGIMEELGLDLTDDSIQGTPYRVAKMYLKEIFHGLDPKNKPKISIFDNKYEYHKMLVEKDISVVSFCEHHFMPIVGKAHVAYVPKDHVIGLSKINRIVTYYCRRPQVQERLTLQIYRELTAVLGTDAVMVVVEAEHMCVSARGVQDVQSKTITMEYGGIFLEKERRDEFLTLIG

SEQ ID NO: 14811 - protein, 209 aa, Sphingobacterium faecium
  misc_feature (1)..(209): tr|A0A2T5Y4S2|A0A2T5Y4S2_9SPHI GTP cyclohydrolase 1 OS= Sphingobacterium faecium OX=34087 GN=folE PE=3 SV=1
MSNHSFEEEELDGYVKIDQYNQDKVDRIAAHYTDILESLGENPNREGLIKTPERVAKALQFLTHGYDIDPAKVLQGAMFEEDYSQMVVVKDIEVYSMCEHHMLPFFGKAHIAYIPNGHIVGLSKIPRVVDIFARRLQVQERLTNEIRDCIQETLGAKGVAVVIECKHMCMAMRGIQKQNSVTTTSAFTGAFQNDVTRSEFLKLITANLT

SEQ ID NO: 14812 - protein, 210 aa, Sphingobacterium gobiense
  misc_feature (1)..(210): tr|A0A2S9JL96|A0A2S9JL96_9SPHI GTP cyclohydrolase 1 OS= Sphingobacterium gobiense OX=1382456 GN=folE PE=3 SV=1
MSNLTAFESEEQDGYIKIDQYNQKQVEEIASYYPAILRAIGENPEREGLVKTPERVAKALQFLTHGNDVDAAEVLRSAMFEEEYSQMVVVKDIEVYSLCEHHMLPFFGKAHIAYIPNGHIVGLSKIPRVVDAFARRLQVQERLTNEIRDCIQETLKPAGVAVVIECKHMCMAMRGVQKQNSVTTTSAFTGAFQNDVTRSEFLRLIMASLD

SEQ ID NO: 14813 - protein, 210 aa, Sphingobacterium haloxyli
  misc_feature (1)..(210): tr|A0A2S9J142|A0A2S9J142_9SPHI GTP cyclohydrolase 1 OS= Sphingobacterium haloxyli OX=2100533 GN=folE PE=3 SV=1
MSNLTAFESEEQDGYIKIDQYNQKQVEEIASYYPAILRALGENPEREGLVKTPERVAKALQFLTHGNDVDAAEVLRSAMFEEEYSQMVVVKDIEVYSLCEHHMLPFFGKAHIAYIPNGHIVGLSKIPRVVDAFARRLQVQERLTNEIRDCIQETLKPAGVAVVIECKHMCMAMRGVQKQNSVTTTSAFTGAFQNDVTRSEFLRLIMASLD

SEQ ID NO: 14814 - protein, 210 aa, Sphingobacterium lactis
  misc_feature (1)..(210): tr|A0A1H5ZSQ7|A0A1H5ZSQ7_9SPHI GTP cyclohydrolase 1 OS= Sphingobacterium lactis OX=797291 GN=folE PE=3 SV=1
MSKIQQFDEAEQEGYLKIDQYNEKAVERIAEHYTDILEAIGEDPTREGLIKTPERVAKALQFLTHGYGVDPAEVLRGAMFQEEYSQMVVVKDIEVYSMCEHHMLPFFGKAHIAYIPNGHIVGLSKIPRVVDIFARRLQVQERLTNEIRDCIQETLNPAGVAVVIECKHMCMAMRGVQKQNSVTTTSAFTGAFQNDVTRSEFLRLITASLG

SEQ ID NO: 14815 - protein, 210 aa, Sphingobacterium mizutaii
  misc_feature (1)..(210): tr|A0A239Z4K7|A0A239Z4K7_9SPHI GTP cyclohydrolase 1 OS= Sphingobacterium mizutaii OX=1010 GN=folE PE=3 SV=1
MSKFQQFEEEEQDGYLKIDQYNEKNVERIAEHYTDILQAIGEDPSREGLIKTPERVAKALQFLTHGYDVDAAELLRGAMFEEEYSQMVVVKDIEVYSMCEHHMLPFFGKAHIAYIPNGHIVGLSKIPRVVDVFARRLQVQERLTNEIRDCIQETLKPAGVAVVIECKHMCMAMRGVQKQNSVTTTSAFTGAFQNDVTRSEFLRLITASLG

SEQ ID NO: 14816 - protein, 272 aa, Sphingobacterium multivorum
  misc_feature (1)..(272): tr|A0A380D9C4|A0A380D9C4_SPHMU GTP cyclohydrolase 1 OS= Sphingobacterium multivorum OX=28454 GN=folE_2 PE=3 SV= 1
MTIKYSEKTLHATKLHLLLFHYIYKNKLTTPNCRSLRISNQRTLTKELFMNTSLKRDISSPIENLGDLHIMTSIDTPMRHDAFTRTDSEKIKKIAQLFQDIMHELGLDLQDDSLSGTPYRVAKMYINELFYGLNPANKPQLSTFENRYGYNKLLVEKNIRVNSACEHHFLPIVGRAHIGYIAKKKVIGLSKINRVVDYYAHRPQVQERLTLQIFNELKSTLETDDIIVLIDADHLCVSARGVKDTTSSTTTMEYSGIFASESQRNDFFNLLK

SEQ ID NO: 14817 - protein, 209 aa, Sphingobacterium multivorum
  misc_feature (1)..(209): tr|A0A2X2J0N3|A0A2X2J0N3_SPHMU GTP cyclohydrolase 1 OS= Sphingobacterium multivorum OX=28454 GN=folE_1 PE=3 SV= 1
MSQHSFDNEELDGYIKIDKYNTEKVDRIAAHYTDILECLGEDPKREGLVKTPERVAKAFQFLTHGYDIDAAEVLRGAMFEEDYSQMVVVKDIEVYSLCEHHMLPFFGKAHIAYIPNGHIVGLSKIPRVVDIFARRLQVQERLTNEIRDCIQETLGARGVAVVMECKHMCMAMRGVQKQNSVTTTSAFTGAFQNDVTRSEFLRLITADLA

SEQ ID NO: 14818 - protein, 209 aa, Sphingobacterium nematocida
  misc_feature (1)..(209): tr|A0A1T5G7H1|A0A1T5G7H1_9SPHI GTP cyclohydrolase 1 OS= Sphingobacterium nematocida OX=1513896 GN=folE PE=3 SV= 1
MSNPTDFNEELDRYKKVERYNVEQVDRIASHYNDILSAIGEDPNREGLIKTPERVAKALQYLTHGYDVDAAEVLRSAMFEEDYSQMVVVKDIEVYSMCEHHMLPFFGKAHIAYIPNGHIVGLSKIPRIVDAFARRLQVQERLTNEIRDCIQETLNPAGVAVVMECKHMCMAMRGVQKQSSVTTTSAFTGEFQNDVTRSEFLRLITASLD

SEQ ID NO: 14819 - protein, 210 aa, Sphingobacterium paludis
  misc_feature (1)..(210): tr|A0A4R7D226|A0A4R7D226_9SPHI GTP cyclohydrolase 1 OS= Sphingobacterium paludis OX=1476465 GN=folE PE=3 SV=1
MSDLTSFEDEEQDGYIKIDRYNEKRVEKIAAHYPAILESLGENPAREGLVKTPERVAKALQFLTHGYDIDAAKVLRSAMFEEDYSQMVVVKDIEVYSMCEHHMLPFFGKAHIAYIPNGHIVGLSKIPRVVDAFARRLQVQERLTNEIRDCIQETLKPAGVAVVMECKHMCMAMRGVQKQNSVTTTSAFTGAFQNDVTRSEFLRLITASLD

SEQ ID NO: 14820 - protein, 209 aa, Sphingobacterium paucimobilis
  misc_feature (1)..(209): tr|U2HSN9|U2HSN9_9SPHI GTP cyclohydrolase 1 OS=Sphingob acterium paucimobilis HER1398 OX=1346330 GN=folE PE=3 S V=1
MSNLTDFNEELEGYKKIDQYNGQQVERIASHYNDILSAIGEDPNREGLIKTPERVAKALQYLTHGYDIDAAEVLRSAMFEEDYSQMVVVKDIEVYSMCEHHMLPFFGKAHIAYIPNGHIVGLSKIPRIVDAFARRLQVQERLTNEIRDCIQDTLNPAGVAVVIECKHMCMAMRGVQKQNSVTTTSAFTGEFQNDVTRSEFLRLITASLA

SEQ ID NO: 14821 - protein, 210 aa, Sphingobacterium psychroaquaticum
  misc_feature (1)..(210): tr|A0A1X7KCW4|A0A1X7KCW4_9SPHI GTP cyclohydrolase 1 OS= Sphingobacterium psychroaquaticum OX=561061 GN=folE PE= 3 SV=1
MSNLTPFDDEEQNGYIKIDQYNSKQVEHIAGHYPDILRAIGEDPTREGLIKTPERVAKALQYLTHGYDVNAAELLRSAMFEEDYSQMVVVKDIEVYSMCEHHMLPFFGKAHIAYIPNGHIVGLSKIPRVVDAFARRLQVQERLTNEIRDCIQETLKPAGVAVVIECKHMCMAMRGVQKQNSVTTTSAFTGAFQNDVTRSEFLRLITASLH

SEQ ID NO: 14822 - protein, 223 aa, Sphingobacterium siyangense
  misc_feature (1)..(223): tr|A0A562M768|A0A562M768_9SPHI GTP cyclohydrolase 1 OS= Sphingobacterium siyangense OX=459529 GN=folE PE=3 SV=1
MNTLLKKDTASNPEDLGDHHMMTSMDTPLRPDAFDRTDEEKISKISQLFKDIMYELGLDLQDDSLSGTPHRVAKMYINELFYGLNPVNKPKLSTFENRYGYNKLLMEKDIRVNSACEHHFLPIVGRAHIGYIPKDRVIGLSKINRIVDYYAHRPQVQERLTLQIYNELRSTLATDDIIVVIDADHLCVSARGVKDTSSCTTTLEYSGIFLSESKRNEFFNLLK

SEQ ID NO: 14823 - protein, 209 aa, Sphingobacterium siyangense
  misc_feature (1)..(209): tr|A0A420FH61|A0A420FH61_9SPHI GTP cyclohydrolase 1 OS= Sphingobacterium siyangense OX=459529 GN=folE PE=3 SV=1
MSQHSFDNEELDGYIKIDKYNTEKVDRIAAHYTDILECLGEDPKREGLVKTPERVAKALQFLTHGYDIDAAEVLRGAMFEEDYSQMVVVKDIEVYSLCEHHMLPFFGKAHIAYIPNGHIVGLSKIPRVVDIFARRLQVQERLTNEIRDCIQETLGARGVAVVMECKHMCMAMRGVQKQNSVTTTSAFTGAFQNDVTRSEFLRLITADLA

SEQ ID NO: 14824 - protein, 210 aa, Sphingobacterium sp.
  misc_feature (1)..(210): tr|A0A4P7DS58|A0A4P7DS58_9SPHI GTP cyclohydrolase 1 OS= Sphingobacterium sp. CZ-2 OX=2557994 GN=folE PE=3 SV=1
MSKFQQFEEAEQDGYLKIDQYNEKNVERIAAHYVDILEAIGENPKREGLEKTPERVAKALQFLTHGYDVDPAEVLRGAMFQEEYSQMVVVKDIEVYSMCEHHMLPFFGKAHIAYIPNGHIVGLSKIPRVVDIFARRLQVQERLTNEIRDCIQETLNPAGVAVVIECKHMCMAMRGVQKQNSVTTTSAFTGAFQNDVTRSEFIRLITASLD

SEQ ID NO: 14825 - protein, 209 aa, Sphingobacterium sp.
  misc_feature (1)..(209): tr|A0A088ESH0|A0A088ESH0_9SPHI GTP cyclohydrolase 1 OS= Sphingobacterium sp. ML3W OX=1538644 GN=folE PE=3 SV=1
MSNHSFEEEELDGYVKIDQYNQEKVDRIAAHYTDILESLGEDPNREGLLKTPERVAKALQFLTHGNNIDPAKILQGAMFEEDYSQMVVVKDIEVYSMCEHHMLPFFGKAHIAYIPNGHIVGLSKIPRVVDIFARRLQVQERLTNEIRDCIQETLGAKGVAVVIECKHMCMAMRGIQKQNSVTTTSAFTGAFQNDVTRSEFLKLITANLM

SEQ ID NO: 14826 - protein, 210 aa, Sphingobacterium spiritivorum
  misc_feature (1)..(210): tr|D7VIY9|D7VIY9_9SPHI GTP cyclohydrolase 1 OS=Sphingob acterium spiritivorum ATCC 33861 OX=525373 GN=folE PE=3 SV=1
MSNPSSLDHEEMDGYVKIDKYNPLHVDRIATHYTDILQALGEDPAREGLLKTPERVAKALKFLTHGYDLDPAAVLKGAMFEEDYSQMVVVKDIEVYSLCEHHMLPFFGKAHVAYIPNGHIVGLSKIPRVVDIFARRLQVQERLTNEIRDCIQETLGAQGVAVVMECKHMCMAMRGVQKQNSVTTTSAFTGAFQNDVTRSEFLRLITASLV

SEQ ID NO: 14827 - protein, 210 aa, Sphingobacterium spiritivorum
  misc_feature (1)..(210): tr|A0A380CBH8|A0A380CBH8_9SPHI GTP cyclohydrolase 1 OS= Sphingobacterium spiritivorum OX=258 GN=folE PE=3 SV=1
MSNPSSLDHEEMDGYVKIDKYNPLHVDRIATHYTDILQALGEDPAREGLLKTPERVAKALKYLTHGYDLDPAAVLKGAMFEEDYSQMVVVKDIEVYSLCEHHMLPFFGKAHVAYIPNGHIVGLSKIPRVVDIFARRLQVQERLTNEIRDCIQETLGAQGVAVVMECKHMCMAMRGVQKQNSVTTTSAFTGAFQNDVTRSEFLRLITASLV

SEQ ID NO: 14828 - protein, 209 aa, Sphingobacterium thalpophilum
  misc_feature (1)..(209): tr|A0A4U9USL7|A0A4U9USL7_9SPHI GTP cyclohydrolase 1 OS= Sphingobacterium thalpophilum OX=259 GN=folE PE=3 SV=1
MSQHSFESEELDGYIKIDKYNTEKVDRIASHYTDILESLGEDPKREGLLKTPERVAKALQFLTHGYDIDAAEVLRGAMFEEDYSQMVVVKDIEVYSLCEHHMLPFFGKAHIAYIPNGHIVGLSKIPRVVDIFARRLQVQERLTNEIRDCIQETLGARGVAVVMECKHMCMAMRGVQKQNSVTTTSAFTGAFQNDVTRSEFLRLITADLA

SEQ ID NO: 14829 - protein, 210 aa, Sphingobacterium wenxiniae
  misc_feature (1)..(210): tr|A0A1I6SEM4|A0A1I6SEM4_9SPHI GTP cyclohydrolase 1 OS= Sphingobacterium wenxiniae OX=683125 GN=folE PE=3 SV=1
MSNLTDFDSEEQDGYIKIDQYNTKHVDRIATYYKDILEAIGEDPKREGLIKTPERVAKALQFLTHGYDIDAAQVLRSAMFEEDYSQMVVVKDIEVYSMCEHHMLPFFGKAHIAYIPNGHIVGLSKIPRVVDVFARRLQVQERLTNEIRDCIQDTLNPAGVAVVMECKHMCMAMRGVQKQNSVTTTSAFTGAFQNDVTRSEFLRLITASLD

SEQ ID NO: 14830 - protein, 209 aa, Sphingobacterium yanglingense
  misc_feature (1)..(209): tr|A0A4R6WK62|A0A4R6WK62_9SPHI GTP cyclohydrolase 1 OS= Sphingobacterium yanglingense OX=1437280 GN=folE PE=3 S V=1
MSNPTDFNEELEGYKKIDQYNVQQVERIASHYNDILSAIGEDPSREGLIKTPERVAKALQYLTHGYDVDAAEVLRSAMFEEDYSQMVVVKDIEVYSMCEHHMLPFFGKAHIAYIPNGHIVGLSKIPRIVDAFARRLQVQERLTNEIRDCIQDTLKPAGVAVVIECKHMCMAMRGVQKQNSVTTTSAFTGEFQNDVTRSEFLRLITASLA

SEQ ID NO: 14831 - protein, 201 aa, Sphingobium algicola
  misc_feature (1)..(201): tr|A0A5J5HIX6|A0A5J5HIX6_9SPHN GTP cyclohydrolase I Fol E OS=Sphingobium algicola OX=2048546 GN=folE PE=4 SV=1
MACDLETETIGDGKEPVPADVSEAIRTLIRWSGDSPEREGLVETPERVARAWREYCRGYADDPAYHLSRIFHEVGGYDDVVLLKDIPFQSHCEHHMAPIVGKAHIAYLPGDYVVGISKLARVLHAYANRLQVQERLTSEVANCIWEHLKPQGVAVVIEATHGCMTGRGVRTPNVIMKTSRMLGVFRDDEKSREEVLKLIAS

SEQ ID NO: 14832 - protein, 193 aa, Sphingobium algorifonticola
  misc_feature (1)..(193): tr|A0A437JED3|A0A437JED3_9SPHN GTP cyclohydrolase 1 OS= Sphingobium algorifonticola OX=2008318 GN=folE PE=3 SV= 1
MARPKKIDVPDDVQDAIRTLIRWSGDDPAREGLIDTPKRVARAWREYCEGYQDDPAYHLSRIFHEVGGYDEIVLLKDIPFQSHCEHHMAPIVGKAHIAYLPDQWVVGISKLARVLNAFSRRLQVQERMTAEIADCIWDNLKPLGVAVVIEGAHGCMSGRGVRTHGVSMKTSRMMGVFRDDEKSRKEVLKLMGV

SEQ ID NO: 14833 - protein, 201 aa, Sphingobium amiense
  misc_feature (1)..(201): tr|A0A494W9M4|A0A494W9M4_9SPHN GTP cyclohydrolase 1 OS= Sphingobium amiense OX=135719 GN=folE PE=3 SV=1
MACDADAETVGEGKEPVPAEVSEAIRTLIRWAGDAPEREGLFETPERVARAWREYCRGYADDPAYHLSRIFHEVGGYDDVVLLKDIPFQSHCEHHMAPIVGKAHIAYLPGEYVVGISKLARVLHAFANRLQVQERLTSEVANCIWEHLKPQGVAVVIEATHGCMTGRGVRTPNVIMKTSRMLGVFRDDEKSREEVLKLIAS

SEQ ID NO: 14834 - protein, 202 aa, Sphingobium baderi
  misc_feature (1)..(202): tr|T0HGP8|T0HGP8_9SPHN GTP cyclohydrolase 1 OS=Sphingob ium baderi LL03 OX=1114964 GN=folE PE=3 SV=1
MIYDPDAETVGESSKEPVPAEVSDAIRALIRWSGDDPAREGLLETPERVARAWREYCRGYGDDPAYHLSRIFHEVGGYDDVVLLKDIPFQSHCEHHMAPIIGRAHIAYLPGDYVVGISKLARVLHAFAHRLQVQERLTSQVANCIWENLKPQGVAVVIEATHGCMTGRGVRTPNVIMKTSRMLGIFREDEKSREEVLKLIES

SEQ ID NO: 14835 - protein, 202 aa, Sphingobium baderi
  misc_feature (1)..(202): tr|A0A0S3F4I4|A0A0S3F4I4_9SPHN GTP cyclohydrolase 1 OS= Sphingobium baderi OX=1332080 GN=folE PE=3 SV=1
MIYDPDAESVGESSKEPVPTEVSDAIRTLIRWSGDNPEREGLIETPERVARAWREYCRGYGDDPAYHLSRIFHEVGGYDDVVLLKDIPFQSHCEHHMAPIIGRAHIAYLPGDYVVGISKLARVLHAFAHRLQVQERLTSEVANCIWENLKPQGVAVVIEATHGCMTGRGVRTPNVIMKTSRMLGVFRDDEKSREEVLKLIGS

SEQ ID NO: 14836 - protein, 202 aa, Sphingobium barthaii
  misc_feature (1)..(202): tr|A0A4R6FQS7|A0A4R6FQS7_9SPHN GTP cyclohydrolase 1 OS= Sphingobium barthaii OX=1054037 GN=folE PE=3 SV=1
MEYDPDAETAGESVKIPVPANVADAIRTLIRWSGDDPEREGLIETPERVARAWKEYCRGYEDDPAYHLSRIFHEVGGYDDVVLLKDIPFQSHCEHHMAPIVGVAHIAYLPGQYVVGISKLARVLHAFAHRLQVQERLTSEVANCIWKNLKPQGVAVVVEATHGCMTGRGVRTPNVVMKTSRMLGVFRDDEKSREEVLKLIAS

SEQ ID NO: 14837 - protein, 202 aa, Sphingobium chinhatense
  misc_feature (1)..(202): tr|W1KT80|W1KT80_9SPHN GTP cyclohydrolase 1 OS=Sphingob ium chinhatense IP26 OX=1346790 GN=folE PE=3 SV=1
MEYDPDAETAGESIKIPVPADVAEAIRTLIRWSGDDPEREGLVETPERVARAWKEYCRGYDDDPAYHLSRIFHEVGGYDDIVLLKDIPFQSHCEHHMAPIVGVAHIAYLPGQYVVGISKLARVLHAFAHRLQVQERLTSEVANCIWEHLRPQGVAVVVEATHGCMTGRGVRTPNVVMKTSRMLGVFRDDEKSREEVLKLIAS

SEQ ID NO: 14838 - protein, 202 aa, Sphingobium chlorophenolicum
  misc_feature (1)..(202): tr|A0A081RJK4|A0A081RJK4_SPHCR GTP cyclohydrolase 1 OS= Sphingobium chlorophenolicum OX=46429 GN=folE PE=3 SV=1
MEYDPDAEAAGESVKIPVPADVADAIRTLIRWSGDDAGREGLLETPERVARAWKEYCRGYGDDPAYHLSRIFHEVGGYDDIVLLKDIPFQSHCEHHMAPIVGVAHIAYLPGQYVVGISKLARVLHAFAHRLQVQERLTSEVANCIWEHLKPEGVAVVIEATHGCMTGRGVRTPNVVMKTSRMLGVFRDDVKSREEVLKLIGA

SEQ ID NO: 14839 - protein, 202 aa, Sphingobium chlorophenolicum
  misc_feature (1)..(202): tr|F6EUP9|F6EUP9_SPHCR GTP cyclohydrolase 1 OS=Sphingob ium chlorophenolicum L-1 OX=690566 GN=folE PE=3 SV=1
MEYDPDAEAAGESVKIPVPADVADAIRTLIRWSGDDTGREGLLETPERVARAWKEYCRGYGDDPAYHLSRIFQEVGGYDDIVLLKDIPFQSHCEHHMAPIVGVAHIAYLPGQYVVGISKLARVLHAFAHRLQVQERLTSEVANCIWEHLKPEGVAVVIEATHGCMTGRGVRTPNVVMKTSRMLGVFRDDVKSREEVLKLIGA

SEQ ID NO: 14840 - protein, 202 aa, Sphingobium chungbukense
  misc_feature (1)..(202): tr|A0A0M3AKT9|A0A0M3AKT9_9SPHN GTP cyclohydrolase 1 OS= Sphingobium chungbukense OX=56193 GN=folE PE=3 SV=1
MEYDPDAEAAGESVKIPVPQDVSEAIRTLIRWSGDTPGREGLLETPERVARAWKEYCRGYEDDPAYHLSRIFHEVGGYDDIVLLKDIPFQSHCEHHMAPIVGVAHIAYLPGEYVVGISKLARVLHAFAHRLQVQERLTSEVANCIWENLKPQGVAVVIEATHGCMTGRGVRTPNVVMKTSRMLGVFREDEKSREEVLKLIGS

SEQ ID NO: 14841 - protein, 202 aa, Sphingobium cloacae
  misc_feature (1)..(202): tr|A0A1E1F192|A0A1E1F192_9SPHN GTP cyclohydrolase 1 OS= Sphingobium cloacae OX=120107 GN=folE PE=3 SV=1
MIYDPDAETVRESVKESVPAEVADAIRTLIKWSGDDPRREGLMETPERVARAWREYCRGYGDDPAYHLSRIFHEVGGYDDVVLLKDIPFQSHCEHHMAPIVGHAHIAYLPGDYVVGISKLARVLHAFAHRLQVQERLTSQVANCIWEHLKPQGVAVVVEATHGCMTGRGVRTPDVIMKTSRMLGVFRDDVKSREEVLKLIES

SEQ ID NO: 14842 - protein, 201 aa, Sphingobium cupriresistens
  misc_feature (1)..(201): tr|A0A4Q4JTX9|A0A4Q4JTX9_9SPHN GTP cyclohydrolase 1 OS= Sphingobium cupriresistens OX=1132417 GN=folE PE=3 SV=1
MACELETETVGDGKEPVPAEVSEAIRTLIRWSGDAPEREGLVETPERVARAWREYCRGYGDDPAYHLSRIFHEVGGYDDVVLLKGIPFQSHCEHHMAPIVGQAHIAYLPGDYVVGISKLARVLHAFANRLQVQERLTSEVANCIWDHLKPQGVAVVIEATHGCMTGRGVRTPGVIMKTSRMLGVFRDDEKSREEVLKLIAS

SEQ ID NO: 14843 - protein, 201 aa, Sphingobium czechense; identical to SEQ ID NO: 14842
  misc_feature (1)..(201): tr|A0A0J7Y124|A0A0J7Y124_9SPHN GTP cyclohydrolase 1 OS= Sphingobium czechense LL01 OX=1420583 GN=folE PE=3 SV=1

SEQ ID NO: 14844 - protein, 202 aa, Sphingobium faniae
  misc_feature (1)..(202): tr|A0A1G4QN20|A0A1G4QN20_9SPHN GTP cyclohydrolase 1 OS= Sphingobium faniae OX=570446 GN=folE PE=3 SV=1
MDYDPDAETVGESVKEPVPAEVSEAIRTLIRWSGDDPRREGLMETPERVARAWREYCRGYGDDPAYHLSRIFHEVGGYDDVVLLKDIPFQSHCEHHMAPIVGRAHIAYLPGDYVVGISKLARVLHAFAHRLQVQERLTSEVANCIWENLKPQGVAVVIEATHGCMTGRGVRTPDVLMKTSRMLGVFRDDEKSREEVLKLIAS

SEQ ID NO: 14845 - protein, 202 aa, Sphingobium francense
  misc_feature (1)..(202): tr|A0A4Q4JB60|A0A4Q4JB60_9SPHN GTP cyclohydrolase 1 OS= Sphingobium francense OX=332057 GN=folE PE=3 SV=1
MEYDPDAETAGESIKIPVPADVAEAIRTLIRWSGDDPEREGLVETPERVARAWKEYCRGYDDDPAYHLSRIFHEVGGYDDIVLLKDIPFQSHCEHHMAPIVGVVHIAYLPGQYVVGISKLARVLHAFAHRLQVQERLTSEVANCIWEHLRPQGVAVVVEATHGCMTGRGVRTPNVVMKTSRMLGVFRDDEKSREEVLKLIAS

SEQ ID NO: 14846 - protein, 202 aa, Sphingobium fuliginis
  misc_feature (1)..(202): tr|A0A5B8CFC7|A0A5B8CFC7_SPHSA GTP cyclohydrolase 1 OS= Sphingobium fuliginis ATCC 27551 OX=1208342 GN=folE PE= 3 SV=1
MEYDPDAETAGESIKIPVPADVADAIRTLIRWSGDDPEREGLVETPQRVARAWKEYCRGYDDDPAYHLSRIFHEVGGYDDIVLLKDIPFQSHCEHHMAPIVGVAHIAYLPGQYVVGISKLARVLHAFAHRLQVQERLTSEVANCIWEHLKPQGVAVVVEATHGCMTGRGVRTPNVVMKTSRMLGVFRDDEKSREEVLKLIGS

SEQ ID NO: 14847 - protein, 202 aa, Sphingobium fuliginis; identical to SEQ ID NO: 14846
  misc_feature (1)..(202): tr|A0A292ZE29|A0A292ZE29_SPHSA GTP cyclohydrolase 1 OS= Sphingobium fuliginis (strain ATCC 27551) OX=336203 GN= folE PE=3 SV=1

SEQ ID NO: 14848 - protein, 202 aa, Sphingobium herbicidovorans
  misc_feature (1)..(202): tr|A0A086P8M7|A0A086P8M7_SPHHM GTP cyclohydrolase 1 OS= Sphingobium herbicidovorans (strain ATCC 700291 / DSM 1 1019 / NBRC 16415 / MH) OX=1219045 GN=folE PE=3 SV=1
MDYDPDAEAVGEAVKEAVPADVSEAIRTLIRWSGDNPEREGLLETPERVARAWREYCRGYTDDPAYHLSRIFHEVGGYDDIVLLKDIPFQSHCEHHMAPIIGRAHIAYLPGKYVVGISKLARVLHAFSNRLQVQERLTAEVANCIWQHLNPQGVAVVIEATHGCMTGRGVRTPNVLMKTSRMLGVFRDDEKSREEVLKLIGS

SEQ ID NO: 14849 - protein, 201 aa, Sphingobium hydrophobicum
  misc_feature (1)..(201): tr|A0A249MWL1|A0A249MWL1_9SPHN GTP cyclohydrolase 1 OS= Sphingobium hydrophobicum OX=1673076 GN=folE PE=3 SV=1
MACDPDAEMVGEGKEPVPAEVSEAIRTLIRWSGDAPEREGLIETPERVARAWREYCRGYHDDPAYHLSRIFHEVGGYDDVVLLKDIPFQSHCEHHMAPIVGKAHIAYLPGDYVVGISKLARVLHAFANRLQVQERLTSEVANCIWEHLKPQGVAVVIEATHGCMTGRGVRTPNVIMKTSRMLGVFRDDEKSREEVLKLISS

SEQ ID NO: 14850 - protein, 205 aa, Sphingobium hydrophobicum
  misc_feature (1)..(205): tr|A0A249MS93|A0A249MS93_9SPHN GTP cyclohydrolase 1 OS= Sphingobium hydrophobicum OX=1673076 GN=folE PE=3 SV=1
MNFIPTGLGGYAFDDDGRPIVPEAVQDAVRTLIRWAGDDPDREGLRDTPARVGRAWRDYCTGYEEDPGRHLARTFEEVGGYDEIVLLKDIPFQSHCEHHMAPITGKASIAYLPRNRVVGISKLARVLHGFARRLQVQERLTAEVAQSIQDHLQPHGVAVVIEAQHGCMTGRGVRTPGVAMVTSRLLGCFLDDRASRRELLALMGY

SEQ ID NO: 14851 - protein, 202 aa, Sphingobium indicum; identical to SEQ ID NO: 14845
  misc_feature (1)..(202): tr|A0A1L5BLW3|A0A1L5BLW3_SPHIB GTP cyclohydrolase 1 OS= Sphingobium indicum (strain DSM 16412 / CCM 7286 / MTCC 6364 / B90A) OX=861109 GN=folE PE=3 SV=1

SEQ ID NO: 14852 - protein, 202 aa, Sphingobium japonicum; identical to SEQ ID NO: 14837
  misc_feature (1)..(202): tr|D4Z2S7|D4Z2S7_SPHJU GTP cyclohydrolase 1 OS=Sphingob ium japonicum (strain DSM 16413 / CCM 7287 / MTCC 6362 / UT26 / NBRC 101211 / UT26S) OX=452662 GN=folE PE=3 SV =1

SEQ ID NO: 14853 - protein, 217 aa, Sphingobium japonicum
  misc_feature (1)..(217): tr|N1MIF7|N1MIF7_9SPHN GTP cyclohydrolase 1 OS=Sphingob ium japonicum BiD32 OX=1301087 GN=folE PE=3 SV=1
MDLCEGGLAADVNYSGTASLCGSRSRPNDADIERAVSILISATGDDPMREGLVGTPERVARAWREWFGGYAIDPATLLTRTFGEALEYQDTIMLRAIPLTSTCEHHLAPITGFAHVAYRPASRVVGISKLSRLVDAFARRLQLQERLTRQIGQTLEDVLKPRGVAVVIEASHGCMSGRGVRQHGVSMVTHCWLGEFNDDQQLRRDLLAALPLGGTGR

SEQ ID NO: 14854 - protein, 201 aa, Sphingobium lactosutens
  misc_feature (1)..(201): tr|T0HSW3|T0HSW3_9SPHN GTP cyclohydrolase 1 OS=Sphingob ium lactosutens DS20 OX=1331060 GN=folE PE=3 SV=1
MACDIDAETVGAGKEPVPAEVSEAIRTLIRWAGDAPEREGLVETPERVARAWREYCRGYGDDPAYHLSRIFHEVGGYDDIVLLKDIPFQSHCEHHMAPIVGKAHIAYLPGDYVVGISKLARVLHAYANRLQVQERLTSEVANCIQEHLKPQGVAVVIEATHGCMTGRGVRTPNVIMKTSRMLGVFRDDEKSREEVLKLIGA

SEQ ID NO: 14855 - protein, 201 aa, Sphingobium limneticum; identical to SEQ ID NO: 14831
  misc_feature (1)..(201): tr|A0A5J5GZD7|A0A5J5GZD7_9SPHN GTP cyclohydrolase I Fol E OS=Sphingobium limneticum OX=1007511 GN=folE PE=4 SV= 1

SEQ ID NO: 14856 - protein, 202 aa, Sphingobium lucknowense; identical to SEQ ID NO: 14837
  misc_feature (1)..(202): tr|A0A081T3H2|A0A081T3H2_9SPHN GTP cyclohydrolase 1 OS= Sphingobium lucknowense F2 OX=1450518 GN=folE PE=3 SV=1

SEQ ID NO: 14857 - protein, 201 aa, Sphingobium paulinellae; identical to SEQ ID NO: 14831
  misc_feature (1)..(201): tr|A0A5J5I9N1|A0A5J5I9N1_9SPHN GTP cyclohydrolase I Fol E OS=Sphingobium paulinellae OX=2048545 GN=folE PE=4 SV =1

SEQ ID NO: 14858 - protein, 202 aa, Sphingobium quisquiliarum
  misc_feature (1)..(202): tr|T0H837|T0H837_9SPHN GTP cyclohydrolase 1 OS=Sphingob ium quisquiliarum P25 OX=1329909 GN=folE PE=3 SV=1
MDYDPDAEAVGEAIKEPVPADVAEAIRTLIRWSGDQPDREGLLETPERVARAWREYCRGYNDDPAYHLSRIFHEVGGYDDVVLLKDIPFQSHCEHHMAPIIGRAHIAYLPGKYVVGISKLARVLHAFANRLQVQERLTSEVANCIWEHLKPQGVAVVIEATHGCMTGRGVRTPNVLMKTSRMLGVFRDDEKSREEVLKLISA

SEQ ID NO: 14859 - protein, 201 aa, Sphingobium sp.
  misc_feature (1)..(201): tr|A0A2A3MTA6|A0A2A3MTA6_9SPHN GTP cyclohydrolase 1 OS= Sphingobium sp. D43FB OX=2017595 GN=folE PE=3 SV=1
MACDPDAETVGNGKEPVPSEVADAIRTLIRWSGDMPEREGLVETPERVARAWREYCRGYGDDPAYHLSRIFHEVGGYDDVVLLKDIPFQSHCEHHMAPIVGKAHIAYLPGDYVVGISKLARVLHAFANRLQVQERLTSEVANCIWEHLKPQGVAVVIEATHGCMTGRGVRTPGVIMKTSRMLGVFRDDEKSREEVLKLIGS

SEQ ID NO: 14860 - protein, 202 aa, Sphingobium sp.; identical to SEQ ID NO: 14846
  misc_feature (1)..(202): tr|A0A197C186|A0A197C186_9SPHN GTP cyclohydrolase 1 OS= Sphingobium sp. 20006FA OX=2056888 GN=folE PE=3 SV=1

SEQ ID NO: 14861 - protein, 202 aa, Sphingobium ummariense
  misc_feature (1)..(202): tr|T0J3E7|T0J3E7_9SPHN GTP cyclohydrolase 1 OS=Sphingob ium ummariense RL-3 OX=1346791 GN=folE PE=3 SV=1
MDYDPDAEVVGESSKEPVPAEIAEAIRTLIRWSGDDPLREGLLETPERVARAWREYCRGYADDPAYHLSRIFHEVGGYDDVVLLKDIPFQSHCEHHMAPIVGKAHIAYLPGDYVVGISKLARVLHAFANRLQVQERLTSEVANCIWDHLKPQGVAVVIEATHGCMTGRGVRTPNVIMKTSRMLGVFRDDEKSREEVLKLISA

SEQ ID NO: 14862 - protein, 202 aa, Sphingobium wenxiniae; identical to SEQ ID NO: 14834
  misc_feature (1)..(202): tr|A0A562KKZ5|A0A562KKZ5_SPHWJ GTP cyclohydrolase 1 OS= Sphingobium wenxiniae (strain DSM 21828 / JZ-1) OX=5956 05 GN=folE PE=3 SV=1

SEQ ID NO: 14863 - protein, 205 aa, Sphingobium xenophagum
  misc_feature (1)..(205): tr|A0A401IXI0|A0A401IXI0_SPHXE GTP cyclohydrolase 1 OS= Sphingobium xenophagum OX=121428 GN=folE PE=3 SV=1
MNFIPTGLGGYAFDDDGRPIVPEAVQDAVRTLIRWAGDDPDREGLRDTPARVGRAWRDYCTGYEEDPGRHLSRTFEEVGGYDEIVLLKDIPFQSHCEHHMAPITGKASIAYLPRNRVVGISKLARVLHGFARRLQVQERLTAEVAQSIQDHLQPHGVAVVIEAQHGCMTGRGVRTPGVAMVTSRLLGCFLDDRASRRELLALMGY

SEQ ID NO: 14864 - protein, 201 aa, Sphingobium xenophagum; identical to SEQ ID NO: 14849
  misc_feature (1)..(201): tr|A0A401IZM3|A0A401IZM3_SPHXE GTP cyclohydrolase 1 OS= Sphingobium xenophagum OX=121428 GN=folE PE=3 SV=1

SEQ ID NO: 14865 - protein, 202 aa, Sphingobium yanoikuyae
  misc_feature (1)..(202): tr|K9D5I4|K9D5I4_SPHYA GTP cyclohydrolase 1 OS=Sphingob ium yanoikuyae ATCC 51230 OX=883163 GN=folE PE=3 SV=1
MAYDPDAETVGEGSKEPVPAEVSEAIRTLIRWSGDMPEREGLVETPERVARAWREYCRGYNDDPAYHLSRIFHEVGGYDDVVLLKDIPFQSHCEHHMAPIVGRAHIAYLPGDYVVGISKLARVLHAYANRLQVQERLTSEVANCIWENLKPQGVAVVIEATHGCMTGRGVRTPNVIMKTSRMLGVFRDDEKSREEVLKLIAS

SEQ ID NO: 14866 - protein, 200 aa, Sphingobium yanoikuyae
  misc_feature (1)..(200): tr|A0A291N7W9|A0A291N7W9_SPHYA GTP cyclohydrolase 1 OS= Sphingobium yanoikuyae OX=13690 GN=folE PE=3 SV=1
MDEDSSKSGPEPLSAPQEVHDAIRTLLRWTGDDPDREGLRDTPARVTRAWKEYCNGYEIDPATYLSRTFDEVGGYDEIVLLRDIPFQSHCEHHLAPITGTASIAYLPKDRVVGISKLARVLNGYARRLQVQERLTAQIADCIWNNLKPHGVAVIIKASHGCMTGRGVRTHGVTMTTSKMLGCFRDDPTSRREIMTLMQSQ

SEQ ID NO: 14867 - protein, 203 aa, Sphingomonadaceae bacterium
  misc_feature (1)..(203): tr|A0A2D4Y1J3|A0A2D4Y1J3_9SPHN GTP cyclohydrolase 1 OS= Sphingomonadaceae bacterium OX=1930536 GN=folE PE=3 SV= 1
  misc_feature (20)..(20): Xaa can be any naturally occurring amino acid
  misc_feature (40)..(40): Xaa can be any naturally occurring amino acid
  misc_feature (56)..(56): Xaa can be any naturally occurring amino acid
MSSLVGPDEDDPRAKPPVPXHVQDAIRTLIEWTGDDPSRXGLLDTPKRVARAWKEXCVGYEEDPAQHLGRVFEEVGGYNEIVLLKDIPFQSHCEHHMAPIIGKAAIAYLPNDRVVGISKLARVLHGFARRLQVQERLTAEVADCIWDNLQPQGVAVVIDAQHSCMTARGVRTPGVGMVTSRMMGTFLDDHRSREEVLKLMGYG

SEQ ID NO: 14868 - protein, 203 aa, Sphingomonadaceae bacterium
  misc_feature (1)..(203): tr|A0A2D8FG19|A0A2D8FG19_9SPHN GTP cyclohydrolase 1 OS= Sphingomonadaceae bacterium OX=1930536 GN=folE PE=3 SV= 1
  misc_feature (125)..(125): Xaa can be any naturally occurring amino acid
MSSLVGPDEDDPRGKLPVPEHVQDAIRTLIEWTGDDPAREGLLDTPKRVARAWKEYCIGYTEDPAVHLDRVFEEVGGYNEIVLLKDIPFQSHCEHHMAPIIGKAAIAYLPHDRVVGISKLARVLXGFARRLQVQERLTAEVADCIWENLQPQGVAVVIEASHACMTARGVRTPGVGMVTSRMMGTFLDDHRSREEVLKLMGYG

SEQ ID NO: 14869 - protein, 201 aa, Sphingomonadales bacterium
  misc_feature (1)..(201): tr|A0A258EB76|A0A258EB76_9SPHN GTP cyclohydrolase 1 OS= Sphingomonadales bacterium 32-67-7 OX=1970595 GN=folE P E=3 SV=1
MNLGGPDEDDPRGRPAVPENVREAVRTLIRWAGDNPEREGLRDTPDRVARAWKEYCQGYDEDPAIHLGRVFEEVGGYDEIVLLKDIPFQSHCEHHMAPIHGKAAIAYLPTSRVVGISKLARVLHGFARRLQIQERLTTEVAQCIWDNLQPKGVAVVIEASHACMTARGVRTPGVNMVTSQVMGTFRRDEKSRQEVLKLMGY

SEQ ID NO: 14870 - protein, 206 aa, Sphingomonadales bacterium
  misc_feature (1)..(206): tr|A0A5C7JQA6|A0A5C7JQA6_9SPHN GTP cyclohydrolase 1 OS= Sphingomonadales bacterium OX=1978525 GN=folE PE=3 SV=1
MDAICDPKTLAAYGDTPAAPRPTRQEAEAAVRTLIRWAGDNPEREGLVDTPRRVTKAYEEFFAGYDEDPVAILSRTFEEVEGYDDIVMLRDIALESHCEHHMVPILGKAHLAYLPDRRVVGISKLARTVEVFAKRLQTQETMTAQIARAIEEALQPRGVAILIDAKHQCMTMRGVHKPDVSTITTRFTGVFREERFERRFLELIRG

SEQ ID NO: 14871 - protein, 212 aa, Sphingomonas adhaesiva
  misc_feature (1)..(212): tr|A0A2A4IBG5|A0A2A4IBG5_9SPHN GTP cyclohydrolase 1 OS= Sphingomonas adhaesiva OX=28212 GN=folE PE=3 SV=1
MADDHAHTPHGDPADGDLVGGDGKLPVPDDVAAAVRTLIRWAGDDPTREGLIDTPKRVARAWREYCAGYGDDPSQHLSRVFEEVGGYDEIVLLKDIPFQSHCEHHMAPIIGKAHIAYLPRDHVVGISKLARVLHAYARRLQVQERLTAEVADCIWNGLKPQGVAVVIEASHACMTARGVRTPGVGMVTSRMMGVFRDDERSRKEVLSLMGMG

SEQ ID NO: 14872 - protein, 208 aa, Sphingomonas aerolata
  misc_feature (1)..(208): tr|A0A2T4YR52|A0A2T4YR52_9SPHN GTP cyclohydrolase 1 OS= Sphingomonas aerolata OX=185951 GN=folE PE=3 SV=1
MIAETPFADAEPAVGPDGKLIVPQEVEAAIRTLIRWTGDDPTREGLVDTPRRVARAWKEYCAGYGDDPARHLERVFEEVGGYDEIVLLKDIPFQSHCEHHMAPIIGKAHIAYLPRNHVVGISKLARVLHGFARRLQVQERLTAEVADCIWEQLQPQGVAVVIEATHACMAARGVRTPGVTMVTSRMMGVFREDERSRKEVLSLMGARA

SEQ ID NO: 14873 - protein, 208 aa, Sphingomonas aquatilis
  misc_feature (1)..(208): tr|A0A511PZT5|A0A511PZT5_9SPHN GTP cyclohydrolase 1 OS= Sphingomonas aquatilis NBRC 16722 OX=1219039 GN=folE PE =3 SV=1
MSHDHAAPDDGDLVGSAAEAAIPQDVAEAIRTLIRWAGDDPTREGLVDTPRRVAKAWREYCAGYGDDPAHHLSRVFEEVGGYDEIVLLKDIPFQSHCEHHMAPIIGKAHIAYLPKDHVVGISKLARVLHGFARRLQVQERLTAEVADCIWQNLRPQGVAVVIEASHACMTARGVRTPGVSMVTSRMMGVFRDDERSRKEVLSLMGLRS

SEQ ID NO: 14874 - protein, 212 aa, Sphingomonas aurantiaca
  misc_feature (1)..(212): tr|A0A2T5GJP5|A0A2T5GJP5_9SPHN GTP cyclohydrolase 1 OS= Sphingomonas aurantiaca OX=185949 GN=folE PE=3 SV=1
MRDETGGAEDWSAVANQVGPDGKPIVPEDVASAIRTLIRWAGDDPTREGLLDTPRRVARAWKEYCAGYGDDPARHLERVFEEVGGYDEIVLLKDIPFQSHCEHHMAPIIGKAHIAYLPKNHVVGISKLARVLHGFARRLQVQERLTAEVADCIWDNLKPQGVAVVIEATHACMAARGVRTPGVTMVTSRMMGVFRDDERSRKEVLSLMGARA

SEQ ID NO: 14875 - protein, 207 aa, Sphingomonas bacterium
  misc_feature (1)..(207): tr|A0A3D0WBR1|A0A3D0WBR1_9SPHN GTP cyclohydrolase 1 OS= Sphingomonas bacterium OX=1895847 GN=folE PE=3 SV=1
MIHEHDDAEDGDLVAGPPEVEVPDHVAEAIRTLIHWAGDDPTREGLVDTPRRVAKAWREYCAGYADDPGHHLERVFEEVGGYDDIVLLRDIPFQSHCEHHMAPIIGRAHIAYLPKDHVVGISKLARVLHGFARRLQVQERLTAEVADCIWKHLRPRGVAVVIEATHGCMTSRGVRTPGVTMTTSRMMGVFRDDERSRKEVLALIAKG

SEQ ID NO: 14876 - protein, 208 aa, Sphingomonas carotinifaciens
  misc_feature (1)..(208): tr|A0A1G7K7L1|A0A1G7K7L1_9SPHN GTP cyclohydrolase 1 OS= Sphingomonas carotinifaciens OX=1166323 GN=folE PE=3 SV =1
MTVVPGEPEDGDLVAADGKIAVPSHVTDAIRTLIEWAGDDPTREGLVDTPKRVARAWREYCAGYADDPAIHLARVFEEVGGYDEIVLLKDIPFQSHCEHHMAPIIGVAHIAYLPRNHVVGISKLARVLHGFARRLQVQERLTAEVADCIWDNLKPLGVAVVIEATHACMTARGVRTPGVAMVTSRMMGVFRDDDRSRKEVLALMGRPA

SEQ ID NO: 14877 - protein, 203 aa, Sphingomonas changbaiensis
  misc_feature (1)..(203): tr|A0A0E9MNB8|A0A0E9MNB8_9SPHN GTP cyclohydrolase 1 OS= Sphingomonas changbaiensis NBRC 104936 OX=1219043 GN=fo lE PE=3 SV=1
MGDHLEDGDLIETPGKIPVPRNVAKAVRTLLAWAGDDPDREGLADTPLRVARAWKEYCQGYDEDPSAHLSRTFEEVGGYDEIVLLRDIPFQSHCEHHMAPIIGKAHIAYLPKDRVVGISKLARVLHGFARRLQVQERLTAEVADCIWDNLQPQGVAVVIEASHSCMAARGVRTPGVVMTTSRMMGVFREDERSRKEVLALMGC

SEQ ID NO: 14878 - protein, 207 aa, Sphingomonas desiccabilis
  misc_feature (1)..(207): tr|A0A4Q2IVN4|A0A4Q2IVN4_9SPHN GTP cyclohydrolase 1 OS= Sphingomonas desiccabilis OX=429134 GN=folE PE=3 SV=1
MQADNPATAEGDLVAPQPKLPVPDEVADAIRTLIRWAGDDPTREGLLDTPKRVARAWKEYCQGYGEDPAHHLARTFEEVGGYDEIVLLRDIPFQSHCEHHMAPIIGKAHIAYLPRDHVVGISKLARVLHGFARRLQVQERLTAQVADCIWEKLAPRGVAVVIEASHACMTARGVRTPGVTMTTSRMMGVFRDDDRSRKEVLSLMGLG

SEQ ID NO: 14879 - protein, 209 aa, Sphingomonas dokdonensis
  misc_feature (1)..(209): tr|A0A245ZHS2|A0A245ZHS2_9SPHN GTP cyclohydrolase 1 OS= Sphingomonas dokdonensis OX=344880 GN=folE PE=3 SV=1
MVNEGSPDDGDLIGDDGKIVVPDHVADAIQTLIRWAGDDPAREGLIDTPRRVARAWREYCAGYAEDPSHHLSRVFEEVGGYDEIVLLRDIPFQSHCEHHMAPIIGRAHIAYLPQDHVVGISKLARVLHAYARRLQVQERLTAEVADCIWNGLKPQGVAVVIEASHACMTARGVRTPGVSMVTSRMMGVFRDDERSRKEVLSLMGMQGRA

SEQ ID NO: 14880 - protein, 203 aa, Sphingomonas edaphi
  misc_feature (1)..(203): tr|A0A418Q255|A0A418Q255_9SPHN GTP cyclohydrolase 1 OS= Sphingomonas edaphi OX=2315689 GN=folE PE=3 SV=1
MTGSPDDGDLVSGAPKIAVPDDVADAVRTLIRWAGDDPTREGLIDTPLRVARAWKEYAKGYTEEPALHLSRTFEEVGGYDEIVLLKDIPFQSHCEHHLAPIIGRAAIAYLPGDKVVGISKLARVLHGFARRLQVQERLTAEVADCIWENLEPKGVAVVIEASHACMTARGVGTPGVMMTTSRMMGCFRDDERSRKEVLALMGY

SEQ ID NO: 14881 - protein, 206 aa, Sphingomonas elodea
  misc_feature (1)..(206): tr|A0A495F467|A0A495F467_SPHEL GTP cyclohydrolase 1 OS= Sphingomonas elodea OX=179878 GN=folE PE=3 SV=1
MHDHHHDPVDGDIVAPPPKIPVPEHVAEAIRTLIRWTGDDPDREGLLDTPQRVARAWKEYCAGYAEDPSHHLSRVFEEVGGYDEIVLLKDIPFQSHCEHHMAPITGKASIAYLPRNHVVGISKLARVLHAFARRLQVQERLTAEVADCIWNHLHPVGVAVVIEAQHGCMTGRGVRTPGVGMVTSRMMGVFREDERSRAEVLKLMGY

SEQ ID NO: 14882 - protein, 214 aa, Sphingomonas elodea
  misc_feature (1)..(214): tr|A0A495F346|A0A495F346_SPHEL GTP cyclohydrolase 1 OS= Sphingomonas elodea OX=179878 GN=folE PE=3 SV=1
MLPVKRKVGPMNFFCNDIERADNEPAQEMVPEEVQEAVRTLLRWVGEDPEREGLRDTPMRHAKAWREYCAGYDEDPGMHLARTFEEVAGYDEIVLLKDIPFQSHCEHHLAPITGKASIAYLPKDRVVGISKLARVLHGYARRLQIQERLTAEIAQAIWTHLKPAGVAVVIEAQHGCMTGRGVKTHGVGMVTSRMLGCFLEDRSSRAELMSLMGY

SEQ ID NO: 14883 - protein, 208 aa, Sphingomonas endophytica
  misc_feature (1)..(208): tr|A0A147I6W5|A0A147I6W5_9SPHN GTP cyclohydrolase 1 OS= Sphingomonas endophytica OX=869719 GN=folE PE=3 SV=1
MSDKGQGTPDDGDLVAADGKIAVPDEVAEAVRTLLRWAGDDPTREGLVDTPRRVARAWKEYCAGYGEDPGVHLSRVFEEVGGYDEIVLLKDIPFQSHCEHHMAPIIGKAHIAYLPRNHVVGISKLARVLHGYARRLQVQERLTAEVADCIWHGLKPLGVAVVIEASHACMTARGVRTSGVGMVTSRMMGVFRDDDRSRKEVLSLMGMA

SEQ ID NO: 14884 - protein, 225 aa, Sphingomonas faeni
  misc_feature (1)..(225): tr|A0A2T5U286|A0A2T5U286_9SPHN GTP cyclohydrolase 1 OS= Sphingomonas faeni OX=185950 GN=folE PE=3 SV=1
MFRCLGMLTKGVAMRDELNGSEERLVEDDVLGPDGKVIVPEDVASAIRTLIRWAGDDPTREGLLDTPRRVARAWKEYCAGYGDDPAKHLERVFEEVGGYDEIVLLKDIPFQSHCEHHMAPIIGKAHIAYLPRDHVVGISKLARVLHGFARRLQVQERLTAEVADCIWDNLKPQGVAVVIEASHACMTARGVRTPGVTMVTSRMMGVFRDDERSRKEVLALMGRGA

SEQ ID NO: 14885 - protein, 201 aa, Sphingomonas fennica
  misc_feature (1)..(201): tr|A0A2T4HUI1|A0A2T4HUI1_9SPHN GTP cyclohydrolase 1 OS= Sphingomonas fennica OX=114404 GN=folE PE=3 SV=1
MGAAMGEMMETPAKIAVPEDVEEAIRTLLRWAGDDPTREGLLDTPKRVARAWKEYCKGYGDDPARHLSRTFEEVGGYDEIVLLKDIPFQSHCEHHMAPIIGKAAIAYLPRERVVGISKLARVLHGFARRLQVQERLTAEVADCIWDNLAPHGVAVVIEATHACMTARGVQTPGVVMTTSRMMGVFRDDERSRAEVLKLMGY

SEQ ID NO: 14886 - protein, 206 aa, Sphingomonas gei
  misc_feature (1)..(206): tr|A0A4S1X8P4|A0A4S1X8P4_9SPHN GTP cyclohydrolase 1 OS= Sphingomonas gei OX=1395960 GN=folE PE=3 SV=1
MAEVHDPAEDGDLIAPPPKIAVPEDVAEAIRTLIRWAGDDPAREGLIDTPQRVARAWKEYCQGYGEDPAYHLARVFEEVGGYDEIVLLKDIPFQSHCEHHMAPIIGKASIAYLPKDHVVGISKLARVLNAFARRLQVQERLTAEVADCIWNGLKPIGVAVVIEASHACMTARGVRTPGVGMVTSRMMGVFRDDERSRQEVLKLMGY

SEQ ID NO: 14887 - protein, 212 aa, Sphingomonas ginsenosidimutans
  misc_feature (1)..(212): tr|A0A2A4HZN2|A0A2A4HZN2_9SPHN GTP cyclohydrolase 1 OS= Sphingomonas ginsenosidimutans OX=862134 GN=folE PE=3 S V=1
MADDHAHTPHGDPADGDLVGGDGKLPVPDDVAAAVRTLIRWAGDDPTREGLLDTPQRVARAWREYCAGYADDPSKHLSRVFEEVGGYDEIVLLKDIPFQSHCEHHMAPIIGKAHIAYLPRDHVVGISKLARVLHAYARRLQVQERLTAEVADCIWNGLKPQGVAVVIEASHACMTARGVRTPGVGMVTSRMMGVFRDDERSRKEVLSLMGMA

SEQ ID NO: 14888 - protein, 207 aa, Sphingomonas ginsenosidivorax
  misc_feature (1)..(207): tr|A0A5C6UEE9|A0A5C6UEE9_9SPHN GTP cyclohydrolase 1 OS= Sphingomonas ginsenosidivorax OX=862135 GN=folE PE=3 SV =1
MSDTYPSLGHDQIDTDGKPLVPSDVAEAIRTLIRWSGDDPDREGLVDTPRRVARAWKEYCAGYADDPARHLERVFEEVGGYDEIVLLKDIPFQSHCEHHMAPIIGKAHIAYLPRDHVVGISKLARVLHGFARRLQVQERLTAEVADCIWDNLKPLGVAVVIEASHACMTARGVRTPGVTMVTSRMMGVFRDDDRSRKEVLALMGARA

SEQ ID NO: 14889 - protein, 207 aa, Sphingomonas glacialis
  misc_feature (1)..(207): tr|A0A502FY23|A0A502FY23_9SPHN GTP cyclohydrolase 1 OS= Sphingomonas glacialis OX=658225 GN=folE PE=3 SV=1
MDGRNKTEFGVAEIGADGKVVVPDAVAEAVRTLIRWAGDNPTREGLRDTPARVARAWKEYCAGYTDDPAKHLSRVFEEVGGYDEIVLLKDIPFQSHCEHHMAPIIGKAHIAYLPGNYVVGISKLARVLQAFARRLQVQERLTAEVADCIWNNLKPVGVAVVIEASHACMTARGVRTQGVTMVTSRMMGVFRDDERSRKEVLALMGRG

SEQ ID NO: 14890 - protein, 206 aa, Sphingomonas guangdongensis
  misc_feature (1)..(206): tr|A0A285QYC3|A0A285QYC3_9SPHN GTP cyclohydrolase 1 OS= Sphingomonas guangdongensis OX=1141890 GN=folE PE=3 SV= 1
MTDSGEPAGGDLIRPTPKIPVPDDVAAAVATLIRWAGDDPSREGLRDTPQRVARAWREYCSGYQDDPAHHLSRVFEEVGGYDEIVLLKDIPFQSHCEHHMAPIIGRAHIAYLPKDHVVGISKLARVLHAYARRLQVQERLTAEVADCIWAGLRPRGVAVVIEASHACMTARGVRTPGVGMVTSRMMGVFRDDERSRKEVLALMGRG

SEQ ID NO: 14891 - protein, 197 aa, Sphingomonas haloaromaticamans
  misc_feature (1)..(197): tr|A0A1S1HEF9|A0A1S1HEF9_9SPHN GTP cyclohydrolase 1 OS= Sphingomonas haloaromaticamans OX=653954 GN=folE PE=3 S V=1
MGEMMETPAKIAVPEDVEEAIRTLLRWAGDDPTREGLLDTPKRVARAWKEYCKGYGDDPARHLSRTFEEVGGYDEIVLLKDIPFQSHCEHHMAPIIGKAAIAYLPRERVVGISKLARVLHGFARRLQVQERLTAEVADCIWDNLAPHGVAVVIEATHACMTARGVQTPGVVMTTSRMMGVFRDDERSRAEVLKLMGY

SEQ ID NO: 14892 - protein, 207 aa, Sphingomonas hengshuiensis
  misc_feature (1)..(207): tr|A0A2W4ZEN8|A0A2W4ZEN8_9SPHN GTP cyclohydrolase 1 OS= Sphingomonas hengshuiensis OX=1609977 GN=folE PE=3 SV=1
MCDANDDADGGELAGPVAKIPVPDEVAAAIRTLIRWTGDDPDREGLLDTPLRVARAWKEYTQGYGEDPARHLERVFEEVGGYDEIVLLRDIPFQSHCEHHMAPIVGKAHIAYLPQDHVVGISKLARVLHGYARRLQVQERLTAEVADCIWNGLRPRGVAVVIEATHGCMTSRGVRTPGVTMTTSRMMGVFRDDERSRKEVLALIARG

SEQ ID NO: 14893 - protein, 206 aa, Sphingomonas histidinilytica
  misc_feature (1)..(206): tr|A0A1T5F5J9|A0A1T5F5J9_9SPHN GTP cyclohydrolase 1 OS= Sphingomonas histidinilytica OX=439228 GN=folE PE=3 SV= 1
MSILGDDDEALHGTPKGKIVVPEDVQEAIRTLIRWSGDNPDREGLLDTPSRVGRAWKEYCQGYDEDPSVHLSRTFEEVGGYDEIVLLRDIPFQSHCEHHMAPIIGHAHIAYLPHSRVVGISKLARVLHGFARRLQIQERLTAEIADCIWTNLEPLGVAVVIHATHACMTARGVRTPGVGMTTSRMMGVFRDDDRSRKEVLSLMGLG

SEQ ID NO: 14894 - protein, 204 aa, Sphingomonas indica
  misc_feature (1)..(204): tr|A0A1X7GRJ2|A0A1X7GRJ2_9SPHN GTP cyclohydrolase 1 OS= Sphingomonas indica OX=941907 GN=folE PE=3 SV=1
MSDTPEDGDLVEGTGGKPPVPEHVREAVQTLIRWAGDDPAREGLLDTPDRVARAWREYAQGYGEDPAIHLSRTFDEVGGYDEIVLLKDIPFQSHCEHHLAPIIGKAAIAYLPGDRVVGISKLARVLHGFARRLQVQERLTAQVADCIWEHLQPQGVAVVIEASHACMTARGVRTPGVMMTTSRMMGVFREDERSRREVLALMGY

SEQ ID NO: 14895 - protein, 205 aa, Sphingomonas jatrophae
  misc_feature (1)..(205): tr|A0A1I6JM02|A0A1I6JM02_9SPHN GTP cyclohydrolase 1 OS= Sphingomonas jatrophae OX=1166337 GN=folE PE=3 SV=1
MSELATDSIDAPRGPDGKIVVPDHVVEAFRTILRWTGDDPEREGLLDTPKRVARAWKEYCQGYGEDPSHHLSRTFDEVGGYDEIVLLKDIPFQSHCEHHMAPIIGKAAIAYLPNMRVVGISKLARVLHGFARRLQVQERLTAQVADCIWEHLHPHGVAVVIEASHACMTARGVRTPGVAMTTSRMMGVFREDERSRQEVLKLMGY

SEQ ID NO: 14896 - protein, 216 aa, Sphingomonas jeddahensis
  misc_feature (1)..(216): tr|A0A1V2EY71|A0A1V2EY71_9SPHN GTP cyclohydrolase 1 OS= Sphingomonas jeddahensis OX=1915074 GN=folE PE=3 SV=1
MHKGFSLMNVKGSPNEGDIVAEDGKMAVPDHVADAIRTLLRWAGDDPSREGLIDTPKRVARAWKEYCAGYAEDPAHHLARVFEEVGGYDEIVLLRDIPFQSHCEHHMAPIIGRAHIAYLPKNHVVGISKLARVLHAYARRLQVQERLTAEVADCIWNELKPQGVAVVIEASHACMTARGVRTPGVSMVTSRMMGVFRDDERSRKEVLALMGMQGRA

SEQ ID NO: 14897 - protein, 207 aa, Sphingomonas koreensis
  misc_feature (1)..(207): tr|A0A1L6JE04|A0A1L6JE04_9SPHN GTP cyclohydrolase 1 OS= Sphingomonas koreensis OX=93064 GN=folE PE=3 SV=1
MSCHDHDEPGDGDIVASPPKIAVPDEVAEAVRTILRWAGDDPSREGLLDTPKRVARAWKEYCQGYGEDPAHHLSRIFEEVGGYDEIVLLKDIPFQSHCEHHMAPIIGKASIAYLPQDHVVGISKLARVLHAYARRLQVQERLTAEVADCIWNHLHPRGVAVVIEASHACMTARGVRTPGVGMVTSRMMGVFREDERSRKEVLALMGY

SEQ ID NO: 14898 - protein, 207 aa, Sphingomonas koreensis
  misc_feature (1)..(207): tr|A0A2M8WH80|A0A2M8WH80_9SPHN GTP cyclohydrolase 1 OS= Sphingomonas koreensis OX=93064 GN=folE PE=3 SV=1
MSCHDHHEPGDGDIVASPPKIAVPDEVAEAVRTILRWAGDDPSREGLLDTPKRVARAWKEYCQGYGEDPAHHLSRIFEEVGGYDEIVLLKDIPFQSHCEHHMAPIIGKASIAYLPQDHVVGISKLARVLHAYARRLQVQERLTAEVADCIWNHLHPRGVAVVIEASHACMTARGVRTPGVGMVTSRMMGVFREDERSRKEVLALMGY

SEQ ID NO: 14899 - protein, 197 aa, Sphingomonas laterariae
  misc_feature (1)..(197): tr|A0A239BMF5|A0A239BMF5_9SPHN GTP cyclohydrolase 1 OS= Sphingomonas laterariae OX=861865 GN=folE PE=3 SV=1
MGEMMESPAKPAVPEDVEDAIRTLLRWAGDDPTREGLIDTPKRVARAWKEYCKGYGDDPAVHLSRTFEEVGGYDEIVLLKDIPFQSHCEHHMAPIIGKAAIAYLPKDRVVGISKLARVLHGFARRLQVQERLTAEVADCIWDNLQPYGVAVVIEATHACMTARGVQTPGVVMTTSRMMGVFRDDERSRAEVLKLMGY

SEQ ID NO: 14900 - protein, 208 aa, Sphingomonas melonis; identical to SEQ ID NO: 14873
  misc_feature (1)..(208): tr|A0A0D1MMC4|A0A0D1MMC4_9SPHN GTP cyclohydrolase 1 OS= Sphingomonas melonis OX=152682 GN=folE PE=3 SV=1

SEQ ID NO: 14901 - protein, 208 aa, Sphingomonas melonis
  misc_feature (1)..(208): tr|A0A175Y7U0|A0A175Y7U0_9SPHN GTP cyclohydrolase 1 OS= Sphingomonas melonis TY OX=621456 GN=folE PE=3 SV=1
MSHDHAAPDDGDLVASAAEAAIPQDVAEAIRTLIRWAGDDPTREGLIDTPRRVAKAWREYCAGYGDDPAHHLSRVFEEVGGYDEIVLLKDIPFQSHCEHHMAPIIGKAHIAYLPKDHVVGISKLARVLHGFARRLQVQERLTAEVADCIWKNLRPQGVAVVIEASHACMTARGVRTPGVSMVTSRMMGVFRDDERSRKEVLSLMGLRS

SEQ ID NO: 14902 - protein, 209 aa, Sphingomonas mucosissima
  misc_feature (1)..(209): tr|A0A245ZS87|A0A245ZS87_9SPHN GTP cyclohydrolase 1 OS= Sphingomonas mucosissima OX=370959 GN=folE PE=3 SV=1
MNCNDSPEDGDLVGEDGKIVVPDDVANAIRTLIRWAGDDPAREGLVDTPRRVARAWKEYCAGYAEDPSRHLARIFEEVGGYDEIVLLRDIPFQSHCEHHMAPIIGRAHIAYLPRNHVVGISKLARVLHAFARRLQVQERLTAEVADCIWNNLKPQGVAVVIEASHACMTARGVRTPGVSMVTSRMMGVFRDDERSRKEVLALMGMQGRG

SEQ ID NO: 14903 - protein, 206 aa, Sphingomonas naasensis
  misc_feature (1)..(206): tr|A0A4S1WSU7|A0A4S1WSU7_9SPHN GTP cyclohydrolase 1 OS= Sphingomonas naasensis OX=1344951 GN=folE PE=3 SV=1
MAEIHDPAEDGDLIAGPAKIAVPEDVAEAIRTLIRWSGDDPAREGLIDTPQRVARAWKEYCQGYGEDPAHHLARVFEEVGGYDEIVLLKDIPFQSHCEHHMAPIIGKASIAYLPKDHVVGISKLARVLHAFARRLQVQERLTAEVADCIWNGLKPVGVAVVIEASHACMTARGVRTPGVGMVTSRMMGVFRDDERSRQEVLKLMGY

SEQ ID NO: 14904 - protein, 209 aa, Sphingomonas olei
  misc_feature (1)..(209): tr|A0A4S4GAM0|A0A4S4GAM0_9SPHN GTP cyclohydrolase 1 OS= Sphingomonas olei OX=1886787 GN=folE PE=3 SV=1
MSVKGSPEDGDIIGEDGKIAVPEHVASAIRTLIEWAGDDPSREGLVDTPKRVARAWREYCAGYAEDPAHHLSRIFEEVGGYDEIVLLKDIPFQSHCEHHMAPILGRAHIAYLPRNHVVGISKLARVLHAYARRLQVQERLTAEVADCIWNGLKPQGVAVVIEASHACMTARGVRTPGVSMVTSRMMGVFRDDERSRKEVLALMGMQGRT

SEQ ID NO: 14905 - protein, 205 aa, Sphingomonas oleivorans
  misc_feature (1)..(205): tr|A0A2T5FV30|A0A2T5FV30_9SPHN GTP cyclohydrolase 1 OS= Sphingomonas oleivorans OX=1735121 GN=folE PE=3 SV=1
MSGCPEPEDGDLVAPTPKIPVPEYVEDAIRTLLRWSGEDPDREGLLDTPKRVARAWKEYCQGYESDPALHLSRTFEEVGGYDEIVLLRDIPFQSHCEHHMAPIVGKAAIAYLPRDRVVGISKLARVLHGFARRLQVQERLTAQVADCIWDHLNPLGVAVVIEASHGCMTARGVRTPGVAMTTSRMMGVFRDDERSRREVLALMGY

SEQ ID NO: 14906 - protein, 224 aa, Sphingomonas oligophenolica
  misc_feature (1)..(224): tr|A0A502CNQ5|A0A502CNQ5_9SPHN GTP cyclohydrolase 1 OS= Sphingomonas oligophenolica OX=301154 GN=folE PE=3 SV=1
MELCRNVGRGDVHAIGGENDVTEDTPDDGDLVAAPPADAVPRDVADAIRTLIRWAGDDPTREGLIETPRRVAKAWKEYCAGYADDPAHHLERVFEEVGGYDEIVLLKDIPFQSHCEHHLAPIIGKAHIAYLPQNHVVGISKLARVLHAFARRLQVQERLTAEVADCIWENLKPQGVAVVIEASHACMTARGVRTPGVSMVTSRMMGVFRDDDRSRKEVLALMGC

SEQ ID NO: 14907 - protein, 208 aa, Sphingomonas panacis
  misc_feature (1)..(208): tr|A0A1B3ZD65|A0A1B3ZD65_9SPHN GTP cyclohydrolase 1 OS= Sphingomonas panacis OX=1560345 GN=folE PE=3 SV=1
MSERAEIAISGDRFELDGKIAVPDDVADAVRTLIRWAGDDPAREGLIDTPRRVARAWKEYCAGYADDPAHHLSRVFEEVGGYDEIVLLKDIPFQSHCEHHMAPIIGKAHIAYLPGNYVVGISKLARVLHAFARRLQVQERLTAEVADCIWKNLKPLGVAVVIEANHACMSARGVRTPGVTMTTSRMMGVFRDDERSREEVLSLIGFKA

SEQ ID NO: 14908 - protein, 208 aa, Sphingomonas parapaucimobilis
  misc_feature (1)..(208): tr|A0A0A1WAA8|A0A0A1WAA8_9SPHN GTP cyclohydrolase 1 OS= Sphingomonas parapaucimobilis NBRC 15100 OX=1219049 GN= folE PE=3 SV=1
MSCAHGDPEDGDLIGQDGKIVVPDHVAEAIRTLIAWAGDDPTREGLVDTPKRVARAWREYCAGYGDDPAVHLSRVFEEVGGYDEIVLLKDIPFQSHCEHHMAPIMGRAHIAYLPRNHVVGISKLARVLHGFARRLQVQERLTAEVADCIWENLKPLGVAVVIEATHGCMTSRGVRTPGVSMVTSRMMGVFRDDDRSRKEVLSLMGMAG

SEQ ID NO: 14909 - protein, 208 aa, Sphingomonas paucimobilis
  misc_feature (1)..(208): tr|A0A0C9NKZ8|A0A0C9NKZ8_SPHPI GTP cyclohydrolase 1 OS= Sphingomonas paucimobilis NBRC 13935 OX=1219050 GN=folE PE=3 SV=1
MSCAPGDPEDGDLIGEDGKIAVPDHVAQAIRTLIAWAGDDPTREGLIDTPKRVARAWREYCAGYGDDPAVHLSRVFEEVGGYDEIVLLKDIPFQSHCEHHMAPIIGRAHIAYLPRNHVVGISKLARVLHGFARRLQVQERLTAEVADCIWENLKPLGVAVVIEATHACMTARGVRTPGVAMVTSRMMGVFRDDDRSRKEVLSLMGLGG

SEQ ID NO: 14910 - protein, 202 aa, Sphingomonas paucimobilis
  misc_feature (1)..(202): tr|A0A031J938|A0A031J938_SPHPI GTP cyclohydrolase 1 OS= Sphingomonas paucimobilis OX=13689 GN=folE PE=3 SV=1
MDYDPDAEAVGEAIKEPVPADVAEAIRTLIRWSGDQPDREGLLETPERVARAWREYCRGYNDDPAYHLSRIFHEVGGYDDVVLLKDIPFQSHCEHHMAPIIGRAHIAYLPGEYVVGISKLARVLHAFANRLQVQERLTSEVANCIWEHLKPQGVAVVIEATHGCMTGRGVRTPNVLMKTSRMLGVFRDDEKSREEVLKLISA

SEQ ID NO: 14911 - protein, 206 aa, Sphingomonas pokkalii
  misc_feature (1)..(206): tr|A0A2U0SDQ2|A0A2U0SDQ2_9SPHN GTP cyclohydrolase 1 OS= Sphingomonas pokkalii OX=2175090 GN=folE PE=3 SV=1
MHDHHDGPEDGDIVAPAPKIPVPEHVAEAIRTLIRWTGDDPDREGLLDTPQRVARAWKEYCAGYGEDPSHHLSRVFEEVGGYDEIVLLKDIPFQSHCEHHMAPITGKASIAYLPRNHVVGISKLARVLHAFARRLQVQERLTAEVADCIWNNLHPQGVAVVIEAQHGCMTARGVRTPGVGMVTSRMMGVFRDDERSRAEVLKLMGY

SEQ ID NO: 14912 - protein, 204 aa, Sphingomonas pokkalii
  misc_feature (1)..(204): tr|A0A2U0SD27|A0A2U0SD27_9SPHN GTP cyclohydrolase 1 OS= Sphingomonas pokkalii OX=2175090 GN=folE PE=3 SV=1
MNFFCNDLEGAELDQGAELVPDEVQEAVRTLLRWVGENPEREGLRDTPRRYAKAWLEYCQGYEEDPGAHLARTFEEVAGYDEIVLLKDIPFHSHCEHHLAPITGKASIAYLPKNRVVGISKLARVLHGYARRLQIQERLTAEVAQAIWDHLQPAGVAVVIEAQHGCMTGRGVKTPGVGMVTSRLRGCFLDDKSSRAEILSLMGY

SEQ ID NO: 14913 - protein, 200 aa, Sphingomonas rubra
  misc_feature (1)..(200): tr|A0A1I5QTQ8|A0A1I5QTQ8_9SPHN GTP cyclohydrolase 1 OS= Sphingomonas rubra OX=634430 GN=folE PE=3 SV=1
MSDLVEDDGKVAVPPHVAEAVRTLIEWAGDDPAREGLLDTPKRVARAWKEYCAGYGEDPARHLSRVFEEVGGYDEIVLLRDIPFQSHCEHHMAPIIGRAHIAYLPKDHVVGISKLARVLHGFARRLQVQERLTAEVADCIWDHLRPVGVAVVIEATHACMTARGVRTPGVSMTTSRMMGVFRDDERSRREVLALMGMNKG

SEQ ID NO: 14914 - protein, 208 aa, Sphingomonas sanguinis
  misc_feature (1)..(208): tr|A0A147HUI4|A0A147HUI4_9SPHN GTP cyclohydrolase 1 OS= Sphingomonas sanguinis OX=33051 GN=folE PE=3 SV=1
MSCAHGDPEDGDLIGEDGKIAVPDEVAQAIRTLIAWAGDDPTREGLVDTPKRVARAWAEYCAGYGDDPAVHLSRVFEEVGGYDEIVLLKDIPFQSHCEHHMAPIIGRAHIAYLPRNHVVGISKLARVLHGFARRLQVQERLTAEVADCIWENLKPLGVAVVIEATHACMTARGVRTPGVAMVTSRMMGVFRDDERSRKEVLSLMGLGG

SEQ ID NO: 14915 - protein, 202 aa, Sphingomonas sanxanigenens
  misc_feature (1)..(202): tr|W0A7Q4|W0A7Q4_9SPHN GTP cyclohydrolase 1 OS=Sphingom onas sanxanigenens DSM 19645 = NX02 OX=1123269 GN=folE PE=3 SV=1
MEDDSGDIAIGDDGKIVVPNDVEEAIRTLIRWAGDDPTREGLVDTPRRVARAWREYCQGYLEDPSVHLSRTFEEVGGYDEIVLLKDIPFQSHCEHHMAPIIGRAHIAYLPRDRVVGISKLARVLQGYARRLQVQERLTAEVADCIWRHLDPIGVAVVIEASHACMSARGVRTPGVAMTTSRMMGVFRDDDRSRKEVLALMGC

SEQ ID NO: 14916 - protein, 200 aa, Sphingomonas sanxanigenens
  misc_feature (1)..(200): tr|A0A2W5C9K3|A0A2W5C9K3_9SPHN GTP cyclohydrolase 1 OS= Sphingomonas sanxanigenens OX=397260 GN=folE PE=3 SV=1
MPVAAAAPESQSKIAVPEDVAEAVRTLIRWAGDDPSREGLIDTPKRVARAWREYCQGYAEDPAIHLSRTFEEVGGYDEIVLLKDIPFQSHCEHHMAPIIGKAHIAYLPRDRVVGISKLARVLHGFARRLQVQERLTAEVANCIWEHLHPHGVAVVIEASHACMTARGVRTPGVGMVTSRMMGVFRDDERSRKEVLALING

SEQ ID NO: 14917 - protein, 208 aa, Sphingomonas sp.; identical to SEQ ID NO: 14908
  misc_feature (1)..(208): tr|A0A1R1Z254|A0A1R1Z254_9SPHN GTP cyclohydrolase 1 OS= Sphingomonas sp. Sph1(2015) OX=1628084 GN=folE PE=3 SV= 1

SEQ ID NO: 14918 - protein, 207 aa, Sphingomonas sp.
  misc_feature (1)..(207): tr|A0A430DG40|A0A430DG40_9SPHN GTP cyclohydrolase 1 OS= Sphingomonas sp. ABOLF OX=1985879 GN=folE PE=3 SV=1
MQADNPATAEGDLVAPQPKLPVPDEVADAIRTLIRWAGDDPEREGLLDTPKRVARAWKEYCQGYGEDPAHHLSRTFEEVGGYDEIVLLRDIPFQSHCEHHMAPIIGKAHIAYLPKDHVVGISKLARVLHGFARRLQVQERLTAQVADCIWDRLAPRGVAVVIEASHACMTARGVRTPGVTMTTSRMMGVFRDDDRSRKEVLALMGLG

SEQ ID NO: 14919 - protein, 207 aa, Sphingomonas spermidinifaciens
  misc_feature (1)..(207): tr|A0A2A4B5T4|A0A2A4B5T4_9SPHN GTP cyclohydrolase 1 OS= Sphingomonas spermidinifaciens OX=1141889 GN=folE PE=3 SV=1
MIHDHDAAADGDLIAGLPEVEVPGDVADAIRTLIRWAGDDPTREGLIDTPRRVAKAWREYCAGYADDPGQHLARVFEEVGGYDDIVLLRDIPFQSHCEHHMAPITGRAHIAYLPKDHVVGISKLARVLHAFARRLQVQERLTAEVADCIWSHLKPRGVAVVIEATHGCMTSRGVRTPGVTMTTSRMMGVFRDDERSRKEVLALIGKK

SEQ ID NO: 14920 - protein, 208 aa, Sphingomonas taxi
  misc_feature (1)..(208): tr|A0A2W5NYD3|A0A2W5NYD3_9SPHN GTP cyclohydrolase 1 OS= Sphingomonas taxi OX=1549858 GN=folE PE=3 SV=1
MSDTTRATPDDGDLVAGDGKLPVPEEVAAAVRTLLRWAGDDPTREGLADTPHRVARAWKEYCAGYGEDPQAHLSRVFEEVGGYDEIVLLKDIPFQSHCEHHMAPIIGRAHIAYLPRNHVVGISKLARVLHAYARRLQVQERLTAEVADCIWTGLKPLGVAVVIEASHACMTARGVRTPGVGMVTSRMMGVFRDDDRSRKEVLSLMGLG

SEQ ID NO: 14921 - protein, 206 aa, Sphingomonas taxi
  misc_feature (1)..(206): tr|A0A097EFU0|A0A097EFU0_9SPHN GTP cyclohydrolase 1 OS= Sphingomonas taxi OX=1549858 GN=folE PE=3 SV=1
MTDQHHAPDEGATAATGDAPVVPIEVAEAIRTLIRWAGDDPGREGLIDTPRRVAKAWKEYCAGYADDPARHLSRVFEEVGGYDEIVLLKDIPFQSHCEHHMAPIIGKAHIAYLPRDHVVGISKLARVLHGFARRLQVQERLTAEVADCIWDNLKPQGVAVVIEASHACMTARGVRTPGVSMVTSRMMGVFREDDRSRKEVLALMGC

SEQ ID NO: 14922 - protein, 214 aa, Sphingomonas trueperi
  misc_feature (1)..(214): tr|A0A543M3U0|A0A543M3U0_9SPHN GTP cyclohydrolase 1 OS= Sphingomonas trueperi OX=53317 GN=folE PE=3 SV=1
MLPVKRKVGPMNFFCNDIERADNEPAQEMVPEEVQEAVRTLLRWVGEDPEREGLRDTPMRHAKAWREYCAGYDEDPGIHLARTFEEVAGYDEIVLLKDIPFQSHCEHHLAPITGKASIAYLPKDRVVGISKLARVLHGYARRLQIQERLTAEIAQAIWTHLKPAGVAVVIEAQHGCMTGRGVKTHGVGMVTSRMLGCFLEDRSSRAELMSLMGY

SEQ ID NO: 14923 - protein, 206 aa, Sphingomonas trueperi; identical to SEQ ID NO: 14881
  misc_feature (1)..(206): tr|A0A543M4G1|A0A543M4G1_9SPHN GTP cyclohydrolase 1 OS= Sphingomonas trueperi OX=53317 GN=folE PE=3 SV=1

SEQ ID NO: 14924 - protein, 206 aa, Sphingomonas turrisvirgatae
  misc_feature (1)..(206): tr|A0A1E3LUE7|A0A1E3LUE7_9SPHN GTP cyclohydrolase 1 OS= Sphingomonas turrisvirgatae OX=1888892 GN=folE PE=3 SV= 1
MSDQHDAAADGDIVAPAPKIPVPDEVAEAVRTILRWAGDDPNREGLLDTPNRVARAWKEYCQGYAEDPAHHLSRVFEEVGGYDEIVLLKDIPFQSHCEHHMAPIIGKASIAYLPQNHVVGISKLARVLHAYARRLQVQERLTAEVADCIWNHLHPRGVAVVVEASHACMTARGVRTPGVGMVTSRMMGTFREDERSRKEVLALMGY

SEQ ID NO: 14925 - protein, 206 aa, Sphingomonas wittichii
  misc_feature (1)..(206): tr|A0A1X9UKH5|A0A1X9UKH5_SPHSD GTP cyclohydrolase 1 OS= Sphingomonas wittichii (strain DC-6 / KACC 16600) OX=12 83312 GN=folE PE=3 SV=1
MSILGDDDEALHGTPKGKIAVPEHVQEAIRTLIRWSGDNPDREGLLDTPSRVGRAWKEYCQGYDEDPSVHLSRTFEEVGGYDEIVLLRDIPFQSHCEHHMAPIIGHAHIAYLPHSRVVGISKLARVLHGFARRLQIQERLTAEIADCIWTNLEPLGVAVVIHATHACMTARGVRTPGVGMTTSRMMGVFRDDDRSRKEVLSLMGLG

SEQ ID NO: 14926 - protein, 206 aa, Sphingomonas wittichii; identical to SEQ ID NO: 14925
  misc_feature (1)..(206): tr|A5V3T4|A5V3T4_SPHWW GTP cyclohydrolase 1 OS=Sphingom onas wittichii (strain RW1 / DSM 6014 / JCM 10273) OX=3 92499 GN=folE PE=3 SV=1

SEQ ID NO: 14927 - protein, 208 aa, Sphingomonas yabuuchiae
  misc_feature (1)..(208): tr|A0A147IVA5|A0A147IVA5_9SPHN GTP cyclohydrolase 1 OS= Sphingomonas yabuuchiae OX=172044 GN=folE PE=3 SV=1
MSCAHGDPEDGDLIGQDGKIAVPDHVADAIRTLIAWAGDDPTREGLIDTPKRVARAWREYCAGYGDDPAVHLSRVFEEVGGYDEIVLLKDIPFQSHCEHHMAPIIGRAHIAYLPRNHVVGISKLARVLHGFARRLQVQERLTAEVADCIWENLKPLGVAVVIEATHGCMTSRGVRTPGVSMVTSRMMGVFRDDNRSRKEVLSLMGMAG

SEQ ID NO: 14928 - protein, 200 aa, Sphingopyxis alaskensis
  misc_feature (1)..(200): tr|Q1GRU9|Q1GRU9_SPHAL GTP cyclohydrolase 1 OS=Sphingop yxis alaskensis (strain DSM 13593 / LMG 18877 / RB2256) OX=317655 GN=folE PE=3 SV=1
MSELGQDLGPDGKLIVPDHVADAVRTLIEWAGDDPAREGLLDTPRRVARAWKEYCSGYGEDPSIHLSRTFEEVGGYDEVVLLRDIPFQSHCEHHMAPITGKASIAYLPRDRVVGISKLARVLNGYARRLQVQERLTAEVAQCIWDNLQPHGVAVVIDAQHGCMTGRGVRTPGVGMVTSRLLGCFLEDQRSRKEVLGLMGY

SEQ ID NO: 14929 - protein, 200 aa, Sphingopyxis bauzanensis
  misc_feature (1)..(200): tr|A0A246JZY5|A0A246JZY5_9SPHN GTP cyclohydrolase 1 OS= Sphingopyxis bauzanensis OX=651663 GN=folE PE=3 SV=1
MSDSKVELGVDGKVVVPDHVADAVRTLIEWAGDDPEREGLLDTPKRVARAWKEYCSGYADDPAIHLARTFEEVGGYDELVLLKDIPFQSHCEHHMAPITGKASIAYMPRDRVVGISKLARVLNGYARRLQVQERLTAEVARCIWDNLHPHGVAVVIDAQHGCMTGRGVRTPGVGMVTSRLLGCFLDDQRSRKEVLSLMGY

SEQ ID NO: 14930 - protein, 199 aa, Sphingopyxis flava
  misc_feature (1)..(199): tr|A0A1T5BSZ7|A0A1T5BSZ7_9SPHN GTP cyclohydrolase 1 OS= Sphingopyxis flava OX=1507287 GN=folE PE=3 SV=1
MIEDVELGEDGKIAVPDHVAEAVRTLIEWAGDDPTREGLFDTPKRVARAWKEYCQGYGEDPSAHLSRTFQEVGGYDEIVLLRDIPFQSHCEHHMAPITGKASIAYLPKDRVVGISKLARVLNGFAKRLQVQERLTAEVAQCIWENLHPQGVAVVIEAQHGCMTGRGVRTPGVGMVTSRLLGCFLDDERSRKEVLSLMGY

SEQ ID NO: 14931 - protein, 211 aa, Sphingopyxis fribergensis
  misc_feature (1)..(211): tr|A0A0A7PPL2|A0A0A7PPL2_9SPHN GTP cyclohydrolase 1 OS= Sphingopyxis fribergensis OX=1515612 GN=folE PE=3 SV=1
MRQDGNSESGAMSDSKTELGPDGKVVVPDHVADAVRTLIEWAGDDPAREGLLDTPRRVARAWKEYCSGYGEDPALHLSRTFQEVGGYDEIVLLRDIPFQSHCEHHMAPITGKASIAYLPRDRVVGISKLARVLNGFARRLQVQERLTAEVARCIWDNLHPHGVAVVIDAQHGCMTGRGVRTPGVGMVTSRLLGCFLDDERSRKEVLSLMGY

SEQ ID NO: 14932 - protein, 220 aa, Sphingopyxis granuli
  misc_feature (1)..(220): tr|A0A0X8QZW2|A0A0X8QZW2_9SPHN GTP cyclohydrolase 1 OS= Sphingopyxis granuli OX=267128 GN=folE PE=3 SV=1
MEMYDPDPEPVAMAAGESPCGTQAPPSRAAVEAAVRTLIAAAGDDPAREGLADTPARVARAYREWFAGYRVDPHRLLDRSFGDAAGYDETVLLRSIPLVSTCEHHLAPIVGVAHVAYRPRGRVVGISKLSRLVDAYARRLQLQERLTRQIAGAIDEALQPRGVAVIIEATHGCMTTRGVRQHGVSLVTKCWLGEFGADAALRRELLASLPCRGNGGRMDG

SEQ ID NO: 14933 - protein, 198 aa, Sphingopyxis granuli
  misc_feature (1)..(198): tr|A0A120LU37|A0A120LU37_9SPHN GTP cyclohydrolase 1 OS= Sphingopyxis granuli OX=267128 GN=folE2 PE=3 SV=1
MTEVELGPDGKILVPGPVQDAIRTLIEWAGDDPSREGLLDTPKRVARAWKEYCQGYAEDPGLHLSRTFEEVGGYDEIVLLRDIPFQSHCEHHMAPITGKASIAYLPKDRVVGISKLARVLNGYARRLQVQERLTAEVARCIWDHLQPHGVAVVIDAQHGCMTGRGVRTPGVGMVTSRLLGCFLDDERSRKEVLSLMGY

SEQ ID NO: 14934 - protein, 210 aa, Sphingopyxis indica
  misc_feature (1)..(210): tr|A0A239FK93|A0A239FK93_9SPHN GTP cyclohydrolase 1 OS= Sphingopyxis indica OX=436663 GN=folE PE=3 SV=1
MTQAKGTPGDGDLVDDRYDADGKLVVPAHVADAVRTLIEWAGDDPAREGLRDTPKRVARAWKEYCQGYSEDPSVHLSRTFEEVGGYDEIVLLRDIPFQSHCEHHMAPITGKASIAYLPRDRVVGISKLARVLNGYARRLQVQERLTAEVARCIWDNLQPQGVAVVIDAQHGCMTGRGVRTPGVGMVTSRLLGCFLDDERSRKEVLSLMGY

SEQ ID NO: 14935 - protein, 217 aa, Sphingopyxis lindanitolerans
  misc_feature (1)..(217): tr|A0A2S8B5N2|A0A2S8B5N2_9SPHN GTP cyclohydrolase 1 OS= Sphingopyxis lindanitolerans OX=2054227 GN=folE PE=3 SV =1
MDLLQTPTPPDADNTDDTAPIDTAAPRPGRAAVEAAVRTLIAAAGDDPAREGLRDTPARVARAYGEWFSGYAIDPKAYLNRVFDEAEGYEDTVLLRDIPLVSTCEHHMAPITGRVHVAYRPRGRVVGISKLSRLVDAFGRRLQLQERLTQQIATTLFSVLKPSGVAVIVEARHGCMTTRGVNQPHVAMVTKAWLGDFREDAELRRDLLAAIPFGLDR

SEQ ID NO: 14936 - protein, 198 aa, Sphingopyxis lindanitolerans
  misc_feature (1)..(198): tr|A0A2S8B2L2|A0A2S8B2L2_9SPHN GTP cyclohydrolase 1 OS= Sphingopyxis lindanitolerans OX=2054227 GN=folE PE=3 SV =1
MTKVELGADGKPVVPGPVLDAVRTLIEWAGDDPAREGLVDTPRRVARAWLEYCQGYEDDPAVHLSRTFEEVGGYDEIVLLRDIPFQSHCEHHMAPITGKASIAYLPRDRVVGISKLARVLNGFARRLQVQERLTAEVAKCIWDNLHPQGVAVVIDAQHGCMTGRGVRTPGVGMVTSRLLGCFLDDERSRKEVLSLMGY

SEQ ID NO: 14937 - protein, 198 aa, Sphingopyxis macrogoltabida
  misc_feature (1)..(198): tr|A0A0N7GSN4|A0A0N7GSN4_SPHMC GTP cyclohydrolase 1 OS= Sphingopyxis macrogoltabida OX=33050 GN=folE PE=3 SV=1
MTKVELGPDGKPVVPEEVLGAVRTLIEWAGDDPSREGLLDTPRRVARAWLEYCQGYADDPAIHLSRTFEEVGGYDEIVMLRDIPFQSHCEHHMAPITGKASIAYLPRDRVVGISKLARVLNGYARRLQVQERLTAEVAKCIWDNLQPHGVAVVIDAQHGCMTGRGVRTPGVGMVTSRLLGSFLDDERSRKEVLALMGY

SEQ ID NO: 14938 - protein, 198 aa, Sphingopyxis macrogoltabida
  misc_feature (1)..(198): tr|A0A0P0DV95|A0A0P0DV95_SPHMC GTP cyclohydrolase 1 OS= Sphingopyxis macrogoltabida OX=33050 GN=folE PE=3 SV=1
MTKVELGPDGKPVVPEEVLGAVRTLIEWAGDDPSREGLLDTPKRVARAWLEYCQGYADDPAIHLSRTFEEVGGYDEIVMLRDIPFQSHCEHHMAPITGKASIAYLPKDRVVGISKLARVLNGYARRLQVQERLTAEVAKCIWDNLQPHGVAVVIDAQHGCMTGRGVRTPGVGMVTSRLLGSFLDDERSRKEVLALMGY

SEQ ID NO: 14939 - protein, 218 aa, Sphingopyxis sp.
  misc_feature (1)..(218): tr|A0A270B9B6|A0A270B9B6_9SPHN GTP cyclohydrolase 1 OS= Sphingopyxis sp. GW247-27LB OX=2012632 GN=folE PE=3 SV= 1
MEMYDLAPEPAPTETDGAFEEKCPRPGQAEIEAAVRTLIAAAGDDPAREGLAETPARVARAYREWFAGYRIDPRHLLSRTFGEAAGYDETILLRSIPLVSTCEHHLAPIVGVAHVAYRPRDRVVGISKLSRLVDAYARRLQLQERLTRQIAHALDEALQPRGVAVIIEAGHACMSTRGVRQHGVSLVTKCWLGEFGEDAELRRELLGSLPRRSVGGEG

SEQ ID NO: 14940 - protein, 200 aa, Sphingopyxis sp.
  misc_feature (1)..(200): tr|A0A0W1DPE4|A0A0W1DPE4_9SPHN GTP cyclohydrolase 1 OS= Sphingopyxis sp. H050 OX=1759072 GN=folE PE=3 SV=1
MLYVPPSIEARNDGEIPAEVLASVATLLRWVGEDPEREGLVDTPRRVARAWREYCLGYDEDPAIHLARTFEEVGGYDEVVLLRDIPFQSHCEHHMAPITGKASIAYLPKDRVVGISKLARVLNGYARRLQVQERLTAEVAQCIWDNLQPHGVAVVIDAQHGCMTGRGVRSHGVGMVTSRLLGCFLNDQRSRKEVLSLMGY

SEQ ID NO: 14941 - protein, 215 aa, Sphingopyxis terrae
  misc_feature (1)..(215): tr|A0A142VVY3|A0A142VVY3_9SPHN GTP cyclohydrolase 1 OS= Sphingopyxis terrae subsp. terrae NBRC 15098 OX=1219058 GN=folE PE=3 SV=1
MDLVTANELTENKPHTENLGYLAASDRPSRAAIEAAVRTLIAAAGDNPYREGLIETPARVARAYEEWFSGYQIDPAQHLLRVFDESNDYEDTVLLKAIPFTSTCEHHMAPIIGHAHVAYRPSGKVVGISKLSRLVDGFARRLQLQERLTQQIAQTLNDILEPRGVAVVLEASHGCMTSRGVNQRGVAMVTKAWLGDFADDAELRRELLMSIASGC

SEQ ID NO: 14942 - protein, 210 aa, Sphingopyxis terrae
  misc_feature (1)..(210): tr|A0A1Y6EUN7|A0A1Y6EUN7_9SPHN GTP cyclohydrolase 1 OS= Sphingopyxis terrae subsp. ummariensis OX=429001 GN=fol E PE=3 SV=1
MNFVARTPFLDTPDGPPVSEDGKLPVPADVTRAIETLIRWVGDDPAREGLLDTPKRVARAWKEYCSGYGEDPAVHLSRTFEEVGGYDEIVLLRDIPFQSHCEHHMAPITGKASIAYLPRERVVGISKLARVLNGYARRLQVQERLTAEVAKCIWDNLHPQGVAVVIDAQHGCMTGRGVRTPGVGMVTSRVLGCFLEDQRSRKEVLSLMGY

SEQ ID NO: 14943 - protein, 213 aa, Sphingopyxis witflariensis
  misc_feature (1)..(213): tr|A0A246JD91|A0A246JD91_9SPHN GTP cyclohydrolase 1 OS= Sphingopyxis witflariensis OX=173675 GN=folE PE=3 SV=1
MEFQTGVEMREPDSKEELSDAATTLRPGRAAVETAVRTLIAAAGDNPMREGLVETPARVARAYAEWFAGYRVDPAAYLRRVFEEAEGYQETVLLRSIPLVSTCEHHMAPIVGRAHVAYRPSGKVVGISKLSRLVDAFARRLQLQERLTQQIAQTLFDTLEPRGVAVVIEASHGCMTSRGVNQPGVSMVTQAWLGDFASDAELRRDFLSSIMGV

SEQ ID NO: 14944 - protein, 198 aa, Sphingopyxis witflariensis
  misc_feature (1)..(198): tr|A0A246K4B2|A0A246K4B2_9SPHN GTP cyclohydrolase 1 OS= Sphingopyxis witflariensis OX=173675 GN=folE PE=3 SV=1
MSEVEVGPDGKIIVPDHVLDAVRTLIEWTGDDVAREGLLDTPRRVARAWKEYCQGYAEDPSVYLSRTFEEVGGYDEIVLLRDIPFQSHCEHHMAPITGKASIAYLPRDRVVGISKLARVLNGYARRLQVQERLTAEVAKCIWDNLQPHGVAVVIDAQHGCMTGRGVRTPGVGMVTSRLLGCFLDDQRSRKEVLSLMGY

SEQ ID NO: 14945 - protein, 206 aa, Sphingorhabdus contaminans
  misc_feature (1)..(206): tr|A0A553WKY4|A0A553WKY4_9SPHN GTP cyclohydrolase 1 OS= Sphingorhabdus contaminans OX=1343899 GN=folE PE=3 SV=1
MVFPIAHIHYHDEIDGNGKVIVPEDVQDAIRTLIRWSGDDPSREGLLDTPARVGRAWREYCAGYAEDPAAHLSRTFQEVGGYHELVLLKDIPFQSHCEHHMAPIIGKASIAYMPTDRVVGISKLARVLHGFAQRLQVQERLTAEVANCIWDNLKPEGVAVVIEAQHGCMTGRGVKVHGVGMVTSKLIGCFLDDQSSRKEVMSLMGY

SEQ ID NO: 14946 - protein, 206 aa, Sphingorhabdus marina
  misc_feature (1)..(206): tr|A0A1N6FC64|A0A1N6FC64_9SPHN GTP cyclohydrolase 1 OS= Sphingorhabdus marina DSM 22363 OX=1123272 GN=folE PE=3 SV=1
MADYSDSIEDALAAREAAKLPVPDEVQEAVKTLLRWSGEDPDREGLLDTPKRVARAWKEYCEGYNENPAIHLARTFEEVGGYDELVLLKDIPFHSHCEHHMAPIIGKASIAYMPTDRVVGISKLARVLHGFARRLQVQERLTAEVAQCIWDNLKPHGVAVVVEASHSCMTARGVRTPGVGMTTSRLLGCFLEDARSRKEVMSLMGY

SEQ ID NO: 14947 - protein, 199 aa, Sphingorhabdus sp.
  misc_feature (1)..(199): tr|A0A2D3RIU6|A0A2D3RIU6_9SPHN GTP cyclohydrolase 1 OS= Sphingorhabdus sp. YGSMI21 OX=2077182 GN=folE PE=3 SV=1
MEDALAEREAQKIPVPEEVQEAVRTLLRWSGEDPEREGLIDTPKRVARAWKEYCEGYAENPAMHLARTFEEVGGYDELVLLKDIPFHSHCEHHMAPIIGKASIAYMPTDKVVGISKLARVLHGFARRLQVQERLTAEVAECIWENLKPDGVAVVIEASHSCMTARGVRTPGVSMTTSRLLGCFLEDARSREEVMSLMGY

SEQ ID NO: 14948 - protein, 206 aa, Sphingorhabdus sp.
  misc_feature (1)..(206): tr|A0A220W4G3|A0A220W4G3_9SPHN GTP cyclohydrolase 1 OS= Sphingorhabdus sp. SMR4y OX=2584094 GN=folE PE=3 SV=1
MADHSLSIEDALAEREAQKIPVPDEVQEAVRTLLRWSGEDPEREGLVDTPKRVARAWKEYCEGYAENPAMHLARTFEEVGGYDELVLLKDIPFHSHCEHHMAPIIGKASIAYMPTDKVVGISKLARVLHGFARRLQVQERLTAEVAECIWENLKPQGVAVVIEASHSCMTARGVRTPGVSMTTSRLLGCFLDDARSREEVMSLMGY

SEQ ID NO: 14949 - protein, 211 aa, Sphingorhabdus wooponensis
  misc_feature (1)..(211): tr|A0A426RRW3|A0A426RRW3_9SPHN GTP cyclohydrolase 1 OS= Sphingorhabdus wooponensis OX=940136 GN=folE PE=3 SV=1
MTKHEKVFPIAHIHYEDEIGENGKIVVPDDVQDAIRTLIRWSGDNPEREGLLDTPARVGRAWREYCAGYAEDPAAHLSRTFQEVGGYHELVLLKDIPFQSHCEHHMAPIIGKASIAYMPTDKVVGISKLARVLHGFAQRLQVQERLTAEVANCIWENLKPEGVAVVIEAQHGCMTGRGVKVHGVGMVTSKLIGCFLDDQSSRKEVMSLMGY

SEQ ID NO: 14950 - protein, 206 aa, Sphingosinicella ginsenosidimutans
  misc_feature (1)..(206): tr|A0A5C6TVL1|A0A5C6TVL1_9SPHN GTP cyclohydrolase 1 OS= Sphingosinicella ginsenosidimutans OX=1176539 GN=folE P E=3 SV=1
MAEQADASDDGDLVDEPGKVHVPDDVQEAIRTLIRWAGDDPEREGLRDTPKRVARAWREYARGYGEDPAHHLRRTFEEVGGYDEIVLLKDIPFQSHCEHHLAPIIGKAAIAYLPGDKVVGISKLARVLHGFARRLQVQERLTAQVADCIWDNLQPQGVAVVIEASHACMTARGVKTPGVMMTTSRMMGVFRDDERSRREVLALMGY

SEQ ID NO: 14951 - protein, 195 aa, Sphingosinicella microcystinivorans
  misc_feature (1)..(195): tr|A0A495RDW1|A0A495RDW1_SPHMI GTP cyclohydrolase 1 OS= Sphingosinicella microcystinivorans OX=335406 GN=folE P E=3 SV=1
MTASNDRDNGIPEDVLASVRRLIEWAGDDPAREGLADTPGRVARAYREYFRGYDEDPARHLSRTFEEVGGYDEIVLLRDIAFQSHCEHHMAPIIGKAHIAYLPGDRVVGISKLARVLKGFASRLQVQERLTAEVADCIWEHLQPRGVAVVIEAAHACMSARGVNTPGVTMTTSRMMGVFREDERSRKEVLSLMGL

SEQ ID NO: 14952 - protein, 205 aa, Sphingosinicella sp.
  misc_feature (1)..(205): tr|A0A2P7QP64|A0A2P7QP64_9SPHN GTP cyclohydrolase 1 OS= Sphingosinicella sp. GL-C-18 OX=2116704 GN=folE PE=3 SV =1
MANGDNLSDGDLVRPAPKIEVPADVQEAVRTLIRWAGDDPAREGLLDTPLRVARAWKEYAKGYDEDPAYHLSRTFDEVGGYDEIVLLKDIPFQSHCEHHMAPIIGKASIAYLPNERVVGISKLARVLHGFARRLQVQERLTAQVADCVWEHLKPQGVAVVIEASHACMTARGVNTPGVMMTTSRMMGVFRQDERSRREVLALMGY

SEQ ID NO: 14953 - protein, 203 aa, Sphingosinicella sp.
  misc_feature (1)..(203): tr|A0A2U2J5P2|A0A2U2J5P2_9SPHN GTP cyclohydrolase 1 OS= Sphingosinicella sp. QZX222 OX=2068657 GN=folE PE=3 SV= 1
MTSTPEDGDLYRSPKKIAVPQEVREAVRTLIRWAGDDPDREGLLDTPVRVARAWKEYAQGYAEDPAHHLSRTFEEVGGYDEIVLLKDIPFQSHCEHHLAPIIGKASIAYLPKDRVVGISKLARVLHGYARRLQVQERLTAEVADCIWGHLEPQGVAVVIEASHACMTARGVRTPGVMMTTSRMMGVFREDERSRREVLALMGY

SEQ ID NO: 14954 - protein, 187 aa, Spiribacter aquaticus
  misc_feature (1)..(187): tr|A0A557RM13|A0A557RM13_9GAMM GTP cyclohydrolase 1 OS= Spiribacter aquaticus OX=1935996 GN=folE PE=3 SV=1
MNPDLDHHFEQIITGLGEDPSRGGLEKTPYRAARAMEYLTQGYHQSLDELVNDAMFESDNDEMVIVRDIEFYSLCEHHVLPFFGHAQVGYIPDGRVIGLSKIARVVDMYARRLQIQENLAREVAEAIQQVTQARGVAVQMDAQHMCMMMRGVSKQNAEMSSSVMLGTFRESVSARNEFLQLIRRRPA

SEQ ID NO: 14955 - protein, 188 aa, Spiribacter curvatus
  misc_feature (1)..(188): tr|U5T5C5|U5T5C5_9GAMM GTP cyclohydrolase 1 OS=Spiribac ter curvatus OX=1335757 GN=folE PE=3 SV=1
MMNPDLDHHFEQIITGLGEDTRRGGLEKTPYRAARAMEYLTQGYHQSLDELVNGAMFESDNDEMVIVRDVEFYSLCEHHVLPFFGHAQVGYIPDGRVIGLSKIARIVDMYARRLQIQENLAREVAEAIQHVTQARGVAVQMDAQHMCMMMRGVSKQNAEMSSSVMLGTFRESVSARNEFLQLIRRRPA

SEQ ID NO: 14956 - protein, 156 aa, Spiribacter salinus
  misc_feature (1)..(156): tr|A0A540VMZ6|A0A540VMZ6_9GAMM GTP cyclohydrolase 1 (Fr agment) OS=Spiribacter salinus OX=1335746 GN=FKY71_1538 5 PE=3 SV=1
MDRFEQRRSAACLLLVAAEPLRHSRGGLNETPDRVAKAWEFWTSGYQQHPADVLKAFEDGADGYDEMVAVVGIPFYSKCEHHLADIFGTATVAYVPDGRIVGLSKLSRLVDVFARRLQVQERLTVQVADALDEHLAPLGVGVTISARHLCMESRGL

SEQ ID NO: 14957 - protein, 184 aa, Spiribacter salinus
  misc_feature (1)..(184): tr|A0A540VUJ6|A0A540VUJ6_9GAMM GTP cyclohydrolase 1 OS= Spiribacter salinus OX=1335746 GN=folE PE=3 SV=1
MNPDLDHHFEEIIRGIGEDVTREGLAKTPYRAARAIEYLTQGYQQSLDDLVNDALFESDSDEMVIVRDIEFYSLCEHHVLPFIGRAQVGYIPNGKVIGLSKIARIIDMYARRLQIQEKLTRDVAEAIQEATGALGVAVQMDAKHLCMMMRGVNKQNSEMSSSVMLGAFRDSQSTRNEFLQLIRR

SEQ ID NO: 14958 - protein, 184 aa, Spiribacter sp.
  misc_feature (1)..(184): tr|A0A2U2N1R4|A0A2U2N1R4_9GAMM GTP cyclohydrolase 1 OS= Spiribacter sp. E85 OX=2182432 GN=folE PE=3 SV=1
MDHDLDYHFEQIIRGIGEDVGREGLVKTPERAARAFEYLTQGYQQSLSELVNGALFESDSDEMVIVRDIEFYSLCEHHMLPFIGRAQVGYIPNGRVLGLSKIARIVDMYARRLQIQEKLTRDVAEAVLEVTGAKGVAVQMDARHLCMMMRGVNKQNSEMSTSVMLGSFRTSQSTRNEFLQLIRR

SEQ ID NO: 14959 - protein, 200 aa, Spirobacillus cienkowskii
  misc_feature (1)..(200): tr|A0A369KQE4|A0A369KQE4_9PROT GTP cyclohydrolase 1 OS= Spirobacillus cienkowskii OX=495820 GN=folE PE=3 SV=1
MTANATSKKAVDSNNVSAQQATEAVRTLLHYIGENPNREGLTDTPDRFCRALLEMSNGYQLTAKSILSTTFDSDSDEMVLLKNIEFTSLCEHHLLSFSGVAHVAYLPSNGKIVGLSKLARVVDLYAHRLQVQERLTQQVAQAIEHYLKPLGVAVVFEGVHSCMCVRGVRKQNSTMITSAMLGQFRDSLASRNEFMSLISK

SEQ ID NO: 14960 - protein, 261 aa, Spirobacillus cienkowskii
  misc_feature (1)..(261): tr|A0A369KS57|A0A369KS57_9PROT GTP cyclohydrolase FolE2 OS=Spirobacillus cienkowskii OX=495820 GN=folE2 PE=3 S V=1
MQDTQDSKDDRMIKIAKVGIKNVKHPIFYCDHPLQKQNFPSVASFSFFVELPADKKGTHMSRFPSVLYEFAPHFTLQRFQEFALAINQKLESKVSYLEANFPYFYEKYAPVSHSKGLADVQIDLKITGFAQTNSVDTELSITIPVKSLCPCSKAISDYGAHSQRSYLNITVWNPQLSIHNYIEIAESSASAAVYPILKRIDEKFITEQAYNNPRFVEDLVREAAIKLKEKNSATRFTVSAENFESIHNHNAWAFVDSESIV

SEQ ID NO: 14961 - protein, 257 aa, Spirochaeta lutea
  misc_feature (1)..(257): tr|A0A098R0M3|A0A098R0M3_9SPIO GTP cyclohydrolase FolE2 OS=Spirochaeta lutea OX=1480694 GN=folE2 PE=3 SV=1
MQDVQSQPDGRNIPLQKVGVKNIKYPIVVLDKVNKTQATTATVDLYANLPHHFKGTHMSRFIEVFHDHSKNVKMENFIHMLHSIRSVLDAEQAYGRIAFPYFIEKKAPVSGQASMMQYHCTYEGTAGPVDHEFYVGIEVPVLTLCPCSKEISDRGAHNQRSMVKVLLKMGSFFWIEEIITLIENSASCGLFTLLKREDEKWVTEHSYDNPTFVEDLVREVTVKIEGLNKFPWFSVEAENMESIHLHDAYAYVERGVK

SEQ ID NO: 14962 - protein, 186 aa, Spirochaeta perfilievii
  misc_feature (1)..(186): tr|A0A5C1Q7K8|A0A5C1Q7K8_9SPIO GTP cyclohydrolase 1 OS= Spirochaeta perfilievii OX=252967 GN=folE PE=3 SV=1
MDKEKIERAVRDILEAIGEDPKREGLLDTPRRVANMYEEIFSAINKDPSDDLQVFFEQAGHEELVLVKDIPFYSCCEHHLVPFFGKAHIGYIPRNGKITGLSKLARVVDTVAKKPQLQERLTTEIVEALEKQLNPLGVIVVVEAEHMCMTMRGIKKPGSRTITSGVRGAFQSDAKVRAEALQLIKF

SEQ ID NO: 14963 - protein, 188 aa, Spirochaeta sp.
  misc_feature (1)..(188): tr|A0A1W9NAE6|A0A1W9NAE6_9SPIO GTP cyclohydrolase 1 OS= Spirochaeta sp. LUC14_002_19_P3 OX=1940821 GN=folE PE=3 SV=1
MDEEKITRLIRELLIEIGEDPDREGLLRTPERVMDMWKFLSSGYRQDVKEIVNGAIFESEANNMILCRDIEVYSLCEHHLLPFFGTCTIGYIARHHVIGVSKLARIVDYFSRRLQLQERLTAQIARAVKDSVDAIGVGVIIEAKHMCMAMRGVEKQLSSMTTSSVLGCFQRDATCRSEFLHLAGRQNK

SEQ ID NO: 14964 - protein, 187 aa, Spirochaeta sp.
  misc_feature (1)..(187): tr|A0A3C0SWI6|A0A3C0SWI6_9SPIO GTP cyclohydrolase 1 OS= Spirochaeta sp. OX=28185 GN=folE PE=3 SV=1
MDQKKVESLIRELLIEIGEDPNREGLVKTPERAAKSWQFLTNGYTADFDKVINNAVFESTSNNMIIVRDIEVYSMCEHHMLPFFGKCHIGYVASDKILGVSKLARIVDHYARRLQIQENLTEQVAEAIMETVQPEGVGVVMECQHMCMMMRGVEKQNSVMTTSSVLGSFRKKEATRLEFLNLIHGAR

SEQ ID NO: 14965 - protein, 267 aa, Spirochaeta thermophila
  misc_feature (1)..(267): tr|E0RSF2|E0RSF2_SPITD GTP cyclohydrolase FolE2 OS=Spir ochaeta thermophila (strain ATCC 49972 / DSM 6192 / RI 19.B1) OX=665571 GN=folE2 PE=3 SV=1
MVVDTQSAFDDRNIPIDKVGIKGLTYPVTVLDKRHRIQHTVATVNMFANLPHHFRGTHMSRFVEVFQAHYKNIQMKGFLSMLEDVRKALDAEAAFVDLSFPYFIEKEAPVSRQKSLLEYRCSYIGELNGEHRSFFVGIEVPINTVCPCSKEISRFGAHNQRGIVRLTVQLGPFFWIEDMIEEIEASASAGIYTLLKREDEKFITEHGYEHPRFVEDVAREVVLRVERFAAFPWFRVEVENMESIHNHNAYACIERGKRERSVWNSIV

SEQ ID NO: 14966 - protein, 266 aa, Spirochaeta thermophila
  misc_feature (1)..(266): tr|G0GCZ8|G0GCZ8_SPITZ GTP cyclohydrolase FolE2 OS=Spir ochaeta thermophila (strain ATCC 700085 / DSM 6578 / Z- 1203) OX=869211 GN=folE2 PE=3 SV=1
MVDTQSAFDDRNIPIDKVGIKGLTYPVTVLDKRHRIQHTVATVNMFANLPHHFRGTHMSRFVEVFQAHYKNIQMKGFLSMLEDVRKALDAEAAFVDLSFPYFIEKEAPVSRQKSLLEYRCSYIGELNGEHRSFFVGIEVPINTVCPCSKEISRFGAHNQRGMVRLTVQLGPFFWIEDMIEEIEASASAGIYTLLKREDEKFITEHGYEHPRFVEDVAREVVLRVERFAAFPWFRVEVENMESIHNHNAYACIERGKRERSVWNSIV

SEQ ID NO: 14967 - protein, 262 aa, Spirochaetaceae bacterium
  misc_feature (1)..(262): tr|A0A3C0WXF3|A0A3C0WXF3_9SPIO GTP cyclohydrolase FolE2 OS=Spirochaetaceae bacterium OX=1898206 GN=folE2 PE=3 SV=1
MEDIQNSIDSRGIAIQHVGVSEAHLPFQIRTKEGDFQQVLARICFTVSLPQEYKGTHMSRFLEILNRWSMRPIAEPEMEAILDEAMQRLSAASANIEIRFKYFIKKVAPVSGKSSFLDLDCCFYGSKQRDKGFVFELGVNVPFTSLCPCSKSISRYGAHNQRGMMRARVRFQEGCTCIYIEDLAELMEQQASCPIYSLLKREDEKYVTEHAYENPKFVEDILRDLVIAFRDLPHLEWFSVVCENYESIHNHNAYASYEECIQ

SEQ ID NO: 14968 - protein, 186 aa, Spirochaetaceae bacterium
  misc_feature (1)..(186): tr|A0A1W9V450|A0A1W9V450_9SPIO GTP cyclohydrolase 1 OS= Spirochaetaceae bacterium 4572_59 OX=1971727 GN=folE PE =3 SV=1
MNKERVAQLINELLLEMGEDPDREGLVKTPERVAEAYSFLTSGYSMDLKEVVNGAVFESEANNMILCKDIEVYSLCEHHILPFFGTCHIGYIAKNKVIGVSKMARIVNYYARRLQIQERLTSQIAHTIREEVGAEGVGVVMECRHMCMMMRGVQKQNSAMVTSSVLGSFHSSAATREEFMSLIGRR

SEQ ID NO: 14969 - protein, 262 aa, Spirochaetae bacterium
  misc_feature (1)..(262): tr|A0A2N1TFI6|A0A2N1TFI6_9SPIR GTP cyclohydrolase FolE2 OS=Spirochaetae bacterium HGW-Spirochaetae-1 OX=201383 2 GN=folE2 PE=3 SV=1
MGKKDLRDIQSEPDYRNLAINRVGVKDISYPVVVLDRAEGEQHTVARVNMYVNLPHHFRGTHMSRFIEILNTYRKGISTLNIREILEAMKDQLDAETAHFEIEFPYFITKEAPVSRERAKMEYTCRLTANSDNDYYLLEVKVPVLSLCPCSKEISQYGAHNQRSILSVSIKARERIWIEDIVNVAEQSASSDVFSILKREDEKYITEKAYENPVFVEDIVRNAAEHLKKIEGILWFSVESENMESIHNHSAYAQIEMDLGGK

SEQ ID NO: 14970 - protein, 255 aa, Spirochaetae bacterium
  misc_feature (1)..(255): tr|A0A2N1R034|A0A2N1R034_9SPIR GTP cyclohydrolase FolE2 OS=Spirochaetae bacterium HGW-Spirochaetae-9 OX=201384 1 GN=folE2 PE=3 SV=1
MVDVQSMKDERRIPIQKVGVKGVRYPITLRDKAAQFQHTTAVVNLYADLPHDFKGTHMSRFIEVFEESRSDLSMPSFLGMLQKIRLELEAETAYSEIHFPYFIQKKAPVSGQSSMMSYDCSYEGKVSDAGHSFIVGVTVPIQTVCPCSKAISSQGAHNQRGLVTLKVALGPFFWIEDLVAIVEDSASSDLFTLLKREDEKYITERSYDRPRFVEDLVREVYLRVEALGKFPRFSVEAENFESIHNHSAYAFVEKA

SEQ ID NO: 14971 - protein, 188 aa, Spirochaetales bacterium
  misc_feature (1)..(188): tr|A0A2D6LA66|A0A2D6LA66_9SPIR GTP cyclohydrolase 1 OS= Spirochaetales bacterium OX=2026792 GN=folE PE=3 SV=1
MDKKRVATLIRELIMEIGENPDREGLLKTPERVALAWEFLTKGYRDKPDDIINGAVFNSEANNMIIARDIEVYSLCEHHMLPFYGRCHIGYIANSEVLGLSKIARIVNHYARRLQIQERLTADIANEMRRAVNAEGVGVVMECKHLCMMMRGVEKQHSFMTTSSVLGSFHGDQSTRLEFLNLIGRDTL

SEQ ID NO: 14972 - protein, 266 aa, Spirochaetales bacterium
  misc_feature (1)..(266): tr|A0A524IIP6|A0A524IIP6_9SPIR GTP cyclohydrolase FolE2 OS=Spirochaetales bacterium OX=2026792 GN=folE2 PE=3 S V=1
MLCMVDVQSRKDNRKIQINKVGVKGLHYPIVVLDKQNKFQHTIADISLFADLAHNLKGTHMSRFIQIFNRYSADFSMENFLEMLKKIKNTLHAQNSFGEVSFPYFIEKEAPVSKEKSKMNYVCEYIGEVREEKTLFYIGIQVPVTTVCPCSKDISARGAHNQRGIVRVKLCLDKFFWIEDIISLIEKSASSELFTLLKREDEKYITERAFDNPRFVEDLVRDVTQRIEKMGQFPWFSVEAENFESIHNHSAYAYVERGNKNYELAE

SEQ ID NO: 14973 - protein, 263 aa, Spirochaetes bacterium
  misc_feature (1)..(263): tr|A0A522D3V6|A0A522D3V6_9SPIR GTP cyclohydrolase FolE2 OS=Spirochaetes bacterium OX=2202144 GN=folE2 PE=3 SV= 1
MPRRKLRDIQSEAPGIRDLPINKVGVKDISYPVVVLDRAEGRQHTVARVNMYVDLPHHFRGTHMSRFIEILNRYREGISTLNIREILDEMKSQLKARNAHFEIEFPYFITKGAPISGEKAKMEYACRLSANSYDDFYTLAVRVPVLSLCPCSKEISEFGAHNQRSIMTITVQARERIWIEEIVDLAEKSASSDIYSILKREDEKYLTEKSYENPMFVEDMVRSAAAKLAGLDKILWFSAESENMESIHNHSAYAQIEMDHRRS

SEQ ID NO: 14974 - protein, 297 aa, Spirochaetes bacterium
  misc_feature (1)..(297): tr|A0A1V5TBZ2|A0A1V5TBZ2_9SPIR GTP cyclohydrolase FolE2 OS=Spirochaetes bacterium ADurb.Bin269 OX=1852911 GN=f olE2 PE=3 SV=1
MLDIQNEPDTREVPLQKVGIKGLQYPILVLDRDHKRQHTTAQANLFVNLPQHFKGTHMSRFIEVFHRHRDNLSMPHFLDMLAEIRESLEASSAFGELTFPYFMEKKAPVSRESALMSYECGYEGSVTADSTAFFVSVAVPVQTVCPCSKAISAYGAHNQRGIVRVKLELGPFFWIEDLVDLIEGCASSAVWTLLKREDEKYVTEAAYDNPKFVEDLVRDVILAVPRLGAYPWYSVEAENFESIHNHSAFAYAEGGTRSGSSPATQSPGCVSPGCVSPGCDSPAHPAPCRLPTENNPT

SEQ ID NO: 14975 - protein, 184 aa, Spirochaetia bacterium
  misc_feature (1)..(184): tr|A0A3D3AJN3|A0A3D3AJN3_9SPIR GTP cyclohydrolase 1 OS= Spirochaetia bacterium OX=2053615 GN=folE PE=3 SV=1
MSLEENVFQILKGLGEDPEREGLLKTPHRVAKALQFLTQGYTKNLDEIVNNAVFNNSYESEMIIVKDIELYSICEHHMLPFFGKCHVGYLPDKKIIGLSKIPRIVDLFSQRLQIQERLTTQIAETIEKILNPLGVAVVIEASHLCARMRGVQKQNSEMVTSCVKGAFRKNASTREEFLKLIGKK

SEQ ID NO: 14976 - protein, 179 aa, Spirochaetia bacterium
  misc_feature (1)..(179): tr|A0A352VAR7|A0A352VAR7_9SPIR GTP cyclohydrolase 1 OS= Spirochaetia bacterium OX=2053615 GN=folE PE=3 SV=1
MKDLIEKLIIDIGDNPNREGLLKTPHRVEKAIKFLTKGYHDNIEEIVNNAIFKAEDNEMIIIKDIEFYSLCEHHMLPFYGKCHIAYIPDKTIMGLSKFARITDHFSRKLQIQERLTTQITEYIDKTLNPMGVGVVIEAMHLCMMMRGVQKQNSYTVTSSLRGIFKSNSRTRNEFLSLIK

SEQ ID NO: 14977 - protein, 185 aa, Unknown
  misc_feature (1)..(185): tr|A0A421KAA2|A0A421KAA2_9SPIR GTP cyclohydrolase 1 OS= spirochete symbiont of Stewartia floridana OX=1968597 G N=folE PE=3 SV=1
MDKNRVTQLTRELLLEIGENPDREGLRCTPDRVAETWKFLTSGYRSNLNSLVNGAIFETEANNMIICRDIEIYSLCEHHLLPFFGTCTIGYIAKRHVMGLSKLARVADHFSRRLQLQERLTAQIAEAVMDRLDATGVGVVINAKHMCMTMRGVEKQNSTMTTSSVLGCFQSDPRSRNEFLTLANG

SEQ ID NO: 14978 - protein, 119 aa, Spiroplasma poulsonii
  misc_feature (1)..(119): tr|A0A2P6FFD4|A0A2P6FFD4_9MOLU Putative GTP cyclohydrol ase 1 type 2 OS=Spiroplasma poulsonii OX=2138 GN=SMSRO_ SF020620 PE=4 SV=1
MLIKKLYQEIETNFPLKTTAKWDYSGFQWEFKHNEITQVFVSLDLTTEVIDEAIAQKANVIITHHPFCFNKKKVWAQIKYKQEILKRLKEHQISVYAVHTNYDGLIDFLHYLLKNCKYL

SEQ ID NO: 14979 - protein, 268 aa, Spirosoma endophyticum
  misc_feature (1)..(268): tr|A0A1I2A2E3|A0A1I2A2E3_9BACT GTP cyclohydrolase 1 OS= Spirosoma endophyticum OX=662367 GN=folE PE=3 SV=1
MKLNGISSNTPSNGHSSTDAQHDGRATNGVSHNGSSVDGHSVACDCLTDELVDEIGDAHGTSSIDTPMRPDAFNLDDDFKIDLIEEHFREIMNILGLDLTDDSLKGSPRRVAKMYVNEIFSGLNPANKPTPTLFDNKFRYKEMLVEKDIIVQTYCEHHFVPIIGKSHVAYISSGKVIGLSKLNRVVEYFSKRPQVQERLTIQIAEELKRVLETDDVAVIIDAKHLCVSTRGVRDINSSTITSSYGGKFEEEATRQEFLRYVAQPSITI

SEQ ID NO: 14980 - protein, 257 aa, Spirosoma fluviale
  misc_feature (1)..(257): tr|A0A286F7H5|A0A286F7H5_9BACT GTP cyclohydrolase 1 OS= Spirosoma fluviale OX=1597977 GN=folE PE=3 SV=1
MKLNGTSSNTPSNSTSSNGQPVHGSHKNGYSLDGAYADELVDEIGDAHGASSIDTPMRPDAFALDDELKIDLIEEHFREIMSILGLDLTDDSLKGSPRRVAKMYINEVFSGLNPANKPKATLFDNKFRYNEMLVEKDITVQTYCEHHFVPIMGKAHVAYISSGKVIGLSKLNRIVEYFSKRPQVQERLTIQIAEELKRVLETEDVAVIIDAKHLCVSTRGIHDVNSSTITASYSGKFSEDATKQELLRYVTQPSVSI

SEQ ID NO: 14981 - protein, 241 aa, Spirosoma linguale
  misc_feature (1)..(241): tr|D2QJ43|D2QJ43_SPILD GTP cyclohydrolase 1 OS=Spirosom a linguale (strain ATCC 33905 / DSM 74 / LMG 10896) OX= 504472 GN=folE PE=3 SV=1
MNGQPVNGNHKNGYALDGDYTDELVDEIGDAHGATSIDTPMRPDAFVLDDALKIDLIEEHFREIMTILGLDLTDDSLKGSPRRVAKMYVNEVFSGLNPANKPKSTLFDNKFRYNEMLVEKDITVQTYCEHHFVPILGKAHVAYISSGKVIGLSKLNRIVEYFSKRPQVQERLTVQIAEELKRVLETEDVAVIIDAKHLCVSTRGVHDVNSSTITSSYGGKFSEEATKQELLRFVTQPSVSI

SEQ ID NO: 14982 - protein, 253 aa, Spirosoma montaniterrae
  misc_feature (1)..(253): tr|A0A1P9WXD3|A0A1P9WXD3_9BACT GTP cyclohydrolase 1 OS= Spirosoma montaniterrae OX=1178516 GN=folE PE=3 SV=1
MKLNGISSNTPLNGNHLNGKHNGHTLNGHSHDVDQLIDAIGDEHGAASIDTPMRPDAFDLDDDTKIDLIEEHFREIMGILGLDLTDDSLKGSPRRVAKMYVKEIFRGLNPENKPAPTLFDNKFRYNEMLVEKDILVQTYCEHHFVPIIGKAHVAYISSGKVIGLSKLNRIVEYFSKRPQVQERLTVQIADELKKVLETEDVAVIVDAKHLCVSTRGVHDVNSSTITAAYGGKFEDEATRQEFLRYISCSNVTI

SEQ ID NO: 14983 - protein, 247 aa, Spirosoma oryzae
  misc_feature (1)..(247): tr|A0A2T0SM62|A0A2T0SM62_9BACT GTP cyclohydrolase 1 OS= Spirosoma oryzae OX=1469603 GN=folE PE=3 SV=1
MKPNGTSSNTPRNGVHRDGLYRDAPDYNGQPADQLLADEIGDVHGAAALDTPMRPDAFALDDDTKIDLIEEHFREIMNILGLDLTDDSLKGSPRRVAKMYVKEIFRGLNPDNKPAPTLFDNKFRYNEMLVEKDITVQTYCEHHFVPILGKAHVAYISSGKVIGLSKLNRIVEYYCKRPQVQERLTMQIADELKRVLETDDVAVLIDAKHLCVSTRGVQDINSSTITSSYSGKFADDATRQELLRYIG

SEQ ID NO: 14984 - protein, 252 aa, Spirosoma pollinicola
  misc_feature (1)..(252): tr|A0A2K8YSZ8|A0A2K8YSZ8_9BACT GTP cyclohydrolase 1 OS= Spirosoma pollinicola OX=2057025 GN=folE PE=3 SV=1
MKLNGTSSNTPSNGQAVNGHPANPVGMPAWEVDELVDEIGDAHGAASVDTPMRADAFAMDDDLKIDLIEEHFREIMTIMGLDLTDDSLKGSPRRVAKMYINEIFSGLNPANKPKPTLFDNKFGYDEMLVEKDITVQTYCEHHFVPILGKAHVAYISSGKVIGLSKLNRVVEYFSKRPQVQERLTIQIADELKRVLETEDVAVIIDAKHLCVSTRGIRDINSSTVTSSYSGKFAEDATKQELLRYVSQPSVTI

SEQ ID NO: 14985 - protein, 262 aa, Spirosoma radiotolerans
  misc_feature (1)..(262): tr|A0A0E3ZWB2|A0A0E3ZWB2_9BACT GTP cyclohydrolase 1 OS= Spirosoma radiotolerans OX=1379870 GN=folE PE=3 SV=1
MKLNGTSSNTPSTSQPTTGGQQNGHALDSHRTDSTGLSAWEVDELVDEIGDAHGASSIDTPMRPDAFAIDDDLKIDLIEEHFREIMGILGLDLTDDSLKGSPRRVAKMYVNEIFSGLNPANKPKPTLFDNKFRYNEMLVEKDITVQTYCEHHFVPIIGKAHVAYISSGKVIGLSKLNRVVEYFGKRPQVQERLTVQIAEELKRVLETDDVAVIIDAKHLCVSTRGVHDINSSTVTASYGGKFADEATKQELLRYIAQPSVTI

SEQ ID NO: 14986 - protein, 262 aa, Spirosoma sp.
  misc_feature (1)..(262): tr|A0A4Q2UKW2|A0A4Q2UKW2_9BACT GTP cyclohydrolase 1 OS= Spirosoma sp. TY50 OX=2502893 GN=folE PE=3 SV=1
MKRNGTSSSTPLNGQAMNGVSLNGNPMNGKHMNGNGLNGHHHDELIDEIGDEHGAASIDTPMRPDAFDLDDDTKIDLIEEHFREIMSILGLDLTDDSLKGSPRRVAKMYVKEIFRGLDPANKPAPTLFENKFRYNEMLVEKDILVQTYCEHHFVPIIGKAHVAYISSGKVIGLSKLNRIVEYYSKRPQVQERLTVQIADELKKVLETEDVAVIIDAKHLCVSTRGVHDVNSSTITAAYGGKFDEEATRQELLRYIGTSNVTI

SEQ ID NO: 14987 - protein, 244 aa, Spirosoma sp.
  misc_feature (1)..(244): tr|A0A514ZWZ7|A0A514ZWZ7_9BACT GTP cyclohydrolase 1 OS= Spirosoma sp. KCTC 42546 OX=2520506 GN=folE PE=3 SV=1
MKLNGTSSNTPSNGHALNGHGHHSDELVDELGDDHGTSSIDTPMRDDAFALDDDLKMELIEEHFREIMNILGLDLTDDSLKGSPRRVAKMYVKEIFSGLNPANKPKSTLFDNKFQYNEMLVEKDITVQTYCEHHFVPIIGKAHVAYISSGKVIGLSKLNRIVEYFCKRPQVQERLTIQIADELKRVLETEDVAVIIDAKHLCVSTRGVRDLNSTTITSSYSGKFEQEATRQELLRYVAQPSVGL

SEQ ID NO: 14988 - protein, 181 aa, Spongiibacter sp.
  misc_feature (1)..(181): tr|A0A2E9SIK7|A0A2E9SIK7_9GAMM GTP cyclohydrolase 1 OS= Spongiibacter sp. OX=2024860 GN=folE PE=3 SV=1
  misc_feature (181)..(181): Xaa can be any naturally occurring amino acid
MEKAFAKIIEEIGEDLSRDGLVDTPKRAAKAFEFITRGYRQSVDEVVNNALFESDANEMVVVSDIELYSLCEHHLLPFIGKCHVAYIPNGKVLGLSKVARIVDLYARRLQIQEGLTTQIANTVQDVTGAEGVAVIIEARHMCMMMRGVEKQNSVMRTSAMLGVFKENQATRAEFMALINKX

SEQ ID NO: 14989 - protein, 217 aa, Spongiibacter sp.
  misc_feature (1)..(217): tr|A0A2E9SRC9|A0A2E9SRC9_9GAMM GTP cyclohydrolase 1 OS= Spongiibacter sp. OX=2024860 GN=folE PE=3 SV=1
  misc_feature (2)..(2): Xaa can be any naturally occurring amino acid
  misc_feature (34)..(34): Xaa can be any naturally occurring amino acid
MXSKEATAVHEALLKAGLETPMRPQSALSNDQKXQRISDLMLGVMETLGLDLSDDSLEETPHRIAKMYVDEIFCGLDYSNFPKITNIDNKMRVEEMVKVSGVSVTSTCEHHFVTIDGEATVAYIPRDKVIGLSKINRIVRFFAQRPQVQERLTQQVLVALQTLLETDDVAVTVDAIHYCVKSRGVMDTNSRTQTTALGGSFKTDPSTRNEFLSQSCR

SEQ ID NO: 14990 - protein, 233 aa, Spongiibacteraceae bacterium
  misc_feature (1)..(233): tr|A0A2E2K0F3|A0A2E2K0F3_9GAMM GTP cyclohydrolase 1 OS= Spongiibacteraceae bacterium OX=2026793 GN=folE PE=3 SV =1
MTVALKAAESFSHQDAHTNGPEFSEAAEQVRHALIEAGLETPQVENHLSRDQKYARIRSAMTEVVEALGLDLRDDSLAETPHRIAKMYVDEIFSGLDYGSFPKITAIDNKMQVDEMVRVSDISLTSTCEHHFITIDGTASIAYIPAQKVIGLSKINRLVRFFAQRPQVQERLTRQILVALQTLLGTDDVAVSISAAHYCVKARGVMDSTSTTQTTALGGAFRSDAKTRAEFLR

SEQ ID NO: 14991 - protein, 180 aa, Spongiibacteraceae bacterium
  misc_feature (1)..(180): tr|A0A2E7IQL9|A0A2E7IQL9_9GAMM GTP cyclohydrolase 1 OS= Spongiibacteraceae bacterium OX=2026793 GN=folE PE=3 SV =1
MEKAFTDIIKAVGENPEREGLLDTPKRATKAFQFLTEGYRRSVDDIVNNALFESDCNEMVIVSDIEMYSLCEHHLLPFIGKCHVAYIPSGKVLGLSKVARIVDLFARRLQIQEQLTTQIAKTVQEVTSAAGVGVIIEAKHMCMMMRGVEKQNSVMRTSAMLGEFQNNQATRQEFLSLISR

SEQ ID NO: 14992 - protein, 188 aa, Sporobacter termitidis
  misc_feature (1)..(188): tr|A0A1M5UVI9|A0A1M5UVI9_9FIRM GTP cyclohydrolase 1 OS= Sporobacter termitidis DSM 10068 OX=1123282 GN=folE PE= 3 SV=1
MDKVRIEKAVREILLAIGEDPEREGLVDTPRRIANMYEEIFSGLGEAPEKHLEIFFQKERYEELVLVKDIPFYSTCEHHLVPFVGKAHVAYIPKNGKLTGLSKLARVVETVSRRPQLQERLTATVADTIFNALEPYGVIVVVEAEHMCMTMRGVKKPGAMTVTSAIRGIFATDQKARAEVMSMINSGK

SEQ ID NO: 14993 - protein, 219 aa, Sporocytophaga myxococcoides
  misc_feature (1)..(219): tr|A0A098LHY5|A0A098LHY5_9BACT GTP cyclohydrolase 1 OS= Sporocytophaga myxococcoides OX=153721 GN=folE PE=3 SV= 1
MNAITEISDIGEEHIGTSIDTPLRKDAFEMDDEVKIELIQKHFREIIFLLGLDLRDDSLNGTPHRVAKMYVKEVFSGLNPANKPRIKLFDNKYQYNEMLIEKNITLYSYCEHHFVPIIGKVHVAYISKGKVIGLSKINRLVQYYAKRPQVQERLTNQIAEGLKEALQSEDVAVIVDAVHLCVSSRGVQDISSNTITANYSGAFQEAKKKEEFLGLLGKL

SEQ ID NO: 14994 - protein, 230 aa, Sporocytophaga myxococcoides
  misc_feature (1)..(230): tr|A0A098LDP8|A0A098LDP8_9BACT GTP cyclohydrolase 1 OS= Sporocytophaga myxococcoides OX=153721 GN=folE PE=3 SV= 1
MKQKGTLLNTQLIKDLTIEEIGDDHVPGSYETPLRSDAFEMSDEVKMQLIENHFREIMTIMGMDLNDDSLKGTPKRVAKMFIKEVFSGLNPENRPKIKLFDNKFKYNEMLVEKDITFYSYCEHHFVPIIGKAHVAYISSGKVIGLSKINRIVQYYSKRPQVQERLTVQIANDLKETLETEDVAVIMDASHLCVASRGVSDTSSRTVTAHYSGKFKLEAVKAEFLNHTKQV

SEQ ID NO: 14995 - protein, 187 aa, Sporolactobacillus inulinus
  misc_feature (1)..(187): tr|A0A0U1QLG7|A0A0U1QLG7_9BACL GTP cyclohydrolase 1 OS= Sporolactobacillus inulinus CASD OX=1069536 GN=folE PE= 3 SV=1
MNVDHEKIEKAVRMILEAIGEQPDREGLIETPKRVARMYEEIFQGIRQDPREYLSKTFHEAHEELVLVKDIPFYSMCEHHLVPFFGKAHVGYIPRGGRVTGLSKLARAVEAVAKRPQLQERLTSEVANSIVETLRPYGVIVVIEAEHMCMTMRGVKKPGAKTITSAVRGIFQRDLNARAEAMSLINH

SEQ ID NO: 14996 - protein, 187 aa, Sporolactobacillus inulinus; identical to SEQ ID NO: 14995
  misc_feature (1)..(187): tr|A0A4Y3T3W1|A0A4Y3T3W1_9BACL GTP cyclohydrolase 1 OS= Sporolactobacillus inulinus OX=2078 GN=folE PE=3 SV=1

SEQ ID NO: 14997 - protein, 187 aa, Sporolactobacillus laevolacticus
  misc_feature (1)..(187): tr|V6IWR9|V6IWR9_9BACL GTP cyclohydrolase 1 OS=Sporolac tobacillus laevolacticus DSM 442 OX=1395513 GN=folE PE= 3 SV=1
MNVDHEKIEKAVRMILEAIGENPDRNGLLETPQRVARMYEEIFQGMRQDPKAYLSKTFDEAHEELVLVKDIPFYSMCEHHLVPFFGKAHVGYIPRGGRVTGLSKLARAVEAVAKRPQLQERLTTEVADSIVETLRPYGVIVVVEAEHMCMTMRGVKKPGAKTITSAVRGVFQKDSTARAEAMSLINH

SEQ ID NO: 14998 - protein, 187 aa, Sporolactobacillus nakayamae
  misc_feature (1)..(187): tr|A0A1I2MXS7|A0A1I2MXS7_9BACL GTP cyclohydrolase 1 OS= Sporolactobacillus nakayamae OX=269670 GN=folE PE=3 SV= 1
MNVDHEKIEKAVRMILEAIGEDPDREGLLETPQRVARMYEEIFQGMQQDPKEYLSKIFNEAHEELVLVKDIPFYSMCEHHLVPFFGKAHVGYIPRGGRVTGLSKLARAVEVVAKRPQLQERLTTEVADSIVETLKPYGVIVVVEAEHMCMTMRGVKKPGSRTITSAVRGVFQKDSTARAEAMSLINH

SEQ ID NO: 14999 - protein, 187 aa, Sporolactobacillus shoreae
  misc_feature (1)..(187): tr|A0A4Z0GPZ2|A0A4Z0GPZ2_9BACL GTP cyclohydrolase 1 OS= Sporolactobacillus shoreae OX=1465501 GN=folE PE=3 SV=1
MSVDHEKIERAVRMILEAIGEDPDRKGLEETPQRVARMYDEIFQGMNQDPKTFLAKTFDEAHEELVLVKDIPFYSMCEHHLVPFFGKAHVGYIPKGGRVTGLSKLARAVEAVARRPQLQERLTTTVANSIVETLHPYGVIVVIEAEHMCMTMRGIKKPGARTITSAVRGIFQTDATARAEALSLINH

SEQ ID NO: 15000 - protein, 211 aa, Sporolactobacillus sp.
  misc_feature (1)..(211): tr|A0A4Q4IE92|A0A4Q4IE92_9BACL GTP cyclohydrolase 1 OS= Sporolactobacillus sp. THM19-2 OX=2511171 GN=folE PE=3 SV=1
MDNKERTLMIKTFPETFENPLELNKKLDQGNHIMDAVKDLINLCGDNPHRDGMQETPYRVLKAFLEYTEGYREDPKLHLKKTFDVEHQGLVLVKDIDFYSMCEHHLAPFFGVAHVGYIPNKKITGLSKIARMVEGYAKRFQVQERLTTQITEAIEEILEPKGTMVVIEARHMCVCGRGIKKSNSSTTTSSVRGVFADKQSARDEFLSLLHK

SEQ ID NO: 15001 - protein, 188 aa, Sporolactobacillus sp.
  misc_feature (1)..(188): tr|A0A4Q4JHL8|A0A4Q4JHL8_9BACL GTP cyclohydrolase 1 OS= Sporolactobacillus sp. THM7-7 OX=2511172 GN=folE PE=3 S V=1
MLSVDQKKIEKAVRLILEAIGEDPDREGLLETPERVARMYDEIFQGMHQDPKSYLSKTFDEAHEELVLVKDIPFYSMCEHHLVPFFGKAHVGYIPRGGRVTGLSKLARAVEAVAKRPQLQERLTTTVADSIVETLRPYGVIVVVEAEHMCMTMRGVKKPGTKTITSAVRGIFRTDATARAEAMSLINR

SEQ ID NO: 15002 - protein, 187 aa, Sporolactobacillus terrae
  misc_feature (1)..(187): tr|A0A410D989|A0A410D989_9BACL GTP cyclohydrolase 1 OS= Sporolactobacillus terrae OX=269673 GN=folE PE=3 SV=1
MNVDHEKIEKAVRMILEAIGEQPDREGLIETPKRVARMYEEIFQGMRQDPREYLSKTFHEAHEELVLVKDIPFYSMCEHHLVPFFGKAHVGYIPRGGRVTGLSKLARAVEAVAKRPQLQERLTSEVANSIVETLRPYGVIVVIEAEHMCMTMRGVKKPGAKTITSAVRGIFQKDLNARAEAMSLINH

SEQ ID NO: 15003 - protein, 266 aa, Sporolituus thermophilus
  misc_feature (1)..(266): tr|A0A1G7I683|A0A1G7I683_9FIRM GTP cyclohydrolase FolE2 OS=Sporolituus thermophilus DSM 23256 OX=1123285 GN=fo lE2 PE=3 SV=1
MKDVQNAADMRGIAIQKVGVSDVDLPFLIKTKNGSFQSVLAKIKLTVDLPKEYKGTHMSRFIEVLNEWSQKPVSYREMEYILGDIMHRLDAQRADIDINFKYFLEKRAPISGLKSYLDCDCLFSGTLLRGAHLKFVLGLAVPFTSLCPCSKEISQYGAHNQRGLMKVKIKHRPGHFIWIEDLAALMEEQGSCPVYPLLKREDEKYVTERAYENPKFVEDVLRDLVLALRRLKGVEWFEVECENYESIHNHNAYAAHREFVSEITSN

SEQ ID NO: 15004 - protein, 276 aa, Sporomusa acidovorans
  misc_feature (1)..(276): tr|A0A259UA81|A0A259UA81_9FIRM GTP cyclohydrolase FolE2 OS=Sporomusa acidovorans DSM 3132 OX=1123286 GN=folE2 PE=3 SV=1
MMRQTTQGRSSNSSIKDVQNSCDERGIAIQKVGVSDVHLPFLIKTKSGSFQSVLAKIKLTVDLPQEFKGTHMSRFIEILSDWSQKPVSYREIGNMLTDTIVRLHAKRAHIDIHFKYFVEKEAPVSGLKSMLDYDCTFSASLARGEQLDFVLGIIVPFTSLCPCSKEISQYGAHNQRGIMRVKIKQVHGKFIWIEDLAKMLEERGSCQVYPLLKREDEKYVTEKAYENPKFVEDVLRDLVLMLRKLDGIQWFEVECENYESIHNHSAYATHIENVDK

SEQ ID NO: 15005 - protein, 272 aa, Sporomusa malonica
  misc_feature (1)..(272): tr|A0A1W2E981|A0A1W2E981_9FIRM GTP cyclohydrolase FolE2 OS=Sporomusa malonica OX=112901 GN=folE2 PE=3 SV=1
MTQTTQGRNSIKDVQNSCDERGIAIQKVGVSDVHLPFLIKTKSGSFQTVLAKIKLTVDLPQEFKGTHMSRFIEILSDWSQKPVSYREVEYMLTDTIDRLHAQRAHIDIDFKYFIEKTAPVSGFKSMLDYDCMFSASLVRGEHLDFMFGITVPFTSLCPCSKEISQYGAHNQRGIMRVKIKHQPGGFIWIEDLAELMEQQGSCQVYPLLKRADEKYVTEKAYENPKFVEDVLRDLVLTLRQIDSVQWFEVECENYESIHNHSAYASHIETIAR

SEQ ID NO: 15006 - protein, 275 aa, Sporomusa silvacetica
  misc_feature (1)..(275): tr|A0A259UKH9|A0A259UKH9_9FIRM GTP cyclohydrolase FolE2 OS=Sporomusa silvacetica DSM 10669 OX=1123289 GN=folE2 PE=3 SV=1
MRQTTQGCSTNSTIKDVQNSCDERGIAIQKVGVSDVHLPFLIKTKSGSFQSVLAKIKLTVDLPQEFKGTHMSRFIEILSDWSQKPVSCREIGYMLTDTIDRLQAQRAHIDINFKYFIEKMAPVSGLKSMLDYDCVFSANLVRGEHLDFMFGITVPFTSLCPCSKEISLYGAHNQRGIMRVKIKQHPGKFIWIEDLAEMMEEQGSCQVYPLLKRGDEKYVTEKAYENPKFVEDVLRDLVLTLRKIDGVQWFEIECENYESIHNHSAYAAHNECVES

SEQ ID NO: 15007 - protein, 275 aa, Sporomusa sp.
  misc_feature (1)..(275): tr|A0A0U1KWH6|A0A0U1KWH6_9FIRM GTP cyclohydrolase FolE2 OS=Sporomusa sp. An4 OX=411922 GN=folE2 PE=3 SV=1
MRQTTQGRSTNSTIKDVQNSCDERGIAIQKVGVSDVHLPFLIKTKSGSFQSVLAKIKLTVDLPQEFKGTHMSRFIEILSDWSQKPVSYREIEYMLTDTIDRLQAKRAHIDINFKYFIEKMAPVSGFKSMLDYDCVFSGNLVRGGHLDLLFGITVPFTSLCPCSKEISQYGAHNQRGIMKAKIKQQPGKFIWIEDLAALMEEQGSCQVYPLLKRGDEKYVTEKAYENPKFVEDVLRDLVLTLRKIDGIEWFEIECENYESIHNHSAYATHIECVES

SEQ ID NO: 15008 - protein, 275 aa, Sporomusa sp.
  misc_feature (1)..(275): tr|A0A562GP05|A0A562GP05_9FIRM GTP cyclohydrolase FolE2 OS=Sporomusa sp. KB1 OX=943346 GN=folE2 PE=3 SV=1
MRQTTQGRSTNSTIKDVQNSCDERGIAIQKVGVSDVHLPFLIKTKSGSFQSVLAKIKLTVDLPQEFKGTHMSRFIEILSDWSQKPVSYREIEYMLTDTIDRLQAKRAHIDINFKYFIEKMAPVSGFKSMLDYDCVFSGNLVRGEHLDLMFGITVPFTSLCPCSKEISQYGAHNQRGIMKAKIKQQPGKFIWIEDLAEMMEEQGSCQVYPLLKRGDEKYVTEKAYENPKFVEDVLRDLVLTLRKIDGIEWFEIECENYESIHNHSAYAAHIECVES

SEQ ID NO: 15009 - protein, 272 aa, Sporomusa sphaeroides
  misc_feature (1)..(272): tr|A0A1U7MKJ7|A0A1U7MKJ7_9FIRM GTP cyclohydrolase FolE2 OS=Sporomusa sphaeroides DSM 2875 OX=1337886 GN=folE2 PE=3 SV=1
MKQTTQGKSGIKDVQNSCDERGIAIQKVGVSDVHLPFLIKTKSGSFQSVLAKIKLAVDLPQEFKGTHMSRFIEILSDWSQKPVSYREVEYMLTDTIDRLHAMRAHIDIHFKYFIEKAAPVSGLKSMLDYDCVFSAELVRGEQLDFMFGITVPFTSLCPCSKEISHYGAHNQRGTMRAKIKQLPGKFIWIEDLAAMMEEQGSCQVYALLKREDEKYVTEKAYENPKFVEDVLRDLVLTLRKIDGVEWFEVECENYESIHNHSAYAAHVECVEQ

SEQ ID NO: 15010 - protein, 272 aa, Sporomusa termitida
  misc_feature (1)..(272): tr|A0A517DSM6|A0A517DSM6_9FIRM GTP cyclohydrolase FolE2 OS=Sporomusa termitida OX=2377 GN=folE2 PE=3 SV=1
MKQTAQGRNSIKDVQNSCDERGIAIQKVGVSDVHLPFLIKTKGGSFQTVLAKIKLTVDLPQEFKGTHMSRFIEILSDWSQKPVSYKEIEYMLTDTIDRLQAQRAHIDIHFKYFIEKTAPVSGFKSMLDYDCMFSGSLARCDHLDFMFGITVPFTSLCPCSKEISQYGAHNQRGIMRVKIKHQHGRFIWIEDLASLMEQQGSCQVYPLLKRADEKYVTEKAYENPKFVEDVLRDLVLALRQIDSVQWFEVECENYESIHNHSAYAAHTETVSR

SEQ ID NO: 15011 - protein, 262 aa, Sporomusaceae bacterium
  misc_feature (1)..(262): tr|A0A402BQ36|A0A402BQ36_9FIRM GTP cyclohydrolase FolE2 OS=Sporomusaceae bacterium OX=1917525 GN=folE2 PE=3 SV =1
MKDVQNAVDERGIAIQKVGVSDVHLPFFIKTKNGSLQSVLANIKLTVDLPKEYKGTHMSRFIEILSEWSQKPVSSREMEQILTDTLTRLDAKSAFLKIKFKYFIEKTAPVSGLKSMLDLDCSFSAKLTQGYPLDFIMGVNIPFTSLCPCSKEISQYGAHNQRGLMRVKLKHEPNKFIWIEDLAKLMEAQGSCPVFPLLKREDEKYVTELAYENPKFVEDILRDLVLALRDLDDVKWFEIECENYESIHNHSAYASHVEFVER

SEQ ID NO: 15012 - protein, 188 aa, Sporomusaceae bacterium
  misc_feature (1)..(188): tr|A0A3C0UD33|A0A3C0UD33_9FIRM GTP cyclohydrolase 1 OS= Sporomusaceae bacterium OX=1917525 GN=folE PE=3 SV=1
MIMVDEQKARQAIALLLEAIGEDAAREGLEDTPKRVGHMYAELFSGLDKDAEKELECFYSKEYYGLILVKDIFFHSMCEHHLLPFFGKAHVAYIPQEGMITGLGKLASTVEIFARRPQIQERLTAQIADVIEKKLKPAGVMVVIEAEHLCMSMRGVKKPGSITTTLAVRGTYSDDLAARAEVLAIIKR

SEQ ID NO: 15013 - protein, 188 aa, Sporosarcina globispora; identical to SEQ ID NO: 5014
  misc_feature (1)..(188): tr|A0A0M0GBK5|A0A0M0GBK5_SPOGL GTP cyclohydrolase 1 OS= Sporosarcina globispora OX=1459 GN=folE PE=3 SV=1

SEQ ID NO: 15014 - protein, 187 aa, Sporosarcina luteola
  misc_feature (1)..(187): tr|A0A511ZBA2|A0A511ZBA2_9BACL GTP cyclohydrolase 1 OS= Sporosarcina luteola OX=582850 GN=folE PE=3 SV=1
MTEVDLSKIEKAVSMILEAVGEDPEREGLLDTPKRVAKMYAEVFEGLNKDPRQYFETVFHENHDEVVLVKDIPFHSMCEHHLVPFFGHAHIAYIPRNGVVAGLSKLARAVETTAKRPQLQERITSTVANAMMDMLNPIGVYVIIEAEHMCMTMRGIKKPGAKTVTTVARGIYEHDDVKRAEILSLLK

SEQ ID NO: 15015 - protein, 189 aa, Sporosarcina newyorkensis
  misc_feature (1)..(189): tr|A0A1T4XE77|A0A1T4XE77_9BACL GTP cyclohydrolase 1 OS= Sporosarcina newyorkensis OX=759851 GN=folE PE=3 SV=1
MNEQDLNKIKQAVTMILEAIGEDPSREGLLDTPKRVAKMYHEVFEGLNKDPKEYFEVVFHENHDEVVLVKDIPFYSMCEHHLVPFFGVAHVAYIPRDGVVAGLSKLARAVETTAKRPQLQERITSTVADAMMEMLNPIGVYVIIEAEHMCMTMRGIKKPGSKTITTVARGIYEHDDVKRAEILSLLKTN

SEQ ID NO: 15016 - protein, 189 aa, Sporosarcina newyorkensis
  misc_feature (1)..(189): tr|F9DNT1|F9DNT1_9BACL GTP cyclohydrolase 1 OS=Sporosar cina newyorkensis 2681 OX=1027292 GN=folE PE=3 SV=1
MNEQDLNKIEQAVTMILEAIGEDPSREGLLDTPKRVAKMYHEVFEGLNKDPKEYFEVVFHENHDEVVLVKDIPFHSMCEHHLVPFFGVAHVAYIPRDGVVAGLSKLARAVETTAKRPQLQERITSTVADAMMEMLNPIGVYVIIEAEHMCMTMRGIKKPGSKTITTVARGIYEHDDVKRAEILSLLKTN

SEQ ID NO: 15017 - protein, 188 aa, Sporosarcina pasteurii
  misc_feature (1)..(188): tr|A0A380BLL1|A0A380BLL1_SPOPA GTP cyclohydrolase 1 OS= Sporosarcina pasteurii OX=1474 GN=folE PE=3 SV=1
MHEVDYMKMEQAVTMILEAIGEDPAREGLIDTPKRVAKMYAEVFEGLHEDPRQYFETVFHENHDEVVLVKDIPFHSMCEHHLVPFFGHAHIAYIPRDGVVAGLSKLARAVETTARRPQLQERITSTVANAIMDMLNPVGVYVVVEAEHMCMTMRGIRKPGAKTMTTVARGIYEHDDIKRSEILSLIKM

SEQ ID NO: 15018 - protein, 189 aa, Sporosarcina psychrophila
  misc_feature (1)..(189): tr|A0A127W4R5|A0A127W4R5_SPOPS GTP cyclohydrolase 1 OS= Sporosarcina psychrophila OX=1476 GN=folE PE=3 SV=1
MNVVDYEKIEKAVSMILEAVGEDPEREGLIDTPKRVAKMYAEVFEGLNKDPKDYFKTVFHENHDEVVLVKDIPFYSMCEHHLVPFFGNAHIAYIPRDGVVAGLSKLARAVETTAKRPQLQERITSTIAEAMMEMLNPIGVYVVIEAEHLCMTMRGIKKPGAKTVTTVARGIYEQDDVKRAEILSLIKMS

SEQ ID NO: 15019 - protein, 187 aa, Sporosarcina sp.
  misc_feature (1)..(187): tr|A0A3D8YZ81|A0A3D8YZ81_9BACL GTP cyclohydrolase 1 OS= Sporosarcina sp. BI001-red OX=2282866 GN=folE PE=3 SV=1
MEEVDFGKIEQAVTMILEAIGEDPEREGLLETPKRVAKMYAEVFEGLNHDPRMYFETVFHEQHEEVVLVKDIPFYSMCEHHLVPFFGVAHIAYIPRDGVVAGLSKLARAVETTAKRPQLQERITTTVADIMMEMLKPLGVYVIIEAEHMCMTMRGIKKPGSKTVTTAARGIYEHDDVKRSEILSLVK

SEQ ID NO: 15020 - protein, 189 aa, Sporosarcina sp.
  misc_feature (1)..(189): tr|A0A5B0DNF1|A0A5B0DNF1_9BACL GTP cyclohydrolase 1 OS= Sporosarcina sp. ANT_H38 OX=2597358 GN=folE PE=3 SV=1
MNVVDYEKIEKAVLMILEAVGEDPEREGLLDTPKRVAKMYAEVFEGLNKDPKDYFKTVFHENHDEVVLVKDIPFYSMCEHHLVPFFGNAHIAYIPRDGVVAGLSKLARAVETTARRPQLQERITSTIAEAMMEMLNPIGVYVVIEAEHMCMTMRGIKKPGAKTVTTVARGIYEQDDVKRAEILSLIKMS

SEQ ID NO: 15021 - protein, 212 aa, Stackebrandtia albiflava
  misc_feature (1)..(212): tr|A0A562V2R1|A0A562V2R1_9ACTN GTP cyclohydrolase 1 OS= Stackebrandtia albiflava OX=406432 GN=folE PE=3 SV=1
MDHEAARIVNGRLGGGPVEDRVDIPRIEAAVREILIGVGEDPDREGLRRTPARVARAYAELFAGLRVDPSEILTTSFAEEHEEMVVVRDIEVASFCEHHLLPFVGYAHIGYIPGEHGRITGLSKLARLVEAYARRPQVQERLTSQIADRLLETLEARGVIVVVECEHMCMSMRGIRKPGAKTLTSAVRGTLRDNAKSRAEAMSLIQMSRGDR

SEQ ID NO: 15022 - protein, 212 aa, Stackebrandtia albiflava
  misc_feature (1)..(212): tr|A0A562VE33|A0A562VE33_9ACTN GTP cyclohydrolase 1 OS= Stackebrandtia albiflava OX=406432 GN=folE PE=3 SV=1
MNVTTATTPTTAPPEATATHRRLIHEGPEIDLRGAEKAIADLLAALGRDPASPHLADTPRRVAQAYAELLTPREFDLTTFPNEEGYDELVIARDIPVHSLCEHHLLPFHGVAHVGYLPGERILGLSKLARVVEWFARDLQVQERLTKQVTDWLQRHLAPKGVGVVIEAEHMCMALRGVRAAGSRTATSALEGTLRDDPRSRQEFFTLAGIRH

SEQ ID NO: 15023 - protein, 217 aa, Stackebrandtia endophytica
  misc_feature (1)..(217): tr|A0A543AZC2|A0A543AZC2_9ACTN GTP cyclohydrolase 1 OS= Stackebrandtia endophytica OX=1496996 GN=folE PE=3 SV=1
MSESDSHLDLDHEAARIVNGRLGGGPVSDAVDLPRIEAAVREILIAVGEDPDREGLQRTPARVARAYAELFAGLRVDASKVLATDFAEEHDEMVVVRDIEVASFCEHHLLPFVGVAHIGYIPGEHGRITGLSKLARLVEAYARRPQVQERLTSQIADQLLNTLGARGVIVVVECEHMCMSMRGIRKPGAKTLTSAVRGTLRDNAKTRAEAINLIRMT

SEQ ID NO: 15024 - protein, 214 aa, Stackebrandtia nassauensis
  misc_feature (1)..(214): tr|D3Q843|D3Q843_STANL GTP cyclohydrolase 1 OS=Stackebr andtia nassauensis (strain DSM 44728 / NRRL B-16338 / N BRC 102104 / LLR-40K-21) OX=446470 GN=folE PE=3 SV=1
MNEELDHEAARIVNGRLGGKSVDTQVDLKRIETAVREILYAIGEDPDREGLAKTPGRVARAYAELFAGLRVDPAQVLKTVFSEDHDELIVVRDIEVFSFCEHHLLPFTGVAHIGYIPGAHGRITGLSKLARLVEAYARRPQVQERLTSQIADQLHETLEANGVIVVVECEHMCMSMRGIRKPGARTLTSAVRGILRDNAKSRAEAMSLINVSNR

SEQ ID NO: 15025 - protein, 220 aa, Stackebrandtia nassauensis
  misc_feature (1)..(220): tr|D3Q8D1|D3Q8D1_STANL GTP cyclohydrolase 1 OS=Stackebr andtia nassauensis (strain DSM 44728 / NRRL B-16338 / N BRC 102104 / LLR-40K-21) OX=446470 GN=folE PE=3 SV=1
MASPAPNPANLSSLSEMKVPHAIPAQRTLRVVHDREDVDLDAAHKAVTDLLVALGRNPMSEHLADTPRRVAEAYAEMLTPREFNLTTFPNDEGYDELVLARGIPVQSLCQHHLLPFHGVAHVGYLPGERILGLSKLARVVELFARDLQVQERLTKQVADWLRDHLAPKGVGVVIEAEHMCMALRGVRATGSRTLTSAMHGQLRDDARSRQEFFALTGTNG

SEQ ID NO: 15026 - protein, 205 aa, Stakelama pacifica
  misc_feature (1)..(205): tr|A0A4R6FU86|A0A4R6FU86_9SPHN GTP cyclohydrolase 1 OS= Stakelama pacifica OX=517720 GN=folE PE=3 SV=1
MNDLPSPDDGDLYDDDGKIAVPEEVAEAIRTLIRWSGDDPAREGLIDTPRRVARAWKEYCQGYTDDPAQHLARVFEEVGGYEDIVLLKDIPFQSHCEHHMAPIIGKAHIAYLPQDRVVGISKLARVLHAFARRLQVQERLTAEVADCIWQHLAPRGVAVVIDATHACMTARGVRTPGVTMTTSRMMGIFREDPRSRAEVLKLMGY

SEQ ID NO: 15027 - protein, 242 aa, Stanieria cyanosphaera
  misc_feature (1)..(242): tr|K9XXJ2|K9XXJ2_STAC7 GTP cyclohydrolase 1 OS=Stanieri a cyanosphaera (strain ATCC 29371 / PCC 7437) OX=111780 GN=folE PE=3 SV=1
MTTVSSNGSNRSKSININSSNNLHSSLIEQVSSRPDRNTHNGQQAQIHAASEQAQEKMMAAVRVMLESVGEDPEREGLLKTPKRVAEAMQFLTQGYNQSLEKIVNDAIFDEGHNEMVLVRDISFFSLCEHHMLPFMGRAHVAYIPNQKVVGLSKLARIVEMYARRLQVQERLTRQIAEAIQEVLEPQGVAVVMEATHMCMVMRGVEKPGSWTVTSAMLGAFQDEQKTRDEFLNLIRHQPSFM

SEQ ID NO: 15028 - protein, 242 aa, Stanieria sp.
  misc_feature (1)..(242): tr|A0A140K0Q6|A0A140K0Q6_9CYAN GTP cyclohydrolase 1 OS= Stanieria sp. NIES-3757 OX=1807358 GN=folE PE=3 SV=1
MTTASSNGSNRSKSVNISGSNSLHSSLVEQVTSRPDRNTHNGQQAQIHATSEQAKGQMMDAVRVMLESVGEDPEREGLLKTPKRVAEAMQFLTQGYNQSLEKIVNDAIFDEGHNEMVLVRDISFFSLCEHHMLPFMGRAHVAYIPNQKVVGLSKLARIVEMYARRLQVQERLTRQIAEAIQEVLEPQGVAVVMEATHMCMVMRGVEKPGSWTVTSAMLGVFQEEQKTRDEFLNLIRHQPSFM

SEQ ID NO: 15029 - protein, 292 aa, Staphylococcus agnetis
  misc_feature (1)..(292): tr|A0A2T4MQH9|A0A2T4MQH9_9STAP GTP cyclohydrolase FolE2 OS=Staphylococcus agnetis OX=985762 GN=folE2 PE=3 SV=1
MTEFDLSTREGRWKHFGSVDPIQGTKPTTKAEMTDLQSTHKNFLFEIEEVGIKNLVYPVWIDQFQTAGNFSFSTSLNKDEKGINMSRILEAVEAEYDNGIRLEFDTLTQLLNRLKSHMKQHSAGVDVSGKWFFERKSPVTDIKAVGHADVTYGLAVRGDDITRKELTIEAAVTTLCPCSKEISEYSAHNQRGIITVKAYMNKTAKLSDDYKEIILDAMEANASSMLYPILKRPDEKRVTERAYENPRFVEDLIRLIAADLVELDWLEGFDIECRNEESIHQHDAFAKLKYRK

SEQ ID NO: 15030 - protein, 292 aa, Staphylococcus agnetis
  misc_feature (1)..(292): tr|A0A2T4MFU5|A0A2T4MFU5_9STAP GTP cyclohydrolase FolE2 OS=Staphylococcus agnetis OX=985762 GN=folE2 PE=3 SV=1
MTEFDLSTREGRWKHFGSVDPIQGTKPTTKAEMTDLQSTHKNFLFEIEEVGIKNLVYPVWIDQFQTAGNFSFSTSLNKDEKGINMSRILEAVEAEYDNGIRLEFDTLTQLLNRLKSHMKQHSAGVDVSGKWFFERKSPVTDIKAVGHADVTYGLAVRGDEITRKELTIEAAVTTLCPCSKEISEYSAHNQRGIITVKAYMNKTAKLSDDYKEIILDAMEANASSMLYPILKRPDEKRVTERAYENPRFVEDLIRLIAADLVELDWLEGFDIECRNEESIHQHDAFAKLKYRK

SEQ ID NO: 15031 - protein, 292 aa, Staphylococcus argensis
  misc_feature (1)..(292): tr|A0A2K4FD39|A0A2K4FD39_9STAP GTP cyclohydrolase FolE2 OS=Staphylococcus argensis OX=1607738 GN=folE2 PE=3 SV =1
MSEFDLSTREGRWKHFGSVDPIKGNKPTSKEKMTDLQSTNKDFLFEIEEVGIKNLIYPVNIDRFQTAGNFSFSTSLNQDEKGINMSRILESVEKHYNHGIELDFDALYQVLRILQESMNQSSAGVDVSGKWFYDRYSPQTDIKAVGHADVTYGLAIKDDNVTRKELTIEAAVTTLCPCSKEISEYSAHNQRGIVTVKAYIDKDAELSDDYKSVILDAMEANASSVLYPILKRPDEKRVTERAYENPRFVEDLIRLIAADLVELDWLEGFDIECRNEESIHQHDAFAKLKHRK

SEQ ID NO: 15032 - protein, 292 aa, Staphylococcus argenteus
  misc_feature (1)..(292): tr|A0A348B8Q8|A0A348B8Q8_9STAP GTP cyclohydrolase FolE2 OS=Staphylococcus argenteus OX=985002 GN=folE2 PE=3 SV =1
MTEFDLSTREGRWKHFGSVDPIEGTKPTTKNEMTDLQSTHKDFLFEIEEVGIKNLVYPVLVDQYQTAGTFSFSTSLTKDEKGINMSRIIESVEKHYDNGIELEFNTLYQVLRTLQTNMKQNAAGVDVSGKWFFDRYSPTTNIKAVGNADVTYGLAIDGDQVTRKELTIEATVTTLCPCSKEISEYSAHNQRGVVTVKTYINKEQDIVDDYKNKILDAMEANASSILYPILKRPDEKRVTERAYENPRFVEDLIRLIAADLVEFDWLEGFDIECRNEESIHQHDAFAKLKYRK

SEQ ID NO: 15033 - protein, 292 aa, Staphylococcus arlettae
  misc_feature (1)..(292): tr|A0A2T7BTG7|A0A2T7BTG7_9STAP GTP cyclohydrolase FolE2 OS=Staphylococcus arlettae OX=29378 GN=folE2 PE=3 SV=1
MTEFDLSTREGRWKHFGSVDPIEGTKPTIKEKMKDLQSTHKNFLFEIEEVGIKNLVYPVLIDRFQTAGTFSFSTSLKLDEKGINMSRILESVEKHYNNGIELDFTALYQVLQSLQKSMNQNDAGVDVSGKWFFDRISPVTNIKAVGHADVTYGLAIDKHSVTRKELTVEAAVTTLCPCSKEISEYSAHNQRGIVTVKAYMNKDKELIDDYKEKILDAMEANASSILYPILKRPDEKSVTERAYENPRFVEDLIRLIAADLVELDWIDGFDIECRNEESIHQHDAFAKLKYRK

SEQ ID NO: 15034 - protein, 292 aa, Staphylococcus aureus
  misc_feature (1)..(292): sp|Q2YS98|GCH4_STAAB GTP cyclohydrolase FolE2 OS=Staphy lococcus aureus (strain bovine RF122 / ET3-1) OX=273036 GN=folE2 PE=3 SV=1
MTEFDLSTREGRWKHFGSVDPIEGTKPTTKNEMTDLQSTHKDFLFEIEEVGIKNLVYPVLVDQYQTAGTFSFSTSLTKDEKGINMSRIIESVEKHYDNGIELEFNTLYQVLRTLQTNMKQNAAGVDVSGKWFFDRYSPTTNIKAVGNADVTYGLAIDGDKVTRKELTIEATVTTLCPCSKEISEYSAHNQRGVVTVKTYINKDQDIVDDYKNKILDAMEANASSILYPILKRPDEKRVTERAYENPRFVEDLIRLIAADLVEFDWLDGFDIECRNEESIHQHDAFAKLKYRK

SEQ ID NO: 15035 - protein, 292 aa, Staphylococcus aureus; identical to SEQ ID NO: 15034
  misc_feature (1)..(292): tr|A0A0D1FSK9|A0A0D1FSK9_STAAU GTP cyclohydrolase FolE2 OS=Staphylococcus aureus subsp. aureus OX=46170 GN=fol E2 PE=3 SV=1

SEQ ID NO: 15036 - protein, 293 aa, Staphylococcus auricularis
  misc_feature (1)..(293): tr|A0A2K4BZX9|A0A2K4BZX9_9STAP GTP cyclohydrolase FolE2 OS=Staphylococcus auricularis OX=29379 GN=folE2 PE=3 S V=1
MTEYDLSTREGRWKHFGSVDPIEGTKPTTKDKMADLQGTHKNYLFEIEEVGIKNLTYPVLIDGFQTAGDFSFSTSLNQDEKGINMSRILESVEKHYDNGIKLEFDSLYQVLRSLQERMNQNAAGVDVSGTWFYDRYSPKTNIKALGHADVTYGLAIEGETTTRKELTIQAAVTTLCPCSKEISEYSAHNQRGIVTVKTYLNKDVDLDENYKELILDAMEANASSILYPILKRPDEKSVTERAYENPRFVEDLIRLIAADLVEFDWLDSFDIECRNEESIHQHDAFAKLKYRKP

SEQ ID NO: 15037 - protein, 293 aa, Staphylococcus auricularis
  misc_feature (1)..(293): tr|A0A2T4M4E1|A0A2T4M4E1_9STAP GTP cyclohydrolase FolE2 OS=Staphylococcus auricularis OX=29379 GN=folE2 PE=3 S V=1
MTEYDLSTREGRWKHFGSVDPIEGTKPTTKDKMADLQGTHKNYLFEIEEVGIKNLTYPVLIDGFQTAGDFSFSTSLNQDEKGINMSRILESVEKHYDNGIKLEFDSLYQVLRSLQERMNQNAAGVDVSGTWFYDRYSPKTNIKALGHADVTYGLAIEGETTTRKELTIQAAVTTLCPCSKEISEYSAHNQRGIVTVKTYLNKDVDLDENYKELILDAMEANASSILYPILKRPDEKSVTERAYENPRFVEDLIRLIAADLVEFDWLDGFDIECRNEESIHQHDAFAKLKYRKP

SEQ ID NO: 15038 - protein, 292 aa, Staphylococcus capitis
  misc_feature (1)..(292): tr|A0A0S4ME87|A0A0S4ME87_STACP GTP cyclohydrolase FolE2 OS=Staphylococcus capitis OX=29388 GN=folE PE=3 SV=1
MTEFDLSTREGRWKHFGSVDPIEGTKPTTKNEMTDLQSTHKNFLFEIEEVGIKNLTYPVLIDQYQTAGLFSFSTSLNKDEKGINMSRILESVEKHYNNGIELEFNTLYQVLRTLQEKMNQNAAGVDVSGKWFFDRFSPVTNIKAVGNADVTYGLAIDGEKVTRKELTIEATVTTLCPCSKEISEYSAHNQRGIVTVKTYLDKDAEVVDDYKDKILDAMEANASSILYPILKRPDEKRVTERAYENPRFVEDLIRLIAADLVEFDWIDGFDIECRNEESIHQHDAFARLKYRK

SEQ ID NO: 15039 - protein, 292 aa, Staphylococcus capitis
  misc_feature (1)..(292): tr|A0A4U9TMP0|A0A4U9TMP0_STACP GTP cyclohydrolase FolE2 OS=Staphylococcus capitis OX=29388 GN=folE2 PE=3 SV=1
MTEFDLSTREGRWKHFGSVDPIEGTKPTTKNEMTDLQNTHKNFLFEIEEVGIKNLTYPVLIDQYQTAGLFSFSTSLNKDEKGINMSRILESVEKHYNNGIELEFNTLYQVLRTLQEKMNQNAAGVDVSGKWFFDRFSPVTNIKAVGNADVTYGLAIDGEKVTRKELTIEATVTTLCPCSKEISEYSAHNQRGIVTVKTYLDKDAKVVDDYKDKILDAMEANASSILYPILKRPDEKRVTERAYENPRFVEDLIRLIAADLVEFDWIDGFDIECRNEESIHQHDAFARLKYRK

SEQ ID NO: 15040 - protein, 292 aa, Staphylococcus caprae
  misc_feature (1)..(292): tr|C5QPS6|C5QPS6_9STAP GTP cyclohydrolase FolE2 OS=Stap hylococcus caprae M23864:W1 OX=525378 GN=folE2 PE=3 SV= 1
MTEFDLSTREGRWKHFGSVDPVEGTKPTTKNEMTDLQSTHKNFLFEIEEVGIKNLTYPVLIDQYQTAGLFSFSTSLNKDEKGINMSRILESVEKHYNNGIELEFNTLYQVLRTLQEKMNQNAAGVDVSGKWFFDRFSPVTHIKAIGNADVTYGLAIDGEKVTRKELTIEAAVTTLCPCSKEISEYSAHNQRGIVTVKTYLNKDTDVVDDYKDKILDAMEANASSILYPILKRPDEKRVTERAYENPRFVEDLIRLIAADLVDFDWIDGFDIECRNEESIHQHDAFARLKYRK

SEQ ID NO: 15041 - protein, 292 aa, Staphylococcus carnosus
  misc_feature (1)..(292): sp|B9DKT0|GCH4_STACT GTP cyclohydrolase FolE2 OS=Staphy lococcus carnosus (strain TM300) OX=396513 GN=folE2 PE= 3 SV=1
MSEFDLTTREGRWRHFGSVDPIEGTKPTVKEEMTDLQSTHKDFLFEIEEVGIKNLVYPVVIDNYQTAGTFAFSTSLTREEKGINMSRILESVEKHYDNGLELSFNNLEAVLHTLEKHMKQSSAGVDVSGKWFFNRYSPVTNIKAVGNADVTYGLAVAGDQVTRKELTVQATVTTLCPCSKEISEYSAHNQRGVITVKMYIDPSATLPTDYKEVILDAMEANASSILYPILKRPDEKRVTERAYENPRFVEDLIRLIAADLVELDWAEGFDIECRNEESIHQHDAFAKLKYRK

SEQ ID NO: 15042 - protein, 292 aa, Staphylococcus carnosus
  misc_feature (1)..(292): tr|A0A380FA80|A0A380FA80_STACA GTP cyclohydrolase FolE2 OS=Staphylococcus carnosus subsp. utilis OX=147449 GN= folE2 PE=3 SV=1
MSEFDLTTREGRWRHFGSVDPIEGTKPTVKEEMTDLQSTHKDFLFEIEEVGIKNLVYPVVIDNYQTAGTFAFSTSLTREEKGINMSRILESVEKYYDNGLELSFNNLEAVLHTLEKHMKQSSAGVDVSGKWFFNRYSPVTNIKAVGNANVTYGLAVAGDQVTRKELTVQATVTTLCPCSKEISEYSAHNQRGVITVKMYIDPSATLPTDYKEVILDAMEANASSILYPILKRPDEKRVTERAYENPRFVEDLIRLIAADLVELDWAEGFDIECRNEESIHQHDAFAKLKYRK

SEQ ID NO: 15043 - protein, 292 aa, Staphylococcus chromogenes
  misc_feature (1)..(292): tr|A0A2T4M0H6|A0A2T4M0H6_STACR GTP cyclohydrolase FolE2 OS=Staphylococcus chromogenes OX=46126 GN=folE2 PE=3 S V=1
MTEFDLSTREGRWKHFGSVDPIPGTKPTTKAEMTDLQSTHKNFLFEIEEVGIKNLVYPVWIDAFQTAGNFSFSTSLNKDEKGINMSRILEAVEAEYDNGIRLDFETLTQLLNRLKSHMKQHSAGVDVSGKWFFERRSPVTDIKAVGHADVTYGLAVKGDTTTRKELTIEAAVTTLCPCSKEISEYSAHNQRGIITVKAYIDKAASLTQDYKEIILDAMEANASSMLYPILKRPDEKRVTERAYENPRFVEDLIRLIAADLVELDWLDGFDIECRNEESIHQHDAFAKLKYRK

SEQ ID NO: 15044 - protein, 292 aa, Staphylococcus cohnii
  misc_feature (1)..(292): tr|A0A3A0JH07|A0A3A0JH07_9STAP GTP cyclohydrolase FolE2 OS=Staphylococcus cohnii OX=29382 GN=folE2 PE=3 SV=1
MTEFDLSTREGRWKHFGSVDPIEGTKPTVKEEMKDLQSTNKNYLFEIEEVGIKNLVYPVLVDRFQTAGNFSFSTSLNQDEKGINMSRILESVEKHYDNGIELDFDSLYRLLRSLQERMEQNAAGVDVSAKWFFDRYSPITNIKAVGHADVTYGMAINKENITRKEITLQAAVTTLCPCSKEISEYSAHNQRGIITVKAILNNETILTDDYKEKILDAMEANASSILYPILKRPDEKSVTERAYENPRFVEDLIRLIAADLVDFDWIEGFDIECRNEESIHQHDAFAKIKYRK

SEQ ID NO: 15045 - protein, 210 aa, Staphylococcus cohnii; identical to SEQ ID NO: 5291
  misc_feature (1)..(210): tr|A0A0M2P529|A0A0M2P529_STACC GTP cyclohydrolase 1 OS= Staphylococcus cohnii subsp. cohnii OX=74704 GN=folE PE =3 SV=1

SEQ ID NO: 15046 - protein, 292 aa, Staphylococcus condimenti
  misc_feature (1)..(292): tr|A0A143PAQ4|A0A143PAQ4_9STAP GTP cyclohydrolase FolE2 OS=Staphylococcus condimenti OX=70255 GN=folE2 PE=3 SV =1
MSEFDLTTREGRWRHFGSVDPIEGTKPTVKEEMTDLQSTHKDFLFEIEEVGIKNLVYPVVIDNYQTAGTFAFSTSLTREEKGINMSRILESVEKHYDNGLELTFSNLETVLHTLEKHMKQSSAGVDVSGKWFFNRYSPVTNIKAVGNADVTYGLAVAGDQVTRKELTIQATVTTLCPCSKEISEYSAHNQRGVITVKMYIDPSATLPTDYKEVILDAMEANASSILYPILKRPDEKRVTERAYENPRFVEDLIRLIAADLVELDWSEGFDIECRNEESIHQHDAFAKLKYRK

SEQ ID NO: 15047 - protein, 292 aa, Staphylococcus delphini
  misc_feature (1)..(292): tr|A0A447Z0Y2|A0A447Z0Y2_9STAP GTP cyclohydrolase FolE2 OS=Staphylococcus delphini OX=53344 GN=folE2 PE=3 SV=1
MTEFDLSTREGRWKHFGSVDPIKGSKPTTKAEMTDLQSTHKNFLFEIEEVGIKNLVYPVWIDQYQTAGNFSFSTSLNKDEKGINMSRILESVEAEYDNGIRLEFDALTQLLNQLKGRMKQHSAGVDVSGKWFFNRYSPVTQMKAVGSADVTFGLALENDAVSRKEITIEAAVTTLCPCSKEISEYSAHNQRGIITVKAYFDKTATLPEDYKEIILDAMEANASSMLYPILKRPDEKRVTERAYENPRFVEDLIRLIAADLVEVSWLEGFDIECRNEESIHQHDAFAKLKYRK

SEQ ID NO: 15048 - protein, 292 aa, Staphylococcus delphini
  misc_feature (1)..(292): tr|A0A2A4HC00|A0A2A4HC00_9STAP GTP cyclohydrolase FolE2 OS=Staphylococcus delphini OX=53344 GN=folE2 PE=3 SV=1
MTEFDLSTREGRWKHFGSVDPIKGSKPTTKAEMTDLQSTHKNFLFEIEEVGIKNLVYPVWIDQYQTAGNFSFSTSLNKDEKGINMSRILESVEAEYDNGIRLEFDALTQLLNQLKGRMKQHSAGVDVSGKWFFNRYSPVTQMKAVGNADVTYGLALENDAVSRKEITIEAAVTTLCPCSKEISEYSAHNQRGIITVKAYLNKTATLPEDYKEIILDAMEANASSMLYPILKRPDEKRVTERAYENPRFVEDLIRLIAADLVEVSWLEGFDIECRNEESIHQHDAFAKLKYRK

SEQ ID NO: 15049 - protein, 292 aa, Staphylococcus devriesei
  misc_feature (1)..(292): tr|A0A2K4DQI9|A0A2K4DQI9_9STAP GTP cyclohydrolase FolE2 OS=Staphylococcus devriesei OX=586733 GN=folE2 PE=3 SV =1
MTEFDLSTREGRWKHFGSVDPVEGTKPTTKSEMTDLQSTHKNFLFEIEEVGIKNLIYPVNIDRFQTAGRFSFSTSLNKDEKGINMSRILESVEKHYNNGLELNFNTLYQVLRTLQTNMKQNSAGVDVSGKWFFDRFSPVTNIKAVGNADVTYGLAIEQDQITRKEITIEASVTTLCPCSKEISEYSAHNQRGIVTVKVYLDKDNDVVDDYKDKILDAMEANASSILYPVLKRPDEKRVTERAYENPRFVEDLIRLVAADLVEFDWIDGFDIECRNEESIHQHDAFAKLKYRK

SEQ ID NO: 15050 - protein, 292 aa, Staphylococcus devriesei
  misc_feature (1)..(292): tr|A0A2T4KD56|A0A2T4KD56_9STAP GTP cyclohydrolase FolE2 OS=Staphylococcus devriesei OX=586733 GN=folE2 PE=3 SV =1
MTEFDLSTREGRWKHFGSVDPVKGTKPTTKSEMTDLQSTHKNFLFEIEEVGIKNLIYPVNIDRFQTAGRFSFSTSLNKDEKGINMSRILESVEKHYNNGLELNFNTLYQVLRTLQTNMNQNSAGVDVSGKWFFDRFSPVTNIKAVGNADVTYGLAIEQDKITRKEITIEASVTTLCPCSKEISEYSAHNQRGIVTVKVYLDKDNDVVDDYKDKILDAMEANASSILYPILKRPDEKRVTERAYENPRFVEDLIRLVAADLVEFDWIDGFDIECRNEESIHQHDAFAKLKYRK

SEQ ID NO: 15051 - protein, 292 aa, Staphylococcus edaphicus
  misc_feature (1)..(292): tr|A0A2C6WI97|A0A2C6WI97_9STAP GTP cyclohydrolase FolE2 OS=Staphylococcus edaphicus OX=1955013 GN=folE2 PE=3 S V=1
MTEFDLSTREGRWKHFGSVDPIEGTKPTIKEEMKDLQSTNKHFLFEIEEVGIKNLVYPVLVDRFQTAGNFSFSTSLNIDEKGINMSRILESVEKHYNNGIELDFDSLYQLLRSLQERMNQNAAGLDVSAKWFFDRHSPVTQIKAVGHADVTYGLAINKENVTRKELTIEAAVTTLCPCSKEISEYSAHNQRGIVTVKAYINKDIALIDDYKNVILDAMEANASSMLYPILKRPDEKSVTERAYENPRFVEDLIRLIAADLVDFEWLDGFDIECRNEESIHQHDAFAKLKYRK

SEQ ID NO: 15052 - protein, 292 aa, Staphylococcus epidermidis
  misc_feature (1)..(292): sp|Q5HRI1|GCH4_STAEQ GTP cyclohydrolase FolE2 OS=Staphy lococcus epidermidis (strain ATCC 35984 / RP62A) OX=176 279 GN=folE2 PE=3 SV=1
MTEFDLSTREGRWKHFGSVDPVKGTKPTTKNEMTDLQSTHKNFLFEIEEVGIKNLTYPVLIDQYQTAGLFSFSTSLNKNEKGINMSRILESVEKHYDNGIELEFNTLHQLLRTLQDKMNQNAAGVDVSGKWFFDRYSPVTHIKAVGHADVTYGLAIENHTVTRKELTIQAKVTTLCPCSKEISEYSAHNQRGIVTVKAYLDKNNDVIDDYKNKILDAMEANASSILYPILKRPDEKRVTERAYENPRFVEDLIRLIAADLVEFDWIEGFDIECRNEESIHQHDAFARLKYRK

SEQ ID NO: 15053 - protein, 292 aa, Staphylococcus epidermidis
  misc_feature (1)..(292): tr|A0A447XNR6|A0A447XNR6_STAEP GTP cyclohydrolase FolE2 OS=Staphylococcus epidermidis OX=1282 GN=folE2 PE=3 SV =1
MTEFDLSTREGRWKHFGSVDPIEGTKPTTKNEMTDLQSTHKNFLFEIEEVGIKNLTYPVLIDQFQTAGTFSFSTSLNKDEKGINMSRILESVEKHYHNGIELEFNTLYQVLRTLQEKMNQNAAGVDVSGKWFFDRFSPVTQIKAIGNADVTYGLAIEGTNVTRKELTIQAAVTTLCPCSKEISEYSAHNQRGIVTVKTYLNKDDIVIDDYKDKILDAMEANASSVLYPILKRPDEKRVTERAYENPRFVEDLIRLIAADLVEFDWIEGFDIECRNEESIHQHDAFARLKYRK

SEQ ID NO: 15054 - protein, 292 aa, Staphylococcus equorum
  misc_feature (1)..(292): tr|A0A3S0KSA6|A0A3S0KSA6_9STAP GTP cyclohydrolase FolE2 OS=Staphylococcus equorum subsp. equorum OX=29383 GN=f olE2 PE=3 SV=1
MTEFDLSTREGRWKHFGSVDPVKGTKPTAKNKMTDLQSSHKNFLFKIEEVGIKNLTYPVLIDQYQTAGLFSFSTSLNKDEKGINMSRILESVEKHYDNGIELEFNTLYQLLRTLQEKMNQHAAGVDVSSKWFFDRFSPVTNIKAVGNASVTYGLAIDGHNVTRKELTVEAAVTTLCPCSKEISEYSAHNQRGIVTVKTYLVKNNDVVDDYKDKILDAMEANASSVLYPILKRPDEKRVTERAYENPRFVEDLIRLIAADLVEFDWIEGFDIECRNEESIHQHDAFARLKYRK

SEQ ID NO: 15055 - protein, 292 aa, Staphylococcus equorum
  misc_feature (1)..(292): tr|A0A1E5TRQ5|A0A1E5TRQ5_9STAP GTP cyclohydrolase FolE2 OS=Staphylococcus equorum OX=246432 GN=folE2 PE=3 SV=1
MTEFDLSTREGRWKHFGSVDPIEGTKPTEKENMKDLQSTHKDFLFEIEEVGIKNLVYPVLVDRFQTAGNFSFSTSLNQDEKGINMSRILESVEKHYNNGIELNFDALYQLLRSLQVSMAQNAAGLDVSAKWFFDRYSPVTQIKAVGYADVTYGLAIDKDDVTRKEITIQAAVTTLCPCSKEISEYSAHNQRGIITVKAFLNKDVDLIGDYKEVILDAMEANASSMLYPILKRPDEKSVTEHAYENPRFVEDLIRLIAADLVGFEWLDGFEIECRNEESIHQHDAFAKLKYHK

SEQ ID NO: 15056 - protein, 292 aa, Staphylococcus felis
  misc_feature (1)..(292): tr|A0A2K3ZC47|A0A2K3ZC47_9STAP GTP cyclohydrolase FolE2 OS=Staphylococcus felis OX=46127 GN=folE2 PE=3 SV=1
MTEFDLSTREGRWKHFGSVDPIQGTKPTTKAEMTDLQSTHKNFLFEIEEVGIKNLTYPVLIDQYQTAGTFSFSTSLNQDEKGINMSRILESVEAEYDNGIRLEYDALTQLLNRLKTNMKQHSAGVDVSGKWFFDRISPITHIKAIGSADVTYGLAIEGDTITRKELTLTAAVTTLCPCSKEISEYSAHNQRGIITVKALINAQATLPEDYKDILLDAMEANASSMLYPILKRPDEKRVTERAYENPRFVEDLIRLIAADLVELDWLDGFDIECRNEESIHQHDAFAKLKYRK

SEQ ID NO: 15057 - protein, 293 aa, Staphylococcus fleurettii
  misc_feature (1)..(293): tr|A0A431YZM4|A0A431YZM4_9STAP GTP cyclohydrolase FolE2 OS=Staphylococcus fleurettii OX=150056 GN=folE2 PE=3 S V=1
MTEFDLSTREGRWRHFGSVDPVNGSKPTTKSEMPDLQSTHKNFLFEIEEVGIKNLVYPAWIDQYQTAGNFSFSTSLTQDEKGINMSRILESVEAEYDNGIRLEFEALTQLMNRLKTSMKQRSAGVDVSGKWFFDRLSPVTQIKAIGHADVTYGLAVDNDQVTRKELTIEAAVTTLCPCSKEISEYSAHNQRGIITVKTYIDKNATLPENYKEIILDAMEANASSMLYPILKRPDEKRVTERAYENPRFVEDLIRLIAADLVEVNWIEGFDIECRNEESIHQHDAFAKLKYRKS

SEQ ID NO: 15058 - protein, 292 aa, Staphylococcus fleurettii
  misc_feature (1)..(292): tr|A0A380FWG6|A0A380FWG6_9STAP GTP cyclohydrolase FolE2 OS=Staphylococcus fleurettii OX=150056 GN=folE2 PE=3 S V=1
MTQLDLSTREARWKYFGSVDPIKGNKPTEKEKMPDLQSSKKDFLFEIEHVGIKNLIYPVRIDDFQTVGNFEFSTSLNQDEKGINMSRIIESVEKHYDNGVKLEFDHLTTLLNTLQSVMLQNTASLDVTAKWFFNRFSPVTNQKAVGHADIRYILSVSDDKVTKKSLGIEVPVTTLCPCSKEISEYSAHNQRGIITVLIDLDPEIDLPDNYKDIVLDGMEANASSMLYPILKRTDEKAVTERAYENPRFVEDLIRLVAADLVDLDWIQGFEIECRNEESIHQHDAFARLKYTK

SEQ ID NO: 15059 - protein, 292 aa, Staphylococcus gallinarum
  misc_feature (1)..(292): tr|A0A418HNQ0|A0A418HNQ0_STAGA GTP cyclohydrolase FolE2 OS=Staphylococcus gallinarum OX=1293 GN=folE2 PE=3 SV= 1
MTEFDLSTREGRWKHFGSVDPVEGTKPTVKEKMKDLQSTHKDFLFEIEEVGIKNLVYPVHVDRFQTAGNFSFSTSLNQDEKGINMSRILESVEKHYHNGIELNFDTLYHVLRSLQESMNQSSAGLDVSAKWFFDRYSPVTQIKAVGHADVTYGIAIDEKDVTRKEITIEAAVTTLCPCSKEISEYSAHNQRGIVTVKAYLNKDVVLNDDFKDVILDAMEANASSILYPILKRPDEKSVTERAYENPRFVEDLIRLIAADLVGFDWLDGFDIECRNEESIHQHDAFAKLKYRK

SEQ ID NO: 15060 - protein, 292 aa, Staphylococcus gallinarum
  misc_feature (1)..(292): tr|A0A3A0H5S3|A0A3A0H5S3_STAGA GTP cyclohydrolase FolE2 OS=Staphylococcus gallinarum OX=1293 GN=folE2 PE=3 SV= 1
MTEFDLSTREGRWKHFGSVDPVEGTKPTVKEKMKDLQSTHKDFLFEIEEVGIKNLVYPVHVDRFQTAGNFSFSTSLNQDEKGINMSRILESVEKHYHNGIELNFDTLYHVLRSLQESMNQSAAGLDVSAKWFFDRYSPVTQIKAVGHADVTYGIAIDEKEVTRKEITIEAAVTTLCPCSKEISEYSAHNQRGIVTVKAYLNKDVVLNDDFKDVILDAMEANASSILYPILKRPDEKSVTERAYENPRFVEDLIRLIAADLVGFDWLDGFDIECRNEESIHQHDAFAKLKYRK

SEQ ID NO: 15061 - protein, 292 aa, Staphylococcus haemolyticus
  misc_feature (1)..(292): sp|Q4L3P5|GCH4_STAHJ GTP cyclohydrolase FolE2 OS=Staphy lococcus haemolyticus (strain JCSC1435) OX=279808 GN=fo lE2 PE=3 SV=1
MTEFDLSTREGRWKHFGSVDPIEGTKPTTKNEMTDLQSTHKNFLFEIEEVGIKNLIYPVNIDRFQTAGRFSFSTSLNKDEKGINMSRILESVEKHYNNGLELNFDTLYQVLRTLQTNMKQNSSGVDVSGKWFFDRFSPVTNIKAVGNADVTYGLAIEQDQITRKEITIEATVTTLCPCSKEISEYSAHNQRGVVTVKVYLDKNNQVVDDYKDKILDAMEANASSILYPILKRPDEKRVTERAYENPRFVEDLIRLIAADLVEFDWIDGFDIECRNEESIHQHDAFAKLKYRK

SEQ ID NO: 15062 - protein, 292 aa, Staphylococcus haemolyticus
  misc_feature (1)..(292): tr|A0A4T9XMH1|A0A4T9XMH1_STAHA GTP cyclohydrolase FolE2 OS=Staphylococcus haemolyticus OX=1283 GN=folE2 PE=3 S V=1
MTEFDLSTREGRWKHFGSVDPIEGTKPTTKNEMTDLQSTHKNFLFEIEEVGIKNLIYPVNIDRFQTAGQFSFSTSLNKDEKGINMSRILESVEKHYNNGLELNFDTLYQVLRTLQTNMKQNSSGVDVSGKWFFDRFSPVTNIKAVGNADVTYGLAIEQDQITRKEITIEATVTTLCPCSKEISEYSAHNQRGVVTVKVYLDKNNQVVDDYKDKILDAMEANASSILYPILKRPDEKRVTERAYENPRFVEDLIRLIAADLVEFDWIDGFDIECRNEESIHQHDAFAKLKYRK

SEQ ID NO: 15063 - protein, 292 aa, Staphylococcus hominis
  misc_feature (1)..(292): tr|A0A4Q9WSC3|A0A4Q9WSC3_STAHO GTP cyclohydrolase FolE2 OS=Staphylococcus hominis OX=1290 GN=folE2 PE=3 SV=1
MTEFDLSTREGRWKHFGSVDPIKGTKPTTKNEMTDLQSTHKNFLFEIEEVGIKNLVYPVKIDQFQTAGTFSFSTSLNKDEKGINMSRILESVEKHYNNGLELDFDTLYQVLRTLQDNMKQNAAGVDVSGKWFFDRYSPVTHIKAVGNADVTYGLAIHKDQVTRKELTITATVTTLCPCSKEISEYSAHNQRGVVTVKVYLDKNSEMIDDYKEKILDAMEANASSILYPILKRPDEKRVTERAYENPRFVEDLIRLIAADLVDFDWIDGFDIECRNEESIHQHDAFARLKYRK

SEQ ID NO: 15064 - protein, 292 aa, Staphylococcus hominis
  misc_feature (1)..(292): tr|A0A3S7GUE4|A0A3S7GUE4_STAHO GTP cyclohydrolase FolE2 OS=Staphylococcus hominis OX=1290 GN=folE2 PE=3 SV=1
MIEFDLSTREGRWKHFGSVDPIKGTKPTTKNEMTDLQSTHKNFLFEIEEVGIKNLVYPVKIDQFQTAGTFSFSTSLNKDEKGINMSRILESVEKHYNNGLELDFDTLYQVLRTLQDNMKQNAAGVDVSGKWFFDRYSPVTHIKAVGHADVTYGLAIHKDQVTRKELTITATVTTLCPCSKEISEYSAHNQRGVVTVKVYLDKNSEMIDDYKEKILDAMEANASSILYPILKRPDEKRVTERAYENPRFVEDLIRLIAADLVDFDWIDGFDIECRNEESIHQHDAFARLKYRK

SEQ ID NO: 15065 - protein, 292 aa, Staphylococcus hyicus
  misc_feature (1)..(292): tr|A0A418JKV5|A0A418JKV5_STAHY GTP cyclohydrolase FolE2 OS=Staphylococcus hyicus OX=1284 GN=folE2 PE=3 SV=1
MTEFDLSTREGRWKHFGSVDPIQGTKPTTKAEMTDLQSTHKNFLFEIEEVGIKNLVYPVWIDHFQTAGNFSFSTSLNKDEKGINMSRILEAVEAEYDNGIRLEYDMLTQLLNRLKTHMKQHSAGVDVSGKWFFDRKSPVTNIKAVGHADVTYGLAVRGDEITRKELTVEAAVTTLCPCSKEISEYSAHNQRGIITVKTYINKTATLTADYKEIILDAMEANASSMLYPILKRPDEKRVTERAYENPRFVEDLIRLIAADLVELEWLDGFDIECRNEESIHQHDAFAKLKYRK

SEQ ID NO: 15066 - protein, 292 aa, Staphylococcus hyicus
  misc_feature (1)..(292): tr|A0A4V6L6S1|A0A4V6L6S1_STAHY GTP cyclohydrolase FolE2 OS=Staphylococcus hyicus OX=1284 GN=folE2 PE=3 SV=1
MTEFDLSTREGRWKHFGSVDPIEGTKPTTKNEMTDLQSTHKDFLFEIEEVGIKNLVYPVLVDQYQTAGTFSFSTSLTKDEKGINMSRIIESVEKHYDNGIELEFNTLYQVLRTLQTNMKQNAAGVDVSGKWFFDRYSPTTNIKAVGNADVTYGLAIDGDKVTRKELTIEATVTTLCPCSKEISEYSAHNQRGVVTVKTYINKDQGIVDDYKNKILDAMEANASSILYPILKRPDEKRVTERAYENPRFVEDLIRLIAADLVEFDWLDGFDIECRNEESIHQHDAFAKLKYRK

SEQ ID NO: 15067 - protein, 214 aa, Staphylococcus intermedius
  misc_feature (1)..(214): tr|A0A380G9P1|A0A380G9P1_STAIN GTP cyclohydrolase 1 OS= Staphylococcus intermedius NCTC 11048 OX=1141106 GN=fol E PE=3 SV=1
MFNQVESLKVISDEQYKKLEVLKPDIKKNEQDLLNIMIGLRKLIRVCGDDPTRDGLEETPFRVLKAYLEYTEGYREDPRKHLEKEFDVDGHQELVIVKDIEFNSLCEHHFAPFHGRVHIGYIPNKKITGLSKFGRLVDGYSKRFQVQERLTTQIADAIDEVLQAQGVMVVVEAKHMCMCGRGIKKATSSTTTSAIRGSFKDNAQLRNEFLSLIK

SEQ ID NO: 15068 - protein, 292 aa, Staphylococcus intermedius
  misc_feature (1)..(292): tr|A0A380GB90|A0A380GB90_STAIN GTP cyclohydrolase FolE2 OS=Staphylococcus intermedius NCTC 11048 OX=1141106 GN =folE2 PE=3 SV=1
MTEFDLSTREGRWKHFGSVDPIKGTKPTTKDEMTDLQSTHKNFLFEIEEVGIKNLVYPVWIDQYQTAGNFSFSTSLNKDEKGINMSRILESVEAEYDNGIRLEFDALTQLLNQLKSRMKQHSAGVDVSGKWFFNRYSPVTQMKAVGNADVTYGLALDNEAVTRKEITIEAAVTTLCPCSKEISEYSAHNQRGIITVKAYLDKTATLPEDYKEVILDAMEANASSMLYPILKRPDEKRVTERAYENPRFVEDLIRLIAADLVEVSWLEGFDIECRNEESIHQHDAFAKLKYRK

SEQ ID NO: 15069 - protein, 210 aa, Staphylococcus kloosii
  misc_feature (1)..(210): tr|A0A151A771|A0A151A771_9STAP GTP cyclohydrolase 1 OS= Staphylococcus kloosii OX=29384 GN=folE PE=3 SV=1
MENIDLEEKVNKLVSDNFSEDIDNKKASINSAMENIKSIIELCGDDPERDGLIETPYRFLKAFFEYTEGYKENPKDHLKKTFDVQQDDMVLVKDIEFYSMCEHHFAPFFGVAHVGYIPDQKVTGLSKIARVVEGYARRFQVQERLTSQIATAINEELKPKGVMVVIEAKHMCMCSRGIKKDQSSTLTSAVHGLFQSSYNTRSEFLTLIHK

SEQ ID NO: 15070 - protein, 292 aa, Staphylococcus kloosii
  misc_feature (1)..(292): tr|A0A512QIS4|A0A512QIS4_9STAP GTP cyclohydrolase FolE2 OS=Staphylococcus kloosii OX=29384 GN=folE2 PE=3 SV=1
MTELDLSTREGRWKHFGSVDPIEGTKPVVKEEMTDLQSTNKNFLFDIEEVGIKNLVYPVRIDDYQTAGTFSFSTSLNQDEKGINMSRILESVEQHYDNGIQLNFTSLNEVLRTLQTSMKQSSAGVDVSGKWFFNRLSPVTNIKAIGNADVTFGLAIEGDAITRKELTINAAVTTLCPCSKEISEYSAHNQRGYVTVKAYLDKDTTLNDNYKEIILDAMEANASSILYPILKRPDEKSVTERAYENPRFVEDLIRLIAADLVGFEWIEGFDIECRNEESIHQHDAFAKIKYRK

SEQ ID NO: 15071 - protein, 292 aa, Staphylococcus lentus
  misc_feature (1)..(292): tr|A0A4Y9KCV1|A0A4Y9KCV1_STALE GTP cyclohydrolase FolE2 OS=Staphylococcus lentus OX=42858 GN=folE2 PE=3 SV=1
MKQIDLSTREARWKYFGSVDPIKGTKPTEKEKMPDLQSSKKDFLFEIEHVGIKNLVYPVKIDGFQSIGNFEFSTSLNQDEKGINMSRIIESVEKHYDNGVPLSFDSLKSLLNTLESAMFQNTASVDVSAKWFFNRYSPITQQKAVGNADIRYILSVSDDKLTKKSLGIEVPVTTLCPCSKEISEYSAHNQRGIITVLIDLDTETDLPDNYKELILDGMEANASSMLYPILKRTDEKAVTEHAYENPRFVEDLIRLVAADLVELEWINGFEIECRNEESIHQHDAFARLKYSK

SEQ ID NO: 15072 - protein, 292 aa, Staphylococcus lentus
  misc_feature (1)..(292): tr|A0A178PMS5|A0A178PMS5_STALE GTP cyclohydrolase FolE2 OS=Staphylococcus lentus OX=42858 GN=folE2 PE=3 SV=1
MKQIDLSTREARWKYFGSVDPIKGTKPTEKEKMPDLQSSKKDFLFEIEHVGIKNLVYPVKIDGFQSIGNFEFSTSLNQDEKGINMSRIIESVEKHYDNGVPLSFDSLKSLLNTLESAMFQNTASVDVSAKWFFNRYSPITQQKAVGNADIRYILSVSDDKLTKKSLGIEVPVTTLCPCSKEISEYSAHNQRGIITVLIDLDTETDLPDNYKELILDGMEANASSMLYPILKRTDEKAVTERAYENPRFVEDLIRLVAADLVELEWINGFEIECRNEESIHQHDAFARLKYSK

SEQ ID NO: 15073 - protein, 293 aa, Staphylococcus lugdunensis
  misc_feature (1)..(293): tr|A0A133Q0V6|A0A133Q0V6_STALU GTP cyclohydrolase FolE2 OS=Staphylococcus lugdunensis OX=28035 GN=folE2 PE=3 S V=1
MTEFDLSTREGRWKHFGSVDPVEGTKPTTKQDMTDLQSTHKNFLFEIEEVGIKNLVYPVRINQYQTAGTFSFSTSLTQNEKGINMSRILESVEKHYSNGLELDYSTLYQVLRTLQENMKQNSAGVDVKGKWFFDRYSPVTNIKAVGNADVTYGLAIEGNNITRKELTIEATVTTLCPCSKEISEYSAHNQRGIVTVKAYLDKDEQIVDDYKEKILDAMEANASSILYPILKRPDEKRVTERAYENPRFVEDLIRLIAADLVDFEWIDGFDIECRNEESIHQHDAFARLKYRKS

SEQ ID NO: 15074 - protein, 293 aa, Staphylococcus lutrae
  misc_feature (1)..(293): tr|A0A1W6BMJ4|A0A1W6BMJ4_9STAP GTP cyclohydrolase FolE2 OS=Staphylococcus lutrae OX=155085 GN=folE2 PE=3 SV=1
MTEFDLSTREGRWKHFGSVDPIEGSKPTTKAEMTDLQSTHKNFLFEIEEVGIKNLIYPVWIDQYQTAGNFSFSTSLNQDEKGINMSRILESVEAEYDNGIRLEFHTLTQLLNRLKSSMKQHSAGVDVSGKWFFNRYSPITHIKAVGYADVTYGLAIDEDTITRKELTIEAAVTTLCPCSKEISEYSAHNQRGIITVKSYLDKDVTLPENYKEVILDAMEANASSMLYPILKRPDEKRVTERAYENPRFVEDLIRLIAADLVDVAWIAGFDIECRNEESIHQHDAFAKLKYRKS

SEQ ID NO: 15075 - protein, 292 aa, Staphylococcus massiliensis
  misc_feature (1)..(292): tr|K9AJK5|K9AJK5_9STAP GTP cyclohydrolase FolE2 OS=Stap hylococcus massiliensis S46 OX=1229783 GN=folE2 PE=3 SV =1
MTEFDLSTREGRWKHFGSVDPIKGTKPTTKSEMTDLQSTHKDFLFEIEEVGITNLVYPVLVDQFQTAGNFSFSTSLNQDEKGINMSRILESVEKHYDNGIELEFHTLYRLLKSLQSKMEQRDAGLDVSAKWFFNRLSPVTNMKAIGHADVTYGMAIEDDTVTRKELTIKAMVTTLCPCSKEISEYSAHNQRGVITVKAYINKEEEIIDDYKDIILDAMEANASSLLYPILKRPDEKHVTETAYENPRFVEDLIRLVAADLVELTWLDGFDIECRNEESIHQHDAYARLKHRK

SEQ ID NO: 15076 - protein, 293 aa, Staphylococcus microti
  misc_feature (1)..(293): tr|A0A0D6XRS1|A0A0D6XRS1_9STAP GTP cyclohydrolase FolE2 OS=Staphylococcus microti OX=569857 GN=folE2 PE=3 SV=1
MTEFDLSTREGRWKHFGSVDPIKGTKPTTKAEMTDLQSTHKNFLFEIEQVGIKNLVYPVWIDNFQTAGNFSFSTSLNQDEKGINMSRILEAVESEYDNGIRLDFDALTTLLNTLKTRMNQHSAGVDVEGKWFFNRLSPVTGIKAVGHADVTYGLAVHDNDVTRKTLTLKAAVTTLCPCSKEISEYSAHNQRGIITVKAYIDKVQTLPSDYKDVLLDAMEANASSMLYPILKRPDEKRVTERAYENPRFVEDLIRLIAADLVEVPWLTGFDIECRNEESIHQHDAFAKLTYRKP

SEQ ID NO: 15077 - protein, 293 aa, Staphylococcus muscae
  misc_feature (1)..(293): tr|A0A240BU61|A0A240BU61_9STAP GTP cyclohydrolase FolE2 OS=Staphylococcus muscae OX=1294 GN=folE2 PE=3 SV=1
MTEFDLSTREGRWKHFGSVDPIKGTKPTTKAEMTDLQSTHKNFLFEIEQVGIKNLVYPVWIDQFQTAGNFSFSTSLNQDEKGINMSRILEAVESEYDNGIRLEFDALTSLLHTLKSRMNQHSAGVDVSGKWFFNRLSPVTGIKAVGHADVSYGLAVQDDEVTRKTLTLTAAVTTLCPCSKEISEYSAHNQRGIITVKAYIDKHSTLPSDYKEVLLDAMEANASSMLYPILKRPDEKSVTERAYENPRFVEDLIRLIAADLVEVRWLTGFDIECRNEESIHQHDAFAKLTYRQP

SEQ ID NO: 15078 - protein, 292 aa, Staphylococcus nepalensis
  misc_feature (1)..(292): tr|A0A291JNN1|A0A291JNN1_9STAP GTP cyclohydrolase FolE2 OS=Staphylococcus nepalensis OX=214473 GN=folE2 PE=3 S V=1
MTEFDLSTREGRWKHFGSVDPIEGTKPTVKEEMKDLQSTNKNFLFEIEEVGIKNLVYPVLVDRFQTAGNFSFSTSLNQDEKGINMSRILESVEKHYDNGIELDFDSLYRLLRSLQERMEQNAAGLDVSAKWFFDRHSPITNIKAVGHADVTYGMAIDKENVTRKEITLQVAVTTLCPCSKEISEYSAHNQRGIVTVKAYLSKDANLTDDYKEKILDAIEANASSILYPILKRPDEKSVTEHAYENPRFVEDLIRLIAADLVDFDWIEGFDIECRNEESIHQHDAFAKLKYRR

SEQ ID NO: 15079 - protein, 292 aa, Staphylococcus nepalensis; identical to SEQ ID NO: 6854
  misc_feature (1)..(292): tr|A0A2T4SD11|A0A2T4SD11_9STAP GTP cyclohydrolase FolE2 OS=Staphylococcus nepalensis OX=214473 GN=folE2 PE=3 S V=1

SEQ ID NO: 15080 - protein, 292 aa, Staphylococcus pasteuri; identical to SEQ ID NO: 15053
  misc_feature (1)..(292): tr|A0A269XIW2|A0A269XIW2_9STAP GTP cyclohydrolase FolE2 OS=Staphylococcus pasteuri OX=45972 GN=folE2 PE=3 SV=1

SEQ ID NO: 15081 - protein, 292 aa, Staphylococcus pasteuri
  misc_feature (1)..(292): tr|A0A0M2NU58|A0A0M2NU58_9STAP GTP cyclohydrolase FolE2 OS=Staphylococcus pasteuri OX=45972 GN=folE2 PE=3 SV=1
MTEFDLSTREGRWKHFGSVDPIEGTKPTTKNEMTDLQSTHKNFLFEIEEVGIKNLTYPVLIDQFQTAGTFSFSTSLNKDEKGINMSRILESVEKHYNNGIELEFNTLYHVLRTLQEKMNQNAAGVDVSGKWFFDRFSPVTNIKAIGNADVTYGIAIEGTKVTRKEVTIQAAVTTLCPCSKEISEYSAHNQRGIVTVKAYLNKDDIVIDDYKDKILDAMEANASSILYPILKRPDEKSVTERAYENPRFVEDLIRLIAADLVEFDWIEGFDIECRNEESIHQHDAFARLKYRK

SEQ ID NO: 15082 - protein, 292 aa, Staphylococcus petrasii
  misc_feature (1)..(292): tr|A0A5F1B1F8|A0A5F1B1F8_9STAP GTP cyclohydrolase FolE2 OS=Staphylococcus petrasii subsp. petrasii OX=1276937 GN=folE2 PE=3 SV=1
MTEFDLSTREGRWKHFGSVDPVEGTKPTTKTEMTDLQSTHKNFLFEIEEVGIKNLIYPVKIDRYQTAGKFSFSTSLNQDEKGINMSRILESVEKHYSNGLELNFDTLYQVLRTLQGNMKQNSAGVDVTGKWFFDRYSPVTNIKAVANADVTYGLAIDKDNVTRKEVTIEATVTTLCPCSKEISEYSAHNQRGVVTVKVYLDKNSDVVDDYKEKILDAMEANASSILYPILKRPDEKRVTERAYENPRFVEDLIRLIAADLVEFDWIDGFDIECRNEESIHQHDAFAKLKYRK

SEQ ID NO: 15083 - protein, 292 aa, Staphylococcus petrasii
  misc_feature (1)..(292): tr|A0A380G4Z6|A0A380G4Z6_9STAP GTP cyclohydrolase FolE2 OS=Staphylococcus petrasii subsp. jettensis OX=1077965 GN=folE2 PE=3 SV=1
MTEFDLSTREGRWKHFGSVDPVEGTKPTTKTEMTDLQSTHKNFLFEIEEVGIKNLIYPVKIDRYQTAGKFSFSTSLNQDEKGINMSRILESVEKHYSNGLELNFDTLYQVLRTLQGNMKQNSAGVDVTGKWFFDRYSPVTNIKAVANADVTYGLAIDKDDVTRKEITIEATVTTLCPCSKEISEYSAHNQRGVVTVKVYLDKNSDVVDDYKEKILDAMEANASSILYPILKRPDEKRVTERAYENPRFVEDLIRLITADLVEFDWIDGFDIECRNEESIHQHDAFAKLKYRK

SEQ ID NO: 15084 - protein, 292 aa, Staphylococcus pettenkoferi
  misc_feature (1)..(292): tr|A0A1Z3U3L9|A0A1Z3U3L9_9STAP GTP cyclohydrolase FolE2 OS=Staphylococcus pettenkoferi OX=170573 GN=folE2 PE=3 SV=1
MSEFDLSTREGRWKHFGSVDPIKGNKPTSKEKMTDLQSTNKDFLFEIEEVGIKNLIYPVNIDRFQTAGNFSFSTSLNQDEKGINMSRILESVEKHYNHGIELDFDALYQVLRSLQESMNQSSAGVDVSGKWFYDRYSPQTDIKAVGHADVTYGLAIKNDNVTRKELTIEAAVTTLCPCSKEISEYSAHNQRGIVTVKAYIDKDAELSDDYKSVILDAMEANASSVLYPILKRPDEKRVTERAYENPRFVEDLIRLIAADLVELDWLEGFDIECRNEESIHQHDAFAKLKHRK

SEQ ID NO: 15085 - protein, 292 aa, Staphylococcus piscifermentans
  misc_feature (1)..(292): tr|A0A239UG46|A0A239UG46_9STAP GTP cyclohydrolase FolE2 OS=Staphylococcus piscifermentans OX=70258 GN=folE2 PE =3 SV=1
MSEFDLTTREGRWKHFGSVDPIEGTKPTVKEEMTDLQSTHKDFLFEIEEVGIKNLVYPVVIDDYQTAGTFAFSTSLTREEKGINMSRILESVEKHYDNGLELTFNNLEAVLHTLEKHMKQSSAGVDVSGKWFFNRYSPVTNMKAVGNADVTYGLAVAGDQVTRKELTIQATVTTLCPCSKEISEYSAHNQRGVITVKMYIDSSATLPTDYKEIILDAMEANASSILYPILKRPDEKRVTERAYENPRFVEDLIRLIAADLVELDWTEGFDIECRNEESIHQHDAFAKLKYRK

SEQ ID NO: 15086 - protein, 292 aa, Staphylococcus piscifermentans
  misc_feature (1)..(292): tr|A0A3S0KDM5|A0A3S0KDM5_9STAP GTP cyclohydrolase FolE2 OS=Staphylococcus piscifermentans OX=70258 GN=folE2 PE =3 SV=1
MTEFDLSTREGRWKHFGSVDPIEGTKPTEKENMKDLQSTHKDFLFEIEEVGIKNLVYPVLVDRFQTAGNFSFSTSLNQDEKGINMSRILESVEKHYNNGIELNFDALYQLLRSLQVSMEQNAAGLDVSAKWFFDRYSPVTQIKAVGHADVTYGLAIDKDDVTRKEITIQAAVTTLCPCSKEISEYSAHNQRGIITVKAFLNKDVDLIGDYKEVILDAMEANASSILYPILKRPDEKSVTEHAYENPRFVEDLIRLIAADLVGFEWLDGFEIECRNEESIHQHDAFAKLKYHK

SEQ ID NO: 15087 - protein, 292 aa, Staphylococcus pseudintermedius
  misc_feature (1)..(292): tr|A0A317YV90|A0A317YV90_STAPS GTP cyclohydrolase FolE2 OS=Staphylococcus pseudintermedius OX=283734 GN=folE2 PE=3 SV=1
MTEFDLSTREGRWKHFGSVDPVKGTKPTTKDEMTDLQSTHKNFLFEIEEVGIKNLVYPVWIDQYQTAGNFSFSTSLNKDEKGINMSRILESVEAEYDNGIRLEFDALTQLLNQLKSRMKQHSAGVDVSGKWFFNRYSPVTQIKAVGHADVTYGFALENDVVSRKEITIEAAVTTLCPCSKEISEYSAHNQRGIITVKVYLDKTATLPEDYKEVILDAMEANASSMLYPILKRPDEKRVTERAYENPRFVEDLIRLIAADLVEVSWLEGFDIECRNEESIHQHDAFAKLKYRK

SEQ ID NO: 15088 - protein, 214 aa, Staphylococcus pseudintermedius
  misc_feature (1)..(214): tr|A0A317YVC2|A0A317YVC2_STAPS GTP cyclohydrolase 1 OS= Staphylococcus pseudintermedius OX=283734 GN=folE PE=3 SV=1
MFNQVESLKVISDEQYKKLKVLKPDIKKSEQDLVNIMIGLRKLICVCGDDPTRDGLEETPFRVLKAYLEYTEGYREDPRKHLEKEFDVDGHQELVIVKDIEFNSLCEHHFAPFHGRVHIGYIPKKKITGLSKFGRLVDGYSKRFQVQERLTTQIADAIDEVLQAQGVMVVVEAKHMCMCGRGIKKATSSTTTSAIRGSFKDNAQLRNEFLSLIK

SEQ ID NO: 15089 - protein, 293 aa, Staphylococcus rostri
  misc_feature (1)..(293): tr|A0A2K3YME9|A0A2K3YME9_9STAP GTP cyclohydrolase FolE2 OS=Staphylococcus rostri OX=522262 GN=folE2 PE=3 SV=1
MTEFDLSTREGRWKHFGSVDPIKGTKPTTKDEMTDLQSTHKNFLFEIEQVGIKNLVYPVWIDNFQTAGNFSFSTSLNQDEKGINMSRILEAVESEYDNGIRLEFDALTKLLHTLKARMNQHSAGVDVQGKWFFNRLSPVTGIKAVGHADVTYGLAVHDDDITRKTLTLTAAVTTLCPCSKEISEYSAHNQRGIITVKAYIDKDATLPSDYKDVLLDAMEANASSMLYPILKRPDEKRVTERAYENPRFVEDLIRLIAADLVDISWLTGFDIECRNEESIHQHDAFAKLTYRQP

SEQ ID NO: 15090 - protein, 292 aa, Staphylococcus saccharolyticus; identical to SEQ ID NO: 15081
  misc_feature (1)..(292): tr|A0A3S0MM59|A0A3S0MM59_9STAP GTP cyclohydrolase FolE2 OS=Staphylococcus saccharolyticus OX=33028 GN=folE2 PE =3 SV=1

SEQ ID NO: 15091 - protein, 292 aa, Staphylococcus saccharolyticus
  misc_feature (1)..(292): tr|A0A4V2HIZ7|A0A4V2HIZ7_9STAP GTP cyclohydrolase FolE2 OS=Staphylococcus saccharolyticus OX=33028 GN=folE2 PE =3 SV=1
MTEFDLSTREGRWKHFGSVDPVKGTKPTTKNEMTDLQSTHKNFLFKIEEVGIKNLTYPVLIDQYQTAGLFSFSTSLNKDEKGINMSRILESVEKHYDNGIELEFNTLYQLLRTLQEKMNQHAAGVDVSGKWFFDRFSPVTSIKAVGNANVTYGLSIDGHNVTRKELTVEAAVTTLCPCSKEISEYSAHNQRGIVTVKAYLVKNNDMVDDYKDKILDAMEANASSVLYPILKRPDEKRVTERAYENPRFVEDLIRLIAADLVEFDWIEGFDIECRNEESIHQHDAFARLKYRK

SEQ ID NO: 15092 - protein, 292 aa, Staphylococcus saprophyticus
  misc_feature (1)..(292): sp|Q49VB3|GCH4_STAS1 GTP cyclohydrolase FolE2 OS=Staphy lococcus saprophyticus subsp. saprophyticus (strain ATC C 15305 / DSM 20229 / NCIMB 8711 / NCTC 7292 / S-41) OX =342451 GN=folE2 PE=3 SV=1
MTEFDLSTREGRWKHFGSVDPIEGTKPTIKEEMKDLQSTHKNFLFEIEEVGIKNLVYPVLVDRFQTAGNFSFSTSLNLDEKGINMSRILESVEKHYHNGIELDFDALYQLLRSLQERMNQNAAGLDVSAKWFFDRFSPITQIKAVGHADVTYGLAIDKQNVTRKEITIEAAVTTLCPCSKEISEYSAHNQRGIVTVKAYINKDIELIDNYKDVILDAMEANASSILYPILKRPDEKSVTERAYENPRFVEDLIRLIAADLVDFDWLDGFDIECRNEESIHQHDAFAKLKYRK

SEQ ID NO: 15093 - protein, 292 aa, Staphylococcus saprophyticus
  misc_feature (1)..(292): tr|A0A1D4I487|A0A1D4I487_STASA GTP cyclohydrolase FolE2 OS=Staphylococcus saprophyticus OX=29385 GN=folE2 PE=3 SV=1
MTEFDLSTREGRWKHFGSVDPIEGTKPTIKEEMKDLQSTNKNFLFEIEEVGIKNLIYPVFVDRFQSAGNFSFSTSLNLDEKGINMSRILESVEKHYNNGIELDFDTLYQVLRSLQKNMNQNAAGLDVSAKWFFDRYSPVTQIKAVGHADVTYGLAIDQKDVTRKEITIEAAVTTLCPCSKEISEYSAHNQRGIVTVKAYINKDAALTEDYKDTILDAMEANASSVLYPILKRPDEKSVTERAYENPRFVEDLIRLIAADLVGFEWLDGFDIECRNEESIHQHDAFAKLKYRK

SEQ ID NO: 15094 - protein, 292 aa, Staphylococcus schleiferi
  misc_feature (1)..(292): tr|A0A3S0M6L8|A0A3S0M6L8_9STAP GTP cyclohydrolase FolE2 OS=Staphylococcus schleiferi subsp. schleiferi OX=7470 7 GN=folE2 PE=3 SV=1
MTQLDLSTREARWKYFGSVDPIKGTKPTEKEKMPDLQSSKKDFLFEIEHVGIKNLIYPVRIDDFQTVGNFEFSTSLNQDEKGINMSRIIESVEKHYDNGVKLDFDHLTTLLNTLQTAMIQNTASVDVTAKWFFNRFSPVTNQKAVGHADIRYILSVSEDKITKKSLGIEVPVTTLCPCSKEISEYSAHNQRGIITVLIDLDPEVSLPDNYKDIVLDGMEANASSMLYPILKRTDEKAVTERAYENPRFVEDLIRLVAADLVELDWIQGFEIECRNEESIHQHDAFARLKYTK

SEQ ID NO: 15095 - protein, 293 aa, Staphylococcus schleiferi
  misc_feature (1)..(293): tr|A0A0K0ZWW2|A0A0K0ZWW2_9STAP GTP cyclohydrolase FolE2 OS=Staphylococcus schleiferi OX=1295 GN=folE2 PE=3 SV= 1
MTEFDLSTREGRWRHFGSVDPVNGSKPTTKSEMPDLQSTHKNFLFEIEEVGIKNLVYPVWIDQYQTAGNFSFSTSLTQDEKGINMSRILESVEAEYDNGIRLEFEALTQLMNRLKTSMKQRSAGVDVSGKWFFDRLSPVTQIKAIGHADVTYGLAVDNDQVTRKELTIEAAVTTLCPCSKEISEYSAHNQRGMITVKTYIDKNAILPENYKEIILDAMEANASSMLYPILKRPDEKRVTERAYENPRFVEDLIRLIAADLVEVNWIEGFDIECRNEESIHQHDAFAKLKYRKS

SEQ ID NO: 15096 - protein, 292 aa, Staphylococcus schweitzeri
  misc_feature (1)..(292): tr|A0A2K4AES2|A0A2K4AES2_9STAP GTP cyclohydrolase FolE2 OS=Staphylococcus schweitzeri OX=1654388 GN=folE2 PE=3 SV=1
MTEFDLSTREGRWKHFGSVDPIEGTKPTTKNEMTDLQSTHKDFLFEIEEVGIKNLVYPVLVDQYQTAGTFSFSTSLTKDEKGINMSRIIESVEKHYDNGIELEFNTLYQVLRTLQTNMKQNAAGVDVSGKWFFDRYSPTTNIKAVGNADVTYGLAIDGNQVTRKELTIEATVTTLCPCSKEISEYSAHNQRGVVTVKTYINKDQDIVDDYKNKILDAMEANASSILYPILKRPDEKRVTERAYENPRFVEDLIRLIAADLVEFDWLDGFDIECRNEESIHQHDAFAKLKYRK

SEQ ID NO: 15097 - protein, 292 aa, Staphylococcus sciuri
  misc_feature (1)..(292): tr|A0A3S0LMS6|A0A3S0LMS6_STASR GTP cyclohydrolase FolE2 OS=Staphylococcus sciuri subsp. rodentium OX=147469 GN =folE2 PE=3 SV=1
MTEFDLSTREGRWKHFGSVDPIQGTKPTTKAEMTDLQSTHKNFLFEIEEVGIKNLVYPVWIDHFQTAGNFSFSTSLNKDEKGINMSRILEAVEAEYDNGIRLEYDMLTQLLNRLKTHMKQHSAGVDVSGKWFFDRKSPVTNIKAVGHADVTYGLAVRGDEITRKELTVEAAVTTLCPCSKEISEYSAHNQRGIITVKTYINKTATLIADYKEIILDAMEANASSMLYPILKRPDEKRVTERAYENPRFVEDLIRLIAADLVELEWLDGFDIECRNEESIHQHDAFAKLKYRK

SEQ ID NO: 15098 - protein, 292 aa, Staphylococcus sciuri
  misc_feature (1)..(292): tr|A0A1X0U092|A0A1X0U092_STASC GTP cyclohydrolase FolE2 OS=Staphylococcus sciuri OX=1296 GN=folE2 PE=3 SV=1
MTQLDLSTREARWKYFGSVDPIKGTKPTEKEKMPDLQSSKKDFLFEIEHVGIKNLIYPVRIDDFQTVGNFEFSTSLNQDEKGINMSRIIESVEKHYDNGVKLDFDHLTTLLNTLQTAMIQNTASVDVTAKWFFNRFSPVTNQKAVGHADIRYILSVSEDKITKKSLGIEVPVTTLCPCSKEISEYSAHNQRGIITVLIDLDPEVSLPDNYKDIVLDGMEANASSMLYPILKRTDEKAVTERAYENPRFVEDLIRLVAADLVELEWIQGFEIECRNEESIHQHDAFARLKYTK

SEQ ID NO: 15099 - protein, 292 aa, Staphylococcus simiae
  misc_feature (1)..(292): tr|G5JF52|G5JF52_9STAP GTP cyclohydrolase FolE2 OS=Stap hylococcus simiae CCM 7213 = CCUG 51256 OX=911238 GN=fo lE2 PE=3 SV=1
MTEFDLSTREGRWKHFGSVDPIQGTKPTTKEEMTDLQSTHKNFLFEIEEVGIKNLTYPVLIDQYQTAGKFSFSTSLNQNEKGINMSRIIESVEKHYDNGIELEFNTLYQLLRTLQHNMKQNAAGVDVSGKWFFDRFSPVTHIKSVGNADVSYGLAIEGDRITRKELTIQATVTTLCPCSKEISEYSAHNQRGVVTVKVYIDKEQNIVDDYKNKVLDAMEANASSMLYPILKRPDEKRVTERAYENPRFVEDLIRLIAADLVEFDWIDGFDIECRNEESIHQHDAFARLKYRK

SEQ ID NO: 15100 - protein, 292 aa, Staphylococcus simulans
  misc_feature (1)..(292): tr|A0A2T4QYE2|A0A2T4QYE2_STASI GTP cyclohydrolase FolE2 OS=Staphylococcus simulans OX=1286 GN=folE2 PE=3 SV=1
MTEFDLSTREGRWKHFGSVDPIKGTKPTVKEEMTDLQSTHKDFLFEIEEVGIKNLVYPVIIDEYQTAGTFAFSTSLTREEKGINMSRILESVEKHYDNGVALTFDNLHTVLDTLQKHMKQTSAGVDVSGKWFFNRYSPVTNLKAVGNADVTYGMAVEGDNVTRKELTMEAKVTTLCPCSKEISEYSAHNQRGVITVKTYLNREATLPSDYKEVILDAMEANASSILYPILKRPDEKRVTERAYENPRFVEDLIRLIAADLVEVDWIEGFDIECRNEESIHQHDAFAKLKYRK

SEQ ID NO: 15101 - protein, 292 aa, Staphylococcus simulans
  misc_feature (1)..(292): tr|A0A2X3QTI4|A0A2X3QTI4_STASI GTP cyclohydrolase FolE2 OS=Staphylococcus simulans OX=1286 GN=folE2 PE=3 SV=1
MTEFDLSTREGRWKHFGSVDPIKGTKPTVKEEMTDLQSTHKDFLFEIEEVGIKNLVYPVIIDEYQTAGTFAFSTSLTREEKGINMSRILESVEKHYDNGVALTFDNLHTVLDTLQKHMKQTSAGVDVSGKWFFNRYSPVTNLKAVGNADVTYGMAVEGDKVTRKELTMEAKVTTLCPCSKEISEYSAHNQRGVITVKTYLNREATLPSDYKEVILDAMEANASSILYPILKRPDEKRVTERAYENPRFVEDLIRLIAADLVEVDWIEGFDIECRNEESIHQHDAFAKLKYRK

SEQ ID NO: 15102 - protein, 292 aa, Staphylococcus sp.; identical to SEQ ID NO: 15052
  misc_feature (1)..(292): tr|A0A1J4HFB9|A0A1J4HFB9_9STAP GTP cyclohydrolase FolE2 OS=Staphylococcus sp. HMSC34G04 OX=1608860 GN=folE2 PE =3 SV=1

SEQ ID NO: 15103 - protein, 292 aa, Staphylococcus sp.
  misc_feature (1)..(292): tr|A0A5B2YMW2|A0A5B2YMW2_9STAP GTP cyclohydrolase FolE2 OS=Staphylococcus sp. GDX7P459A OX=2608390 GN=folE2 PE =3 SV=1
MTEFDLSTREGRWKHFGSVDPIEGTKPTTKNEMTDLQSTHKNFLFEIEEVGIKNLIYPVNIDRFQTAGQFSFSTSLNKDEKGINMSRILESVEKHYSNGLELNFDTLYQVLRTLQTNMKQNSAGVDVSGKWFFDRFSPVTNIKAVGNADVTYGLAIEHDQITRKEITIEATVTTLCPCSKEISEYSAHNQRGVVTVKVYLDKNNQVVDDYKDKILDAMEANASSILYPILKRPDEKRVTERAYENPRFVEDLIRLIAADLVEFDWIDGFDIECRNEESIHQHDAFAKLKYRK

SEQ ID NO: 15104 - protein, 292 aa, Staphylococcus stepanovicii
  misc_feature (1)..(292): tr|A0A240A962|A0A240A962_9STAP GTP cyclohydrolase FolE2 OS=Staphylococcus stepanovicii OX=643214 GN=folE2 PE=3 SV=1
MTQIDLSTREARWRHFGSVDPIKGTKPTEKENMPDLQSSKKDFLFEIEHVGIKNLIYPVRIDDFQTVGNFEFSTSLNQDEKGINMSRIIESVEKHYDNGVNLDFESLKALLNTLQSVMFQNTASVDVDAKWFFNRYSPITKQKAVGHADVRYILSVNNSKVTRKSLGIKVPVTTLCPCSKEISEYSAHNQRGIITVLIDLDTEITLPSDYKDIVLDGMEANASSMLYPILKRTDEKAVTERAYENPRFVEDLIRLVAADLVELDWIKGFEIECRNEESIHQHDAFARLKYNK

SEQ ID NO: 15105 - protein, 292 aa, Staphylococcus succinus
  misc_feature (1)..(292): tr|A0A2T4Q5J8|A0A2T4Q5J8_9STAP GTP cyclohydrolase FolE2 OS=Staphylococcus succinus OX=61015 GN=folE2 PE=3 SV=1
MTEFDLSTREGRWKHFGSVDPIDGTKPTIKEKMKDLQSTHKNFLFEIEEVGIKNLVYPVLLDRFQTAGNFSFSTSLNQDEKGINMSRILESVEKHYNNGIELNFDTLYQLLRSLQDSMNQNAAGLDVSAKWFYDRYSPVTQIKAVGHADVTYGLAIDKKDVTRKEITIEAAVTTLCPCSKEISEYSAHNQRGIVTVKAYINKNVALTDDYKDTILDAMEANASSILYPILKRPDEKSVTERAYENPRFVEDLIRLIAADLVDFEWIDGFDIECRNEESIHQHDAFAKLKYRK

SEQ ID NO: 15106 - protein, 292 aa, Staphylococcus vitulinus
  misc_feature (1)..(292): tr|A0A2T4PSA6|A0A2T4PSA6_9STAP GTP cyclohydrolase FolE2 OS=Staphylococcus vitulinus OX=71237 GN=folE2 PE=3 SV= 1
MTQLDLSTREARWKHFGSVDPIKGNKPTEKEKMPDLQSSKKDFLFEIEHVGIKNLIYPVRIDDFQTVGNFEFSTSLNQDEKGINMSRIIESVEKHYDNGVKLEFDHLTTLLNTLQSVMLQNTASLDVTAKWFFNRYSPITNQKAVGHADIRYILSVSDDKVTQKSLGIEVPVTTLCPCSKEISEYSAHNQRGIITVLIDLNPEIDLPDNYKDIVLDGMEANASSMLYPILKRTDEKAVTERAYENPRFVEDLIRLVAADLVELDWIKGFEIECRNEESIHQHDAFARLKYTK

SEQ ID NO: 15107 - protein, 192 aa, Staphylococcus warneri
  misc_feature (1)..(192): tr|A0A2V3ZDV6|A0A2V3ZDV6_STAWA GTP cyclohydrolase 1 OS= Staphylococcus warneri OX=1292 GN=folE PE=3 SV=1
MKHNPNLNNSQIEQTMSGIRQLINACGEDVSRDGLQETPYRVLKAFMEYTEGYREEPKEHLRKTFDVDHNELVIVKDIEFNSMCEHHFAPFYGRIHIGYIPDDKVTGLSKFGRLVDGYAKRFQVQERLTTQIANAIDEELSPQGVMVVVEAQHMCMCGRGIKKSTSSTTTSAVRGEFENSAQLRNEFLSLLK

SEQ ID NO: 15108 - protein, 292 aa, Staphylococcus warneri
  misc_feature (1)..(292): tr|A0A2V3ZCF8|A0A2V3ZCF8_STAWA GTP cyclohydrolase FolE2 OS=Staphylococcus warneri OX=1292 GN=folE2 PE=3 SV=1
MTEFDLSTREGRWKHFGSVDPIEGTKPTTKNEMTDLQSTHKNFLFEIEEVGIKNLTYPVLIDQFQTAGTFSFSTSLNKDEKGINMSRILESVEKHYNNGIELEFNTLYQVLRTLQEKMNQNAAGVDVSGKWFFDRFSPVTQIKAIGNADVTYGLAIEGTNVTRKELTIQAAVTTLCPCSKEISEYSAHNQRGIVTVKTYLNKDDIVIDDYKDKILDAMEANASSVLYPILKRPDEKRVTERAYENPRFVEDLIRLIAADLVEFDWIEGFDIECRNEESIHQHDAFARLKYRK

SEQ ID NO: 15109 - protein, 292 aa, Staphylococcus xylosus
  misc_feature (1)..(292): tr|A0A418IH14|A0A418IH14_STAXY GTP cyclohydrolase FolE2 OS=Staphylococcus xylosus OX=1288 GN=folE2 PE=3 SV=1
MTEFDLSTREGRWKHFGSVDPIEGTKPTVKENMKDLQSTHKDFLFEIEEVGIKNLVYPVLVDRFQTAGNFSFSTSLNQDEKGINMSRILESVEKHYHNGIELDFDSLYQLLRSLQESMNQNAAGLDVSAKWFFDRHSPVTQIKAVGHADVTYGLAIDKKEVTRKEITIQAAVTTLCPCSKEISEYSAHNQRGIVTVKAYINKDVELVDDYKGKILDAMEANASSILYPILKRPDEKSVTERAYENPRFVEDLIRLIAADLVGFEWLDGFDIECRNEESIHQHDAFAKLKYRK

SEQ ID NO: 15110 - protein, 292 aa, Staphylococcus xylosus
  misc_feature (1)..(292): tr|A0A512STG3|A0A512STG3_STAXY GTP cyclohydrolase FolE2 OS=Staphylococcus xylosus OX=1288 GN=folE2 PE=3 SV=1
MTEFDLSTREGRWKHFGSVDPIEGTKPTVKENMKDLQSTHKDFLFEIEEVGIKNLVYPVLVDRFQTAGNFSFSTSLNQDEKGINMSRILESVEKHYHNGIELDFDSLYQLLRSLQESMNQNAAGLDVSAKWFFDRHSPVTQIKAVGHADVTYGLAIDKKEITRKEITIQAAVTTLCPCSKEISEYSAHNQRGIVTVKAYINKDVELVDDYKGKILDAMEANASSILYPILKRPDEKSVTERAYENPRFVEDLIRLIAADLVGFEWLDGFDIECRNEESIHQHDAFAKLKYRK

SEQ ID NO: 15111 - protein, 211 aa, Stappia indica
  misc_feature (1)..(211): tr|A0A285TRC3|A0A285TRC3_9RHOB GTP cyclohydrolase 1 OS= Stappia indica OX=538381 GN=folE PE=3 SV=1
MDAILKPVTTRDDTAAATRPRPSREEVEAAVRTLLAWTGDDPEREGLLDTPKRVAKAYEEIFSGYFQDPAEHLKRTFEDVGGYDDIVLVRGIPFFSHCEHHMLPFVGEAHVAYYPSEGVVGLSKIARVIDIFAKRLQTQENLTAQVVDAIDTHLAPRGIAVMIEAEHQCMTMRGVQKQGVSTITTQFTGVFRDDPSEQVRFMSLVRGGRRD

SEQ ID NO: 15112 - protein, 208 aa, Stappia sp.
  misc_feature (1)..(208): tr|A0A2E6Y9P4|A0A2E6Y9P4_9RHOB GTP cyclohydrolase 1 OS= Stappia sp. OX=1870903 GN=folE PE=3 SV=1
MDAILNPVGDNGQATRPERPTREEAEAAVRTLLAWAGDDPTREGLLDTPKRVAKAYGEIFAGYAQDPGEHLERTFEDVGGYDDIVLVRGIPFFSHCEHHMLPFVGTAHVAYYPSEGVVGLSKIARVVDIFAKRLQTQENLTAQIIGSLDEHLSPRGIAVMLEAEHQCMTMRGVQKQGVSTITTQFTGVFRDDPSEQVRFMSLVRDQRR

SEQ ID NO: 15113 - protein, 211 aa, Stappia sp.
  misc_feature (1)..(211): tr|A0A1H2GQZ8|A0A1H2GQZ8_9RHOB GTP cyclohydrolase 1 OS= Stappia sp. ES.058 OX=1881061 GN=folE PE=3 SV=1
MDAILNPVAQRDDSTESPLARPTREQAEAAVRTLLAWAGDDPTREGVLDTPKRVAKAYQEIFSGYDQDPAEHLKRTFEDVGGYDDIVLVRGIPFFSHCEHHMLPFVGEAHVAYYPSEGVVGLSKIARVVDIFAKRLQTQENLTAQITEAMDTHLAPRGIAVMLEAEHQCMTMRGVQKRGVSTITTQFTGVFRDDPTEQVRFMSLIRDARRG

SEQ ID NO: 15114 - protein, 221 aa, Starkeya novella
  misc_feature (1)..(221): tr|A0A2W5KLM5|A0A2W5KLM5_STANO GTP cyclohydrolase 1 OS= Starkeya novella OX=921 GN=folE PE=3 SV=1
MDAVVQHPWARVPIPAPKQSSVPAEFVKPRPTREQAEAAVRTLIAWAGDDPTREGLIDTPKRVVKAYAELFSGYGKDAATDLERVFEEVAGYDDMVVLRDIPYFSHCEHHMVPFFGKAHVAYFPSNGVVGLSKIARVVDAFSKRLQTQETLTSQIAEAIDEHLKPRGVAVMLEGEHMCMSMRGIQKAGVSTVTTQFSGLFKDEPAEQVRFITMVRAGQSGR

SEQ ID NO: 15115 - protein, 214 aa, Starkeya novella
  misc_feature (1)..(214): tr|A0A2W5QSS8|A0A2W5QSS8_STANO GTP cyclohydrolase 1 OS= Starkeya novella OX=921 GN=folE PE=3 SV=1
MDAVLKSLMRSAQNESDAAAAAVKRPSREEAEAAVRTLIAWTGDDPEREGLLDTPKRVVRAYEELYSGYRADAETILDRTFGEIGNFDDMVLVRDIEFYSHCEHHMVPFVGKAHVAYFPVERVVGLSKIARIVDIFARRLQTQEHLTSQITTAMDEILKPRGVAVLIEAEHMCMAMRGVRKQGASTVTSQFTGLFRDDPQEQVRFMSLLRGMRP

SEQ ID NO: 15116 - protein, 212 aa, Starkeya sp.
  misc_feature (1)..(212): tr|A0A556PG06|A0A556PG06_9RHIZ GTP cyclohydrolase 1 OS= Starkeya sp. 3C OX=2597768 GN=folE PE=3 SV=1
MDAVLKSLMRSAQNEIEASAARRPSREDAEAAVRTLIAWAGDDPSREGLLDTPKRVVRAYEELYSGYRADPESILDRTFGEIGNFDDMVLVRDIEFYSHCEHHMVPFVGKAHVAYFPVERVVGLSKIARIVDLFARRLQTQEHLTSQIVTAMDEILKPRGVAVLLEAEHMCMAMRGVRKQGASTVTTQFTGVFRDDPQEQVRFMSLLRGMRP

SEQ ID NO: 15117 - protein, 208 aa, Stella humosa
  misc_feature (1)..(208): tr|A0A3N1L0A7|A0A3N1L0A7_9PROT GTP cyclohydrolase 1 OS= Stella humosa OX=94 GN=folE PE=3 SV=1
MTTEDPQAPPSDRPTQSEAEAAVRTLIRWAGDDPAREGLLDTPSRVARSFAEFFGGYELDPVGVLQRTFEEVEGYDEMVVLRDIRFESHCEHHLAPIIGKAHVAYLPRTRVVGISKLARVVDLYARRLQIQEKMTAQIANAIEEVLQPHGVAVVIEASHQCMTTRGVHKPGTSLVTSRMLGAFRADAATRREFLAFVGVGGAPGMTNV

SEQ ID NO: 15118 - protein, 213 aa, Stella humosa
  misc_feature (1)..(213): tr|A0A3N1M688|A0A3N1M688_9PROT GTP cyclohydrolase 1 OS= Stella humosa OX=94 GN=folE PE=3 SV=1
MDALTLPPPDRTSAAPTTGRPTREEAEAAIRTLIGWAGDDVGREGLLDTPARVVRAYEEFFGGYRLDPVEILNRTFDETEGYDEMVLLKDIRFESHCEHHMVPIIGRAHVAYLPRSRVVGISKLARVVDAYARRLQIQEKLTAQIAQAIDTALQPLGVAVVIEAQHQCMTTRGVHKPGVSMVTSRMLGAFRTDPVARQEFMLAIGGRAGAAAA

SEQ ID NO: 15119 - protein, 312 aa, Stenotrophomonas acidaminiphila
  misc_feature (1)..(312): tr|A0A2W5LLP5|A0A2W5LLP5_9GAMM GTP cyclohydrolase FolE2 OS=Stenotrophomonas acidaminiphila OX=128780 GN=folE2 PE=3 SV=1
MTMAPSLPVAPRADLPDVAHQRVPLARPLDWVGMENIALPVRIADGQGGQLQVAASIDLSVNLANPDARGIHMSRLYLQLQDGLAREAITPAGLRHLLQDGVASQAGLATSARLKIRYDALLQRKALESDYAGWKRYPVEIEATLVDGHLGLALSFAVEYSSTCPASAALSRQANAERFASDFDGSPALSVAAVHDWLASERGLAATPHAQRSRASVRVELRPQFDELPLVPLVDAIEAALGTPVQTAVKRVDEQAFARLNAENLMFCEDAARRVASVLAGDARVARYDATVAHYESLHPHDAVARVSGSND

SEQ ID NO: 15120 - protein, 199 aa, Stenotrophomonas acidaminiphila
  misc_feature (1)..(199): tr|A0A0R0E0M3|A0A0R0E0M3_9GAMM GTP cyclohydrolase 1 OS= Stenotrophomonas acidaminiphila OX=128780 GN=folE PE=3 SV=1
MADSNNPSVTQAQAEEAVRTLLRWAGEDPAREGLLDTPRRVAEAYGDWFKGYQDDPREYLARTFEEVAGYDEMIVLRDIEYESHCEHHMAPIIGRVHVGYVPNGRVVGISKLARVVEAYARRFQVQEKMTAQIADVIQDVLQPLGVGVVVEGSHECMTTRGIHKRGVSMVTSRMRGSFHDDARTRAEFLRFIEVGHARR

SEQ ID NO: 15121 - protein, 203 aa, Stenotrophomonas chelatiphaga
  misc_feature (1)..(203): tr|A0A0R0D6A4|A0A0R0D6A4_9GAMM GTP cyclohydrolase 1 OS= Stenotrophomonas chelatiphaga OX=517011 GN=folE PE=3 SV =1
MSNDNNSKAPQGDVSQTQAEEAVRTLLRWAGEDPTREGLLDTPRRVAEAYGDWFSGYRDDPRAYMERTFEEVAGYDELIVLRDIEYESHCEHHMAPIIGRVHVGYLPAGKVVGISKLARVVEAYARRFQVQEKMTAQIAQCIQDVLQPIGVGVVVEGAHECMTTRGIHKRGVSMVTSKMLGSFREDARTRAEFLRFIEVGGKR

SEQ ID NO: 15122 - protein, 199 aa, Stenotrophomonas daejeonensis
  misc_feature (1)..(199): tr|A0A0R0E3Z1|A0A0R0E3Z1_9GAMM GTP cyclohydrolase 1 OS= Stenotrophomonas daejeonensis OX=659018 GN=folE PE=3 SV =1
MADPENPSVTQAQAEEAVRTLLRWAGEDPAREGLLDTPRRVAEAYGDWFKGYHDDPREYLERTFEEVAGYDEMIVLRDIEYESHCEHHMAPIIGRVHVGYVPDGRVVGISKLARVVEAYARRFQVQEKMTAQIADCIQDVLRPLGVGVVVEGAHECMTTRGIHKRGVSMVTSRMRGTFHDDARTRAEFLRFIEVGHARR

SEQ ID NO: 15123 - protein, 199 aa, Stenotrophomonas ginsengisoli
  misc_feature (1)..(199): tr|A0A0R0D6G3|A0A0R0D6G3_9GAMM GTP cyclohydrolase 1 OS= Stenotrophomonas ginsengisoli OX=336566 GN=folE PE=3 SV =1
MADSDKSTITQAQAEEAVRTLLLWAGEDPSREGLLDTPRRVAKAYGDWFSGYREDPREYMARTFEEVAGYDEMIVLRDIEYESHCEHHMAPIIGRVHVGYIPNGKVVGISKLARVVETYARRFQVQEKMTAQIASCIQDVLQPLGVAVVVEGSHECMTTRGVHKRGVSMVTSRMLGIFHDDARTRAEFLQFVQSGNGRR

SEQ ID NO: 15124 - protein, 199 aa, Stenotrophomonas humi
  misc_feature (1)..(199): tr|A0A0R0C821|A0A0R0C821_9GAMM GTP cyclohydrolase 1 OS= Stenotrophomonas humi OX=405444 GN=folE PE=3 SV=1
MADSKNPSVTQAQAEDAVRTLLRWAGEDPTREGLLDTPRRVAEAYGDWFKGYNDDPREYLARTFEEVAGYDEMIVLRDIEYESHCEHHMAPIIGRVHVGYIPNGRVVGISKLARVVEAYARRFQVQEKMTAQIADVIQDVLQPLGVGIVVEGAHECMTTRGIHKRGVSMVTSRMRGTFHDDARTRAEFLRFIEVGQARR

SEQ ID NO: 15125 - protein, 199 aa, Stenotrophomonas koreensis
  misc_feature (1)..(199): tr|A0A0R0BTJ6|A0A0R0BTJ6_9GAMM GTP cyclohydrolase 1 OS= Stenotrophomonas koreensis OX=266128 GN=folE PE=3 SV=1
MADSDKSPVTQAQAEEAVRTLLLWAGEDPTREGLLDTPRRVAKAYGDWFSGYDIDPREYLQRTFEEVAGYDEMIVLRDIEYESHCEHHMAPIIGKVHVGYIPNGKVVGISKLARVVEAYARRFQVQEKMTAQIATCIQDVLQPLGVAVVVEGAHECMTTRGVHKRGVSMVTSRMLGSFHDDARTRAEFLQFVQSGSGRR

SEQ ID NO: 15126 - protein, 203 aa, Stenotrophomonas lactitubi
  misc_feature (1)..(203): tr|A0A2M9QQK2|A0A2M9QQK2_9GAMM GTP cyclohydrolase 1 OS= Stenotrophomonas lactitubi OX=2045214 GN=folE PE=3 SV=1
MSKNNEKAAPQGDVTQVQAEDAVRTLLRWAGEDPTREGLLDTPRRVAEAYGDWFSGYRDDPRAYMERTFEEVAGYDELIVLRDIEYESHCEHHMAPIIGRVHVGYLPAGKVVGISKLARVVEAYARRFQVQEKMTAQIAQCIQDVLQPVGVGVVVEGAHECMTTRGIHKRGVSMVTSKMLGSFREDARTRAEFLRFIEVGGKR

SEQ ID NO: 15127 - protein, 203 aa, Stenotrophomonas maltophilia
  misc_feature (1)..(203): tr|A0A2J0V6V9|A0A2J0V6V9_STEMA GTP cyclohydrolase 1 OS= Stenotrophomonas maltophilia OX=40324 GN=folE PE=3 SV=1
MSKNNEKAAPQGDVTQDQAEDAVRILLRWAGEDPSREGLLDTPRRVAEAYGDWFSGYRDDPRAYMERTFEEVAGYDELIVLRDIEYESHCEHHMAPIIGRVHVGYLPAGKVVGISKLARVVEAYARRFQVQEKMTAQIAQCIQDVLQPIGVGVVVEGAHECMTTRGIHKRGVSMVTSKMLGSFRDDARTRAEFLRFIEVGGKR

SEQ ID NO: 15128 - protein, 203 aa, Stenotrophomonas maltophilia; identical to SEQ ID NO: 5274
  misc_feature (1)..(203): tr|A0A0F5ZPA8|A0A0F5ZPA8_STEMA GTP cyclohydrolase 1 OS= Stenotrophomonas maltophilia OX=40324 GN=folE PE=3 SV=1

SEQ ID NO: 15129 - protein, 201 aa, Stenotrophomonas panacihumi
  misc_feature (1)..(201): tr|A0A0R0A909|A0A0R0A909_9GAMM GTP cyclohydrolase 1 OS= Stenotrophomonas panacihumi OX=676599 GN=folE PE=3 SV=1
MSASKNTPDSDVTQAQAEEAVRTLLRWAGEDPAREGLLDTPRRVAEAYGDWFSGYRDDPREYLARTFEEVAGYDELIVLRDIEYESHCEHHMAPIIGKVHVGYLPDGKVVGISKLARVVETYARRFQVQEKMTAQIAQCIQDVLGPRGVGVVVEGAHECMTTRGIHKRGVSMVTSKMLGTFREDARTRAEFLRFIEVGGKR

SEQ ID NO: 15130 - protein, 203 aa, Stenotrophomonas pavanii; identical to SEQ ID NO: 5274
  misc_feature (1)..(203): tr|A0A246KZ33|A0A246KZ33_9GAMM GTP cyclohydrolase 1 OS= Stenotrophomonas pavanii OX=487698 GN=folE PE=3 SV=1

SEQ ID NO: 15131 - protein, 199 aa, Stenotrophomonas pictorum
  misc_feature (1)..(199): tr|A0A0R0AJQ6|A0A0R0AJQ6_9GAMM GTP cyclohydrolase 1 OS= Stenotrophomonas pictorum JCM 9942 OX=1236960 GN=folE P E=3 SV=1
MAESPKSPVTQAQAEAAVRTLLEWAGEDPTREGLLDTPRRVAEAYGDWFSGYREDPRAYMARTFEEVAGYDEMIVLRDIEYESHCEHHMAPIIGRVHVGYVPNGRVVGISKLARVVEAYARRFQVQEKMTAQIADCIQDVLQPLGVGVVVEGAHECMTTRGIHKRGVSMVTSRMRGSFHDDARTRAEFLRFIEVGQARR

SEQ ID NO: 15132 - protein, 210 aa, Stenotrophomonas rhizophila
  misc_feature (1)..(210): tr|A0A1B2MZ04|A0A1B2MZ04_9GAMM GTP cyclohydrolase 1 OS= Stenotrophomonas rhizophila OX=216778 GN=folE PE=3 SV=1
MLAPLRVLYVMSKQDNDVTPVTQDEAESAVRTLLRWAGEDPTREGLLDTPRRVAEAYGDWFSGYRDDPRAYMERTFEEVAGYDELIVLRDIEYESHCEHHMAPIIGRVHVGYLPAGKVVGISKLARVVEAYARRFQVQEKMTAQIAQCIQDVLQPIGVGVVVEGAHECMTTRGIHKRGVSMVTSKMLGSFREDARTRAEFLRFIEVGGKR

SEQ ID NO: 15133 - protein, 200 aa, Stenotrophomonas rhizophila
  misc_feature (1)..(200): tr|A0A023Y9H0|A0A023Y9H0_9GAMM GTP cyclohydrolase 1 OS= Stenotrophomonas rhizophila OX=216778 GN=folE PE=3 SV=1
MSKKDNDATPVTQADAESAVRTLLRWAGEDPTREGLLDTPRRVAEAYGDWFSGYRDDPRAYMERTFEEVAGYDELIVLRDIEYESHCEHHMAPIIGRVHVGYLPAGKVVGISKLARVVEAYARRFQVQEKMTAQIAQCIQDVLQPVGVGVVVEGAHECMTTRGIHKRGVSMVTSKMLGSFREDARTRAEFLRFIEVGGKR

SEQ ID NO: 15134 - protein, 199 aa, Stenotrophomonas sp.
  misc_feature (1)..(199): tr|A0A4R4IER3|A0A4R4IER3_9GAMM GTP cyclohydrolase 1 OS= Stenotrophomonas sp. ATCM1_4 OX=2259330 GN=folE PE=3 SV =1
MTDSKNPPVTQAQAEDAVRTLLRWAGEDPAREGLLDTPRRVAEAYGDWFKGYQDDPREYLARTFEEVAGYDEMIVLRDIEYESHCEHHMAPILGRVHVGYVPNGRVVGISKLARVVEAYARRFQVQEKMTAQIADVIQDVLQPLGVGVVVEGSHECMTTRGIHKRGVSMVTSRMRGTFHDDARTRAEFLRFIEVGHARR

SEQ ID NO: 15135 - protein, 203 aa, Stenotrophomonas sp.
  misc_feature (1)..(203): tr|A0A2T3WLS5|A0A2T3WLS5_9GAMM GTP cyclohydrolase 1 OS= Stenotrophomonas sp. Nf4 OX=2116542 GN=folE PE=3 SV=1
MSKNNEKAAPQGDVTQDQAEDAVRTLLRWAGEDPSREGLLDTPRRVAEAYGDWFSGYRDDPRAYMERTFEEVAGYDELIVLRDIEYESHCEHHMAPIIGRVHVGYLPAGKVVGISKLARVVEAYARRFQVQEKMTAQIAQCIQDVLQPIGVGVVVEGAHECMTTRGIHKRDVSMVTSKMLGSFRDDARTRAEFLRFIEVGGKR

SEQ ID NO: 15136 - protein, 199 aa, Stenotrophomonas terrae
  misc_feature (1)..(199): tr|A0A0R0C752|A0A0R0C752_9GAMM GTP cyclohydrolase 1 OS= Stenotrophomonas terrae OX=405446 GN=folE PE=3 SV=1
MADSKNPSVTQAQAEDAVRTLLRWAGEDPAREGLLDTPRRVAEAYGDWFKGYHEDPREYLARTFEEVAGYDEMIVLRDIEYESHCEHHMAPIIGRVHVGYVPNGRVVGISKLARVVEAYARRFQVQEKMTAQIADVIQDVLQPMGVGIVVEGAHECMTTRGIHKRGVSMVTSRMRGTFHDDARTRAEFLRFIEVGHARR

SEQ ID NO: 15137 - protein, 283 aa, Steroidobacter denitrificans
  misc_feature (1)..(283): tr|A0A127FAR2|A0A127FAR2_STEDE GTP cyclohydrolase FolE2 OS=Steroidobacter denitrificans OX=465721 GN=folE2 PE= 3 SV=1
MSTLPSNVQSATQPPTITSIEDVQGRADSRRIPINKVGIKEVYHPVRVKDRSRGEQHTVASFNMYVALPHHFKGTHMSRFVEILHGNEREISVESFREILIEMTRRLDAQSGHIEMEFPYFVMKKAPVSGVESLMNYKASLIGEFHGGEPELWLKVVVAVTSLCPCSKGISDYGAHNQRSHITIKARIDGHMWLEELIDIAEQEASCEVYGILKRPDEKFVTERAYDNPKFVEDIVRDVAVRMNDEARVLAYVVEAENFESIHNHSAYALIEHNKTAEPVQGD

SEQ ID NO: 15138 - protein, 202 aa, Steroidobacter denitrificans
  misc_feature (1)..(202): tr|A0A127FBT6|A0A127FBT6_STEDE GTP cyclohydrolase 1 OS= Steroidobacter denitrificans OX=465721 GN=folE PE=3 SV= 1
MIRVPRKKSPRPAVPGVTEEQAQEAIRVLLRWAGEDPRREGLLDTPARVVGAYRDWFAGYLSDPADYLRRTFEEVDGYDEMIVLRGIEFESHCEHHMAPIIGCAHVGYLPTNKVVGISKLARVVDGYARRFQVQEKLTAQIANCIESVLKPRGVAVVVNAVHQCMTTRGVHKRGVSMITSAMRGDFRDDARTRDEFLRFIKE

SEQ ID NO: 15139 - protein, 153 aa, Stigmatella aurantiaca
  misc_feature (1)..(153): tr|Q08SR8|Q08SR8_STIAD GTP cyclohydrolase I 2 OS=Stigma tella aurantiaca (strain DW4/3-1) OX=378806 GN=STIAU_72 11 PE=4 SV=1
MTEFLDGYALTPEEAIGTVYPAPPDSAGEMVVVTDLRFHSMCPHHLLPYEGRAHVAYVPGKHVVGFGRLSTLVDCFAHRLILQEDLARHVASALARVLGSPATACILEAKQACMRLRGEQQRDAITHVEAYEGRLRKEGPLRRELWARLGART

SEQ ID NO: 15140 - protein, 211 aa, Streptacidiphilus jiangxiensis
  misc_feature (1)..(211): tr|A0A1H7VNT8|A0A1H7VNT8_STRJI GTP cyclohydrolase 1 OS= Streptacidiphilus jiangxiensis OX=235985 GN=folE PE=3 S V=1
MSTLLDTTAEEPELTTVSRLRVSHQSEGIDLDEAERAAAAFLSALGVATDSASLKDTPKRMAHAYAEMFSPRPFDLTTFPNDEGYDELVLARRIPVRSVCEHHLLPFVGIAHVGYLPGKGILGLSKLARVVEHFSCRPQVQERLTKQIADWLDEHLEPKGVGVVIEAEHTCMSLRGVRAVGSNTVTSTLLGTLRKDARSRQEFFALTGMNP

SEQ ID NO: 15141 - protein, 202 aa, Streptacidiphilus jiangxiensis
  misc_feature (1)..(202): tr|A0A1H7PZS1|A0A1H7PZS1_STRJI GTP cyclohydrolase 1 OS= Streptacidiphilus jiangxiensis OX=235985 GN=folE PE=3 S V=1
MIDPVTVEGSTGAVREFDQKRAEDAVRELLIAVGENPDREGLRDTPARVARAYKEIFAGLYQEPEDVLTTVFDLGHDELVLVKDIELVSCCEHHLLPFHGVAHVGYIPAESGKITGLSKLARLVDVFARRPQVQERLTTQIADSLMRILEARGVIVVVEAEHMCMSVRGIRKPGAKTMTSAVRGQLRDGKTRAEAMSLIVSR

SEQ ID NO: 15142 - protein, 202 aa, Streptacidiphilus pinicola
  misc_feature (1)..(202): tr|A0A2X0ISR8|A0A2X0ISR8_9ACTN GTP cyclohydrolase 1 OS= Streptacidiphilus pinicola OX=2219663 GN=folE PE=3 SV=1
MIDPVTVEGSIGAVREFDQKRAEDAVRELLIAVGENPDREGLRDTPARVARAYKEIFAGLYQEPEDVLTTVFDLGHDELVLVKDIELVSCCEHHLLPFHGVAHVGYIPAENGKITGLSKLARLVDVFARRPQVQERLTTQIADSLMRILEARGVIVVVEAEHMCMSVRGIRKPGAKTMTSAVRGQLRDGKTRAEAMSLIIGR

SEQ ID NO: 15143 - protein, 201 aa, Streptacidiphilus sp.
  misc_feature (1)..(201): tr|A0A345SYT1|A0A345SYT1_9ACTN GTP cyclohydrolase 1 OS= Streptacidiphilus sp. DSM 106435 OX=2126346 GN=folE PE= 3 SV=1
MTDPVTLDGEATVGVFDQKRAEDAVRELLIAIGEDPDREGLRETPARVARAYQEIFSGLWQQPEDVLTTTFDLGHDEMVLVKDIEVYSTCEHHLVPFRGVAHVGYIPSTSGKITGLSKLARLVDVYARRPQVQERLTTQVADALMRILEPRGVIVVFECEHMCMSMRGIRKPGAKTLTSAVRGQLRDPATRAEAMSLIIGR

SEQ ID NO: 15144 - protein, 209 aa, Streptoalloteichus hindustanus
  misc_feature (1)..(209): tr|A0A1M4VZ37|A0A1M4VZ37_STRHI GTP cyclohydrolase 1 OS= Streptoalloteichus hindustanus OX=2017 GN=folE PE=3 SV= 1
MTSTVDDVTDAAGGVLPRRRAFDQARAEAAVRELLLACGEDPDREGLRDTPARVARAYRELFAGLHTDPDAVLNRTFDESHEELVLVTDIPMYSTCEHHLLPFHGVAHVGYIPNEHGRVTGLSKLARLVDLYAKRPQVQERLTSQVADALVRKLDPRGVIVVVEAEHLCMGMRGIRKAGSKTTTSAVRGLLRTSASSRAEALALINQRR

SEQ ID NO: 15145 - protein, 209 aa, Streptoalloteichus hindustanus
  misc_feature (1)..(209): tr|A0A1M5DBX5|A0A1M5DBX5_STRHI GTP cyclohydrolase 1 OS= Streptoalloteichus hindustanus OX=2017 GN=folE PE=3 SV= 1
MTNTLDRLAPPRGSQDLMSSGPVDIERVADLVGQLLAAIGEDPGREGLSETPVRVAAWWRSFFSPEPSATPTCFTEQHLSDQLVVIGGMSVWSLCEHHLLPMNLDVAVGYVPDDEVMGLSKFGRIAQRCAGRLQVQERFTQQVADEIAVVIGSTDLAVAVRGTHLCMSARGVRMEAARTTTLKAGGRFKSDPVLSQQFLTLATARWRAA

SEQ ID NO: 15146 - protein, 187 aa, Streptococcus acidominimus
  misc_feature (1)..(187): tr|A0A239X6P2|A0A239X6P2_STRAI GTP cyclohydrolase 1 OS= Streptococcus acidominimus OX=1326 GN=folE PE=3 SV=1
MINQKKAEEAIYSLLQAIGEDPEREGLLDTPKRVAKMYAEMFSELNSDPREQFTAVFSEGHEEMILVKDIPFYSMCEHHLIPFYGVAHAAYLPSDGRVTGLSKVARAVEVAARRPQLQERLTAQVANALQEAMQPKGVYVMLEAEHLCMTMRGIKKPGSKTVTTVSRGIYQTDVEARGQVIAMIRGK

SEQ ID NO: 15147 - protein, 187 aa, Streptococcus agalactiae
  misc_feature (1)..(187): sp|Q3K0Y1|GCH1_STRA1 GTP cyclohydrolase 1 OS=Streptococ cus agalactiae serotype Ia (strain ATCC 27591 / A909 / CDC SS700) OX=205921 GN=folE PE=3 SV=1
MPNQEKMEKAIYQFLEALGENPDREGLKDTPKRVAKMYIEMFSGLNQDPKEQFTAVFSENHEEVVIVKDIPFYSMCEHHLVPFYGKAHIAYLPNDGRVTGLSKLARAVEVASKRPQLQERLTAQVAQALEDALAPKGIFVMIEAEHMCMTMRGIKKPGSKTITTVARGLYKDDRYERQEILSLIQKG

SEQ ID NO: 15148 - protein, 187 aa, Streptococcus agalactiae
  misc_feature (1)..(187): tr|K0JNG7|K0JNG7_STRAG GTP cyclohydrolase 1 OS=Streptoc occus agalactiae OX=1311 GN=folE PE=3 SV=1
MPNQEKMEKAIYQFLEALGENPNREGLKDTPKRVAKMYIEMFSGLNQDPKEQFTAVFSENHEEVVIVKDIPFYSMCEHHLVPFYGKAHIAYLPNDGRVTGLSKLARAVEVASKRPQLQERLTAQVAQALEDALAPKGIFVMIEAEHMCMTMRGIKKPGSKTITTVARGLYKDDRYERQEILSLIQKG

SEQ ID NO: 15149 - protein, 184 aa, Streptococcus australis
  misc_feature (1)..(184): tr|A0A428HNG3|A0A428HNG3_9STRE GTP cyclohydrolase 1 OS= Streptococcus australis OX=113107 GN=folE PE=3 SV=1
MDTKKIQEAVKMIIDAVGEDGSREGLQETPERIAKMYQEIFAGLNQTAEVHLSKSFEIVDNNMVVEKDIFFHSMCEHHFLPFYGKVHIAYIPNGRVAGLSKLARTVEVYAKKPQIQERLTVEIADALMEYLGAQGALVWVEAEHMCMNMRGVRKPGTATVTTAARGLLETDKDLKNEAYKLMGH

SEQ ID NO: 15150 - protein, 265 aa, Streptococcus australis
  misc_feature (1)..(265): tr|A0A3R9KZT2|A0A3R9KZT2_9STRE Putative GTP cyclohydrol ase 1 type 2 OS=Streptococcus australis OX=113107 GN=D8 785_01035 PE=4 SV=1
MLASEVIKRYEAYCPQELSMEGDVRGLQVGTLQKVIKKVMVALDIREQTVAEAIAHGVDLIIVKHAPIFRPIKDLVADRAQNQIYIDLIKHDIAVYVSHTNIDIVPDGLNDWFCQLLEIENPEPLSLTGEGLGIGRIGQVRAQTFGQLAEKVKETFGLDALRLIGYDQADLDRVIERVAICGGSGQSFYKDALAKGAEVYITGDIYYHTAQDMLSDGLLGLDPGHHIEVLFVKKLVEKLNQWKSEEAWEIEVFGSQASTNPFYHI

SEQ ID NO: 15151 - protein, 187 aa, Streptococcus bovimastitidis
  misc_feature (1)..(187): tr|A0A1L8MP70|A0A1L8MP70_9STRE GTP cyclohydrolase 1 OS= Streptococcus bovimastitidis OX=1856638 GN=folE PE=3 SV =1
MNSQKAEEAIYQLLEALGEDPQREGLLDTPKRVAKMYAEMFAGLEQDPKEEFTAVFAEETYDDIVLVKDIPFYSMCEHHLVPFYGKAHVAYYPADGRVTGLSKLARAVEVASKRPQLQERLTSQIATALDEALHPHGVFVVVEAEHMCMTMRGIKKPGSKTITKMAKGSLVGDRDSQRYILELMKDK

SEQ ID NO: 15152 - protein, 188 aa, Streptococcus canis
  misc_feature (1)..(188): tr|A0A2D4DMW0|A0A2D4DMW0_STRCB GTP cyclohydrolase 1 OS= Streptococcus canis OX=1329 GN=folE PE=3 SV=1
MSINKEKAEAAIYQFLEAIGENPNREGLLDTPKRVTKMYAEMFVGLEKDPKEEFTAVFTEHHEDVVIVKDISFYSMCEHHLVPFYGKAHIAYLPSDGRVTGLSKLARAVEVASKRPQLQERLTSQIADALVEALRPKGVLVLVEAEHMCMTMRGIKKPGSKTITTTARGLYKENRAERQEIMALMTRD

SEQ ID NO: 15153 - protein, 188 aa, Streptococcus canis
  misc_feature (1)..(188): tr|A0A3P5XN55|A0A3P5XN55_STRCB GTP cyclohydrolase 1 OS= Streptococcus canis OX=1329 GN=folE PE=3 SV=1
MSINKEKAEAAIYQFLEAIGENPNREGLLDTPKRVAKMYAEMFVGLEKDPKEEFTAVFTEHHEDVVIVKDISFYSMCEHHLVPFYGKAHIAYLPSDGRVTGLSKLARAVEVASKRPQLQERLTSQIADALVEALRPKGVLVLVEAEHMCMTMRGIKKTGSKTITTTARGLYKENRAERQEIMALMTRD

SEQ ID NO: 15154 - protein, 265 aa, Streptococcus constellatus
  misc_feature (1)..(265): tr|A0A564TUV2|A0A564TUV2_STRCV GTP cyclohydrolase 1 typ e 2 OS=Streptococcus constellatus OX=76860 GN=SCSS39_01 978 PE=4 SV=1
MLASDVINRYEAYCPQDLSEEGDVRGLQIGTLNKEVKRILVALDIREQTVAEAIEKGVDLILVKHAPIFRPIKDLVAERSQNQIYINLIKHDIAVYVSHTNIDIVDDGLNDWFCDLLEITDTDYLSETAPGHGIGRVGKIAPQTFGEFSSKVKEIFDLDSLRLVSYSAVDLERMIEKVAICGGSGQSLYKEALAKGAQVYITGDIYYHTAQDMLSDGLLALDPGHHIEVLFVKKLVEKFQDWKVEEGWEVEFLASQVSTNPFKHI

SEQ ID NO: 15155 - protein, 187 aa, Streptococcus criceti
  misc_feature (1)..(187): tr|G5JNJ8|G5JNJ8_STRCG GTP cyclohydrolase 1 OS=Streptoc occus criceti HS-6 OX=873449 GN=folE PE=3 SV=1
MINQEKAEAAIYQLLEAVGEDPHREGLLDTPQRVARMYAEMFAGLDENPKDQFTAVFSENHEEVVLVKDIPFYSMCEHHLVPFYGVAHVAYLPDQGKVTGLSKLARAVEVASKRPQLQERLTEQVATALEEALAPKGVFVMVEAEHMCMTMRGIKKPGSKTVTTVARGIFQEDKGQRQELLHLIKEF

SEQ ID NO: 15156 - protein, 265 aa, Streptococcus cristatus
  misc_feature (1)..(265): tr|A0A3R9KW11|A0A3R9KW11_STRCR Putative GTP cyclohydrol ase 1 type 2 OS=Streptococcus cristatus OX=45634 GN=D87 90_04455 PE=4 SV=1
MLASEIIARYEAYCPQELSMEGDISGLQIGTLNKEVDKVLVALDIREQTVAEAIEAGAGLIIVKHAPIFRPLKNLVGDKAQNQMILDLIKHDIAVYVSHTNIDIVEDGLNDWFCQLLEIEETSFLSQTGPENGIGRVGNIAPQTFGDFAVKVKATFGLDSLRLVAYEETDLERVVERVAICGGSGQSFYPEAIAKGAQVYITGDIYYHTAQEMLTEGLLALDPGHHIEVLFTEKLKEKLDTWKAEEGWEIEILASQASTNPFRHI

SEQ ID NO: 15157 - protein, 184 aa, Streptococcus cristatus
  misc_feature (1)..(184): tr|A0A5B0DDY5|A0A5B0DDY5_STRCR GTP cyclohydrolase 1 OS= Streptococcus cristatus OX=45634 GN=folE PE=3 SV=1
MDTKKIEAAVAQIIEAVGEDGSREGLQETPQRIAKMYQEIFAGLGETAEEHLAKSFEIIDNNMVVEKDIFFHSMCEHHFLPFYGKVHIAYVPNGRVAGLSKLARTVEVYAKKPQIQERLTVEIAEALMDYLGAQGALVWVEAEHMCMNMRGVRKPGTATVTTAARGILATDKDLKNEAYKLMGH

SEQ ID NO: 15158 - protein, 187 aa, Streptococcus downei
  misc_feature (1)..(187): tr|A0A380JEA0|A0A380JEA0_STRDO GTP cyclohydrolase 1 OS= Streptococcus downei MFe28 OX=764290 GN=folE PE=3 SV=1
MVNQEKAEKAIYQLLEAIGEDPQREGLLETPKRVAKMYAEMFSGLEENPKDQFTAVFSENHEEVVLVKDIPFYSMCEHHLVPFYGVAHVAYLPSQSKVTGLSKLARAVEVASKRPQLQERLTEQVAKALEEALNPKGVFVMVEAEHMCMTMRGIKKPGSKTVTTVARGLFKEDRDQRQELLTLIKEH

SEQ ID NO: 15159 - protein, 188 aa, Streptococcus dysgalactiae
  misc_feature (1)..(188): tr|A0A380JT64|A0A380JT64_STRDY GTP cyclohydrolase 1 OS= Streptococcus dysgalactiae subsp. dysgalactiae OX=99822 GN=folE PE=3 SV=1
MSINKEKAEAAIYQFLEAIGENPNREGLLDTPKRVAKMYAEMFAGLNKDPKEEFTAVFTEHHEDVVIVKDISFYSMCEHHLVPFYGKAHIAYLPSDGCVTGLSKLARAVEVASKRPQLQERLTAQIADALVEALHPTGVLVLVEAEHMCMTMRGIKKPGSKTITTTARGLYKEDRSERQEVMALMTKA

SEQ ID NO: 15160 - protein, 188 aa, Streptococcus dysgalactiae
  misc_feature (1)..(188): tr|M4YXP8|M4YXP8_STREQ GTP cyclohydrolase 1 OS=Streptoc occus dysgalactiae subsp. equisimilis RE378 OX=617121 G N=folE PE=3 SV=1
MSINKEKAEAAIYQFLEAIGENPNREGLLDTPKRVAKMYAEMFAGLNKDPKEEFTAVFTEHHEDVVIVKDISFYSMCEHHLVPFYGKAHISYLPSDGRVTGLSKLARAVEVASKRPQLQERLTAQIADALVEALHPTGVLVLVEAEHMCMTMRGIKKPGSKTITTTARGLYKEDRSERQEVMALMTKV

SEQ ID NO: 15161 - protein, 207 aa, Streptococcus equi
  misc_feature (1)..(207): tr|C0MEX5|C0MEX5_STRS7 GTP cyclohydrolase 1 OS=Streptoc occus equi subsp. zooepidemicus (strain H70) OX=553483 GN=folE PE=3 SV=1
MLTHINSPNKINQLKRGKPLPINQKKAEAAIYQLLEAIGEDPNREGLRDTPKRVAKMYLEMLSGLEKDAKDEFTAVFTEHHDDLVIVKDISFYSMCEHHLVPFYGKAHIAYLPSDGRVTGLSKLARAVEVTSRRPQLQERLTAQIANALVDALQPKGVFVMVEAEHMCMTMRGVKKPGSKTITTTARGIYKDSRDDRREVMQLIMEG

SEQ ID NO: 15162 - protein, 188 aa, Streptococcus equi
  misc_feature (1)..(188): tr|B4U349|B4U349_STREM GTP cyclohydrolase 1 OS=Streptoc occus equi subsp. zooepidemicus (strain MGCS10565) OX=5 52526 GN=folE PE=3 SV=1
MPINQKKAEAAIYQLLEAIGEDPNREGLRDTPKRVAKMYLEMLSGLEKDAKDEFTAVFTEHHDDLVIVKDISFYSMCEHHLVPFYGKAHIAYLPSDGRVTGLSKLARAVEVASKRPQLQERLTAQIANALVDALQPKGVFVMVEAEHMCMTMRGVKKPGSKTITTTARGIYKDSRDDRREVMQLIMEG

SEQ ID NO: 15163 - protein, 187 aa, Streptococcus equinus
  misc_feature (1)..(187): tr|A0A1V0GH06|A0A1V0GH06_STREI GTP cyclohydrolase 1 OS= Streptococcus equinus OX=1335 GN=folE PE=3 SV=1
MANQEKVEQAVYQLLEALGENPEREGLLDTPKRVAKMYAEMFSGLNEDPKDQFTAVFSEVHDEVVLVKDIPFYSMCEHHLVPFYGKAHVAYLPSGDKVTGLSKLARAVEVAARRPQLQERLTDQVATALEEALNPRGVFVMVEAEHMCMTMRGIKKPGSKTITTVAKGLYKEDREERKEILSLMRDF

SEQ ID NO: 15164 - protein, 187 aa, Streptococcus equinus
  misc_feature (1)..(187): tr|A0A1H0YGI6|A0A1H0YGI6_STREI GTP cyclohydrolase 1 OS= Streptococcus equinus OX=1335 GN=folE PE=3 SV=1
MANQEKLEAAVYQLLEALGEDPKREGLLDTPKRVAKMYQEMFSGLNEDPKDQFTAVFTENHDEVVLVKDIPFYSMCEHHLVPFYGKAHVAYLPSDGRVTGLSKLARAVEVASKRPQLQERLTDQVATALEEALHPKGIFVMIEAEHMCMTMRGIKKPGSKTVTTVAKGIFKEDREERKEILSLILGK

SEQ ID NO: 15165 - protein, 186 aa, Streptococcus ferus
  misc_feature (1)..(186): tr|A0A2X3VG54|A0A2X3VG54_9STRE GTP cyclohydrolase 1 OS= Streptococcus ferus OX=1345 GN=folE PE=3 SV=1
MLKEEKIEQAVYQLLEAIGENPNREGLLDTPSRVAKMYQEVFSGLGENPKEEFTAVFSESYEEVVLVKDIPFYSMCEHHLVPFYGVAHIAYLPDGGRVTGLSKLARAVEVASKRPQLQERLTGQVAAALDEALSPKGVFVMVEAEHMCMTMRGIKKPGSKTVTSVAKGVYQTDTALRQEVLAMIQR

SEQ ID NO: 15166 - protein, 187 aa, Streptococcus gallolyticus
  misc_feature (1)..(187): tr|F5X1C7|F5X1C7_STRG1 GTP cyclohydrolase 1 OS=Streptoc occus gallolyticus (strain ATCC 43143 / F-1867) OX=9815 39 GN=folE PE=3 SV=1
MANQEKLEAAVYQLLEALGENPEREGLLDTPKRVAKMYQEMFSGLNEDPKDQFTAVFTENHDEVVLVKDIPFYSMCEHHLVPFYGKAHVAYLPSDGRVTGLSKLARAVEVASKRPQLQERLTDQVATALEEALHPKGVFVMLEAEHMCMTMRGIKKPGSKTITTVAKGIFKENREERNEILSLILGK

SEQ ID NO: 15167 - protein, 187 aa, Streptococcus gallolyticus; identical to SEQ ID NO: 15166
  misc_feature (1)..(187): tr|A0A0E1XGL6|A0A0E1XGL6_STRGY GTP cyclohydrolase 1 OS= Streptococcus gallolyticus subsp. gallolyticus TX20005 OX=545774 GN=folE PE=3 SV=1

SEQ ID NO: 15168 - protein, 187 aa, Streptococcus gordonii
  misc_feature (1)..(187): sp|A8AZD8|GCH1_STRGC GTP cyclohydrolase 1 OS=Streptococ cus gordonii (strain Challis / ATCC 35105 / BCRC 15272 / CH1 / DL1 / V288) OX=467705 GN=folE PE=3 SV=1
MSDFEKLQETVYQLLELVGENPDREGLLDTPKRVAKMYQEVFSGLGRDPKDEFTAVFSEGHEEVVLVKDIPFHSMCEHHLLPFYGVAHVAYLPSNGKVTGLSKLARAVEVASKRPQLQERLTAQIATALDEALSPEGVFVMVEAEHMCMTMRGIKKPGSKTITTVAKGIYKENVHQRQEILSMIHHD

SEQ ID NO: 15169 - protein, 265 aa, Streptococcus gordonii
  misc_feature (1)..(265): tr|A0A1V0H422|A0A1V0H422_STRGN Nif3-like dinuclear meta l center hexameric protein OS=Streptococcus gordonii OX =1302 GN=A6J85_09610 PE=4 SV=1
MLASEIIARYEAYCPQELSMEGDISGLQIGTLDKEVDKVLVALDIREQTVAEAIEASAGLIIVKHAPIFRPLKDLVADKAQNQMILDLIKHDIAVYVSHTNIDVVEDGLNDWFCQLLDIEETSYLSQTGPDYGIGRVGKIAPQTFGEFAAKVKATFGLDSLRLVTYDETDFERVIERVAICGGSGQSFYPEAIAKGAQVYITGDIYYHTAQEILTEGLLALDPGHHIEVLFTEKLKEKLDTWKVEEGWEIEILASQASTNPFRHI

SEQ ID NO: 15170 - protein, 184 aa, Streptococcus halitosis
  misc_feature (1)..(184): tr|A0A3R8MWH0|A0A3R8MWH0_9STRE GTP cyclohydrolase 1 OS= Streptococcus halitosis OX=2172545 GN=folE PE=3 SV=1
MDTQKIETAVKMIIEAVGEDANREGLQETPARVARMYQEIFSGLGQTAEEHLSKSFEIIDDNMVVEKDIFFHTMCEHHFLPFYGRAHIAYIPDGRVAGLSKLARTVEIYSKKPQIQERLNIEVADALMDYLGAKGAFVVIEAEHMCMSMRGVRKPGTATLTTVARGVFETDKDLRDQAYRLMGL

SEQ ID NO: 15171 - protein, 187 aa, Streptococcus henryi
  misc_feature (1)..(187): tr|A0A1G6BAG7|A0A1G6BAG7_9STRE GTP cyclohydrolase 1 OS= Streptococcus henryi OX=439219 GN=folE PE=3 SV=1
MANQEKLEQAVYQLLEALGENPQREGLLDTPKRVAKMYQEMFAGLNEDPKDQFTAVFTENHEEVVLVKDIPFYSMCEHHLVPFYGVAHVAYLPSDGRVTGLSKLARAVEVASKRPQLQERLTDQVATALEEALHPKGIFVMLEAEHMCMTMRGIKKPGSKTITTVAKGLYKEDREERKEILSLIREK

SEQ ID NO: 15172 - protein, 187 aa, Streptococcus hyointestinalis
  misc_feature (1)..(187): tr|A0A380K9U5|A0A380K9U5_9STRE GTP cyclohydrolase 1 OS= Streptococcus hyointestinalis OX=1337 GN=folE PE=3 SV=1
MDLEKAEQAVYQLLEALGENPEREGLKETPARVVRMYQEMWQGLHKDPKDEFTAVFNEGNGEAVIVRDIPFYSMCEHHLVPFYGKAHIAYLPNTDRQVTGLSKLARCVETASKRPQVQERLTAEIADGIEQALKPQGVYVFVEAEHMCMTMRGIKKPGSKTITTASRGCYQKDALLRQELLTLLKLG

SEQ ID NO: 15173 - protein, 188 aa, Streptococcus ictaluri
  misc_feature (1)..(188): tr|G5K3H8|G5K3H8_9STRE GTP cyclohydrolase 1 OS=Streptoc occus ictaluri 707-05 OX=764299 GN=folE PE=3 SV=1
MSINKEKAEAAIYQFLEAIGENPDREGLLDTPKRVAKMYAEMFSGLEKDPKEEFTAVFTEHHEDVVIVKDIPFYSMCEHHLVPFYGKAHIAYLPSDGRVTGLSKLARAVEVASKKPQLQERLTSQVADALVEALNPKGVFVMIEAEHMCMTMRGIKKPGSKTITTTARGLYKENREERRDIMDLILHR

SEQ ID NO: 15174 - protein, 187 aa, Streptococcus infantarius
  misc_feature (1)..(187): tr|A0A380KMZ9|A0A380KMZ9_9STRE GTP cyclohydrolase 1 OS= Streptococcus infantarius OX=102684 GN=folE PE=3 SV=1
MATQEKLEAAVYQLLEALGEDPKREGLLDTPKRVAKMYQEMFSGLNEDPKDQFTAVFTENHDEVVLVKDIPFYSICEHHLVPFYGKAHVAYLPSDGRVTGLSKLARAVEVASKRPQLQERLTDQVATALEEALHPKGIFVMIEAEHMCMTMRGIKKPGSKTVTTVAKGIFKEDREERKEILSLILGK

SEQ ID NO: 15175 - protein, 184 aa, Streptococcus infantis
  misc_feature (1)..(184): tr|F9PZC0|F9PZC0_9STRE GTP cyclohydrolase 1 OS=Streptoc occus infantis SK970 OX=1035189 GN=folE PE=3 SV=1
MDTQKIETAVKMIIEAVGEDVNREGLQETPARVARMYQEIFSGLGRTAEEHLSKSFEIIDDNMVVEKDIFFHTMCEHHFLPFYGKAHIAYVPDGRVAGLSKLARTVEVYAKKPQIQERLNIEVADALMEYLGAKGAFVVIEAEHMCMSMRGVRKPGTATLTTVARGVFETDKDLRDQAYRLMGL

SEQ ID NO: 15176 - protein, 184 aa, Streptococcus infantis
  misc_feature (1)..(184): tr|E8JZ01|E8JZ01_9STRE GTP cyclohydrolase 1 OS=Streptoc occus infantis ATCC 700779 OX=889204 GN=folE PE=3 SV=1
MDTQKIEEAVKMIIEAVGEDANREGLQETPARVARMYQEIFSGLGQTAEEHLSKSFEIIDDNMVVEKDIFFHTMCEHHFLPFYGKAHIAYIPDGRVAGLSKLARTVEVYAKKPQIQERLNIEVADALMDYLGAKGAFVVIEAEHMCMSMRGVRKPGTATLTTVARGVFETDKDLRDQAYRLMGL

SEQ ID NO: 15177 - protein, 187 aa, Streptococcus iniae
  misc_feature (1)..(187): tr|A0A1J0MZ39|A0A1J0MZ39_STRIN GTP cyclohydrolase 1 OS= Streptococcus iniae OX=1346 GN=folE PE=3 SV=1
MVNLEKAEAAIYDLLEALGENPQREGLLDTPKRVAKMYQEMFSGLEQDPKEQFTAVFTENHDDVVIVKDIPFYSMCEHHLVPFYGKAHIAYLPSDGRVTGLSKLARALEVASKRPQLQERLTAQVADSLVEALNPKGVFVMVEAQHMCMTMRGIKKPGSLTITTTARGIYKDNQAERKEVLALIKEH

SEQ ID NO: 15178 - protein, 187 aa, Streptococcus iniae
  misc_feature (1)..(187): tr|A0A3L8GHJ6|A0A3L8GHJ6_STRIN GTP cyclohydrolase 1 OS= Streptococcus iniae OX=1346 GN=folE PE=3 SV=1
MIDYEKAKKAIYDLLEAIGENPEREGLLDTPKRVAKMYAQVFSGMEEDPKDQFTAVFSEGYDDLIIVKDIPFHSMCEHHLLPFYGKAHLAYLPNDGKVTGLSKLARAVEVASQRPQLQERLTGQIADAMQEALQPKGILVMLEAEHMCMNMRGVKKSGSKTVTLMTRGIYQEDSQLRKEVLELIKER

SEQ ID NO: 15179 - protein, 265 aa, Streptococcus intermedius
  misc_feature (1)..(265): tr|A0A3R9LMQ9|A0A3R9LMQ9_STRIT Putative GTP cyclohydrol ase 1 type 2 OS=Streptococcus intermedius OX=1338 GN=D8 829_02305 PE=4 SV=1
MLASDFINRYEAYCPQDLSEEGDVRGLQIGTLNKEVKRVLVALDIREQTVAEAIEKRVDLILVKHAPIFRPIKDLVAERSQNQIYIDLIKHDIAVYVSHTNIDIVDDGLNDWFCDLLEITDTDYLSETAPGYGIGRIGKIVPQTFGEFAIKVKEKFGLDSLRLVSYMATDLERMVEKVAICGGSGQSLYKEALAKGAQVYITGDIYYHTAQDMLSEGLLALDPGHHIEVLFVEKLVEKFQDWKVEEGWEVKFLASQVSTNPFKYK

SEQ ID NO: 15180 - protein, 265 aa, Streptococcus intermedius
  misc_feature (1)..(265): tr|A0A428ESP6|A0A428ESP6_STRIT Putative GTP cyclohydrol ase 1 type 2 OS=Streptococcus intermedius OX=1338 GN=D8 831_01120 PE=4 SV=1
MLASDFINRYEAYCPQDLSEEGDVRGLQIGTLNKEVKRVLVALDIREQTVAEAIEKGVDLILVKHAPIFRPIKDLVAERSQNQIYIDLIKHDIAVYVSHTNIDIVDDGLNDWFCDLLEITDTDYLSETAPGYGIGRIGKIVPQTFGEFAIKVKEKFGLDSLRLVSYMATDLERMVEKVAICGGSGQSLYKEALAKGAQVYITGDIYYHTAQDMLSEGLLALDPGHHIEVLFVEKLVEKFQDWKVEEGWEVKFLASQVSTNPFKYK

SEQ ID NO: 15181 - protein, 187 aa, Streptococcus lutetiensis
  misc_feature (1)..(187): tr|S5R0F3|S5R0F3_9STRE GTP cyclohydrolase 1 OS=Streptoc occus lutetiensis 033 OX=1076934 GN=folE PE=3 SV=1
MANQEKLEAAVYQLLEALGEDPKREGLLDTPKRVAKMYQEMFSGLNEDPKDQFTAVFTENHDEAVLVKDISFYSMCEHHLVPFYGKAHVAYLPSAGRVTGLSKLARAVEVASKRPQLQERLTDQVATALEEALHPKGIFVMIEAEHMCMTMRGIKKPGSKTVTTVAKGIFKEDHEERKEILSLILGK

SEQ ID NO: 15182 - protein, 186 aa, Streptococcus lutetiensis
  misc_feature (1)..(186): tr|A0A4V0E542|A0A4V0E542_9STRE GTP cyclohydrolase 1 OS= Streptococcus lutetiensis OX=150055 GN=folE PE=3 SV=1
MAQEKLEAAVYQLLEALGEDPKREGLLDTPKRVAKMYQEMFSGLNEDPKDQFTAVFTENHDEAVLVKDISFYSMCEHHLVPFYGKAHVAYLPSAGRVTGLSKLARAVEVASKRPQLQERLTDQVATALEEALHPKGIFVMIEAEHMCMTMRGIKKPGSKTVTTVAKGIFKEDHEERKEILSLILGK

SEQ ID NO: 15183 - protein, 189 aa, Streptococcus macacae
  misc_feature (1)..(189): tr|G5JU64|G5JU64_9STRE GTP cyclohydrolase 1 OS=Streptoc occus macacae NCTC 11558 OX=764298 GN=folE PE=3 SV=1
MSNQKKIEQAVYQLLEALGENPKREGLLDTPKRVAKMYQEIFSGLQENPKDQFTAVFSEGYEEVVLVKDIPFASMCEHHLLPFYGTAHVAYIPSQGRVTGLSKLARAVEIASKRPQLQERLTAQIADALQEALQPQGIFVMLAAEHMCMTMRGIKKPGSKTVTSAARGIYKEDKEARKEIIAMIHNKEK

SEQ ID NO: 15184 - protein, 187 aa, Streptococcus macedonicus
  misc_feature (1)..(187): tr|H2A6Q4|H2A6Q4_STRMD GTP cyclohydrolase 1 OS=Streptoc occus macedonicus (strain ACA-DC 198) OX=1116231 GN=fol E PE=3 SV=1
MANQEKLETAVYQLLEALGENPKREGLLDTPKRVAKMYQEMFSGLNEDPKDQFTAVFTENHDEVVLVKDIPFYSMCEHHLVPFYGKAHVAYLPSDGRVTGLSKLARAVEVASKRPQLQERLTDQVATALEEALHPKGIFVMLEAEHMCMTMRGIKKPGSKTVTTVAKGIFKENREERNEILSLILGK

SEQ ID NO: 15185 - protein, 187 aa, Streptococcus macedonicus; identical to SEQ ID NO: 15184
  misc_feature (1)..(187): tr|A0A081JH02|A0A081JH02_STRMC GTP cyclohydrolase 1 OS= Streptococcus macedonicus OX=59310 GN=folE PE=3 SV=1

SEQ ID NO: 15186 - protein, 184 aa, Streptococcus massiliensis
  misc_feature (1)..(184): tr|A0A380KWU8|A0A380KWU8_9STRE GTP cyclohydrolase 1 OS= Streptococcus massiliensis OX=313439 GN=folE PE=3 SV=1
MDTKKIEAAVKMIIEAVGEDENREGLQETPERIAKMYEEIFSGLGQTAEEHLAKSFEIVDNNLVVEKDIFFHSMCEHHFLPFYGKVHIAYVPNGRVAGLSKLARTVEVYAKKPQIQERLTVEIADALMTYLGAQGALVWVEAEHMCMNMRGVRKPGTETVTTAARGILATDKDLKNEAYRMMNR

SEQ ID NO: 15187 - protein, 188 aa, Streptococcus merionis
  misc_feature (1)..(188): tr|A0A239SQ04|A0A239SQ04_9STRE GTP cyclohydrolase 1 OS= Streptococcus merionis OX=400065 GN=folE PE=3 SV=1
MTINQTQVEDAVRQLLVAMGENPDREGLLDTPKRVAKMYQEMWSGLGKDPKDEFTAVFSEGHEEVILVRDIPFYSMCEHHLVPFYGLAHVAYIPSRGHVTGLSKLARAVEVASKRPQLQERLTAQVATALDEALSPEGVFVMVEAEHLCMTMRGIKKPGAKTVTTVAKGVFKDNIDQRKEILAMIQNG

SEQ ID NO: 15188 - protein, 184 aa, Streptococcus mitis
  misc_feature (1)..(184): tr|D3H6R1|D3H6R1_STRM6 GTP cyclohydrolase 1 OS=Streptoc occus mitis (strain B6) OX=365659 GN=sulC PE=3 SV=1
MDTQKIEAAVKMIIEAVGEDVNREGLQGTPARVARMYQEIFSGLGQTAEEHLSKSFEIIDDNMVVEKDIFFHTMCEHHFLPFYGRAHIAYIPDGRVAGLSKLARTVEVYSKKPQIQERLNIEVADALMDYLGAKGAFVVIEAEHMCMSMRGVRKPGTATLTTVARGLFETDKDLRDQAYRLMGL

SEQ ID NO: 15189 - protein, 184 aa, Streptococcus mitis
  misc_feature (1)..(184): tr|A0A081QZU6|A0A081QZU6_STRMT GTP cyclohydrolase 1 OS= Streptococcus mitis OX=28037 GN=folE PE=3 SV=1
MDTQKIEAAVKMIIEAVGEDANREGLQETPARVARMYQEIFSGLGQTAEEHLSKSFEIIDDNMVVEKDIFFHTMCEHHFLPFYGRAHIAYIPDGRVAGLSKLARTVEVYSKKPQIQERLNIEVADALMEYLGAKGAFVVIEAEHMCMSMRGVRKPGTATLTTVARGLFETDKDLRDQAYRLMGL

SEQ ID NO: 15190 - protein, 192 aa, Streptococcus mutans
  misc_feature (1)..(192): sp|Q8DUG2|GCH1_STRMU GTP cyclohydrolase 1 OS=Streptococ cus mutans serotype c (strain ATCC 700610 / UA159) OX=2 10007 GN=folE PE=3 SV=1
MNEKIMSDQKKIEEAVYQLLEALGEDPNREGLLDTPKRVAKMYQEMFAGLNEDPKDQFTAVFSEEHEDVVLVKDIPFYSMCEHHLVPFHGLAHVAYIPSDGCVTGLSKLARAVEVVSKRPQLQERLTVQIANALEEALKPKGVLVMIEAEHMCMTMRGIKKPGSKTVTRVVRGICQSDKETRQEIIAMIHHN

SEQ ID NO: 15191 - protein, 186 aa, Streptococcus mutans
  misc_feature (1)..(186): tr|A0A448RXC5|A0A448RXC5_STRMG GTP cyclohydrolase 1 OS= Streptococcus mutans OX=1309 GN=folE PE=3 SV=1
MSDQKKIEEAVYQLLEALGENPEREGLLDTPKRVARMYQEMFSGLNEDPKDQFTAVFSEEHDEVVLVKDIPFYSMCEHHLVPFYGRAHVAYMPSGGRVTGLSKLARAVEVASRRPQLQERLTAQVADALEKALNPKGVFVMIEAEHMCMTMRGIKKPGSKTVTSAARGLYRSDKEVRQEIISMIHN

SEQ ID NO: 15192 - protein, 265 aa, Streptococcus oralis
  misc_feature (1)..(265): tr|A0A3R9I5Y7|A0A3R9I5Y7_STROR Putative GTP cyclohydrol ase 1 type 2 OS=Streptococcus oralis OX=1303 GN=D8860_0 1870 PE=4 SV=1
MLASEVIRAYEAFCPQEFSMEGDSRGLQIGTLDKDIQRVMVALDIREETVAEAIEKGVDLIIVKHAPIFRPIKDLVASRPQNQIYIDLIKHDIAVYVSHTNIDIVDNGLNDWFCQMLGIEETTYLQETGPERGIGRIGNIQPQPFGELAQHVKQVFGLDGLRLVHYHESDLQKPISRVAICGGSGQSFYKDALAKGADVYITGDIYYHTAQDMLSDGLLALDPGHYIEVLFVEKIAELLTQWKAEKGWGIDIVPSQASTNPFHLI

SEQ ID NO: 15193 - protein, 184 aa, Streptococcus oralis
  misc_feature (1)..(184): tr|D4FQX4|D4FQX4_STROR GTP cyclohydrolase 1 OS=Streptoc occus oralis ATCC 35037 OX=655813 GN=folE PE=3 SV=1
MDTQKIEAAVKMIIEAVGEDANREGLQETPARVARMYQEIFSGLGQTAEEHLSKSFEIIDDNMVVEKDIFFHTMCEHHFLPFYGKAHIAYIPDGRVAGLSKLARTVEVYSKKPQIQERLNIEVADALMNYLGAKGAFVVIEAEHMCMSMRGVRKPGTATLTTVARGLFETDKDLRDQAYRLMGL

SEQ ID NO: 15194 - protein, 186 aa, Streptococcus pantholopis
  misc_feature (1)..(186): tr|A0A172Q707|A0A172Q707_9STRE GTP cyclohydrolase 1 OS= Streptococcus pantholopis OX=1811193 GN=folE PE=3 SV=1
MINQEKVEEAIYQLLQALGENPEREGLSETPRRVAKMYQEVFAGINEDPKNQFTAVFAEDHEEIVMVKDIPFYSMCEHHLLPFYGTAHVAYLPEQGRITGLSKLARAVEMAGKRPQLQERMTEQIASALDDALQPRGVFVMVEAEHLCMSMRGIKKPGSKTVTLAARGLFQEDFQKRQELLSLMRQ

SEQ ID NO: 15195 - protein, 265 aa, Streptococcus parasanguinis
  misc_feature (1)..(265): tr|A0A3R9HNC8|A0A3R9HNC8_STRPA Putative GTP cyclohydrol ase 1 type 2 OS=Streptococcus parasanguinis OX=1318 GN= D8866_03045 PE=4 SV=1
MLASEVIKRYEAYCPLELSMEGDVRGLQVGTLQKDIHKVMVALDIREQTVAEAIAHGVDLIIVKHAPIFRPLKDLVADRAQNQIYIDLIKHDIAVYVSHTNIDIVPEGLNDWFCQLLDIENTEPLSMTGEGFGIGRIGRVATQTFGQLAEKVKETFGLDALRIVSYDQADLERVIEHVAICGGSGQSFYKDALAKGAEVYITGDIYYHTAQDMLSDGLLALDSGHHIEVLFVSKLVEKLNQWKAEEAWEIEVIGSQASTNPFYHI

SEQ ID NO: 15196 - protein, 184 aa, Streptococcus parasanguinis
  misc_feature (1)..(184): tr|F8DH02|F8DH02_STREP GTP cyclohydrolase 1 OS=Streptoc occus parasanguinis (strain ATCC 15912 / DSM 6778 / CIP 104372 / LMG 14537) OX=760570 GN=folE PE=3 SV=1
MDTKKIEEAVKMIIEAVGEDENREGLQETPTRIAKMYQEIFAGLGQTAEEHLSKSFEIIDNNMVVEKDIFFHSMCEHHFLPFYGKVHIAYIPNGRVAGLSKLARTVEVYAKKPQIQERLTVEIADALMEYLGAQGALVWVEAEHMCMNMRGVRKPGTATVTTAARGVLATNKDLKNEAYKLMGH

SEQ ID NO: 15197 - protein, 187 aa, Streptococcus parasuis
  misc_feature (1)..(187): tr|A0A4Q8L0P3|A0A4Q8L0P3_9STRE GTP cyclohydrolase 1 OS= Streptococcus parasuis OX=1501662 GN=folE PE=3 SV=1
MSKQEQIEQTIYQLLELLGEDPNREGLLDTPKRVAKMYLEMFNGLKEDPKDQFTAVFSEGHEEVVLVKDIPFHSMCEHHLVPFYGIAHVAYIPSKGRVTGLSKLARAVEVASRRPQLQERLTHQVAHALQDALEPEGVFVMVEAEHMCMSMRGIRKPGSKTVTTVALGKYKEDAVLRRELLSMIHKK

SEQ ID NO: 15198 - protein, 186 aa, Streptococcus parauberis
  misc_feature (1)..(186): tr|A0A0E2U9V9|A0A0E2U9V9_9STRE GTP cyclohydrolase 1 OS= Streptococcus parauberis OX=1348 GN=gch1 PE=3 SV=1
MNIEKAEQAIYDLLEAIGENPNREGLLDTPKRVAKMYQEMFSELQADPKDQFTAVFTENHEDAVIVKDIYFHSMCEHHLVPFYGKAHIAYLPSDGRVTGLSKLARAVEVASKRPQLQERLTAQVADALEEALHPKGVFVMLEAEHMCMTMRGIRKPGSKTITTTARGIYQTDREERKEILSLINEK

SEQ ID NO: 15199 - protein, 186 aa, Streptococcus parauberis
  misc_feature (1)..(186): tr|F1YZC7|F1YZC7_9STRE GTP cyclohydrolase 1 OS=Streptoc occus parauberis NCFD 2020 OX=873447 GN=folE PE=3 SV=1
MNIEKAEQAIYDLLEAIGENPNREGLLDTPKRVAKMYQEMFSELQADPKDQFTAVFTENHEDAVIVKDIYFHSMCEHHLVPFYGKAHIAYLPSDGRVTGLSKLARAVEVASKRPQLQERLTAQVANALEEALHPKGVFVMLEAEHMCMTMRGIRKPGSKTITTTARGIYQTDREERKEILSLINEK

SEQ ID NO: 15200 - protein, 187 aa, Streptococcus pasteurianus
  misc_feature (1)..(187): tr|F5X6W1|F5X6W1_STRPX GTP cyclohydrolase 1 OS=Streptoc occus pasteurianus (strain ATCC 43144 / JCM 5346 / CDC 1723-81) OX=981540 GN=folE PE=3 SV=1
MANQEKLELAVYQLLEALGENPEREGLLDTPKRVAKMYQEMFSGLNEDPKDQFTAVFTENHDEVVLVKDIPFYSMCEHHLVPFYGKAHVAYLPSDGRVTGLSKLARAVEVASKRPQLQERLTDQVATALEEALHPKGVFVMLEAEHMCMTMRGIKKPSSKTVTTVAKGIFKENREERNEILSLILGK

SEQ ID NO: 15201 - protein, 249 aa, Streptococcus pasteurianus
  misc_feature (1)..(249): tr|A0A564TL56|A0A564TL56_9STRE GTP cyclohydrolase 1 typ e 2 OS=Streptococcus pasteurianus OX=197614 GN=SPSS39_0 2262 PE=4 SV=1
MKASEIIARYEAYCPRELSMEGDISGLQIGTLDKDVKRVMIALDVRETTVAEVIEKGVDLIIVKHAPIFKPLKDLVATAQNQIYIDLVRHDIAVYVSHTNIDIVPDGLNDWFCELLEIKDTDILTPTADGYGIGRIGKIEEQTFSDFALKVKEKFHLDSVRLVAYGNQETLVNRVAICGGSGQGFYRDAMEKGAQVYITGDIYYHTAQEMITNGMLAIDPGHHIEVLFIDKLVANSMLGKPIINGMLIL

SEQ ID NO: 15202 - protein, 187 aa, Streptococcus penaeicida
  misc_feature (1)..(187): tr|A0A2N8LCH5|A0A2N8LCH5_9STRE GTP cyclohydrolase 1 OS= Streptococcus penaeicida OX=1765960 GN=folE PE=3 SV=1
MNSQKAEEAIYQLLEALGEDPQREGLLDTPKRVAKMYAEMFAGLEQDPKEEFTAVFAEETYDDIVLVKDIPFYSMCEHHLVPFYGKAHVAYYPADGRVTGLSKLARAVEVASKRPQLQERLTSQIATALDEALHPHGVFVVVEAEHMCMTMRGIKKPGSKTVTKMAKGSLVGDRDSQRYILELIKDK

SEQ ID NO: 15203 - protein, 184 aa, Streptococcus peroris
  misc_feature (1)..(184): tr|E8K9S5|E8K9S5_9STRE GTP cyclohydrolase 1 OS=Streptoc occus peroris ATCC 700780 OX=888746 GN=folE PE=3 SV=1
MDTQKIETAVKMIIEAVGEDVNREGLQETPARVARMYQEIFSGLGQTAEEHLSKSFEIIDDNMVVEKDIFFHTMCEHHFLPFYGKAHIAYIPDGRVAGLSKLARTVEVYSKKPQIQERLNIEVADALMDYLGAKGAFVVIEAEHMCMSMRGVRKPGTATLTTVARGVFETDKDLRDQAYRLMGL

SEQ ID NO: 15204 - protein, 188 aa, Streptococcus phocae
  misc_feature (1)..(188): tr|A0A0P6S6U4|A0A0P6S6U4_9STRE GTP cyclohydrolase 1 OS= Streptococcus phocae OX=119224 GN=folE PE=3 SV=1
MPINHKKAEAAIYQLLEALGENPEREGLLDTPKRVAKMYAEMFSGLAQNPKGEFTAVFSEEHDDMILVKDISFYSMCEHHLVPFYGKAHIAYLPRDGRVTGLSKLARAVEVASKKPQLQERLTSQIANALVDALNPKGVFVMVEAEHMCMTMRGIKKPGSKTITTTARGCYHDNREDRRDIMSLIEKH

SEQ ID NO: 15205 - protein, 186 aa, Streptococcus pluranimalium
  misc_feature (1)..(186): tr|A0A2L0D3H5|A0A2L0D3H5_9STRE GTP cyclohydrolase 1 OS= Streptococcus pluranimalium OX=82348 GN=folE PE=3 SV=1
MMNQEKVEAAIYQLLEAIGENPEREGLLDTPKRVAKMYAEMFSGLSEDPKDQFTAVFSEGHEEMILVKDIPFYSMCEHHLVPFYGVAHVAYLPSDGRVTGLSKLARAVEVASRRPQLQERLTAQVANALEEAMHPKGVFVMVEAEHLCMTMRGIKKPGSKTVTTVARGLYQEDGAARREVMAMIKE

SEQ ID NO: 15206 - protein, 185 aa, Streptococcus pluranimalium
  misc_feature (1)..(185): tr|A0A345VJQ1|A0A345VJQ1_9STRE GTP cyclohydrolase 1 OS= Streptococcus pluranimalium OX=82348 GN=folE PE=3 SV=1
MNQEKVEAAVYQLLEAIGENPEREGLLDTPKRVAKMYAEMFSGLSENPKDQFTAVFSEGHEEMILVKDIPFYSMCEHHLVPFYGVAHVAYLPSDGRVTGLSKLARAVEVAARRPQLQERLTAQVANALEEAMHPKGVFVMVEAEHMCMTMRGIKKPGSKTVTTVARGLYQEDGAARREVMAMIKE

SEQ ID NO: 15207 - protein, 184 aa, Streptococcus pneumoniae
  misc_feature (1)..(184): sp|C1CB65|GCH1_STRP7 GTP cyclohydrolase 1 OS=Streptococ cus pneumoniae (strain 70585) OX=488221 GN=folE PE=3 SV =1
MDTQKIEAAVKMIIEAVGEDANREGLQETPARVARMYQEIFSGLGQTAEEHLSKSFEIIDDNMVVEKDIFFHTMCEHHFLPFYGRAHIAYIPDGRVAGLSKLARTVEVYSKKPQIQERLNIEVADALMDYLGAKGAFVVIEAEHMCMSMRGVRKPGTATLTTVARGLFETDKDLRDQAYRLMGL

SEQ ID NO: 15208 - protein, 184 aa, Streptococcus pneumoniae; identical to SEQ ID NO: 15189
  misc_feature (1)..(184): tr|A0A0T7TRC9|A0A0T7TRC9_STREE GTP cyclohydrolase 1 OS= Streptococcus pneumoniae OX=1313 GN=folE PE=3 SV=1

SEQ ID NO: 15209 - protein, 187 aa, Streptococcus porcinus
  misc_feature (1)..(187): tr|A0A4U9YHB8|A0A4U9YHB8_STRPO GTP cyclohydrolase 1 OS= Streptococcus porcinus OX=1340 GN=folE PE=3 SV=1
MNSKKAEEAIYQLLEALGEDPKREGLRDTPKRVVKMYREMFAGLEMDPKNEFTTVFAEETYDDLVLVKDIPFYSMCEHHLVPFYGKAHVAYIPSGGRVTGLSKLARAVEVASKKPQLQERLTSQIAIALEEALQPKGVFVLVEAEHMCMTMRGIKKPGSKTVTKMARGSFIEDRESQRYILELIKDK

SEQ ID NO: 15210 - protein, 187 aa, Streptococcus porcinus
  misc_feature (1)..(187): tr|A0A4U9YQ80|A0A4U9YQ80_STRPO GTP cyclohydrolase 1 OS= Streptococcus porcinus OX=1340 GN=folE PE=3 SV=1
MNSKKAEEAIYQLLEALGEDPQREGLIDTPKRVVKMYQEMFAGLEMDPKNEFTTVFAEETYDDIVLVKDIPFYSMCEHHLVPFYGKAHVAYIPRGGRVTGLSKLARAVEVASKRPQLQERLTSQIAIALEEALHPEGVFVLVEAEHMCMTMRGIKKPGSKTVTKMARGSFIENRESQRYILELIRDK

SEQ ID NO: 15211 - protein, 184 aa, Streptococcus pseudopneumoniae
  misc_feature (1)..(184): tr|A0A3A4RZM1|A0A3A4RZM1_9STRE GTP cyclohydrolase 1 OS= Streptococcus pseudopneumoniae OX=257758 GN=folE PE=3 S V=1
MDTQKIEAAVKMIIEAVGEDVNREGLQETPARVARMYQEIFSGLGQTAEEHLSKSFEIIDDNMVVEKDIFFHTMCEHHFLPFYGRAHIAYIPDGRVAGLSKLARTVEVYSKKPQIQERLNIEVADALMEYLGAKGAFVVIEAEHMCMSMRGVRKPGTATLTTVARGLFETDKDLRDQAYRLMGL

SEQ ID NO: 15212 - protein, 184 aa, Streptococcus pseudopneumoniae
  misc_feature (1)..(184): tr|A0A3A4N0F7|A0A3A4N0F7_9STRE GTP cyclohydrolase 1 OS= Streptococcus pseudopneumoniae OX=257758 GN=folE PE=3 S V=1
MDTQKIETAVKMIIEAVGEDANREGLQETPARVARMYQEIFSGLGQTAEEHLSKSFEIIDDNMVVEKDIFFHTMCEHHFLPFYGRAHIAYIPDGRVAGLSKLARTVEVYSKKPQIQERLNIEVADALMDYLGAKGAFVVIEAEHMCMSMRGVRKPGTATLTTVARGLFETDKDLRDQAYRLMGL

SEQ ID NO: 15213 - protein, 187 aa, Streptococcus pseudoporcinus; identical to SEQ ID NO: 15209
  misc_feature (1)..(187): tr|G5KBM5|G5KBM5_9STRE GTP cyclohydrolase 1 OS=Streptoc occus pseudoporcinus LQ 940-04 OX=875093 GN=folE PE=3 S V=1

SEQ ID NO: 15214 - protein, 194 aa, Streptococcus pyogenes
  misc_feature (1)..(194): sp|P0C0C2|GCH1_STRP1 GTP cyclohydrolase 1 OS=Streptococ cus pyogenes serotype M1 OX=301447 GN=folE PE=3 SV=1
MKRERLMSINKEKAEAAIYQFLEAIGENPNREGLLDTPKRVAKMYAEMFLGLGKDPKEEFTAVFKEQHEDVVIVKDISFYSICEHHLVPFYGKAHIAYLPSDGRVTGLSKLARAVEVASKRPQLQERLTSQIADALVEALNPKGTLVMVEAEHMCMTMRGIKKPGSKTITTTARGLYKESRAERQEVISLMTKD

SEQ ID NO: 15215 - protein, 200 aa, Streptococcus pyogenes
  misc_feature (1)..(200): tr|A0A4U7G4L9|A0A4U7G4L9_STRPY GTP cyclohydrolase 1 OS= Streptococcus pyogenes OX=1314 GN=folE PE=3 SV=1
MKRKKLMKRERLMSINKEKAEAAIYQFLEAIGENPNREGLLDTPKRVAKMYAEMFLGLGKDPKEEFTAVFKEQHEDVVIVKDISFYSICEHHLVPFYGKAHIAYLPSDGRVTGLSKLARAVEVASKRPQLQERLTSQIADALVEALNPKGTLVMVEAEHMCMTMRGIKKPGSKTITTTARGLYKESRAERQEVISLMTKD

SEQ ID NO: 15216 - protein, 186 aa, Streptococcus ratti; identical to SEQ ID NO: 15191
  misc_feature (1)..(186): tr|J3F9L3|J3F9L3_STRRT GTP cyclohydrolase 1 OS=Streptoc occus ratti FA-1 = DSM 20564 OX=699248 GN=folE PE=3 SV= 1

SEQ ID NO: 15217 - protein, 186 aa, Streptococcus ratti; identical to SEQ ID NO: 15191
  misc_feature (1)..(186): tr|A0A5J6NQI3|A0A5J6NQI3_STRRT GTP cyclohydrolase I Fol E OS=Streptococcus ratti OX=1341 GN=folE PE=4 SV=1

SEQ ID NO: 15218 - protein, 184 aa, Streptococcus rubneri
  misc_feature (1)..(184): tr|A0A4Z1DSZ1|A0A4Z1DSZ1_9STRE GTP cyclohydrolase 1 OS= Streptococcus rubneri OX=1234680 GN=folE PE=3 SV=1
MDTKKIQEAVKMIIEAVGEDGNREGLQETPERIAKMYQEIFAGLNQTAEEHLSKSFEIIDNNMVVEKDIFFHSMCEHHFLPFYGKVHIAYIPNGRVAGLSKLARTVEVYAKKPQIQERLTVEIADALMEYLGAQGALVWVEAEHMCMNMRGVRKPGTATVTTAARGLLETDKDLKNEAYKLMGH

SEQ ID NO: 15219 - protein, 187 aa, Streptococcus ruminantium
  misc_feature (1)..(187): tr|A0A2Z5TLV9|A0A2Z5TLV9_9STRE GTP cyclohydrolase 1 OS= Streptococcus ruminantium OX=1917441 GN=folE PE=3 SV=1
MSKQEQIEQTIYQLLELLGEDPKREGLLDTPKRVAKMYLEMFSGLQEDPKDQFTAVFSEGHEEVVLVKDIPFHSMCEHHLVPFYGIAHVAYIPSKGRVTGLSKLARAVEVASRRPQLQERLTYQVAHALQDALNPEGVFVMVEAEHMCMSMRGIRKPGSKTVTTVALGKYKEDAILRRELLSMIHNK

SEQ ID NO: 15220 - protein, 187 aa, Streptococcus salivarius; identical to SEQ ID NO: 15163
  misc_feature (1)..(187): tr|I0QK73|I0QK73_STRSL GTP cyclohydrolase 1 OS=Streptoc occus salivarius PS4 OX=1157946 GN=folE PE=3 SV=1

SEQ ID NO: 15221 - protein, 262 aa, Streptococcus salivarius
  misc_feature (1)..(262): tr|A0A3R9ISE4|A0A3R9ISE4_STRSL Putative GTP cyclohydrol ase 1 type 2 OS=Streptococcus salivarius OX=1304 GN=D88 67_03785 PE=4 SV=1
MLASELIKTYEEFCPQELSMEGDVVGLQIGSLDKEIQKVMVTLDVRENTVAEAIEKGVDLIIAKHAPIFRPVKDLVSSPDRDILLDLVKHDIAVYVSHTNIDVVNDGLNDWFCDLLDIKDTTYLTQTSENHGIGRVGDIVPQTIEELALKVKSVFGLDSVRLVRYNHDNPLVNRVAICGGSGQGFYKDALKKGAQVFITGDVYYHTGQEMITNGLLAIDPGHHIEALFISKIAEKLEAWKREHDWNVTILESQSSTNPFDHL

SEQ ID NO: 15222 - protein, 184 aa, Streptococcus sanguinis
  misc_feature (1)..(184): sp|A3CKF4|GCH1_STRSV GTP cyclohydrolase 1 OS=Streptococ cus sanguinis (strain SK36) OX=388919 GN=folE PE=3 SV=1
MDTKKIEAAVAQIIEAVGEDGSREGLQETPQRIAKMYQEIFAGLGETAEEHLAKSFEIIDNNMVVEKDIFFHSMCEHHFLPFYGKVHIAYVPNGRVAGLSKLARTVEVYAKKPQIQERLTVEIAEALMDYLGAQGALVWVEAEHMCMNMRGVRKPGTATVTTAARGVLATDKDLKNEAYKLMGH

SEQ ID NO: 15223 - protein, 184 aa, Streptococcus sanguinis; identical to SEQ ID NO: 15222
  misc_feature (1)..(184): tr|F3UPJ8|F3UPJ8_STRSA GTP cyclohydrolase 1 OS=Streptoc occus sanguinis SK355 OX=888816 GN=folE PE=3 SV=1

SEQ ID NO: 15224 - protein, 184 aa, Streptococcus sinensis
  misc_feature (1)..(184): tr|A0A0A0DFD6|A0A0A0DFD6_9STRE GTP cyclohydrolase 1 OS= Streptococcus sinensis OX=176090 GN=folE PE=3 SV=1
MDTKKIEAAVAQIIEAIGEDGSREGLQETPQRIAKMYQEIFAGLGETAEEHLAKSFEIIDNNMVVEKDIFFHSMCEHHFLPFYGKVHIAYVPNGRVAGLSKLARTVEVYAKKPQIQERLTVEIAEALMDYLGAQGALVWVEAEHMCMNMRGVRKPGTATVTTAARGVLATDKDLKNEAYKLMGH

SEQ ID NO: 15225 - protein, 187 aa, Streptococcus sobrinus
  misc_feature (1)..(187): tr|U2J2S0|U2J2S0_9STRE GTP cyclohydrolase 1 OS=Streptoc occus sobrinus W1703 OX=1227275 GN=folE PE=3 SV=1
MFNQEKAQEAIYQLLEAIGENPQREGLLETPKRVAKMYAEMFAGLGENPKDQFTAVFSENHEEVVLVKDIPFYSMCEHHLVPFYGVAHVAYLPSQGKVTGLSKLARAVEVASKRPQLQERLTEQVATALEEALNPKGVFVMIEAEHMCMTMRGIKKPGSKTVTTVARGIFQEDRDQRQELLSLIREH

SEQ ID NO: 15226 - protein, 184 aa, Streptococcus sp.
  misc_feature (1)..(184): tr|A0A1E9GAD3|A0A1E9GAD3_9STRE GTP cyclohydrolase 1 OS= Streptococcus sp. HMSC076C08 OX=1739270 GN=folE PE=3 SV =1
MDTQKIETAVKMIIEAVGEDANREGLQETPARVARMYQEIFSGLGQTAEEHLSKSFEIIDDNMVVEKDIFFHTMCEHHFLPFYGRAHIAYIPDGRVAGLSKLARTVEVYSKKPQIQERLNIEVADALMDYLGAKGAFVVIEAEHMCMSMRGVRKPGTATLTTVARGVFETDKDLRDQAYRLMGL

SEQ ID NO: 15227 - protein, 187 aa, Streptococcus sp.
  misc_feature (1)..(187): tr|F9HJG3|F9HJG3_9STRE GTP cyclohydrolase 1 OS=Streptoc occus sp. oral taxon 056 str. F0418 OX=904294 GN=folE P E=3 SV=1
MADIEKVQETIYQLLQLLGENPDREGLLDTPKRVAKMYQEVFSGLNQDPKDEFTAVFSEGHEEVVLVKDIPFHSMCEHHLLPFYGVAHVAYLPSKGKVTGLSKLARAVEVASKRPQLQERLTAQIATALDEALAPKGVFVMVEAEHMCMTIRGIKKPGSKTVTTVAKGIYKEDVHQRQEILSMIHHH

SEQ ID NO: 15228 - protein, 187 aa, Streptococcus suis
  misc_feature (1)..(187): sp|A4W1S9|GCH1_STRS2 GTP cyclohydrolase 1 OS=Streptococ cus suis (strain 98HAH33) OX=391296 GN=folE PE=3 SV=1
MSKQEQIEQTIYQLLELLGEDPNREGLLDTPKRVAKMYLEMFNGLEEDPKDQFTAVFSEGHEEVVLVKDIPFHSMCEHHLVPFYGIAHVAYIPSKGRVTGLSKLARAVEVASRRPQLQERLTHQVAHALQDALEPEGVFVMVEAEHMCMSMRGIRKPGSKTVTTVALGKYKEDAILRRELLSMIHNK

SEQ ID NO: 15229 - protein, 187 aa, Streptococcus suis; identical to SEQ ID NO: 15228
  misc_feature (1)..(187): tr|A0A0M9FDZ4|A0A0M9FDZ4_STRSU GTP cyclohydrolase 1 OS= Streptococcus suis OX=1307 GN=folE PE=3 SV=1

SEQ ID NO: 15230 - protein, 187 aa, Streptococcus thermophilus
  misc_feature (1)..(187): sp|Q5M391|GCH1_STRT2 GTP cyclohydrolase 1 OS=Streptococ cus thermophilus (strain ATCC BAA-250 / LMG 18311) OX=2 64199 GN=folE PE=3 SV=1
MENQEKVEQAVYQLLEALGENPEREGLLDTPKRVAKMYAEMFSGLNEDPKDQFTAVFSEVHDEVVLVKDIPFYSMCEHHLVPFYGMAHVAYLPSGDKVTGLSKLARAVEVAARRPQLQERLTDQVATALEEALNPRGVFVMVEAEHMCMTMRGIKKPGSKTITTVAKGIYKEDREERKEILSLMRDF

SEQ ID NO: 15231 - protein, 187 aa, Streptococcus thermophilus; identical to SEQ ID NO: 15230
  misc_feature (1)..(187): tr|A0A0M4I0H6|A0A0M4I0H6_STRTR GTP cyclohydrolase 1 OS= Streptococcus thermophilus OX=1308 GN=folE PE=3 SV=1

SEQ ID NO: 15232 - protein, 187 aa, Streptococcus troglodytae
  misc_feature (1)..(187): tr|A0A1L7LJQ4|A0A1L7LJQ4_9STRE GTP cyclohydrolase 1 OS= Streptococcus troglodytae OX=1111760 GN=folE PE=3 SV=1
MSNQKKIEEAVYQLLEALGEDPNREGLLDTPKRVARMYQEMFAGLNEDPKDQFTAVFSEGHEEVVLVKDIPFYSMCEHHLVPFYGLAHVAYIPSDGRVTGLSKLARAVEVASKRPQLQERLTDQIANALEEALKPKGVLVMIEAEHMCMTMRGIKKPGSKTVTRVVRGVCQSDKETRQEIIAMIHHN

SEQ ID NO: 15233 - protein, 186 aa, Streptococcus uberis
  misc_feature (1)..(186): tr|A0A380MGV1|A0A380MGV1_STRUB GTP cyclohydrolase 1 OS= Streptococcus uberis OX=1349 GN=folE PE=3 SV=1
MMDIKKAEDAIYQLLEAIGEDPQREGLLETPKRVAKMYEEMFSSLKSDAKEAFTAVFTEAYDDLVLVKDIPFYSMCEHHLVPFYGVAHIAYYPQNGKVTGLSKLARAVEIASKKPQLQERLTSQIADALDQSLHPRGVFVMVEAEHMCMTMRGIKKPGSKTMTTTARGIFAEDKKEQAYVLSLIKD

SEQ ID NO: 15234 - protein, 186 aa, Streptococcus uberis
  misc_feature (1)..(186): tr|B9DRZ2|B9DRZ2_STRU0 GTP cyclohydrolase 1 OS=Streptoc occus uberis (strain ATCC BAA-854 / 0140J) OX=218495 GN =folE PE=3 SV=1
MMDIKKAEDAIYQLLEAIGEDPQREGLLETPKRVAKMYEEMFSSLKSDAKEAFTAVFTEAYDDLVLVKDIPFYSMCEHHLVPFYGVAHIAYYPQNGKVTGLSKLARAVEIASKKPQLQERLTSQIADALDQSLHPRGVFVMVEAEHMCMTMRGIKKPGSKTMTTTARGIFTEDKKEQAYVLSLIKD

SEQ ID NO: 15235 - protein, 185 aa, Streptococcus urinalis
  misc_feature (1)..(185): tr|G5KFP1|G5KFP1_9STRE GTP cyclohydrolase 1 OS=Streptoc occus urinalis 2285-97 OX=764291 GN=folE PE=3 SV=1
MADQKKMEAAIYQFLEALGEDPEREGLKDTPKRVSNMYLEMFSGLHQDPKNEFTALFQEDYENLVLVKDIPFYSMCEHHLVPFYGKVHIAYLPQDGKVTGLSKLARAVEVASKRPQLQERLTEQIADALDQALNPQGVYVMVEAEHMCMTMRGIKKPGSKTITTIAKGLYQSNDSLRQEVMSLIK

SEQ ID NO: 15236 - protein, 187 aa, Streptococcus vestibularis
  misc_feature (1)..(187): tr|A0A448ABP1|A0A448ABP1_STRVE GTP cyclohydrolase 1 OS= Streptococcus vestibularis OX=1343 GN=folE PE=3 SV=1
MANQEKVEQAVYQLLEALGENPEREGLLDTPKRVAKMYAEMFSGLNEDPKDQFTAVFSEVHDEVVLVKDIPFYSMCEHHLVPFYGKAHVAYLPSGDKVTGLSKLARAVEVAARRPQLQERLTDQVATALEEALNPRGVFVMVEAEHMCMTMRGIKKPGSKTITTVAKGLYKEDREERKEILSLIRDL

SEQ ID NO: 15237 - protein, 187 aa, Streptococcus vestibularis; identical to SEQ ID NO: 15163
  misc_feature (1)..(187): tr|A0A3E4XCZ0|A0A3E4XCZ0_STRVE GTP cyclohydrolase 1 OS= Streptococcus vestibularis OX=1343 GN=folE PE=3 SV=1

SEQ ID NO: 15238 - protein, 184 aa, Streptococcus viridans
  misc_feature (1)..(184): tr|A0A447Z2D7|A0A447Z2D7_9STRE GTP cyclohydrolase 1 OS= Streptococcus viridans OX=78535 GN=folE PE=3 SV=1
MDTKKIQEAVKMIIDAVGEDGSREGLQETPERIAKMYQEIFAGLNQTAEVHLSKSFEIVDNNMVVEKDIFFHSMCEHHFLPFYGKVHIAYIPNGRVAGLSKLARTVEVYAKKPQIQERLTVEIADALMEYLGAQGALVWVEAEHMCMNMRGVRKPGTATVTTAARGLFETDKDLKNEAYKLMGH

SEQ ID NO: 15239 - protein, 310 aa, Streptohalobacillus salinus
  misc_feature (1)..(310): tr|A0A2V3WT26|A0A2V3WT26_9BACI GTP cyclohydrolase FolE2 OS=Streptohalobacillus salinus OX=621096 GN=folE2 PE=3 SV=1
MNNKQKQIKRLPKKAERHRIFGSTSPGKRTKPTVKDAMVDLQNKQDDYFFKLDQVGISNVKHPVKIYGEKEPQLQTSIATFGFYSSIDKGSKGTNMSRFTEQLAEAYRHDQLDLKLKTLKAFTKALANRLKTEDATLEVTVPYFYQQPAPDSHLSGLNHVDLVTKVTYRAPDTYTVEVGLTATITTLCPCSKEISEYSAHNQRGIVQVEVELHSDFDESIEDWKHFILEAAESNASARIHPILKRPDEKVVTEHAYENPRFVEDMVRLVSADIYEWEAAAAFKVSCRNEESIHLHDAFASITFDKRVDER

SEQ ID NO: 15240 - protein, 198 aa, Streptomonospora alba
  misc_feature (1)..(198): tr|A0A0C2JF89|A0A0C2JF89_9ACTN GTP cyclohydrolase 1 OS= Streptomonospora alba OX=183763 GN=folE PE=3 SV=1
MPLVVPEHHEVDHARIEKAVREILLAIGEDPERDGLRDTPARVARAYEEQFAGLGQKPEDVLTTVFEAGHEEMVLIRDIELYSTCEHHLVPFYGSAHVGYIPNSKGQITGLSKIARLVDVYARRPQVQERLTTQVADGIMAHLDPRGVIVVIEAEHLCMTMRGVRKPGAKTVTSAVRGDFRNRDRTRSEAMSLILGRD

SEQ ID NO: 15241 - protein, 209 aa, Streptomonospora sp.
  misc_feature (1)..(209): tr|A0A4P6Q9U1|A0A4P6Q9U1_9ACTN GTP cyclohydrolase 1 OS= Streptomonospora sp. M2 OX=2498135 GN=folE PE=3 SV=1
MSAESPDADTDIPLVVPAHKSVDHGRIEKAVREILLAIGEDPDRDGLRETPARVARAYEEQFAGLSQRPEDVLTTVFEAGHEEMVLVRDIELYSTCEHHLVPFYGSAHVGYIPNSKGQITGLSKIARLVDVYARRPQVQERLTTQVADGIMANLEPRGVIVVIEAEHLCMTMRGVRKPGAKTVTSAVRGDFRNRDRTRAEAMSLILGQH

SEQ ID NO: 15242 - protein, 279 aa, Streptomonospora sp.
  misc_feature (1)..(279): tr|A0A4P6Q5W6|A0A4P6Q5W6_9ACTN GTP cyclohydrolase 1 typ e 2 OS=Streptomonospora sp. M2 OX=2498135 GN=EKD16_1491 5 PE=4 SV=1
MTESPADLSLHDVTRAFEGVYDPAWAASWDAVGLVCGEPAQPVRRVLFAVDPVAEVVEEAREWGADLVITHHPLLLRGVTGVAATTPKGRLVHRLISSGIALYTAHTNADTADPGVSDALAAAVGLPGPLRPLDPDPADPAGRRGIGRVGALPEPVPLRDFAARAAAGLPRTAGGIRVSGDPERPVQRVAVSGGAGDALLDRARAAGVDVYLTSDLRHHPASEFAEHGGTALVDTAHWASEWPWLAEGAARLVSALGGERANVETRVSTIVTDAWSLAL

SEQ ID NO: 15243 - protein, 202 aa, Streptomyces abyssalis
  misc_feature (1)..(202): tr|A0A1E7JQN3|A0A1E7JQN3_9ACTN GTP cyclohydrolase 1 OS= Streptomyces abyssalis OX=933944 GN=folE PE=3 SV=1
MTDPVTLGGEGDFKPSDFDEKRAENAVRELLIAVGEDPDREGLLETPARVTRAYKELFAGLHQRPEEVLTTTFDLGHDEMVLVKDIEVFSTCEHHLVPFHGVAHVGYIPSADGKITGLSKLARLVDVYARRPQVQERLTTQIAESLMRILEPRGVIVVVECEHMCMSMRGIRKPGAKTLTSAVRGQLRDAATRSEAMSLILR

SEQ ID NO: 15244 - protein, 196 aa, Streptomyces acidiscabies
  misc_feature (1)..(196): tr|A0A100JEB7|A0A100JEB7_9ACTN GTP cyclohydrolase 1 OS= Streptomyces acidiscabies OX=42234 GN=folE_2 PE=3 SV=1
MSDFDSPESVDTPLSVRDPLEDIARRLLTEIGEDPDRDGLKETPARFARWWREFSGYEAGKVDTRFPMFTQGQIVMVSDIDVWSLCEHHLLPFSCTLTIAYRPDGEVLGLSKFARIAHRHAHRLQVQERLVRDIAEEVVATTGSADVAVVGRGEHLCMSMRGVRASARMTSSVFTGVFEEYGPAREELIATISAAR

SEQ ID NO: 15245 - protein, 198 aa, Streptomyces acidiscabies
  misc_feature (1)..(198): tr|A0A0L0JHZ9|A0A0L0JHZ9_9ACTN GTP cyclohydrolase 1 OS= Streptomyces acidiscabies OX=42234 GN=IQ63_41120 PE=3 S V=1
MTVSDFDSPESVDTPLSVRDPLEDIARRLLTEIGEDPDRDGLKETPARFARWWREFSGYEAGKVDTRFPMFTQGQIVMVSDIDVWSLCEHHLLPFSCTLTIAYRPDGEVLGLSKFARIAHRHAHRLQVQERLVRDIAEEVVATTGSADVAVVGRGEHLCMSMRGVRASARMTSSVFTGVFEEYGPAREELIATISAAR

SEQ ID NO: 15246 - protein, 201 aa, Streptomyces actuosus
  misc_feature (1)..(201): tr|A0A2U9P6Q9|A0A2U9P6Q9_STRAS GTP cyclohydrolase 1 OS= Streptomyces actuosus OX=1885 GN=folE PE=3 SV=1
MTDPVTLDGEGPIGEFDEKRAENAVRELLIAVGEDPDREGLRETPARVARAYKELLAGLRQQPEEVLTTTFDLGHDEMVLVKDIEIVSLCEHHLLPFHGVAHVGYIPAETGKITGLSKLARLVEVFARRPQVQERLTTQVADSLMRILEARGAIVVIEAEHMCMSVRGIRKPGAKTTTSAVRGQLRDSTTRAEAMSLILAK

SEQ ID NO: 15247 - protein, 216 aa, Streptomyces actuosus
  misc_feature (1)..(216): tr|A0A2U9PAP2|A0A2U9PAP2_STRAS GTP cyclohydrolase 1 OS= Streptomyces actuosus OX=1885 GN=folE PE=3 SV=1
MTESSHRTAVRIRTADQAAPAVPALRVVHEPDGIDLAAAERAAGQFLNALGVSTASESLRGTPGRMARAYAELFSPRPFDLTTFPNDEGYDELVLARRIPVRSVCEHHLLPFVGTAHVGYLPGGRILGLSKLARVVEHFSCRPQVQERLTKQVADWLQTHLEPKGVGVVIEAEHSCMTLRGVQATGSSTMTSTLLGLLRTDARSRSEFLALTGTTS

SEQ ID NO: 15248 - protein, 228 aa, Streptomyces afghaniensis
  misc_feature (1)..(228): tr|S4MN14|S4MN14_9ACTN GTP cyclohydrolase 1 OS=Streptom yces afghaniensis 772 OX=1283301 GN=folE PE=3 SV=1
MDLAGSINAHPSRTADLPAPSASIPRPQTPPSTAGPLRVVHDTDGIDLAEAERAAADFLAALGIDTGTESLRGTPGRMARAYAELFSPRPFDLTTFPNDEGYDELVLARSIPVRSVCEHHLLPFTGTAHVGYLPGHRILGLSKLARVVEHFACRPQVQERLTKQVADWLQAHLEPKGVGVVIEAEHSCMTLRGVQATGSSTLTSTLLGTLRHDARSRAEFLSLTGLQS

SEQ ID NO: 15249 - protein, 201 aa, Streptomyces afghaniensis
  misc_feature (1)..(201): tr|S4NTG5|S4NTG5_9ACTN GTP cyclohydrolase 1 OS=Streptom yces afghaniensis 772 OX=1283301 GN=folE PE=3 SV=1
MTDPVMLDGEGQIGEFDEKRAENAVRELLIAVGEDPDREGLRETPARVARAYREIFAGLWQKPEDVLTTTFDIGHDEMVLVKDIEVYSTCEHHLVPFRGVAHVGYIPAHSGKITGLSKLARLVDVYARRPQVQERLTTQIADSLMEILEPRGVIVVVECEHMCMSMRGIRKPGAKTLTSAVRGQLRDAATRNEAMSLIMAR

SEQ ID NO: 15250 - protein, 197 aa, Streptomyces agglomeratus
  misc_feature (1)..(197): tr|A0A1E5PI11|A0A1E5PI11_9ACTN GTP cyclohydrolase 1 OS= Streptomyces agglomeratus OX=285458 GN=folE PE=3 SV=1
MSDEDLDTDLEFEEIDLAGAEKAANQFLTALGMRTDTEALSDTPGRMTRAYAELFSPRPFHLTTFPNDEGYDQLVLARSITLRSVCEHHVLPLVGYAHVGYLPGARILGISKLARVVEHFACRPQVQERLTMQIAQWLQEQLQPKGVGVVIEAEHTCMTLRGVQSAGSSTVTSALLGEIRDNGRTRSEFLSFASISR

SEQ ID NO: 15251 - protein, 201 aa, Streptomyces agglomeratus
  misc_feature (1)..(201): tr|A0A1E5P868|A0A1E5P868_9ACTN GTP cyclohydrolase 1 OS= Streptomyces agglomeratus OX=285458 GN=folE PE=3 SV=1
MTDPVTLDGEGTIGEFDEKRAENAVRELLISIGEDPDREGLRATPGRVARAYKEIFAGLWQQPEDVLTTTFDLGHDEMILVKDIEVFSTCEHHLVPFRGVAHVGYIPATSGKITGLSKLARLVDVFARRPQVQERLTTQVADSLMEILEPRGVIVVIECEHMCMSMRGIRKPGAKTITSAVRGQLRDSATRNEAMSLIMAR

SEQ ID NO: 15252 - protein, 201 aa, Streptomyces ahygroscopicus
  misc_feature (1)..(201): tr|K7STK8|K7STK8_9ACTN GTP cyclohydrolase 1 OS=Streptom yces ahygroscopicus subsp. wuzhouensis OX=387850 GN=tym D PE=3 SV=1
MSTVSGAPELDVLDDSGPQVPDPLEDVARKLLIEIGEDPERDGLKETPARFARWWREFSRYDAGAVDTLFPLQTEGQLVMVSDINVWSLCEHHLLPFSCSLTIAYRPKGDVLGLSKFARIAHRHAHRLQVQERLVRDIADEVTKVTGSVDVAVIATGEHLCMSMRGIRTPAVMTSTAYSGVFEEYGPARQELVATVFPLRK

SEQ ID NO: 15253 - protein, 201 aa, Streptomyces aidingensis
  misc_feature (1)..(201): tr|A0A1I1R9B0|A0A1I1R9B0_9ACTN GTP cyclohydrolase 1 OS= Streptomyces aidingensis OX=910347 GN=folE PE=3 SV=1
MTDPVTPDGESPLGEFDEKRAENAIRELLIAVGEDPDREGLRETPARVARAYKEIFAGLWQRPEDVLTTTFDLGHDEMVLVKDIEVFSSCEHHLVPFQGVAHVGYIPSTSGKITGLSKLARLVDVYARRPQVQERLTTQIADSLMRILEPRGVIVVLECEHMCMTMRGVRKPGAKTTTSAVRGQLRDAATRAEAMSLILAR

SEQ ID NO: 15254 - protein, 201 aa, Streptomyces albidoflavus
  misc_feature (1)..(201): tr|A0A2A2UQ51|A0A2A2UQ51_9ACTN GTP cyclohydrolase 1 OS= Streptomyces albidoflavus OX=1886 GN=folE PE=3 SV=1
MTDPVTLDGLGAIGEFDEKRAEHAVRELLLAVGEDPDREGLRETPARVARAYREIFAGLWQKPEDVLTTTFDLGHDEMVLVKDIEVQSSCEHHLVPFVGVAHVGYIPSADGKITGLSKLARLVDVYARRPQVQERLTTQIADSLMEILEPRGVIVVVECEHMCMTMRGVRKPGAKTITSAVRGQLRDAATRNEAMSLIMAR

SEQ ID NO: 15255 - protein, 201 aa, Streptomyces albireticuli
  misc_feature (1)..(201): tr|A0A2A2DG57|A0A2A2DG57_9ACTN GTP cyclohydrolase 1 OS= Streptomyces albireticuli OX=1940 GN=folE PE=3 SV=1
MTDPVTLDAENSIGEFDEKRAENAVRELLIAVGEDPDREGLRETPARVARAYKEIFAGLWQEPEDVLTTTFDLGHDEMVLVRDIEVYSTCEHHLVPFHGVAHVGYIPATSGKITGLSKLARLVDVFARRPQVQERLTTQIADSLMEILEPRGVVVVVECEHMCMSMRGIRKPGAKTLTSAVRGQLRDPATRAEAMSLIMAR

SEQ ID NO: 15256 - protein, 201 aa, Streptomyces albireticuli
  misc_feature (1)..(201): tr|A0A1Z2L307|A0A1Z2L307_9ACTN GTP cyclohydrolase 1 OS= Streptomyces albireticuli OX=1940 GN=folE PE=3 SV=1
MTDPVTLDAENSIGEFDEKRAENAVRELLIAVGEDPDREGLRETPARVARAYKEIFAGLWQEPEDVLTTTFDLGHDEMVLVRDIEVYSTCEHHLVPFHGVAHVGYIPSTSGKITGLSKLARLVDVYARRPQVQERLTTQIADSLMEILEPRGVVVVVECEHMCMSMRGIRKPGAKTLTSAVRGQLRDPATRAEAMSLIMAR

SEQ ID NO: 15257 - protein, 201 aa, Streptomyces alboflavus
  misc_feature (1)..(201): tr|A0A1Z1WG22|A0A1Z1WG22_9ACTN GTP cyclohydrolase 1 OS= Streptomyces alboflavus OX=67267 GN=folE PE=3 SV=1
MTDPVTLDGEGTIGEFDEKRAENAVRELLIAVGEDPDREGLRETPGRVARAYKEIFAGLWQEPEDVLTTTFDLGHDEMVLVKDIEVMSSCEHHLVPFVGVAHVGYIPSSDGKITGLSKLARLVDVYARRPQVQERLTTQIADSLMQILEPRGVIVVVECEHMCMTMRGVRKPGAKTITSAVRGQLRDPATRNEAMSLIMAR

SEQ ID NO: 15258 - protein, 201 aa, Streptomyces alboniger
  misc_feature (1)..(201): tr|A0A5J6HQQ9|A0A5J6HQQ9_STRAD GTP cyclohydrolase I Fol E OS=Streptomyces alboniger OX=132473 GN=folE PE=4 SV=1
MTDPVTLDGEHSIGEFDEKRAENAVRELLIAVGEDPDREGLLETPARVARAYREIFSGLRQKAEDVLTTTFDLGHDEMVLVKDIEVMSSCEHHLVPFVGVAHVGYIPSTDGKITGLSKLARLVDVYARRPQVQERLTTQIADSLMEILEPRGVIVVVECEHMCMTMRGVRKPGAKTITSAVRGQLRDPATRNEAMSLIMAR

SEQ ID NO: 15259 - protein, 202 aa, Streptomyces albulus
  misc_feature (1)..(202): tr|A0A059W5H3|A0A059W5H3_STRA9 GTP cyclohydrolase 1 OS= Streptomyces albulus OX=68570 GN=folE_1 PE=3 SV=1
MTDPVTLDVEGGAIGTFDEKRAADAVRELLIAVGEDPDREGLLETPARVARAYREIFAGLWQKPEDVLTTTFDLGHDEMVLVKDIEVVSNCEHHLVPFVGVAHVGYIPSTDGKITGLSKLARLVDVFARRPQVQERLTTQIADSLMKILEPRGVIVVIECEHMCMTMRGVRKPGAKTTTSAVRGQLRDPATRAEAMSLILAR

SEQ ID NO: 15260 - protein, 201 aa, Streptomyces albulus
  misc_feature (1)..(201): tr|A0A401RB46|A0A401RB46_STRA9 GTP cyclohydrolase 1 OS= Streptomyces albulus OX=68570 GN=folE_2 PE=3 SV=1
MSTVSGAPELDVLDDSGPQVPDPLEDVARKLLIEIGEDPERDGLKETPARFARWWREFSRYDAGAVDTLFPLQTEGQLVMVSDINVWSLCEHHLLPFSCSLTIAYRPKGDVLGLSKFARIAHRHAHRLQVQERLVRDIAEEVTKVTGSVDVAVIATGEHLCMSMRGIRTPAVMTSTAYSGVFEEYGPARQELVATVFPSRR

SEQ ID NO: 15261 - protein, 201 aa, Streptomyces albus
  misc_feature (1)..(201): tr|A0A0B5ENW5|A0A0B5ENW5_STRA4 GTP cyclohydrolase 1 OS= Streptomyces albus (strain ATCC 21838 / DSM 41398 / FER M P-419 / JCM 4703 / NBRC 107858) OX=1081613 GN=folE PE =3 SV=1
MTDPVTLDGEGNIGTFDEKRAQNAVRELLIAVGEDPDREGLRETPARVARAYREIFAGLWQEPEDVLTTTFDLGHDEMVLVKDIEVMSSCEHHLVPFVGVAHVGYIPSSDGKITGLSKLARLVDVYARRPQVQERLTTQIADSLMHILEPRGVIVVVECEHMCMTMRGVRKPGAKTLTSAVRGQLRHPATRAEAMSLIMAR

SEQ ID NO: 15262 - protein, 200 aa, Streptomyces albus
  misc_feature (1)..(200): tr|A0A4Z0VU83|A0A4Z0VU83_9ACTN GTP cyclohydrolase 1 OS= Streptomyces albus OX=1888 GN=folE PE=3 SV=1
MTDPVTLDGERPIGDFDEKRAENAVRELLIAVGEDPDREGLLETPARVARAYKEIFAGLRQKPEDVLTTTFDIGHDEMVLVKDIEVYSTCEHHLVPFQGVAHVGYIPAASGKITGLSKLARLVDVYARRPQVQERLTTQIADSLMRILEPRGVIVVVECEHMCMSMRGIRKPGAKTVTSAVRGQLRDAATRSEAMSLILR

SEQ ID NO: 15263 - protein, 201 aa, Streptomyces alfalfae
  misc_feature (1)..(201): tr|A0A1P8THH3|A0A1P8THH3_9ACTN GTP cyclohydrolase 1 OS= Streptomyces alfalfae OX=1642299 GN=folE PE=3 SV=1
MTDPVTLDSEGSIGEFDEKRAENAVRELLIAVGEDPDREGLLETPARVARAYREIFAGLWQQPEDVLTTTFDLGHDEMVLVKDIEVMSSCEHHLVPFVGVAHVGYIPSTDGKITGLSKLARLVDVYARRPQVQERLTTQIADSLMKILEPRGVIVVVECEHMCMTMRGVRKPGAKTITSAVRGQLRDPATRNEAMSLIMAR

SEQ ID NO: 15264 - protein, 202 aa, Streptomyces alni
  misc_feature (1)..(202): tr|A0A1I2INQ1|A0A1I2INQ1_9ACTN GTP cyclohydrolase 1 OS= Streptomyces alni OX=380248 GN=folE PE=3 SV=1
MTDPVTIDGDSPVGEFDEKRAEAAVRELLYAVGEDPDREGLRETPARVARAYKEIFAGLWQQPEDVLTTTFDLGHDEMVLVKDIEVMSSCEHHLVPFVGVAHVGYIPSTSGKITGLSKLARLVDVYARRPQVQERLTTQIADALMRILEPRGVIVVIECEHMCMTMRGVRKQGAKTITSAVRGQLRDSATRAEAMSLIIGRG

SEQ ID NO: 15265 - protein, 201 aa, Streptomyces ambofaciens
  misc_feature (1)..(201): tr|A0A0K2AVP2|A0A0K2AVP2_STRA7 GTP cyclohydrolase 1 OS= Streptomyces ambofaciens (strain ATCC 23877 / 3486 / DS M 40053 / JCM 4204 / NBRC 12836 / NRRL B-2516) OX=27899 2 GN=folE PE=3 SV=1
MTDPVTLDGDGQIGEFDEKRAENAVRELLIAVGEDPDREGLRETPARVARAYREIFAGLWQEPEDVLTTTFDLGHDEMVLVKDIEVFSTCEHHLVPFRGVAHVGYIPSPSGKITGLSKLARLVDVYARRPQVQERLTTQIADSLMEILEPRGVIVVVECEHMCMSMRGIRKPGAKTLTSAVRGQLRDLATRNEAMSLIMAR

SEQ ID NO: 15266 - protein, 288 aa, Streptomyces ambofaciens
  misc_feature (1)..(288): tr|A0A0K2AQN7|A0A0K2AQN7_STRA7 Putative GTP cyclohydrol ase 1 type 2 OS=Streptomyces ambofaciens (strain ATCC 2 3877 / 3486 / DSM 40053 / JCM 4204 / NBRC 12836 / NRRL B-2516) OX=278992 GN=SAM23877_2376 PE=4 SV=1
MPRLSEVIAALENLWPAERAESWDAVGTVVGDPDQEVSRVLFAVDPVQETVDEAVGLGADLLVTHHPLYLRGTTTVAASTFKGRVVHTLIKNDIALHVAHTNADTADPGVSDALAGALDLRVVRPLVPDAGDPEGRRGLGRVCELDHPLTVREFAARAAERLPATAQGIRVAGDPEATVRTVAVSGGSGDSLFAHVRAAGVDAFLTADLRHHPASEFLADRAHSPLALLDAAHWATEWPWCELGAAQLDEISDRNGWDLRVHVSKTVTDPWTAHAASTPTSDAMGAPN

SEQ ID NO: 15267 - protein, 198 aa, Streptomyces antibioticus
  misc_feature (1)..(198): tr|A0A0L8PFQ0|A0A0L8PFQ0_STRAT GTP cyclohydrolase 1 OS= Streptomyces antibioticus OX=1890 GN=folE PE=3 SV=1
MPGRPALRVVHERDGIDLAAAEAAAGQFLAALGVSTASESLRGTPGRMARAYAELFTPRPFDLTTFPNDEGYDELVLARRIPVRSVCEHHLLPFVGTAHVGYLPGARILGLSKLARVVEHFACRPQVQERLTKQVADWLQDHLEPKGVGVVIEAEHSCMTLRGVQATGSSTMTSTLLGLLRSDARSRSEFLGLTGAAS

SEQ ID NO: 15268 - protein, 201 aa, Streptomyces antibioticus
  misc_feature (1)..(201): tr|A0A0L8NMN0|A0A0L8NMN0_STRAT GTP cyclohydrolase 1 OS= Streptomyces antibioticus OX=1890 GN=folE PE=3 SV=1
MTDPVTLDGEGPIGEFDEKRAENAVRELLIAVGEDPDREGLRETPARVARAYKEIFAGLWQQPEDVLTTTFDLGHDEMVLVKDIEVYSTCEHHLVPFRGVAHVGYIPSETGKITGLSKLARLVDVYARRPQVQERLTTQIADSLMNILEPRGVIVVVECEHMCMSMRGIRKPGAKTITSAVRGQLRDAATRNEAMSLIMAR

SEQ ID NO: 15269 - protein, 201 aa, Streptomyces antimycoticus
  misc_feature (1)..(201): tr|A0A4D4K3S8|A0A4D4K3S8_9ACTN GTP cyclohydrolase 1 OS= Streptomyces antimycoticus OX=68175 GN=folE PE=3 SV=1
MTDPVMLDGESPIGVFDEKRAENAIRELLIAVGEDPDREGLRETPGRVARAYKEIFAGLRQEPEDVLTTTFDLGHDEMVLVKDIEVMSSCEHHLVPFVGVAHVGYIPSHDGKITGLSKLARLVDVFARRPQVQERLTTQIAESLMRILEPRGVIVVVECEHMCMTMRGVRKPGAKTLTSAVRGQLRDSATRAEAMSLIMAR

SEQ ID NO: 15270 - protein, 201 aa, Streptomyces antioxidans
  misc_feature (1)..(201): tr|A0A1V4DCR9|A0A1V4DCR9_9ACTN GTP cyclohydrolase 1 OS= Streptomyces antioxidans OX=1507734 GN=folE PE=3 SV=1
MTDPVTLDGESPIGVFDEKRAENAIRELLIAVGEDPDREGLRETPGRVARAYKEIFAGLRQEPEDVLTTTFDLGHDEMVLVKDIEVMSSCEHHLVPFVGVAHVGYIPSHDGKITGLSKLARLVDVFARRPQVQERLTTQIADSLMRILEPRGVIVVVECEHMCMTMRGVRKPGAKTLTSAVRGQLRAPATRAEAMSLIMAR

SEQ ID NO: 15271 - protein, 201 aa, Streptomyces argenteolus
  misc_feature (1)..(201): tr|A0A561R697|A0A561R697_9ACTN GTP cyclohydrolase 1 OS= Streptomyces argenteolus OX=67274 GN=folE PE=3 SV=1
MTDPVTLDGQGSIGVFDEKRAEAAVRELLIAVGEDPDREGLLETPGRVARAYKEIFAGLHQEPEDVLTTTFDLGHDEMVLVKDIEVFSTCEHHLVPFHGVAHVGYIPATSGKITGLSKLARLVDVYARRPQVQERLTTQIAESLMAILEPRGVIVVVECEHMCMSMRGIRKPGAKTLTSAVRGQLRDPATRAEAMSLIMAR

SEQ ID NO: 15272 - protein, 201 aa, Streptomyces armeniacus
  misc_feature (1)..(201): tr|A0A345XVN7|A0A345XVN7_9ACTN GTP cyclohydrolase 1 OS= Streptomyces armeniacus OX=83291 GN=folE PE=3 SV=1
MTDPVTVDVEGSIAEFDEKRAENAVRELLLAVGEDPDREGLRETPARVARAYRELFAGLRQRPEDVLTTTFDLGHDEMVLVKDIEVVSQCEHHLLPFHGVAHVGYIPAATGKITGLSKLARLVEVFARRPQVQERLTTQVADSLLKILEPRGVIVVIECEHMCMSLRGVRKPGAKTLTSAVRGQLRDATTRAEAMSLIMAR

SEQ ID NO: 15273 - protein, 201 aa, Streptomyces asterosporus
  misc_feature (1)..(201): tr|A0A514JS55|A0A514JS55_9ACTN GTP cyclohydrolase 1 OS= Streptomyces asterosporus OX=285570 GN=folE PE=3 SV=1
MTDPVTLDGIATVGEFDEKRAENAVRELLIAVGEDPDREGLQETPARVARAYREIFAGLWQKPEDVLTTTFDIGHDEMVLVKDIEVYSTCEHHLVPFRGVAHVGYIPATSGKITGLSKLARLVDVYARRPQVQERLTTQIADSLMEILEPRGVIVVVECEHMCMSMRGIRKPGAKTLTSAVRGQLRDAATRNEAMSLIMAR

SEQ ID NO: 15274 - protein, 203 aa, Streptomyces atratus
  misc_feature (1)..(203): tr|A0A2Z5J766|A0A2Z5J766_STRAR GTP cyclohydrolase 1 OS= Streptomyces atratus OX=1893 GN=folE PE=3 SV=1
MATTITPVSDAPAARRKTVQAYRQGLRSWLAGRGLDPDSPALTDTPDRVLRALEEMTAGYDEDPAEHLARVFPVDHDGGPIMVTGVPFTSLCEHNMLPFTGHADIAYQPRPGQPVAGLSKLPRVLDVYARRLQTQEQLTRQVTATLDTHLQPVGSACVIRSEHGCLAHRGARKPGSVMVTASYTGTFRDDPEARAELHRLMTG

SEQ ID NO: 15275 - protein, 201 aa, Streptomyces atratus
  misc_feature (1)..(201): tr|A0A1K2DHF0|A0A1K2DHF0_STRAR GTP cyclohydrolase 1 OS= Streptomyces atratus OX=1893 GN=folE PE=3 SV=1
MTDPVTLDGQGSIGEFDEKRAEAAVRELLIAVGEDPDREGLRETPGRVARAYKEIFAGLYQEPEDVLTTTFDLGHDEMVLVKDIEVFSTCEHHLVPFRGVAHVGYIPATSGKITGLSKLARLVDVFARRPQVQERLTTQIADSLMEILEPRGVVVVVECEHMCMSMRGIRKPGAKTLTSAVRGQLRDPATRAEAMSLIMAR

SEQ ID NO: 15276 - protein, 201 aa, Streptomyces aurantiacus
  misc_feature (1)..(201): tr|S3ZEL5|S3ZEL5_9ACTN GTP cyclohydrolase 1 OS=Streptom yces aurantiacus JA 4570 OX=1286094 GN=folE PE=3 SV=1
MTDPVTLDGEGSIGEFDEKRAEHAVRELLIAVGEDPDREGLKETPGRVARAYREIFAGLWQKPEDVLTTTFDLGHDEMVLVKDIEVMSSCEHHLVPFVGVAHVGYIPSHDGKITGLSKLARLVDVYARRPQVQERLTTQIADSLMQILEPRGVIVVVECEHMCMTMRGVRKPGAKTITSAVRGQLRDPATRNEAMSLIMAR

SEQ ID NO: 15277 - protein, 201 aa, Streptomyces auratus
  misc_feature (1)..(201): tr|J1RQD5|J1RQD5_9ACTN GTP cyclohydrolase 1 OS=Streptom yces auratus AGR0001 OX=1160718 GN=folE PE=3 SV=1
MTDPVTLDIAGKLGVFDEKRAENAVRELLIAVGEDPDREGLLETPARVARAYKEIFAGLWQKPEDVLTTTFDLGHDEMVLVKDIELVSSCEHHLVPFVGVAHVGYIPSADGKITGLSKLARLVDVFARRPQVQERLTTQIADSLMEILEPRGVIVVIECEHMCMTMRGVRKPGAKTTTSAVRGQLRDAATRAEAMSLILAR

SEQ ID NO: 15278 - protein, 201 aa, Streptomyces autolyticus
  misc_feature (1)..(201): tr|A0A1P8XWX7|A0A1P8XWX7_9ACTN GTP cyclohydrolase 1 OS= Streptomyces autolyticus OX=75293 GN=folE PE=3 SV=1
MTDPVTLDGESPIGVFDEKRAENAVRELLIAVGEDPDREGLRDTPGRVARAYKEIFAGLHQEPEDVLTTTFDLGHDEMVLVKDIEVMSSCEHHLVPFVGVAHVGYIPSHDGKITGLSKLARLVDVFARRPQVQERLTTQIAESLMRILEPRGVIVVVECEHMCMTMRGVRKPGAKTLTSAVRGQLRDPATRAEAMSLIMAR

SEQ ID NO: 15279 - protein, 201 aa, Streptomyces avermitilis
  misc_feature (1)..(201): sp|Q82EE8|GCH1_STRAW GTP cyclohydrolase 1 OS=Streptomyc es avermitilis (strain ATCC 31267 / DSM 46492 / JCM 507 0 / NBRC 14893 / NCIMB 12804 / NRRL 8165 / MA-4680) OX= 227882 GN=folE PE=3 SV=1
MTDPVTLDGEGTIGEFDEKRAENAVRELLIAVGEDPDREGLRETPGRVARAYREIFAGLWQKPEDVLTTTFDIGHDEMVLVKDIEVLSSCEHHLVPFVGVAHVGYIPSTDGKITGLSKLARLVDVYARRPQVQERLTTQVADSLMEILEPRGVIVVVECEHMCMSMRGVRKPGAKTITSAVRGQLRDPATRNEAMSLIMAR

SEQ ID NO: 15280 - protein, 201 aa, Streptomyces avermitilis; identical to SEQ ID NO: 15279
  misc_feature (1)..(201): tr|A0A4D4LY59|A0A4D4LY59_STRAX GTP cyclohydrolase 1 OS= Streptomyces avermitilis OX=33903 GN=folE PE=3 SV=1

SEQ ID NO: 15281 - protein, 201 aa, Streptomyces avidinii
  misc_feature (1)..(201): tr|A0A329CHQ2|A0A329CHQ2_STRAV GTP cyclohydrolase 1 OS= Streptomyces avidinii OX=1895 GN=folE PE=3 SV=1
MTDPVTLDGQGSIGVFDEKRAEAAVRELLIAVGEDPDREGLRETPGRVARAYKEIFAGLHQEPEDVLTTTFDLGHDEMVLVKDIEVFSTCEHHLVPFRGVAHVGYIPATTGKITGLSKLARLVDVYARRPQVQERLTTQIAESLMAILEPRGVIVVVECEHMCMSMRGIRKPGAKTLTSAVRGQLRDPATRAEAMSLIMAR

SEQ ID NO: 15282 - protein, 201 aa, Streptomyces azureus
  misc_feature (1)..(201): tr|A0A0K8PD70|A0A0K8PD70_STRAJ GTP cyclohydrolase 1 OS= Streptomyces azureus OX=146537 GN=folE PE=3 SV=1
MTDPVTLDGEGQIGEFDEKRAENAVRELLIAVGEDPDREGLRETPARVARAYREIFAGLWQKPEDVLTTTFDLGHDEMVLVKDIEVLSSCEHHLVPFVGVAHVGYIPSIEGKITGLSKLARLVDVYARRPQVQERLTTQIADSLMQILEPRGVIVVVECEHMCMSMRGVRKPGAKTITSAVRGQLRDPATRNEAMSLIMAR

SEQ ID NO: 15283 - protein, 201 aa, Streptomyces badius
  misc_feature (1)..(201): tr|A0A328JG50|A0A328JG50_STRBA GTP cyclohydrolase 1 OS= Streptomyces badius OX=1941 GN=folE PE=3 SV=1
MTDPVTLDGQGSIGEFDEKRAEAAVRELLLAVGEDPDREGLRETPGRVARAYKEIFAGLYQQPEDVLTTTFDLGHDEMVLVKDIEVFSTCEHHLVPFRGVAHVGYIPASSGKITGLSKLARLVDVYARRPQVQERLTTQIAESLMSILEPRGVIVVVECEHMCMSMRGIRKPGAKTLTSAVRGQLRDPATRAEAMSLIMAN

SEQ ID NO: 15284 - protein, 201 aa, Streptomyces bingchenggensis
  misc_feature (1)..(201): tr|D7CGD8|D7CGD8_STRBB GTP cyclohydrolase 1 OS=Streptom yces bingchenggensis (strain BCW-1) OX=749414 GN=folE P E=3 SV=1
MTDSISLDGQGPVGVFDEKRAEQAIRELLIAVGEDPDREGLRETPGRVARAYREIFAGLRQKPEEVLTTTFDLGHDEMVLVKDIEVMSSCEHHLVPFVGVAHVGYIPSNDGKITGLSKLARLVDVFARRPQVQERLTTQIADSLMRILEPRGVIVVVECEHMCMTMRGVRKPGAKTLTSAVRGQLRDPATRAEAMSLIMAR

SEQ ID NO: 15285 - protein, 201 aa, Streptomyces bottropensis
  misc_feature (1)..(201): tr|M3FW15|M3FW15_9ACTN GTP cyclohydrolase 1 OS=Streptom yces bottropensis ATCC 25435 OX=1054862 GN=folE PE=3 SV =1
MTDPVTLDGGGAIGEFDEKRAENAVRELLIAVGEDPDREGLRETPARVARAYREIFAGLWQQPEGVLTTTFDLGHDEMVLVKDIEVYSTCEHHLVPFRGVAHVGYIPSTSGKITGLSKLARLVDVYARRPQVQERMTTQIADSLMEILEPRGVIVVVECEHMCMSMRGIRKPGAKTITSAVRGQLRDAATRNEAMSLIMAR

SEQ ID NO: 15286 - protein, 201 aa, Streptomyces brevispora
  misc_feature (1)..(201): tr|A0A561UX92|A0A561UX92_9ACTN GTP cyclohydrolase 1 OS= Streptomyces brevispora OX=887462 GN=folE PE=3 SV=1
MTDPVTLDGQGSIGEFDEKRAAAAVRELLFAVGEDPDREGLRETPGRVARAYKEVFAGLYQAPEDVLTTTFDLGHDEMVLVKDIEVFSTCEHHLVPFHGVAHVGYIPAVSGKITGLSKLARLVDVFARRPQVQERLTTQIADSLMTILEPRGVVVVVECEHMCMSMRGIRKPGAKTLTSAVRGQLRDPATRAEAMSLIMAR

SEQ ID NO: 15287 - protein, 201 aa, Streptomyces bungoensis
  misc_feature (1)..(201): tr|A0A117R8T0|A0A117R8T0_9ACTN GTP cyclohydrolase 1 OS= Streptomyces bungoensis OX=285568 GN=folE PE=3 SV=1
MTDPVTLDGEGTIGEFDEKRAENAVRELLIAVGEDPDREGLRETPARVARAYREIFAGLWQKPEDVLTTTFDLGHDEMVLVKDIEVYSTCEHHLVPFRGVAHVGYIPSVSGKITGLSKLARLVDVYARRPQVQERMTTQIADSLMKILEPRGVIVVVECEHMCMSMRGIRKPGAKTITSAVRGQLRDAATRNEAMSLIMAG

SEQ ID NO: 15288 - protein, 202 aa, Streptomyces caatingaensis
  misc_feature (1)..(202): tr|A0A0K9XHC6|A0A0K9XHC6_9ACTN GTP cyclohydrolase 1 OS= Streptomyces caatingaensis OX=1678637 GN=folE PE=3 SV=1
MIDPVTLDGERSIGEFDEKRAVNAVRELLIAVGEDPDREGLRETPARVARAYKEIFAGLWQEPEDVLTTTFDLGHDEMVLVRDIEVYSTCEHHLVPFHGVAHIGYIPATSGKITGLSKLARLVDVYARRPQVQERLTTQIADSMTEILEARGVVVVIECEHMCMSMRGIRKPGAKTITSAVRGQLRDPASRAEAMSLIMSGR

SEQ ID NO: 15289 - protein, 201 aa, Streptomyces cacaoi
  misc_feature (1)..(201): tr|A0A4Y3R1H3|A0A4Y3R1H3_STRCI GTP cyclohydrolase 1 OS= Streptomyces cacaoi subsp. cacaoi OX=66857 GN=folE PE=3 SV=1
MTDPVTLDGETPIGEFDEKRAENAVRELLIAVGEDPDREGLLETPARVARAYREMFAGLRQRPEDVLTTTFDLGHDEMVLVKDIEVVSQCEHHLLPFHGVAHVGYIPSASGKITGLSKLARLVEVFARRPQVQERLTTQIADSLMRILEPRGVIVVIECEHMCMSVRGVRKPGAKTTTSAVRGQLRDSTTRAEAMSLILAK

SEQ ID NO: 15290 - protein, 201 aa, Streptomyces caelestis
  misc_feature (1)..(201): tr|A0A0M8QNT4|A0A0M8QNT4_9ACTN GTP cyclohydrolase 1 OS= Streptomyces caelestis OX=36816 GN=folE PE=3 SV=1
MTDPVTLDGMATIGEFDEKRARNAVRELLIAIGEDPDREGLLETPARVARAYREIFAGLWQKPEDVLTTTFDLGHDEMVLVKDIEVYSTCEHHLVPFRGVAHVGYIPSTSGKITGLSKLARLVDVYARRPQVQERLTTQIADSLMEILEPRGVIVVVECEHMCMSMRGIRKPGAKTLTSAVRGQLRDAATRNEAMSLIMAR

SEQ ID NO: 15291 - protein, 200 aa, Streptomyces caelestis
  misc_feature (1)..(200): tr|A0A0N0S6G0|A0A0N0S6G0_9ACTN GTP cyclohydrolase 1 OS= Streptomyces caelestis OX=36816 GN=ADK41_00730 PE=3 SV= 1
MTTTDTRLPTTGGIDIGEVEALYRKLLVALGQDVDSEGLRDTPARVARFWKDFLQHDPGTTDTAFTHQESGGQYVVVSGIRAWSLCQHHLLPFRLDVHIGYVPAGRVLGLSKLPRIVQTYAHRLQIQEALTTQVAHEVAALSGSGDVGVWSVGEHLCMAMRGVRDQAARTTTACLLGRLESDDRLAERLRTAAFLPLGAR

SEQ ID NO: 15292 - protein, 207 aa, Streptomyces caeruleatus
  misc_feature (1)..(207): tr|A0A124I9L6|A0A124I9L6_9ACTN GTP cyclohydrolase 1 OS= Streptomyces caeruleatus OX=661399 GN=folE PE=3 SV=1
MAADGAQTPAPAPAALRVAHEPQGTDLEAAELAAAQFLRALGVSTDSESLRDTPRRMTHAYAELFSPRPFDLTTFPNDEGYDELVLARGIPLRSVCEHHLMPFVGTAHIGYLPGQRILGLSKLARVLEHFAFRPQVQERLTKQVADWLQHQLEPKGVGVVIQAEHTCMTLRGVQATGTATMTSTLLGLLRTDARSRSKFLALTGLPR

SEQ ID NO: 15293 - protein, 201 aa, Streptomyces caeruleatus
  misc_feature (1)..(201): tr|A0A117RKA7|A0A117RKA7_9ACTN GTP cyclohydrolase 1 OS= Streptomyces caeruleatus OX=661399 GN=folE PE=3 SV=1
MTDPVTLDGEGRIGEFDEKRAENAVRELLIAVGEDPDREGLRETPGRVARAYKEIFAGLWQKPEDVLTTTFDIGHDEMVLVKDIEVYSTCEHHLVPFRGVAHVGYIPATSGKITGLSKLARLVDVYARRPQVQERLTTQIADSLMEILEPRGVIVVVECEHMCMSMRGIRKPGAKTITSAVRGQLRDAATRNEAMSLIMAR

SEQ ID NO: 15294 - protein, 201 aa, Streptomyces canus
  misc_feature (1)..(201): tr|A0A101RV21|A0A101RV21_9ACTN GTP cyclohydrolase 1 OS= Streptomyces canus OX=58343 GN=folE PE=3 SV=1
MTDPVTLDGEGSIGEFDEKRAENAIRELLIAVGEDPDREGLRETPARVARSYKEIFAGLWQKPEDVLTTTFDLGHDEMVLVKDIEVYSTCEHHLVPFRGVAHVGYIPATTGKITGLSKLARLVDVYARRPQVQERLTTQIADSLMEILEPRGVIVVVECEHMCMSMRGIRKPGAKTLTSAVRGQLRDAATRNEAMSLIMAR

SEQ ID NO: 15295 - protein, 201 aa, Streptomyces canus
  misc_feature (1)..(201): tr|A0A101NXG5|A0A101NXG5_9ACTN GTP cyclohydrolase 1 OS= Streptomyces canus OX=58343 GN=folE PE=3 SV=1
MTDPVTLDGEGSIGEFDEKRAENAVRELLIAVGEDPDREGLRETPARVARSYKEIFAGLWQRPEDVLTTTFDLGHDEMVLVKDIEVYSTCEHHLVPFRGVAHVGYIPATTGKITGLSKLARLVDVYARRPQVQERLTTQIADSLMEILEPRGVIVVVECEHMCMSMRGIRKPGAKTLTSAVRGQLRDAATRNEAMSLIMAR

SEQ ID NO: 15296 - protein, 201 aa, Streptomyces capillispiralis
  misc_feature (1)..(201): tr|A0A561TG81|A0A561TG81_9ACTN GTP cyclohydrolase 1 OS= Streptomyces capillispiralis OX=68182 GN=folE PE=3 SV=1
MTDPVTLDGMAPVGEFDEKRAENAVRELLIAVGEDPDREGLQQTPARVARAYREIFAGLWQKPEDVLTTTFDIGHDEMVLVKDIEVYSTCEHHLVPFRGVAHVGYIPATSGKITGLSKLARLVDVYARRPQVQERLTTQIADSLMEILEPRGVIVVVEAEHMCMSMRGIRKPGAKTLTSAVRGQLRDAATRNEAMSLIMAR

SEQ ID NO: 15297 - protein, 196 aa, Streptomyces cattleya
  misc_feature (1)..(196): tr|F8JT12|F8JT12_STREN GTP cyclohydrolase 1 OS=Streptom yces cattleya (strain ATCC 35852 / DSM 46488 / JCM 4925 / NBRC 14057 / NRRL 8057) OX=1003195 GN=folE PE=3 SV=1
MTNPDPSLRVAARRFTAGLTAWFASIGLDPDSPALAETPTRVLRALGEFTAGYRDDPAFHLSRTFPADHAGQPIAVTGVPFTSLCEHHLLPFSGTADIAYQPKPGASVAGLSKLPRVLDVYARRLQTQEQLTRQVTAALDEHLDTLGAACIIRSEHGCLAHRGARKPGASMVTASYTGRFLTDPQARADLHTLLTR

SEQ ID NO: 15298 - protein, 202 aa, Streptomyces cattleya
  misc_feature (1)..(202): tr|F8K1L8|F8K1L8_STREN GTP cyclohydrolase 1 OS=Streptom yces cattleya (strain ATCC 35852 / DSM 46488 / JCM 4925 / NBRC 14057 / NRRL 8057) OX=1003195 GN=folE PE=3 SV=1
MTDPVTLNDAGNAAGEFDEKRAENAVRELLLAVGEDPDREGLQETPARVARAYKEIFAGLWQRPEDVLTTTFDLGHDEMVLVRDIEVYSTCEHHLVPFHGVAHVGYIPATTGKITGLSKLARLVDVYARRPQVQERLTTQIADSLMDILEPRGVIVVVECEHMCMSMRGIRKPGAKTTTSAVRGQLRDPATRAEAMSLILAR

SEQ ID NO: 15299 - protein, 201 aa, Streptomyces cavourensis
  misc_feature (1)..(201): tr|A0A543VNL6|A0A543VNL6_9ACTN GTP cyclohydrolase 1 OS= Streptomyces cavourensis OX=67258 GN=folE PE=3 SV=1
MTDPVTLDGQGSIGEFDEKRAEAAVRELLIAVGEDPDREGLRETPGRVARAYKEIFAGLYQQPEDVLTTTFDLGHDEMVLVKDIEVFSTCEHHLVPFRGVAHVGYIPATTGKITGLSKLARLVDVYARRPQVQERLTTQIAESLMTILEPRGVIVVIECEHMCMSMRGIRKPGAKTLTSAVRGQLRDPATRAEAMSLIMAN

SEQ ID NO: 15300 - protein, 201 aa, Streptomyces cellostaticus
  misc_feature (1)..(201): tr|A0A101NFW0|A0A101NFW0_9ACTN GTP cyclohydrolase 1 OS= Streptomyces cellostaticus OX=67285 GN=folE PE=3 SV=1
MTDPVTLDGEGTIGEFDEKRAENAVRELLIAVGEDPDREGLRETPGRVARAYREIFAGLWQKPEDVLTTTFDLGHDEMVLVKDIEVYSTCEHHLVPFRGVAHVGYIPSVTGKITGLSKLARLVDVYARRPQVQERLTTQIADSLMEILEPRGVIVVVECEHMCMSMRGIRKPGAKTITSAVRGQLRDAATRNEAMSLIMAR

SEQ ID NO: 15301 - protein, 228 aa, Streptomyces chartreusis
  misc_feature (1)..(228): tr|A0A2N9B1Y2|A0A2N9B1Y2_STRCX GTP cyclohydrolase 1 OS= Streptomyces chartreusis NRRL 3882 OX=1079985 GN=folE_1 PE=3 SV=1
MDLAGSINAHASRTADLPAPSASIPRPQAPAPSPAPLRVVHDTDGIDLAGAERAAADFLAALGIDTSSESLHGTPGRMARAYAELFSPRPFDLTTFPNDEGYDELVLARSIPVRSVCEHHLLPFTGTAHVGYLPGHRILGLSKLARVVEHFACRPQVQERLTKQVADWLQAHLEPKGVGVVIEAEHSCMTLRGVQATGSSTLTSTLLGTLRHDARSRAEFLSLTGLHS

SEQ ID NO: 15302 - protein, 201 aa, Streptomyces chartreusis
  misc_feature (1)..(201): tr|A0A5J6JZ29|A0A5J6JZ29_STRCX GTP cyclohydrolase I Fol E OS=Streptomyces chartreusis OX=1969 GN=folE PE=4 SV=1
MTDPVTLDGEGRIGEFDEKRAENAVRELLIAVGEDPDREGLRETPARVARAYKEIFGGLWQKPEDVLTTTFDIGHDEMVLVKDIEVYSTCEHHLVPFRGVAHVGYIPATSGKITGLSKLARLVDVYARRPQVQERLTTQIADSLMEILEPRGVIVVVECEHMCMSMRGIRKPGAKTITSAVRGQLRDAATRNEAMSLIMAR

SEQ ID NO: 15303 - protein, 201 aa, Streptomyces chattanoogensis
  misc_feature (1)..(201): tr|A0A0N0H375|A0A0N0H375_9ACTN GTP cyclohydrolase 1 OS= Streptomyces chattanoogensis OX=66876 GN=folE PE=3 SV=1
MTDPVTLDGDGVIGTFDEKRAENAVRELLIAVGEDPDREGLLETPARVARAYKEIFAGLWQKPEDVLTTTFDLGHDEMVLVKDIELVSSCEHHLVPFVGVAHVGYIPSVEGKITGLSKLARLVDVYARRPQVQERLTTQIADSLMEILEPRGVIVVIECEHMCMTMRGVRKPGAKTTTSAVRGQLRDPATRAEAMSLILAR

SEQ ID NO: 15304 - protein, 201 aa, Streptomyces cinereoruber
  misc_feature (1)..(201): tr|A0A5J6IM16|A0A5J6IM16_9ACTN GTP cyclohydrolase I Fol E OS=Streptomyces cinereoruber OX=67260 GN=folE PE=4 SV =1
MTDPVTLDGEGRIGDFDEKRAENAVRELLIAVGEDPDREGLRETPARVARAYKEIFAGLRQEPQDVLTTTFDLGHDEMVLVKDIEVFSTCEHHLVPFRGVAHVGYIPSTSGKITGLSKLARLVDVYARRPQVQERLTTQVADSLMEILEPRGVIVVFECEHMCMSMRGIRKPGAKTITSAVRGQLRDPATRAEAMSLIMAR

SEQ ID NO: 15305 - protein, 201 aa, Streptomyces cinnamoneus
  misc_feature (1)..(201): tr|A0A2G1XGU2|A0A2G1XGU2_STRCJ GTP cyclohydrolase 1 OS= Streptomyces cinnamoneus OX=53446 GN=folE PE=3 SV=1
MTDPVTLDAERSIGVFDEKRAENAVRELLIAVGEDPDREGLRETPARVARAYREIFAGLWQEPEDVLTTTFDLGHDEMVLVRDIEVYSTCEHHLVPFHGVAHVGYIPATTGKITGLSKLARLVDVFARRPQVQERLTTQIADSLMEILEPRGVIVVVECEHMCMSMRGIRKPGAKTLTSAVRGQLRDPASRAEAMSLIMAR

SEQ ID NO: 15306 - protein, 201 aa, Streptomyces clavuligerus
  misc_feature (1)..(201): tr|B5GPB7|B5GPB7_STRC2 GTP cyclohydrolase 1 OS=Streptom yces clavuligerus (strain ATCC 27064 / DSM 738 / JCM 47 10 / NBRC 13307 / NCIMB 12785 / NRRL 3585 / VKM Ac-602) OX=443255 GN=folE PE=3 SV=1
MTDPVTLDGQGAIGEFDEKRAENAIRELLAAVGEDPDREGLRETPARVARAYRELLAGLRQRPEDVLTTTFDLGHDEMVLVKDIEIVSLCEHHLLPFHGVAHVGYIPADSGKITGLSKLARLVEVFARRPQVQERLTTQIADSLMRILDARGAIVVIEAEHMCMSVRGIRKPGAKTTTSAVRGQLRDASTRAEAMSLILAR

SEQ ID NO: 15307 - protein, 198 aa, Streptomyces coelicoflavus
  misc_feature (1)..(198): tr|H1QLA5|H1QLA5_9ACTN GTP cyclohydrolase 1 OS=Streptom yces coelicoflavus ZG0656 OX=1120227 GN=folE PE=3 SV=1
MTATVPLQVVEDVTGPDLEAAECAAREFLAALGIMVDSEGTRETPARMARGYAELLTARPFQMTTFPNDEGYDELVLARDIPVRSVCQHHMLPFVGKAHVGYLPGTRILGLSKLARVVEHFACRPQVQERLTKQTADWLAEQLQPRGVGVVVEAEHTCMTLRGVQATGSRTVTSTMLGVLRDDAASRHEFLALTGVQR

SEQ ID NO: 15308 - protein, 110 aa, Streptomyces coelicoflavus
  misc_feature (1)..(110): tr|H1QFE9|H1QFE9_9ACTN GTP cyclohydrolase 1 (Fragment) OS=Streptomyces coelicoflavus ZG0656 OX=1120227 GN=SMCF _3638 PE=3 SV=1
VSFCEHHMLPVVGRAHVAYLPTDRVVGISKLARVVRGFARRLQIQEKMTAEIAEAINTVLKPHGVGVVIEAEHSCMTLRGVNAPGASLSTSHLIGVVRDDPRTREEFLRL

SEQ ID NO: 15309 - protein, 201 aa, Streptomyces coelicolor
  misc_feature (1)..(201): sp|Q9X8I3|GCH1_STRCO GTP cyclohydrolase 1 OS=Streptomyc es coelicolor (strain ATCC BAA-471 / A3(2) / M145) OX=1 00226 GN=folE PE=3 SV=1
MTDPVTLDGEGQIGEFDEKRAENAVRELLIAVGEDPDREGLRETPARVARAYREIFAGLWQEPEDVLTTTFDLGHDEMVLVKDIEVFSTCEHHLVPFRGVAHVGYIPSTSGKITGLSKLARLVDVYARRPQVQERLTTQIADSLMEILEPRGVIVVVECEHMCMSMRGIRKPGAKTLTSAVRGQLRDVATRNEAMSLIMAR

SEQ ID NO: 15310 - protein, 201 aa, Streptomyces coelicolor; identical to SEQ ID NO: 15309
  misc_feature (1)..(201): tr|A0A4V3HI70|A0A4V3HI70_STRCH GTP cyclohydrolase 1 OS= Streptomyces coelicolor OX=1902 GN=folE PE=3 SV=1

SEQ ID NO: 15311 - protein, 198 aa, Streptomyces coeruleorubidus
  misc_feature (1)..(198): tr|A0A5J6I0Z6|A0A5J6I0Z6_STRC4 GTP cyclohydrolase I Fol E OS=Streptomyces coeruleorubidus OX=116188 GN=folE PE= 4 SV=1
MPSITPLRVVHDTGGIDLPGAERAAAQFLEALGIQTDTESLNGTPGRMARAYAELFSPRPFDLTTFPNDEGYDELVLARRIPVRSVCEHHMLPVIGTAHVGYLPGSRILGLSKLARVVEHFAFRPQVQERLTKQVADWLHTHLEPKGVGVVIEAEHTCMTLRGVQATGSSTLTSTLLGTLRHDARSRAEFLSLTGMPT

SEQ ID NO: 15312 - protein, 201 aa, Streptomyces coeruleorubidus
  misc_feature (1)..(201): tr|A0A5J6I5Z3|A0A5J6I5Z3_STRC4 GTP cyclohydrolase I Fol E OS=Streptomyces coeruleorubidus OX=116188 GN=folE PE= 4 SV=1
MTDPVTLDGEGQIGEFDEKRAENAVRELLIAVGEDPDREGLRETPARVARAYKEIFAGLWQKPEDVLTTTFDLGHDEMVLVKDIEVLSSCEHHLVPFVGVAHVGYIPSVEGKITGLSKLARLVDVYARRPQVQERLTTQIADSLMEILEPRGVIVVIECEHMCMSMRGVRKPGAKTITSAVRGQLRDPATRNEAMSLIMAR

SEQ ID NO: 15313 - protein, 201 aa, Streptomyces collinus
  misc_feature (1)..(201): tr|S5VK54|S5VK54_STRC3 GTP cyclohydrolase 1 OS=Streptom yces collinus (strain DSM 40733 / Tu 365) OX=1214242 GN =folE PE=3 SV=1
MTDPVTLAGDGFIGEFDEKRAENAVRELLIAVGEDPDREGLRDTPARVARAYRELLAGLWQEPEDVLTTTFDLGHDEMVLVKDIEIVSLCEHHLLPFHGVAHVGYIPAETGKITGLSKLARLVEVFARRPQVQERLTTQIADSLVRILEARGAIVVIEAEHMCMSVRGIRKPGAKTTTSAVRGQLRDATTRAEAMSLILAR

SEQ ID NO: 15314 - protein, 201 aa, Streptomyces corchorusii
  misc_feature (1)..(201): tr|A0A117QGA3|A0A117QGA3_STRCK GTP cyclohydrolase 1 OS= Streptomyces corchorusii OX=1903 GN=folE PE=3 SV=1
MTDPVTLDGEGPIGEFDEKRAENAVRELLIAVGEDPDREGLRETPARVARAYREIFAGLWQQPEDVLTTTFDLGHDEMVLVKDIEVYSTCEHHLVPFRGVAHVGYIPSETGKITGLSKLARLVDVYARRPQVQERLTTQIADSLMNILEPRGVIVVVECEHMCMSMRGIRKPGAKTITSAVRGQLRDAATRNEAMSLIMAR

SEQ ID NO: 15315 - protein, 201 aa, Streptomyces curacoi
  misc_feature (1)..(201): tr|A0A117PHA6|A0A117PHA6_9ACTN GTP cyclohydrolase 1 OS= Streptomyces curacoi OX=146536 GN=folE PE=3 SV=1
MTDPVTLDGEGRIGEFDEKRAENAVRELLIAVGEDPDREGLKETPARVARAYREIFAGLWQKPEDVLTTTFDIGHDEMVLVKDIEVYSTCEHHLVPFRGVAHVGYIPATSGKITGLSKLARLVDVFARRPQVQERLTTQIADSLMEILEPRGVIVVVECEHMCMSMRGIRKPGAQTITSAVRGQLRDAATRNEAMSLIMAR

SEQ ID NO: 15316 - protein, 201 aa, Streptomyces cyaneogriseus
  misc_feature (1)..(201): tr|A0A0C5G331|A0A0C5G331_9ACTN GTP cyclohydrolase 1 OS= Streptomyces cyaneogriseus subsp. noncyanogenus OX=4772 45 GN=folE PE=3 SV=1
MTDPVTLDGEGQIGEFDEKRAENAVRELLIAVGEDPDREGLRETPARVARAYREIFAGLWQKPEDVLTTTFDIGHDEMVLVKDIEVYSTCEHHLVPFRGVAHVGYIPSTTGKITGLSKLARLVDVYARRPQVQERLTTQIADSLMEMLEPRGVIVVVECEHMCMSMRGIRKPGAKTITSAVRGQLRDVATRNEAMSLIMAH

SEQ ID NO: 15317 - protein, 201 aa, Streptomyces davaonensis
  misc_feature (1)..(201): tr|K4QWJ0|K4QWJ0_STRDJ GTP cyclohydrolase 1 OS=Streptom yces davaonensis (strain DSM 101723 / JCM 4913 / KCC S- 0913 / 768) OX=1214101 GN=folE PE=3 SV=1
MTDPVTLDGEGRIGEFDEKRAENAVRELLIAVGEDPDREGLRETPGRVARAYKEIFAGLWQQPEDVLTTTFDLGHDEMVLVKDIEVYSTCEHHLVPFRGVAHVGYIPATTGKITGLSKLARLVDVYARRPQVQERLTTQIADSLMEILEPRGVIVVVECEHMCMSMRGIRKPGAKTLTSAVRGQLRDAATRAEAMSLIMAR

SEQ ID NO: 15318 - protein, 201 aa, Streptomyces decoyicus
  misc_feature (1)..(201): tr|A0A0L8LU12|A0A0L8LU12_9ACTN GTP cyclohydrolase 1 OS= Streptomyces decoyicus OX=249567 GN=folE PE=3 SV=1
MTDPVTLDVDGKIGTFDEKRAENAVRELLIAVGEDPEREGLLETPGRVARAYKEIFAGLWQKPEDVLTTTFDLGHDEMVLVKDIELVSSCEHHLVPFVGVAHVGYIPSADGKITGLSKLARLVDVYARRPQVQERLTTQIADSLMEILEPRGVIVVIECEHMCMTMRGVRKPGAKTTTSAVRGQLRDAATRAEAMSLILAR

SEQ ID NO: 15319 - protein, 266 aa, Streptomyces dengpaensis
  misc_feature (1)..(266): tr|A0A2L2MWD6|A0A2L2MWD6_9ACTN GTP cyclohydrolase FolE2 OS=Streptomyces dengpaensis OX=2049881 GN=folE2 PE=3 S V=1
MIPDVQSWPDDRGIGLDEVGITGVRYPVSVFDAGHGKQDTVAGVTLSVSLPPEKKGARLSRFVEVLDAHAGEVTPQTIPVILTALQDRLGSPAARLHLRFPYFLRRSAPVSGATAMMDYECGITASARGDDVRLAISARVPVTSVCPCSKAISDYGAHNQRSHITIEAEPAAGVGPAQAPVWLEGLITAAETTASSPVFPLLKRADERQVIMHGYDHPVFVEDMARGVTERLRADSWIARFTVEAASDESIHDHSAFARLSWPPHR

SEQ ID NO: 15320 - protein, 201 aa, Streptomyces dengpaensis
  misc_feature (1)..(201): tr|A0A2L2ML68|A0A2L2ML68_9ACTN GTP cyclohydrolase 1 OS= Streptomyces dengpaensis OX=2049881 GN=folE PE=3 SV=1
MTDPVTLDGEGVIGEFDEKRAENAIRELLIAVGEDPDREGLKETPGRVARAYREIFSGLWQKPEDVLTTTFDLGHDEMVLVKDIEVLSSCEHHLVPFVGVAHVGYIPSTDGKITGLSKLARLVDVYARRPQVQERLTTQIADSLMEILEPRGVIVVVECEHMCMSMRGVRKPGAKTITSAVRGQLRDLATRNEAMSLIMAR

SEQ ID NO: 15321 - protein, 201 aa, Streptomyces diastatochromogenes
  misc_feature (1)..(201): tr|A0A233SDB5|A0A233SDB5_9ACTN GTP cyclohydrolase 1 OS= Streptomyces diastatochromogenes OX=42236 GN=folE PE=3 SV=1
MTDPVTLDGEGTIGEFDEKRAENAVRELLIAVGEDPDREGLRETPARVARAYKEIFAGLWQKPEDVLTTTFDLGHDEMVLVKDIEVYSTCEHHLVPFRGVAHVGYIPSVTGKITGLSKLARLVDVYARRPQVQERLTTQIADSLMEILEPRGVIVVVECEHMCMSMRGIRKPGAKTITSAVRGQLRDAATRNEAMSLIMAR

SEQ ID NO: 15322 - protein, 198 aa, Streptomyces diastatochromogenes
  misc_feature (1)..(198): tr|A0A1L7B5N3|A0A1L7B5N3_9ACTN GTP cyclohydrolase 1 OS= Streptomyces diastatochromogenes OX=42236 GN=toyD PE=3 SV=1
MSGAPELDVLDDSGPQVPDPLEDVARKLLIEIGEDPERDGLKETPARFARWWREFSRYDAGAVDTLFPLQTEGQLVMVSDINVWSLCEHHLLPFSCSLTIAYRPKGDVLGLSKFARIAHRHAHRLQVQERLVRDIADEVTKVTGSVDVAVIATGEHLCMSMRGIRTPAVMTSTAYSGVFEEYGPARQELVATVFPLRK

SEQ ID NO: 15323 - protein, 201 aa, Streptomyces eurocidicus
  misc_feature (1)..(201): tr|A0A2N8NXA8|A0A2N8NXA8_STREU GTP cyclohydrolase 1 OS= Streptomyces eurocidicus OX=66423 GN=folE PE=3 SV=1
MTDPVTLDAENSIGEFDEKRAENAVRELLIAVGEDPDREGLRETPARVARAYKEIFAGLWQEPEDVLTTTFDLGHDEMVLVRDIEVYSTCEHHLVPFHGVAHVGYIPATSGKITGLSKLARLVDVYARRPQVQERLTTQIADSLMEILEPRGVVVVVECEHMCMSMRGIRKPGAKTLTSAVRGQLRDPATRAEAMSLIMAR

SEQ ID NO: 15324 - protein, 195 aa, Streptomyces filamentosus
  misc_feature (1)..(195): tr|D6AIR2|D6AIR2_STRFL GTP cyclohydrolase 1 OS=Streptom yces filamentosus NRRL 15998 OX=457431 GN=SSGG_00404 PE =3 SV=1
MDASAITILEQDEAQGGDPLESIARRLLIEIGEDPDREGLRDTPRRYARWWREFVDYDAGNLDTVFSSVASNQIVMVSGMRVWSLCEHHLLPFNCDLQVAYRAHDSLLGLSKFARIAHKHAHKLQVQERLVADIAAEIEEITKSPDVAVIGRGEHLCMTMRGIKTGAQMTSAVFQGVFRENSFERTELLSLMNGS

SEQ ID NO: 15325 - protein, 201 aa, Streptomyces filamentosus
  misc_feature (1)..(201): tr|W9FPG0|W9FPG0_STRFL GTP cyclohydrolase 1 OS=Streptom yces filamentosus NRRL 11379 OX=457430 GN=folE PE=3 SV= 1
MTDPVTLDGQGSIGEFDEKRAEAAVRELLLAVGEDPDREGLRETPGRVARAYKEIFAGLYQQPEDVLTTTFDLGHDEMVLVKDIEVFSTCEHHLVPFRGVAHVGYIPASTGKITGLSKLARLVDVYARRPQVQERLTTQIAESLMSILEPRGVIVVVECEHMCMSMRGIRKPGAKTLTSAVRGQLRDPATRAEAMSLIMAN

SEQ ID NO: 15326 - protein, 329 aa, Streptomyces formicae
  misc_feature (1)..(329): tr|A0A291QCP2|A0A291QCP2_9ACTN GTP cyclohydrolase I typ e 1 OS=Streptomyces formicae OX=1616117 GN=KY5_4453 PE= 4 SV=1
MGYGLPSNQTVNAVGGRQRARDIRVGSRLWTLDGERTVQTTVTEVEVVKAREVVDVVADGVTLTVAADQMLGAPDGWVHARDAADTVLAWTPARKLCRARLTIRPGYEFGYLIGATCSDGTVGVNYVSLVVNDERFAQRYARCLTVATGLSAGLEPVTRPSGYLRRQVPGYRVRVVSSYLADVLRQYVGGDAHHLRQGFPRVVLRDPETFQGFLDGYTDGDGYLIKTWPGRVLVSANVPFLTELARIVGARFTPRADGRASRLIITDRWPSRGTFRPEQHPIQLRESGWSQVHAVRRREAGDKPFTLYGFRLAPYPSFLVNGHLARQQW

SEQ ID NO: 15327 - protein, 201 aa, Streptomyces formicae
  misc_feature (1)..(201): tr|A0A291QCF4|A0A291QCF4_9ACTN GTP cyclohydrolase 1 OS= Streptomyces formicae OX=1616117 GN=folE PE=3 SV=1
MTDPVTLDGEGAIGEFDEKRAENAVRELLIAVGEDPDREGLRETPGRVARAYKEIFAGLWQKPEDVLTTTFDLGHDEMVLVKDIEVTSCCEHHLVPFRGLAHVGYIPSASGKITGLSKLARLVDVYARRPQVQERMTTQIADSLMGILEPRGVIVVVECEHMCMSMRGIRKPGAKTITSAVRGQLRDPATRNEAMSLIMAR

SEQ ID NO: 15328 - protein, 201 aa, Streptomyces fradiae
  misc_feature (1)..(201): tr|A0A1Y2NNR6|A0A1Y2NNR6_STRFR GTP cyclohydrolase 1 OS= Streptomyces fradiae ATCC 10745 = DSM 40063 OX=1319510 GN=folE PE=3 SV=1
MTDAVTLDGEGRIGEFDEQRAVAAVRELLIAVGEDPDREGLRETPARVARAYKEIFAGLWQEPEDVLTTTFDLGHDEMVLVKDIEVFSTCEHHLVPFRGVAHVGYIPSTTGKITGLSKLARLVDVYARRPQVQERLTTQIADSLMKILEPRGVIVVIECEHMCMSMRGIRKPGAKTITSAVRGQLRDMATRSEAMSLIMAN

SEQ ID NO: 15329 - protein, 201 aa, Streptomyces fradiae; identical to SEQ ID NO: 15263
  misc_feature (1)..(201): tr|A0A3B7QIL9|A0A3B7QIL9_STRFR GTP cyclohydrolase 1 OS= Streptomyces fradiae OX=1906 GN=folE PE=3 SV=1

SEQ ID NO: 15330 - protein, 201 aa, Streptomyces fulvissimus
  misc_feature (1)..(201): tr|N0CYF0|N0CYF0_9ACTN GTP cyclohydrolase 1 OS=Streptom yces fulvissimus DSM 40593 OX=1303692 GN=folE PE=3 SV=1
MTDPVTLDGQGSIGDFDEKRAEAAVRELLLAVGEDPDREGLRETPGRVARAYKEILAGLRQEPEDVLTTTFDLGHDEMVLVKDIEIMSLCEHHLLPFHGVAHVGYIPADTGKITGLSKLARLVDVFARRPQVQERLTTQVADSLMRILEARGAIVVIEAEHMCMSVRGIRKPGAKTITSAVRGQLRAPATRAEAMSLIMAR

SEQ ID NO: 15331 - protein, 201 aa, Streptomyces fungicidicus
  misc_feature (1)..(201): tr|A0A494UYA8|A0A494UYA8_9ACTN GTP cyclohydrolase 1 OS= Streptomyces fungicidicus OX=68203 GN=folE PE=3 SV=1
MTDPVTLDGVTPIGEFDEKRARNAVRELLIAVGEDPDREGLLETPARVARAYREIFAGLWQKPEDVLTTTFDLGHDEMVLVKDIEVYSTCEHHLVPFRGVAHVGYIPATSGKITGLSKLARLVDVYARRPQVQERLTTQIADSLMEILEPRGVIVVVECEHMCMSMRGIRKPGAKTLTSAVRGQLRDAATRNEAMSLIMAR

SEQ ID NO: 15332 - protein, 203 aa, Streptomyces galbus
  misc_feature (1)..(203): tr|A0A4U5WUR4|A0A4U5WUR4_STRGB GTP cyclohydrolase 1 OS= Streptomyces galbus OX=33898 GN=folE PE=3 SV=1
MTDPVTLDGDRGGAIGEFDEKRAENAVRELLLAVGEDPDREGLKETPARVARAYREIFAGLWQQPEDVLTTTFDLGHDEMVLVKDIEVFSTCEHHLVPFRGVAHVGYIPSASGKITGLSKLARLVDVYARRPQVQERLTTQIADSLMEILEPRGVIVVIECEHMCMSMRGIRKPGAKTLTSAVRGQLRDAATRNEAMSLIMAR

SEQ ID NO: 15333 - protein, 218 aa, Streptomyces galbus
  misc_feature (1)..(218): tr|A0A4U5X180|A0A4U5X180_STRGB GTP cyclohydrolase 1 OS= Streptomyces galbus OX=33898 GN=folE PE=3 SV=1
MTEHPHQATARTDLHGDRDTAPARPALRVVHEPAGIDLAAAEAAAGQFLTALGIPTTSESLRGTPGRMARAYAELFSPRPFDLTTFPNDEGYDELVLARRIPVRSVCEHHLLPFTGTAHVGYLPGARILGLSKLARIVEHFACRPQVQERLTKQIADWLQTHLEPKGVGVVIEAEHACMSLRGVQATGSTTMTSTLLGLLRSDARSRSEFLALTGATP

SEQ ID NO: 15334 - protein, 201 aa, Streptomyces galilaeus
  misc_feature (1)..(201): tr|A0A5J6EUS8|A0A5J6EUS8_STRGJ GTP cyclohydrolase I Fol E OS=Streptomyces galilaeus OX=33899 GN=folE PE=4 SV=1
MTDPVTLDGEGLVGEFDEKRAENAVRELLIAVGENPDREGLRETPARVARAYREIFAGLWQQPEDVLTTTFDLGHDEMVLVKDIEVYSTCEHHLVPFRGVAHVGYIPATSGKITGLSKLARLVDVYARRPQVQERLTTQIADSLMEILEPRGVIVVVECEHMCMSMRGIRKPGAKTITSAVRGQLRDAATRNEAMSLIMAR

SEQ ID NO: 15335 - protein, 201 aa, Streptomyces gancidicus
  misc_feature (1)..(201): tr|M3E578|M3E578_9ACTN GTP cyclohydrolase 1 OS=Streptom yces gancidicus BKS 13-15 OX=1284664 GN=folE PE=3 SV=1
MTDPVTLDGIAPVGEFDEKRARNAVRELLIAVGEDPDREGLQETPARVARAYREIFAGLWQKPEDVLTTTFDIGHDEMVLVKDIEVYSTCEHHLVPFRGVAHVGYIPSTSGKITGLSKLARLVDVYARRPQVQERLTTQIADSLMEILEPRGVIVVVECEHMCMSMRGIRKPGAKTITSAVRGQLRDAATRNEAMSLIMAR

SEQ ID NO: 15336 - protein, 202 aa, Streptomyces gardneri
  misc_feature (1)..(202): tr|A0A4Y3RU94|A0A4Y3RU94_9ACTN GTP cyclohydrolase 1 OS= Streptomyces gardneri OX=66892 GN=folE PE=3 SV=1
MTDPVTLDGEGTIGEFDEKRAENAVRELLIAVGEDPDREGLRETPARVARAYKELFAGLWQTPEDVLTTTFDLGHDEMVLVKDIELVSQCEHHLLPFHGVAHIGYIPAESGKITGLSKLARLVDVFARRPQVQERLTTQIADSLMRILDARGAIVVIEAEHMCMALRGVRKPGAKTTTSAVRGQLRDATTRSEAMSLILARS

SEQ ID NO: 15337 - protein, 203 aa, Streptomyces gilvigriseus
  misc_feature (1)..(203): tr|A0A1J7BDY9|A0A1J7BDY9_9ACTN GTP cyclohydrolase 1 OS= Streptomyces gilvigriseus OX=1428644 GN=folE PE=3 SV=1
MTDPVNRDYNEEWQPGAFDEKRAEAAVREILYAIGEDPDREGLRETPARVARAYREIFAGLWQQPEDVLTTTFDMGHDEMVLVKDIEVFSNCEHHLLPFHGVAHVGYIPAESGKITGLSKLARLVDVYARRPQVQERLTTQIADALMRILDARGVIVVVEAEHLCMSARGVRKPGAKTTTSAVRGQLRDPATRSEAMSLILSH

SEQ ID NO: 15338 - protein, 201 aa, Streptomyces gilvosporeus
  misc_feature (1)..(201): tr|A0A1V0TV14|A0A1V0TV14_9ACTN GTP cyclohydrolase 1 OS= Streptomyces gilvosporeus OX=553510 GN=folE PE=3 SV=1
MTDPVTLDGDGTIGVFDEKRAENAVRELLIAVGEDPDREGLLETPARVARAYKEILAGLRQTPEEVLTTTFDLGHDEMVLVKDIEIVSLCEHHLLPFHGVAHVGYIPAENGKITGLSKLARLVEVYARRPQVQERLTTQIADSLMRILEARGAIVVVEAEHMCMSVRGIRKPGAKTTTSAVRGQLRDASTRAEAMSLIMAR

SEQ ID NO: 15339 - protein, 226 aa, Streptomyces glaucescens
  misc_feature (1)..(226): tr|A0A089XLM9|A0A089XLM9_STRGA GTP cyclohydrolase 1 OS= Streptomyces glaucescens OX=1907 GN=folE PE=3 SV=1
MDISAPSAAAAPGTAGVRAGVAGIPGPQLPPPVTPLRVVHDTRAVDLPAAERAAAQFLAALGIATDTESLYGTPGRMARAYAELFSPRPFDLTTFPNDEGYDELVLARSIPVRSVCEHHMLPVVGTAHVGYLPGDRILGLSKLARVVEHFACRPQVQERLTKQVADWLHTHLEPKGVGVVIEAEHTCMTLRGVQATGSSTITSTLLGALRQDARSRAEFLALTGAG

SEQ ID NO: 15340 - protein, 201 aa, Streptomyces glaucescens
  misc_feature (1)..(201): tr|A0A089X917|A0A089X917_STRGA GTP cyclohydrolase 1 OS= Streptomyces glaucescens OX=1907 GN=folE PE=3 SV=1
MTDPVTLDGEGTIGEFDEKRAENAVRELLIAVGEDPDREGLRETPARVARAYREIFAGLWQKPEDVLTTTFDLGHDEMVLVKDIEIYSTCEHHLVPFRGVAHVGYIPSTSGKITGLSKLARLVDVYARRPQVQERLTTQIADSLMEILEPRGVIVVIECEHMCMSMRGIRKPGAKTITSAVRGQLRDAATRNEAMSLIMAH

SEQ ID NO: 15341 - protein, 202 aa, Streptomyces glauciniger
  misc_feature (1)..(202): tr|A0A239B6C2|A0A239B6C2_9ACTN GTP cyclohydrolase 1 OS= Streptomyces glauciniger OX=235986 GN=folE PE=3 SV=1
MTDPVTLEGELRPVGEFDEKRAENAVRELLIAVGEDPDREGLRETPARVARAYREIFAGLYQEPEDVLTTTFDLGHDEMVLVKDIEVLSSCEHHLVPFVGVAHVGYIPSSDGKITGLSKLARLVDVFARRPQVQERLTTQIADSLMRILEPRGVIVVIECEHMCMTMRGVRKPGAKTITSAVRGQLRDSATRAEAMSLIMAK

SEQ ID NO: 15342 - protein, 201 aa, Streptomyces globisporus; identical to SEQ ID NO: 15283
  misc_feature (1)..(201): tr|A0A2U8NQL3|A0A2U8NQL3_STRGL GTP cyclohydrolase 1 OS= Streptomyces globisporus OX=1908 GN=folE PE=3 SV=1

SEQ ID NO: 15343 - protein, 201 aa, Streptomyces globisporus; identical to SEQ ID NO: 15325
  misc_feature (1)..(201): tr|A0A0U3KJ07|A0A0U3KJ07_STRGL GTP cyclohydrolase 1 OS= Streptomyces globisporus C-1027 OX=1172567 GN=folE PE=3 SV=1

SEQ ID NO: 15344 - protein, 201 aa, Streptomyces globosus
  misc_feature (1)..(201): tr|A0A344TUL0|A0A344TUL0_9ACTN GTP cyclohydrolase 1 OS= Streptomyces globosus OX=68209 GN=folE PE=3 SV=1
MTDPVTLDGEGTIGVFDEKRAEAAVRELLLAVGEDPDREGLLETPARVARAYREILAGLWQKPEDVLTTTFDLGHDEMVLVKDIEIVSLCEHHLLPFHGVAHVGYIPAESGKITGLSKLARLVDVYARRPQVQERLTTQIADSLMEILEARGAIVVVEAEHMCMSVRGIRKPGAKTTTSAVRGQLRAPATRSEAMSLIMAR

SEQ ID NO: 15345 - protein, 201 aa, Streptomyces griseoaurantiacus
  misc_feature (1)..(201): tr|F3NM25|F3NM25_9ACTN GTP cyclohydrolase 1 OS=Streptom yces griseoaurantiacus M045 OX=996637 GN=folE PE=3 SV=1
MTDPVTLDGESTIGEFDEKRAENAVRELLLAIGEDPDREGLRDTPGRVARAYQEIFAGLRQRPEDVLTTTFDLGHDEMVLVKDIEVFSTCEHHLVPFRGVAHVGYIPSANGKITGLSKLARLVDVYARRPQVQERLTTQIAESLMEILEPRGVIVVVECEHMCMSMRGIRKPGAKTLTSAVRGQLRDAATRNEAMSLIMAR

SEQ ID NO: 15346 - protein, 201 aa, Streptomyces griseocarneus
  misc_feature (1)..(201): tr|A0A3L8IXP4|A0A3L8IXP4_9ACTN GTP cyclohydrolase 1 OS= Streptomyces griseocarneus OX=51201 GN=folE PE=3 SV=1
MTDPVTLAAENSIGAFDEKRAENAVRELLLAVGEDPDREGLRETPARVARAYKEIFAGLWQEPEDVLTTTFDLGHDEMVLVRDIEVYSTCEHHLVPFHGVAHVGYIPSTSGKITGLSKLARLVDVYARRPQVQERLTTQIADSLMEILEPRGVIVVVECEHMCMSMRGIRKPGAKTLTSAVRGQLRDPATRAEAMSLIMAR

SEQ ID NO: 15347 - protein, 202 aa, Streptomyces griseocarneus
  misc_feature (1)..(202): tr|A0A3L8IJB1|A0A3L8IJB1_9ACTN GTP cyclohydrolase 1 OS= Streptomyces griseocarneus OX=51201 GN=folE PE=3 SV=1
MTAVTDTPFVTAVDAEEALAASITAWLSARGLDPHSAELADTPRRVVAALAEFTAGYDQDPAEHLARTFPVEHSGQPIIVTGVPFTSLCGHHLLPFSGTATIAYLPTPGAPVVGLSKLPRVLDIYARRLQTQENLTQQVTAALDTHLDALGSACLIRSVHGCLAHRGAHKPGAAMVTASYTGVLRSDRHIRADLHALINTMP

SEQ ID NO: 15348 - protein, 205 aa, Streptomyces griseochromogenes
  misc_feature (1)..(205): tr|A0A1B1B2T5|A0A1B1B2T5_9ACTN GTP cyclohydrolase 1 OS= Streptomyces griseochromogenes OX=68214 GN=AVL59_29105 PE=3 SV=1
MAVTLEPEQAPRLLDRPEGTPDPLEGLARQLLIEIGEDPDREGLADTPRRYAKWWREFIGYEAGKTETLFDSISDNQLVYVSGMLVWSLCEHHLLPFNCNLTIAYRSDKNLLGLSKFARIAHKHAHRLQVQERLVSDVADEISQITGSEDVAVIGRGEHLCMTMRGIRTPALMTSAAFRGAFAQDGPERTQLLMLAQNSGGSASH

SEQ ID NO: 15349 - protein, 201 aa, Streptomyces griseochromogenes
  misc_feature (1)..(201): tr|A0A1B1AQ01|A0A1B1AQ01_9ACTN GTP cyclohydrolase 1 OS= Streptomyces griseochromogenes OX=68214 GN=folE PE=3 SV =1
MTDPVTLDGEGTIGEFDEKRAENAVRELLIAVGEDPDREGLRETPARVARAYQEIFAGLWQKPEDVLTTTFDLGHDEMVLVKDIEVYSTCEHHLVPFRGVAHVGYIPSVTGKITGLSKLARLVDVYARRPQVQERLTTQIADSLMEILEPRGVIVVVECEHMCMSMRGIRKPGAKTITSAVRGQLRDAATRNEAMSLIMAR

SEQ ID NO: 15350 - protein, 201 aa, Streptomyces griseoflavus; identical to SEQ ID NO: 15331
  misc_feature (1)..(201): tr|D9Y1C1|D9Y1C1_9ACTN GTP cyclohydrolase 1 OS=Streptom yces griseoflavus Tu4000 OX=467200 GN=folE PE=3 SV=1

SEQ ID NO: 15351 - protein, 196 aa, Streptomyces griseoflavus
  misc_feature (1)..(196): tr|A0A0L8NMX5|A0A0L8NMX5_9ACTN GTP cyclohydrolase 1 OS= Streptomyces griseoflavus OX=35619 GN=ADK76_10870 PE=3 SV=1
MVKAVWERQEAADVSVDAARLEELARQILIEIGEDPTREGLRETPRRYAKWWKEFVEYDAGKVDTLFESSTLGQTVMVSGMTVWSLCEHHLLPFSCDLTVAYKSGGVLLGLSKFARIAHKHAHKLQVQERLVVDIADEISDITGTNDLAVMGRGEHLCMTMRGIRTPSTMSSSIFRGVFDQSERARAELFAQLGVK

SEQ ID NO: 15352 - protein, 201 aa, Streptomyces griseofuscus
  misc_feature (1)..(201): tr|A0A3R8RV52|A0A3R8RV52_9ACTN GTP cyclohydrolase 1 OS= Streptomyces griseofuscus OX=146922 GN=folE PE=3 SV=1
MTDPVTLDSERPVGEFDEKRAENAVRELLIAIGEDPDREGLRETPARVARAYQEIFAGLWQQPEDVLTTTFDLGHDEMVLVKDIEVYSTCEHHLVPFRGVAHVGYIPSVTGKITGLSKLARLVDVYARRPQVQERLTTQIADSLMEILEPRGVIVVVECEHMCMSMRGIRKPGAKTITSAVRGQLRDAATRNEAMSLIMAR

SEQ ID NO: 15353 - protein, 201 aa, Streptomyces griseofuscus
  misc_feature (1)..(201): tr|A0A1X4GSI0|A0A1X4GSI0_9ACTN GTP cyclohydrolase 1 OS= Streptomyces griseofuscus OX=146922 GN=folE PE=3 SV=1
MTDPVTLDSERPVGEFDEKRAENAVRELLIAIGEDPDREGLRETPARVARAYQEIFAGLWQKPEDVLTTTFDLGHDEMVLVKDIEVYSTCEHHLVPFRGVAHVGYIPSVTGKITGLSKLARLVDVYARRPQVQERLTTQIADSLMEILEPRGVIVVVECEHMCMSMRGIRKPGAKTITSAVRGQLRDAATRNEAMSLIMAR

SEQ ID NO: 15354 - protein, 201 aa, Streptomyces griseoluteus
  misc_feature (1)..(201): tr|A0A4Z1DJJ4|A0A4Z1DJJ4_STRGP GTP cyclohydrolase 1 OS= Streptomyces griseoluteus OX=29306 GN=folE PE=3 SV=1
MTDAVTLAGDGTIGEFDEKRAENAVRELLIAVGEDPDREGLRETPARVARAYRELLAGLRQKPEEVLTTTFDLGHDEMVLVKDIEIVSLCEHHLLPFHGVAHVGYIPAESGKITGLSKLARLVEVFARRPQVQERLTTQIADSLMGILEARGAIVVIEAEHMCMSVRGIRKPGAKTTTSAVRGQLRDSTTRAEAMSLILAR

SEQ ID NO: 15355 - protein, 201 aa, Streptomyces griseoruber
  misc_feature (1)..(201): tr|A0A101SR99|A0A101SR99_9ACTN GTP cyclohydrolase 1 OS= Streptomyces griseoruber OX=1943 GN=folE PE=3 SV=1
MTDPVTLDGEGSIGEFDEKRAENAVRELLIAVGEDPDREGLKETPARVARAYREIFAGLWQKPEDVLTTTFDLGHDEMVLVKDIEVFSTCEHHLVPFRGVAHVGYIPSTSGKITGLSKLARLVDVFARRPQVQERLTTQIADSLMEILEPRGVIVVVECEHMCMSMRGIRKPGAKTITSAVRGQLRDMATRNEAMSLIMAH

SEQ ID NO: 15356 - protein, 201 aa, Streptomyces griseorubiginosus
  misc_feature (1)..(201): tr|A0A385ZKZ8|A0A385ZKZ8_9ACTN GTP cyclohydrolase 1 OS= Streptomyces griseorubiginosus OX=67304 GN=folE PE=3 SV =1
MTDPVTLDGEGPIGEFDEKRAENAVRELLIAVGENPDREGLRETPGRVARAYREILAGLWQVPEDVLTTTFDLGHDEMVLVKDIEIVSLCEHHLLPFHGVAHIGYIPAETGKITGLSKLARLVEVFARRPQVQERLTTQIADSLMRILEARGAIVVIEAEHMCMSVRGIRKPGAKTTTSAVRGQLRDATTRAEAMSLILAR

SEQ ID NO: 15357 - protein, 201 aa, Streptomyces griseorubiginosus
  misc_feature (1)..(201): tr|A0A3N1N226|A0A3N1N226_9ACTN GTP cyclohydrolase 1 OS= Streptomyces griseorubiginosus OX=67304 GN=folE PE=3 SV =1
MTDPVTLDGEGPIGEFDEKRAENAVRELLIAVGEDPDREGLRETPARVARAYKEIFAGLWQKPEDVLTTTFDLGHDEMVLVKDIEVYSTCEHHLVPFRGVAHVGYIPSTSGKITGLSKLARLVDVYARRPQVQERLTTQIADSLMEILEPRGVIVVVECEHMCMSMRGIRKPGAKTLTSAVRGQLRDAATRNEAMSLIMAR

SEQ ID NO: 15358 - protein, 201 aa, Streptomyces griseoviridis
  misc_feature (1)..(201): tr|A0A3S9ZDE0|A0A3S9ZDE0_STRGD GTP cyclohydrolase 1 OS= Streptomyces griseoviridis OX=45398 GN=folE PE=3 SV=1
MTDPVMLGGEASIGEFDEKRAENAVRELLIAVGEDPDREGLRETPGRVARAYKEIFAGLWQTPEDVLTTTFDLGHDEMVLVKDIEVLSSCEHHLVPFVGVAHVGYIPSADGKITGLSKLARLVDVYARRPQVQERLTTQIAESLMTVLEPRGVIVVVECEHMCMSMRGVRKPGAKTITSAVRGQLRDPATRAEAMSLIMAR

SEQ ID NO: 15359 - protein, 201 aa, Streptomyces griseus
  misc_feature (1)..(201): sp|B1VSG4|GCH1_STRGG GTP cyclohydrolase 1 OS=Streptomyc es griseus subsp. griseus (strain JCM 4626 / NBRC 13350 ) OX=455632 GN=folE PE=3 SV=1
MTDPVTLDGQGSIGAFDEKRAEAAVRELLIAVGEDPDREGLRETPGRVARAYKEIFAGLYQEPEDVLTTTFDLGHDEMVLVKDIEVFSTCEHHLVPFRGVAHVGYIPATTGKITGLSKLARLVDVYARRPQVQERLTTQIAESLMSILEPRGVIVVVECEHMCMSMRGIRKPGAKTLTSAVRGQLRDPATRAEAMSLIMAR

SEQ ID NO: 15360 - protein, 201 aa, Streptomyces griseus; identical to SEQ ID NO: 15359
  misc_feature (1)..(201): tr|A0A2X2M7V9|A0A2X2M7V9_STRGR GTP cyclohydrolase 1 OS= Streptomyces griseus OX=1911 GN=folE_1 PE=3 SV=1

SEQ ID NO: 15361 - protein, 203 aa, Streptomyces guanduensis
  misc_feature (1)..(203): tr|A0A1H0FJ90|A0A1H0FJ90_9ACTN GTP cyclohydrolase 1 OS= Streptomyces guanduensis OX=310781 GN=folE PE=3 SV=1
MVDPVTLDGDGKPIGEFDEKRAEAAIRELLYAVGEDPEREGLRETPARVARAYREIFAGLWQQPEDVLTTTFDIGHDEMVLVKDIEVMSSCEHHLVPFVGVAHIGYIPATSGKITGLSKLARLVDVYARRPQVQERLTTQIADALMRILEPRGVIVVVECEHMCMTMRGVRKPGAKTLTSAVRGQLRDPATRSEAMSLIIGRG

SEQ ID NO: 15362 - protein, 204 aa, Streptomyces hainanensis
  misc_feature (1)..(204): tr|A0A4V2Y3M8|A0A4V2Y3M8_9ACTN GTP cyclohydrolase 1 OS= Streptomyces hainanensis OX=402648 GN=folE PE=3 SV=1
MTDPVTLPDQPGPGPIGEFDEKRAESAIRELLIAVGEDPDREGLRDTPARVARAYREIFAGLWQRPEDVLTTTFDLGHDEMVLVKDIEVLSSCEHHLVPFVGYAHIGYIPAASGKITGLSKLARLVDVFARRPQVQERLTTQIADSLMRILEPRGVIVVVECEHMCMTMRGVRKPGAKTTTSAVRGQLRDAATRAEAMSLILAR

SEQ ID NO: 15363 - protein, 200 aa, Streptomyces harbinensis
  misc_feature (1)..(200): tr|A0A1I6THU3|A0A1I6THU3_9ACTN GTP cyclohydrolase 1 OS= Streptomyces harbinensis OX=1176198 GN=folE PE=3 SV=1
MTDPVTAGTGHVGTFDEKRAENAVRELLIAVGEDPDREGLRDTPARVARAYREIFAGLWQEPEDVLTTTFDLGHDEMVLVKDIEVMSSCEHHLVPFVGKAHVGYIPSSSGKITGLSKLARLVDVYARRPQVQERLTTQIADSLMRILEPRGVIVVVECEHMCMTMRGVRKPGAKTTTSAVRGQLRDAATRAEAMSLILSR

SEQ ID NO: 15364 - protein, 201 aa, Streptomyces himastatinicus
  misc_feature (1)..(201): tr|D9WBV9|D9WBV9_9ACTN GTP cyclohydrolase 1 OS=Streptom yces himastatinicus ATCC 53653 OX=457427 GN=folE PE=3 S V=1
MTDPVTLDGESTIGVFDEKRAENAIRELLIAVGEDPDREGLRETPGRVARAYKEIFAGLRQEPEDVLTTTFDLGHDEMVLVKDIEVMSSCEHHLVPFVGVAHVGYIPSHDGKITGLSKLARLVDVFARRPQVQERLTTQIADSLMRILEPRGVIVVVECEHMCMTMRGVRKPGAKTLTSAVRGQLRDPATRAEAMSLIMAR

SEQ ID NO: 15365 - protein, 214 aa, Streptomyces himastatinicus
  misc_feature (1)..(214): tr|D9WJ58|D9WJ58_9ACTN GTP cyclohydrolase 1 OS=Streptom yces himastatinicus ATCC 53653 OX=457427 GN=folE PE=3 S V=1
MSEQLDATAARLVSSRDPEVRTRGTVDLARIEEAVRDILVAVGEDPDRRGLKETPRRVAHAYAELFAGLRVDPTDVLDTTFEEGHQELIMVCDIEVQSFCEHHLLPFLGRAHIGYVPGESGCVAGLSKLARLVEVYARRPQVQERLTSQIADCLHTTLDAAGVLVVVECEHTCMTMRGIRKAGARTVTSAVRGTLQSDPRTRNEAMELLRRTAV

SEQ ID NO: 15366 - protein, 205 aa, Streptomyces hoynatensis
  misc_feature (1)..(205): tr|A0A3A9Z3C7|A0A3A9Z3C7_9ACTN GTP cyclohydrolase 1 OS= Streptomyces hoynatensis OX=1141874 GN=folE PE=3 SV=1
MTDPVTLGERDSLRGAIGEFDEKRAEAAVRELLLAVGEDPDREGLRDTPARVARAYREIFAGLWQQPEDVLTTTFDLGHDEMVLVKDIEVMSSCEHHLVPFVGSAHIGYIPSTSGKITGLSKLARLVDVFARRPQVQERLTTQIADSLMRILEPRGVIVVVECEHMCMTMRGVRKPGAKTTTSAVRGQLRDPATRAEAMSLILAR

SEQ ID NO: 15367 - protein, 211 aa, Streptomyces hoynatensis
  misc_feature (1)..(211): tr|A0A3A9YSF8|A0A3A9YSF8_9ACTN GTP cyclohydrolase 1 OS= Streptomyces hoynatensis OX=1141874 GN=D7294_22690 PE=3 SV=1
MKGGGMAELEEAASPLPPKRVDVDAIETAVGDLLRGLGQGDKAEVMAQTPRRVAELYAQSINPGDIDIEEDFKVFDNPGLDDLILVNDVHYVSMCEHHLAPAFGIAHLGYVPDRKVAGYSKLKKGLNYLSRQPQLNERLVVQAVDFLESRLQPKGIGLILRSAHCCIALRTNAPSQEVVTVADLRGVLREDRYRQPLWSSAVAERPSFLGR

SEQ ID NO: 15368 - protein, 201 aa, Streptomyces hundungensis
  misc_feature (1)..(201): tr|A0A387HKQ8|A0A387HKQ8_9ACTN GTP cyclohydrolase 1 OS= Streptomyces hundungensis OX=1077946 GN=folE PE=3 SV=1
MTDPVTLDGEAKIGEFDEKRAENAVRELLIAVGENPDREGLQETPARVARAYREILAGLRQTPEEVLTTTFDLGHDEMVLVKDIEIVSLCEHHLLPFHGVAHVGYIPAESGKITGLSKLARLVDVFARRPQVQERLTTQVADSLMRILDARGAIVVIEAEHMCMSVRGIRKPGAKTTTSAVRGQLRDPATRSEAMSLIMAR

SEQ ID NO: 15369 - protein, 202 aa, Streptomyces hyalinus
  misc_feature (1)..(202): tr|A0A401YRM6|A0A401YRM6_9ACTN GTP cyclohydrolase 1 OS= Streptomyces hyalinus OX=516124 GN=folE PE=3 SV=1
MTIDPVTFDGSPAVGEFDQDRAERAVRELLLAVGENPDREGLKDTPARVARSYREIFAGLRQEPEDVLTTTFDLGHDELVLVKDIEVYSTCEHHLVTFHGVAHVGYIPSEDGQITGLSKLARLVDVYAKRPQVQERLTTQIADALVNILRPRGVIVVVECEHLCMTMRGIRKPGARTLTSAVRGQLLNAATRAEAMSLILSR

SEQ ID NO: 15370 - protein, 201 aa, Streptomyces hygroscopicus; identical to SEQ ID NO: 15268
  misc_feature (1)..(201): tr|A0A0S2P3A5|A0A0S2P3A5_STRHL GTP cyclohydrolase 1 OS= Streptomyces hygroscopicus subsp. limoneus OX=264445 GN =folE PE=3 SV=1

SEQ ID NO: 15371 - protein, 201 aa, Streptomyces hygroscopicus
  misc_feature (1)..(201): tr|A0A1S6RLD9|A0A1S6RLD9_STRHY GTP cyclohydrolase 1 OS= Streptomyces hygroscopicus OX=1912 GN=folE PE=3 SV=1
MTDPVTLDGESPIGVFDEKRAEHAIRELLIAVGEDPDREGLRETPGRVARAYKEIFAGLRQEPEDVLTTTFDLGHDEMVLVKDIEVMSSCEHHLVPFVGVAHVGYIPSHDGKITGLSKLARLVDVFARRPQVQERLTTQIAESLMRILEPRGVIVVVECEHMCMTMRGVRKPGAKTLTSAVRGQLRDPATRAEAMSLIMAR

SEQ ID NO: 15372 - protein, 201 aa, Streptomyces incarnatus
  misc_feature (1)..(201): tr|A0A0G3AIX4|A0A0G3AIX4_9ACTN GTP cyclohydrolase 1 OS= Streptomyces incarnatus OX=665007 GN=folE PE=3 SV=1
MTDPVTLDGEGPIGEFDEKRAENAVRELLIAVGEDPDREGLRETPARVARAYREIFAGLWQKPEDVLTTTFDLGHDEMVLVKDIEVYSTCEHHLVPFRGVAHVGYIPSVTGKITGLSKLARLVDVYARRPQVQERLTTQIADSLMEILEPRGVIVVVECEHMCMSMRGIRKPGAKTITSAVRGQLRDAATRNEAMSLIMAH

SEQ ID NO: 15373 - protein, 201 aa, Streptomyces indicus
  misc_feature (1)..(201): tr|A0A1G9BUM0|A0A1G9BUM0_9ACTN GTP cyclohydrolase 1 OS= Streptomyces indicus OX=417292 GN=folE PE=3 SV=1
MTDPVTLDGASKIGEFDEKRAENAVRELLIAVGEDPDREGLLETPARVARAYREIFAGLWQKPEDVLTTTFDLGHDEMVLVKDIEVMSSCEHHLVPFHGVAHVGYIPSTDGKITGLSKLARLVDVYARRPQVQERLTTQIADSLMEILEPRGVIVVVECEHMCMTMRGVRKPGAKTLTSAVRGQLRDPATRAEAMSLIMAR

SEQ ID NO: 15374 - protein, 228 aa, Streptomyces ipomoeae
  misc_feature (1)..(228): tr|A0A540QPB9|A0A540QPB9_9ACTN GTP cyclohydrolase 1 OS= Streptomyces ipomoeae OX=103232 GN=folE PE=3 SV=1
MDIAASATASTSDTADIPARFTAIPSPQTARASTTPLRVVHDTDGIDLAEAERAAAQFLGALGIETDTESLRGTPGRMARAYAELFSPRPFDLTTFPNDEGYDELVLARSIPVRTVCEHHMLPVVGTAHVGYLPGHRILGLSKLARVVEHFACRPQVQERLTKQVADWLQAHLEPKGVGVVIAAEHSCMTLRGVQATGSSTLTSTLLGTLRNDARSRAEFLSLTGMLT

SEQ ID NO: 15375 - protein, 201 aa, Streptomyces ipomoeae
  misc_feature (1)..(201): tr|A0A540Q1H4|A0A540Q1H4_9ACTN GTP cyclohydrolase 1 OS= Streptomyces ipomoeae OX=103232 GN=folE PE=3 SV=1
MTDPVTLDGEGTIGEFDRKRAENAIRELLIAVGEDPDREGLRETPARVARAYRELLAGHGQEPEDVLTTTFDIGHDEMVLVKDIEIVSLCEHHMLPFHGVAHIGYIPAESGKITGLSKLARLVEVFARRLQVQERLTTQVADSLMKILEARGVIVVIEAEHMCMSVRGIRKPGAKTTTSAVRGQLRDATTRAEAMSLILAR

SEQ ID NO: 15376 - protein, 218 aa, Streptomyces iranensis
  misc_feature (1)..(218): tr|A0A060ZC10|A0A060ZC10_9ACTN GTP cyclohydrolase 1 OS= Streptomyces iranensis OX=576784 GN=folE PE=3 SV=1
MTELAPRATARIHPDAPEEPAPAGPTLRVVHESGDIDLAAAEAAAGQFLNALGISTSSESLRGTPGRMARAYAELFSPRPFDLTTFPNDEGYDELVLARRIPVRSVCEHHLLPFVGTAHVGYLPGGRILGLSKLARVVEHFACRPQVQERLTKQVADWLQTHLEPKGVGVVIEAEHSCMTLRGVQATGSSTMTSTLLGLLRSDARSRSEFLALTGAAS

SEQ ID NO: 15377 - protein, 196 aa, Streptomyces iranensis
  misc_feature (1)..(196): tr|A0A060ZZ01|A0A060ZZ01_9ACTN GTP cyclohydrolase 1 OS= Streptomyces iranensis OX=576784 GN=folE PE=3 SV=1
MSVTELDLDGDSSASRTTEDPLVGLARQLLEEIGEDPNRDGLRDTPARFARWWREFINYDPGSLGTLFESIGTSQLVVVSDIQVWSLCEHHLLPFNCSVTIAYRPTGQLLGLSKFARVAHQYAHKLQVQERLVDQIALEISTLSGTPDVAVIAKGEHLCMSMRGIKAAAQMTSTAYRGEFSTDPGLRGELFDLLRV

SEQ ID NO: 15378 - protein, 201 aa, Streptomyces jeddahensis
  misc_feature (1)..(201): tr|A0A177HKI5|A0A177HKI5_9ACTN GTP cyclohydrolase 1 OS= Streptomyces jeddahensis OX=1716141 GN=folE PE=3 SV=1
MTDPVTLDGEGPIGEFDEKRAENAVRELLIAVGEDPDREGLRETPGRVARAYREIFAGLWQKPEDVLTTTFDLGHDEMVLVKDIEVLSSCEHHLVPFVGFAHIGYIPSTDGKITGLSKLARLVDVFARRPQVQERLTTQIADSLMDILEPRGAIVVIECEHMCMTMRGVRKPGAKTITSAVRGQLRDPATRAEAMSLIMAK

SEQ ID NO: 15379 - protein, 201 aa, Streptomyces jietaisiensis; identical to SEQ ID NO: 15345
  misc_feature (1)..(201): tr|A0A1G7RJQ3|A0A1G7RJQ3_9ACTN GTP cyclohydrolase 1 OS= Streptomyces jietaisiensis OX=235987 GN=folE PE=3 SV=1

SEQ ID NO: 15380 - protein, 201 aa, Streptomyces kanamyceticus
  misc_feature (1)..(201): tr|A0A5J6GFT1|A0A5J6GFT1_STRKN GTP cyclohydrolase I Fol E OS=Streptomyces kanamyceticus OX=1967 GN=folE PE=4 SV =1
MTDPVTLDGEGAIGEFDEKRAENAVRELLIAVGEDPDREGLRETPGRVARAYKEIFAGLWQKPEDVLTTTFDLGHDEMVLVKDIEVQSSCEHHLVPFHGVAHVGYIPSADGKITGLSKLARLVDVYARRPQVQERLTTQVADSLMQILEPRGVIVVVECEHMCMSMRGVRKPGAKTITSAVRGQLRDPATRNEAMSLIMAR

SEQ ID NO: 15381 - protein, 201 aa, Streptomyces kanasensis
  misc_feature (1)..(201): tr|A0A124ECJ9|A0A124ECJ9_9ACTN GTP cyclohydrolase 1 OS= Streptomyces kanasensis OX=936756 GN=folE PE=3 SV=1
MTDPVTLDGESAIGVFDAKRAESAVRELLIAVGEDPDREGLRETPARVARAYREILSGLWQEPEDVLTTTFDLGHDEMVLVKDIEIVSLCEHHLLPFHGVAHVGYIPAESGKITGLSKLARLVEVYARRPQVQERLTTQIADSLMRILEARGAIVVIEAEHMCMSVRGIRKPGAKTTTSAVRGQLRDGSTRAEAMSLIMAR

SEQ ID NO: 15382 - protein, 201 aa, Streptomyces kasugaensis
  misc_feature (1)..(201): tr|A0A4Q9HR45|A0A4Q9HR45_STRKA GTP cyclohydrolase 1 OS= Streptomyces kasugaensis OX=1946 GN=folE PE=3 SV=1
MTDPVTLDSDGTIGAFDEKRAENAVRELLIAVGEDPDREGLLETPARVARAYKEIFAGLWQEPADVLTTTFDIGHDEMVLVRDIEVFSTCEHHLVPFHGVAHVGYIPSADGKITGLSKLARLVDVYARRPQVQERLTTQIADSLMQILEPRGVIVVVECEHMCMSMRGIRKPGAKTITSAVRGQLRDAATRSEAMSLIIGR

SEQ ID NO: 15383 - protein, 202 aa, Streptomyces katrae
  misc_feature (1)..(202): tr|A0A0F4JTR1|A0A0F4JTR1_9ACTN GTP cyclohydrolase 1 OS= Streptomyces katrae OX=68223 GN=folE PE=3 SV=1
MTDPVTLTGDEGTIGEFDEKRAEAAVRELLIAVGEDPDREGLLETPARVARAYKEIFAGLYQKPEDVLTTTFDLGHDEMVLVKDIEVMSSCEHHLVPFHGVAHVGYIPSADGKITGLSKLARLVDVFARRPQVQERLTTQIADSLMEILDPRGCIVVIECEHMCMTMRGVRKPGAKTITSAVRGQLRDPATRNEAMSLIMAR

SEQ ID NO: 15384 - protein, 201 aa, Streptomyces klenkii
  misc_feature (1)..(201): tr|A0A3B0BSU7|A0A3B0BSU7_9ACTN GTP cyclohydrolase 1 OS= Streptomyces klenkii OX=1420899 GN=folE PE=3 SV=1
MTDPVTLDAERSVGAFDEKRAENAVRELLLAVGEDPDREGLRETPARVARAYKEIFAGLWQEPEDVLTTTFDLGHDEMVLVRDIEVYSTCEHHLVPFHGVAHVGYIPSTSGKITGLSKLARLVDVYARRPQVQERLTTQIADSLMEILEPRGVVVVIECEHMCMSMRGIRKPGAKTLTSAVRGQLRDPATRAEAMSLIMAR

SEQ ID NO: 15385 - protein, 201 aa, Streptomyces koyangensis; identical to SEQ ID NO: 15254
  misc_feature (1)..(201): tr|A0A385DDF0|A0A385DDF0_9ACTN GTP cyclohydrolase 1 OS= Streptomyces koyangensis OX=188770 GN=folE PE=3 SV=1

SEQ ID NO: 15386 - protein, 203 aa, Streptomyces lasaliensis
  misc_feature (1)..(203): tr|A0A4V6AW11|A0A4V6AW11_STRLS GTP cyclohydrolase 1 OS= Streptomyces lasaliensis OX=324833 GN=folE PE=3 SV=1
MTDPVTLDGDSGGARGEFDEKRAENAVRELLLAVGEDPDREGLKETPARVARAYREIFAGLWQKPEDVLTTTFDLGHDEMVLVKDIEVFSTCEHHLVPFRGVAHVGYIPSTSGKITGLSKLARLVDVYARRPQVQERLTTQIADSLMEILEPRGVIVVIECEHMCMSMRGIRKPGAKTLTSAVRGQLRDAATRNEAMSLIMAR

SEQ ID NO: 15387 - protein, 201 aa, Streptomyces laurentii
  misc_feature (1)..(201): tr|A0A160NZ53|A0A160NZ53_STRLU GTP cyclohydrolase 1 OS= Streptomyces laurentii OX=39478 GN=folE PE=3 SV=1
MTDPVTLDGEGTIGEYDEKRAEAAVRELLLAVGEDPDREGLRETPARVARAYKELFAGLWQKPEEVLTTTFDLGHDEMVLVKDIELMATCEHHLLPFHGVAHIGYIPAESGKITGLSKLARLVDVFARRPQVQERLTTQIADSLMEILEARGAIVVIEAEHMCMTLRGVRKPGAKTTTSAVRGQLRDATTRAEAMSLILAR

SEQ ID NO: 15388 - protein, 186 aa, Streptomyces laurentii
  misc_feature (1)..(186): tr|A0A160NS97|A0A160NS97_STRLU GTP cyclohydrolase 1 OS= Streptomyces laurentii OX=39478 GN=folE PE=3 SV=1
MSPDPLERIARELLLAIGEDPDREGLRDTPARYARWWREFSDYDPGTLDTSFLCASSAEAVSVSGIHLWSLCEHHLLPFSCEVTIGYLPREQVLGLSKFARIAQQHAHRLQVQERLTADIADSVEKLTGSADVAVVCHGEHLCMAMRGIRTPATMTTATWRGAFRDAAVRAEFLALQPARPHSAGR

SEQ ID NO: 15389 - protein, 285 aa, Streptomyces lavendulae
  misc_feature (1)..(285): tr|A0A2K8PLI1|A0A2K8PLI1_STRLA GTP cyclohydrolase 1 typ e 2 OS=Streptomyces lavendulae subsp. lavendulae OX=583 40 GN=SLAV_25785 PE=4 SV=1
MPRLSEVIAALDALWPPSRAEQWDAVGTVCGEPDAEVTRVLFAVDPVQEIVDEAVELGADLLVTHHPLYLRGTTTVEAGTFKGRVVHTLIKNDIALHVAHTNADTADPGVSDALAGALDLRVTGPLVPDPTDPAGRRGLGRICELDHPETLREFAARAASRLPSTAQGIRAAGDPDALIRTVAVSGGSGDSLFEQVRAAGVDAFLTADLRHHPASEARERSPLALVDAAHWATEWPWCEQAAAQLDAISERRGWGLRTHVSRTVTDPWTAHAPSVTSPSTSGAPN

SEQ ID NO: 15390 - protein, 201 aa, Streptomyces lavendulae
  misc_feature (1)..(201): tr|A0A5C8GTC9|A0A5C8GTC9_STRLA GTP cyclohydrolase 1 OS= Streptomyces lavendulae OX=1914 GN=folE PE=3 SV=1
MTDPVTLDSERPVGEFDEKRAENAVRELLFAIGEDPDREGLRETPARVARAYREIFAGLWQKPEDVLTTTFDLGHDEMVLVKDIEVYSTCEHHLVPFRGVAHVGYIPSVSGKITGLSKLARLVDVYARRPQVQERLTTQIADSLMEILEPRGVIVVVECEHMCMSMRGIRKPGAKTITSAVRGQLRDAATRNEAMSLIMAR

SEQ ID NO: 15391 - protein, 201 aa, Streptomyces leeuwenhoekii
  misc_feature (1)..(201): tr|A0A0F7VYS9|A0A0F7VYS9_9ACTN GTP cyclohydrolase 1 OS= Streptomyces leeuwenhoekii OX=1437453 GN=sle_32260 PE=3 SV=1
MTDPVTLDGEGQIGEFDEKRAENAVRELLIAVGEDPDREGLRETPARVARAYREIFAGLWQKPEDVLTTTFDIGHDEMVLVKDIEVYSTCEHHLVPFRGVAHVGYIPSTTGKITGLSKLARLVDVYARRPQVQERLTTQIADSLMEMLEPRGVIVVVECEHMCMSMRGIRKPGAKTITSAVRGQLRDVATRNEAMSLIMAR

SEQ ID NO: 15392 - protein, 201 aa, Streptomyces lincolnensis
  misc_feature (1)..(201): tr|A0A1B1MEP8|A0A1B1MEP8_STRLN GTP cyclohydrolase 1 OS= Streptomyces lincolnensis OX=1915 GN=folE PE=3 SV=1
MTDPVTLDGEGSIGEFDEKRAENAVRELLIAVGEDPDREGLRETPARVARAYREIFAGLWQQPEDVLTTTFDLGHDEMVLVKDIEVYSTCEHHLVPFRGVAHVGYIPAVSGKITGLSKLARLVDVFARRPQVQERLTTQIADSLMQILEPRGVIVVVECEHMCMSMRGIRKPGAKTITSAVRGQLRDAATRNEAMSLIMAR

SEQ ID NO: 15393 - protein, 204 aa, Streptomyces lividans
  misc_feature (1)..(204): tr|A0A076LX57|A0A076LX57_STRLI GTP cyclohydrolase 1 OS= Streptomyces lividans TK24 OX=457428 GN=folE PE=3 SV=1
MTATAALQVIEDVTGPDEVTGPDLEAAERAAREFLRALGVVVDGEGTRDTPGRMARGYAELLNARPFRMTTFPNDEGYDELVLARDIPLRSVCQHHMLPFVGVAHVGYLPGARILGLSKLARVVEHYACRPQVQERLTKQVADHLVEQLQPRGVGVVVEAEHTCMTLRGVRATGSRTVTSTLLGTLRDDAASRQEFLALTGVQR

SEQ ID NO: 15394 - protein, 201 aa, Streptomyces lividans; identical to SEQ ID NO: 15309
  misc_feature (1)..(201): tr|D6EQN2|D6EQN2_STRLI GTP cyclohydrolase 1 OS=Streptom yces lividans TK24 OX=457428 GN=folE PE=3 SV=1

SEQ ID NO: 15395 - protein, 203 aa, Streptomyces longwoodensis
  misc_feature (1)..(203): tr|A0A101QPS7|A0A101QPS7_9ACTN GTP cyclohydrolase 1 OS= Streptomyces longwoodensis OX=68231 GN=folE PE=3 SV=1
MTDPVTLDGASGGASGEFDEKRAENAVRELLLAVGEDPDREGLKETPARVARAYREIFAGLWQKPQDVLTTTFDIGHDEMVLVKDIEVFSTCEHHLVPFRGVAHVGYIPSSSGKITGLSKLARLVDVYARRPQVQERLTTQIADSLMEILEPRGVIVVIECEHMCMSMRGIRKPGAKTLTSAVRGQLRDAATRNEAMSLIMAR

SEQ ID NO: 15396 - protein, 201 aa, Streptomyces lunaelactis
  misc_feature (1)..(201): tr|A0A2R4T5T2|A0A2R4T5T2_9ACTN GTP cyclohydrolase 1 OS= Streptomyces lunaelactis OX=1535768 GN=folE PE=3 SV=1
MTDPVTLDGEGTIGIFDEKRAENAVRELLIAVGEDPDREGLRETPSRVARAYREIFAGLWQQPEDVLTTTFDLGHDEMVLVKDIEVMSSCEHHLVPFHGVAHVGYIPSADGKITGLSKLARLVDVFARRPQVQERLTTQIADSLMQILEPRGVIVVVECEHMCMTMRGVRKPGAKTITSAVRGQLRDPATRAEAMSLIMAR

SEQ ID NO: 15397 - protein, 201 aa, Streptomyces luteoverticillatus
  misc_feature (1)..(201): tr|A0A3Q9FVA7|A0A3Q9FVA7_STRLT GTP cyclohydrolase 1 OS= Streptomyces luteoverticillatus OX=66425 GN=folE PE=3 S V=1
MTDPVTLEAEGPIGEFDEKRAENAVRELLIAVGEDPDREGLRETPARVARAYKEIFAGLRQEPEDVLTTTFDLGHDEMVLVRDIEVYSTCEHHLVPFHGVAHVGYIPSTTGKITGLSKLARLVDVYARRPQVQERLTTQIADSLMDILEPRGVVVVIECEHMCMSMRGIRKPGAKTLTSAVRGQLRDPATRAEAMSLIMAR

SEQ ID NO: 15398 - protein, 201 aa, Streptomyces luteus
  misc_feature (1)..(201): tr|A0A086N185|A0A086N185_9ACTN GTP cyclohydrolase 1 OS= Streptomyces luteus OX=1915400 GN=folE PE=3 SV=1
MTDPVTLDGEGQIGEFDEKRAENAVRELLIAVGEDPDREGLRETPARVARAYKEMFAGLWQEPEDVLTTTFDLGHDEMVLVKDIEVFSTCEHHLVPFRGVAHVGYIPATNGKITGLSKLARLVDVYARRPQVQERLTTQIADSLMEILEPRGVIVVVECEHMCMSMRGIRKPGAKTLTSAVRGQLRDVATRNEAMSLIMAR

SEQ ID NO: 15399 - protein, 201 aa, Streptomyces lydicus
  misc_feature (1)..(201): tr|A0A3S9YEC6|A0A3S9YEC6_9ACTN GTP cyclohydrolase 1 OS= Streptomyces lydicus OX=47763 GN=folE PE=3 SV=1
MTDPVTLDVGGKIGTFDEKRAENAVRELLIAVGEDPDREGLLETPARVARAYKEIFAGLWQKPEDVLTTTFDLGHDEMVLVKDIELVSSCEHHLVPFVGVAHVGYIPSTDGKITGLSKLARLVDVYARRPQVQERLTTQIADSLMEILEPRGVIVVIECEHMCMTMRGVRKPGAKTTTSAVRGQLRDAATRAEAMSLILAR

SEQ ID NO: 15400 - protein, 201 aa, Streptomyces lydicus; identical to SEQ ID NO: 15303
  misc_feature (1)..(201): tr|A0A0D4DP48|A0A0D4DP48_9ACTN GTP cyclohydrolase 1 OS= Streptomyces lydicus OX=47763 GN=folE PE=3 SV=1

SEQ ID NO: 15401 - protein, 201 aa, Streptomyces malaysiense
  misc_feature (1)..(201): tr|A0A1J4Q3B3|A0A1J4Q3B3_9ACTN GTP cyclohydrolase 1 OS= Streptomyces malaysiense OX=1428626 GN=folE PE=3 SV=1
MTDPVTLDSERPVGEFDEKRAENAVRELLIAIGEDPDREGLRETPARVARAYQEIFAGLWQRPGDVLTTTFDLGHDEMVLVKDIEVYSTCEHHLVPFRGVAHVGYIPSVSGKITGLSKLARLVDVYARRPQVQERLTTQIADSLMEILEPRGVIVVVECEHMCMSMRGIRKPGAKTITSAVRGQLRDAATRNEAMSLIMAR

SEQ ID NO: 15402 - protein, 201 aa, Streptomyces malaysiensis; identical to SEQ ID NO: 15278
  misc_feature (1)..(201): tr|A0A291SSF0|A0A291SSF0_9ACTN GTP cyclohydrolase 1 OS= Streptomyces malaysiensis OX=92644 GN=folE PE=3 SV=1

SEQ ID NO: 15403 - protein, 201 aa, Streptomyces mangrovisoli
  misc_feature (1)..(201): tr|A0A1J4NXH5|A0A1J4NXH5_9ACTN GTP cyclohydrolase 1 OS= Streptomyces mangrovisoli OX=1428628 GN=folE PE=3 SV=1
MTDPVTLDGEAIIGEFDEKRAENAVRELLIAVGEDPDREGLRETPARVARAYREIFAGLRQQPEDVLTTTFDLGHDEMVLVKDIEVFSTCEHHLVPFRGVAHVGYIPATSGKITGLSKLARLVDVFARRPQVQERLTTQIADSLMEILEPRGVIVVVECEHMCMSMRGIRKPGAKTLTSAVRGQLRDAATRNEAMSLIMAR

SEQ ID NO: 15404 - protein, 214 aa, Streptomyces melanosporofaciens
  misc_feature (1)..(214): tr|A0A1H4KSC5|A0A1H4KSC5_STRMJ GTP cyclohydrolase 1 OS= Streptomyces melanosporofaciens OX=67327 GN=folE PE=3 S V=1
MTNAIYGASGLSPAAPPQPAAELSRPEVDAERVAVLVGQLLTALGENPDREGLAETPTRVAAWWTSFLSPDAATPTCFTEVHLSGQLVVVGGVSVWSLCEHHMLPMNLRVVAGYVPDGEAVGLSKFGRIAQRYAGRLQVQERFTRQVAEEITAAIGGKDVAVAVRGTHLCMSMRGVRMEEARTTTLQADGRFQTDPVLSAQFLTLATGQWGAVE

SEQ ID NO: 15405 - protein, 201 aa, Streptomyces melanosporofaciens
  misc_feature (1)..(201): tr|A0A1H4Q6U8|A0A1H4Q6U8_STRMJ GTP cyclohydrolase 1 OS= Streptomyces melanosporofaciens OX=67327 GN=folE PE=3 S V=1
MTDPVTLDGESPIGVFDEKRAENAIRELLIAVGEDPDREGLRETPGRVARAYKEIFAGLRQEPEDVLTTTFDLGHDEMVLVKDIEVMSSCEHHLVPFVGVAHVGYIPSHDGKITGLSKLARLVDVFARRPQVQERLTTQIAESLMRILEPRGVIVVVECEHMCMTMRGVRKPGAKTLTSAVRGQLRDSATRAEAMSLIMAR

SEQ ID NO: 15406 - protein, 201 aa, Streptomyces microflavus; identical to SEQ ID NO: 15281
  misc_feature (1)..(201): tr|A0A285DCM7|A0A285DCM7_STRMI GTP cyclohydrolase 1 OS= Streptomyces microflavus OX=1919 GN=folE PE=3 SV=1

SEQ ID NO: 15407 - protein, 201 aa, Streptomyces mirabilis
  misc_feature (1)..(201): tr|A0A1I2TLT2|A0A1I2TLT2_9ACTN GTP cyclohydrolase 1 OS= Streptomyces mirabilis OX=68239 GN=folE PE=3 SV=1
MTDPVTLDGEGVIGEFDEKRAENAVRELLIAVGEDPDREGLRETPGRVARAYREIFAGLWQKPEDVLTTTFDLGHDEMVLVKDIEVLSSCEHHLVPFVGVAHVGYIPSVDGKITGLSKLARLVDVYARRPQVQERLTTQIADSLMGILEPRGVIVVVECEHMCMSMRGVRKPGAKTITSAVRGQLRDPATRNEAMSLIMAR

SEQ ID NO: 15408 - protein, 201 aa, Streptomyces misionensis
  misc_feature (1)..(201): tr|A0A1H4ZJ23|A0A1H4ZJ23_9ACTN GTP cyclohydrolase 1 OS= Streptomyces misionensis OX=67331 GN=folE PE=3 SV=1
MTDPVTLDSERPVGEFDEKRAENAVRELLIAVGEDPDREGLRETPARVARAYKEIFAGLWQQPEDVLTTTFDLGHDEMVLVKDIEVYSTCEHHLVPFRGVAHVGYIPSVSGKITGLSKLARLVDVYARRPQVQERLTTQIADSLMEILEPRGVIVVVECEHMCMSMRGIRKPGAKTITSAVRGQLRDAATRNEAMSLIMAR

SEQ ID NO: 15409 - protein, 201 aa, Streptomyces misionensis
  misc_feature (1)..(201): tr|A0A5C6JWF1|A0A5C6JWF1_9ACTN GTP cyclohydrolase 1 OS= Streptomyces misionensis OX=67331 GN=folE PE=3 SV=1
MTDPVTLDSERPVGEFDEKRAENAVRELLIAVGEDPDREGLRETPARVARAYKEIFAGLWQQPEDVLTTTFDLGHDEMVLVKDIEVYSTCEHHLVPFRGVAHVGYIPSVSGKITGLSKLARLVDVYARRPQVQERLTTQIADSLMEILEPRGVIVVIECEHMCMSMRGIRKPGAKTITSAVRGQLRDAATRNEAMSLIMAR

SEQ ID NO: 15410 - protein, 202 aa, Streptomyces mobaraensis
  misc_feature (1)..(202): tr|M3CCB5|M3CCB5_STRMB GTP cyclohydrolase 1 OS=Streptom yces mobaraensis NBRC 13819 = DSM 40847 OX=1223523 GN=f olE PE=3 SV=1
MIDPVTLDGERAIGPFDEKRAEQAVRELLIAVGEDPDREGLRETPARVARAYKEIFAGLRQEPADVLTTTFDLGHDEMVLVRDIEVYSTCEHHLVPFHGVAHIGYIPATSGKITGLSKLARLVDVYARRPQVQERLTTQIADSLVEILEARGVVVVIECEHMCMSMRGIRKPGAKTITSAVRGQLRDPASRAEAMSLIMSAR

SEQ ID NO: 15411 - protein, 202 aa, Streptomyces nanshensis
  misc_feature (1)..(202): tr|A0A1E7LAE2|A0A1E7LAE2_9ACTN GTP cyclohydrolase 1 OS= Streptomyces nanshensis OX=518642 GN=folE PE=3 SV=1
MTDPVTLGGEGEFQPADFDEKRAENAVRELLIAVGEDPDREGLLETPARVTRAYKEMFAGLHQRPEDVLTTTFDLGHDEMVLVKDIEVFSTCEHHLVPFHGVAHVGYIPSADGKITGLSKLARLVDVYARRPQVQERLTTQIAEALMRILEPRGVIVVVECEHMCMSMRGIRKPGAKTLTSAVRGQLRDAATRSEAMSLILR

SEQ ID NO: 15412 - protein, 201 aa, Streptomyces nanshensis; identical to SEQ ID NO: 15299
  misc_feature (1)..(201): tr|A0A1E7LI95|A0A1E7LI95_9ACTN GTP cyclohydrolase 1 OS= Streptomyces nanshensis OX=518642 GN=folE PE=3 SV=1

SEQ ID NO: 15413 - protein, 201 aa, Streptomyces natalensis
  misc_feature (1)..(201): tr|A0A0D7CWJ6|A0A0D7CWJ6_9ACTN GTP cyclohydrolase 1 OS= Streptomyces natalensis ATCC 27448 OX=1240678 GN=folE P E=3 SV=1
MTDPVTLDGDGTIGVFDEKRAENAVRELLIAVGEDPDREGLLETPARVARAYKEILAGLWQTPEDVLTTTFDLGHDEMVLVKDIEIVSLCEHHLLPFHGVAHVGYIPAENGKITGLSKLARLVEVYARRPQVQERLTTQIADSLMRILEARGAIVVVEAEHMCMSVRGIRKPGAKTTTSAVRGQLRDASTRAEAMSLIMAR

SEQ ID NO: 15414 - protein, 201 aa, Streptomyces netropsis
  misc_feature (1)..(201): tr|A0A445N9Q5|A0A445N9Q5_STRNE GTP cyclohydrolase 1 OS= Streptomyces netropsis OX=55404 GN=folE PE=3 SV=1
MTDPVTLDIEGPVGEFDEKRAENAVRELLIAVGEDPDREGLRETPARVARAYKEIFAGLWQEPEDVLTTTFDIGHDEMVLVRDIEVYSTCEHHLVPFHGVAHVGYIPATSGKITGLSKLARLVDVYARRPQVQERLTTQIADSLMEILEPRGVVVVIECEHMCMSMRGIRKPGAKTLTSAVRGQLRDPATRAEAMSLIMAR

SEQ ID NO: 15415 - protein, 201 aa, Streptomyces nigra
  misc_feature (1)..(201): tr|A0A2S1IGB5|A0A2S1IGB5_9ACTN GTP cyclohydrolase 1 OS= Streptomyces nigra OX=1827580 GN=folE PE=3 SV=1
MTDPVTLDGEGRIGEFDEKRAEAAVRELLIAVGEDPDREGLRETPARVARAYRELLAGLRQDPEDVLTTTFDLGHDEMVLVKDIEIVSLCEHHMLPFHGVAHVGYIPAESGKITGLSKLARLVEVFARRLQVQERLTTQIADSLMRILEARGVIVVVEAEHMCMSVRGIRKPGAKTTTSAVRGQLRDATTRAEAMSLILAR

SEQ ID NO: 15416 - protein, 201 aa, Streptomyces nitrosporeus
  misc_feature (1)..(201): tr|A0A5J6FDB3|A0A5J6FDB3_9ACTN GTP cyclohydrolase I Fol E OS=Streptomyces nitrosporeus OX=28894 GN=folE PE=4 SV =1
MTDPVTLDGQGPIGEFDEKRAEAAVRELLIAVGEDPDREGLRETPGRVARAYKEIFAGLRQKPEDVLTTTFDLGHDEMVLVKDIEVFSTCEHHLVPFRGVAHVGYIPATSGKITGLSKLARLVDVYARRPQVQERLTTQIAESLMEILEPRGVIVVIECEHMCMSMRGIRKPGAKTLTSAVRGQLRDPATRAEAMSLIMAR

SEQ ID NO: 15417 - protein, 201 aa, Streptomyces niveus
  misc_feature (1)..(201): tr|A0A1U9QTT6|A0A1U9QTT6_STRNV GTP cyclohydrolase 1 OS= Streptomyces niveus OX=193462 GN=folE PE=3 SV=1
MTNPVKLDGEGVIGEFDEKRAENAVRELLIAVGEDPDREGLRETPGRVARSYREIFAGLWQRPEEVLTTTFDIGHDEMVLVKDIEVQSSCEHHLVPFHGVAHVGYIPSADGKITGLSKLARLVDVFARRPQVQERMTTQIADSLMKILEPRGVIVVVECEHMCMSMRGVRKPGAKTITSAVRGQLRDPVTRNEAMSLIMAR

SEQ ID NO: 15418 - protein, 210 aa, Streptomyces niveus
  misc_feature (1)..(210): tr|V6K586|V6K586_STRNV GTP cyclohydrolase 1 OS=Streptom yces niveus NCIMB 11891 OX=1352941 GN=folE PE=3 SV=1
MERQRNEAQMTNPVRLDGEGVIGEFDEKRAEAAVRELLIAVGEDPDREGLRETPERVARSYKEIFAGLWQRPEDVLTTTFDLGHDEMVLVKDIEVQSSCEHHLVPFHGVAHVGYIPSADGKITGLSKLARLVDVFARRPQVQERLTTQIADSLMKILDPRGVIVVIECEHMCMSMRGVRKPGAKTITSAVRGQLRDPATRNEAMSLIMAR

SEQ ID NO: 15419 - protein, 201 aa, Streptomyces nodosus
  misc_feature (1)..(201): tr|A0A0B5DKV9|A0A0B5DKV9_9ACTN GTP cyclohydrolase 1 OS= Streptomyces nodosus OX=40318 GN=folE PE=3 SV=1
MTDPVTLDGEGTIGEFDEKRAENAVRELLIAVGEDPDREGLRETPGRVARAYREIFAGLWQKPEDVLTTTFDLGHDEMVLVKDIEVFSTCEHHLVPFRGVAHVGYIPATSGKITGLSKLARLVDVFARRPQVQERLTTQIADSLMDILEPRGVIVVVECEHMCMSMRGIRKPGAKTITSAVRGQLRDAATRNEAMSLIMAR

SEQ ID NO: 15420 - protein, 201 aa, Streptomyces noursei
  misc_feature (1)..(201): tr|A0A2N8P514|A0A2N8P514_STRNR GTP cyclohydrolase 1 OS= Streptomyces noursei OX=1971 GN=folE PE=3 SV=1
MTDPVTLDVEGAIGTFDEKRAENAVRELLIAVGEDPDREGLLETPARVARAYKEIFAGLWQKPEDVLTTTFDLGHDEMVLVKDIEVVSNCEHHLVPFVGVAHVGYIPSTDGKITGLSKLARLVDVFARRPQVQERLTTQIADSLMKILEPRGVIVVIECEHMCMTMRGVRKPGAKTTTSAVRGQLRDPATRAEAMSLILAR

SEQ ID NO: 15421 - protein, 201 aa, Streptomyces noursei
  misc_feature (1)..(201): tr|A0A1B2GT93|A0A1B2GT93_STRNR GTP cyclohydrolase 1 OS= Streptomyces noursei ATCC 11455 OX=316284 GN=folE PE=3 SV=1
MTDPVTLDVEGAIGTFDEKRAENAVRELLIAVGEDPDREGLLQTPARVARAYKELFAGLWQKPEDVLTTTFDLGHDEMVLVKDIEVVSNCEHHLVPFVGVAHVGYIPSTDGKITGLSKLARLVDVFARRPQVQERLTTQIAESLMQILEPRGVIVVIECEHMCMTMRGVRKPGAKTTTSAVRGQLRDPATRAEAMSLILAR

SEQ ID NO: 15422 - protein, 206 aa, Streptomyces oceani
  misc_feature (1)..(206): tr|A0A1E7JVH1|A0A1E7JVH1_9ACTN GTP cyclohydrolase 1 OS= Streptomyces oceani OX=1075402 GN=folE PE=3 SV=1
MTDPVLLDGESAIPEGAIPEFDEKRAENAIRELLLAVGEDPDREGLRETPARVARAYRELFAGLRQRPEDVLTTTFDMGHDEMVLVRDIEVVSQCEHHLLPFHGVAHVGYIPSTTGKITGLSKLARLVEVYARRPQVQERLTTQIADSLLEILEPRGVIVIIECEHMCMSVRGVRKPGAKTMTSAVRGQLRDATTRAEAMSLIMSR

SEQ ID NO: 15423 - protein, 201 aa, Streptomyces olivaceus
  misc_feature (1)..(201): tr|A0A1D8SSR9|A0A1D8SSR9_STROV GTP cyclohydrolase 1 OS= Streptomyces olivaceus OX=47716 GN=folE PE=3 SV=1
MTDPVTLDGEGQIGEFDEKRAENAVRELLIAVGEDPDREGLRETPARVARAYRELLAGNTQEPEDVLTTTFDIGHDEMVLVKDIEIVSLCEHHMLPFHGVAHIGYIPAESGKITGLSKLARLVEVFARRLQVQERLTTQVADSLVKILEARGVIVVIEAEHMCMSVRGVRKPGAKTTTSAVRGQLRDATTRAEAMSLILAR

SEQ ID NO: 15424 - protein, 201 aa, Streptomyces olivochromogenes
  misc_feature (1)..(201): tr|A0A250VGV2|A0A250VGV2_STROL GTP cyclohydrolase 1 OS= Streptomyces olivochromogenes OX=1963 GN=folE PE=3 SV=1
MTDPVTLDGEGVIGEFDEKRAENAVRELLIAVGEDPDREGLRETPGRVARAYREIFAGLWQKPEDVLTTTFDLGHDEMVLVKDIEVLSSCEHHLVPFVGVAHVGYIPSTDGKITGLSKLARLVDVYARRPQVQERLTTQIADSLMEILEPRGVIVVVECEHMCMSMRGVRKPGAKTITSAVRGQLRDPATRNEAMSLIMAR

SEQ ID NO: 15425 - protein, 196 aa, Streptomyces olivochromogenes
  misc_feature (1)..(196): tr|A0A250VL26|A0A250VL26_STROL GTP cyclohydrolase 1 OS= Streptomyces olivochromogenes OX=1963 GN=folE2 PE=3 SV= 1
MSVTELDLDGDSAASRTTEDPLVEIARQLLAEIGEDPNRDGLRDTPARFARWWREFINYDPGSLGTLFESIGTSQLVVVSDIQVWSLCEHHLLPFNCSVTIAYRPTGQLLGLSKFARVAHQYAHRLQVQERLVDQIALEISTLSGTPDVAVIAKGEHLCMSMRGIKAAAQMTSTAYRGEFSTDSGLRAELFDLLRA

SEQ ID NO: 15426 - protein, 201 aa, Streptomyces ossamyceticus
  misc_feature (1)..(201): tr|A0A3N1LSW2|A0A3N1LSW2_9ACTN GTP cyclohydrolase 1 OS= Streptomyces ossamyceticus OX=249581 GN=folE PE=3 SV=1
MTDPVTLDGEGAIGEFDEKRAENAVRELLIAVGEDPDREGLRETPARVARAYKEIFAGLWQKPEDVLTTTFDIGHDEMVLVKDIEVYSTCEHHLVPFRGVAHVGYIPATSGKITGLSKLARLVDVYARRPQVQERLTTQIADSLMEILEPRGVIVVVECEHMCMSMRGIRKPGAKTLTSAVRGQLRDAATRNEAMSLIMAR

SEQ ID NO: 15427 - protein, 201 aa, Streptomyces pactum
  misc_feature (1)..(201): tr|A0A1S6J9E3|A0A1S6J9E3_9ACTN GTP cyclohydrolase 1 OS= Streptomyces pactum OX=68249 GN=folE PE=3 SV=1
MTDPVTLDGEGQIGEFDEKRAENAVRELLIAVGEDPDREGLRETPARVARAYRELLAGHAQEPEDVLTTTFDIGHDEMVLVKDIEIVSLCEHHMLPFHGVAHIGYIPAANGKITGLSKLARLVEVFARRLQVQERLTTQVADSLMRILEARGVIVVIEAEHMCMSVRGVRKPGAKTTTSAVRGQLRDATSRAEAMSLIVAR

SEQ ID NO: 15428 - protein, 201 aa, Streptomyces palmae
  misc_feature (1)..(201): tr|A0A4Z0HAL7|A0A4Z0HAL7_9ACTN GTP cyclohydrolase 1 OS= Streptomyces palmae OX=1701085 GN=folE PE=3 SV=1
MTDPVTLDGAGPIGVFDEKRAESAVRELLLAVGEDPDREGLRETPARVARAYAEIFAGLWQEPEDVLTTTFDLGHDEMVLVKDIEVYSTCEHHLVPFHGVAHVGYIPSQDGKITGLSKLARLVDVYARRPQVQERLTTQIAESLVRILEPRGVIVVVECEHMCMSMRGIRKPGAKTITSAVRGQLRDPASRSEAMSLIIGR

SEQ ID NO: 15429 - protein, 201 aa, Streptomyces parvulus
  misc_feature (1)..(201): tr|A0A191V151|A0A191V151_9ACTN GTP cyclohydrolase 1 OS= Streptomyces parvulus OX=146923 GN=folE PE=3 SV=1
MTDPVTLDGEGEIGEFDEKRAENAVRELLIAVGEDPDREGLRETPGRVARAYKEIFAGLWQQPEDVLTTTFDLGHDEMVLVKDIEVFSTCEHHLVPFRGVAHVGYIPSSSGKITGLSKLARLVDVFARRPQVQERLTTQIADSLMEILEPRGVIVVVECEHMCMSMRGIRKPGAKTLTSAVRGQLRDVATRNEAMSLIMAR

SEQ ID NO: 15430 - protein, 201 aa, Streptomyces parvus; identical to SEQ ID NO: 15325
  misc_feature (1)..(201): tr|A0A5D4JDY9|A0A5D4JDY9_9ACTN GTP cyclohydrolase 1 OS= Streptomyces parvus OX=66428 GN=folE PE=3 SV=1

SEQ ID NO: 15431 - protein, 201 aa, Streptomyces paucisporeus
  misc_feature (1)..(201): tr|A0A1M7HU73|A0A1M7HU73_9ACTN GTP cyclohydrolase 1 OS= Streptomyces paucisporeus OX=310782 GN=folE PE=3 SV=1
MTDPVTLDGEGRISEFDEKRAAAAVRELLLAVGEDPDREGLRETPNRVARAYREIFSGLWQEPEDVLTTTFDIGHDEMVLVKDIEVMSSCEHHLVPFVGVAHVGYIPSLSGKITGLSKLARLVDVYARRPQVQERLTTQIADSLMRILEPRGVIVVVECEHMCMTMRGVRKPGAKTITSAVRGQLRDPATRSEAMSLIIGR

SEQ ID NO: 15432 - protein, 206 aa, Streptomyces peucetius
  misc_feature (1)..(206): tr|A0A2D3UKR9|A0A2D3UKR9_STRC0 GTP cyclohydrolase 1 OS= Streptomyces peucetius subsp. caesius ATCC 27952 OX=316 280 GN=folE PE=3 SV=1
MTDQASTPAPEPVALRVVHQAQEADLAAAELAAGQFLQALGISTDSESLRGTPGRMARAYAELFSPRPFDLTTFPNDEGYDELVLARGIPLRSVCEHHLLPFVGTAHIGYLPGNRILGLSKLARVLEHFACRPQVQERLTKQVADWLQDQLEPKGVGVVIQAEHTCMTLRGALATGTTTMTSTLLGLLRTDGRSRSEFLALTGPHH

SEQ ID NO: 15433 - protein, 237 aa, Streptomyces peucetius
  misc_feature (1)..(237): tr|A0A2D3U340|A0A2D3U340_STRC0 GTP cyclohydrolase 1 OS= Streptomyces peucetius subsp. caesius ATCC 27952 OX=316 280 GN=folE PE=3 SV=1
MNDHLPQMNGPPPVAGLVGESLVPATDEIEWAAVSPRQITPEEWQRFEGHLKEIFEALGLAAGATATADTPRRFLRALFDATSGYEGDEKLVTAFQTECHGGSDCRISQIVEGPIPFFALCEHHALPFFGKAYVGYIAHEHILGLSKLTRLVRLFARRFSVQERIGRQLAESLQQILLPHGVAVHLEAVHLCTQMRGVREIESSTRTTHWRGTYDEDPQLRGEFFTLCGQRGLAGYG

SEQ ID NO: 15434 - protein, 201 aa, Streptomyces phaeoluteigriseus
  misc_feature (1)..(201): tr|A0A1V6MKL6|A0A1V6MKL6_9ACTN GTP cyclohydrolase 1 OS= Streptomyces phaeoluteigriseus OX=114686 GN=folE PE=3 S V=1
MTDPVTLDGEGLVGEFDEKRAENAVRELLMAVGENPDREGLRETPARVARAYREIFAGLWQQPEDVLTTTFDIGHDEMVLVKDIEVYSTCEHHLVPFRGVAHVGYIPATSGKITGLSKLARLVDVYARRPQVQERLTTQIADSLMEILEPRGVIVVVECEHMCMSMRGIRKPGAKTITSAVRGQLRDAATRNEAMSLIMAR

SEQ ID NO: 15435 - protein, 201 aa, Streptomyces pharetrae
  misc_feature (1)..(201): tr|A0A1Y2Q0Y3|A0A1Y2Q0Y3_9ACTN GTP cyclohydrolase 1 OS= Streptomyces pharetrae CZA14 OX=1144883 GN=folE PE=3 SV =1
MTDPVTLDGEGTIGEFDEKRAENAVRELLIAVGEDPDREGLRETPARVARAYRELLAGLWQEPEEVLTTTFDLGHDEMVLVKDIEIVSLCEHHLLPFHGVAHVGYIPAETGKITGLSKLARLVEVFARRPQVQERLTTQIADSLMRILEARGAIVVIEAEHMCMSVRGIRKPGAKTTTSAVRGQLRDSTTRAEAMSLILAR

SEQ ID NO: 15436 - protein, 226 aa, Streptomyces pini
  misc_feature (1)..(226): tr|A0A1I4KAW1|A0A1I4KAW1_9ACTN GTP cyclohydrolase 1 OS= Streptomyces pini OX=1520580 GN=folE PE=3 SV=1
MPAAPLRLTTGGARLFAAAIEKEDHMIDPVTLEGEGSVGEFDEKRAENAIRELLIAVGEDPDREGLRETPARVARAYREIFAGLRQRPEDVLTTTFDLGHDEMVLVKDIELLSSCEHHLLPFHGVAHVGYIPADSGKITGLSKLARLVEVFARRPQVQERLTTQVADSLMEILEARGVIVVIECEHMCMTVRGVRKPGAKTITSAVRGQLRDSATRAEAMSLIMAR

SEQ ID NO: 15437 - protein, 237 aa, Streptomyces platensis
  misc_feature (1)..(237): tr|A0A1Y2N2H9|A0A1Y2N2H9_STRPT GTP cyclohydrolase 1 OS= Streptomyces platensis OX=58346 GN=folE_4 PE=3 SV=1
MNDASEQMHSPPPVAGLVGERLVPVTDEVEWAAVSPREIAPEDWQRYEDHVKEIFQALGLAVGSAATADTPRRFLRALFDATSGYEGDEKLVTAFETECHGGSDCRISQIVEGPIPFFSLCEHHSLPFFGKAYVGYIAHEHILGLSKLTRLVRLFARRFSMQERIGRQLAGSLQQILQPHGVAVHLEAVHLCTQMRGVREIESSTRTTHWRGTYDEDPLLRAEFFTMCGQRGLPGHG

SEQ ID NO: 15438 - protein, 216 aa, Streptomyces platensis
  misc_feature (1)..(216): tr|A0A1Y2NBB3|A0A1Y2NBB3_STRPT GTP cyclohydrolase 1 OS= Streptomyces platensis OX=58346 GN=folE_2 PE=3 SV=1
MTQHPHTALHLAPGDSGIPAPAQPALRVVQETDAVDLAAAERAAGQFLHALGISTETESLRGTPGRMARAYAELFSPRPFDLTTFPNDEGYDELVLARSIPVRSVCEHHLLPFVGTAHVGYLPGRRILGLSKLARVVEHFACRPQVQERLTKQVADWLQTQLEPKGVGVVIEAEHSCMTLRGVQATGSSTLTSTLLGTLRNDARSRGEFLALAGLT

SEQ ID NO: 15439 - protein, 197 aa, Streptomyces pluripotens
  misc_feature (1)..(197): tr|A0A221P7R6|A0A221P7R6_9ACTN GTP cyclohydrolase 1 OS= Streptomyces pluripotens OX=1355015 GN=folE PE=3 SV=1
MSVTTWVQEGDVDSEEPREEDPLVGLARQLLKEIGENPDRDGLRDTPTRFARWWREFINYEPGSVGTLFESVDTKQLVIVSDIQVWSLCEHHLLPFNCSVTIAYRPTDRLLGLSKFARIAHRHAHKLQVQERLVSEIAEDIAQLSGAEDVAVIARGEHLCMTMRGIKAAAQMTSTAYRGAFGEDAALRAEMFNLLRP

SEQ ID NO: 15440 - protein, 201 aa, Streptomyces pluripotens
  misc_feature (1)..(201): tr|A0A221P002|A0A221P002_9ACTN GTP cyclohydrolase 1 OS= Streptomyces pluripotens OX=1355015 GN=folE PE=3 SV=1
MTDPVTLAGDGPIGEFDEKRAENAVRELLIAVGEDPDREGLRETPARVARAYQEIFAGLRQKPEDVLTTTFDLGHDEMVLVKDIEVLSSCEHHLVPFVGFAHVGYIPSVDGKITGLSKLARLVDVYARRPQVQERLTTQIADSLMKILEPRGVIVVVECEHMCMTMRGVRKPGAKTITSAVRGQLRDPATRNEAMSLIMAR

SEQ ID NO: 15441 - protein, 201 aa, Streptomyces populi
  misc_feature (1)..(201): tr|A0A2I0SHN6|A0A2I0SHN6_9ACTN GTP cyclohydrolase 1 OS= Streptomyces populi OX=2058924 GN=folE PE=3 SV=1
MTDPVTLDGEAAIGEFDEKRAENAVRELLLAVGEDPDREGLQETPARVARAYKEIFAGLRQRAEDVLTTTFDLGHDEMVLVKDIEVFSTCEHHLVPFRGVAHVGYIPSTSGKITGLSKLARLVDVYARRPQVQERLTTQIADSLMEILEPRGVIVVVECEHMCMSMRGIRKPGAKTITSAVRGQLRDAATRNEAMSLVMAR

SEQ ID NO: 15442 - protein, 201 aa, Streptomyces prasinopilosus
  misc_feature (1)..(201): tr|A0A1G6VZE9|A0A1G6VZE9_9ACTN GTP cyclohydrolase 1 OS= Streptomyces prasinopilosus OX=67344 GN=folE PE=3 SV=1
MTDPVTLGGEATLGEFDEKRAENAVRELLIAVGEDPDREGLQETPGRVARAYKEIFAGLWQKPEDVLTTTFDIGHDEMVLVKDIEVYSTCEHHLVPFRGVAHVGYIPSTSGKITGLSKLARLVDVYARRPQVQERLTTQIADSLMEILEPRGVIVVIECEHMCMSMRGIRKPGAKTLTSAVRGQLRDAATRNEAMSLIMAR

SEQ ID NO: 15443 - protein, 201 aa, Streptomyces prasinus
  misc_feature (1)..(201): tr|A0A5J6H032|A0A5J6H032_9ACTN GTP cyclohydrolase I Fol E OS=Streptomyces prasinus OX=67345 GN=folE PE=4 SV=1
MTDPVTLGGEATFGEFDEKRAENAVRELLIAVGEDPDREGLQETPARVARAYKEIFAGLLQKPEDVLTTTFDIGHDEMVLVKDIEVYSTCEHHLVPFRGVAHVGYIPSTSGKITGLSKLARLVDVYARRPQVQERLTTQIADSLMEILEPRGVIVVIECEHMCMSMRGIRKPGAKTLTSAVRGQLRDAATRNEAMSLIMAR

SEQ ID NO: 15444 - protein, 198 aa, Streptomyces prasinus
  misc_feature (1)..(198): tr|A0A5J6HA91|A0A5J6HA91_9ACTN GTP cyclohydrolase I Fol E OS=Streptomyces prasinus OX=67345 GN=folE PE=4 SV=1
MPSVTALRVVRDTGGVDLAEAERAAAQFLDALGIDTGTESLHNTPGRMARAYAELISPRPFDLTTFPNDEGYDELVLARSIPVRSVCEHHMLPFVGTAHVGYLPGHRILGLSKLARVVEHFACRPQVQERLTKQVADWLQTQLQPKGVGVVIEAEHTCMTLRGVQATGSSTLTSTLLGTLRHDARSRAEFLSLTGLTA

SEQ ID NO: 15445 - protein, 201 aa, Streptomyces pratensis; identical to SEQ ID NO: 15281
  misc_feature (1)..(201): tr|E8WG63|E8WG63_STRFA GTP cyclohydrolase 1 OS=Streptom yces pratensis (strain ATCC 33331 / IAF-45CD) OX=591167 GN=folE PE=3 SV=1

SEQ ID NO: 15446 - protein, 192 aa, Streptomyces pristinaespiralis
  misc_feature (1)..(192): tr|B5H7B4|B5H7B4_STRE2 GTP cyclohydrolase 1 OS=Streptom yces pristinaespiralis (strain ATCC 25486 / DSM 40338 / CBS 914.69 / JCM 4507 / NBRC 13074 / NRRL 2958 / 5647) OX=457429 GN=folE PE=3 SV=1
MRVVREAAEPDLAAAELAAGQFLEALGISTDSESLRGTPGRMARAYAELFSPRPFDLTTFPNDEGYDELVLARGIPLRSVCEHHLLPFVGTAHIGYLPGSRILGLSKLARVLEHFACRPQVQERLTKQVADWIQTQLEPKGVGVVIQAEHTCMTLRGAQATGTTTMTSTLLGLLRTDGRSRSEFLALTGPPR

SEQ ID NO: 15447 - protein, 201 aa, Streptomyces pristinaespiralis
  misc_feature (1)..(201): tr|B5HIA5|B5HIA5_STRE2 GTP cyclohydrolase 1 OS=Streptom yces pristinaespiralis (strain ATCC 25486 / DSM 40338 / CBS 914.69 / JCM 4507 / NBRC 13074 / NRRL 2958 / 5647) OX=457429 GN=folE PE=3 SV=1
MTDPVTLDGEGYLAEFDEKRAENAVRELLIAVGEDPDREGLRETPARVARAYREIFAGLWQQPEDVLTTTFDIGHDEMVLVKDIEVYSTCEHHLVPFRGVAHVGYIPSTTGKITGLSKLARLVDVFARRPQVQERMTTQIADSLMEILEPRGVIVVVECEHMCMSMRGIRKPGAKTITSAVRGQLRDPATRNEAMSLIMAH

SEQ ID NO: 15448 - protein, 201 aa, Streptomyces pseudovenezuelae
  misc_feature (1)..(201): tr|A0A117PQP2|A0A117PQP2_9ACTN GTP cyclohydrolase 1 OS= Streptomyces pseudovenezuelae OX=67350 GN=folE PE=3 SV= 1
MTDPVTLDVEGTIGEFDEKRAENAVRELLIAVGEDPDREGLRETPGRVARAYKEIFAGLWQKPEDVLTTTFDLGHDEMVLVKDIEVYSTCEHHLVPFRGVAHVGYIPATTGKITGLSKLARLVDVYARRPQVQERLTTQIADSLMEILEPRGVIVVVECEHMCMSMRGIRKPGAKTLTSAVRGQLRDAATRNEAMSLIMAR

SEQ ID NO: 15449 - protein, 196 aa, Streptomyces puniciscabiei
  misc_feature (1)..(196): tr|A0A1D7YJF0|A0A1D7YJF0_9ACTN GTP cyclohydrolase 1 OS= Streptomyces puniciscabiei OX=164348 GN=folE PE=3 SV=1
MSVTEVNLDGEQSVPATAEDRLVELARQLLEEIGEDPNRDGLRDTPERFARWWREFINYDPGSLGTLFESIGTSQLVVVSDIQVWSLCEHHLLPFNCSVTIAYRPTGQLLGLSKFARVAHQYAHRLQVQERLVDQIALEISTLSGTPDVAVIAKGEHLCMSMRGIKAAAQMTSTAYRGEFSTDSGLRAELFDLLRA

SEQ ID NO: 15450 - protein, 201 aa, Streptomyces puniciscabiei
  misc_feature (1)..(201): tr|A0A542UEA9|A0A542UEA9_9ACTN GTP cyclohydrolase 1 OS= Streptomyces puniciscabiei OX=164348 GN=folE PE=3 SV=1
MTDPVTLDGEGPIGEFDEKRAENAVRELLIAVGEDPDREGLRETPARVARAYKEIFAGLWQQPEDVLTTTFDLGHDEMVLVKDIEVYSTCEHHLVPFRGVAHVGYIPSVTGKITGLSKLARLVDVYARRPQVQERLTTQIADSLMEILEPRGVIVVVECEHMCMSMRGIRKPGAKTITSAVRGQLRDAATRNEAMSLIMAR

SEQ ID NO: 15451 - protein, 201 aa, Streptomyces qaidamensis
  misc_feature (1)..(201): tr|A0A143C3H9|A0A143C3H9_9ACTN GTP cyclohydrolase 1 OS= Streptomyces qaidamensis OX=1783515 GN=folE PE=3 SV=1
MTDPVTLDGEGQIGEFDEKRAENAVRELLIAVGEDPDREGLRETPARVARAYKEIFAGLWQKPEDVLTTTFDLGHDEMVLVKDIEVLSSCEHHLVPFVGVAHVGYIPSVEGKITGLSKLARLVDVYARRPQVQERLTTQIADSLMEILEPRGVIVVVECEHMCMSMRGVRKVGAKTITSAVRGQLRDPATRNEAMSLIMAR

SEQ ID NO: 15452 - protein, 201 aa, Streptomyces qinglanensis
  misc_feature (1)..(201): tr|A0A1E7KD21|A0A1E7KD21_9ACTN GTP cyclohydrolase 1 OS= Streptomyces qinglanensis OX=943816 GN=folE PE=3 SV=1
MTDPVTLDGESSNSAFDEKRAENAIRELLIAVGEDPDREGLLETPARVARAYREMFAGLNQRPEDVLTTTFDLGHDEMVLVKDIEVVSQCEHHLLPFHGMAHVGYIPSASGKITGLSKLARLVDVFARRPQVQERLTTQIADSLMRILEPRGVIVVIECEHMCMSVRGVRKPGAKTTTSAVRGQLRDATTRAEAMSLILAR

SEQ ID NO: 15453 - protein, 201 aa, Streptomyces qinglanensis
  misc_feature (1)..(201): tr|A0A1H9W6R2|A0A1H9W6R2_9ACTN GTP cyclohydrolase 1 OS= Streptomyces qinglanensis OX=943816 GN=folE PE=3 SV=1
MTDPVTLDGESPNSAFDEKRAENAIRELLIAVGEDPDREGLLETPARVARAYREMFAGLNQRPEDVLTTTFDLGHDEMVLVKDIEVVSQCEHHLLPFHGMAHVGYIPSASGKITGLSKLARLVDVFARRPQVQERLTTQIADSLMRILEPRGVIVVIECEHMCMSVRGVRKPGAKTTTSAVRGQLRDATTRAEAMSLILAR

SEQ ID NO: 15454 - protein, 201 aa, Streptomyces radiopugnans
  misc_feature (1)..(201): tr|A0A1H9CY91|A0A1H9CY91_9ACTN GTP cyclohydrolase 1 OS= Streptomyces radiopugnans OX=403935 GN=folE PE=3 SV=1
MIDPVTLEGDGSVGEFDEKRAENAIRELLIAVGEDPDREGLRETPARVARAYREIFAGLRQRPEDVLTTTFDLGHDEMVLVKDIELLSSCEHHLLPFHGVAHVGYIPADSGKITGLSKLARLVEVFARRPQVQERLTTQIADSLMEILEARGVIVVIECEHMCMTVRGVRKPGAKTITSAVRGQLRDSTTRAEAMSLIMAR

SEQ ID NO: 15455 - protein, 201 aa, Streptomyces rapamycinicus
  misc_feature (1)..(201): tr|A0A0A0NAX9|A0A0A0NAX9_STRRN GTP cyclohydrolase 1 OS= Streptomyces rapamycinicus (strain ATCC 29253 / DSM 415 30 / NRRL 5491 / AYB-994) OX=1343740 GN=folE PE=3 SV=1
MTDPVTLDGESPIGVFDEKRAENAIRELLIAVGEDPDREGLRETPGRVARAYKEIFAGLRQEPEDVLTTTFDLGHDEMVLVKDIEVMSSCEHHLVPFVGVAHVGYIPSHDGKITGLSKLARLVDVYARRPQVQERLTTQIADSLMRILEPRGVIVVVECEHMCMTMRGVRKPGAKTLTSAVRGQLRDPATRAEAMSLIMAR

SEQ ID NO: 15456 - protein, 218 aa, Streptomyces rapamycinicus
  misc_feature (1)..(218): tr|A0A0A0N6J9|A0A0A0N6J9_STRRN GTP cyclohydrolase 1 OS= Streptomyces rapamycinicus (strain ATCC 29253 / DSM 415 30 / NRRL 5491 / AYB-994) OX=1343740 GN=folE PE=3 SV=1
MTELAPRATARIRPHDPEEPAPAGPALRVVHESGDIDLAAAEAAAGQFLNALGISTSSESLRGTPGRMARAYAELFSPRPFDLTTFPNDEGYDELVLARRIPVRSVCEHHLLPFVGTAHVGYLPGGRILGLSKLARVVEHFACRPQVQERLTKQVADWLQTHLEPKGVGVVIEAEHSCMTLRGVQATGSSTMTSTLLGLLRSDARSRAEFLALTGATS

SEQ ID NO: 15457 - protein, 201 aa, Streptomyces regalis
  misc_feature (1)..(201): tr|A0A0X3VD15|A0A0X3VD15_9ACTN GTP cyclohydrolase 1 OS= Streptomyces regalis OX=68262 GN=folE PE=3 SV=1
MTDPVTLDGEGFIGEFDEKRAENAVRELLIAVGEDPDREGLRETPARVARAYRELLAGHTQEPEDVLTTTFDIGHDEMVLVKDIEIVSLCEHHMLPFHGVAHIGYIPAESGKITGLSKLARLVEVFARRLQVQERLTTQVADSLMKILEARGVIVVIEAEHMCMSVRGIRKPGAKTTTSAVRGQLRDATTRAEAMSLILAR

SEQ ID NO: 15458 - protein, 201 aa, Streptomyces resistomycificus
  misc_feature (1)..(201): tr|A0A0L8LB89|A0A0L8LB89_9ACTN GTP cyclohydrolase 1 OS= Streptomyces resistomycificus OX=67356 GN=folE PE=3 SV= 1
MTDPVTLDGVGSVGEFDEKRAENAVRELLIAVGEDPDREGLRETPARVARAYREIFAGLWQKPEDVLMTTFDLGHDEMVLVKDIEVYSTCEHHLVPFRGVAHVGYIPATSGKITGLSKLARLVDVYARRPQVQERLTTQIADSLMEILEPRGVIVVIECEHMCMSMRGIRKPGAKTITSAVRGQLRDATSRNEAMSLIMAR

SEQ ID NO: 15459 - protein, 196 aa, Streptomyces rimosus
  misc_feature (1)..(196): tr|A0A0M9XC35|A0A0M9XC35_STRRM GTP cyclohydrolase 1 OS= Streptomyces rimosus subsp. rimosus OX=132474 GN=ADK43_ 35850 PE=3 SV=1
MVKAAWERQEAVDVSVDAARLEELARQILIEIGEDPTREGLRETPRRYAKWWKEFVEYDAGKVDTLFESSTLGQTVMVSGMTVWSLCEHHLLPFSCDLTVAYKSGGVLLGLSKFARIAHKHAHKLQVQERLVVDIADEISDITGTDDLAVMGRGEHLCMTMRGIRTPSTMSSSIFRGVFDQSERARAELFAQLGVK

SEQ ID NO: 15460 - protein, 201 aa, Streptomyces rimosus; identical to SEQ ID NO: 9369
  misc_feature (1)..(201): tr|L8EQB8|L8EQB8_STRR1 GTP cyclohydrolase 1 OS=Streptom yces rimosus subsp. rimosus (strain ATCC 10970 / DSM 40 260 / JCM 4667 / NRRL 2234) OX=1265868 GN=folE PE=3 SV= 1

SEQ ID NO: 15461 - protein, 201 aa, Streptomyces rochei; identical to SEQ ID NO: 15352
  misc_feature (1)..(201): tr|A0A510D517|A0A510D517_STRRO GTP cyclohydrolase 1 OS= Streptomyces rochei OX=1928 GN=folE PE=3 SV=1

SEQ ID NO: 15462 - protein, 201 aa, Streptomyces roseochromogenus
  misc_feature (1)..(201): tr|V6KDL4|V6KDL4_STRRC GTP cyclohydrolase 1 OS=Streptom yces roseochromogenus subsp. oscitans DS 12.976 OX=1352 936 GN=folE PE=3 SV=1
MTDPVTLDGEGRIGEFDEKRAENAVRELLIAVGEDPDREGLRETPARVARAYKEIFAGLWQKPEDVLTTTFDLGHDEMVLVKDIEVYSTCEHHLVPFRGVAHVGYIPSTTGKITGLSKLARLVDVFARRPQVQERLTTQIADSLMTILEPRGVIVVIECEHMCMSMRGIRKPGAKTITSAVRGQLRNVATRNEAMSLIMAR

SEQ ID NO: 15463 - protein, 202 aa, Streptomyces roseus
  misc_feature (1)..(202): tr|A0A0J6XWL5|A0A0J6XWL5_9ACTN GTP cyclohydrolase 1 OS= Streptomyces roseus OX=66430 GN=folE PE=3 SV=1
MTDPVTLTGDEGTIGEFDEKRAQAAVRELLIAVGEDPDREGLLETPARVARAYKEIFAGLYQKPEEVLTTTFDLGHDEMVLVKDIEVMSNCEHHLVPFHGVAHVGYIPSTDGKITGLSKLARLVDVYARRPQVQERLTTQIADSLMEILEPRGVIVVVECEHMCMTMRGVRKPGAKTITSAVRGQLRDPATRNEAMSLIMAR

SEQ ID NO: 15464 - protein, 201 aa, Streptomyces rubellomurinus
  misc_feature (1)..(201): tr|A0A0F2TLK2|A0A0F2TLK2_STRR3 GTP cyclohydrolase 1 OS= Streptomyces rubellomurinus (strain ATCC 31215) OX=3591 31 GN=folE PE=3 SV=1
MIDPVTLDGPPAVGTFDQKRAENAIRELLLAVGEDPDREGLLETPARVARAYKEIFAGLWQEPEDVLTTTFDLGHDEMVLVKDIELTSVCEHHLVPFRGVAHVGYIPSTSGKITGLSKLARLVDVYARRPQVQERLTSQVADALMRILEPRGAIVVVECEHMCMSMRGIRKPGAKTITSCVRGQLRDPATRAEAMSLIIGR

SEQ ID NO: 15465 - protein, 202 aa, Streptomyces rubidus
  misc_feature (1)..(202): tr|A0A1H8DG87|A0A1H8DG87_9ACTN GTP cyclohydrolase 1 OS= Streptomyces rubidus OX=310780 GN=folE PE=3 SV=1
MTDPVTLLGATPAGEFDEKRAEAAVRELLIAVGEDPDREGLRETPARVARAYREIFAGLWQQPEDVLTTTFDLGHDEMVLVKDIEVMSSCEHHLVPFVGVAHVGYIPSTSGKITGLSKLARLVDVYARRPQVQERLTTQIADALMTILEPRGVIVVVECEHMCMTMRGVRKPGAKTLTSAVRGQLRDPATRSEAMSLIIGRG

SEQ ID NO: 15466 - protein, 201 aa, Streptomyces rubrolavendulae; identical to SEQ ID NO: 15328
  misc_feature (1)..(201): tr|A0A1D8G463|A0A1D8G463_9ACTN GTP cyclohydrolase 1 OS= Streptomyces rubrolavendulae OX=285473 GN=folE PE=3 SV= 1

SEQ ID NO: 15467 - protein, 279 aa, Streptomyces rubrolavendulae
  misc_feature (1)..(279): tr|A0A1D8FZK7|A0A1D8FZK7_9ACTN Putative GTP cyclohydrol ase 1 type 2 OS=Streptomyces rubrolavendulae OX=285473 GN=A4G23_01452 PE=4 SV=1
MPRLTEVLAELDALWPPERAEQWDAVGTVCGDPDAEIDRVLFAVDPVQEIAEEAIRLGAQLVVTHHPLYLRGTTSVAASHFKGRVVHTLIKHDIALHVAHTNADTADPGVSDALAGALGLRVIGPLVPENGLGRICELDPPETLAAFATRAAERLPATAQGVRVAGDPDATVRRVAVSGGSGDSLFDAVRAAGVDAFLTADLRHHPASEAVQYSPLGLVDAAHWATEWPWCELAAAQLDEISDRRGWNLRVHVSKTVTDPWAAHHTSSSAHHTSPGAPN

SEQ ID NO: 15468 - protein, 201 aa, Streptomyces scabiei
  misc_feature (1)..(201): tr|C9Z0U3|C9Z0U3_STRSW GTP cyclohydrolase 1 OS=Streptom yces scabiei (strain 87.22) OX=680198 GN=folE PE=3 SV=1
MTDPVTLDGGGAIGEFDEKRAENAVRELLIAVGEDPDREGLKETPARVARAYQEIFAGLWQQPEDVLTTTFDLGHDEMVLVKDIEVYSTCEHHLVPFRGVAHVGYIPSTSGKITGLSKLARLVDVYARRPQVQERMTTQIADSLMEILEPRGVIVVVECEHMCMSMRGIRKPGAKTITSAVRGQLRDAATRNEAMSLIMAR

SEQ ID NO: 15469 - protein, 201 aa, Streptomyces scabiei
  misc_feature (1)..(201): tr|A0A100JWB5|A0A100JWB5_STRSC GTP cyclohydrolase 1 OS= Streptomyces scabiei OX=1930 GN=folE PE=3 SV=1
MTDPVTLDGGGTIGEFDEKRAENAVRELLIAVGEDPDREGLKETPARVARAYQEIFAGLWQKPEDVLTTTFDLGHDEMVLVKDIEVYSTCEHHLVPFRGVAHVGYIPSTSGKITGLSKLARLVDVYARRPQVQERMTTQIADSLMEILEPRGVIVVVECEHMCMSMRGIRKPGAKTITSAVRGQLRDAATRNEAMSLIMAR

SEQ ID NO: 15470 - protein, 202 aa, Streptomyces scabrisporus
  misc_feature (1)..(202): tr|A0A1T3P087|A0A1T3P087_9ACTN GTP cyclohydrolase 1 OS= Streptomyces scabrisporus OX=159449 GN=folE PE=3 SV=1
MTIDPVTFDGRPAVGEFDQDRAERAVRELLLAVGENPDREGLKDTPARVARSYREIFAGLRQEPEDVLTTTFDLGHDELVLVKDIEVYSTCEHHLVTFHGVAHVGYIPSEDGQITGLSKLARLVDVYAKRPQVQERLTTQIADALVNILRPRGVIVVVECEHLCMTMRGIRKPGARTLTSAVRGQLLNAATRAEAMSLILSR

SEQ ID NO: 15471 - protein, 201 aa, Streptomyces scopuliridis
  misc_feature (1)..(201): tr|A0A2T7TAZ9|A0A2T7TAZ9_9ACTN GTP cyclohydrolase 1 OS= Streptomyces scopuliridis RB72 OX=1440053 GN=folE PE=3 SV=1
MTDPVMLDGESPIREFDEKRAENAVRELLIAVGEDPDREGLRATPGRVARAYREIFAGLWQTPEEVLTTTFDIGHDEMVLVKDIEVMSSCEHHLVPFVGVAHVGYIPSSDGKITGLSKLARLVDVFARRPQVQERLTTQIADSLMEILDPRGVIVVVECEHMCMTMRGVRKPGAKTITSAVRGQLRVPATRAEAMSLIMAR

SEQ ID NO: 15472 - protein, 205 aa, Streptomyces sedi
  misc_feature (1)..(205): tr|A0A5C4UXG9|A0A5C4UXG9_9ACTN GTP cyclohydrolase 1 OS= Streptomyces sedi OX=555059 GN=folE PE=3 SV=1
MTDPVSWTGGERAPGRIGAFDEKRAENAVRELLLAVGEDPDREGLRDTPARVARAYREIFAGLWQRPEDVLTTTFDLGHDEMVLVKDIEVMSTCEHHLVPFVGVAHIGYIPSGSGKITGLSKLARLVDVFARRPQVQERLTTQVADSMMRILEPRGVIVVMECEHMCMTMRGVRKPGAKTTTSAVRGQLRTPATRAEAMSLILAR

SEQ ID NO: 15473 - protein, 211 aa, Streptomyces sedi
  misc_feature (1)..(211): tr|A0A5C4ULR9|A0A5C4ULR9_9ACTN GTP cyclohydrolase I Fol E OS=Streptomyces sedi OX=555059 GN=folE PE=4 SV=1
MTSFATGSTPDPSLAPTTNRAIAAIDTGRVAGLISQLLVELGEDPSREGLLGTPHRIAAWWSTFLSPGDAAPAACFAESRVSDQLVVVGGMSVWSLCEHHLLPMNLHVTAGYVPEGEMVGLSKFGRTARHFAGRLQVQERFTRQFAEHLAGVIGREDVAVAVRGTHLCMNMRGVRMEDARTTTVHTGGRFRSDPALNQQFLTLAAARWNAA

SEQ ID NO: 15474 - protein, 201 aa, Streptomyces seoulensis
  misc_feature (1)..(201): tr|A0A4P6TYG9|A0A4P6TYG9_STRSO GTP cyclohydrolase 1 OS= Streptomyces seoulensis OX=73044 GN=folE PE=3 SV=1
MTDPVTLAGDGTIGEFDEKRAENAVRELLIAVGEDPDREGLLDTPARVARAYREIFSGLRQRAEDVLTTTFDLGHDEMVLVKDIEVYSTCEHHLVPFRGVAHVGYIPSVTGKITGLSKLARLVDVYARRPQVQERLTTQIADSLMEILEPRGVIVVIECEHMCMSMRGIRKPGAKTITSAVRGQLRDATTRNEAMSLIMAR

SEQ ID NO: 15475 - protein, 201 aa, Streptomyces shenzhenensis
  misc_feature (1)..(201): tr|A0A3M0I4J1|A0A3M0I4J1_9ACTN GTP cyclohydrolase 1 OS= Streptomyces shenzhenensis OX=943815 GN=folE PE=3 SV=1
MTDPVTLDGEGTIGEFDEKRAENAVRELLIAVGEDPDREGLRETPARVARAYRELLAGLKQEPEDVLTTTFDLGHDEMVLVKDIEIVSLCEHHLLPFHGVAHVGYIPAESGKITGLSKLARLVEVFARRLQVQERLTTQIADSLVRILEARGVIVVIEAEHMCMSVRGIRKPGAKTTTSAVRGQLRDATTRAEAMSLILAR

SEQ ID NO: 15476 - protein, 201 aa, Streptomyces silvensis
  misc_feature (1)..(201): tr|A0A0W7WYD2|A0A0W7WYD2_9ACTN GTP cyclohydrolase 1 OS= Streptomyces silvensis OX=1765722 GN=folE PE=3 SV=1
MTDPVTLDGEGSIGEFDEKRAENAVRELLIAVGEDPDREGLRETPGRVARAYREIFAGLWQKPEDVLTTTFDLGHDEMVLVKDIEVTSCCEHHLVPFRGVAHVGYIPAATGKITGLSKLARLVDVYARRPQVQERMTTQIADSLMDILEPRGVIVVVECEHMCMSMRGIRKPGAKTITSAVRGQLRDAATRNEAMSLIMAH

SEQ ID NO: 15477 - protein, 201 aa, Streptomyces sioyaensis
  misc_feature (1)..(201): tr|A0A4Q1QLV9|A0A4Q1QLV9_9ACTN GTP cyclohydrolase 1 OS= Streptomyces sioyaensis OX=67364 GN=folE PE=3 SV=1
MTDPVTLDVDGKLGTFDEKRAENAVRELLIAVGEDPDREGLLETPARVARAYKEIFAGLWQKPEDVLTTTFDLGHDEMVLVKDIELVSSCEHHLVPFVGVAHVGYIPSADGKITGLSKLARLVDVFARRPQVQERLTTQIADSLMEILEPRGVIVVIECEHMCMTMRGVRKPGAKTTTSAVRGQLRDAATRAEAMSLILAR

SEQ ID NO: 15478 - protein, 201 aa, Streptomyces sp.
  misc_feature (1)..(201): tr|A0A5C8Q3H0|A0A5C8Q3H0_9ACTN GTP cyclohydrolase 1 OS= Streptomyces sp. IB2014 016-6 OX=2517818 GN=folE PE=3 S V=1
MTNPVKLDGEGVIGDFDEKRAENAVRELLIAVGEDPDREGLRETPGRVARSYREIFAGLWQRPEEVLTTTFDIGHDEMVLVKDIEVQSSCEHHLVPFHGVAHVGYIPSADGKITGLSKLARLVDVFARRPQVQERMTTQIADSLMKILEPRGVIVVVECEHMCMSMRGVRKPGAKTITSAVRGQLRDQVTRNEAMSLIMAR

SEQ ID NO: 15479 - protein, 201 aa, Streptomyces sp.
  misc_feature (1)..(201): tr|A0A1Q5NDI9|A0A1Q5NDI9_9ACTN GTP cyclohydrolase 1 OS= Streptomyces sp. CB02488 OX=1703920 GN=folE PE=3 SV=1
MTDPVTLDGQEPIGEFDEKRAAAAVRELLIAVGEDPDREGLRETPGRVARAYQEIFAGLYQAPEDVLTTTFDLGHDEMVLVKDIEVYSTCEHHLVPFHGVAHVGYIPATSGKITGLSKLARLVDVYARRPQVQERLTTQIAESLMTILEPRGVIVVVECEHMCMSMRGIRKPGAKTLTSAVRGQLRDPATRAEAMSLIMAR

SEQ ID NO: 15480 - protein, 218 aa, Streptomyces sparsogenes
  misc_feature (1)..(218): tr|A0A1R1SBT6|A0A1R1SBT6_9ACTN GTP cyclohydrolase 1 OS= Streptomyces sparsogenes DSM 40356 OX=1331668 GN=folE P E=3 SV=1
MTERPHRTATRIDPHDEETTVPARPALRVVHQPADIDLEAAEEAAGRFLTALGISTDSESLRGTPGRMARAYAELFSPRAFDLTTFPNDEGYDELVLARRIPVRSVCEHHLLPFVGTAHVGYLPGARILGLSKLARVVEHFACRPQVQERLTKQVADWLQTHLEPKGVGVVIEAEHSCMTLRGVQATGSSTMTSTLLGLLRSDARSRSEFLALTGATS

SEQ ID NO: 15481 - protein, 201 aa, Streptomyces sparsogenes
  misc_feature (1)..(201): tr|A0A1R1SJJ1|A0A1R1SJJ1_9ACTN GTP cyclohydrolase 1 OS= Streptomyces sparsogenes DSM 40356 OX=1331668 GN=folE P E=3 SV=1
MTDPITLDGEVPLGVFDEKRAERAIRELLIAVGEDPEREGLRETPARVARAYREIFAGLWQKPEEVLTTTFDLGHDEMVLVKDIEVMSSCEHHLVPFVGVAHVGYIPSSDGKITGLSKLARLVDVYARRPQVQERLTTQIADSLMRILEPRGVIVVVECEHMCMTMRGVRKPGAKTLTSAVRGQLHDPATRAEAMSLIMAR

SEQ ID NO: 15482 - protein, 201 aa, Streptomyces spectabilis
  misc_feature (1)..(201): tr|A0A516RB79|A0A516RB79_STRST GTP cyclohydrolase 1 OS= Streptomyces spectabilis OX=68270 GN=folE PE=3 SV=1
MTDPVTLAGEGSIGEFDEKRAENAVRELLIAVGEDPDREGLRDTPARVARAYREILSGLRQEPEDVLTTTFDLGHDEMVLVKDIEIVSLCEHHLLPFHGVAHVGYIPADSGKITGLSKLARLVDVYARRPQVQERLTTQIADSLMRILEARGAIVVVEAEHMCMSVRGIRKPGAKTTTSAVRGQLRDATTRAEAMSLILAR

SEQ ID NO: 15483 - protein, 201 aa, Streptomyces spinoverrucosus
  misc_feature (1)..(201): tr|A0A4Y3VSW6|A0A4Y3VSW6_9ACTN GTP cyclohydrolase 1 OS= Streptomyces spinoverrucosus OX=284043 GN=folE PE=3 SV= 1
MTDPVTLDGEGTIGEFDEKRAENAIRELLIAVGEDPDREGLRETPARVARAYKEIFAGLWQQPEDVLTTTFDIGHDEMVLVKDIEVYSTCEHHLVPFRGVAHVGYIPSTSGKITGLSKLARLVDVYARRPQVQERLTTQIADSLMEILEPRGVIVVVECEHMCMSMRGIRKPGAQTITSAVRGQLRDAATRNEAMSLIMAR

SEQ ID NO: 15484 - protein, 201 aa, Streptomyces spongiicola
  misc_feature (1)..(201): tr|A0A2S1Z2H4|A0A2S1Z2H4_9ACTN GTP cyclohydrolase 1 OS= Streptomyces spongiicola OX=1690221 GN=folE PE=3 SV=1
MTDPVTLDGEGSIGEFDEKRAENAVRELLIAVGEDPDREGLRETPSRVARAYREIFAGLWQQPEDVLTTTFDLGHDEMVLVKDIELVSCCEHHLVPFRGVAHVGYIPSTTGKITGLSKLARLVDVFARRPQVQERLTTQIADSLMEILEPRGVIVVIECEHMCMSMRGIRKPGAKTITSAVRGQLRDVATRNEAMSLIMAR

SEQ ID NO: 15485 - protein, 201 aa, Streptomyces stelliscabiei; identical to SEQ ID NO: 15285
  misc_feature (1)..(201): tr|A0A0L0JTE4|A0A0L0JTE4_9ACTN GTP cyclohydrolase 1 OS= Streptomyces stelliscabiei OX=146820 GN=folE PE=3 SV=1

SEQ ID NO: 15486 - protein, 202 aa, Streptomyces subrutilus
  misc_feature (1)..(202): tr|A0A1E5PSK7|A0A1E5PSK7_9ACTN GTP cyclohydrolase 1 OS= Streptomyces subrutilus OX=36818 GN=folE PE=3 SV=1
MTDPVTLTGEEGTIGVFDEKRAEAAVRELLIAVGEDPEREGLLETPARVARAYREILAGLWQQPEDVLTTTFDIGHDEMVLVKGIEIVSLCEHHLLPFHGIAHVGYIPAETGKITGLSKLARLVDVFARRPQVQERLTTQIADSLMRILEARGAIVVIEAEHMCMSVRGIRKPGAKTTTSAVRGQLRDPATRSEAMSLIMAR

SEQ ID NO: 15487 - protein, 201 aa, Streptomyces sviceus
  misc_feature (1)..(201): tr|B5HYD9|B5HYD9_9ACTN GTP cyclohydrolase 1 OS=Streptom yces sviceus ATCC 29083 OX=463191 GN=folE PE=3 SV=1
MTDPVTLDSDGSIGEFDEKRAENAVRELLIAVGEDPDREGLRETPGRVARAYREIFAGLWQKPEDVLTTTFDIGHDEMVLVKDIEVYSTCEHHLVPFRGVAHVGYIPATTGKITGLSKLARLVDVYARRPQVQERLTTQIADSLMEILEPRGVIVVVECEHMCMSMRGIRKPGAKTLTSAVRGQLRDAATRNEAMSLIMAR

SEQ ID NO: 15488 - protein, 201 aa, Streptomyces swartbergensis
  misc_feature (1)..(201): tr|A0A243RYH2|A0A243RYH2_9ACTN GTP cyclohydrolase 1 OS= Streptomyces swartbergensis OX=487165 GN=folE PE=3 SV=1
MTDPVTLDGEGQIGEFDEKRAENAVRELLIAVGEDPDREGLRETPARVARAYKEIFAGLWQKPEDVLTTTFDIGHDELVLVKDIEVYSTCEHHLVPFRGVAHVGYIPATSGKITGLSKLARLVDVYARRPQVQERLTTQIADSLMEILEPRGVIVVVECEHMCMSMRGIRKPGAKTLTSAVRGQLRDAATRNEAMSLIMAR

SEQ ID NO: 15489 - protein, 183 aa, Streptomyces swartbergensis
  misc_feature (1)..(183): tr|A0A243RKS7|A0A243RKS7_9ACTN GTP cyclohydrolase 1 OS= Streptomyces swartbergensis OX=487165 GN=folE PE=3 SV=1
MDLAEAERAAARFLAALGIDTSTESLLGTPGRMARAYAELFSPRPFDLTTFPNDEGYDELVLARSIPVRSVCEHHLLPFTGTAHVGYLPGHRILGLSKLARVVEHFACRPQVQERLTKQVADWLHAHLEPKGVGVVIEAEHTCMTLRGVQATGSSTLTSTLLGTLRHDARSRAEFLSLAGLHS

SEQ ID NO: 15490 - protein, 201 aa, Streptomyces tateyamensis
  misc_feature (1)..(201): tr|A0A2V4NIF8|A0A2V4NIF8_9ACTN GTP cyclohydrolase 1 OS= Streptomyces tateyamensis OX=565073 GN=folE PE=3 SV=1
MTDPVTLDGQATVGTFDQKRAENAIRELLIAVGEDPEREGLRETPARVARAYKEIFAGLWQQAEDVLTTTFDLGHDELVLVRDIELVSTCEHHLLTFHGVAHIGYIPSTSGKITGLSKLARLVDVYARRPQVQERLTTQIADSLMRVLEPRGAIVVVEAEHMCMTVRGIRKPGAKTLTSAVRGQLRDPATRAEAMSLIIGR

SEQ ID NO: 15491 - protein, 194 aa, Streptomyces thermoautotrophicus
  misc_feature (1)..(194): tr|A0A132MLB6|A0A132MLB6_9ACTN GTP cyclohydrolase 1 OS= Streptomyces thermoautotrophicus OX=1469144 GN=folE PE= 3 SV=1
MPDQALRPFDEARAEAAVRELLIAIGEDPDREGLRDTPRRVARAYREMFAGLWQRPEDVLTTTFDLGHDEMVLVKDIEVFSMCEHHLVPFHGVAHVGYVPSEEGRITGLSKLARLVEVYARRPQVQERMTSQIADALMRILQPRGVIVVIECEHLCMSMRGIRKPGSKTITSAVRGQLRDPATRAEAMSLILEN

SEQ ID NO: 15492 - protein, 202 aa, Streptomyces thermoautotrophicus
  misc_feature (1)..(202): tr|A0A132NF57|A0A132NF57_9ACTN GTP cyclohydrolase 1 OS= Streptomyces thermoautotrophicus OX=1469144 GN=folE PE= 3 SV=1
MPDAAQRRPVLQVVRDHGERDLAAAERAAAEFLTALGVELDRESLRDTPRRMAQAYAELLTPRPFNLTTFPNEEGYDQLVLAREIPVRSVCEHHLLPFVGVAHVAYLPGERILGLSKLARVVELFAHGPQVQERLTKQVADWLAEHLRPKGVGVVLEAEHLCMTLRGVRAAGTKTITSALHGTLREDSRSRQEFFSLVGVTP

SEQ ID NO: 15493 - protein, 201 aa, Streptomyces thermolilacinus
  misc_feature (1)..(201): tr|A0A1D3DRU9|A0A1D3DRU9_9ACTN GTP cyclohydrolase 1 OS= Streptomyces thermolilacinus SPC6 OX=1306406 GN=folE PE =3 SV=1
MTDAVTLDGEGTIGEFDEKRAENAVRELLIAVGEDPDREGLRETPARVARAYKEIFAGLWQEPEDVLTTTFDLGHDEMVLVKDIEVFSTCEHHLVPFRGVAHVGYIPSTSGKITGLSKLARLVDVYARRPQVQERLTTQIADSLMKILEPRGVIVVIECEHMCMSMRGIRKPGAKTLTSAVRGQLRDMATRAEAMSLIMAN

SEQ ID NO: 15494 - protein, 201 aa, Streptomyces tirandamycinicus
  misc_feature (1)..(201): tr|A0A2S1SV16|A0A2S1SV16_9ACTN GTP cyclohydrolase 1 OS= Streptomyces tirandamycinicus OX=2174846 GN=folE PE=3 S V=1
MTDPVTLDGEGTIGEFDEKRAENAVRELLIAVGEDPDREGLRETPARVARAYREIFAGLWQQPEDVLTTTFDLGHDEMVLVKDIELVSCCEHHLVPFRGVAHVGYIPSTTGKITGLSKLARLVDVFARRPQVQERLTTQIADSLMEILEPRGVIVVIECEHMCMSMRGIRKPGAKTITSAVRGQLRDVATRNEAMSLIMAR

SEQ ID NO: 15495 - protein, 201 aa, Streptomyces toyocaensis
  misc_feature (1)..(201): tr|A0A081XSB7|A0A081XSB7_STRTO GTP cyclohydrolase 1 OS= Streptomyces toyocaensis OX=55952 GN=folE PE=3 SV=1
MTDPVTLDGIAPVGEFDEQRARNAVRELLIAVGEDPDREGLLETPARVARAYREIFAGLWQKPEDVLTTTFDIGHDEMVLVKDIEVYSTCEHHLVPFRGVAHVGYIPSTSGKITGLSKLARLVDVYARRPQVQERLTTQIADSLMEILEPRGVIVVVECEHMCMSMRGIRKPGAKTITSAVRGQLRDAATRNEAMSLIMAR

SEQ ID NO: 15496 - protein, 201 aa, Streptomyces tsukubensis
  misc_feature (1)..(201): tr|A0A1V4A583|A0A1V4A583_9ACTN GTP cyclohydrolase 1 OS= Streptomyces tsukubensis OX=83656 GN=folE PE=3 SV=1
MTDAVTLDGEGSIGEFDEKRAADAVRELLLAVGEDPDREGLRETPARVARAYKEIFAGLWQKPEDVLTTTFDLGHDEMVLVKDIEVQSSCEHHLVPFVGVAHVGYIPSADGKITGLSKLARLVDVYARRPQVQERLTTQIAESLMEILEPRGVIVVVECEHMCMSMRGVRKPGAKTITSAVRGQLRDPATRNEAMSLIMAR

SEQ ID NO: 15497 - protein, 202 aa, Streptomyces tsukubensis
  misc_feature (1)..(202): tr|I2N3M3|I2N3M3_STRT9 GTP cyclohydrolase 1 OS=Streptom yces tsukubensis (strain DSM 42081 / NBRC 108919 / NRRL 18488 / 9993) OX=1114943 GN=folE PE=3 SV=1
MTDPVTLDGDAHPIGEFDEKRAENAIRELLIAVGEDPDREGLLETPARVARAYREIFAGLWQRPEDVLTTTFDLGHDEMVLVKDIEVMSSCEHHLVPFVGVAHVGYIPSADGKITGLSKLARLVDVFARRPQVQERLTTQIADSLMEILEPRGVIVVVECEHMCMTMRGVRKPGAKTITSAVRGQLRDPATRAEAMSLIMAR

SEQ ID NO: 15498 - protein, 201 aa, Streptomyces turgidiscabies
  misc_feature (1)..(201): tr|L7FAQ6|L7FAQ6_9ACTN GTP cyclohydrolase 1 OS=Streptom yces turgidiscabies Car8 OX=698760 GN=folE PE=3 SV=1
MTDPVTLDGEGTIGVFDEKRAASAVRELLIAVGEDPDREGLRETPGRVARAYREIFAGLWQRPEDVLTTTFDLGHDEMVLVKDIEVLSSCEHHLVPFVGVAHVGYIPSVDGKITGLSKLARLVDVYARRPQVQERLTTQVADSLMKILEPRGVIVVVECEHMCMSMRGVRKPGAKTITSAVRGQLRDPATRNEAMSLIMAR

SEQ ID NO: 15499 - protein, 201 aa, Streptomyces uncialis
  misc_feature (1)..(201): tr|A0A1Q4UXS0|A0A1Q4UXS0_9ACTN GTP cyclohydrolase 1 OS= Streptomyces uncialis OX=1048205 GN=folE PE=3 SV=1
MTDPVTLGGERTIGEFDEKRAENAIRELLFAIGEDPDREGLLDTPARVARAYREILAGLWQQPEDVLTTTFDIGHDEMVLVKDIEIVSLCEHHLLPFHGVAHVGYIPAESGKITGLSKLARLVEVFARRPQVQERLTTQVADSLMRILEARGAIVVIEAEHMCMSVRGIRKPGAKTTTSAVRGQLRDSTTRAEAMSLILAR

SEQ ID NO: 15500 - protein, 201 aa, Streptomyces variegatus
  misc_feature (1)..(201): tr|A0A0M2GP15|A0A0M2GP15_9ACTN GTP cyclohydrolase 1 OS= Streptomyces variegatus OX=284040 GN=folE PE=3 SV=1
MTDPVTLDGEGTIGEFDEKRAENAVRELLIAVGEDPDREGLRETPSRVARAYKEIFAGLWQQPEDVLTTTFDIGHDEMVLVKDIEVYSTCEHHLVPFRGVAHVGYIPSTSGKITGLSKLARLVDVYARRPQVQERLTTQIADSLMEILEPRGVIVVVECEHMCMSMRGIRKPGAKTLTSAVRGQLRDMATRNEAMSLIMAR

SEQ ID NO: 15501 - protein, 140 aa, Streptomyces varsoviensis
  misc_feature (1)..(140): tr|A0A0L8QFI7|A0A0L8QFI7_9ACTN GTP cyclohydrolase 1 (Fr agment) OS=Streptomyces varsoviensis OX=67373 GN=ADK38_ 33925 PE=3 SV=1
EPQDVLTTTFDLGHDEMVLVRDIEVFSTCEHHLVPFHGVAHVGYIPATSGKITGLSKLARLVDVFARRPQVQERLTTQIADSMMEILEPRGAIVVIECEHMCMSMRGIRKPGAKTLTSAVRGQLRDPATRSEAMSLIIGR

SEQ ID NO: 15502 - protein, 201 aa, Streptomyces venezuelae
  misc_feature (1)..(201): tr|F2RA59|F2RA59_STRVP GTP cyclohydrolase 1 OS=Streptom yces venezuelae (strain ATCC 10712 / CBS 650.69 / DSM 4 0230 / JCM 4526 / NBRC 13096 / PD 04745) OX=953739 GN=f olE PE=3 SV=1
MTDPVTLDGEGTIGEFDEKRAEAAVRELLIAVGEDPDREGLRETPARVARAYKEIFAGLWQVPEGVLTTTFDLGHDEMVLVKDIEVYSTCEHHLVPFRGVAHVGYIPSTSGKITGLSKLARLVDVYARRPQVQERLTTQVADSLMDILEPRGVIVVFECEHMCMSMRGIRKPGAKTITSAVRGQLRDPATRAEAMSLIMAR

SEQ ID NO: 15503 - protein, 201 aa, Streptomyces venezuelae
  misc_feature (1)..(201): tr|A0A0M7QTZ6|A0A0M7QTZ6_STRVZ GTP cyclohydrolase 1 OS= Streptomyces venezuelae OX=54571 GN=folE PE=3 SV=1
MTDPVTLDGEGTIGEFDEKRAENAVRELLIAVGEDPDREGLRETPARVARAYQEIFAGLRQQPEDVLTTTFDLGHDEMVLVKDIEVYSTCEHHLVPFRGVAHVGYIPSTSGKITGLSKLARLVDVYARRPQVQERLTTQVADSLMEILEPRGVIVVFECEHMCMSMRGIRKPGAKTITSAVRGQLRDPATRAEAMSLIMAR

SEQ ID NO: 15504 - protein, 201 aa, Streptomyces vietnamensis
  misc_feature (1)..(201): tr|A0A0B5HZL4|A0A0B5HZL4_9ACTN GTP cyclohydrolase 1 OS= Streptomyces vietnamensis OX=362257 GN=folE PE=3 SV=1
MTDPVTLDGEGTIGEFDEKRAENAVRELLIAVGEDPDREGLRETPARVARAYKEIFAGLWQQPEDVLTTTFDLGHDEMVLVKDIEVYSTCEHHLVPFRGVAHVGYIPSTSGKITGLSKLARLVDVYARRPQVQERLTTQVADSLMEMLEPRGVIVVFECEHMCMSMRGIRKPGAKTITSAVRGQLRDPATRAEAMSLIMAH

SEQ ID NO: 15505 - protein, 202 aa, Streptomyces vinaceus
  misc_feature (1)..(202): tr|A0A5J6JEW1|A0A5J6JEW1_STRVI GTP cyclohydrolase I Fol E OS=Streptomyces vinaceus OX=1960 GN=folE PE=4 SV=1
MTDPVTLTGDEGTIGEFDEKRAQAAVRELLIAVGEDPDREGLLETPARVARAYREILAGLRQEPEDVLTTTFDLGHDEMVLVKDIEIVSLCEHHLLPFHGVAHVGYIPAESGKITGLSKLARLVEVYARRPQVQERLTTQIADSLMRILEARGAIVVIEAEHMCMSVRGIRKPGAKTTTSAVRGQLRDPATRSEAMSLIIAR

SEQ ID NO: 15506 - protein, 201 aa, Streptomyces violaceoruber
  misc_feature (1)..(201): tr|A0A1V0UEE6|A0A1V0UEE6_STRVN GTP cyclohydrolase 1 OS= Streptomyces violaceoruber OX=1935 GN=folE PE=3 SV=1
MTDPVTLDGEGPIGAFDEKRAEAAVRELLLAVGEDPDREGLRETPGRVARAYKEIFAGLYQQPEDVLTTTFDLGHDEMVLVKDIEVFSTCEHHLVPFRGVAHVGYIPASTGKITGLSKLARLVDVYARRPQVQERLTTQIAESLMSILEPRGVIVVVECEHMCMSMRGIRKPGAKTLTSAVRGQLRDPATRAEAMSLIMAR

SEQ ID NO: 15507 - protein, 201 aa, Streptomyces violaceusniger
  misc_feature (1)..(201): tr|A0A0X3XC89|A0A0X3XC89_STRVO GTP cyclohydrolase 1 OS= Streptomyces violaceusniger OX=68280 GN=folE PE=3 SV=1
MTDPVTLDGESPIGVFDEKRAENAIRELLIAVGEDPDREGLRETPGRVARAYKEIFAGLRQEPEDVLTTTFDLGHDEMVLVKDIEVMSSCEHHLVPFVGVAHVGYIPSHDGKITGLSKLARLVDVFARRPQVQERLTTQIAESLMRILEPRGVIVVVECEHMCMTMRGVRKPGAKTLTSAVRGQLRDPATRAEAMSLIMAR

SEQ ID NO: 15508 - protein, 201 aa, Streptomyces violaceusniger
  misc_feature (1)..(201): tr|G2P1D7|G2P1D7_STRVO GTP cyclohydrolase 1 OS=Streptom yces violaceusniger Tu 4113 OX=653045 GN=folE PE=3 SV=1
MTDPVTLDGESPIGVFDEKRAENAIRELLIAVGEDPDREGLRETPGRVARAYKEIFAGLRQEPEDVLTTTFDLGHDEMVLVKDIEVMSSCEHHLVPFVGVAHVGYIPSHDGKITGLSKLARLVDVFARRPQVQERLTTQVAESLMRILEPRGVIVVVECEHMCMTMRGVRKPGAKTLTSAVRGQLRDPATRAEAMSLIMAR

SEQ ID NO: 15509 - protein, 202 aa, Streptomyces virginiae
  misc_feature (1)..(202): tr|A0A0L8M627|A0A0L8M627_STRVG GTP cyclohydrolase 1 OS= Streptomyces virginiae OX=1961 GN=folE PE=3 SV=1
MTDPVTLTGDEGTIGVFDEKRAEAAVRELLIAVGEDPDREGLLETPARVARAYKEIFAGLYQTPEEVLTTTFDLGHDEMVLVKDIEVMSSCEHHLVPFHGVAHVGYIPSTDGKITGLSKLARLVDVFARRPQVQERLTTQIADSLMEILEPRGAIVVIECEHMCMTMRGVRKPGAKTITSAVRGQLRDPATRNEAMSLIMAR

SEQ ID NO: 15510 - protein, 201 aa, Streptomyces viridifaciens; identical to SEQ ID NO: 9368
  misc_feature (1)..(201): tr|A0A1L9DLL5|A0A1L9DLL5_STRVF GTP cyclohydrolase 1 OS= Streptomyces viridifaciens OX=48665 GN=folE PE=3 SV=1

SEQ ID NO: 15511 - protein, 201 aa, Streptomyces viridochromogenes
  misc_feature (1)..(201): tr|D9X5B9|D9X5B9_STRVT GTP cyclohydrolase 1 OS=Streptom yces viridochromogenes (strain DSM 40736 / JCM 4977 / B CRC 1201 / Tue 494) OX=591159 GN=folE PE=3 SV=1
MTDPVTLDGEGQIGEFDEKRAENAVRELLIAVGEDPNREGLRETPARVARAYRELLAGLRQEPEDVLTTTFDLGHDEMVLVKDIEIVSLCEHHLLPFHGVAHVGYIPAETGKITGLSKLARLVEVFARRPQVQERLTTQIADSLMKILEARGAIVVIEAEHMCMSVRGIRKPGAKTTTSAVRGQLRDATTRAEAMSLILAR

SEQ ID NO: 15512 - protein, 201 aa, Streptomyces viridochromogenes
  misc_feature (1)..(201): tr|A0A0L8JKT7|A0A0L8JKT7_STRVR GTP cyclohydrolase 1 OS= Streptomyces viridochromogenes OX=1938 GN=folE PE=3 SV= 1
MTDPVTLDGEGTIGEFDEKRAENAVRELLIAVGEDPDREGLRETPARVARAYRELLAGMRQEPEDVLTTTFDLGHDEMVLVKDIELVSFCEHHLLPFHGVAHVGYIPAESGKITGLSKLARLVDVFARRPQVQERLTTQIADSLMKILEARGAIVVIEAEHMCMSLRGIRKPGAKTTTSAVRGQLRDATTRAEAMSLILAR

SEQ ID NO: 15513 - protein, 202 aa, Streptomyces viridosporus
  misc_feature (1)..(202): tr|A0A5J6FYN5|A0A5J6FYN5_STRVD GTP cyclohydrolase I Fol E OS=Streptomyces viridosporus T7A OX=665577 GN=folE PE =4 SV=1
MTNPVTLDDGTVPIGEFDEKRAENAVRELLIAIGEDPDREGLLETPARVARAYRELLAGLRQEPEDVLTTTFDLGHDEMVLVKDIEIVSLCEHHMLPFHGVAHVGYIPAETGKITGLSKLARLVEVFARRLQVQERLTTQVADSLMRILEARGVIVVIEAEHMCMSVRGVRKPGAKTTTSAVRGQLRDATTRAEAMSLILAR

SEQ ID NO: 15514 - protein, 202 aa, Streptomyces viridosporus; identical to SEQ ID NO: 15513
  misc_feature (1)..(202): tr|D6A7L5|D6A7L5_STRV1 GTP cyclohydrolase 1 OS=Streptom yces viridosporus (strain ATCC 14672 / DSM 40746 / JCM 4963 / KCTC 9882 / NRRL B-12104 / FH 1290) OX=566461 GN =folE PE=3 SV=1

SEQ ID NO: 15515 - protein, 201 aa, Streptomyces vitaminophilus
  misc_feature (1)..(201): tr|A0A0T6LS49|A0A0T6LS49_9ACTN GTP cyclohydrolase 1 OS= Streptomyces vitaminophilus OX=76728 GN=folE PE=3 SV=1
MTDPVTLDGSQGAAGVFDHERVENAVRELLIAVGEDPDRDGLRDTPARVARSYKEIFAGLWQDPHDVLTTTFDLGHDEMVLVKDIEVFSMCEHHLLPFHGVAHIGYIPASSGKITGLSKLARLVDVYARRPQVQERLTTQIADSLVSILEARGVIVVIECEHMCMSLRGIRKPGAKTTTSAVRGQLRDATSRAEAMSLILG

SEQ ID NO: 15516 - protein, 201 aa, Streptomyces wuyuanensis
  misc_feature (1)..(201): tr|A0A1H0BHE4|A0A1H0BHE4_9ACTN GTP cyclohydrolase 1 OS= Streptomyces wuyuanensis OX=1196353 GN=folE PE=3 SV=1
MTDPVTLDGEGTIGEFDEKRAENAVRELLIAVGEDPDREGLKETPARVARAYKEIFAGLWQQPEDVLTTTFDLGHDEMVLVKDIELVSCCEHHLVPFRGVAHVGYIPSTTGKITGLSKLARLVDVFARRPQVQERLTTQIADSLMEILEPRGVIVVIECEHMCMSMRGIRKPGAKTITSAVRGQLRDVATRNEAMSLIMAR

SEQ ID NO: 15517 - protein, 200 aa, Streptomyces xiamenensis
  misc_feature (1)..(200): tr|A0A0F7FV26|A0A0F7FV26_9ACTN GTP cyclohydrolase 1 OS= Streptomyces xiamenensis OX=408015 GN=folE PE=3 SV=1
MTDPVTAQAGQMGTFDEKRAENAIRELLIAVGEDPDREGLRDTPARVARAYREIFAGLWQEPEDVLTTTFDLGHDEMVLVKDIEVMSSCEHHLVPFVGKAHVGYIPSSSGKITGLSKLARLVDVFARRPQVQERLTTQIADSLMRILEPRGVIVVVECEHMCMTMRGVRKPGAKTTTSAVRGQLRDAATRAEAMSLILSR

SEQ ID NO: 15518 - protein, 201 aa, Streptomyces xinghaiensis
  misc_feature (1)..(201): tr|A0A3R7FTX8|A0A3R7FTX8_9ACTN GTP cyclohydrolase 1 OS= Streptomyces xinghaiensis OX=1038928 GN=folE PE=3 SV=1
MTDPVTLNSGRAVGEFDEKRAENAVRELLIAVGEDPDREGLLETPARVARAYREILGGLRQDPEDVLTTTFDLGHDELVLVKDIEIVSLCEHHLLPFHGVAHVGYIPAETGKITGLSKLARLVDVFARRPQVQERLTTQVADSLMRILEARGAIVVIEAEHMCMSVRGIRKPGAKTTTSAVRGQLRDATTRAEAMSLILAR

SEQ ID NO: 15519 - protein, 202 aa, Streptomyces yanglinensis
  misc_feature (1)..(202): tr|A0A1H5Z4H6|A0A1H5Z4H6_9ACTN GTP cyclohydrolase 1 OS= Streptomyces yanglinensis OX=310779 GN=folE PE=3 SV=1
MTDPITLDGDEYAGEFDEKRAEAAIRELLYAVGEDPDREGLRETPGRVARAYREIFSGLWQRPEDVLTTTFDLGHDEMVLVKDIEVMSSCEHHLVPFVGVAHIGYIPASSGKITGLSKLARLVDVYARRPQVQERLTTQVADAMMRILEPRGVIVVVECEHMCMTMRGVRKPGAKTITSAVRGQLRDPATRSEAMSLIIGRS

SEQ ID NO: 15520 - protein, 203 aa, Streptomyces yokosukanensis
  misc_feature (1)..(203): tr|A0A101P466|A0A101P466_9ACTN GTP cyclohydrolase 1 OS= Streptomyces yokosukanensis OX=67386 GN=folE PE=3 SV=1
MPDAGPDTPVDARVAGGPATERDLVAAELAAGELLTALGLPVDAPSVRATPGRLVRALAEMITPGEFTATTFPNDEGYTELVLQTGIPFRSLCEHHMLAFSGTAHVGYLPGERIVGLSKLARLVQHHAARPQVQERLTQQIGAWLDENLNARGVGVVLSAEHSCMSLRGVRVSGTRTVTSAWFGALREEPRERDAFLTLAGLG

SEQ ID NO: 15521 - protein, 201 aa, Streptomyces yokosukanensis
  misc_feature (1)..(201): tr|A0A101PE81|A0A101PE81_9ACTN GTP cyclohydrolase 1 OS= Streptomyces yokosukanensis OX=67386 GN=folE PE=3 SV=1
MIDPVTLDGEGRIGEFDEKRAENAVRELLIAVGEDPGREGLRETPARVARAYKEIFAGLWQKPEDVLTTTFDLGHDEMVLVKDIEVYSTCEHHLVPFRGVAHVGYIPSTSGKITGLSKLARLVDVYARRPQVQERLTTQIADSLMAILEPRGVIVVVECEHMCMSMRGIRKPGAKTITSAVRGQLRDVATRNEAMSLIMAR

SEQ ID NO: 15522 - protein, 201 aa, Streptomyces yunnanensis; identical to SEQ ID NO: 15420
  misc_feature (1)..(201): tr|A0A1M7CED3|A0A1M7CED3_9ACTN GTP cyclohydrolase 1 OS= Streptomyces yunnanensis OX=156453 GN=folE PE=3 SV=1

SEQ ID NO: 15523 - protein, 205 aa, Streptomyces zhaozhouensis
  misc_feature (1)..(205): tr|A0A286DWT2|A0A286DWT2_9ACTN GTP cyclohydrolase 1 OS= Streptomyces zhaozhouensis OX=1300267 GN=folE PE=3 SV=1
MTDPVSLTGGERAPGAIGAFDEKRAENAVRELLFAVGEDPDREGLRDTPARVARAYREIFAGLWQRPEDVLTTTFDLGHDEMVLVKDIEVMSTCEHHLVPFVGVAHIGYIPSASGKITGLSKLARLVDVFARRPQVQERLTTQVADSMMRILEPRGVIVVMECEHMCMTMRGVRKPGAKTTTSAVRGQLRTPATRAEAMSLILAR

SEQ ID NO: 15524 - protein, 201 aa, Streptomyces zinciresistens
  misc_feature (1)..(201): tr|G2GHS4|G2GHS4_9ACTN GTP cyclohydrolase 1 OS=Streptom yces zinciresistens K42 OX=700597 GN=folE PE=3 SV=1
MTDPVTLDGEGSVGEFDEKRAENAVRELLIAVGEDPDREGLRETPGRVARAYQEIFAGLRQRPEDVLTTTFDIGHDEMVLVKDIEVYSTCEHHLVPFRGVAHVGYIPATSGKITGLSKLARLVDVYARRPQVQERLTTQIADSLMDILEPRGVIVVVECEHMCMSMRGIRKPGAKTLTSAVRGQLRDAATRNEAMSLIMAR

SEQ ID NO: 15525 - protein, 211 aa, Streptomyces zinciresistens
  misc_feature (1)..(211): tr|G2G775|G2G775_9ACTN GTP cyclohydrolase 1 OS=Streptom yces zinciresistens K42 OX=700597 GN=folE PE=3 SV=1
MTTSVASSEPDLSPVPVAGPCGAAIDTCRVADLIAQLLVALGEDPAREGLAGTPDRVAAWWRAFLSPDDAATATCFTESQLSDQLVIVGGMSVWSLCEHHMLPMNLQVTAGYVPNGEVVGLSKFGRIAQHYAGRLQVQERFTQQFAEHLAGVIGREDVAVAVRGVHLCMSMRGVRMEAARTTTVHAGGQFRSDPVLNQQFVTLAAAQWNAA

SEQ ID NO: 15526 - protein, 201 aa, Streptomycetaceae bacterium
  misc_feature (1)..(201): tr|V6L3H7|V6L3H7_9ACTN GTP cyclohydrolase 1 OS=Streptom ycetaceae bacterium MP113-05 OX=1380770 GN=folE PE=3 SV =1
MTDPVTLDGEGTLGKFDEKRVQDAVRELLTAVGEDPDREGLRETPARVARAYREIFAGLWQEPEDVLTTTFDLGHDEMVLVKDIEVLSSCEHHLVPFVGSAHVGYIPSASGKITGLSKLARLVDVYARRPQVQERLTTQIADSLMEILEPRGAIVVIECEHMCMTMRGVRKPGAKTLTSAVRGQLRDPATRSEAMSLIMAR

SEQ ID NO: 15527 - protein, 196 aa, Streptosporangiaceae bacterium
  misc_feature (1)..(196): tr|A0A3A4A4E5|A0A3A4A4E5_9ACTN GTP cyclohydrolase 1 OS= Streptosporangiaceae bacterium YIM 75507 OX=2339229 GN= folE PE=3 SV=1
MAQHPHLDVDSDRIEKAVREILLAIGEDPNRDGLRETPARVARAYAEQFAGLGQEPEDVLNTVFDADHDEMVLVKDIEMVSTCEHHLVPFVGVAHVGYTPNEKGQITGLSKLARLVDVYARRPQVQERMTSQIADAIMRVLEPRGAIVVVEAEHLCMTMRGVRKPGAKTITSAVRGDFRECEKTRAEAMSLILGRR

SEQ ID NO: 15528 - protein, 196 aa, Streptosporangiaceae bacterium
  misc_feature (1)..(196): tr|A0A3A4BB44|A0A3A4BB44_9ACTN GTP cyclohydrolase 1 OS= Streptosporangiaceae bacterium YIM 75507 OX=2339229 GN= folE PE=3 SV=1
MDRELRTGRRDFEGAWLHARGLMDALGFPVDSPGMAGTARRLVQALDELTSGMHEDPGRHLLVTFPPEAEKQGMIAVTDIPFISVCEHHLLPFTGTADVAYVPAPGAPVVGLSKLARLVQGYAARPQLQERLGEQIVSAIADRLETSGAACRLRAEHACLTLRGARAAGARMVTIHVKGVFETDAEARAEFVELSS

SEQ ID NO: 15529 - protein, 193 aa, Streptosporangium canum
  misc_feature (1)..(193): tr|A0A1I4DV40|A0A1I4DV40_9ACTN GTP cyclohydrolase 1 OS= Streptosporangium canum OX=324952 GN=folE PE=3 SV=1
MSVKPLQVDSARIERAVREILIALGEDPDRDGLQDTPARVARAYAEQFAGLGQSPEDVLTTVFDVDHDEMVLVRDIEVYSTCEHHLVPFHGVAHVGYIPNEKGQVTGLSKLARLVDVYARRPQVQERMTSQIADALMSVLEPRGVIVVIECEHLCMTMRGVRKPGAKTITSAVRGDFRNSDKTRAEAMALILR

SEQ ID NO: 15530 - protein, 193 aa, Streptosporangium minutum; identical to SEQ ID NO: 15529
  misc_feature (1)..(193): tr|A0A243RW10|A0A243RW10_9ACTN GTP cyclohydrolase 1 OS= Streptosporangium minutum OX=569862 GN=folE PE=3 SV=1

SEQ ID NO: 15531 - protein, 201 aa, Streptosporangium nondiastaticum
  misc_feature (1)..(201): tr|A0A2P7PHG9|A0A2P7PHG9_9ACTN GTP cyclohydrolase 1 OS= Streptosporangium nondiastaticum OX=35764 GN=folE PE=3 SV=1
MTDPVTLDAERSVGAFDEKRAENAVRELLLAVGEDPDREGLRETPARVARAYKEIFAGLWQEPEDVLTTTFDLGHDEMVLVRDIEVYSTCEHHLVPFHGVAHVGYIPSTSGKITGLSKLARLVDVFARRPQVQERLTTQIADSLMEILEPRGVVVVIECEHMCMSMRGIRKPGAKTLTSAVRGQLRDPATRAEAMSLIMAR

SEQ ID NO: 15532 - protein, 193 aa, Streptosporangium roseum
  misc_feature (1)..(193): tr|D2BB29|D2BB29_STRRD GTP cyclohydrolase 1 OS=Streptos porangium roseum (strain ATCC 12428 / DSM 43021 / JCM 3 005 / NI 9100) OX=479432 GN=folE PE=3 SV=1
MSVKPLQVDSARIEKAVREILIALGEDPDRDGLQDTPARVARAYAEQFAGLGQSPEDVLTTVFDVDHDEMVLVRDIEVYSTCEHHLVPFHGVAHVGYIPNEKGQVTGLSKLARLVDVYARRPQVQERMTSQIADALMSVLEPRGVIVVIECEHLCMTMRGVRKPGAKTITSAVRGDFRNSDKTRAEAMALILR

SEQ ID NO: 15533 - protein, 193 aa, Streptosporangium sp.
  misc_feature (1)..(193): tr|A0A2Z3V7Y0|A0A2Z3V7Y0_9ACTN GTP cyclohydrolase 1 OS= Streptosporangium sp. 'caverna' OX=2202249 GN=folE PE=3 SV=1
MSGKPLEVDSARIEKAVREILIAIGEDPDRDGLQNTPARVARAYAEQFAGLRQTPEDVLTTIFDAGHDEMVLVRDIEVYSTCEHHLVPFHGVAHVGYIPNEKGQITGLSKLARLVDVYARRPQVQERMTSQIADALMSVLEPRGVIVVIECEHLCMTMRGVRKPGAKTTTSAVRGLFRDSDRTRAEAMALIIR

SEQ ID NO: 15534 - protein, 192 aa, Streptosporangium subroseum
  misc_feature (1)..(192): tr|A0A239NTV7|A0A239NTV7_9ACTN GTP cyclohydrolase 1 OS= Streptosporangium subroseum OX=106412 GN=folE PE=3 SV=1
MGKPLEVDSARIEKAVREILIAIGEDPDRDGLQDTPARVARAYAEQFAGLGQTPEDVLTTVFDAGHDEMVLVRDIEVYSTCEHHLVPFHGVAHVGYIPNEKGQITGLSKLARLVDVYARRPQVQERMTSQIADALMNVLEPRGVIVVIECEHLCMTMRGVRKPGAKTTTSAVRGLFRDSDRTRAEAMALIIR

SEQ ID NO: 15535 - protein, 218 aa, Subsaximicrobium wynnwilliamsii
  misc_feature (1)..(218): tr|A0A5C6ZND0|A0A5C6ZND0_9FLAO GTP cyclohydrolase 1 OS= Subsaximicrobium wynnwilliamsii OX=291179 GN=folE PE=3 SV=1
MKKELIEEIGDNHILTNIETPLLSNAFEKSDEEKIENIQRYFSKIMQELGLDLKDESLSGTPYRFAKMYVKELFYGLNPINKPKLSTFPNKYGYKKMLVEQDITIDSSCEHHFLPITGHAHIGYVPNEKVIGLSKINRLVDYYSHRPQVQERLCLQILNDLQETLNTKNVIVVLNAKHLCVSSRGIKDKDSSTTTIEFGGCFEDIENRNEFFLTLNKK

SEQ ID NO: 15536 - protein, 225 aa, Subsaximicrobium wynnwilliamsii
  misc_feature (1)..(225): tr|A0A5C6ZJB4|A0A5C6ZJB4_9FLAO GTP cyclohydrolase 1 OS= Subsaximicrobium wynnwilliamsii OX=291179 GN=folE PE=3 SV=1
MSIEKNIEELDLLGNDHIGTSADTPLRENAFELSDSEKIKIIRKDVHHILETLGLDLNDDSLKGTPNRVAKMFVNEIFSGLHPNNKPSASTFDNKYKYGEMLVEKNINLYSTCEHHLLPIVGKAHIAYISSGKVVGLSKMNRIVDYFAKRPQVQERLTIQIVKELQQVLKTEDVACVIDAKHLCVNSRGIRDVDSSTVTSEFGGQFKNKDTKREFLDYIKLDTAF

SEQ ID NO: 15537 - protein, 208 aa, Subtercola boreus
  misc_feature (1)..(208): tr|A0A3E0VDG7|A0A3E0VDG7_9MICO GTP cyclohydrolase 1 OS= Subtercola boreus OX=120213 GN=folE PE=3 SV=1
MAVDRGRVEAAVYELIAALGEDPSRAELESTPRRVAEAYSEFFSGVGVDARDQLGETYPFGGDIDGGFGGSVGPGAASGASPEPVLVKGLSFRSVCEHHLLPFRGTAHVAYVPRDRLVGLGRIPAVIEVLANRPQLQERLGEQIASTLSEGLDARGVLVVLEAAHGCVTLRGPQQVASTTVTVASRGSLSEPAARAELMGLIGAEVSS

SEQ ID NO: 15538 - protein, 222 aa, Subtercola boreus
  misc_feature (1)..(222): tr|A0A3E0W7M8|A0A3E0W7M8_9MICO GTP cyclohydrolase 1 OS= Subtercola boreus OX=120213 GN=folE PE=3 SV=1
MAVNRQRIEAAVLELIEAIGEDPQREGLVNTPRRVAEAYSEFFAGVGADARQALGETYPFDGSAPPEPVLVRGLAFRSVCEHHLLPFRGVAHVAYVPDDRLIGLGRIPAVIEVLANRPQLQERLGEEIASTLSEALDAAGVLVVLEASHGCVTMRGPQQAGSTTVTVASRGTLSEPAARAELMGLIGASAFGARAGAGMAAAAGSAAAVTAAAGRAGREVSL

SEQ ID NO: 15539 - protein, 227 aa, Subtercola sp.
  misc_feature (1)..(227): tr|A0A2S5W1Q1|A0A2S5W1Q1_9MICO GTP cyclohydrolase 1 OS= Subtercola sp. Z020 OX=2080582 GN=folE PE=3 SV=1
MAVDRQRIEAAVLELIEAIGDDPRREGLTNTPRRVADAYAEFFSGVGVDARAALGETFPFTGDAPREPVLVRGVTFRSICEHHLLPFRGTAHVAYVPNDRLVGLGRIPAVIEVLANRPQLQERLGEQIASTLSEALDAAGTLVVLEASHGCVTLRGPQQADSTTVTVASRGSLSEPAARAELMALIAAGDAAIHAPTPSGAPRAAAAPPTAPTPAAPSPATAHGVAL

SEQ ID NO: 15540 - protein, 199 aa, Subtercola vilae
  misc_feature (1)..(199): tr|A0A4V4RG54|A0A4V4RG54_9MICO GTP cyclohydrolase 1 OS= Subtercola vilae OX=2056433 GN=folE PE=3 SV=1
MVDRARIEAAVLEILEAIGEDPNREGLGSTPRRVAEAYSEFFSGVGVDARALLGETFAFDEAAPREPVLMRGITFRSVCEHHLLPFEGLAHIAYVPTDRLIGLGRLPAVVDALASRPQLQERLGEQLADTIADGLDATGVLVVLEASHGCVTLRGPRQVGSTTVTVASRGSLSEPAARSELMGLIGQPTAGATGHEAAL

SEQ ID NO: 15541 - protein, 218 aa, Succinatimonas hippei
  misc_feature (1)..(218): tr|E8LJN6|E8LJN6_SUCHY GTP cyclohydrolase 1 OS=Succinat imonas hippei (strain DSM 22608 / JCM 16073 / KCTC 1519 0 / YIT 12066) OX=762983 GN=folE PE=3 SV=1
MSEDKDLLPEARLVRNALIERGLETPWHDNGLDDVEKRRRIAACMTEIMETLGLDLQDDSLTKTPERVGKMFVNEIFSGLDYRNFPSITLIENKMHFDEMIKVKDISLTSTCEHHFVVIDGMAKVAYMPGTKIIGLSKINRIVQFFAKRPQVQERMTQQILVALQTLLDTKNVAVTITATHYCVKARGVKDPTSSTTTTALGGHFKHNPSSRHEFLTD

SEQ ID NO: 15542 - protein, 220 aa, Succinatimonas sp.
  misc_feature (1)..(220): tr|R5EUK9|R5EUK9_9GAMM GTP cyclohydrolase 1 OS=Succinat imonas sp. CAG:777 OX=1262974 GN=folE PE=3 SV=1
MEAQSDKELSSEAVMVRDALIECGLETPWHDNGLSSSQKKDIIMKNMSEIMNTLGLDLNDDSLRETPTRVARMFVDEVFSGLDYRNFPKVSVFDNKMHFDEMVKVDNITVTSTCEHHFVVMDGYAKVAYMPSDKIIGLSKINRIVQFFGHRPQVQERMTQQIKVALQTLLNTKNVAVSITATHYCVKSRGVRDQTSETTTTALGGHFKTNPSSRHEFLTD

SEQ ID NO: 15543 - protein, 267 aa, Succiniclasticum ruminis
  misc_feature (1)..(267): tr|A0A1G6MQE6|A0A1G6MQE6_9FIRM GTP cyclohydrolase FolE2 OS=Succiniclasticum ruminis OX=40841 GN=folE2 PE=3 SV= 1
MLNEALEKKKQFLKDVQSEQDSRNIPLKHVGISDLRWPLVLRDRQKGEQHTVATVSVAVDLPKDLRGTHMSRFVQCLQKLDIVNLSALEEVLDDLKESLLADRAFLKLEFPYFIQKEAPVSGLSSVMDLNCVYTMEKGTRFTQKVEVQVPIQTLCPCSREISAYGAHNQRAVASLEIEASEFVWIEELAEMADVGASAPVYGLLKRPDEKFVTEEAYDNPRFVEDAVREIALRLEADPRISWYRATVKSFESIHNHNAFACVEKGWK

SEQ ID NO: 15544 - protein, 267 aa, Succiniclasticum ruminis
  misc_feature (1)..(267): tr|A0A1I1ZQI0|A0A1I1ZQI0_9FIRM GTP cyclohydrolase FolE2 OS=Succiniclasticum ruminis DSM 9236 OX=1123323 GN=fol E2 PE=3 SV=1
MLNEALEKKKQFLKDVQSEQDSRNIPLKHVGISDLRWPLVLRDRQKGEQHTVATVSVAVDLPKDLRGTHMSRFVQCLQKLDIVNLSALEEVLDDLKESLLADRAFLKLEFPYFIQKEAPVSGLSSVMDLNCVYTMEKGTHFTQKVEVQVPIQTLCPCSREISAYGAHNQRAVASLEIEASEFVWIEELAEMADAGASAPVYGLLKRPDEKFVTEEAYDNPRFVEDAVREIALRLEADPRISWYRATVKSFESIHNHNAFACVEKGWK

SEQ ID NO: 15545 - protein, 221 aa, Succinivibrio dextrinosolvens
  misc_feature (1)..(221): tr|A0A1T4UZJ0|A0A1T4UZJ0_9GAMM GTP cyclohydrolase 1 OS= Succinivibrio dextrinosolvens DSM 3072 OX=1123324 GN=fo lE PE=3 SV=1
MTTQTNNSELSPEAILVRDALIRHGLESPWVDNGLTSEEKKDIIRSHMSSIMTTLGLDLSDDSLSETPSRVARMFVDEVFSGLDYRNFPKVSVFENKMHFDEMVKVCNITVTSTCEHHFVVMDGVAKVAYMPSDKIIGLSKVNRIVQFFGHRPQVQERLTQQIKVALQTLLDTKNVAVTITATHYCVKSRGVKDQTSETTTTALGGLFKTNPSSRHEFLTD

SEQ ID NO: 15546 - protein, 217 aa, Succinivibrio sp.
  misc_feature (1)..(217): tr|A0A3C1W1B2|A0A3C1W1B2_9GAMM GTP cyclohydrolase 1 OS= Succinivibrio sp. OX=2053619 GN=folE PE=3 SV=1
MNDNELSPEAILVRNALIEHGLETPWHDNGLSSEEKKTIIQEHMSSIMQTLGLDLSDDSLTQTPHRVARMFVDEIFSGLDYKNFPKVSVFENKMHFDEMVKVCNITITSTCEHHFVVMDGIAKVAYMPSDKIIGLSKVNRIVQFFGHRPQVQERLTQQIKVALQTLLNTKNVAVSITATHYCVKSRGVKDQTSVTTTTALGGLFKNNPSSRHEFLTD

SEQ ID NO: 15547 - protein, 364 aa, Sulfitobacter brevis
  misc_feature (1)..(364): tr|A0A1I1Z4M0|A0A1I1Z4M0_9RHOB GTP cyclohydrolase FolE2 OS=Sulfitobacter brevis OX=74348 GN=folE2 PE=3 SV=1
MNVVPTMPEKADRAAAEAALATLKTWAATASSAEIAALDAGVARLLSDAEPYPAFSRIYPDDFAAGGNYTSTLPDLQNGPASLIRGSRQQIQHVGISNFRLPIRFQTRDGDALTLETSVTGSVSLEADKKGINMSRIMRSFYKHAEATFSFEVIEAALDDYKADLESLDARIQMRFSFPMKINSLRSGLSGYQYYDIALELIETAGQRQKIIHLDYVYSSTCPCSLELSEHARSTRGQLATPHSQRSVARVSVVVNCDEDCLWFEDLIEACRRAVPTETQVMVKREDEQAFAELNAANPIFVEDAARLFCEQLLAEARVGDFRIVASHQESLHSHDAISILTEGPTFAARSIDPKLFNTLFHVG

SEQ ID NO: 15548 - protein, 363 aa, Sulfitobacter delicatus
  misc_feature (1)..(363): tr|A0A1G7LCS6|A0A1G7LCS6_9RHOB GTP cyclohydrolase FolE2 OS=Sulfitobacter delicatus OX=218672 GN=folE2 PE=3 SV= 1
MNIVTEVSETPDREAAEAALNTLRAWAETATPAELAALDPAMSRMLAPSDYPTLSRAYPSDFTAGANYMATLPDLQNGPASLIRGAQQLIQHVGISNFRLPIRYRSREGGDLQLETSVTGSVSLDAEKKGINMSRIMRSFYRHAEATFSFEVIEAALDDYKADLESLDARIQMRFSFPMKIGSLRSGLTGYQYYDIALELVEQGGKRKKLIHLDYVYSSTCPCSLELSEHARQTRGQLATPHSQRSVARISVETLDAGDCLWFEDLIDLCRRAVPTETQVMVKREDEQAFAELNAANPIFVEDAARLFCEQLLAEDRVGDFRIVASHQESLHSHDAISILTQGETFAAESIDPKLFNTLFHVG

SEQ ID NO: 15549 - protein, 363 aa, Sulfitobacter delicatus
  misc_feature (1)..(363): tr|A0A1G7Z673|A0A1G7Z673_9RHOB GTP cyclohydrolase FolE2 OS=Sulfitobacter delicatus OX=218672 GN=folE2 PE=3 SV= 1
MNAVTEMSEAPDEDAVKAALATLRAWSNHATAAELNALDPSMEPLLNGATYPALTRTYPENFSASANYVATLPDLQNGPSSLIRGAQQLIQHVGISNFRLPIRYRSREGSDLRLQTSVTGSVSLDAEKKGINMSRIMRSFYRHAEATFSFEVIEAALDDYKADLESLDARIQMRFSFPMKIESLRSGLTGYQYYDISLELCEQGGQRRKIVHLDYVYSSTCPCSLELSEHARQTRGQLATPHSQRSVARISVETIDSADCLWFEDLIEICRRAVPTETQVMVKREDEQAFAELNAANPIFVEDAARLFCAQLSADERIGDFRIVASHQGSLHSHDAISVLTQGDTFATRSIDPKLFSTLFHVG

SEQ ID NO: 15550 - protein, 292 aa, Sulfitobacter donghicola; identical to SEQ ID NO: 15108
  misc_feature (1)..(292): tr|A0A410XWR9|A0A410XWR9_9RHOB GTP cyclohydrolase FolE2 OS=Sulfitobacter donghicola OX=421000 GN=folE2 PE=3 SV =1

SEQ ID NO: 15551 - protein, 364 aa, Sulfitobacter donghicola
  misc_feature (1)..(364): tr|A0A073II94|A0A073II94_9RHOB GTP cyclohydrolase FolE2 OS=Sulfitobacter donghicola DSW-25 = KCTC 12864 = JCM 14565 OX=1300350 GN=folE2 PE=3 SV=1
MNISTPISPKPNRTEAEQALETLRAWAADVDASELAALDPAIAQVLTGGKAYPLFDREYPADFEIEAEYKASLPDLQNGPSSLIKGANQQIQHVGISNFRLPVQFETRSGGPITLETSVTGSVSLEADKKGINMSRIMRSFYKHAEQTFSFKVIEAALDDYITDLESFDARIQMRFSFPMKITSLRSGLEGYQYYDVALELVEQDGVRQQIIHLDYVYSSTCPCSLELSEHARATRNQLATPHSQRSVARISVLVKDGAECLWFENLIEACRRAVPTETQVMVKREDEQAFAELNAANPIFVEDAARLFCEQLLEDERVSDFRIIASHQESLHSHDAVSVLTEGPTFAQASFDPKLFNTLFHVG

SEQ ID NO: 15552 - protein, 363 aa, Sulfitobacter dubius
  misc_feature (1)..(363): tr|A0A1I2SU38|A0A1I2SU38_9RHOB GTP cyclohydrolase FolE2 OS=Sulfitobacter dubius OX=218673 GN=folE2 PE=3 SV=1
MNIVTEMSETPDRSAAEAALATLRAWADTATPAEIAALDPAMARMLAPAEYPALSRAYPEDFTAGDNYRASLPDLQNGPSSLIRGAQQLIQHVGISNFRLPIRYRSREGGDLRLETSVIGSVSLDAEKKGINMSRIMRSFYRHAEATFSFEVIEAALDDYKADLESLDARIQMRFSFPMKIGSLRSGLTGYQYYDIALELVEQDGQRKKIVHLDYVYSSTCPCSLELSEHARETRGQLATPHSQRSVARISVETNDAGDCLWFEDLVEICRRAVPTETQVMVKREDEQAFAELNAANPIFVEDAARLFCEQLLADGRVGDFRIVASHQESLHSHDAISVLTQGDTFAAQSIDPKMFNTLFHVG

SEQ ID NO: 15553 - protein, 364 aa, Sulfitobacter geojensis
  misc_feature (1)..(364): tr|A0A196QYC6|A0A196QYC6_9RHOB GTP cyclohydrolase FolE2 OS=Sulfitobacter geojensis OX=1342299 GN=folE2 PE=3 SV =1
MNVITSVEKAPERAKAEQALATLKAWATSATAAEIDALDPAVTRLLSQTGAYPEFNRVYPDDFAVGDTYHASLPDLQNGPSSLIRGAKQQIQHVGISNFRLPIGFHTRDNGDLTLETSVTGSVSLEADKKGINMSRIMRSFYKHAERTFSFEVIEAALDDYKADLESMDARIQMRFSFPMRIESLRSGLSGYQYYDVALELVEKDGVRRKMIHLDYVYSSTCPCSLELSEHARATRGQLATPHSQRSVARVSAVINEDDSCLWFEDLIDACRRAVPTETQVMVKREDEQAFAELNAANPIFVEDAARLFCEQLQAEPRIGDFRVIASHQESLHSHDAISVLTEGPTFEMQSIDPKLFNTLFHVG

SEQ ID NO: 15554 - protein, 364 aa, Sulfitobacter guttiformis
  misc_feature (1)..(364): tr|A0A420DJL3|A0A420DJL3_9RHOB GTP cyclohydrolase FolE2 OS=Sulfitobacter guttiformis OX=74349 GN=folE2 PE=3 SV =1
MNISTPITPTPDRVAAEKALETLRAWASSADATELATLDPAVAQMLTGGAAYPLLKRDYPADFAIEPEYKESLPDLQNGPSSLIKGAKQQIQHVGISNFRLPVQFETRDNGPLTLETSVTGTVSLEADKKGINMSRIMRSFYKHAESTFSFKVIEAALEDYITDLESFDARIQMRFSFPMKISSLRSGLTGYQYYDVALELVEHAGVRQQIIHLDYVYSSTCPCSLELSEHARATRNQLATPHSQRSVARVSVLLDNDAGVMWFEDLIEACRRAVPTETQVMVKREDEQAFAELNAANPVFVEDAARLFCEQLLADARISDFRVIASHQESLHSHDAVSVLTEGPTFAQSSFDPKLFNTLFHVG

SEQ ID NO: 15555 - protein, 363 aa, Sulfitobacter indolifex
  misc_feature (1)..(363): tr|A9EFJ7|A9EFJ7_9RHOB GTP cyclohydrolase FolE2 OS=Sulf itobacter indolifex HEL-45 OX=391624 GN=folE2 PE=3 SV=1
MTIETKVSETPDRKAAKAALATLRAWAQEATSAEVAALDPAVARMVNGAGYPAFNRIYPADFTGGANYKATLPDLQNGPSSLIRGAQQLIQHVGISNFRLPIRYHSRGAGDLQLETSVTGSVSLDAQKKGINMSRIMRSFYRHAEATFSFEVIEAALDDYKADLESLDARIQMRFSFPMKIESLRSGLAGYQYYDIALELVEQEGKRKKIVHLDYVYSSTCPCSLELSEHARATRGQLATPHSQRSVARISVEVLDAEGCLWFEDLIDFCRRAVPTETQVMVKREDEQAFAELNAANPIFVEDAARLFCEQLLADARVGDFRIVASHQESLHSHDAISVLTQGDTFAAQSFDPKLFNTLFHVG

SEQ ID NO: 15556 - protein, 363 aa, Sulfitobacter indolifex
  misc_feature (1)..(363): tr|A9E2N6|A9E2N6_9RHOB GTP cyclohydrolase FolE2 OS=Sulf itobacter indolifex HEL-45 OX=391624 GN=folE2 PE=3 SV=1
MNIVTEMSETPDRDAAEAALATLRAWADTATPAEIAALDPAMSQMLSSAEYPALSRAYPEDFTAGDNYRASLPDLQNGPSSLIRGAQQLIQHVGISNFRLPIRYRSREGGDLRLETSVTGSVSLDAEKKGINMSRIMRSFYRHAEATFSFEVIEAALDDYKTDLESLDARIQMRFSFPMKIASLRSGLTGYQYYDIALELVEQDGERKKIVHLDYVYSSTCPCSLELSEHARETRGQLATPHSQRSVARISVETQDEGDCLWFEDLIEICRRAVPTETQVMVKREDEQAFAELNAANPIFVEDAARLFCEQLLADGRVGDFRIVASHQESLHSHDAISVLTQGGTFAAQSIDPKLFNTLFHVG

SEQ ID NO: 15557 - protein, 362 aa, Sulfitobacter litoralis
  misc_feature (1)..(362): tr|A0A1H0M8I3|A0A1H0M8I3_9RHOB GTP cyclohydrolase FolE2 OS=Sulfitobacter litoralis OX=335975 GN=folE2 PE=3 SV= 1
MNIAATVIPDRDDAVAALDTLRAWARKADAIEIEALDPSLAKLLQNVESYPQFNRDYPGDFAVGDNYKATLPDLQNGPSSLIRGAKQQIQHVGISNFRLPMRFHTRDGGDLTLETSVTGSVSLEADKKGINMSRIMRSFYKHADEVFSFEVMEAALDDYKSDLESYDARIQMRFSFPVKIGSLRSGLSGYQYYDIALELVEAGGARKKIIHLDYVYSSTCPCSLELSEHARATRGQLATPHSQRSVARISVEVNCNETCLWFEDLIDLARRAVPTETQVMVKREDEQAFAELNAANPIFVEDAARLFCEQLQAEPRVGDFRVVASHQESLHSHDAISMLTQGETFAAQSIDPKLFSTLFHVG

SEQ ID NO: 15558 - protein, 364 aa, Sulfitobacter marinus
  misc_feature (1)..(364): tr|A0A1I6S022|A0A1I6S022_9RHOB GTP cyclohydrolase FolE2 OS=Sulfitobacter marinus OX=394264 GN=folE2 PE=3 SV=1
MNVIAPGSTKPDREAAVAALDTLRAWASKASQADMDALDPALARLLTKVDAYPEFNRIYPEDFAVGDNYKATLPDLQNGPSSLIRGAKQQIQHVGISNFRLPLRFHTRDDGDLTLETSVTGSVSLEADKKGINMSRIMRSFYKHGDQTFSFEVMEAALDDYKADLESLDARIQMRFSFPMKIESLRSGLSGYQYYDIVLELVEIAGLRKKIMHLDYVYSSTCPCSLELSEHARATRGQLATPHSQRSVARISVDVNYDAPCLWFEDLIEAARRAVPTETQVMVKREDEQAFAELNAANPIFVEDAARLFCEQLQADPRIGDFRVVASHQESLHSHDAISILTQGDTFAAQSIDPKLFTTLFHVG

SEQ ID NO: 15559 - protein, 364 aa, Sulfitobacter mediterraneus
  misc_feature (1)..(364): tr|A0A061SXL5|A0A061SXL5_9RHOB GTP cyclohydrolase FolE2 OS=Sulfitobacter mediterraneus OX=83219 GN=folE2 PE=3 SV=1
MNAITSVEKGPDRSDAEQALATLKAWAAGASATEIDALDPQVVRLLQGKGDYPKFNRDYPQDFKVDAAYKAGLPDLQNGPSSLIRGAKQQIQHVGISNFRLPIRFHTRNNGDLTLETSITGSVSLEADKKGINMSRIMRSFYKHAERTFSFHVIEAALDDYKSDLESFDARIQMRFSFPMKIESLRSGLSGYQYYDIALELVEKDGVRQKIIHLDYVYSSTCPCSLELSEHARATRNQLATPHSQRSVARISAVLEGDNSCLWFEDLIEACRRAVPTETQVMVKREDEQAFAELNAANPIFVEDAARLFCQQLQEDPRVGDFRVIASHQESLHSHDAISVLTEGPTFEMQSIDPKLFNTLFHVG

SEQ ID NO: 15560 - protein, 362 aa, Sulfitobacter pontiacus
  misc_feature (1)..(362): tr|A0A1H2QIT3|A0A1H2QIT3_9RHOB GTP cyclohydrolase FolE2 OS=Sulfitobacter pontiacus OX=60137 GN=folE2 PE=3 SV=1
MNIAATVIPDRDDAVAALDTLRAWARKASAAEIETLDPSLARLLQSAESYPQFSRDYPSDFAVGDNYKATLPDLQNGPSSLIRGAKQQIQHVGISNFRLPMRFHTREGSDLTLETSVTGSVSLEADKKGINMSRIMRSFYKHADEVFSFEVMEAALDDYKSDLESYDARIQMRFSFPVRIDSLRSGLSGYQYYDIALELVEAEGARKKIIHLDYVYSSTCPCSLELSEHARATRGQLATPHSQRSVARISVEVNCEESCLWFEDLIDAARRAVPTETQVMVKREDEQAFAELNAANPIFVEDAARLFCEQLQAEPRVRDFRVVASHQESLHSHDAISVLTQGDTFAAQSIDPRLFSTLFHVG

SEQ ID NO: 15561 - protein, 368 aa, Sulfitobacter pseudonitzschiae
  misc_feature (1)..(368): tr|A0A221JY73|A0A221JY73_9RHOB GTP cyclohydrolase FolE2 OS=Sulfitobacter pseudonitzschiae OX=1402135 GN=folE2 PE=3 SV=1
MNIHTPEFQQIPERDDAKAALDVLRRWAKSATPTEILELDASVARLLPGDSGSNYPAFSRNYPEEFVVDAAYKNTLPDLQNGPSSLIRGAHQQIQHVGISNFRLPIRYRSRDTDASLLLETSVTGTVSLEAEKKGINMSRIMRSFYAHADQTFSFEVIEAALDDYKTDLESFDARIQMRFSFPMKVKSLRSGLSGYQYYDIALELVEQNGVRKKIVHLDYVYSSTCPCSLELSEHARATRGQLATPHSQRSVARISVVLDCDAGPLWFEDLIDACRRAVPTETQVMVKREDEQAFAELNAANPIFVEDAARLFCEQLLADHRVGDFRVVASHQESLHSHDAVSVLTEGDTFAAESIDPRLFQSLFHVG

SEQ ID NO: 15562 - protein, 368 aa, Sulfitobacter pseudonitzschiae
  misc_feature (1)..(368): tr|A0A073IZK3|A0A073IZK3_9RHOB GTP cyclohydrolase FolE2 OS=Sulfitobacter pseudonitzschiae OX=1402135 GN=folE2 PE=3 SV=1
MNIHTPDIQQIPERDDAAAALDVLRRWAKSATPTEILELDASVARLLPGDSGVDYPAFSRSYPEGFEVDESYKATLPDLQNGPSSLIKGAHQQIQHVGISNFRLPIRYRSRNTETPLLLETSVTGTVSLEADKKGINMSRIMRSFYTHAERTFSFEVIEAALDDYKTDLESFDARIQMRFSFPIKVESLRSGLSGYQYYDIALELVEHNGVRKKIVHLDYVYSSTCPCSLELSEHARATRGQLATPHSQRSVARISVVLDCDAGPLWFEDLIDACRRAVPTETQVMVKREDEQAFAELNAANPIFVEDAARLFCEQLLADHRVGDFRIVASHQESLHSHDAVSVLTEGETFAADSLDPRLFQSLFHIG

SEQ ID NO: 15563 - protein, 364 aa, Sulfitobacter sp.
  misc_feature (1)..(364): tr|A0A345QPZ1|A0A345QPZ1_9RHOB GTP cyclohydrolase FolE2 OS=Sulfitobacter sp. SK012 OX=1389005 GN=folE2 PE=3 SV =1
MNIAAPISETPDRDAAEAALNTLRAWASTASSGDIAALDPTVARVLGGADGYPQFDRNYPEGFVAGPNYMATLPDLQNGPASLIRGARQQIQHVGISNFRLPIRFHSLDGDDLTLETSVTGTVSLEADKKGINMSRIMRSFYKHAEATFSFEVIEAALDDYKADLESIDARIQMRFSFPMKIESLRSGLSGYQYYDVALELVESNGLRQKIIHLDYVYSSTCPCSLELSEHARATRNQLATPHSQRSVARVSVLMEDCDNCLWFEDLINACRRAVPTETQVMVKREDEQAFAELNAANPIFVEDAARLFCQQLQTDERISDFRVIASHQESLHSHDAVSVLTEGPTFAQASFDPKLFNTLFHVG

SEQ ID NO: 15564 - protein, 364 aa, Sulfitobacter sp.
  misc_feature (1)..(364): tr|A0A196PK24|A0A196PK24_9RHOB GTP cyclohydrolase FolE2 OS=Sulfitobacter sp. EhC04 OX=1849168 GN=folE2 PE=3 SV =1
MNAITSVEKAPERSDAEKALSVLKAWARAASPEEVAALDPSVSRLLSDAPAYPEFRRDYPDDFAVGEVYKSTLPDLQNGPSSLIRGAQQQIQHVGISNFRLPIRFRTRDNGELTLETSVTGSVSLEADKKGINMSRIMRSFYKHAEATFSFEVIEKALDDYKADLDSMDARIQMRFSFPMKIESLRSGLSGYQYYDIALELVEKGGVRQKMIHLDYVYSSTCPCSLELSEHARATRGQLATPHSQRSVARISAVIDCDRECLWFEDLIDACRRAVPTETQVMVKREDEQAFAELNAANPIFVEDAARLFCQQLQQDGRVGDFRVIASHQESLHSHDAISVLTEGPTFEVASIDPKLFNTLFHVG

SEQ ID NO: 15565 - protein, 185 aa, Sulfobacillus acidophilus
  misc_feature (1)..(185): tr|A0A2T2WN67|A0A2T2WN67_9FIRM GTP cyclohydrolase 1 OS= Sulfobacillus acidophilus OX=53633 GN=folE PE=3 SV=1
MDQEKIRRAVSMILEAIGEDPTREGLQETPSRVARMYTEICAGLHQEGRDVLATRFHVDHDEVVLVKDIHFYSLCEHHLLPFFGVAHVAYLPNRGMVTGLSKLARLVEVYARRPQVQERMTNQIADILEEELSAVGTFVMVQAEHLCMSMRGIQKPGSHTVTTAARGDFNTRPELRSEILRLIQS

SEQ ID NO: 15566 - protein, 217 aa, Sulfobacillus acidophilus
  misc_feature (1)..(217): tr|G8TZP0|G8TZP0_SULAD GTP cyclohydrolase 1 OS=Sulfobac illus acidophilus (strain ATCC 700253 / DSM 10332 / NAL ) OX=679936 GN=folE PE=3 SV=1
MQTSEPPRNIINASDLDAWEESVDPQSTGPIDTVKIQTAVRMILEAIGENPDREGLVETPARVARMYQEIFQGLYQNPHDVLATRFHVKQADLVLVKDIPFYSACEHHLLPFFGVAHIAYLPEAGEVTGLSKLARLVDIFAKRPQVQERMTEDIAQALNDELGAQGVVVMVEAEHLCMAMRGVKKPGSRTLTIAARGLYETEEAKRREVIDLMRRSL

SEQ ID NO: 15567 - protein, 210 aa, Sulfobacillus benefaciens
  misc_feature (1)..(210): tr|A0A2T2XF75|A0A2T2XF75_9FIRM GTP cyclohydrolase 1 OS= Sulfobacillus benefaciens OX=453960 GN=folE PE=3 SV=1
MSQNVGAHRSRVASHSTPPVPETVDHEKIEQAVRMILEAIGEDPDREGLIDTPKRVARMYQEIFSGLHSDPAEELSARFHVDHDELVLVKDITFYSACEHHLLPFYGLAHVAYLPANGTVTGLSKLARLVDHVAKQPQIQERMTNTIADVLHNTLNPQGVMVVIEAEHLCMTMRGVKKPGSKTVTIASRGLYETNPEKQQQVLRMLHLEV

SEQ ID NO: 15568 - protein, 199 aa, Sulfobacillus benefaciens
  misc_feature (1)..(199): tr|A0A2T2X7K3|A0A2T2X7K3_9FIRM GTP cyclohydrolase 1 OS= Sulfobacillus benefaciens OX=453960 GN=folE PE=3 SV=1
MTAAEVKDDSEESLVNREKVEQAVRMILEAIGENPDREGLHDTPARVARMYEEIFSGLHRDPSEVLSARFHVDHDEVVLVKDIPFYSSCEHHLLPFFGEAHVAYLPRHGVVTGLSKLARLVDIVAKRPQIQERMTNIIADTLENDLDAVGVMVVIEAEHLCMTMRGIKKPGSKTVTMASRGAYEDSARQQEILRMLNLS

SEQ ID NO: 15569 - protein, 199 aa, Sulfobacillus sp.; identical to SEQ ID NO: 15568
  misc_feature (1)..(199): tr|A0A356ZWK0|A0A356ZWK0_9FIRM GTP cyclohydrolase 1 OS= Sulfobacillus sp. OX=33949 GN=folE PE=3 SV=1

SEQ ID NO: 15570 - protein, 220 aa, Sulfobacillus sp.
  misc_feature (1)..(220): tr|A0A2S3QIW9|A0A2S3QIW9_9FIRM GTP cyclohydrolase 1 OS= Sulfobacillus sp. hq2 OX=2039167 GN=folE PE=3 SV=1
MSQSLHTNKSSQPVGLDTAVTVTDSPEMNITAAHSVDRQKIEAAVRMILEAVGEDPTREGLLETPARVARMYEEIFSGLHRDPAETLSARFHVDHNEVVLVKDIPFYSACEHHLLPFFGAAHVAYLPRHGVVTGLSKLARLVDLVAKRPQIQERMTNIVADTLEQELDAEGVMVVIEAEHLCMTMRGIKKPGSKTVTIASRGTYEESSRQMEILRLLNLG

SEQ ID NO: 15571 - protein, 219 aa, Sulfobacillus thermosulfidooxidans
  misc_feature (1)..(219): tr|A0A1W1W872|A0A1W1W872_SULTA GTP cyclohydrolase 1 OS= Sulfobacillus thermosulfidooxidans (strain DSM 9293 / V KM B-1269 / AT-1) OX=929705 GN=folE PE=3 SV=1
MSQSLRSKKATSKSGDGVLAVTPPEIVKESDAPLVDHEKIEQAVRMILEAIGENPDREGLQDTPARVARMYEEIFSGLHRDPSEVLSARFHVDHNEVVLVKDIPFYSACEHHLLPFFGQAHVAYLPRHGVVTGLSKLARLVDLVAKRPQIQERMTNIIADTLENDLDAAGVMVVIEAEHLCMTMRGIKKPGSKTVTIASRGAYEDPDRQQEILRMLKLG

SEQ ID NO: 15572 - protein, 219 aa, Sulfobacillus thermosulfidooxidans; identical to SEQ ID NO: 15571
  misc_feature (1)..(219): tr|A0A1R0IKF9|A0A1R0IKF9_SULTH GTP cyclohydrolase 1 OS= Sulfobacillus thermosulfidooxidans OX=28034 GN=folE PE= 3 SV=1

SEQ ID NO: 15573 - protein, 193 aa, Sulfobacillus thermotolerans
  misc_feature (1)..(193): tr|A0A3S6Z933|A0A3S6Z933_9FIRM GTP cyclohydrolase 1 OS= Sulfobacillus thermotolerans OX=338644 GN=folE PE=3 SV= 1
MNITAAHSVDRQKIEAAVRMILEAIGEDPTREGLLETPARVARMYEEIFSGLHRDPAETLSARFHVDHNEVVLVKDIPFYSACEHHLLPFFGAAHVAYLPRHGVVTGLSKLARLVDLVAKRPQIQERMTNIVADTLEQELDAEGVMVVIEAEHLCMTMRGIKKPGSKTVTIASRGTYEESSRQMEILRLLNLG

SEQ ID NO: 15574 - protein, 273 aa, Sulfuricaulis limicola
  misc_feature (1)..(273): tr|A0A1B4XHZ3|A0A1B4XHZ3_9GAMM GTP cyclohydrolase FolE2 OS=Sulfuricaulis limicola OX=1620215 GN=folE2 PE=3 SV= 1
MKLKSKTRPVEEEIADVQSTPDLRHLPIDKVGIKEIRHPVVVRDRSQGVQHTIASFNMYVELPHNFKGTHMSRFVEILNSHDMELSVESFRDMLAEMRRRLEANTGHIEMSFPYFINKAAPVSGVKSLMDYQVVFIGEITGNQDVMTIKVVVPVTSLCPCSKEISQYGAHNQRSHVTLTVRTNTFVWVEDLIDLVENQASCQLYGLLKRPDEKYVTEKAYENPKFVEDMVRDVAAKLNADDRIDAYVVESENFESIHNHSAYAMIKKDKTLDS

SEQ ID NO: 15575 - protein, 212 aa, Sulfuricella denitrificans
  misc_feature (1)..(212): tr|S6A9M5|S6A9M5_SULDS GTP cyclohydrolase 1 OS=Sulfuric ella denitrificans (strain DSM 22764 / NBRC 105220 / sk B26) OX=1163617 GN=folE PE=3 SV=1
MSDCCDHDHSAPLPGGLGIPRIGTFDAVAFEQAITDLLRACGVSPDSTHTGRTARRVRELWEKRLLGGYDMDPAEVLGEGFVDLREDMVVIRGIAVHGVCPHHLVPFRGIAHVAYIPGGRLHGFGRIARLVDAIGHRFTYQEWMTRDVAEALVTHGKAKGAACVIEAEQLCLLLGEDRRGDERVYTQAFAGCFNDNDQFRQEFLRSISGRMP

SEQ ID NO: 15576 - protein, 271 aa, Sulfuricella denitrificans
  misc_feature (1)..(271): tr|S6B659|S6B659_SULDS GTP cyclohydrolase FolE2 OS=Sulf uricella denitrificans (strain DSM 22764 / NBRC 105220 / skB26) OX=1163617 GN=folE2 PE=3 SV=1
MNAPVCDKDAIADVQNYADSRQIAIDKVGIKSIRHPVRVADKSEGVQHTIAMFNMNVYLPHNFKGTHMSRFVEILNSDANEREISVESFEAMLREMVQRLEAESGHVEMSFPYFINKTAPVSGVQSLLDYDVTFVGEIVKGKYQLTMKVVIPVTSLCPCSKKISDYGAHNQRSHVTVAVRTNEMVWIEDVVRMVEDQASCELYGLLKRPDEKFVTERAYDNPKFVEDMVRDVAAALNADKRIDAYVVEAENFESIHNHSAYALIERDKTAS

SEQ ID NO: 15577 - protein, 212 aa, Sulfuricella sp.
  misc_feature (1)..(212): tr|A0A0E9MEW6|A0A0E9MEW6_9PROT GTP cyclohydrolase 1 OS= Sulfuricella sp. T08 OX=1632857 GN=SCT_1343 PE=3 SV=1
MSDCCDHDHPAPPPGGLGIPRIGTFNAAAFEQAVTDLLRACGISPDSTHTGKTARRVRELWEKRLLGGYDMDPAEVLGEGFADTREDMVVIRGIAVHGVCPHHLVPFRGIAHVAYIPGGRLHGFGRIARLVDAIGHRFTYQEWMTRDVAEALVTHGMAKGAACVIEAEQLCLLLGEDRRGDERVYTQAFAGCFNDYDQFRQEFLRSISGRMP

SEQ ID NO: 15578 - protein, 280 aa, Sulfuricella sp.
  misc_feature (1)..(280): tr|A0A0E9MBW5|A0A0E9MBW5_9PROT GTP cyclohydrolase FolE2 OS=Sulfuricella sp. T08 OX=1632857 GN=folE2 PE=3 SV=1
MTDCNATCDVNSPVCDKDAIADVQNYADSRQIAIDKVGIKSIRHPVRVADKSEGVQHTIAMFNMNVYLPHNFKGTHMSRFVEILNSDANEREISVESFEAMLREMVQRLEAESGHVEMSFPYFINKTAPVSGVQSLLDYDVTFIGEIVKGKYQLTMKVVIPVTSLCPCSKKISDYGAHNQRSHVTVAVRTNEMVWIEDVVRLVEDQASCELYGLLKRPDEKFVTERAYDNPKFVEDMVRDVAAALNADKRIDAYVIEAENFESIHNHSAYALIERDKTAS

SEQ ID NO: 15579 - protein, 195 aa, Sulfuricurvum kujiense
  misc_feature (1)..(195): tr|A0A2D3WK44|A0A2D3WK44_9HELI GTP cyclohydrolase 1 OS= Sulfuricurvum kujiense OX=148813 GN=folE PE=3 SV=1
MSKAIEQQNFEEAVKTMIRYVGEDVNREGLEKTPNRVLKAYEFMFGGYQEDPQEILNSAMFASSNDEMVLIKDIEFYSTCEHHLLPIIGRAHVAYIPDGKVVGLSKIPRVVDVFARRMQIQEQLTEQIADALMEAVSPKGVAVVIQARHMCMEMRGVQKISSTTTSSALRGLFKRDEKTRMEFFSLINSSSGNRY

SEQ ID NO: 15580 - protein, 192 aa, Sulfuricurvum kujiense
  misc_feature (1)..(192): tr|E4TZF6|E4TZF6_SULKY GTP cyclohydrolase 1 OS=Sulfuric urvum kujiense (strain ATCC BAA-921 / DSM 16994 / JCM 1 1577 / YK-1) OX=709032 GN=folE PE=3 SV=1
MDNNELFIKAVKTMIAHVGEDVEREGLLKTPERVLKAYEFMFGGYKEDPQSILNSAMFESSNDEMVLIKDIEFYSTCEHHLLPIIGRAHVAYIPDGKVVGLSKIPRVVDVFARRMQIQEQLTEQIADALMHAIAPKGVAVVVQARHMCMEMRGVEKISSTTTSSALRGLFKRDEKTRMEFFSLINSSSGNRY

SEQ ID NO: 15581 - protein, 195 aa, Sulfuricurvum sp.
  misc_feature (1)..(195): tr|A0A4R4G5C1|A0A4R4G5C1_9HELI GTP cyclohydrolase 1 OS= Sulfuricurvum sp. IAE1 OX=2546102 GN=folE PE=3 SV=1
MSKTTTQQAFEDAVKTMIRYVGEDETREGLLKTPERVMKAYEFMFGGYNEDPQAILNSAMFETSNDEMVLIKDIEFYSTCEHHLLPIIGRAHVAYIPDGKVVGLSKIPRVVDVFARRMQIQEQLTEQIADALMHAISPKGVAVVVQARHMCMEMRGVEKISSTTTSSALRGLFKRDEKTRMEFFNLINSPAGTRY

SEQ ID NO: 15582 - protein, 191 aa, Sulfuricurvum sp.
  misc_feature (1)..(191): tr|A0A0C2VZL7|A0A0C2VZL7_9HELI GTP cyclohydrolase 1 OS= Sulfuricurvum sp. PC08-66 OX=1539066 GN=folE PE=3 SV=1
MDQNSFEEAVRTLIASTGEDIHREGLVKTPTRVFKAYEHIFGGYKLDAETILRSALFESSNDEMVVIKDIEFYSMCEHHLLPIIGHAHVAYIPNGKVVGLSKIPRVVDVFARRMQIQEQMTEQIADAIMRTIAPKGVAVVIQARHMCMEMRGVEKVNATTTSSALRGLFKSNEATRKEFFAHINASAGKRY

SEQ ID NO: 15583 - protein, 211 aa, Sulfuriferula multivorans
  misc_feature (1)..(211): tr|A0A401JH93|A0A401JH93_9PROT GTP cyclohydrolase 1 OS= Sulfuriferula multivorans OX=1559896 GN=folE PE=3 SV=1
MDNHSCDHDPAGHPIPGSIGIPRQGEFNPAAFEQAITDLLRACGVNPDSTHTGKTAQRVRELWQKRLLGGYAIDPAEALGEGFEDSRQDMVVVRGIAIHGVCPHHLVPFRGVAHVAYIPGGRLHGFGRIARLVDAIGHRFTYQEWMTRDIAEALMTHGKALGAACIIEAEQLCLLLGEDRRGDERVVTQAFTGCFDTSHQTRNEFLRALRG

SEQ ID NO: 15584 - protein, 277 aa, Sulfuriferula multivorans
  misc_feature (1)..(277): tr|A0A401JEY3|A0A401JEY3_9PROT GTP cyclohydrolase FolE2 OS=Sulfuriferula multivorans OX=1559896 GN=folE2 PE=3 SV=1
MNDCCGVAAMPDVQNYADTRQLAINKVGIKSIRHPVRVADKSGGVQHTVASFNMYVYLPHNFKGTHMSRFVEILNTREREISVENFESMMRQMVERLEAESGYIEMNFPYFINKAAPVSGVQSLMDYDVTFIGAIENGRYTHTTKIVVPVTSLCPCSKKISDYGAHNQRSHVTVSARTNGFLWIEDIVRMVEDQASCELYGLLKRPDEKYVTERAYDNPKFVEDMVRDVAAALEKETKIDAYVVESENFESIHNHSAYALIENDKTHPTQISSEGTA

SEQ ID NO: 15585 - protein, 269 aa, Sulfuriferula plumbiphila
  misc_feature (1)..(269): tr|A0A512L7F5|A0A512L7F5_9PROT GTP cyclohydrolase FolE2 OS=Sulfuriferula plumbiphila OX=171865 GN=folE2 PE=3 S V=1
MNDCCEVAAMPDVQNYADTRQIAINKVGIKSIRHPVRVADKSGGVQHTVASFSMYVHLPHNFKGTHMSRFVEILNTREREISVENFETMMRQMVERLEAESGYIEMNFPYFINKTAPVSGVQSLMDYDVTFIGAIENGRYTHTTKIAVPVTSLCPCSKKISDYGAHNQRSHVTVSARTNDFLWIEDLVRMVEDQASCELYGLLKRPDEKYVTERAYDNPKFVEDMVRDVAAALEKEAKIDAYVVESENFESIHNHSAYALIEHDKVRPA

SEQ ID NO: 15586 - protein, 211 aa, Sulfuriferula plumbiphila
  misc_feature (1)..(211): tr|A0A512L4S8|A0A512L4S8_9PROT GTP cyclohydrolase 1 OS= Sulfuriferula plumbiphila OX=171865 GN=folE PE=3 SV=1
MSDHGCDHDPAGHPIPGSIGIPRQGEFDPAAFERAVTDLLLACGVNPDSTHTGKTAQRVRELWQKRLLGGYAIDPAGALGEGFEDTRQDMVVVRGIAIHGVCPHHLVPFRGVAHVAYIPGGRLHGFGRIARLVDAIGHRFTYQEWMTRDIAEALMSHGHALGAACIIEAEQLCLLLGEDRRGDERVVTQAFTGCFDTSHQTRNEFLRALQG

SEQ ID NO: 15587 - protein, 269 aa, Sulfuriferula sp.
  misc_feature (1)..(269): tr|A0A1Y0G5Q4|A0A1Y0G5Q4_9PROT GTP cyclohydrolase FolE2 OS=Sulfuriferula sp. AH1 OX=1985873 GN=folE2 PE=3 SV=1
MNDCCDITAPMPDVQNYADTRQIAINKVGIKSIRHPVKVADKSSGIQHTIANFNMYVFLPHNFKGTHMSRFVEILNTNEREISIENFESILRQMVQRLEADSGYIEMSFPYFINKTAPVSGVQSLMDYDVTLIGAIENGQYVHTTKVVVPVTSLCPCSKKISEYGAHNQRSHVTISARTNDFMWIEDIVAVAEKQASCELYGLLKRPDEKFVTERAYDNPKFVEDMVRDVAAALDREPRIDSYVVESENFESIHNHSAYALIERDKRKL

SEQ ID NO: 15588 - protein, 272 aa, Sulfurifustis variabilis
  misc_feature (1)..(272): tr|A0A1B4V6H5|A0A1B4V6H5_9GAMM GTP cyclohydrolase FolE2 OS=Sulfurifustis variabilis OX=1675686 GN=folE2 PE=3 S V=1
MKLKTKAEPIPIADVQSTPDTRRLPIDKVGIKDIRHPVRVKDKTQGEQHTIANFNMYVELPHNFKGTHMSRFVEILNQHDIEISVESFKEMLSEMSERLEARRGHIEMSFPYFINKSAPVSGVKSLMDYQVTFIGEIEDGRHVMTIKVIVPVTSLCPCSKEISDRGAHNQRSHVTLTVRTNSFVWIEELIELVESQASCELYGLLKRPDEKYVTERAYDNPKFVEDMVRDVAAMLNQDERVDAFCVESENFESIHNHSAYAMIKRDKLEPAD

SEQ ID NO: 15589 - protein, 187 aa, Sulfurihydrogenibium azorense
  misc_feature (1)..(187): tr|C1DVQ4|C1DVQ4_SULAA GTP cyclohydrolase 1 OS=Sulfurih ydrogenibium azorense (strain Az-Fu1 / DSM 15241 / OCM 825) OX=204536 GN=folE PE=3 SV=1
MAIDKNKIEQAIRLFLEGIGEDPNREGLRDTPKRVAKMWEEFESHGEFNMTVFEDVGSYDEMVVVRDIQFFSFCEHHLLPFFGKAHVAYIPDKKVCGLSKIVRVVNKFSYRPQVQERLTAEIAEFLEKELQPKGVAVVMEAIHLCMAMRGVRNPDSVTVTSKLTGRFLECQKTREEFLNLINSHKKL

SEQ ID NO: 15590 - protein, 187 aa, Sulfurihydrogenibium sp.
  misc_feature (1)..(187): sp|B2V9P4|GCH1_SULSY GTP cyclohydrolase 1 OS=Sulfurihyd rogenibium sp. (strain YO3AOP1) OX=436114 GN=folE PE=3 SV=1
MVIDKNKIEQAIRLFLEGIGEDPNREGLRDTPKRVAKMWEEFESYREMNMTIFEEVGSYDEMVVVRDIQFYSLCEHHLLPFFGKAHVAYIPDKKVCGLSKIVRVVNKFSYRPQVQERLTAEIAEYLEKELQPKGVAVVMEAVHLCMAMRGVRNPESITVTSKLTGRFLECQKTREEFLNLINSHKKM

SEQ ID NO: 15591 - protein, 187 aa, Sulfurihydrogenibium sp.
  misc_feature (1)..(187): tr|A0A2J6X1K7|A0A2J6X1K7_9AQUI GTP cyclohydrolase 1 OS= Sulfurihydrogenibium sp. OX=2053621 GN=folE PE=3 SV=1
MAIDKSKIEQAIRLFLEGIGEDPNREGLRDTPKRVAKMWEEFESFREFDMTTFEEIGTYDEMVVVRDIKFFSLCEHHLLPFFGKAHVAYIPDKKVCGLSKIVRVVNKFSYRPQVQERLTIEIAEFLEKELKPKGVAVVMEAVHLCMAMRGVRNPDSVTVTSKLTGKFLECQKTKEEFLNLINSHKKL

SEQ ID NO: 15592 - protein, 187 aa, Sulfurihydrogenibium yellowstonense
  misc_feature (1)..(187): tr|C4FIV5|C4FIV5_9AQUI GTP cyclohydrolase 1 OS=Sulfurih ydrogenibium yellowstonense SS-5 OX=432331 GN=folE PE=3 SV=1
MAIDKNKIEQAIKLFLEGIGEDPNREGLRDTPKRVAKMWEEFESYREMNMTVFEEVGNYDEMVVVRDIQFYSLCEHHLLPFFGKAHVAYIPDKKVCGLSKIVRVVNKFSYRPQVQERLTAEIAEYLEKELQPKGVAVVMEAVHLCMAMRGVRNPEAITVTSKLTGRFLECQKTREEFLNLINSHKKI

SEQ ID NO: 15593 - protein, 194 aa, Sulfurimonas autotrophica
  misc_feature (1)..(194): tr|E0US95|E0US95_SULAO GTP cyclohydrolase 1 OS=Sulfurim onas autotrophica (strain ATCC BAA-671 / DSM 16294 / JC M 11897 / OK10) OX=563040 GN=folE PE=3 SV=1
MSDNKNSEFENAVKVMMHHVGEDPQREGLIDTPSRVRKAYEFIYGGYKEDPAEILKKALFTTSNDEMVLVKDIEFYSTCEHHLLPIIGRVHVAYIPDGKVVGLSKIPRVVNVFARRMQIQEQLTEQIADAIMDTIAPKGVGVVIQARHMCMEMRGVEKINSTTTSSALRGLFKKDEKTRSEFFSLINSPTGNRY

SEQ ID NO: 15594 - protein, 179 aa, Sulfurimonas denitrificans
  misc_feature (1)..(179): tr|Q30NS1|Q30NS1_SULDN GTP cyclohydrolase 1 OS=Sulfurim onas denitrificans (strain ATCC 33889 / DSM 1251) OX=32 6298 GN=folE PE=3 SV=1
MMLHVGENPDREGLLKTPQRVKKAYEFIFGGYKEDPEEILNSALFTSSNDEMVLLKDIEFYSTCEHHLLPIIGRVHVAYIPNGKVVGLSKIPRVVNVFARRMQIQEQLTEQIADAIMNTIKPKGVAVVVQARHMCMEMRGVEKINSTTTSSALRGLFKKDEKTRSEFFSLINSPNGSRY

SEQ ID NO: 15595 - protein, 194 aa, Sulfurimonas gotlandica
  misc_feature (1)..(194): tr|B6BGW8|B6BGW8_SULGG GTP cyclohydrolase 1 OS=Sulfurim onas gotlandica (strain DSM 19862 / JCM 16533 / GD1) OX =929558 GN=folE PE=3 SV=1
MKKKEDIEFENAVKTMMLHVNEDPTREGLLETPGRVRKAYEFIYGGYKENPKEILEKALFTSSNDEMVLLKDIEFYSTCEHHLLPIIGRVHVAYIPDGKVVGLSKIPRVVNVFARRMQIQEQLTEQIADAIMEAIAPKGVAVVIQARHMCMEMRGVEKINSTTTSSALRGLFKKDEKTRSEFFSLINSPTGTRY

SEQ ID NO: 15596 - protein, 194 aa, Sulfurimonas hongkongensis
  misc_feature (1)..(194): tr|T0JQ05|T0JQ05_9HELI GTP cyclohydrolase 1 OS=Sulfurim onas hongkongensis OX=1172190 GN=folE PE=3 SV=1
MDNKKNIEFENAVKIMMLYVDEDPEREGLKATPSRVRKAYEFIYGGYKEDPKAILEKALFTSSNDEMVLLKDIEFYSTCEHHLLPIIGRVHVAYIPDGKVVGLSKIPRVVNVFARRMQIQEQLTEQIADAIMDAIAPKGVAVVIAARHMCMEMRGVEKINSTTTSSALRGLFKKDEKTRSEFFSLINSPTGTRY

SEQ ID NO: 15597 - protein, 193 aa, Sulfurimonas sp.
  misc_feature (1)..(193): tr|A0A2D3W161|A0A2D3W161_9HELI GTP cyclohydrolase 1 OS= Sulfurimonas sp. UBA12504 OX=2015903 GN=folE PE=3 SV=1
MKKEDLDFENAVKSMMLHVGENPEREGLLETPKRVRKAYEFIFGGYKENPKEILEKALFTSSNDEMVLIKDIEFYSTCEHHLLPIIGRVHVAYIPDGKVVGLSKIPRVVNVFARRMQIQEQLTEQIADAIMSTIEPKGVAVVIQARHMCMEMRGVEKINSTTTSSALRGLFKKDQKTRSEFFSLINSPTGTRY

SEQ ID NO: 15598 - protein, 194 aa, Sulfurimonas sp.
  misc_feature (1)..(194): tr|A0A2G1YP96|A0A2G1YP96_9HELI GTP cyclohydrolase 1 OS= Sulfurimonas sp. OX=2022749 GN=folE PE=3 SV=1
MSQTKDLEFENAVKIMMLHVDEDPNREGLLETPSRVRKAYEFIYGGYKENPKEILQKALFTSSNDEMVLLKDIEFYSTCEHHLLPIIGRVHVAYIPDGKVVGLSKIPRVVNVFARRMQIQEQLTEQIADAIMDTIAPKGVAVVVQARHMCMEMRGVEKINSTTTSSALRGLFKKDEKTRSEFFSLINSPTGTRY

SEQ ID NO: 15599 - protein, 268 aa, Sulfurirhabdus autotrophica
  misc_feature (1)..(268): tr|A0A4R3XXK0|A0A4R3XXK0_9PROT GTP cyclohydrolase FolE2 OS=Sulfurirhabdus autotrophica OX=1706046 GN=folE2 PE= 3 SV=1
MNQCCDTDAIPDVQNTPDTRQLAIDKVGIKSIRHPVKVADKTGGVQHTIAMFNMYVYLPHNFKGTHMSRFVEILNGYEREITVESFEQMLRQMVVLLEAESGHVEMTFPYFINKAAPISGVQSLLDYDVTFIGEILKGEYRQTMKVVVPVTSLCPCSKKISDYGAHNQRSHVTVTARTNDFMWIEDVVRIVEEQASCELFGLLKRPDEKYVTERAYDNPKFVEDMVRDIAAKLNDDARIDSYVVESENFESIHNHSAYALIERDKTKQ

SEQ ID NO: 15600 - protein, 208 aa, Sulfurisoma sediminicola
  misc_feature (1)..(208): tr|A0A497XCI7|A0A497XCI7_9PROT GTP cyclohydrolase 1 OS= Sulfurisoma sediminicola OX=1381557 GN=folE PE=3 SV=1
MPTCDDHCPVPGAAGGIGIPRRDPFDPAAFERAVADLLSACGIAPDAAHMGRTAQRVRELWQKRLLGGYDIDPAEALGEGFADHRSDMVVIRGIAVHGVCPHHLVPFRGVAHVGYLPGGRLHGFGRIARLVDAIGHRFTYQEWMTRDIAEALMQHGKARGGACVVEAEQLCLLLGEDRRGDERVVTQAFTGAFAESDQLRNEFLRAIG

SEQ ID NO: 15601 - protein, 269 aa, Sulfurisoma sediminicola
  misc_feature (1)..(269): tr|A0A497XB51|A0A497XB51_9PROT GTP cyclohydrolase FolE2 OS=Sulfurisoma sediminicola OX=1381557 GN=folE2 PE=3 S V=1
MNARDTMIIPDVQSSADSRQLPINKVGIKSIRHPVKVLDKSGGVQHTIANFNMYVGLPHNFKGTHMSRFVEILNSREKEISVESFEAMLREMVKKLEAETGIIEMSFPYFINKEAPVSKVKSLMDYEVTFIGEIRDGGVYRQTMKVQVPATSLCPCSKKISDYGAHNQRSHITVTATTNSFLWIEELVQMVEGQASCEVYGLLKRPDEKYVTERAYDNPKFVEDMVRDVAGVLNAEPRIDAYMLEAENFESIHNHSAYAVIERDKTIGA

SEQ ID NO: 15602 - protein, 268 aa, Sulfuritalea hydrogenivorans
  misc_feature (1)..(268): tr|W0SGQ4|W0SGQ4_9PROT GTP cyclohydrolase FolE2 OS=Sulf uritalea hydrogenivorans sk43H OX=1223802 GN=folE2 PE=3 SV=1
MAPPEKSVIADVQSSEDSRQLPINKVGIKDIRHPFKVLDKSGGVRHTIATFNMYVGLPHNFKGTHMSRFVEILNAHEDEISVESFETMLREMVTRLEAATGHLEMSFPYFINKVAPVSGVKSLMDYEVTFIGEIIEGGRYRQTIKVVVPVTSLCPCSKKISERGAHNQRSHVTISATTNQLVWIEDIVRMAETQASCELYGLLKRPDEKYVTERAYDNPKFVEDLVRDVAGALNADPRIDAYVVESENFESIHNHSAYALIESNKKRY

SEQ ID NO: 15603 - protein, 279 aa, Sulfuritortus calidifontis
  misc_feature (1)..(279): tr|A0A4R3JZ10|A0A4R3JZ10_9PROT GTP cyclohydrolase FolE2 OS=Sulfuritortus calidifontis OX=1914471 GN=folE2 PE=3 SV=1
MSTTCDAVCHTAAPCPTKDAIPDVQNYPDSRKLAIDKVGIKSIRHPVRVADKNGGVQHTIASFNMYVYLPHHFKGTHMSRFVEILNSYEREISVENFEDMLRQMVKRLEAESGHVEMNFPYFINKKAPVSGVESMIDYDVTFIGEIKDGEYIQTIKVVVPVTSLCPCSKKISDYGAHNQRSHITIAARTNTFVWIEDIVRMAEDNASCELYGLLKRPDEKYVTERAYDNPKFVEDIVRDVAATLNADDRIDAYVVESENFESIHNHSAYALIERDKKAS

SEQ ID NO: 15604 - protein, 213 aa, Sulfuritortus calidifontis
  misc_feature (1)..(213): tr|A0A4V2UQU4|A0A4V2UQU4_9PROT GTP cyclohydrolase 1 OS= Sulfuritortus calidifontis OX=1914471 GN=folE PE=3 SV=1
MSDCSDHDCMPAPRPGSLGIPRSGKFDVAAFEQAITDLLRACGVEPDAVHTGRTAQRVRELWQRRLLGGYDMDPGEALGEGFQDERDDMVVVRGIAVHGVCPHHLVPFRGVAHVAYVPGGRLHGFGRIARMVDAIGHRFTYQEWMTRDIAEALITHGKAKGAACVIEAEQLCLLLGEDRRGDERVVTQAYTGCFKQDAQYRNEFLRALGGPLP

SEQ ID NO: 15605 - protein, 316 aa, Sulfurivirga caldicuralii
  misc_feature (1)..(316): tr|A0A1N6GWY4|A0A1N6GWY4_9GAMM GTP cyclohydrolase FolE2 OS=Sulfurivirga caldicuralii OX=364032 GN=folE2 PE=3 S V=1
MKKPLPDVACEAQSETRGRLNWVGMSQIELPIEVLDGEDQPVRVPTLADAFVNLIDPNSKGIHMSRLYLRLDQFSLGGAVSVERLQGLLADFIDSHAGLSDRAHVAFRFDYYERRASLLSDNSGWKHYPAEIRAQLGPGGFMCELGVEIPYSSTCPCSAALSRQLIMEHFAERFAGQESVALDEALAWLATPEGVNATPHSQRSIAQIRVRLQPGQEIDISALISLIEGALQTPVQAAVKREDEQEFARLNAANLMFCEDAARRLQAALNAAESHFADFWARVNHYESLHPHDAVAVVTKGVPGGYSDDPELVCKR

SEQ ID NO: 15606 - protein, 191 aa, Sulfurospirillum barnesii
  misc_feature (1)..(191): tr|I3Y060|I3Y060_SULBS GTP cyclohydrolase 1 OS=Sulfuros pirillum barnesii (strain ATCC 700032 / DSM 10660 / SES -3) OX=760154 GN=folE PE=3 SV=1
MHRKEEFEQAVKTMLEIIGENTEREGLLKTPTRVFKAYEYMTQGYHQSPNEVLGEALFESDNNQMVLIKDIEFYSMCEHHLLPIIGRAHVAYIPDGKVVGLSKIPRMVDIFARRLQIQEQLTEQIAKAIDDVIAPKGVGVVIQARHMCMEMRGVEKTHSNTTTSALRGLFLKADTRKEFFDIINAPQANRY

SEQ ID NO: 15607 - protein, 191 aa, Sulfurospirillum cavolei
  misc_feature (1)..(191): tr|A0A2D3W3U5|A0A2D3W3U5_9PROT GTP cyclohydrolase 1 OS= Sulfurospirillum cavolei OX=366522 GN=folE PE=3 SV=1
MHRQEEFENAVRTMLEIIGENTKREGLLKTPTRVFKAYEYMTQGYTQSPNDVLGEALFESDNNQMVLIKDIEFYSMCEHHLLPIIGRAHVAYIPNGKVVGLSKIPRMVDVFARRLQIQEQLTEQIAKAIDDVIAPKGVGVVIQARHMCMEMRGVEKTHSNTTTSALRGLFLKPDTRKEFFDIINAPQANRY

SEQ ID NO: 15608 - protein, 193 aa, Sulfurospirillum deleyianum
  misc_feature (1)..(193): tr|D1B4Z8|D1B4Z8_SULD5 GTP cyclohydrolase 1 OS=Sulfuros pirillum deleyianum (strain ATCC 51133 / DSM 6946 / 517 5) OX=525898 GN=folE PE=3 SV=1
MIMERKEEFENAVKTMLEIIGENTQREGLLKTPSRVFKAYEYMTQGYHQSPTEVLNEALFESDNNQMVLIKDIEFYSMCEHHLLPIIGRAHVAYIPNGKVVGLSKIPRMVDIFARRLQIQEQLTEQIAKAIDDVIAPKGVGVVIQARHMCMEMRGVEKTHSNTTTSALRGLFLKADTRKEFFDIINAPQANRY

SEQ ID NO: 15609 - protein, 191 aa, Sulfurospirillum halorespirans
  misc_feature (1)..(191): tr|A0A1D7TNN0|A0A1D7TNN0_9PROT GTP cyclohydrolase 1 OS= Sulfurospirillum halorespirans DSM 13726 OX=1193502 GN= folE PE=3 SV=1
MQRREEFEQAVKTMLEIIGENTEREGLLKTPTRVFKAYEHMTQGYHQSPNEVLGEALFESDNNQMVLIKDIEFYSMCEHHLLPIIGRAHVAYIPNGKVVGLSKIPRMVDIFARRLQIQEQLTEQIAKAIDDVIAPKGVGVVIQARHMCMEMRGVEKTHSNTTTSALRGLFLKADTRKEFFDIINAPQANRY

SEQ ID NO: 15610 - protein, 191 aa, Sulfurospirillum multivorans; identical to SEQ ID NO: 15609
  misc_feature (1)..(191): tr|A0A5B9TVD0|A0A5B9TVD0_SULMU GTP cyclohydrolase 1 OS= Sulfurospirillum multivorans OX=66821 GN=folE PE=3 SV=1

SEQ ID NO: 15611 - protein, 239 aa, Sulfurospirillum multivorans
  misc_feature (1)..(239): tr|A0A5B9TTL1|A0A5B9TTL1_SULMU NIF3 family protein OS=S ulfurospirillum multivorans OX=66821 GN=SMN_2273 PE=4 S V=1
MKLGALYDFLDTLSPFATQASWDNSGLLIGSREDEVEQIYLSLDVDSALLEEVAENSLIITHHPLIFSSLKQLNFAKYPSNLIQIMVQKKISLIAMHTNFDLSHLNAFVASKLGFEIVDSNEFVAYCEVNQRLDDLALHVKHVLGIENLRIVRGREWVGRCAITTGAGGDLISKIEADCFLSGDLKYHQAMEAKENNLSLIDIGHFESERYFPECLAQYLKNLPLKAIMSNSKNPFEYK

SEQ ID NO: 15612 - protein, 239 aa, Sulfurospirillum sp.
  misc_feature (1)..(239): tr|A0A1Y0HMD4|A0A1Y0HMD4_9PROT GTP cyclohydrolase 1 typ e 2 OS=Sulfurospirillum sp. SL2-1 OX=1986224 GN=Sdiek1_ 2120 PE=4 SV=1
MKLGAIYDFLDTLSPFATQARWDNSGLLIGSLDDEVEQIYLSLDVDSLLLEQVVPNSLIITHHPLIFSGLKQLNFAKYPSNLIQIMVQKKISLIAMHTNFDLSHLNAYVASKLGFEVKETKEFVAYCEVNQSLDDLALHVKHVLGIEHLRIVRAKEWIGLCAITTGSGGDLIAQIEADCFLSGDLKYHQAMEAKENNLSLIDIGHFESERYFPECLGDYLKNLPLKAIISNSKNPFEYK

SEQ ID NO: 15613 - protein, 239 aa, Sulfurospirillum sp.
  misc_feature (1)..(239): tr|A0A290HFE2|A0A290HFE2_9PROT NIF3 family protein OS=S ulfurospirillum sp. JPD-1 OX=220622 GN=SJPD1_2042 PE=4 SV=1
MTLGALYDFLDTLSPFATQARWDNSGLLIGSLDDEVEQIYLSLDVDGSLLEQVTPNSLIITHHPLIFNGLKQLDFAKYPSNLIQIMVQKKISLIAMHTNFDLSHLNAYVASKLGFEVSETKEFVAYCEVNQSLDDLALHVKHVLGIEHLRIVRAREWIGRCAITTGSGGDLITQIEADCFLSGDLKYHQAMEAKENNLSLMDIGHFESERYFPECLGNYLKNLPLKAIISNSKNPFEYK

SEQ ID NO: 15614 - protein, 192 aa, Sulfurovum riftiae
  misc_feature (1)..(192): tr|A0A151CEL4|A0A151CEL4_9PROT GTP cyclohydrolase 1 OS= Sulfurovum riftiae OX=1630136 GN=folE PE=3 SV=1
MNKEKEFEEAVTKVLELLGEDPKREGLLKTPNRVVKALRFLTEGYQQDPEEILNQALFSTSNDEMVLVRDIEFYSMCEHHMLPIIGRCHVAYIPDGKVVGLSKIPRIVNVYARRLQIQEQMTEQIADAILGTIKPKGVAVVVHARHMCMEMRGVQKINSTTVSSALRGLFKSDERTRNEFYNLINTPTPSNF

SEQ ID NO: 15615 - protein, 192 aa, Sulfurovum sp.
  misc_feature (1)..(192): tr|A0A432T6J9|A0A432T6J9_9PROT GTP cyclohydrolase 1 OS= Sulfurovum sp. OX=1969726 GN=folE PE=3 SV=1
MEKNQEFEQTITKMLELLGEDPKREGLLKTPSRVAKALKFLTEGYHQDPKEILNQALFTSSNDEMVVVRDIEFYSMCEHHMLPIIGRAHIAYIPDGKVVGLSKIPRIVNVFARRLQIQEQMTEQIADAILETIKPKGVAVVLHARHMCMEMRGVEKINSTTVSSALRGLFKSDQRTRFEFYNIINTPAPSNF

SEQ ID NO: 15616 - protein, 192 aa, Sulfurovum sp.
  misc_feature (1)..(192): tr|I2K5K9|I2K5K9_9PROT GTP cyclohydrolase 1 OS=Sulfurov um sp. AR OX=1165841 GN=folE PE=3 SV=1
MNKEEEFEQAVTKVLELLGEDPTREGLLKTPSRVAKALQFLTEGYQQDPKEILNQALFSTSNDEMVLVRDIEFYSMCEHHMLPIIGRAHVAYIPDGKVVGLSKIPRIVNVYARRLQIQEQMTEQIADAILETIKPKGVAVVVHARHMCMEMRGVQKINSTTVSSALRGLFKSDERTRNEFYNLINTPTPSNF

SEQ ID NO: 15617 - protein, 209 aa, Sunxiuqinia dokdonensis
  misc_feature (1)..(209): tr|A0A0L8V3H5|A0A0L8V3H5_9BACT GTP cyclohydrolase 1 OS= Sunxiuqinia dokdonensis OX=1409788 GN=folE PE=3 SV=1
MDMEDSFNGKKSGYRRIEKFDRLHTEKISEHYREIIDLLGEDVTREGLQKTPLRVAKAMQFLLQGYEQDPEAMLRSAMFKEDYRQMVIVKDIEIYSMCEHHMLPFIGKAHVGYIPDGYITGLSKIARVVDAFSRRLQVQERLTLQIKECIQNTLNPLGVAVVIEAQHLCMQMRGIQKQHSITTTSDFTGAFQRVATREEFIKLISSKLS

SEQ ID NO: 15618 - protein, 198 aa, Sunxiuqinia dokdonensis
  misc_feature (1)..(198): tr|A0A0L8VDE2|A0A0L8VDE2_9BACT GTP cyclohydrolase 1 OS= Sunxiuqinia dokdonensis OX=1409788 GN=folE PE=3 SV=1
MREDAFVRSDEEKMEIIQAKFREIMETLGLDLRDDSLNGTPRRVAKMFVQEIFSGLNPKNRPQISVFENKFQYGEMLVEKNINLNSTCEHHFLPIVGKAHVAYVSSGEVIGLSKINRIVDYFSRRPQVQERLTVQIASELKRILKTEDVAIVIDAKHMCVSSRGIEDESSSTITAEYGGIFKQQARKEEFLKYIALGK

SEQ ID NO: 15619 - protein, 244 aa, Sunxiuqinia elliptica
  misc_feature (1)..(244): tr|A0A1I2KRQ9|A0A1I2KRQ9_9BACT GTP cyclohydrolase 1 OS= Sunxiuqinia elliptica OX=655355 GN=folE PE=3 SV=1
MKVNGFVKTNRPTTAKNSRVNGHLVQNRVDNDLIGDNHIATSIDTPMRSDAFKLTDNEKMEIIEDKFREIMDTLGLDLNDDSLSGTPHRVAKMFVQEIFNGLNPANKPKISVFENKFKYGEMLVEKNINLNSTCEHHFLPIVGKAHVAYVSSGQVIGLSKINRIVDYYARRPQVQERLTVQVANELKKILKTEDVAVVIDAKHMCVSSRGIEDESSSTVTAEYGGIFKDKERKEEFLKYVTLGS

SEQ ID NO: 15620 - protein, 207 aa, Sunxiuqinia elliptica
  misc_feature (1)..(207): tr|A0A4R6GPS3|A0A4R6GPS3_9BACT GTP cyclohydrolase 1 OS= Sunxiuqinia elliptica OX=655355 GN=folE PE=3 SV=1
MEESLNGELGGYQRIEKFDRENTERISDYYRKIIDLLGEDVNREGLEKTPLRVAKAMQFLLQGYEQNPEEMLRSAMFKEDYRQMVIVKDIEIYSMCEHHMLPFIGKAHIGYIPDGYITGLSKIARVVDAFSRRLQVQERLTLQIKECIQNTLNPLGVAVVIEAQHLCMQMRGVQKQHSITTTSDFTGAFERVATREEFIKLISSKLS

SEQ ID NO: 15621 - protein, 222 aa, Superficieibacter electus
  misc_feature (1)..(222): tr|A0A2P5GWA4|A0A2P5GWA4_9ENTR GTP cyclohydrolase 1 OS= Superficieibacter electus OX=2022662 GN=folE PE=3 SV=1
MSLLSKEAALVHEALVARGLETPLRPPVRDMDNETRKRLISGHMTEIMQLLNLDLSDDSLMETPHRIAKMYVDEIFSGLDYANFPKITVIENKMKVDEMVTVRDITLTSTCEHHFVTIDGQATVAYIPKESVIGLSKINRIVQFFAQRPQVQERLTQQILTALQTLLGTNNVAVSIDAVHYCVKARGIRDATSATTTTSLGGLFKSSQNTRQEFLRAVRHRS

SEQ ID NO: 15622 - protein, 262 aa, Sutterella megalosphaeroides
  misc_feature (1)..(262): tr|A0A2Z6I7D0|A0A2Z6I7D0_9BURK GTP cyclohydrolase FolE2 OS=Sutterella megalosphaeroides OX=2494234 GN=folE2 PE =3 SV=1
MDAKTNLPDVQSAHDGRNIAIDRVGVRGVTLPIVIEGRDGPQHTVASIAMTVSLPADQKGTHMSRFIALMSECTEPLNVNVIRRLMGQMLENLHAVDGTIEIRFPFFVKKTAPVSKLESIMNYEGAWIADSDEGAITVRQETLTPVTSLCPCSKEISKYGAHNQRSHLTSSLILKSDMTLEEQVAISESVASCQLWARLKRADEKYVTEYAYEHPKFVEDLVRDMAKALNDDDRVAAYRIEAENFESIHNHSAYATITHDKR

SEQ ID NO: 15623 - protein, 265 aa, Sutterella parvirubra
  misc_feature (1)..(265): tr|H3KE55|H3KE55_9BURK GTP cyclohydrolase FolE2 OS=Sutt erella parvirubra YIT 11816 OX=762967 GN=folE2 PE=3 SV= 1
MDNEMKTMLPDVQSSHDGRNIPINRVGVRGVKTPLVVAGRDGEQHTVAELAMTVALPADQKGTHMSRFIAMLEEHGEPFSAETMRHLMLDMLDRLNAVDGTIEVRFPYFIRKTAPVSKLQSTMNYEAAWIADATNGVVTVRQIMVTPVTSLCPCSKEISRYGAHNQRSHVTTSLLLGAPMTLEEQAAIAEEAGSCQLWARLKRADEKYVTEYAYDHPKFVEDLVRDMAKALDDDERVQAYRVEAENFESIHNHSAYAWIEHDKRG

SEQ ID NO: 15624 - protein, 265 aa, Sutterella sp.
  misc_feature (1)..(265): tr|A0A5B7ZJ99|A0A5B7ZJ99_9BURK GTP cyclohydrolase FolE2 OS=Sutterella sp. KGMB03119 OX=2584944 GN=folE2 PE=3 S V=1
MEAENKTTLPDVQSSEDERNIAINRVGVRGIRLPVIVAGREAPQHTVADITMTVSLPADKKGTHMSRFIALMEELSEPLDADLMRRLFAEMLERLHAEDGTIEIRFPFFVRKIAPVSKLESIMNYQCALIASSVKGEVTVRQEALAPVTSLCPCSKEISRYGAHNQRSHLTSSLILSAPMSFEEQVAIAENSASCQLWSRLKRSDEKYVTEYAYDHPKFVEDLVRDMAKALNADDRVVAYRVEAENFESIHNHSAYAWIERDKRL

SEQ ID NO: 15625 - protein, 265 aa, Sutterella sp.
  misc_feature (1)..(265): tr|A0A415CIR9|A0A415CIR9_9BURK GTP cyclohydrolase FolE2 OS=Sutterella sp. AM11-39 OX=2292075 GN=folE2 PE=3 SV= 1
MDKTSNVLPDVQNLMDGRNIPIDRVGIRGLTVPLQVQSIKGAQPTVAKVCMCVGLPADKRGTHMSRFVSLIADNHEPLSSDMMRETLEKMLTLLEAEEGYIEISCPFFVTKTSPMSKLKSLMNYDVRFLAERVGGKTRVIQEVTVPVTSLCPCSREISDYGAHNQRSHIVVALELSEPISLEEQIRFAETSASCELWSRLKRNDEKFVTEFAYDHPKFVEDIIRDVCKQLNADDRVLWYRAEAENFESIHNHSAYATISRDKRLA

SEQ ID NO: 15626 - protein, 264 aa, Sutterella wadsworthensis
  misc_feature (1)..(264): tr|K1JJP4|K1JJP4_9BURK GTP cyclohydrolase FolE2 OS=Sutt erella wadsworthensis 2_1_59BFAA OX=742823 GN=folE2 PE= 3 SV=1
MDADNKNTLPDVQSARDGRNIAIDRVGVRGITVPITVETKEDTLATVATVEMTVSLPADKKGTHMSRFVALMEEHSEPLNVDVVRSLMADMLKRLDAVDGTIELRFPFFIRKCAPVSKLTSLMNYEAAWIADSRGGVITVRQETATPVTSLCPCSKEISRYGAHNQRSRLTASVELSAPMSLEEQIAYSEEAASCQLWARLKRSDEKYVTEYAYDHPKFVEDIVRDMAAALNKEERVVAYRVEAENFESIHNHSAYAYITHDKR

SEQ ID NO: 15627 - protein, 268 aa, Sutterella wadsworthensis
  misc_feature (1)..(268): tr|R5PT41|R5PT41_9BURK GTP cyclohydrolase FolE2 OS=Sutt erella wadsworthensis CAG:135 OX=1263111 GN=folE2 PE=3 SV=1
MEAPQTNSLPDIQSSGDPRNIRINRVGVRGVELPVTVADEADVQHTVARLTMSVALPPDHRGTHMSRFIGILEAQTEPYTIEVVQSTIRAMLAELQAQEGTFEIRFPFFLRKAAPISRLESVMNYECAWTATISPAAFELRQETITPVTSLCPCSKEISRYGAHNQRSRLTSSIVLASPMSLREQIALSEAAGSAPLWARLKRADEKFVTEYAYDNPKFVEDIVRDMAESLNKDSRVTAYRVESENFESIHNHSAYAWIEHDKRTKTN

SEQ ID NO: 15628 - protein, 268 aa, Sutterellaceae bacterium; identical to SEQ ID NO: 12376
  misc_feature (1)..(268): tr|A0A3D3SH53|A0A3D3SH53_9BURK GTP cyclohydrolase FolE2 OS=Sutterellaceae bacterium OX=2026794 GN=folE2 PE=3 S V=1

SEQ ID NO: 15629 - protein, 268 aa, Sutterellaceae bacterium
  misc_feature (1)..(268): tr|A0A350CYK5|A0A350CYK5_9BURK GTP cyclohydrolase FolE2 OS=Sutterellaceae bacterium OX=2026794 GN=folE2 PE=3 S V=1
MTDNKLMVLPDVQSSADRRNIPIRRVGVKGIRTPILVKSQSGAQHTVADVEMYVSLPADKKGTHMSRFWTLLGGINKPFAPQMMVEVMQEMLASLKSDGGYIRLAFPFFMEKSAPVSHLQSTMDYDVVLTAECVNGKITVTQEVTAPVTSLCPCSKEISKYGAHNQRSHVSIIAEVETNFPIEKQIEMIESCASCQVWGLLKRSDEKYVTEHAYENPKFVEDLVRDVAIRCQDEPAILAFTVEAENFESIHNHSAFASLHFDKRQTAE

SEQ ID NO: 15630 - protein, 263 aa, Suttonella indologenes
  misc_feature (1)..(263): tr|A0A380MV87|A0A380MV87_9GAMM GTP cyclohydrolase FolE2 OS=Suttonella indologenes OX=13276 GN=folE2 PE=3 SV=1
MTEMIPDVQGSADRRQLPITRVGIRDIRMPIIFSNAESKQQHSVATAEMTVLLPHDKKGTHMSRFIQILNETSQYSVADFLQLHGQMLQRLMADEGTFALTFPYFVEKSAPVSGSKSMMDYEVSLLADGNVGNSELYVEVTVPVTSLCPCSKEISDYGAHNQRSHIIITALYDPERPFSIEELIGMGEKGGSCPIWATLKRPDEKWVTEHAYENPKFVEDIVRDVALMLNEDDRIQSYSVSSENFESIHNHSAYAIIEHDKRL

SEQ ID NO: 15631 - protein, 265 aa, Suttonella ornithocola
  misc_feature (1)..(265): tr|A0A380MS64|A0A380MS64_9GAMM GTP cyclohydrolase FolE2 OS=Suttonella ornithocola OX=279832 GN=folE2 PE=3 SV=1
MVDINSIPDIQGTPDKRELSINRVGIRDIRIPFAIKNHEGNITHTVAEVEMTVSLPHDKKGTHMSRFIHLLNETACYQLSALDDLHAEMLKRLNALEGTIILDFPYFVEKLAPISKTQSLMEYQVSLTIDGSMQEKDIVVEVTVPVTSLCPCSKEISQYGAHNQRSHIIITALYDADNPFFIEELIYMGEKGGSCPIWATLKRPDEKYVTEHAYENPKFVEDIVRDVAIMLNEDDRILAYTVSSENFESIHNHSAYAIIKHDKRL

SEQ ID NO: 15632 - protein, 218 aa, Swaminathania salitolerans
  misc_feature (1)..(218): tr|A0A511BQC1|A0A511BQC1_9PROT GTP cyclohydrolase 1 OS= Swaminathania salitolerans OX=182838 GN=folE PE=3 SV=1
MTKPAADLVALDAARHKGQGGERPIAPIALPEDAQVRIAAAMREILLALGEDPDREGLFETPDRVARMYLDVLGGLHEDPRVHLHKQFLADQHEGAVIVRDIGFHSMCEHHLLPFFGKAHVAYLPEAGRLTGLSKIARVVNVLARRPQLQERLTDQIAASIIEVLEPKAVMVLVEAEHMCMAMRGIRNVGSRTVTTVVRGVWQRDTAARAEIMALLKG

SEQ ID NO: 15633 - protein, 212 aa, Swingsia samuiensis
  misc_feature (1)..(212): tr|A0A4Y6UJJ1|A0A4Y6UJJ1_9PROT GTP cyclohydrolase 1 OS= Swingsia samuiensis OX=1293412 GN=folE PE=3 SV=1
MTDKKAQNGPSHQEGLRPLEAISKPQDAQGRIASAVREILEAVGEDPDREGLKDTPTRVAKMYLEIFEGLYEDPREHLKKQFSADQHNGAVIVKDIHFYSMCEHHLLPVHGKAHVAYLPGGGRLTGLSKLARLVEGFARRPQLQERMTDQIAQGMMDILSPEAVLVVVEAEHMCMSMRGVRSPGSTTVTSVARGLWQDDYAARMEIMSLLRA

SEQ ID NO: 15634 - protein, 205 aa, Swingsia sp.
  misc_feature (1)..(205): tr|A0A4Y6U8S5|A0A4Y6U8S5_9PROT GTP cyclohydrolase 1 OS= Swingsia sp. F3b2 OX=2558361 GN=folE PE=3 SV=1
MTIANANTGKEGFLNLPDNAEERIAGHVRGILEALGEDPGREGLLETPQRAARMFLDVFSGLYEDPARHLEKQFSSDGHSGLVIVRDIPFRSTCEHHLLPVVGKADVAYLPDGGRLTGLSKLARVVEGYARRPQLQERLTDQVAEAIWRVLHPKAVLVVMRAEHMCMTVRGVKAPGAETVTSRAMGQWADDAAARAEVMALMRAG

SEQ ID NO: 15635 - protein, 176 aa, Symbiobacterium thermophilum
  misc_feature (1)..(176): tr|A0A1Y2T3U6|A0A1Y2T3U6_SYMTR GTP cyclohydrolase 1 OS= Symbiobacterium thermophilum OX=2734 GN=folE PE=3 SV=1
MILEAVGEDPDREGLLETPRRVADFYEEVFAGLHRDPAERLTAIFNEDHEELVIVRDISFESMCEHHLLPFFGKAHVAYIPRSGRVVGLSKLARVVEDFSRRPQLQERLTAQIADLLMEKLNPLGVLVVVEAEHMCMTMRGVRKPGSSTITSAVRGVFQTSEATRAEAMALIRGVR

SEQ ID NO: 15636 - protein, 187 aa, Symbiobacterium thermophilum
  misc_feature (1)..(187): tr|Q67QR8|Q67QR8_SYMTH GTP cyclohydrolase 1 OS=Symbioba cterium thermophilum (strain T / IAM 14863) OX=292459 G N=folE PE=3 SV=1
MDKAKIEQAVRMILEAVGEDPDREGLLETPRRVADFYEEVFAGLHRDPAERLTAIFNEDHEELVIVRDISFESMCEHHLLPFFGKAHVAYIPRSGRVVGLSKLARVVEDFSRRPQLQERLTAQIADLLMEKLNPLGVLVVVEAEHMCMTMRGVRKPGSSTITSAVRGVFQTSEATRAEAMALIRGVR

SEQ ID NO: 15637 - protein, 213 aa, Synechococcus elongatus
  misc_feature (1)..(213): sp|Q54769|GCH1_SYNE7 GTP cyclohydrolase 1 OS=Synechococ cus elongatus (strain PCC 7942) OX=1140 GN=folE PE=3 SV =2
MTSPSLNGSNSLVDAIRPETEAVSQAEMEAAVRTLLLGVGEDPEREGLLKTPKRVAEAYRFLTSGYSQSLDDLVNGAIFDEGHNEMVLVRDITAFSLCEHHMLPFMGKVHVAYIPNQKVVGLSKLARIVEMYSRRLQVQERLTRQIAESVQEILDPQGVAVVMEATHMCMVMRGVQKPGSWTVTSAMVGVFQEDQRTREEFLSLIRHQPAAFA

SEQ ID NO: 15638 - protein, 213 aa, Synechococcus elongatus
  misc_feature (1)..(213): tr|A0A3G6X0S2|A0A3G6X0S2_SYNEL GTP cyclohydrolase 1 OS= Synechococcus elongatus PCC 11801 OX=2219813 GN=folE PE =3 SV=1
MTSPSLNGSNSLIDAVRPDENGTSQAEMEAAVRTLLLGVGEDPEREGLLKTPKRVAEAYRFLTSGYSQSLDDLVNGAIFDEGHNEMVLVRDITAFSLCEHHMLPFMGKVHVAYIPNQKVVGLSKLARIVEMYSRRLQVQERLTRQIAESVQEILDPQGVAVVMEATHMCMVMRGVQKPGSWTVTSAMVGVFQEDQRTREEFLSLIRHQPAAFA

SEQ ID NO: 15639 - protein, 234 aa, Synechococcus lividus
  misc_feature (1)..(234): tr|A0A2D2PYT8|A0A2D2PYT8_SYNLI GTP cyclohydrolase 1 OS= Synechococcus lividus PCC 6715 OX=1917166 GN=folE PE=3 SV=1
MTSSSSNRLTMSESIANGKVTTPTVLPDRNTHQGKEAILHPPHAEAAKEEMMAAVRSILLNVGEDPEREGLLKTPKRVAEAMQFLTSGYSQSLDTLVNGAIFDEGHDEMVLVRDINFFSLCEHHMLPFIGKAHVAYIPNQRVIGLSKLARIVEMYARRLQVQERLTRQVAEAIETVLDPKGVAVVMEASHMCMVMRGVQKPGSWTVTSSMLGVFRDDQKTREEFLNLIRHQPNF

SEQ ID NO: 15640 - protein, 229 aa, Synechococcus sp.
  misc_feature (1)..(229): sp|Q2JR69|GCH1_SYNJA GTP cyclohydrolase 1 OS=Synechococ cus sp. (strain JA-3-3Ab) OX=321327 GN=folE PE=3 SV=1
MTLAKPGSGAEFRLNNKANLKSRLVRDLSHAAGQEPEGSESLDPAMVAAVETLLRGIGEDPQREGLKKTPERVVAALKFLTSGYRQSLEDLINGAIFDEGHDEMVLLRDITLFSLCEHHLLPFIGKAHVAYIPRQKVVGLSKIARIVEMYSRRLQVQERLTRQIAEALMTMLDPYGVGVVIEATHMCMVMRGVQKPGSWTVTSSMVGVFQEDPRTREEFLSLIRHPSNL

SEQ ID NO: 15641 - protein, 247 aa, Synechococcus sp.
  misc_feature (1)..(247): tr|G4FIH4|G4FIH4_9SYNE GTP cyclohydrolase I OS=Synechoc occus sp. WH 8016 OX=166318 GN=Syn8016DRAFT_1226 PE=4 S V=1
MTSTIPAISNGTLTSLNAEVQPVSQRIRQRLIDQGVSFLANDNVAAFIQTGELDELEIEVADRVRELLRSLVIDIENDHNTAETAERVARMYLREVFKGRYHHQPKVASFPNVKQLDEIYTVGPITVRSACSHHLVPIMGNCWIGIKPGDRVIGLSKFTRVADWVFSRPHIQEEAVMILADEIERLCAPQGLGIIIKAQHYCMKWRGVREPQTSMVNSVVRGDFRHDPSLKQEFFELVRQQEAMLST

SEQ ID NO: 15642 - protein, 234 aa, Synechocystis sp.
  misc_feature (1)..(234): sp|Q55759|GCH1_SYNY3 GTP cyclohydrolase 1 OS=Synechocys tis sp. (strain PCC 6803 / Kazusa) OX=1111708 GN=folE P E=3 SV=1
MTIASSHSINNGMNTGKLVNQLSSLPDRNTHNGQEVKYHPENVELNKEKMMDAVRVMLESVGEDPEREGLLKTPKRVAEAMQFLTQGYDQSLEKLVNGAIFDEGHNEMVLVRDIDFFSLCEHHMLPFMGKAHLAYIPNQKVVGLSKLARIVEMFSRRLQVQERLTRQIAEAVQEILDPQGVAVVMEATHMCMVMRGVQKPGSWTVTSAMIGSFQNEQKTREEFLNLIRHQPNFY

SEQ ID NO: 15643 - protein, 234 aa, Synechocystis sp.; identical to SEQ ID NO: 15642
  misc_feature (1)..(234): tr|A0A068MVU6|A0A068MVU6_SYNY4 GTP cyclohydrolase 1 OS= Synechocystis sp. (strain PCC 6714) OX=1147 GN=folE PE= 3 SV=1

SEQ ID NO: 15644 - protein, 268 aa, Synergistaceae bacterium
  misc_feature (1)..(268): tr|A0A3C0SKA2|A0A3C0SKA2_9BACT GTP cyclohydrolase FolE2 OS=Synergistaceae bacterium OX=2053624 GN=folE2 PE=3 S V=1
MRDVQSERDIRNIPIDSVGVTGLAYPIEVRDRNDKTQHTVATVEMSVSLPRDYRGTHMSRFIEILNSCNGHVTLPNLEHIVAALRDHLDAEQSEIRFSFPYFAVRKAPVSGAPSLTRYDVVFWASSGKDFDFTLTVIVPVNTLCPCSREISEKGAHNQRAEVTITVRMDRLVWIEELAEVAEESASSPVFTLLKREDEKFVTEKAYDTPRFVEDVVREVAVRLDDDPRVRWYSVRVVSHESIHAHEAFASLSRDKGLWIDKQGGDRHR

SEQ ID NO: 15645 - protein, 268 aa, Synergistaceae bacterium
  misc_feature (1)..(268): tr|A0A353N0T7|A0A353N0T7_9BACT GTP cyclohydrolase FolE2 OS=Synergistaceae bacterium OX=2053624 GN=folE2 PE=3 S V=1
MRDVQSERDIRNIPIDSVGVTGLAYPIEVRDRNDKTQHTVATVEMSVSLPRDYRGTHMSRFIEILNSCNGHVTLPNLEHIVAALRDHLDAEQSEIRFSFPYFAVRKAPVSGAPSLTRYDVVFWASSGKDFDFTLTVIVPVNTLCPCSREISEKGAHNQRAEVTITVRMDRLVWIEELAEVAEESASSPVFTLLKREDEKFVTEKAYDTPRFVEDVVREVAVRLDDDPRIRWYSVRVVSHESIHAHEAFASLSRDKGLWIDQQGGDRHR

SEQ ID NO: 15646 - protein, 268 aa, Synergistales bacterium; identical to SEQ ID NO: 15645
  misc_feature (1)..(268): tr|A0A101I3U4|A0A101I3U4_9BACT GTP cyclohydrolase FolE2 OS=Synergistales bacterium 58_81 OX=1635274 GN=folE2 P E=3 SV=1

SEQ ID NO: 15647 - protein, 268 aa, Synergistales bacterium; identical to SEQ ID NO: 15645
  misc_feature (1)..(268): tr|A0A101GQP5|A0A101GQP5_9BACT GTP cyclohydrolase FolE2 OS=Synergistales bacterium 57_84 OX=1641384 GN=folE2 P E=3 SV=1

SEQ ID NO: 15648 - protein, 259 aa, Synergistes jonesii
  misc_feature (1)..(259): tr|A0A073ISC5|A0A073ISC5_9BACT GTP cyclohydrolase FolE2 OS=Synergistes jonesii OX=2754 GN=folE2 PE=3 SV=1
MRDVQNETDDRNLEIDRVGVRDISWPIAVPDRDSGTQETIANVSLSVSLPRDYRGTHMSRFVEVLSSQEKRVTFHNMEGLLETLRARLAARDAHALFDFPYFITKSAPVSGAKGRVRCDVRFDASLVDDEFDLVTTVTAPIQTLCPCSKEISDFGAHNQRAHAVMEVRLSGFVWLEEFVKMADDCASAPIYSLLKREDEKFVTERAYMHPKFVEDAVRDLALAMRAEPRVLWYRVSVASHESIHNHDAFAVIVGDKRNG

SEQ ID NO: 15649 - protein, 258 aa, Synergistes sp.
  misc_feature (1)..(258): tr|G9PZK0|G9PZK0_9BACT GTP cyclohydrolase FolE2 OS=Syne rgistes sp. 3_1_syn1 OX=457415 GN=folE2 PE=3 SV=1
MRDVQNESDNRNMAIDRVGIRDLSWPISVPDRMNGTQETVAQVSLSVSLPRDYRGTHMSRFIEVLGAQEKSVTFHNMEGLLMTLKERLQARDAHAVFEFPYFIMKEAPVSGAKGRLRCDVRFEAALCGDDFDLVTTVTSPVQTLCPCSKEISEFGAHNQRAHAVMEVRLSGFVWLEEFVRMADDCASAPIYSLLKREDEKYVTERAYSNPRFVEDSVRELALAMQADERVLWYRVSVTSHESIHNHDAFAVIERDKRI

SEQ ID NO: 15650 - protein, 332 aa, Synergistetes bacterium
  misc_feature (1)..(332): tr|A0A1V5JW72|A0A1V5JW72_9BACT GTP cyclohydrolase FolE2 OS=Synergistetes bacterium ADurb.Bin520 OX=1852915 GN= folE2 PE=3 SV=1
MGRSGIRPAPRALPFALEGDVQQGHPEVPLGLSRVGISNLRRIVRLGTEDRVALFYATMDLFAHLRGDRAGVHMSRFSEILEEMGEEISLPPTPDLESLAERIALQIARRQEAASSEVHIRAQFLVRQETPLSSRRSDELYTFLGYAASDGVTVRRAAGVEVDGLTACPCAQDMVRGAALARLREAGYAPEEAERIVSLVPLATHNQRGRGTLILGCDPKIPAEHLVAVVEAAMSSETYELLKRPDEFFVVEKAHRRPRFVEDVVREMLRHVVEAFPDLPDDTFVLARQENLESIHQHNAFAEASALLGSLRRELAGGPPASGPSLEGWLRG

SEQ ID NO: 15651 - protein, 257 aa, Synergistetes bacterium
  misc_feature (1)..(257): tr|A0A2N1QTL2|A0A2N1QTL2_9BACT GTP cyclohydrolase FolE2 OS=Synergistetes bacterium HGW-Synergistetes-1 OX=2013 842 GN=folE2 PE=3 SV=1
MRDVQSEHDKRNIAIDKVGIRGLSWPIQVLDRSNGIQDTVANVSLSVFLPRDYRGTHMSRFIEVLGEQENQVTFHNMENLLKMLQKRLDADEAHADFEFPYFITKKAPVSGAPGRMRYDVRFFAELKGSKFDLITELTAPIQTLCPCSKEISDRGAHNQRAHAKISVRMKTFVWIEELAEAADLCASAPVYSILKREDEKAVTEKAYANPRFVEDSVRELSIAMEKDHRITWYSVSVTSHESIHNHDAFASVERSKN

SEQ ID NO: 15652 - protein, 255 aa, Syntrophaceae bacterium
  misc_feature (1)..(255): tr|A0A1J5IBR2|A0A1J5IBR2_9DELT GTP cyclohydrolase FolE2 OS=Syntrophaceae bacterium CG2_30_58_14 OX=1805378 GN= folE2 PE=3 SV=1
MIDIQNLKDERNIDIKKVGVKGLKYPIVVLDRAHETQQVNATINMYVSLLHHFKGTHMSRFVEVLNEIREQVNIRTFHSILEKIRTRLRAESAHIEIEFPYFIEKTAPRSKAKSLMEYRCQFMGTCNDGGMDFMVGMVVPVTTVCPCSKEISRSGAHNQRSIVTVRVRFRKFFWIEDVIKLIEKSASGEVYSLLKRIDEKFVTEKGYENPMFVEDVVRNVAVRLSQDPNFTWYSVEAENFESIHNHSAYACVEKE

SEQ ID NO: 15653 - protein, 257 aa, Syntrophaceae bacterium
  misc_feature (1)..(257): tr|A0A1V4X8J4|A0A1V4X8J4_9DELT GTP cyclohydrolase FolE2 OS=Syntrophaceae bacterium PtaB.Bin038 OX=1811716 GN=f olE2 PE=3 SV=1
MIDVQSRRDRRKIDIQKVGVKGIQYPVIVLDRANGIQHVNATVDMFVDLPHQFKGTHMSRFIEILNEVRGQINLRSFEKILLQMREKLNAKSAHMEIEFPYFIEKRAPVSGAKSLMGYRCRFTGEHDGEKTDFLVGVSVPVTTVCPCSKEMSSLGAHNQRSIVTVRVRFRKFFWIEDVISLVEGSASGEVYSLLKRVDEKHVTEAAHANPMFVEDVVRSVAVKLNRDPNFTWYRVEAENIESIHNHSAYACVEKEPS

SEQ ID NO: 15654 - protein, 185 aa, Syntrophaceticus schinkii
  misc_feature (1)..(185): tr|A0A0B7MP98|A0A0B7MP98_9FIRM GTP cyclohydrolase 1 OS= Syntrophaceticus schinkii OX=499207 GN=folEA PE=3 SV=1
MDREKILQGVRLLIEGIGEDPEREGLQGTPDRVARMCEEIFCGLHSDPKEELNVCFTENHSEMILVKDIPIYSVCEHHLLPFYGKAHVAYIPRQGKLTGLSKLARVVETLSKRPQLQERLTSQVADTIMDALNPLGVIVVIEAEHMCMTMRGIKKAGAKTMTSAVRGVFKTSEATRAEAFALIKE

SEQ ID NO: 15655 - protein, 257 aa, Syntrophobacter fumaroxidans
  misc_feature (1)..(257): sp|A0LQR3|GCH4_SYNFM GTP cyclohydrolase FolE2 OS=Syntro phobacter fumaroxidans (strain DSM 10017 / MPOB) OX=335 543 GN=folE2 PE=3 SV=1
MIDVQSRFDSRNIRVDKVGVKDIRYPITVMDKTNGIQHTVASVNMYVNLPREFKGTHMSRFIEILNEFHGNLDIREFPSILQSVQEHLSAESAHLELSFSYFIKKLSPVTGCAGLMEYGCRVAGSLDSNRGHDLVLEVNVPISTVCPCSKEISSYGAHNQRGMVRLAVRFKKFVWIEDLVRLVECAASSEVYSVLKRPDEKFVTESAFDNPKFVEDVVRDIAKELKADQNISWFLVDVENFESIHNHSAYACIERSK

SEQ ID NO: 15656 - protein, 257 aa, Syntrophobacter sp.
  misc_feature (1)..(257): tr|A0A2P9GUX9|A0A2P9GUX9_9DELT GTP cyclohydrolase FolE2 OS=Syntrophobacter sp. SbD2 OX=2043168 GN=folE PE=3 SV =1
MIDVQNQADHRNISIDKVGVKDIRYPVTVMDRNNGVQHTVASINMYVNVPREFKGTHMSRFIEILNEFHGHLDIREFSSVLEALQEHLQSESAHMEINFPYFIRKLSPVTESAGLMEYRCRIAGTLDREKGYDLVVEVNVPITTVCPCSKEISDHGAHNQRGTVRIAVRFQRFIWIEDLIDLVERAASCDVYSVLKRPDEKYVTEYAFENPKFVEDVVRDIACELEHDPNVCWFLVDVENFESIHNHSAYAFIERQK

SEQ ID NO: 15657 - protein, 271 aa, Syntrophobacter sp.
  misc_feature (1)..(271): tr|A0A2U3LI71|A0A2U3LI71_9DELT Putative GTP cyclohydrol ase 1 type 2 OS=Syntrophobacter sp. SbD1 OX=2043167 GN= SBDP1_950010 PE=4 SV=1
MVRIKDILQWIDSWAPFRYAELWDNCGLQVGNPQSAVTRALVALDPASCVIEEAEQCGCQCVVTHHPLLLSPIKFVRTDSWPGSIIGRALLSGISIIAAHTNLDAARLGTNAQLKELLGLSVTGPLDASALFCGQEQYMGMGLVGLLPRETGIESLAATLSGALGGTAVRVTGDLRKKISRVAVCTGSGASLMEKALAAGAEVFITGDFKYHDARFAEENGLGVIDIGHFASEKLVLEPFADFLRSKAKSEAAELEVFVSKSQADPFKLVV

SEQ ID NO: 15658 - protein, 259 aa, Syntrophobacteraceae bacterium
  misc_feature (1)..(259): tr|A0A2M6YL84|A0A2M6YL84_9DELT GTP cyclohydrolase FolE2 OS=Syntrophobacteraceae bacterium CG07_land_8_20_14_0_ 80_61_8 OX=1974095 GN=folE2 PE=3 SV=1
MIDVQSQLDDRNVNIDKVGVKNVRYPITVMDRENQLQHTVASINMYVNLPRQFKGTHMSRFIEILNEFHGHLDIREFSRVVEAMKERLQAQSAHLEIEFPYFIKKQSPVTRTAGLMEYHCRVMGSLDQAGKHDLVVEVNVPITTVCPCSREISRHGAHNQRGLAHLAVRFKRFIWIEDLVRMVERAASCEVYSLLKRPDEKFVTEKGYDNPKFVEDVVRDIAVQLKTDPNVLWFRADVENYESIHNHSAYAYIERRKAV

SEQ ID NO: 15659 - protein, 259 aa, Syntrophobacteraceae bacterium
  misc_feature (1)..(259): tr|A0A1J5IQI1|A0A1J5IQI1_9DELT GTP cyclohydrolase FolE2 OS=Syntrophobacteraceae bacterium CG2_30_61_12 OX=1805 379 GN=folE2 PE=3 SV=1
MIDVQSQLDDRNVNIDKVGVKNVRYPITVMDRENQLQHTVASINMYVNLPRQFKGTHMSRFIEILNEFHGHLDIREFSRVVEAMKERLHAQSAHLEIEFPYFIKKQSPVTRTAGLMEYHCRVMGSLDQAGKHDLVVEVNVPITTVCPCSREISRHGAHNQRGLAHLAVRFKRFIWIEDLVRMVERAASCEVYSLLKRPDEKFVTEKGYDNPKFVEDVVRDIAVQLKTDPNVLWFRADVENYESIHNHSAYAYIERRKAV

SEQ ID NO: 15660 - protein, 255 aa, Syntrophobacterales bacterium; identical to SEQ ID NO: 15652
  misc_feature (1)..(255): tr|A0A2M7BDS4|A0A2M7BDS4_9DELT GTP cyclohydrolase FolE2 OS=Syntrophobacterales bacterium CG03_land_8_20_14_0_8 0_58_14 OX=1974100 GN=folE2 PE=3 SV=1

SEQ ID NO: 15661 - protein, 251 aa, Syntrophobacterales bacterium
  misc_feature (1)..(251): tr|A0A1G3UQ04|A0A1G3UQ04_9DELT GTP cyclohydrolase I (Fr agment) OS=Syntrophobacterales bacterium GWC2_56_13 OX= 1802287 GN=A2X96_00835 PE=3 SV=1
MIDIQNLKDERNINIKKVGVKGLKYPIVVLDRAHGTQPVNATINMYVSLLHNFKGTHMSRFVEVLNDIREQVNIRTFHSILEKIRTKLHAESAHIEIEFPYFIEKTAPRSGAKSLMEYRCRFLGTNDGGRMDFVVGMAVPVTTVCPCSREISRVGAHNQRSIVTVKVRFRKFFWIEDVIRLIEDSASGEVYSLLKRIDEKYVTEKGYKNPMFVEDVVRNVAERISRDANFTWYRVEAENFESIHNHSAYAC

SEQ ID NO: 15662 - protein, 188 aa, Syntrophobotulus glycolicus
  misc_feature (1)..(188): tr|F0T214|F0T214_SYNGF GTP cyclohydrolase 1 OS=Syntroph obotulus glycolicus (strain DSM 8271 / FlGlyR) OX=64599 1 GN=folE PE=3 SV=1
MEINTQKLEQAVSMLLEAIGEDPEREGLIDTPKRVAKFYAEAFAGLHDDPSKHLQVIFDENHEEMVIVKDIPMYSMCEHHLLPFFGKAHVAYIPRNGKVTGLSKLARVIDGYARRPQLQERLTTQIADTIKNSLEARGVLVVIEAEHMCMTLRGIKKPGSKTVTSAVRGIFQTSSATRAEAFSLIMGK

SEQ ID NO: 15663 - protein, 191 aa, Syntrophomonas sp.
  misc_feature (1)..(191): tr|A0A3B8HY24|A0A3B8HY24_9FIRM GTP cyclohydrolase 1 OS= Syntrophomonas sp. OX=2053627 GN=folE PE=3 SV=1
MTNREINKPQIVQAVRMILEAIGENPEREGLLNTPQRVAKMYEEIFSGMGTEPKEFLEVCFSEYHDELVLVKDIPIYSMCEHHLLPFYGKAHVAYIPKGGKVVGISKLVRVAEAYAHRPQLQERLTSQIADCIYDALSPYAVGVVIEAEHMCMTMRGVRKPGSITVTSAVRGLFETRSEVRAELFALINSK

SEQ ID NO: 15664 - protein, 190 aa, Syntrophomonas sp.
  misc_feature (1)..(190): tr|A0A356Z9Y4|A0A356Z9Y4_9FIRM GTP cyclohydrolase 1 OS= Syntrophomonas sp. OX=2053627 GN=folE PE=3 SV=1
MPGQNIDTDKIKQAVTMMLEAIGENPEREGLVDTPARVARMYQEIFEGLRETPQDFLKVSFTEYHDELVLVKDIPLYSMCEHHLLPFYGKAHVAYIPRGGKVVGISKLARVTESFAHRPQLQERLTSQIADCINETLHPYGVAVVIQAEHMCMTMRGVRKPGALTVTSAVRGIFETSQASRAEVFSLING

SEQ ID NO: 15665 - protein, 192 aa, Syntrophomonas wolfei
  misc_feature (1)..(192): tr|Q0AX39|Q0AX39_SYNWW GTP cyclohydrolase 1 OS=Syntroph omonas wolfei subsp. wolfei (strain DSM 2245B / Goettin gen) OX=335541 GN=folE PE=3 SV=1
MQKKVIDEAKIEEAVHMILEAIGEDPEREGLQNTPKRVARMYREIFAGMNSNPREFLQVSFTEFHDELVLVKDIPLYSMCEHHLLPFYGKAHVAYIPRGGKVVGISKLTRVAEAYAMRPQLQERLTSQIADCINDSLKPFGVAVVIEAEHMCMTMRGVRKPGALTVTSAVRGIFETRPETRAEVFSLINQKI

SEQ ID NO: 15666 - protein, 88 aa, Syntrophomonas wolfei
  misc_feature (1)..(88): tr|A0A354YWG1|A0A354YWG1_9FIRM GTP cyclohydrolase 1 (Fr agment) OS=Syntrophomonas wolfei OX=863 GN=DDZ44_01430 PE=3 SV=1
MDEAKIEEAVHMILEAIGEDPEREGLQNTPKRVARMYSEIFAGMNSNPREFLKVSFTEFHDELVLVKDIPLYSMCEHHLLPFYGKAHV

SEQ ID NO: 15667 - protein, 190 aa, Syntrophomonas zehnderi
  misc_feature (1)..(190): tr|A0A0E3W3M8|A0A0E3W3M8_9FIRM GTP cyclohydrolase 1 OS= Syntrophomonas zehnderi OL-4 OX=690567 GN=folE PE=3 SV= 1
MDKQDNNRLKIEAAFKQILEAIGEDPQREGVVNTPARVARMYDELFWGMKVDPRKYLDVSFTEYHDELVLVKDIPIYSMCEHHFLPFYGVAHIAYIPKGGKVVGISKLARVAEAYARRPQLQERLTSQIADCIYETLEPMGVGVVIQAEHMCMTMRGIKKPGSLTVTSAVRGIFETRPQTRAELLTLILK

SEQ ID NO: 15668 - protein, 263 aa, Syntrophorhabdaceae bacterium
  misc_feature (1)..(263): tr|A0A1V5C2C5|A0A1V5C2C5_9DELT GTP cyclohydrolase FolE2 OS=Syntrophorhabdaceae bacterium PtaU1.Bin034 OX=18117 15 GN=folE2 PE=3 SV=1
MKDVQNMYDPRNIDIDKVGVKNVKYPIIVLDKANGTQHTIADISMYVSLPRDYKGTHMSRFVEILHQHKNMINMKDFPIILSEMKERLNAESAHMEVRFPYFIRKDAPVSGTQGYLEYNCALIGHMDNSNSMKEFTVSVSVPITTLCPCSKEISDWGAHNQRGIVTVGVRFKRFFWIEDLIATIEDCSSCDIYSVLKRQDEKFVTEKAFQNPKFVEDVVRDVAEKLGNEPNITYFVIEAENFESIHNHSAYAFLERKNEGGNA

SEQ ID NO: 15669 - protein, 269 aa, Syntrophorhabdus sp.
  misc_feature (1)..(269): tr|A0A1V4WQB5|A0A1V4WQB5_9DELT GTP cyclohydrolase FolE2 OS=Syntrophorhabdus sp. PtaB.Bin047 OX=1811700 GN=folE 2 PE=3 SV=1
MNDRQKMADVQNMHDSREIEIDKVGVKNVKYPIIVLDRANGHQNTIATIDMYVNLPHHYKGTHMSRFVEILHEYKNMINMKNFPDILKEMKARLDAEAAHMSVSFPYFIKKEAPVSKTPSYMEYQCGFKGSMGADNTMTEFIVSVSVPINTLCPCSKEISEQGAHNQRGITKVDVHTKRFFWIEDLIDIVEKSASSDIYSILKREDEKFITEHAFDNPKFVEDVVRDISERLSRDTNIRWFAIEAENFESIHNHSAYAYLERDNEGGKI

SEQ ID NO: 15670 - protein, 272 aa, Syntrophorhabdus sp.
  misc_feature (1)..(272): tr|A0A1V5DA00|A0A1V5DA00_9DELT GTP cyclohydrolase FolE2 OS=Syntrophorhabdus sp. PtaU1.Bin153 OX=1811705 GN=fol E2 PE=3 SV=1
MLDVQSFDDDRMIEIDKVGVKNIKYPIVVLDKTEGLQHTIATIDMYVNLPHNYKGTHMSRFVEILHSNKSMINMKNFPNILREMKDRLNAESAHLSVKFPYFIKKEAPISRTEGFLEYCCGFSGSMDGSNRMREFVVSVSVPINTLCPCSKEISEHGAHNQRGITTVSVRFKKFFWIEDLIGLVEQCASSDIYSVLKREDEKFVTERAFENPKFVEDVVRDIAETLSKDTNMTWFMIEAENFESIHNHSAYAYLERNNESGTAIKSGVDKVS

SEQ ID NO: 15671 - protein, 188 aa, Syntrophothermus lipocalidus
  misc_feature (1)..(188): tr|D7CMP9|D7CMP9_SYNLT GTP cyclohydrolase 1 OS=Syntroph othermus lipocalidus (strain DSM 12680 / TGB-C1) OX=643 648 GN=folE PE=3 SV=1
MDIEKIEKAVRMIIEAIGEDKDREGLRDTPRRVARMYAELFSGIEEDPSKHLQVLFTEHHDELVLIKDIPLYSMCEHHLLPFYGKAHVAYIPRKGRITGLSKLVRVVEGFAKRPQLQERLTSQIADSIMERLQPWGVAVVIEAEHMCMTMRGVNKPGSMTVTSAVRGIFETNPASRAEAFALIKGPIR

SEQ ID NO: 15672 - protein, 255 aa, Syntrophus aciditrophicus
  misc_feature (1)..(255): sp|Q2LUP0|GCH4_SYNAS GTP cyclohydrolase FolE2 OS=Syntro phus aciditrophicus (strain SB) OX=56780 GN=folE2 PE=3 SV=1
MIDIQNLEDHRKINIQKVGVKGINYPIVVLDKAKGTQHVNASINMYVDLPHHFKGTHMSRFIEVLNEFRGEINIRTFHTILEKVRDKLKAESAHMEITFPYFIEKTAPVSGAKSLMDYICAFSGMNAENKKDFLVGVVVPVTTVCPCSKEISCMGAHNQRSHVTVKVRFKKFFWLEDIIRLVETSASGEVYSLLKRVDEKYVTEQGYANPMFVEDVVRNVAERLNENSNLTWYSVEAENFESIHNHNAYAYVEKE

SEQ ID NO: 15673 - protein, 255 aa, Syntrophus gentianae
  misc_feature (1)..(255): tr|A0A1H7WPQ5|A0A1H7WPQ5_9DELT GTP cyclohydrolase FolE2 OS=Syntrophus gentianae OX=43775 GN=folE2 PE=3 SV=1
MIDIQSQKDHRKINIQKVGVKGIKYPIIVLDKTAGTQPVNASINMYVNLPHSFKGTHMSRFIEVLNEFRGEINLRTFHTILEKVREKLHAESAHMEIEFPYFIEKTAPVSGAKSLMEYRCLFSGCNAEHQKDFLVGIVVPVTTVCPCSKEISSMGAHNQRSFVTVKVRFRKFFWLEDLIRLVETSASGEVYSLLKRVDEKYVTEQGYSNPMFVEDVVRNIAEQLNSNSNLTWYSVEAENFESIHNHNAYAYVEKE

SEQ ID NO: 15674 - protein, 255 aa, Syntrophus sp.
  misc_feature (1)..(255): tr|A0A1V5DMD8|A0A1V5DMD8_9DELT GTP cyclohydrolase FolE2 OS=Syntrophus sp. PtaU1.Bin208 OX=1811713 GN=folE2 PE= 3 SV=1
MIDIQSQKDHRKINIQKVGVKGIKYPIIVLDKIAGTQPVNASINMYVNLPHSFKGTHMSRFIEVLNEFRGEINLRTFHTILEKVREKLHAESAHMEIEFPYFIEKTAPVSGAKSLMEYRCLFSGCNAEHQKDFLVGIVVPVTTVCPCSKEISSMGAHNQRSFVTVKVRFRKFFWLEDLIRLVETSASGEVYSLLKRVDEKHVTEQGYSNPMFVEDVVRNVAEQLNSNSNLTWYSVEAENLESIHNHNAYAYVEKE

SEQ ID NO: 15675 - protein, 257 aa, Syntrophus sp.
  misc_feature (1)..(257): tr|A0A1V4XW87|A0A1V4XW87_9DELT GTP cyclohydrolase FolE2 OS=Syntrophus sp. PtaB.Bin138 OX=1811711 GN=folE2_2 PE =4 SV=1
MKDEKRFMQDVGMTDLPFPMKVLSRDHKEGQFTIAKISIATRIMHEFEARWIDKFIHIIHQHREQIGTESLKTNILDYMKELNATKVKVDFNYPFFIEKVTPVSKEKCLVRYNCTYSASVAKSDLKPKVSLKISAPCITTYPASSPEKTGGLFGQMSKVELEVQSQKDIFPEDLIEIVDNHALVPIYSFLTEEDQEFVIKKIHSEQKTSVVMVDEIKEELANIRDIEGYSVNCSNFGMLHSYSTFIGTAKSMWIPLS

SEQ ID NO: 15676 - protein, 363 aa, Tabrizicola sp.
  misc_feature (1)..(363): tr|A0A2N4YEL5|A0A2N4YEL5_9RHOB GTP cyclohydrolase FolE2 OS=Tabrizicola sp. TH137 OX=2067452 GN=folE2 PE=3 SV=1
MNIHTPELDRQPSREEAEAALAVLRRWAGKASDAEIATLDSSVAYLIPGEGYPALSRAYPSDFVVDSVYKDSLPDLQNGPASLIRGEKALIQHVGISNFRLPIRYRTRDNGEIMLETSVTGTVSLEAEKKGINMSRIMRSFYAHAERDFSFAVIEHALEDYKRDLESFDARIQMRFSFPVKVGSLRSGLSGWQYYDIALELVDVAGVRKKIMHLDFVYSSTCPCSLELSEHARRTRGQLATPHSQRSVARISVEVKPGKRLWFEDLIDLAREAVPTETQVMVKREDEQAFAELNAANPIFVEDAARSFCQALKGDGRIGDFRIVASHQESLHSHDAVSVLTEGPTFAAESLDPRLFQTLYHVG

SEQ ID NO: 15677 - protein, 322 aa, Tahibacter aquaticus
  misc_feature (1)..(322): tr|A0A4R6YRT0|A0A4R6YRT0_9GAMM GTP cyclohydrolase FolE2 OS=Tahibacter aquaticus OX=520092 GN=folE2 PE=3 SV=1
MRPTENAVRSLPDVAKEMQPHVAGTLDWVGMGEIEVPVSINNPDGRTVQSGARVTAYVNLTDPDARGIHMSRLYLHVDKSLSNEPLTPCSLRRLLKDFLDSHTGLSDRALVRIRFDHLLRRPALVSDNSGWKSYPIVLTALMDRGQFSLEIGYEVVYSSTCPCSAALARQLIQERFGQDFARGRPLDYDQIVAWLGSEQGICATPHSQRSSAEVRVKLLQGFELPLIELIDCVEQALKTPVQTAVKRVDEQAFARLNGENLMFCEDAARRVQQALDADERIVDFWVRASHFESLHPHNAVAVATKGVAGGYAGGMDAFAALR

SEQ ID NO: 15678 - protein, 200 aa, Tahibacter aquaticus
  misc_feature (1)..(200): tr|A0A4R6Z6H0|A0A4R6Z6H0_9GAMM GTP cyclohydrolase 1 OS= Tahibacter aquaticus OX=520092 GN=folE PE=3 SV=1
MSSEPSNNGVDRAEAEAAIRTLLRWAGEDPGREGLLDTPRRVVDAYRDWFSGYAEDPAEYLRRTFEEVAGYDELIVLRDIEFESHCEHHMAPIIGRAHVGYLPTDKVVGISKLARVVEGFARRFQVQEKLTAQIAHCIEDVLKPRGVGVVIEAAHQCMTTRGVHKTGVSMTTSQMLGAFREDARTRSEFLQFIAMPGPRR

SEQ ID NO: 15679 - protein, 198 aa, Taibaiella chishuiensis
  misc_feature (1)..(198): tr|A0A2P8D4P1|A0A2P8D4P1_9BACT GTP cyclohydrolase 1 OS= Taibaiella chishuiensis OX=1434707 GN=folE PE=3 SV=1
MAYKKEDHYDEHITNPLTTHYKSVIELLGEDADREGLQKTPERVAKAMQYLTQGYQMNAADILNSAKFKEPYSEMVIVKDIELYSLCEHHMLPFIGKAHIAYIPNGYITGLSKIARVVDCFARRLQVQERLTHQILDAIQEALAPLGVAVVIEAKHMCMMMRGVQKQNSVTTTSAFSGQFEHNETRSEFLRLIAADLV

SEQ ID NO: 15680 - protein, 198 aa, Taibaiella soli
  misc_feature (1)..(198): tr|A0A2W2BWN0|A0A2W2BWN0_9BACT GTP cyclohydrolase 1 OS= Taibaiella soli OX=1649169 GN=folE PE=3 SV=1
MAYKKIEQYDEDITNKLMENYRSSIELLGEDANREGLLKTPERVAKAMQYITAGYNMDAREVLNSAKFHESYSEMVIVKDIELYSLCEHHMLPFFGKAHIAYIPNGWITGLSKIARVVDCFARRLQVQERMTHQILDAIQETLNPQGVAVVIEAKHLCMMMRGVQKQNSVTTTSAFSGQFEKNETRSEFLKLITADLY

SEQ ID NO: 15681 - protein, 198 aa, Taibaiella sp.
  misc_feature (1)..(198): tr|A0A3N6ZMJ8|A0A3N6ZMJ8_9BACT GTP cyclohydrolase 1 OS= Taibaiella sp. KBW10 OX=2153357 GN=folE PE=3 SV=1
MAYKKIESYDEQTTQELSGLYKSVISVLGEDAEREGLQKTPERMAKAMQYLTQGYQLDAHEILNSAKFKEDYNEMVIVKDIELYSMCEHHLLPFIGKAHIAYIPNGYITGLSKLARVVDVFARRLQVQERLTDQILAAIQETLQPQGVAVVIEAKHMCMMMRGVQKQNSSTTTSAFSGQFLQNETRSEFLRLISTELS

SEQ ID NO: 15682 - protein, 220 aa, Tamaricihabitans halophyticus
  misc_feature (1)..(220): tr|A0A4R2R1Z9|A0A4R2R1Z9_9PSEU GTP cyclohydrolase 1 OS= Tamaricihabitans halophyticus OX=1262583 GN=folE PE=3 S V=1
MTRSENVGGNGVPDGRAGIEVVPEESESGRREFDQERVERAIRELLIGVGEDPDRAGLRETPARVARAYRETFGGLHVDPDEVLDRTFAEGHEELVLVTDIPLYSTCEHHLVPFHGVAHVGYIPNAQGRVTGLSKLARLVDLYAKRPQVQERMTSQIADALMRKLRPRGVIVVVEAEHLCMSMRGIRKPGTRTTTSAVRGLLQTSSASRAEALELIRGRG

SEQ ID NO: 15683 - protein, 189 aa, Tamilnaduibacter salinus
  misc_feature (1)..(189): tr|A0A2U1CYN4|A0A2U1CYN4_9ALTE GTP cyclohydrolase 1 OS= Tamilnaduibacter salinus OX=1484056 GN=folE PE=3 SV=1
MKDSTDEIASHYDSIITQLGEDTDREGLRETPRRAARAMQFLTQGYHQSLEELVNGAVFQSDMDEMVLVQDIELYSLCEHHMLPFIGKCHIAYIPDGNVLGLSKFARIVDMYARRLQIQESLTRNIAEAVQQVTGAKGVGVVVEAQHMCMMMRGVEKQNSHMTSSVMLGQFRKSQATRTEFLQLISGRK

SEQ ID NO: 15684 - protein, 189 aa, Tamilnaduibacter salinus
  misc_feature (1)..(189): tr|A0A2A2I7G0|A0A2A2I7G0_9ALTE GTP cyclohydrolase 1 OS= Tamilnaduibacter salinus OX=1484056 GN=folE PE=3 SV=1
MKDSTDEIASHYDSIITQLGEDTDREGLRETPRRAARAMQFLTQGYHQSLEELVNGAVFQSDMDEMVLVQDIELYSLCEHHMLPFIGKCHIAYIPDGNVLGLSKFARIVDMYARRLQIQESLTRNIAEAVQQVTGARGVGVVVEAQHMCMMMRGVEKQNSHMTSSVMLGQFRKSQATRTEFLQLISGRK

SEQ ID NO: 15685 - protein, 195 aa, Tamlana nanhaiensis
  misc_feature (1)..(195): tr|A0A0D7W1K8|A0A0D7W1K8_9FLAO GTP cyclohydrolase 1 OS= Tamlana nanhaiensis OX=1382798 GN=folE PE=3 SV=1
MPYNKFEEYNMQVTDDVKERYKNIIDDLGEDTKREGLLKTPERAAKAMQFLTQGYNQDPVEILKGAMFKESYNEMVIVKDIELYSLCEHHILPFFGKAHIAYIPNGQIVGLSKLPRIVDVFARRLQVQERLTEQILDCINDTLKPQGVAVVIEAAHMCMMMRGVQKQNSTTTTSGFRGQFEKIETRNEFLKLIGK

SEQ ID NO: 15686 - protein, 225 aa, Tamlana nanhaiensis
  misc_feature (1)..(225): tr|A0A0D7VX12|A0A0D7VX12_9FLAO GTP cyclohydrolase 1 OS= Tamlana nanhaiensis OX=1382798 GN=folE PE=3 SV=1
MKIDNNIDEHDALGEDHIGTSSNTPLRLDAFKLSNEEKIEIIKDDVRHIMETLGLDLTDDSLSGTPNRVAKMFVKEIFGGLDPKKKPSASTFDNKYKYGEMLVEKNITLYSTCEHHLLPIVGRAHIAYISNGNVVGLSKMNRIVDYFAKRPQVQERLTIQIVKELQEVLNTQDVACVIDAKHLCVNSRGIRDIESSTVTSEFGGKFKDKTVRREFLDYIQLDTKF

SEQ ID NO: 15687 - protein, 221 aa, Tamlana sedimentorum
  misc_feature (1)..(221): tr|A0A0D7WB71|A0A0D7WB71_9FLAO GTP cyclohydrolase 1 OS= Tamlana sedimentorum OX=1435349 GN=folE PE=3 SV=1
MMNKDLIENIGDNHISTNIETPLLPNAFDKSDDEKIENIKHHFAKIMEELGLDLTDDSLSGTPYRFAKMYVKELFYGLNPKNKPKLSVFENKYKYKKMLVEQNITIDSSCEHHFLPITGHAHIAYIPKDKVIGLSKINRLVDYYAHRPQVQERLSLQILKDLQAVLNTKDVIVMISAKHLCVSSRGIKDKDSFTTTIEYDGAFNNELQRNEFFGIVNNSST

SEQ ID NO: 15688 - protein, 195 aa, Tamlana sedimentorum
  misc_feature (1)..(195): tr|A0A0D7WAM4|A0A0D7WAM4_9FLAO GTP cyclohydrolase 1 OS= Tamlana sedimentorum OX=1435349 GN=folE PE=3 SV=1
MPYNKFEEYNMKVTDDVKARYKHIIDDLGEDTKREGLLKTPERAAKAMQFLTQGYEQDPVEILKGAMFKESYNEMVIVKDIELYSLCEHHILPFFGKAHIAYIPNGHIVGLSKLPRIVDVFARRLQVQERLTEQILDCINDTLQPQGVAVVIEAAHMCMMMRGVQKQNSTTTTSGFRGQFEKIETRNEFLKLIGK

SEQ ID NO: 15689 - protein, 225 aa, Tamlana sp.
  misc_feature (1)..(225): tr|A0A2I7SE97|A0A2I7SE97_9FLAO GTP cyclohydrolase 1 OS= Tamlana sp. UJ94 OX=2069432 GN=folE PE=3 SV=1
MKFDSNLDDFDALGEEHIGTSEDTPMRNDAFKLSNEEKIDIIKDDVRHIMETLGLDLTDDSLKGTPNRVAKMFVKEIFGGLDPSKKPSASTFDNKYKYGEMLVEKNITVYSTCEHHLLPIVGRAHIAYISNGTVVGLSKMNRVVDYFAKRPQVQERLTIQIVRELQRVLGTKDVACVIDAKHLCVNSRGIRDIESSTVTSEFGGKFKDMGTRREFLDYIKLDTTF

SEQ ID NO: 15690 - protein, 225 aa, Tamlana sp.
  misc_feature (1)..(225): tr|A0A5C4SNC3|A0A5C4SNC3_9FLAO GTP cyclohydrolase 1 OS= Tamlana sp. CW2-9 OX=2583814 GN=folE PE=3 SV=1
MKFDNNLEDFDALGNEHIGTSENTPLRQDAFKLSNEEKIDIIKDDVRHIMETLGLDLSDDSLKGTPNRVAKMFVKEIFGGLDPDKKPSASTFDNKYKYGEMLVEKNITVYSTCEHHLLPIVGRAHIAYISNGTVVGLSKMNRVVDYFAKRPQVQERLTIQIVRELQNVLGTKDVACVIDAKHLCVNSRGIRDIESSTVTSEFGGKFKDMATRREFLDYIKLDTTF

SEQ ID NO: 15691 - protein, 242 aa, Tangfeifania diversioriginum
  misc_feature (1)..(242): tr|A0A1M6C0N0|A0A1M6C0N0_9BACT GTP cyclohydrolase 1 OS= Tangfeifania diversioriginum OX=1168035 GN=folE PE=3 SV =1
MKNEMILQGVNGNGKAKLNGNGHSKGKLNGYEILGENHVGTSAETPLRPDAFEKSDVEKMTVIEDKFRDIMATMGLDLTDDSLQGTPHRVAKMFVQEIFYGLNPDNKPAISVFDNKFKYNEMLVEKDINLNSFCEHHFLPIVGKAHVGYISSGQVIGLSKINRIVDYFARRPQVQERLTVQIANELKKVLKTEDVAVVIDAKHMCVSCRGIQDESSTTVTAEYGGRFKEKSVREEFLRYSGL

SEQ ID NO: 15692 - protein, 207 aa, Tangfeifania diversioriginum
  misc_feature (1)..(207): tr|A0A1M6PF20|A0A1M6PF20_9BACT GTP cyclohydrolase 1 OS= Tangfeifania diversioriginum OX=1168035 GN=folE PE=3 SV =1
MSEPKIVDSNGYERIDVFDEAVIDELASNYKNILQIIGEDVNREGLDKTPERVAKSMQFLLQGYKTDPVEILRSAMFKEDYRQMVIVKDIEIYSMCEHHLLPFFGKAHVAYIPNGTITGLSKIARVVDVFSRRLQVQERLTTQIKECIQDTLKPLGVAVVIEAQHLCMQMRGIQKQHSITTTSDFTGAFQKNATRDEFIKLISTKFS

SEQ ID NO: 15693 - protein, 193 aa, Tannerella forsythia
  misc_feature (1)..(193): tr|G8ULQ7|G8ULQ7_TANFA GTP cyclohydrolase 1 OS=Tannerel la forsythia (strain ATCC 43037 / JCM 10827 / FDC 338) OX=203275 GN=folE PE=3 SV=1
MKETEALLEVRRQVSEHYRQIIELLGEDTDREGLKKTPMRVAKAMQFLLKGYDEDPEAVLASAMFKEEDYKQMVIVKDIDFFSLCEHHMLPFFGKVHVAYIPNHYITGLSKIPRIVDIFAHRLQIQERMTLQIKECLQKTLNPLGVMVVIEAQHMCMQMRGVEKQNSLTTTSDFTGSFQQARTREEFMNLIKK

SEQ ID NO: 15694 - protein, 193 aa, Tannerella forsythia; identical to SEQ ID NO: 15693
  misc_feature (1)..(193): tr|A0A1D3UTT4|A0A1D3UTT4_TANFO GTP cyclohydrolase 1 OS= Tannerella forsythia OX=28112 GN=folE PE=3 SV=1

SEQ ID NO: 15695 - protein, 199 aa, Tannerella sp.
  misc_feature (1)..(199): tr|R7DGS4|R7DGS4_9BACT GTP cyclohydrolase 1 OS=Tannerel la sp. CAG:51 OX=1262979 GN=folE PE=3 SV=1
MQKVQDRLSDQEKEDLIAGHYKSILELLGEDVNREGLEKTPIRVARAMKFLTSGYSQSPEEILRSAIFHENYGDSQRIVLVKDIEFYSLCEHHLLPFFGKVHIGYMPGDKIVGLSKPARLVDAFARRFQVQERMTREILDCFDSVIEPYGTIVMVEARHLCMQMRGVEKQNASTTTCLYSGNFKDRELREEFFSMLRNR

SEQ ID NO: 15696 - protein, 199 aa, Tannerella sp.; identical to SEQ ID NO: 15695
  misc_feature (1)..(199): tr|A0A396MW45|A0A396MW45_9BACT GTP cyclohydrolase 1 OS= Tannerella sp. AF04-6 OX=2293248 GN=folE PE=3 SV=1

SEQ ID NO: 15697 - protein, 202 aa, Tanticharoenia sakaeratensis
  misc_feature (1)..(202): tr|A0A0D6MJ87|A0A0D6MJ87_9PROT GTP cyclohydrolase 1 OS= Tanticharoenia sakaeratensis NBRC 103193 OX=1231623 GN= folE PE=3 SV=1
MKTEGLRPLGPIDRPADADVRIARAVRDLLEALGEDVSREGLHDTPQRVARMYLEALGGLHADPREPLRTRFVADHHEGPVIVRDIGFHAMCEHHLLPFFGRAHVAYLPDAGVLTGLSKIARTVEVLARRPQLQERLTDQIAQALVETLAPRAVLVVVEAEHLCMAMRGVRAHGARTITMKARGIWADDLAARAEIMALLKA

SEQ ID NO: 15698 - protein, 240 aa, Tardiphaga robiniae
  misc_feature (1)..(240): tr|A0A163ZQG8|A0A163ZQG8_9BRAD GTP cyclohydrolase 1 OS= Tardiphaga robiniae OX=943830 GN=folE PE=3 SV=1
MDAVIKPLRGKSPDGKSSEIRSADNKVQEFRPAELDPAEFLAAAVNPDQLRPSRAEAEQAVQTLLAYIGENPQREGLMDTPRRVVEAYDELFQGYHQCPAEVLNRTFGETAGYDDFVLIRDMAFVSHCEHHMMPFYGKAHIAYTPVERVVGLSKLARLVDIFGHRLQTQEHLTAQLAAAVDEVLKPRGVAVMVEAEHTCMSARGIRKEGSRTFTTRFTGNFRDNPAEQARFMSMIQSMSR

SEQ ID NO: 15699 - protein, 240 aa, Tardiphaga sp.
  misc_feature (1)..(240): tr|A0A2U0TDL5|A0A2U0TDL5_9BRAD GTP cyclohydrolase 1 OS= Tardiphaga sp. OV697 OX=2135487 GN=folE PE=3 SV=1
MDAVIKPLRGKSPDGKSSEIRSADTKVQEFRPAELDPAEFLAAAVNPDQLRPSRAEAEQAVQTLLAYIGENPQREGLMDTPRRVVEAYDELFQGYHQCPAEVLNRTFGETAGYDDFVLIRDMAFVSHCEHHMMPFYGKAHIAYTPVERVVGLSKLARLVDIFGHRLQTQEHLTAQLAAAVDEVLKPRGVAVMVEAEHTCMSARGIRKEGSRTFTTRFTGNFRDNPAEQARFMSMIQSMSR

SEQ ID NO: 15700 - protein, 235 aa, Tardiphaga sp.
  misc_feature (1)..(235): tr|A0A5A7WGY8|A0A5A7WGY8_9BRAD GTP cyclohydrolase 1 OS= Tardiphaga sp. P9-11 OX=2024614 GN=folE PE=3 SV=1
MDAVIKPLRGKSPDGKPTESKAQEFRPAQLDPAEFLAAAVNPDQPRPSRAEAEHAVQTLLAYIGENPQREGLMDTPRRVVEAYDELFQGYHQCPAEVLNRTFGETAGYDDFVLIRDMAFVSHCEHHMMPFYGKAHIAYTPVERVVGLSKLARLVDIFGHRLQTQEHLTAQLAAAVDEVLKPRGVAVMVEAEHTCMSARGIRKEGSRTFTTRFTGNFRDNPAEQARFMSMIQSMSR

SEQ ID NO: 15701 - protein, 367 aa, Tateyamaria omphalii
  misc_feature (1)..(367): tr|A0A1P8MST3|A0A1P8MST3_9RHOB GTP cyclohydrolase FolE2 OS=Tateyamaria omphalii OX=299262 GN=folE2 PE=3 SV=1
MNIHTPDITAIPERDEAEAALETLRRWAKSATTTDIIELDPSVARLVPGSDGVDYPAFSRDYPEGFAVDAGYKDTLPDLQNGPSSLIRGAKTRIQHVGISNFRLPLRIETRDGAPLTLETSVTGTVSLEADKKGINMSRIMRSFYKHAEETFSFGVIEAALDDYMSDLESFDARIQMRFSMPVRVDSLRSGLSGYQYYDIALELVEQAGVRKRIVHLDYVYSSTCPCSLELSEHARATRGQLATPHSQRSVARISVALEDDADTLWFEDLIDACRRAVSTETQVMVKREDEQAFAELNAANPIFVEDAARLFSEQLLADVRVGDFRVVASHQESLHSHDAVSVLTEGDTFASDSIDPRMFQTLFHTG

SEQ ID NO: 15702 - protein, 367 aa, Tateyamaria sp.
  misc_feature (1)..(367): tr|A0A0B4CAV6|A0A0B4CAV6_9RHOB GTP cyclohydrolase FolE2 OS=Tateyamaria sp. ANG-S1 OX=1577905 GN=folE2 PE=3 SV= 1
MNIHTPDITAIPERDEAEAALELLRRWAQNATTTDIIELDPSVARLVPGGDGVDYPSFARDYPDEFRVDADYKDTLPDLQNGPSSLIRGAKTRIQHVGISNFRLPLRIESCDGAPLTLETSVTGTVSLEADKKGINMSRIMRSFYKHAEETFSFGVIEAALDDYKADLDSFDARIQMRFSMPVQVDSLRSGLSGYQYYDIALELVEQTGVRKRIVHLDYVYSSTCPCSLELSEHARAVRGQLATPHSQRSVARISVALEDDAETLWFEDLVDACRRAVPTETQVMVKREDEQAFAELNAANPIFVEDAARLFSEQLLADVRIGDFRVVASHQESLHSHDAVSVLTEGDTFAADSIDPRMFQTLFHTG

SEQ ID NO: 15703 - protein, 181 aa, Tatlockia micdadei
  misc_feature (1)..(181): tr|A0A098GAU9|A0A098GAU9_TATMI GTP cyclohydrolase 1 OS= Tatlockia micdadei OX=451 GN=folE PE=3 SV=1
MQELYKQILEAIGEDVEREGLRGTPDRAANAFRYLTKGYHENLDEIINDALFDSDMSEMVIVKEIEMYSMCEHHLLPFLGKCHVGYMPNGKVLGLSKVARIVDYFARRLQIQERLTIEIADCISSITNARGVAVVIEAKHLCMMMRGIEKQNSVMTTSVMLGEMRDNSASRSEFLRLISKS

SEQ ID NO: 15704 - protein, 308 aa, Tatumella citrea
  misc_feature (1)..(308): tr|A0A1Y0LBM7|A0A1Y0LBM7_TATCI GTP cyclohydrolase FolE2 OS=Tatumella citrea OX=53336 GN=folE2 PE=3 SV=1
MTIKTKLSPTDLPDVQSEKGEATESLSRVGMEQIDLPVEISGRPVSAKVNAGINLLSSPDAEKGIHMSRLYLLLDELTQHEITPKLLERVLNKFLKSHHGQSDEANIDVYGDILLSRKSLTSNLYGWKAYPIHLSAELNKGLATTLKVGIPYSSTCPASAALSRQVAASQFRDDFANRTDDVPVDEVVEWLTERGMPATPHSQRSWAWITIVLSPAADSYPIEEVIDYTETALGTAVQTVVKRSDEQAFAVANGKNLMFCEDAVRRLSKAFQTAPFCEDFEIYVEHQESLHPHNAVARIYRKGNKNVT

SEQ ID NO: 15705 - protein, 221 aa, Tatumella citrea
  misc_feature (1)..(221): tr|A0A1Y0LAD9|A0A1Y0LAD9_TATCI GTP cyclohydrolase 1 OS= Tatumella citrea OX=53336 GN=folE PE=3 SV=1
MSLFSQEAALVHEALVARGLETPLRKPARELDDQARKTLIAGHMTEIMQLLNLDLQDDSLTETPHRIAKMYVDEIFSGLDYANFPKITVIENKMNVDEMVTVRDISLTSTCEHHFVTIDGKATVAYIPKDKVIGLSKINRIVQFFARRPQVQERLTQQVLVALQTLLGTNNVAVCIDAVHYCVKARGVQDATSATTTTSLGGLFKSSQNTRQEFLRSVRHN

SEQ ID NO: 15706 - protein, 221 aa, Tatumella morbirosei
  misc_feature (1)..(221): tr|A0A095T6R3|A0A095T6R3_9GAMM GTP cyclohydrolase 1 OS= Tatumella morbirosei OX=642227 GN=folE PE=3 SV=1
MSLFSQEAVLVHEALVARGLETPLRKPARELDDQARKTLIAGHMTEIMQLLNLDLQDDSLTETPHRIAKMYVDEIFSGLDYANFPKITVIENKMKVDEMVTVRDISLTSTCEHHFVTIDGKATVAYIPKDKVIGLSKINRIVQFFARRPQVQERLTQQVLVALQTLLGTNNVAVCIDAVHYCVKARGVQDATSATTTTSLGGLFKSSQNTRQEFLRSVRHN

SEQ ID NO: 15707 - protein, 311 aa, Tatumella morbirosei
  misc_feature (1)..(311): tr|A0A095UCJ1|A0A095UCJ1_9GAMM GTP cyclohydrolase FolE2 OS=Tatumella morbirosei OX=642227 GN=folE2 PE=3 SV=1
MSSAAKQTLCPGMLPDIQASKADGAGESLSWVGMEQIDLPVEIAGRPVSAKVNAGINLLSSPEAEKGIHMSRLYLLLDELTQGEITPGLLHHVLKAFLASHQGRSDEASIEISGELLLSRKSLNSNHLGWKAYPVTLSAELGQSFTATLKVGVPYSSTCPASAALSRQVAGLQFRKDFADRIDRLPAAEIVDWLVGKGMPATPHSQRSWAWLSIRLHPGAQSIPVIDLIDGAEIALGTAVQTVVKRSDEQAFAVANGQNLMFCEDAVRRLDHMLQTAPFCEAYDIRVEHQESLHPHNAVARINWKGIKNVT

SEQ ID NO: 15708 - protein, 221 aa, Tatumella ptyseos
  misc_feature (1)..(221): tr|A0A085JH92|A0A085JH92_9GAMM GTP cyclohydrolase 1 OS= Tatumella ptyseos ATCC 33301 OX=1005995 GN=folE PE=3 SV =1
MSLLSQEAALVHEALVARGLETPLRKPARELDNTTRKALIAGHMTEIMQLLNLDLDDDSLTETPHRIAKMYVDEIFSGLDYANFPKITVIENKMKVDEMVTVRDISLTSTCEHHFVTIDGKATVAYIPKDKVIGLSKINRIVQFFAQRPQVQERLTQQVLVALQTLLGTNNVAVCIDAVHYCVKARGVQDATSATTTTSLGGLFKSSQNTRQEFLRAVRHN

SEQ ID NO: 15709 - protein, 116 aa, Tatumella ptyseos
  misc_feature (1)..(116): tr|A0A2X5NPR0|A0A2X5NPR0_9GAMM GTP cyclohydrolase 1 OS= Tatumella ptyseos OX=82987 GN=folE_2 PE=3 SV=1
MARGLETPLRKPARELDNTTRKALIAGHMTEIMQLLNLDLDDDSLTETPHRIAKMYVDEIFSGLDYANFPKITVIENKMKVDEMVTVRDISLTSTCEHHFVTIDGKATVAYIRKIK

SEQ ID NO: 15710 - protein, 221 aa, Tatumella sp.; identical to SEQ ID NO: 5172
  misc_feature (1)..(221): tr|A0A2G8BYW1|A0A2G8BYW1_9GAMM GTP cyclohydrolase 1 OS= Tatumella sp. OPLPL6 OX=1928657 GN=folE PE=3 SV=1

SEQ ID NO: 15711 - protein, 226 aa, Taylorella asinigenitalis
  misc_feature (1)..(226): tr|G4QB93|G4QB93_TAYAM GTP cyclohydrolase I type 1 OS=T aylorella asinigenitalis (strain MCE3) OX=1008459 GN=TA SI_0953 PE=4 SV=1
MSQNTKYISDVIRERIQTAGKRFHANDNISEFINEDEIAQLQDEVESKFKAVLESLVIDTESDHNTNETAKRVAKMYVREIFAGRYEPMPAVTEFPNIESVNELIVVGPITIRSACSHHFCPIMGQCWIGVMPHKDSNLIGLSKYARIAHWVMHRPQIQEEAIMQLAAILEQKLNPKGIAVIMKADHYCMKWRGVKDSDSKMTNSVMRGCFLTNSDLRKEFLSLIA

SEQ ID NO: 15712 - protein, 269 aa, Taylorella asinigenitalis
  misc_feature (1)..(269): tr|I7IKD4|I7IKD4_9BURK GTP cyclohydrolase FolE2 OS=Tayl orella asinigenitalis 14/45 OX=1091495 GN=folE2 PE=3 SV =1
MIVDEQNAIPDVQNWDDERNLVIQKVGIRRIKYPFKLLSQEGSISTIGEWSLAVTLPENKKGTHMSRFVNLLQTHKDHTFTLSEFKTLCSEMTDLLEADRGFIETQFTFFVQKEAPISKVVSLMEYAVKWGVSYEKSKNSYGLSVEILIPVMSLCPCSKEISDYGAHNQRSHITVTLCGDLCEKWESVIAIVEGQSSSPLWGLLKRSDEKFVTEHSYDNPKFVEDLIRDVARALKSMQGNGRFDIQVENFESIHNHSAFAQMSINAGDL

SEQ ID NO: 15713 - protein, 267 aa, Taylorella equigenitalis
  misc_feature (1)..(267): tr|I7JIW5|I7JIW5_9BURK GTP cyclohydrolase FolE2 OS=Tayl orella equigenitalis 14/56 OX=1091497 GN=folE2 PE=3 SV= 1
MLKINNYDIPDVQNRNDLRELVIQKVGIKRIKYPLKVTSNSGDFSTVGEWSLAVELPANKKGTHMSRFVNLLQNHKNYSFTISSFKTLCKQMVGQLEANKGFIETSFIFFVEKEAPVSKVLSLLEYSVTWIVSYQESTDSFSTSVKVLVPVMSLCPCSKEISDYGAHNQRSHITFTIHGEFCEKWESVIDIVEAESSSPLWGLLKRSDEKFVTEHSYDNPKFVEDLIRDVAKALSNLDGIGHFELEVENFESIHNHSAFAYLSSKTT

SEQ ID NO: 15714 - protein, 219 aa, Telmatospirillum siberiense
  misc_feature (1)..(219): tr|A0A2N3Q0E7|A0A2N3Q0E7_9PROT GTP cyclohydrolase 1 OS= Telmatospirillum siberiense OX=382514 GN=folE PE=3 SV=1
MKDPVVTEQKPVTYEEVASRRQPGKPSRAEAEEAVRTLIRWTGDDPTREGLIDTPSRVVRSYEEFYEGYDIDPEEVLRRTFEETDGYDEMVVLRDIRLESHCEHHMVPIIGKAHVAYLPGNRVVGISKLARVVEIYSRRLQIQEKLTAQIANAIQEVLHPRGVAVVIEAAHQCMTTRGVRKPGVTMVTSRMLGAFRDNPATRREFMALISSPASGLSNV

SEQ ID NO: 15715 - protein, 230 aa, Tenacibaculum caenipelagi
  misc_feature (1)..(230): tr|A0A4R6TES8|A0A4R6TES8_9FLAO GTP cyclohydrolase 1 OS= Tenacibaculum caenipelagi OX=1325435 GN=folE PE=3 SV=1
MFEVNSKKMNNDSQDEIGENHIGTSAKTPLRADAFDISDKEKIEKIQENVKEILETLGMDLNDDSLSGTPKRVAKAFVSELFMGLNPKNKPEPSTFDNTYKYGEMLVEKNIIVYSTCEHHLLPIIGRAHVAYISNGKVIGLSKMNRIVEYYAKRPQVQERLTMQVVQAMQEALGTQDVACVIDAKHLCVNSRGIKDIESSTVTAEFGGAFKNKETKREFLDYIKLNTDFH

SEQ ID NO: 15716 - protein, 230 aa, Tenacibaculum dicentrarchi
  misc_feature (1)..(230): tr|A0A0U3JZF5|A0A0U3JZF5_9FLAO GTP cyclohydrolase 1 OS= Tenacibaculum dicentrarchi OX=669041 GN=folE PE=3 SV=1
MFEVNSNKMNEDRIDDIGDNHVGTSAKNPLRADAFDLSDQEKIAKIQESVKDILETLGMDLTDDSMQGTPKRVAKSFVNEIFMGLNPANMPKASTFENNYNYGEMLVEKNIVVYSTCEHHLLPIIGRAHVAYISGGRVIGLSKMNRLVEYFSKRPQVQERLTMQIVQAMQEALGTQDVACVIDAKHLCVNSRGIKDIESSTVTAEFGGKFKNKETKREFLDYLKMNTDFN

SEQ ID NO: 15717 - protein, 230 aa, Tenacibaculum dicentrarchi
  misc_feature (1)..(230): tr|A0A2H1XTV8|A0A2H1XTV8_9FLAO GTP cyclohydrolase 1 OS= Tenacibaculum dicentrarchi OX=669041 GN=folE PE=3 SV=1
MFEVNSNEMNEDRIDDIGDNHVGTSAKNPLRDDAFDLSDQEKIAKIQESVKDILETLGMDLTDDSMQGTPKRVAKSFVNEIFMGLNPANMPKASTFENNYNYGEMLVEKNIVVYSTCEHHLLPIIGRAHVAYISGGRVIGLSKMNRLVEYFSKRPQVQERLTMQIVQAMQEALGTQDVACVIDAKHLCVNSRGIKDIESSTVTAEFGGKFKNKETKREFLDYLKMNTDFN

SEQ ID NO: 15718 - protein, 230 aa, Tenacibaculum discolor
  misc_feature (1)..(230): tr|A0A497ZDI3|A0A497ZDI3_9FLAO GTP cyclohydrolase 1 OS= Tenacibaculum discolor OX=361581 GN=folE PE=3 SV=1
MFEVNNNKMNDDSIDEIGENHIGTSAKTPLRADAFDISDKEKIEKIQENVKEILETLGMDLTDDSMQGTPKRVAKAFVNELFMGLNPQNKPEASTFDNTYKYGEMLVEKNIIVYSTCEHHLLPIIGRAHVAYISNGKVIGLSKMNRIVEYYAKRPQVQERLTMQVVQAMQEALGTQDVACVIDAKHLCVNSRGIKDIESSTVTAEFGGAFKNKETKREFLDYIKLNTDFQ

SEQ ID NO: 15719 - protein, 230 aa, Tenacibaculum finnmarkense
  misc_feature (1)..(230): tr|A0A2I2LDE7|A0A2I2LDE7_9FLAO GTP cyclohydrolase 1 OS= Tenacibaculum finnmarkense OX=1680763 GN=folE PE=3 SV=1
MFEVNSNKMNEDRIDDIGDNHVGTSAKNPLRADAFDLSDQEKIAKIQESVKDILETLGMDLTDDSMQGTPKRVAKSFVNEIFMGLNPANMPKASTFENNYNYGEMLVEKNIVVYSTCEHHLLPIIGRAHVAYISGGRVIGLSKMNRLVEYFSKRPQVQERLTMQIVQAMQEALGTQDVACVIDAKHLCVNSRGIKDIESSTVTAEFGGKFKNKETKREFLNYLKMNTDFN

SEQ ID NO: 15720 - protein, 230 aa, Tenacibaculum finnmarkense; identical to SEQ ID NO: 15716
  misc_feature (1)..(230): tr|A0A2H1Y789|A0A2H1Y789_9FLAO GTP cyclohydrolase 1 OS= Tenacibaculum finnmarkense OX=1680763 GN=folE PE=3 SV=1

SEQ ID NO: 15721 - protein, 230 aa, Tenacibaculum gallaicum
  misc_feature (1)..(230): tr|A0A3E0HDR5|A0A3E0HDR5_9FLAO GTP cyclohydrolase 1 OS= Tenacibaculum gallaicum OX=561505 GN=folE PE=3 SV=1
MFEVKNNKMNDDSIDEIGENHIGTSAKTPLRPDAFDISDKEKIDKIQESVKEILETLGMDLTDDSMQGTPKRVAKAFVNELFMGLNPENKPEASTFDNTYKYGEMLVEKNIIVYSTCEHHLLPIIGRAHVAYISNGKVIGLSKMNRIVEYYAKRPQVQERLTMQVVQAMQEALGTQDVACVIDAKHLCVNSRGIKDIESSTVTAEFGGAFKNKETKREFLDYIKLNTDFH

SEQ ID NO: 15722 - protein, 217 aa, Tenacibaculum holothuriorum
  misc_feature (1)..(217): tr|A0A1Y2PHT1|A0A1Y2PHT1_9FLAO GTP cyclohydrolase 1 OS= Tenacibaculum holothuriorum OX=1635173 GN=folE PE=3 SV= 1
MNKEHIETIGNNHISSNIETPLRTDAFDKTDDEKVKNIQHHFGKIMEELGLDLTDDSLSGTPYRFAKMYVKELFYGLNPKNKPKLSTFDNKYGYKKMLVEQNITIDSACEHHFLPITGHAHIAYIPKDKVVGLSKINRLVDYYSHRPQVQERLSLQILKDLQEALQTEDVIVMISAKHLCVSSRGIKDKNSYTTTIEYGGCFKDDAKRDEFMKIINN

SEQ ID NO: 15723 - protein, 230 aa, Tenacibaculum holothuriorum
  misc_feature (1)..(230): tr|A0A1Y2PB11|A0A1Y2PB11_9FLAO GTP cyclohydrolase 1 OS= Tenacibaculum holothuriorum OX=1635173 GN=folE PE=3 SV= 1
MFEVNNNKMNDERIDEIGENHIATSAKTPLRADAFDISDKEKIERIQESVKEILETLGMDLTDDSMQGTPKRVAKAFVNELFMGLNPKNKPEASTFDNTYKYGEMLVEKNIIVYSTCEHHLLPIIGRAHVAYISKGKVIGLSKMNRIVEYYAKRPQVQERLTMQVVQAMQEALGTEDVACVIDAKHLCVNSRGIKDIESSTVTAEFGGAFKNKETKREFLDYIKLNTDFH

SEQ ID NO: 15724 - protein, 219 aa, Tenacibaculum jejuense
  misc_feature (1)..(219): tr|A0A238UHG8|A0A238UHG8_9FLAO GTP cyclohydrolase 1 OS= Tenacibaculum jejuense OX=584609 GN=folE2 PE=3 SV=1
MEKHDHIGDNHILTNIKTPMVPNAFDKSDDEKIANIQVHFKKIMEELGLDLTDDSLSGTPYRFAKMYVKELFYGLNPANKPKISTFENKYGYQKMLVEQNITIDSSCEHHFLPITGYAHVGYIPKDKVVGLSKINRLVDYYSHRPQVQERLCIQILKDLQETLGTEDVIVVVNAKHLCVSSRGIKDKESFTTTVEYGGRYNEASIRNEFFKICDFKNVE

SEQ ID NO: 15725 - protein, 229 aa, Tenacibaculum jejuense
  misc_feature (1)..(229): tr|A0A238UCW0|A0A238UCW0_9FLAO GTP cyclohydrolase 1 OS= Tenacibaculum jejuense OX=584609 GN=folE1 PE=3 SV=1
MFEIHNNMTDERIDEIGENHIGTSAKTPLRADAFDISDEEKIEKIQESVKDILITLGMDLTDDSLSGTPKRVAKAFVNELFMGLNPKNRPKASTFDNNYNYGEMLVEKNIIVYSTCEHHLLPIVGRAHVAYISDGKVIGLSKMNRIVDYFAKRPQVQERLTMQVVQAMQEALGTEDVACVIDAKHLCVNSRGIKDIESSTVTAEFGGKFKNKDTKREFLDYIKMDTPFD

SEQ ID NO: 15726 - protein, 230 aa, Tenacibaculum litoreum
  misc_feature (1)..(230): tr|A0A3R9D5Y5|A0A3R9D5Y5_9FLAO GTP cyclohydrolase 1 OS= Tenacibaculum litoreum OX=321269 GN=folE PE=3 SV=1
MFEVNNNKMNDDSIDEIGENHIGTSAKTPLRADAFDISDKEKIEKIQESVREILETLGMDLTDDSMQGTPKRVAKAFVNELFMGLNPQNKPEASTFDNTYKYGEMLVEKNIIVYSTCEHHLLPIIGRAHVAYISNGKVIGLSKMNRIVEYYAKRPQVQERLTMQVVQAMQEALGTQDVACVIDAKHLCVNSRGIKDIESSTVTAEFGGAFKNKETKREFLDYIKLNTDFQ

SEQ ID NO: 15727 - protein, 230 aa, Tenacibaculum lutimaris
  misc_feature (1)..(230): tr|A0A420DYY5|A0A420DYY5_9FLAO GTP cyclohydrolase 1 OS= Tenacibaculum lutimaris OX=285258 GN=folE PE=3 SV=1
MFEVNSNKMNDDRIDEIGENHIGTSAKTPLRADAFDISDKEKIEKIQESVREILETLGMDLTDDSMKGTPKRVAKAFVNELFMGLNPENKPEASTFDNTYKYGEMLVEKNIIVYSTCEHHLLPIIGRAHVAYISNGKVIGLSKMNRIVEYYAKRPQVQERLTMQVVQAMQEALGTQDVACVIDAKHLCVNSRGIKDIESSTVTAEFGGAFKNKETKREFLDYIKLNTDFQ

SEQ ID NO: 15728 - protein, 230 aa, Tenacibaculum maritimum
  misc_feature (1)..(230): tr|A0A2H1EB40|A0A2H1EB40_9FLAO GTP cyclohydrolase 1 OS= Tenacibaculum maritimum NCIMB 2154 OX=1349785 GN=folE P E=3 SV=1
MFEVNNNKMNDERIDEIGENHVSTSAKTPLRPDAFDISDSEKIEKIQESVKDILETLGMDLTDDSMKGTPRRVAKAFVNEIFMGLNPENKPKASTFDNNYNYGEMLVEKNIVVYSTCEHHLLPIVGRAHVAYISNGKVIGLSKMNRIVEYFSKRPQVQERLTMQVVQAMQEALGTEDVACVIDAKHLCVNSRGIKDIESSTVTAEFGGKFKDKETKREFLDYLKMNTEFN

SEQ ID NO: 15729 - protein, 219 aa, Tenacibaculum mesophilum
  misc_feature (1)..(219): tr|A0A1M5DLX9|A0A1M5DLX9_9FLAO GTP cyclohydrolase 1 OS= Tenacibaculum mesophilum OX=104268 GN=folE PE=3 SV=1
MNKHDYIGDNHILTNIKTPLTPNAFDKSDEEKIVNIQGHFAKIMEELGLDLTDDSLSGTPYRFAKMYVKELFYGLNPANKPKVSTFDNKYGYSKMLVEQNITIDSSCEHHFLPISGYAHIGYIPKNRVIELSKINRLVDYYSHRPQVQERLCLQILTDLQETLETEDVIVLVNAKHLCVSSRGIKDKNSYTTTIEYGGSFNDLAVRNEFFKICEFENRE

SEQ ID NO: 15730 - protein, 230 aa, Tenacibaculum mesophilum
  misc_feature (1)..(230): tr|A0A1M5HNP3|A0A1M5HNP3_9FLAO GTP cyclohydrolase 1 OS= Tenacibaculum mesophilum OX=104268 GN=folE PE=3 SV=1
MFEVNNNKMNDDSIDEIGENHIGTSAKTPLRADAFDISDKEKIEKIQESVREILETLGMDLTDDSMQGTPKRVAKAFVNELFMGLNPENKPEPSTFDNTYKYGEMLVEKNIIVYSTCEHHLLPIIGRAHVAYISNGKVIGLSKMNRIVEYYAKRPQVQERLTMQVVQAMQEALGTQDVACVIDAKHLCVNSRGIKDIESSTVTAEFGGAFKNKETKREFLDYIKLNTDFQ

SEQ ID NO: 15731 - protein, 229 aa, Tenacibaculum skagerrakense
  misc_feature (1)..(229): tr|A0A4R2NZA4|A0A4R2NZA4_9FLAO GTP cyclohydrolase 1 OS= Tenacibaculum skagerrakense OX=186571 GN=folE PE=3 SV=1
MFEIHNNMIDDRIDEIGENHVGTSAKTPLRADAFDISDEEKIAKIQDSVKDILETLGMDLTDDSLKGTPKRVAKAFVNEMFMGLNPKNKPSASTFDNNYKYGEMLVEKNIIVYSTCEHHLLPIVGRAHVAYISNGKVIGLSKMNRIVEYFSKRPQVQERLTMQVVQAMQEALGTDDVACVIDAKHLCVNSRGIKDIESSTVTAEFGGKFKNKETKREFLDYIKLNTTFD

SEQ ID NO: 15732 - protein, 221 aa, Tenacibaculum soleae
  misc_feature (1)..(221): tr|A0A1B9XYL1|A0A1B9XYL1_9FLAO GTP cyclohydrolase 1 OS= Tenacibaculum soleae OX=447689 GN=folE PE=3 SV=1
MMNKKQIELVGDNHMYSSIQTPLSTNAFKKTDDEKIENIAYHFKMIMEEIGLDLTDDSLSGTPYRVAKMYIKELFYGLNPANKPKLSTFENKYGYKKMLVEQNITIDSACEHHFLPIIGHAHVAYVAKDKVIGLSKINRLVDYYARRPQVQERLVLQILNDLQTVLDTKDVIIMVTAKHLCVSSRGIKDQSSFTTTLEYGGCFNNTEKRNEFLKIISNQKI

SEQ ID NO: 15733 - protein, 230 aa, Tenacibaculum soleae
  misc_feature (1)..(230): tr|A0A1B9Y3F3|A0A1B9Y3F3_9FLAO GTP cyclohydrolase 1 OS= Tenacibaculum soleae OX=447689 GN=folE PE=3 SV=1
MFEVNNNKMNDERIDEIGENHIATSAESPIRKDAFDISDEEKIARIEESVKDILITLGMDLTDDSMQGTPKRVAKAYVNELFMGLNPKNMPKASTFDNNYNYGEMLVEKNIVVYSTCEHHLLPIIGRAHVAYISNGKVIGLSKMNRIVEYFSKRPQVQERLTMQIVQAMQEALGTEDVACIVDAKHLCVNSRGIKDIESSTVTAEFGGAFKNKDTKREFLDYVKMDTKFD

SEQ ID NO: 15734 - protein, 230 aa, Tenacibaculum sp.
  misc_feature (1)..(230): tr|A0A2H1YF51|A0A2H1YF51_9FLAO GTP cyclohydrolase 1 OS= Tenacibaculum sp. TNO020 OX=1458515 GN=folE PE=3 SV=1
MFEVNNNKMNDERIDDIGDNHVATSAKNPLRDDAFDLSDQEKIAKIQESVKDILETLGMDLTDDSMQGTPKRVAKSFVNEIFMGLNPANMPKASTFENNYNYGEMLVEKNIVVYSTCEHHLLPIIGRAHVAYISGGRVIGLSKMNRLVEYFSKRPQVQERLTMQIVQAMQEALGTQDVACVIDAKHLCVNSRGIKDIESSTVTAEFGGKFKEKNTKREFLDYLKMNTDFN

SEQ ID NO: 15735 - protein, 232 aa, Tenacibaculum sp.
  misc_feature (1)..(232): tr|A0A1H5J9B8|A0A1H5J9B8_9FLAO GTP cyclohydrolase 1 OS= Tenacibaculum sp. MAR_2010_89 OX=1250198 GN=folE PE=3 S V=1
MKHQETLLNTLINKNSLNDFSIEDIGDDHLYTGIDTPLKNDAFSLSDNEKKEKIASLFSQIMDVMGLDLTDDSLNGTPKRVAKMYIDEIFSGLNPKNKPKIALFENKYRYNQMLIEKDIQFYSNCEHHFVPIIGKAHVAYVSSGKVIGLSKLNRIVQYYAKRPQVQERLTNQIATDLQAILNTKNVAVIIDAKHLCVSSRGVKDDSSSTITCFYGGVFNTKEKIVELQNYIK

SEQ ID NO: 15736 - protein, 230 aa, Tenacibaculum todarodis
  misc_feature (1)..(230): tr|A0A1L3JGR2|A0A1L3JGR2_9FLAO GTP cyclohydrolase 1 OS= Tenacibaculum todarodis OX=1850252 GN=folE PE=3 SV=1
MFEVNNNKMNDERSKEIGENHVGTSATTPLRADAFDISDEEKIERIQKSVKDILTTLGMDLTDDSLQGTPKRVAKSFVNEIFMGLDPKNMPKASTFDNNYNYGEMLVEKNIVVYSTCEHHLLPIIGRAHVAYISDGKVIGLSKMNRIVEYFSKRPQVQERLTMQVVQAMQEALGVEDVACVIDAKHLCVNSRGIKDIESSTVTAEFGGKFKERETKREFLDYLKMNTDFD

SEQ ID NO: 15737 - protein, 257 aa, Tenericutes bacterium
  misc_feature (1)..(257): tr|A0A1V6F972|A0A1V6F972_9BACT Putative GTP cyclohydrol ase 1 type 2 OS=Tenericutes bacterium ADurb.Bin087 OX=1 852918 GN=BWX74_00729 PE=4 SV=1
MKTRTLLTKLGRLYPKRIAQKYNDYVGYMAGQKVPEIKRIVLLLDLDEIVLEEALSHKPDLILTHHPFIRGTRAKVFARDEKKKAFALWLDTLPVMVYSMHTNFDEAPNGMNDALAEKLALTDIKPLASEPMARGGYLPHPMNVEEAAKYVVEKLETKYGLLVAGDKEREIKRVAITGGSGSRDWLSAMAEGYDLYISGDAPHHVRRDVMNAGYNYLDVPHEVENAFLCKMKEVLLAIDPTFDVIKIKHEKPPIVIK

SEQ ID NO: 15738 - protein, 263 aa, Tenericutes bacterium
  misc_feature (1)..(263): tr|A0A1V5HLD0|A0A1V5HLD0_9BACT Putative GTP cyclohydrol ase 1 type 2 OS=Tenericutes bacterium ADurb.BinA124 OX= 1852921 GN=BWY97_01509 PE=4 SV=1
MLIKEIVQYLEQLYPPQLAIESDFNRIGFIIGDLNFEVSNVLMALDLTLEVAQEAVLKNANLIITHHPFFFQPLDKIMFSSEKGQILNLLFTHRLSLFVMHTNLDVGNNGVNDTLARLIGLIDFKVINNEVGKGNFLRYGEIRPLTLASLALKLKNDLDLTGVRVVGDPQKIIKRVGIVGGSGAHDEDIAAALAMDLDCYITGEVKLPAAQKAYFHNLSLIEINHGVEKMVFYPLAQKMAGELGLKNRIFVSEINTDPLVVWK

SEQ ID NO: 15739 - protein, 205 aa, Tengunoibacter tsumagoiensis
  misc_feature (1)..(205): tr|A0A402AAJ8|A0A402AAJ8_9CHLR GTP cyclohydrolase 1 OS= Tengunoibacter tsumagoiensis OX=2014871 GN=folE1 PE=3 S V=1
MVMHMDQERARNNGHDAHDEQPQARHVDYARLLELGRELLIAVGENPDREGLLDTPRRWADWWREFIEYDPGKTETIFNTASTDQMVCVSGMRVFSLCEHHLLPMWCDVSIGYIPDGKVLGLSKFARIAHQFAHQLQIQERLGQEIADEISRITGTSHVAVVLKGEHLCMTGRGIRTPGVMTSSVMRGVFREHYETRMEFLRLIE

SEQ ID NO: 15740 - protein, 195 aa, Tenuibacillus multivorans
  misc_feature (1)..(195): tr|A0A1H0E374|A0A1H0E374_9BACI GTP cyclohydrolase 1 OS= Tenuibacillus multivorans OX=237069 GN=folE PE=3 SV=1
MEVSLKNNIQEEKKIIQEKISYHIYEILKLIGEDPEREGLLDTPNRVAKMYLDIFSGINLDPKLELNTLFEEKSNDWIIINDITFYSTCEHHLVTFYGKCHIGYIPNEKIAGLSKFARLVDVLSKKPQVQERLTNEIADCIDEVLKPKGIIVKVEAEHLCMCARGVKKPGSNTITQTKKGDLNQREIYNFLQLIN

SEQ ID NO: 15741 - protein, 306 aa, Tenuibacillus multivorans
  misc_feature (1)..(306): tr|A0A1H0CIZ8|A0A1H0CIZ8_9BACI GTP cyclohydrolase FolE2 OS=Tenuibacillus multivorans OX=237069 GN=folE2 PE=3 S V=1
MNETNSKKQLPPKEERHKLFGSVEPGPRTKPQDKDKMADLQNTKKDFLFELDAVGVSNVKHPIVVPSHVEPKEQTTIGTFYFASTISQGSKGTNMSRFTEQLQAYYNKGFRVDIETMKKFTKDLQERLKQKDAELTVEFPWFYQRKAPYTGNIGMNHADAWLKVKYHHENGYDIKVGLKAKITTLCPCSKEISEYSAHNQRGNVVIEITLDPEFDEDKQDWKELLLEAAESNASARIHPVLKRPDEKMVTEQAYENPRFVEDMVRLIASDLYELDMVKQFHVKCINEESIHLHDAIASITFDKREE

SEQ ID NO: 15742 - protein, 219 aa, Tepidamorphus gemmatus
  misc_feature (1)..(219): tr|A0A4R3MJN3|A0A4R3MJN3_9RHIZ GTP cyclohydrolase 1 OS= Tepidamorphus gemmatus OX=747076 GN=folE PE=3 SV=1
MADGSKRDAMDAMIRNYRGTAHDVNDRDPRGRPSREQVEAAVRTLIAWTGDDPKREGLIDTPRRVAKAFEELYGGYFECPIEALSRTFEEVGGYDDIVLLRDVPFFSHCEHHMLPFVGKANIAYYPAGRVVGLSKLARVVETYARRLQTQENLTAQIATTIDEVLQPHGVAVMLEAEHMCMSLRGVHKHGVSTVTTQFTGRFRDNVGEQDRFLRLVRDR

SEQ ID NO: 15743 - protein, 286 aa, Tepidanaerobacter acetatoxydans
  misc_feature (1)..(286): tr|U4QJM1|U4QJM1_TEPAE GTP cyclohydrolase FolE2 OS=Tepi danaerobacter acetatoxydans (strain DSM 21804 / JCM 160 47 / Re1) OX=1209989 GN=folE PE=3 SV=1
MNYLGKTADFMKSRFGKQKIVASCTGVNDLLKDIQSQIDTRGISLNRVGIKNIDWPLKVYDQTNGFQNTVANISLSVALNHDIKGTHMSRFVEVLNNIDILNPQIILSILSSIQTKLDAESSFFECKFPYFIWKESPVSKNISPLKIEAMILGEKNRDETEIIIGVVVPVQTLCPCSKAISSVGAHNQRANVKILVKTKKKIWFEHLAAIAEMSASSPVYSLLKREDEKYVTEAAYNTPKFVEDVARDAALLLEKEDGLKCYRVEVESHESIHNHEAFAWVEKALS

SEQ ID NO: 15744 - protein, 276 aa, Tepidanaerobacter syntrophicus
  misc_feature (1)..(276): tr|A0A0U9HIA9|A0A0U9HIA9_9THEO GTP cyclohydrolase FolE2 OS=Tepidanaerobacter syntrophicus OX=224999 GN=folE2 P E=3 SV=1
MKSRFGKLKIVESHTGVNDLLKDIQSQVDTRGISLNRVGIKNIDWPLKVYDQTNGFQNTVANISLSVALKHDIKGTHMSRFVEVLNNIDILNPQVILSILSRIQTKLDAESSFFECKFPYFIWKESPVSKNISPLKIEATISGEKNRDKTEIIIGVVVPVQTLCPCSKAISSVGAHNQRANVKILVKTKKKIWFEHLAAIAEMSASSPVYSLLKREDEKYVTEAAYNTPKFVEDVARDAALLLEKEEGLKCYRVEVESHESIHNHEAFAWVEKALS

SEQ ID NO: 15745 - protein, 187 aa, Tepidibacillus decaturensis
  misc_feature (1)..(187): tr|A0A135L401|A0A135L401_9BACI GTP cyclohydrolase 1 OS= Tepidibacillus decaturensis OX=1413211 GN=folE PE=3 SV= 1
MGVNHKQIEEAVKVILKSIGEDPEREGLLETPARVARMYEEIFVGLEQDPKDYFDVIFSEKHEEVVLVKDIPFYSTCEHHLVPFFGIAHVAYIPRDGRVTGLSKLARAVEAVAKRPQLQERMTDTIADAIMEKLEPFGVLVMIEAEHMCMTMRGVKKPGSKTVTITARGIYKEDPQLRNEILQLIRS

SEQ ID NO: 15746 - protein, 187 aa, Tepidibacillus fermentans
  misc_feature (1)..(187): tr|A0A4R3KK95|A0A4R3KK95_9BACI GTP cyclohydrolase 1 OS= Tepidibacillus fermentans OX=1281767 GN=folE PE=3 SV=1
MSVNHEQIKEAVKLILTSIGENPEREGLIDTPARVARMYEEVFSGIEQDPKEYFDVVFSEEHEEVVLVKDIPFYSMCEHHLVPFFGVAHVAYIPRNGRVTGLSKLARAVEAVARRPQLQERITDTVADAIMEKLEPYGVFVMIEAEHMCMTMRGVKKPGSKTVTTAARGIYREDALLRNEILQLIRG

SEQ ID NO: 15747 - protein, 187 aa, Tepidibacter formicigenes
  misc_feature (1)..(187): tr|A0A1M6PH59|A0A1M6PH59_9FIRM GTP cyclohydrolase 1 OS= Tepidibacter formicigenes DSM 15518 OX=1123349 GN=folE PE=3 SV=1
MDKVKIRRAVRDILEAIGEDPDREGLRDTPDRIARMYEEIYSGLNEDPKKHLEIFFQDEKHEELVLVKDIPFYSTCEHHLVPFFGKAHVAYIPKGGKLTGLSKLARVVETAAKRPQLQERITKTVAEALVDVLNPYGVIVVVEAEHMCMTMRGVKKPGSKTITSAVRGIFEKDVAARAEVMSLINNK

SEQ ID NO: 15748 - protein, 195 aa, Tepidibacter formicigenes
  misc_feature (1)..(195): tr|A0A1M6NVI9|A0A1M6NVI9_9FIRM GTP cyclohydrolase 1 OS= Tepidibacter formicigenes DSM 15518 OX=1123349 GN=folE PE=3 SV=1
MAINKKEIEKHIRGILIALGEDPDREGLKDTPKRVANMYEEVFMGTNYTNDEIAEIFGKTFEEDLDVKGSNKDIVFMKDIEIFSHCEHHLALMYNMKVSVAYIPNKKVIGLSKIARIADMVGRRLQLQERIGMDIAYIIQRVTDSEDVAVIIEGEHACMTARGIKKNNTKTITTTLKGRFETDPILNNKLMMLYK

SEQ ID NO: 15749 - protein, 187 aa, Tepidibacter thalassicus
  misc_feature (1)..(187): tr|A0A1M5P4D7|A0A1M5P4D7_9FIRM GTP cyclohydrolase 1 OS= Tepidibacter thalassicus DSM 15285 OX=1123350 GN=folE P E=3 SV=1
MDKEKIKKAVRDILEAIGEDPDREGLIDTPDRIARMYEEIYGGINEDPKKHLEIFFQDEKHEELVLVKDIPFYSICEHHLVPFFGKAHVAYIPKGGKLTGLSKLARVVETVARRPQLQERITKIVADALVDVLNPYGVIVVVEAEHMCMTMRGVKKPGSKTITSAVRGIFEKDVAARAEVMSLINCK

SEQ ID NO: 15750 - protein, 194 aa, Tepidibacter thalassicus
  misc_feature (1)..(194): tr|A0A1M5QMF1|A0A1M5QMF1_9FIRM GTP cyclohydrolase 1 OS= Tepidibacter thalassicus DSM 15285 OX=1123350 GN=folE P E=3 SV=1
MAINKKEIEKHVRGILIALGENPDREGLRDTPKRVANMYEEVFMGINYTNDEIADMFGKTFEEDLDVEGNKDMVFMKDIEIFSHCEHHLALMYNMKVAVAYIPNKKVIGLSKIARIADMVGKRLQLQERIGTDIAYIIQKVTGSEDVAVIIEGEHACMSARGIKKDNAKTVTVTVKGRFATDPILNNKLMMLYK

SEQ ID NO: 15751 - protein, 209 aa, Tepidicaulis marinus
  misc_feature (1)..(209): tr|A0A081BDA9|A0A081BDA9_9RHIZ GTP cyclohydrolase 1 OS= Tepidicaulis marinus OX=1333998 GN=folE PE=3 SV=1
MDMNAVVDSLSSTKTDSARPSREEAEAAVRTLIAWAGDNPDREGLIETPNRVVRAYEEFFAGYEEDPDEVLGKTFEEVEGYDDMVMLRDITLESHCEHHMVAILGKAHIAYVPTNRVVGISKLARVIEIYAKRLQTQETMTAQIVDSINRVLKPKGVAVLIEAKHQCMTTRGIRKPDVATITTQFTGVFRDDLRMEQRFLQMIRGYQER

SEQ ID NO: 15752 - protein, 245 aa, Tepidimonas alkaliphilus
  misc_feature (1)..(245): tr|A0A554W621|A0A554W621_9BURK GTP cyclohydrolase 1 OS= Tepidimonas alkaliphilus OX=2588942 GN=folE PE=4 SV=1
MLMPHPDAMTARANSEEEGVPVSVRIRERLRAARKRFHANDNIADFIQPGELEELLDEVTEKMQAVLDSLVIDTRSDHNTEDTARRVAKMYIKEVFAGRYVKAPAITEFPNAEHLNELMIVGPITVRSACSHHFCPVIGRLWIGVMPNEHTNVIGLSKYARLAEWIMSRPQIQEEAVVQLADLIQEKTQPDGLAIVMEATHYCMAWRGVKDMDSRMINSVMRGVFLKDANLRREFLSLLPRQASA

SEQ ID NO: 15753 - protein, 244 aa, Tepidimonas aquatica
  misc_feature (1)..(244): tr|A0A554WEV7|A0A554WEV7_9BURK GTP cyclohydrolase 1 OS= Tepidimonas aquatica OX=247482 GN=folE PE=4 SV=1
MLMPNPDAMTDTQPHDDGVPVSVRIRERLRAARKRFHANDNIADFIQPGELEQLLDEVTDKMQTVLDSLVIDTTNDHNTEDTARRVAKMYLKEVFAGRYTKAPTITEFPNAEHLNELMIVGPITVRSACSHHFCPVIGKLWIGVMPNEHTNVIGLSKYARLAEWIMGRPQIQEEAVVQLADLIQEKTQPDGLAIVMEATHYCMAWRGVKDLDSRMINSVMRGVFLKDANLRREFLSLLPRQVQQ

SEQ ID NO: 15754 - protein, 241 aa, Tepidimonas fonticaldi
  misc_feature (1)..(241): tr|A0A1A6DUL1|A0A1A6DUL1_9BURK GTP cyclohydrolase OS=Te pidimonas fonticaldi OX=1101373 GN=folE PE=4 SV=1
MLMKAPETMTDDTRPDEGVPVSVRIRERIRAARKRFHSNDNIAEFIRPGELEQLLDEVSEKMQAVLDAMVIDTANDHNTEDTARRVAKMYLKEVFAGRYVPAPSITEFPNAEHLNELMIVGPITVRSACSHHFCPVIGKVWIGVMPNEHTNVIGLSKYARLAEWVMGRPQIQEEAVVQLADLIQEKTQPDGLAIVMEATHYCMAWRGVKDMDSRMINSVMRGVFLKDPNLRREFLSLIPRS

SEQ ID NO: 15755 - protein, 246 aa, Tepidimonas sediminis
  misc_feature (1)..(246): tr|A0A554WRZ5|A0A554WRZ5_9BURK GTP cyclohydrolase 1 OS= Tepidimonas sediminis OX=2588941 GN=folE PE=4 SV=1
MLMPNPDAMTAAPAADDDGVPVSVRIRERIRAARKRFHANDNIAEFIRPGELEQLLDEVTEKMQAVLDSLVIDTTSDHNTEDTARRVAKMYLKEVFAGRYVKAPAITEFPNAEHLNELMIVGPITVRSACSHHFCPVIGKLWIGVMPNEHTNVIGLSKYARLAEWIMGRPQIQEEAVVQLADLIQEKTQPDGLAIVMEATHYCMAWRGVKDMDSRMINSVMRGVFLKDANLRREFLSLIPRHVAPQ

SEQ ID NO: 15756 - protein, 245 aa, Tepidimonas sp.
  misc_feature (1)..(245): tr|A0A554XK47|A0A554XK47_9BURK GTP cyclohydrolase 1 OS= Tepidimonas sp. SPSP-6 OX=2267262 GN=folE PE=4 SV=1
MLMPTHDVSAMAADSVPDEGVPVSVRIRERIKAARKRFHANDNIAEFIRPGELEQLLDEVTEKMQAVLDAMVIDTANDHNTEDTARRVAKMYLKEVFAGRYVPAPTITEFPNAEHLNELMIVGPITVRSACSHHLCPVIGKVWIGVMPNEHTNVIGLSKYARLAEWVMGRPQIQEEAVVQLADLIQERTQPDGLAIVMEATHYCMAWRGVKDMDSRMINSVMRGVFLKDANLRREFLSLIPRQGQ

SEQ ID NO: 15757 - protein, 243 aa, Tepidimonas taiwanensis
  misc_feature (1)..(243): tr|A0A554XC32|A0A554XC32_9BURK GTP cyclohydrolase 1 OS= Tepidimonas taiwanensis OX=307486 GN=folE PE=4 SV=1
MLMKAPETMTDDTRPDEEGVPVSVRIRERIRAARKRFHANDNIAEFIRPGELEQLLDEVTEKMQAVLDAMVIDTANDHNTEDTARRVAKMYLKEVFAGRYVPAPTITEFPNAEHLNELMIVGPITVRSACSHHFCPVIGKVWIGVMPNEHTNVIGLSKYARLAEWVMGRPQIQEEAVVQLADLIQEKTQPDGLAIVMEATHYCMAWRGVKDMNSRMINSVMRGVFLKDANLRREFLSLIPREG

SEQ ID NO: 15758 - protein, 241 aa, Tepidimonas thermarum
  misc_feature (1)..(241): tr|A0A554X4U9|A0A554X4U9_9BURK GTP cyclohydrolase 1 OS= Tepidimonas thermarum OX=335431 GN=folE PE=4 SV=1
MLMKAPETMTDDTRPDEGVPVSVRIRERIQAARKRFHANDNIADFIQPGELEQLLDEVTEKMQAVLDAMVIDTRNDHNTEDTARRVAKMYLKEVFAGRYVQAPTITEFPNAEHLNELMIVGPITVRSACSHHFCPVIGKVWIGIMPNEHTNVIGLSKYARLAEWVMGRPQIQEEAVVQLADLIQEKTQPDGLAIVMEATHYCMAWRGVKDMDSRMINSVMRGVFLKDANLRREFLSLIPRG

SEQ ID NO: 15759 - protein, 268 aa, Tepidiphilus thermophilus
  misc_feature (1)..(268): tr|A0A0K6IVR0|A0A0K6IVR0_9PROT GTP cyclohydrolase FolE2 OS=Tepidiphilus thermophilus OX=876478 GN=folE2 PE=3 S V=1
MDQAIQPIPDVQSFADHRHMAIDKVGIKSIRHPIRVSDRSGGVQHTVATFNMYVGLPHNFKGTHMSRFVEILNAHEREISVENFEPMLRQMVERLEAETGHIEMSFPYFIEKRAPVTGVASLMDYDVTFIGEILAGGEYRFTMKVVVPVTSLCPCSKKISAYGAHNQRSHVTITARTIDHVWIEELVQLAEKEASSELYGLLKRPDEKYVTEHAYDNPKFVEDMVRDVAARLDADPRIVHYVAESENFESIHNHSAYALIERDKTKPR

SEQ ID NO: 15760 - protein, 184 aa, Terasakiispira papahanaumokuakeensis
  misc_feature (1)..(184): tr|A0A1E2VEX6|A0A1E2VEX6_9GAMM GTP cyclohydrolase 1 OS= Terasakiispira papahanaumokuakeensis OX=197479 GN=folE PE=3 SV=1
MTESMIPLYRQILEAVGEDPEREGLLDTPKRAAKAMTFLTQGYRQDLSEIVNGAVFSSDCDEMVIVRDIELYSMCEHHMLPFIGRCHIGYIPNGQVLGLSKFARIVDMFARRLQIQEQLTRQIANAVQEVTQARGVGVIIEAQHMCMMMRGVEKQNSSMRSSVMLGQFRESQNTRQEFLKLAGL

SEQ ID NO: 15761 - protein, 185 aa, Teredinibacter sp.
  misc_feature (1)..(185): tr|A0A509DY93|A0A509DY93_9GAMM GTP cyclohydrolase 1 OS= Teredinibacter sp. ISS155 OX=2584524 GN=folE PE=3 SV=1
MTDHNTKDHFAKIIESCGEDLNRPGLLDTPKRAAKAFEFLTSGYHETVEKVVNGALFPSDANDMVIVKDIELYSLCEHHMLPFIGKAHVGYIPTGKVLGLSKVARIVDMYSRRLQIQEQLSSQIAHTIAEITGASGVGVVIDAKHLCMMMRGVEKQNSSMRTSAMLGTFRDNPTTRSEFLSLIYS

SEQ ID NO: 15762 - protein, 184 aa, Teredinibacter turnerae
  misc_feature (1)..(184): sp|C5BL73|GCH1_TERTT GTP cyclohydrolase 1 OS=Terediniba cter turnerae (strain ATCC 39867 / T7901) OX=377629 GN= folE PE=3 SV=1
MKPTPAELYANLISSTGEDLQRPGLQGTPARAATAFEYLTSGYKQSVQEVVNDALFPSDSNDMVVVRDIELFSLCEHHMLPFIGKAHVGYIPTGKVLGLSKVARIIDMYARRLQIQEQLTHQVASTIAEVTGAAGVGVIIEAKHLCMMMRGVEKQNSVMKTSAMLGSFRANLSTRSEFLALLNN

SEQ ID NO: 15763 - protein, 190 aa, Terrabacter aerolatus
  misc_feature (1)..(190): tr|A0A512D523|A0A512D523_9MICO GTP cyclohydrolase 1 OS= Terrabacter aerolatus OX=422442 GN=folE PE=3 SV=1
MAIDQPRAEAAVRELLLAIGEDPDREGLLDTPGRVARSFAEIYAGLDMTAADVLGTTFEIDHQELVIVRDIELYSTCEHHLVPFHGVAHVGYIPSKDGRVTGLSKLARLVEVFARRPQVQERLTTQIADALVEHLDVQGVIVVVQAEHLCMSMRGIRKPGASTITSAVRGQLRDPATRAEAMALMLEGNK

SEQ ID NO: 15764 - protein, 190 aa, Terrabacter lapilli
  misc_feature (1)..(190): tr|A0A543N061|A0A543N061_9MICO GTP cyclohydrolase 1 OS= Terrabacter lapilli OX=436231 GN=folE PE=3 SV=1
MAIDTARAQAAVRELLLAIGEDPEREGLLDTPARVARSFSEIYAGLDMEPADVLGTTFEIDHQELVIVRDIELYSTCEHHLVPFHGVAHVGYIPSKDGRVTGLSKLARLVEVFARRPQVQERLTSQIADALVEHLDVQGVIVVVQAEHLCMSMRGIRKPGASTITSAVRGQLRDAATRAEAMALMLEGNK

SEQ ID NO: 15765 - protein, 214 aa, Terrabacter lapilli
  misc_feature (1)..(214): tr|A0A543MM86|A0A543MM86_9MICO GTP cyclohydrolase 1 OS= Terrabacter lapilli OX=436231 GN=folE PE=3 SV=1
MNRYTSQTDAPSPAHRPHPRLPWAGTGAVIDPDLDRAAAGARVLLEALGVDLDNESLARTPERMASSLAELMSPRPFQMTTFPNDGGYDELILARSIPLRSLCEHHMLPFVGVAHIGYLPGERILGLSKLARVLEHFACRPQVQERLTGQVADWLRAQLSPAGVGVVIEAEHLCMTLRGVQAPGSTTITSSLLGTLRDDPRSRAEFLALTRATG

SEQ ID NO: 15766 - protein, 213 aa, Terrabacter sp.
  misc_feature (1)..(213): tr|A0A543KXN0|A0A543KXN0_9MICO GTP cyclohydrolase 1 OS= Terrabacter sp. 3211 OX=2587050 GN=folE PE=3 SV=1
MNPSLSQPDPSSRTQHRARTSWSGTGAVAEPDLERAAAGARILLEALGVDLDDESLARTPERMAGSLAELMSPRPFHLTTFPNDGGYDEMVVARSIPLRSLCEHHMLPFVGTAHIGYLPGGRILGLSKLARVLEHFASRPQVQERLTVQVADWLAAQLSPVGVGVVIEAEHLCMTLRGVQAPGTTTITSSLRGVLREDSRSRAEFLALTRSPG

SEQ ID NO: 15767 - protein, 181 aa, Terrabacter sp.
  misc_feature (1)..(181): tr|A0A0Q8XTH5|A0A0Q8XTH5_9MICO GTP cyclohydrolase 1 OS= Terrabacter sp. Root85 OX=1736603 GN=folE PE=3 SV=1
MARAASGARIMLEALGIDLDNESLARTPERMAASLAELMSPRPFQMTTFPNDGDYDELIVARGIPVRSLCEHHMLPFVGTAHIGYLPGGRILGLSKLARVLEHFSSRPQVQERLTVQVADWLCAQLSPVGVGVVVEAEHLCMTLRGVQAPGTTTITSSLLGALRDDSRSRAEFLALTQASR

SEQ ID NO: 15768 - protein, 137 aa, Terrabacteria group
  misc_feature (1)..(137): tr|A0A537J1T3|A0A537J1T3_9BACT GTP cyclohydrolase 1 (Fr agment) OS=Terrabacteria group bacterium ANGP1 OX=25697 60 GN=folE PE=3 SV=1
LLAVGFEEKHKEMVIVKDISLQSLCEHHLLPFHGVAHVAYIPNGRIVGISKIARLVEMLAHRPQVQERLTSQIADLLMEGLRARGAAVVIDATHLCMTMRGVKKPGSRVVTSANRGIFRENPSTRAEFLTLLKPQAG

SEQ ID NO: 15769 - protein, 189 aa, Terrabacteria group
  misc_feature (1)..(189): tr|A0A537LKE0|A0A537LKE0_9BACT GTP cyclohydrolase 1 OS= Terrabacteria group bacterium ANGP1 OX=2569760 GN=folE PE=3 SV=1
MDKAVIERAVQQIIEAIGEDPKREGLIGTPRRIADMYEEIFAGLKEDPRELLEVGFDDEDHHELVIVKDIPFYSMCEHHFLPFHGVAHVGYIPQGRILGVSKVARLVEMLARRPQVQERLTSQVADFLCQGGLGAAGSAVVIEAEHLCTTMRGVKKPGSKVVTSATRGIFREDARTRAEFFSIIEGKRS

SEQ ID NO: 15770 - protein, 190 aa, Terracoccus luteus
  misc_feature (1)..(190): tr|A0A495Y3T4|A0A495Y3T4_9MICO GTP cyclohydrolase 1 OS= Terracoccus luteus OX=53356 GN=folE PE=3 SV=1
MPVDHERAEAAVRELLLAIGEDPSREGLVDTPGRVARAYAEIFAGLDMSPADVLGKTFEIDHQELVIVRDIEVYSTCEHHLVPFHGVAHVGYIPSRDGRVTGLSKLARLVEVYARRPQVQERLTAQVADALVEHLDVQGVIVVIQAEHLCMSMRGIRKPGASTITSAVRGQLRDPATRAEAMSLMLEGNR

SEQ ID NO: 15771 - protein, 310 aa, Terribacillus aidingensis
  misc_feature (1)..(310): tr|A0A285NLG6|A0A285NLG6_9BACI GTP cyclohydrolase FolE2 OS=Terribacillus aidingensis OX=586416 GN=folE2 PE=3 S V=1
MQHLHTPTKKQLPAKAERHKLFGSVPPGEKTKPENKADMADLQNTKKNFLFHIDAVGIANVKHPIQVISNTSPAMQTTIGTFEFTSSIQQDSKGTNMSRFTEQLDMYHKNGFTVSVQSLQTFVAELAERLKQDDAKVKVTFPWFFERSGPASGMTGLNHADASLEVSYHKETGFRTTAKLSGTVTTLCPCSKEISEYSAHNQRGIVSMEVQLTDAFNEDVQDWKEALLEAAESNASARIHPVLKRPDEKMVTETAYENPRFVEDMVRLVAADLYELDYVEKFTVSCSNQESIHLHDAVATLSYDKRDEME

SEQ ID NO: 15772 - protein, 310 aa, Terribacillus goriensis
  misc_feature (1)..(310): tr|A0A075LKL4|A0A075LKL4_9BACI GTP cyclohydrolase FolE2 OS=Terribacillus goriensis OX=386490 GN=folE2 PE=3 SV= 1
MQHLHTPTRKELPSKAERHKLFGSVEPGKKTKPENKADMADLQNTKKNFLFHIDAVGIAKVKHPIQVISNTRPAMQTTIGTFEFTSSIQQDSKGTNMSRFTEQLDLYHKNGFTVSVKSLQTFVAELADRLKQEDARVKVTFPWFFERSGPASGMTGLNHADATLEVAYDKHTGFRTTAKLSGTVTTLCPCSKEISEYSAHNQRGIVSMEVQLTDAFDEDVRDWKEDLLEAAESNASARIHPVLKRPDEKMVTETAYENPRFVEDMVRLVAADLYELNYVEKFTVSCNNEESIHLHDAVATLSYDKRDEEE

SEQ ID NO: 15773 - protein, 310 aa, Terribacillus halophilus
  misc_feature (1)..(310): tr|A0A1G6MU82|A0A1G6MU82_9BACI GTP cyclohydrolase FolE2 OS=Terribacillus halophilus OX=361279 GN=folE2 PE=3 SV =1
MQHLHTPTRKQLPSKAERHKLFGSVPPGKKTKPENKADMADLQNTKKNFLFHIDAVGIANVKHPIQVISNTSPAMQTTIGTFEFTSSIQQDSKGTNMSRFTEQLDLYHKNGFTVSVKSLQTFVAELANRLKQDDARVKVTFPWFFERSGPASGMTGLNHADATLEVAYDKQTGFRTTAKLSGTVTTLCPCSKEISEYSAHNQRGIVSMEVQLTDAFDEDVRDWKEDLLEAAESNASARIHPVLKRPDEKMVTETAYENPRFVEDMVRLVAADLYELDYVEKFTVSCSNQESIHLHDAVATLSYDKRDEEE

SEQ ID NO: 15774 - protein, 310 aa, Terribacillus saccharophilus
  misc_feature (1)..(310): tr|A0A268A9P4|A0A268A9P4_9BACI GTP cyclohydrolase FolE2 OS=Terribacillus saccharophilus OX=361277 GN=folE2 PE= 3 SV=1
MQHLHTPTKKQLPSKAERHKLFGSVAPGKKTKPENKADMADLQNTKKNFLFHIDAVGIAKVKHPIQVISTTRPAMQTTIGTFEFTSSIQQDSKGTNMSRFTEQLDLYHKNGFTVSVKSLQTFVAELADRLKQEDARVKVTFPWFFERSGPASGMTGLNHADATLEVAYNKHTGFRTTAKLSGTVTTLCPCSKEISEYSAHNQRGIVSMEVQLTDAFDEDVRDWKEDLLEAAESNASARIHPVLKRPDEKMVTETAYENPRFVEDMVRLVAADLYELDYVEKFTVSCSNEESIHLHDAVATLSYDKRDEEE

SEQ ID NO: 15775 - protein, 310 aa, Terribacillus saccharophilus; identical to SEQ ID NO: 15772
  misc_feature (1)..(310): tr|A0A1H8AE40|A0A1H8AE40_9BACI GTP cyclohydrolase FolE2 OS=Terribacillus saccharophilus OX=361277 GN=folE2 PE= 3 SV=1

SEQ ID NO: 15776 - protein, 310 aa, Terribacillus sp.
  misc_feature (1)..(310): tr|A0A268BNN7|A0A268BNN7_9BACI GTP cyclohydrolase FolE2 OS=Terribacillus sp. 7520-G OX=2025389 GN=folE2 PE=3 S V=1
MQHLHTSTKKQLPSKAERHKLFGSVPPGKKTKPENKADMADLQNTKKNFLFHIDAVGIAKVKHPIQVISNTSPAMQTTIGTFEFTSSIQQDSKGTNMSRFTEQLDLYHKNGFTVSVKSLQTFVAELADRLKQDDARVKVTFPWFFERSGPASGMTGLNHADATLEVAYDKQTGFRTTAKLSGTVTTLCPCSKEISEYSAHNQRGIVSMEVQLTDAFDEDVRDWKEDLLEAAESNASARIHPVLKRPDEKMVTETAYENPRFVEDMVRLVAADLYELDYVEKFTVSCSNQESIHLHDAVATLSYDKRDEEE

SEQ ID NO: 15777 - protein, 196 aa, Terriglobus albidus
  misc_feature (1)..(196): tr|A0A5B9EEY0|A0A5B9EEY0_9BACT GTP cyclohydrolase 1 OS= Terriglobus albidus OX=1592106 GN=folE PE=3 SV=1
MSTLTDRPLSEASTEEIYRELLLRYDEDPTRDGLLKTPERMEKAMAFLTKGYKQDPTEILRGALFDVDYDEMVIVKDIEFYSLCEHHLLPFFGKAHIAYIPDGKVIGLSKMPRLVDVFSRRLQVQERLTRQIADAIVDAIRPQGVAVIMEARHLCMMMRGVEKQNSATVTSAMLGVFKEQQQTRNEFLSLVRSGKL

SEQ ID NO: 15778 - protein, 207 aa, Terriglobus roseus
  misc_feature (1)..(207): tr|A0A1H4JBW3|A0A1H4JBW3_9BACT GTP cyclohydrolase 1 OS= Terriglobus roseus OX=392734 GN=folE PE=3 SV=1
MKDSRLETNTAIAEPEVTLHDATTAELYRELLQRVGEDPARDGLLKTPERMEKAMTFLTRGYEQNPTDILRGALFDVDYDEMVIVRDIEFYSLCEHHMLPFFGKAHVAYIPKGKVIGLSKVARLVDVFARRLQVQERMTREIADAVVEAIHPMGVAVILEAQHLCMMMRGVEKQGSMTSTSAMLGCFRESAQTRNEFLSLIRRPSGF

SEQ ID NO: 15779 - protein, 207 aa, Terriglobus roseus
  misc_feature (1)..(207): tr|I3ZI06|I3ZI06_TERRK GTP cyclohydrolase 1 OS=Terriglo bus roseus (strain DSM 18391 / NRRL B-41598 / KBS 63) O X=926566 GN=folE PE=3 SV=1
MKDSRLETNTAVAEPQVTLNDATTAELYRELLLRIGENPERDGLLKTPERMEKAMTFLTHGYEQSATDILRGALFDVDYDEMVIVRDIEFYSLCEHHMLPFFGKAHIAYIPKGKVIGLSKVARLVDVFARRLQVQERMTREIADAVVEAIHPMGVAVILEAQHLCMMMRGVEKQGSMTSTSAMLGCFRESAQTRNEFLSLIRRPGGF

SEQ ID NO: 15780 - protein, 193 aa, Terriglobus saanensis
  misc_feature (1)..(193): tr|E8UX10|E8UX10_TERSS GTP cyclohydrolase 1 OS=Terriglo bus saanensis (strain ATCC BAA-1853 / DSM 23119 / SP1PR 4) OX=401053 GN=folE PE=3 SV=1
MVKSLEQATTEELYSEVLRRLGEDPERDGLLKTPERVAKSMAFLTQGYAQNPTELLRGALFDVDYDEMVIVRDIEFYSLCEHHMLPFFGKAHVAYIPQGKVIGLSKVARLVDLFARRLQVQERMTRQIADAIVEAIAPQGVGVVVEAQHLCMMMRGVEKQHSMTTTSAMLGAFRNAAQTRNEFLSLIRRPSAL

SEQ ID NO: 15781 - protein, 258 aa, Terrimicrobium sacchariphilum
  misc_feature (1)..(258): tr|A0A146G7D7|A0A146G7D7_TERSA GTP cyclohydrolase FolE2 OS=Terrimicrobium sacchariphilum OX=690879 GN=folE2 PE =3 SV=1
MTLQDTQNQRDERRLPIDRVGVKDLRYPIQIRDKDHSLQSTIATVQLTVDLPHHFKGTHMSRFVEVLNSHGPILHVDNIRDVLEQLTRKLQSTCAHVDFEFPFFLEKKAPVTGAVGLIDYVARFNATVENGKMDFIVTTVVPVTTLCPCSKAISARGAHNQRGHVTLAVRCSKPMWIEDMIRLVEDSASSELYSLLKRPDEKAVTERAYDNPVFVEDLVRNVASRCEKDANILWYRVEAENFESIHNHNAYALIEKHG

SEQ ID NO: 15782 - protein, 198 aa, Terrimonas sp.
  misc_feature (1)..(198): tr|A0A2T7Q5C9|A0A2T7Q5C9_9BACT GTP cyclohydrolase 1 OS= Terrimonas sp. NS-102 OX=2171976 GN=folE PE=3 SV=1
MAYKKVEQYDGDTTASLIETYERALGLLGEDPQREGLLKTPERIAKAMQFMTQGYQQSSRDILNSAKFHEPISEMIIVKDIEVYSMCEHHMLPFFGKAHVAYIPNGWITGLSKIARVVDVYARRLQVQERLTTQILDAIKDALQPLGVAVVIEASHLCMMMRGVQKQNSVTTTSAFFGEFEKNETRSEFIRLIGSSLH

SEQ ID NO: 15783 - protein, 193 aa, Terrisporobacter glycolicus
  misc_feature (1)..(193): tr|A0A1I3QP26|A0A1I3QP26_9FIRM GTP cyclohydrolase 1 OS= Terrisporobacter glycolicus OX=36841 GN=folE PE=3 SV=1
MGERRTVDKPAIEKAVREILIAIGEDPDREGLIGTPDRVARMYEEIFSGLHEDPREHLKVLFKNENHEEMVVVKDIPFYSSCEHHLVPFFGKAHVVYIPKDGKLTGLSKLARVIETFARRPQLQERITKETANIIMEELEPYGVMVVVEAEHMCMTMRGVKKPGSKTITSAVRGIFEKDALARSEAMSLIKFD

SEQ ID NO: 15784 - protein, 193 aa, Terrisporobacter othiniensis
  misc_feature (1)..(193): tr|A0A0B3VVZ5|A0A0B3VVZ5_9FIRM GTP cyclohydrolase 1 OS= Terrisporobacter othiniensis OX=1577792 GN=folE PE=3 SV =1
MGEKRTVDKPAIEKAVRDILIAIGEDPDREGLIGTPDRVARMYEEIFSGLHEDPRQHLKVLFKNENHEEMVVVKDIPFYSSCEHHLVPFFGKAHVVYVPKDGRLTGLSKLARVIETFARRPQLQERITKETANIIMEELEPYGVMVVVEAEHMCMTMRGVKKPGSKTITSAVRGIFETDALARSEAMSLIKFD

SEQ ID NO: 15785 - protein, 204 aa, Tersicoccus phoenicis
  misc_feature (1)..(204): tr|A0A1R1LDB0|A0A1R1LDB0_9MICC GTP cyclohydrolase 1 OS= Tersicoccus phoenicis OX=554083 GN=folE PE=3 SV=1
MDRAERPDDPGMPGATAGVDEPRISAAVREILLAIGEDPDRSGLRDTPDRVARAYAEMFSGLHQDAADVLGTTFDLDHEELVLVKDIPFYSTCEHHLVPFHGTAHVGYIPSHDGRVTGLSKLARLVEVYARRPQVQERLTTQIVEALVTHLAPRGAIVVVECEHLCMSMRGVRKPGTKTVTSAVRGQLHDPATRAEAMSLILGR

SEQ ID NO: 15786 - protein, 204 aa, Tersicoccus sp.
  misc_feature (1)..(204): tr|A0A1R1LY14|A0A1R1LY14_9MICC GTP cyclohydrolase 1 OS= Tersicoccus sp. Bi-70 OX=1897634 GN=folE PE=3 SV=1
MTHAERPDEPGMPGAVAGVDEPRIAAAVREILLAIGEDPERSGLKDTPDRVARAYAEMFSGLHQDAGDVLGTTFDLDHEELVLVKDIPFYSTCEHHLVPFHGTAHVGYIPSHDGKVTGLSKLARLVEIYARRPQVQERLTTQIVEALVAHLAPRGAIVVIECEHLCMSMRGVRKPGTRTVTSAVRGQLHDPATRAEAMGLILGR

SEQ ID NO: 15787 - protein, 188 aa, Tessaracoccus aquimaris
  misc_feature (1)..(188): tr|A0A1Q2CSH6|A0A1Q2CSH6_9ACTN GTP cyclohydrolase 1 OS= Tessaracoccus aquimaris OX=1332264 GN=folE PE=3 SV=1
MAVDERRAAAAVRELLAAIGEDPDREGLQDTPDRVARAWGELAAGYSTDIGDILGTTFDIEHDELVLVKDIELVSMCEHHMLPFTGVAHIGYIPSSNGRVTGLSKLARLVEMYGRRLQVQERLTTQIADALVEHLDARGVIVVVEAEHTCMTMRGVRKPGSRTVTSAVRGQLRNPATRAEAMSLILGR

SEQ ID NO: 15788 - protein, 205 aa, Tessaracoccus bendigoensis
  misc_feature (1)..(205): tr|A0A1M6H436|A0A1M6H436_9ACTN GTP cyclohydrolase 1 OS= Tessaracoccus bendigoensis DSM 12906 OX=1123357 GN=folE PE=3 SV=1
MGPAAAVESAVDAAEPLMAVDLARASAAVRELLAAIGEDPDREGLRDTPSRVAKAWLELGAGYDADVEEILGTTFDIDHEELVLVKDIELVSMCEHHMLPFTGVAHVGYIPSAVGRVTGLSKLARLVEMYGRRLQVQERLTTQIAEAVVGQLQARGVIVVIEAEHTCMTMRGVRKPGSRTVTSAVRGLLRDPATRAEAMSLILGR

SEQ ID NO: 15789 - protein, 199 aa, Tessaracoccus flavescens
  misc_feature (1)..(199): tr|A0A1Q2CVZ3|A0A1Q2CVZ3_9ACTN GTP cyclohydrolase 1 OS= Tessaracoccus flavescens OX=399497 GN=folE PE=3 SV=1
MGSAEHTSEQLMAVDGPRAAAAIRELLIAIGEDPERDGLRDTPDRVARAWTELAAGYDADVKEILGTTFDIAHEEMVLVKDIELVSMCEHHMLPFTGVAHIGYIPSENGRVTGLSKLARLVDVYARRLQVQERLTTQIAEALVNELDARGAIVVISAEHTCMTMRGVRKPGSQTVTSAVRGQLRNPATRAEAMSLILGR

SEQ ID NO: 15790 - protein, 188 aa, Tessaracoccus flavus
  misc_feature (1)..(188): tr|A0A1Q2CIL9|A0A1Q2CIL9_9ACTN GTP cyclohydrolase 1 OS= Tessaracoccus flavus OX=1610493 GN=folE PE=3 SV=1
MAVDHQRAIAAVRELLAAVGEDPDRDGLLETPDRVARSWAEMLAGHGADPADLLAKTFDIDHDEMVLVKDIRFVSMCEHHLLPFTGVAHIGYIPSPERGVTGLSKLARLVELFARRLQVQERITSQIAEALVEHLDAHGVIVVLEAEHTCMTMRGVKKPGSMTVTSAVRGQLRVPATRAEAMSLILGR

SEQ ID NO: 15791 - protein, 188 aa, Tessaracoccus lapidicaptus
  misc_feature (1)..(188): tr|A0A1C0AR47|A0A1C0AR47_9ACTN GTP cyclohydrolase 1 OS= Tessaracoccus lapidicaptus OX=1427523 GN=folE PE=3 SV=1
MAIDEARAAAAVRELLLAIGEDPERDGLQETPERVARAWGELLAGHGADASGVLGKTFDIAHDEMVLVKDIELVSTCEHHMLPFTGVAHVGYIPSESGRVTGLSKLARLVDIFARRLQVQERLTTQIADALVEHLDARGVIVVVEAEHTCMTMRGVRKPGSRTVTSAVRGILRHPATRAEAMSLIIGR

SEQ ID NO: 15792 - protein, 188 aa, Tessaracoccus oleiagri
  misc_feature (1)..(188): tr|A0A1G9MYG8|A0A1G9MYG8_9ACTN GTP cyclohydrolase 1 OS= Tessaracoccus oleiagri OX=686624 GN=folE PE=3 SV=1
MAVDQARIAAAVREILLAVGEDPERDGLRDTPARVARSYAELFSGLGKDASDVLGTTFDVAHDELILVKDIEVASSCEHHLLPFYGVAHVGYIPSKDGRVAGLSKLARLVDLYARRPQIQERLVSEIADALVEHLDPGGVIVVIEAEHMCMSLRGVRKPGAKTITSAVRGSLRNAATRAEAMSLILGH

SEQ ID NO: 15793 - protein, 196 aa, Tessaracoccus rhinocerotis
  misc_feature (1)..(196): tr|A0A553JXI0|A0A553JXI0_9ACTN GTP cyclohydrolase 1 OS= Tessaracoccus rhinocerotis OX=1689449 GN=folE PE=3 SV=1
MHNWRPRVVAERPTADLAAATDAAAALLTALGLDLTDEGLVETPGRMAATLLEMTSSPPFELTTFPNDEGYDELVMVRDIPVRSVCEHHVLPFVGVAHVGYLPGERILGLSKFARMVEFHARRPQTQERLTKRIADHLASALHPRGVGVVIHAEHTCMSIRGALAVGARTTTSALFGLLRDDPRTRSEFLALTRGA

SEQ ID NO: 15794 - protein, 189 aa, Tessaracoccus rhinocerotis
  misc_feature (1)..(189): tr|A0A553K1I1|A0A553K1I1_9ACTN GTP cyclohydrolase 1 OS= Tessaracoccus rhinocerotis OX=1689449 GN=folE PE=3 SV=1
MAVDQARIEAAVREILIAVGEDPDREGLQQTPARVARAYEELFAGLSQDPETYLGTTFDIAHDELVLVKDIEVTSTCEHHLLPFVGVAHVGYIPSSDGRVTGLSKLARLVDVYSRRPQVQERLTTQIADALVEHIEARGVIVVIEAEHMCMTMRGARKPGSKTVTSAVRGQLRDPATRAEAMGLITGRR

SEQ ID NO: 15795 - protein, 200 aa, Tessaracoccus sp.
  misc_feature (1)..(200): tr|A0A3M0GYN4|A0A3M0GYN4_9ACTN GTP cyclohydrolase 1 OS= Tessaracoccus sp. JDX10 OX=2479848 GN=folE PE=3 SV=1
MPGRAAILPEGPERDLGAAAAAGAEFMRALGVDPSDESRPDLALTPHRFATAYAEMLTPRPFDFTTFLNVEGYDEMVVVRDIAVQSLCEHHLLPFVGVAHVAYLPANLIVGLSKLPRIVEHFARRLQTQERLTLQVAEALESHLQPRGVGVVVEATHSCMTLRGVRSEHASTKTSSLRGSLRSDPATRAEFFALVNGAAH

SEQ ID NO: 15796 - protein, 187 aa, Tessaracoccus sp.
  misc_feature (1)..(187): tr|A0A3M0G809|A0A3M0G809_9ACTN GTP cyclohydrolase 1 OS= Tessaracoccus sp. JDX10 OX=2479848 GN=folE PE=3 SV=1
MVDHARIEAAVREILLAVGEDPDRDGLRDTPGRVARSYEELFSGLGADPAELLATTFDIDHKELVLVRDVELTSCCEHHLLPFVGVAHVGYIPGPDGKVTGLSKLARLVDMYARRPQIQERLTSQVADALVEHLGVSGVIVVIEAEHMCMTMRGVRKRGSRTITSAVRGHLRNPATRAEAMSLILGR

SEQ ID NO: 15797 - protein, 218 aa, Testudinibacter aquarius; identical to SEQ ID NO: 12408
  misc_feature (1)..(218): tr|A0A4R3Y3W6|A0A4R3Y3W6_9PAST GTP cyclohydrolase 1 OS= Testudinibacter aquarius OX=1524974 GN=folE PE=3 SV=1

SEQ ID NO: 15798 - protein, 195 aa, Tetrasphaera australiensis
  misc_feature (1)..(195): tr|W6K2M8|W6K2M8_9MICO GTP cyclohydrolase 1 OS=Tetrasph aera australiensis Ben110 OX=1193182 GN=folEA PE=3 SV=1
MTEPADKVDQPRIEAAVREILAAIGEDPGRDGLLDTPARVARAYAEAFGGLHADPAEVLAKKFEVDHQELVIVRDIAMYSTCEHHLLPFHGVAHIGYLPQGGVVTGLSKLARLVDVFARRPQVQERMTGQIADALVEHLGVMGCIVVIEAEHLCMSMRGVRKPGARTITSAVRGSLARNAKTRAEAMSLLHSGQR

SEQ ID NO: 15799 - protein, 204 aa, Tetrasphaera duodecadis
  misc_feature (1)..(204): tr|A0A2N3YI15|A0A2N3YI15_9MICO GTP cyclohydrolase 1 OS= Tetrasphaera duodecadis OX=173053 GN=folE PE=3 SV=1
MVVSNPEAAGSFVHPPVDVPRARAAVREFLIAIGEDPDRDGLLETPARVAKAAVELYAGLRQDPAEVLSKTFPIEHEELVIVRDIPMYSTCEHHLLPFHGVAHIGYIPAADGKVTGLSKLGRLVEVFARRPQVQEQITTQVADALVTHLGAQGVIVVVEAEHLCMSMRGVQKPGSRTITSAVRGQLRDPATRAEAMSLLLGGKR

SEQ ID NO: 15800 - protein, 198 aa, Tetrasphaera elongata
  misc_feature (1)..(198): tr|N0E613|N0E613_9MICO GTP cyclohydrolase 1 OS=Tetrasph aera elongata Lp2 OX=1193181 GN=folEA PE=3 SV=1
MTVPEPVASGVDQARAEAAVRELLRAVGEDPDRDGLLETPARVARAYAELFAGLHQDAAKVLATTFSIDHEEMIIVRDIELFSTCEHHLLPFHGVAHVGYIPNESGVVTGLSKLARLVEVFARRPQVQERITTQIADALVEHLRARGVIVVIEAEHLCMTMRGVRKPGARTITSAVRGQLRDPATRSEAMSLLLGGKH

SEQ ID NO: 15801 - protein, 234 aa, Tetrasphaera japonica
  misc_feature (1)..(234): tr|A0A077LWS4|A0A077LWS4_9MICO GTP cyclohydrolase 1 OS= Tetrasphaera japonica T1-X7 OX=1194083 GN=folE PE=3 SV= 1
MDLTATSAAIVAGDGVATSLPTASGGSIASADGSVVDGSHRETAPRGLDVDAAERACRQLLWALGLDLSSEAVVRTPHRMARAFAELLTAPEVDFTTFPNEEGYDELVLVEDIPFRSLCEHHMLPFAGVAHVGYLPGSRILGLSKLARLVAHAASRPQTQERLTTRVAEELDHRLRPRGVGVVLHAQHACMSLRGARAHGTWTRTSSLSGELTEDPARRAEFLSLTRSRGGATP

SEQ ID NO: 15802 - protein, 202 aa, Tetrasphaera japonica
  misc_feature (1)..(202): tr|A0A077M5S1|A0A077M5S1_9MICO GTP cyclohydrolase 1 OS= Tetrasphaera japonica T1-X7 OX=1194083 GN=folEA PE=3 SV =1
MSTPDTADAEPAHRVDLARAEAAVREFLAAIGEDPDREGLRDTPGRVARAARELYAGLGRDPSAILSTMFQIDHDEMIIVRDIEVYSTCEHHLLPFHGVAHVGYIPAIDGRVTGLSKLARLVDLYARRPQVQERITTQVADALVEHLQARGVIVVVEAEHLCMSMRGVHRPGSRTITSAVRGQLRDPATRSEAMSLLLGGKR

SEQ ID NO: 15803 - protein, 195 aa, Tetrasphaera jenkinsii
  misc_feature (1)..(195): tr|A0A077M9V9|A0A077M9V9_9MICO GTP cyclohydrolase 1 OS= Tetrasphaera jenkinsii Ben 74 OX=1193518 GN=folEA PE=3 SV=1
MAELSSPMDLPRIEAAVREILIAVGEDPERDGLLDTPGRVARAYVEAFAGLHADPAEVLSKRFAVDHQELVIVRDIAMYSTCEHHLLPFHGKAHIGYLPRNGYVTGLSKLARLVDVFARRPQVQERMTGQIADALVEHLDVLGVIVVIEAEHLCMSMRGVRKPGASTITSAVRGILARNATTRAEAMALLGFGPR

SEQ ID NO: 15804 - protein, 205 aa, Tetrasphaera sp.
  misc_feature (1)..(205): tr|A0A0Q9M3R1|A0A0Q9M3R1_9MICO GTP cyclohydrolase 1 OS= Tetrasphaera sp. Soil756 OX=1736399 GN=folE PE=3 SV=1
MSNPDPAGPAGSFVHPPVDVPRARAAVREFLIAIGEDPDRDGLLETPARVAKAAVELYAGLRQDPAEVLSKTFAIEHEELVIVRDIPMYSTCEHHLLPFHGVAHIGYIPAADGKVTGLSKLGRLVEVFARRPQVQEQITTQVADALVTHLGAQGVIVVVEAEHLCMSMRGVQKPGSRTITSAVRGQLRDPATRAEAMALLLGGKR

SEQ ID NO: 15805 - protein, 189 aa, Tetzosporium hominis
  misc_feature (1)..(189): tr|A0A264W713|A0A264W713_9BACL GTP cyclohydrolase 1 OS= Tetzosporium hominis OX=2020506 GN=folE PE=3 SV=1
MTTVDLHKIENAVKMILEAVGEDPAREGLIETPKRVAKMYAEMFEGLHQDPKEYFKTIFHEDHEELVLVKDIPFHSMCEHHLVPFYGKAHVAYIPRNGVVTGLSKLARAVETTARRPQLQERITSTIADSIMEMLNPYGAYVVIEAEHMCMTMRGIKKPGAKTITAVARGVYEEDAVKRSEIHSFIQMT

SEQ ID NO: 15806 - protein, 310 aa, Thalassobacillus cyri
  misc_feature (1)..(310): tr|A0A1H4GWY9|A0A1H4GWY9_9BACI GTP cyclohydrolase FolE2 OS=Thalassobacillus cyri OX=571932 GN=folE2 PE=3 SV=1
MSQINIRNKKLLPSKKERHKLFGSSDPGPRTKPIEKEQMVDLQNSKQDFLFNIDTVGISNVKHPIRIPSQLTPEIQTTIGTFTFGSSITQDSKGTNMSRFTQQLDEYHQEGFAIDLTTLKKFTKELAARLKQKDAEVEVNFPWFFERKGPASDLAGMNHADAFMKVSYHQETGHDIEVGLTATITTLCPCSKEISEYSAHNQRGNVSMSVKLTEDFNDQETDWKAALLEAAESNASARIHPVLKRPDEKMVTEQAYENPRFVEDVVRLVAADLYEYDFVESFKVTCRNEESIHLHDAIASLSYDKNDEGN

SEQ ID NO: 15807 - protein, 365 aa, Thalassobacter sp.
  misc_feature (1)..(365): tr|A0A099TAP9|A0A099TAP9_9RHOB GTP cyclohydrolase FolE2 OS=Thalassobacter sp. 16PALIMAR09 OX=1225651 GN=folE2 PE=3 SV=1
MNIHAPEIDRQPNDDQAAEALATLQRWAAAASEAEIAALDPKIAQLLPGAEATGRALSRTYPDDFRVDDAYRATLPDLQNGPSSLIRGEKALIQHVGISNFRLPIRYHTREGAELTLETSVTGSVSLEAEKKGINMSRIMRTFYARSEERFSLGVIEAALSDYKTDLESFDARIQMRFSFPMKVDSLRSGLSGYQYYDIAMEVVDTGGVRQKFMHLDYVYSSTCPCSLELSEHARQARGQLATPHSQRSVARVSVEVTGPSRLWFEDLIEMCRAGVPTETQVMVKREDEQAFAELNAANPIFVEDAARSFCAQLKADPRIGDFRVVASHQESLHSHDAISVLTEGDTFAARSLDPRLFQSLFHVG

SEQ ID NO: 15808 - protein, 365 aa, Thalassobacter stenotrophicus
  misc_feature (1)..(365): tr|A0A0P1FGW8|A0A0P1FGW8_9RHOB GTP cyclohydrolase FolE2 OS=Thalassobacter stenotrophicus OX=266809 GN=folE2 PE =3 SV=1
MNIHAPEIDRQPNDDQAAEALVTLQRWAAAASEAEIAALDPKIAQLLPGAEATGRALSRTYPDDFRVDDAYRATLPDLQNGPSSLIRGEKALIQHVGISNFRLPIRYHTREGAELTLETSVTGSVSLEAEKKGINMSRIMRTFYARSEERFSLGVIEAALSDYKTDLESFDARIQMRFSFPMKVDSLRSGLSGYQYYDIAMEVVDTGGVRQKFMHLDYVYSSTCPCSLELSEHARQARGQLATPHSQRSVARVSVEVTGPSRLWFEDLIEMCRAGVPTETQVMVKREDEQAFAELNAANPIFVEDAARSFCAQLKADPRIGDFRVVASHQESLHSHDAISVLTEGDTFAARSLDPRLFQSLFHVG

SEQ ID NO: 15809 - protein, 210 aa, Thalassobaculum litoreum
  misc_feature (1)..(210): tr|A0A1G7Q684|A0A1G7Q684_9PROT GTP cyclohydrolase 1 OS= Thalassobaculum litoreum DSM 18839 OX=1123362 GN=folE P E=3 SV=1
MTPYDQALADSEAGTVTPAHPRPTREQAERAVRTLIEFVGENPDREGLQDTPKRVVKSYEELFSGYLYDPAEILARTFEEVEEYDEIVLLRDVRFESFCEHHMLPIIGTAHVAYFPNDRVVGISKLARVIDAYARRMQIQERLTAQIAQAIETVLEPRGVAVVIESEHHCMSTRGVHKHGVSMVTTRMLGCFKEDPDRRREFYQLIGKSS

SEQ ID NO: 15810 - protein, 219 aa, Thalassobaculum litoreum
  misc_feature (1)..(219): tr|A0A1G7PUB9|A0A1G7PUB9_9PROT GTP cyclohydrolase 1 OS= Thalassobaculum litoreum DSM 18839 OX=1123362 GN=folE P E=3 SV=1
MTDMPVSIMRSGGLAAHQLSDDGEFVAESGEDRLAAAESGIRALLRGIGEDPGRDGLLETPARVVRAFSEYCSGYAVDAKALLTTTFSEVSGYQNLVILTDIDFVSHCEHHLAPIVGKAHVAYLPASSVVGISKLARVVDAYARRLQIQERMTSQIAQCIEDGLNPQAVGVIVDAEHGCMTLRGVNKRSPRLRTQDFRGLLAEDLTMQQRFLDAIGARP

SEQ ID NO: 15811 - protein, 388 aa, Thalassobium sp.
  misc_feature (1)..(388): tr|C7DC78|C7DC78_9RHOB GTP cyclohydrolase FolE2 OS=Thal assobium sp. R2A62 OX=633131 GN=folE2 PE=3 SV=1
MEIDRDTPHMKLLRPEDGETEMTLEGQEFEREPTQDEAREALALLRQWAVSVTDEEIATLDALVSCLVPGQELMNYPALARAYPEEFEVDELYKASMPDLQNGPSSLIRGAKQQIQHVGISNFRLPIQVRTRGGAPLTLETSVTGTVSLEAEKKGINMSRIMRTFYRRAEETFSFDVIERALEDYKADLESFDARIQMRFSFPMKVDSLRSGLSGYQYYDLALEVIDVGGVRQKIVHLDYVYSSTCPCSLELSEHARQFRGQLATPHSQRSVARLSVQVDETAGILWFEDLIDLCRRAVPTETQVMVKREDEQAFAELNAANPIFVEDAARSFCELLQADPRIGDFRIVASHQESLHSHDAVSILTEGETFSADSIDPKLFSTLFHVG

SEQ ID NO: 15812 - protein, 367 aa, Thalassobium sp.
  misc_feature (1)..(367): tr|A0A2G1ZYK4|A0A2G1ZYK4_9RHOB GTP cyclohydrolase FolE2 OS=Thalassobium sp. OX=2030825 GN=folE2 PE=3 SV=1
MNIHQPDAARAPSRAEAEDALALLRRWAVDATAEEVATLDPLVSRLIPGSELPNYPALARAYPEDFAVDEAYRAMLPDLQNGPASLIRGAKQQIQHVGISNFRLPIRFHTRDGDDLTLETSVTGTVSLEAEKKGINMSRIMRTFYKHAGETFSFDVIERALEAYKADLDSFDARIQMRFSFPMKVQSLRSGLEGFQYYDIALELIEQKGVAKKIVHLDFVYSSTCPCSLELSEHARQYRGQLATPHSQRSVARISVELEQDAPCLWFEDLIDICRAAVPTETQVMVKREDEQAFAELNAANPIFVEDAARSFCEKLQQDQRIRDFRVVASHQESLHSHDAVSVLTEGQTFAADSLDPKLFATLFHIG

SEQ ID NO: 15813 - protein, 366 aa, Thalassobius activus
  misc_feature (1)..(366): tr|A0A0P1ISF5|A0A0P1ISF5_9RHOB GTP cyclohydrolase FolE2 OS=Thalassobius activus OX=1715691 GN=folE2 PE=3 SV=1
MNIQSSKSDRPMTREEAKDALDKLRAWASAANPTEIAELDPAVARLIPGNEVSNYPDLSRDYPEDFTVDPDYKATLPDLQNGPTSLIKGAKKQIQHVGISNFRLPISYRTRDGGDVTLETSVTGTVSLEEDKKGINMSRIMRSFYKHAEKTFSFEVLEHALADYKADLDSFDARIQMRFRYPMKIPSLRSGLEGYQYYDLAMEKVEIGGQPMKIMHLDYVYSSTCPCSLELSEHARQFRGQLATPHSQRSVARISVVTKSIQRLWFEDLIDMARRAVPTETQVMVKREDEQAFAELNAANPIFVEDAARLFCRELQQDERIGDFRVIASHQESLHSHDAVSILTEGDTFVSGSIDPKLFTTLFHVG

SEQ ID NO: 15814 - protein, 363 aa, Thalassobius autumnalis
  misc_feature (1)..(363): tr|A0A0P1FXH7|A0A0P1FXH7_9RHOB GTP cyclohydrolase FolE2 OS=Thalassobius autumnalis OX=2072972 GN=folE2 PE=3 SV =1
MNVHTSEIDRVMQADEARDALARLRTWAETASDAELKEVDAGLLALLRSGQYPELSREYPEDFTVDAAYKASLPDLQNGPSSLIRGAKRAIQHVGISNFRLPIRFHTRDGADITLETSVTGTVSLEAEKKGINMSRIMRSFYRHAEKTFSFEVVEAALEDYKADLESFDARIQMRFSYPVKVPSLRSGLAGYQYYDIALELIESAGVRKKIMHLDYVYSSTCPCSLELSEHARQTRGQLATPHSQRSVARISVELVGKACLWFEDLIELARQAVPTETQVMVKREDEQAFAELNAANPIFVEDAARLFSQSLEADARVGDFRVVASHQESLHSHDAVSILTEGATFAAESYDPKMFATLHHPG

SEQ ID NO: 15815 - protein, 366 aa, Thalassobius gelatinovorus
  misc_feature (1)..(366): tr|A0A0P1FC54|A0A0P1FC54_THAGE GTP cyclohydrolase FolE2 OS=Thalassobius gelatinovorus OX=53501 GN=folE2 PE=3 S V=1
MNVFMPELNKPLSREDAEQALARLRDWAAQATPEEIADLDPAVSRLLPDAALGNYPALRREYPEDFAVDSGYKDSLPDLQNGPASLIRGAKRIIQHVGISNFRLPIRFHTRDDGDLSLETSVTGTVSLEAEKKGINMSRIMRSFYRHAEKTFSFEVIEAALEDYKTDLDSFDARIQMRFSYPVKLSSLRSGLEGFQYYDIALELIETAGTRKKIIHLDYVYSSTCPCSLELSEHARQFRGQLATPHSQRSVARISVVAQDGECLWFEDLIDMVRTAVPTETQVMVKREDEQAFAELNAANPIFVEDAARLFAQHLEDDPRVGDFRIVASHQESLHSHDAVSILTEGETFSSESIDPKLFNTLYHVG

SEQ ID NO: 15816 - protein, 363 aa, Thalassobius mediterraneus
  misc_feature (1)..(363): tr|A0A0P1GND6|A0A0P1GND6_9RHOB GTP cyclohydrolase FolE2 OS=Thalassobius mediterraneus OX=340021 GN=folE2 PE=3 SV=1
MNVHASEIDREMQAEEARDALNRLRAWAQTASEADLAAVGADLSGLLAGKAYPEFSRDYPSDFTVDAAYKDTLPDLQNGPSSLIRGAKRAIQHVGISNFRLPIRFHTRDGGDIALETSVTGTVSLEAEKKGINMSRIMRSFYRHAEKTFSFEVVNAALEDYKNDLESFDARIQMRFSYPVKVQSLRSGLWGYQYYDIALELNETNGVRKKIMHLDYVYSSTCPCSLELSEHAREMRGQLATPHSQRSVARISVELVGPNRLWFEDLLELARDAVPTETQVMVKREDEQAFAELNAANPIFVEDAARLFSKALEDDPRVGDFRVVASHQESLHSHDAVSILTEGDTFAAESYDPKMFATLHHAG

SEQ ID NO: 15817 - protein, 223 aa, Thalassobius sp.
  misc_feature (1)..(223): tr|A0A2E9G533|A0A2E9G533_9RHOB GTP cyclohydrolase 1 OS= Thalassobius sp. OX=1979401 GN=folE PE=3 SV=1
MNDTNKKLTERQHFEFNGDNHLSNSIDTALRKDAFAKSDEEKINNIEVLFKGIMEELGLDLTDNSLKGTPYRVAKMYVSELFHGLNPQNKPSLSVFDNHYQYNKILLEKNITFSSACEHHFLPIVGKAHIAYISSGKVIGLSKLNRLVEYYSRRPQVQERLTLQIFNELKNTLNTEDIIVMIEAEHLCISSRGVNDKSSSTTTLEYGGKFTEVNMRNEFFQLL

SEQ ID NO: 15818 - protein, 243 aa, Thalassobius sp.
  misc_feature (1)..(243): tr|A0A2E9GC42|A0A2E9GC42_9RHOB GTP cyclohydrolase 1 OS= Thalassobius sp. OX=1979401 GN=folE PE=3 SV=1
MKQNGTSLNTLHLNGKGSNQNVTESDSLSLELIEQIGDEHVGSSYDTPLRKDAFELSDEEKMRKIEHHFKEIMETLGLDLTDDSLKGTPHRVAKMYVKEIFNGLNPANFPAVKLFDNKYKYNEMLVEKDISFHSNCEHHFVPIIGKAHVAYISNGKVIGLSKINRIVQYFAKRPQVQERLTVQIAETLKKVLETEDIAIVMDAKHMCVSMRGVEDHASSTVTSHFSGKFKNEATKSEFLKYIQ

SEQ ID NO: 15819 - protein, 366 aa, Thalassococcus halodurans
  misc_feature (1)..(366): tr|A0A1H5ZR09|A0A1H5ZR09_9RHOB GTP cyclohydrolase FolE2 OS=Thalassococcus halodurans OX=373675 GN=folE2 PE=3 S V=1
MNVFTPEIDRKPSREEAEQALAVLRQWAGKAQDEEIVDLDPAVHALVPDGNGVAYPALDRDYDGDFTVDAAYKAGLPDLQNGPSSLIRGAKRAIQHVGISNFRLPIRYHSRDNGDLTLETSVTGSVSLDADKKGINMSRIMRSFYKHSEATFSFEVIEKALEDYKTDLESFDARINMRLSFPVRVDSLRSGLSGFQYYDIALELVEMNGVRRKIMHLDYVYSSTCPCSLELSEHARRTRGQLATPHSQRSVARISVELKGDDCLWFEDLIDMCRAAVPTETQVMVKREDEQAFAELNAANPIFVEDAARLFAEQLLQDDRIGDFRVVASHQESLHSHDAVSVLTEGDLFHSESLDPKLFSTLFHVG

SEQ ID NO: 15820 - protein, 365 aa, Thalassococcus profundi
  misc_feature (1)..(365): tr|A0A369THL3|A0A369THL3_9RHOB GTP cyclohydrolase FolE2 OS=Thalassococcus profundi OX=2282382 GN=folE2 PE=3 SV =1
MNVHTPEIDRKPSREEAEAALALLRQWANKAPDAEIEALDPAVARLLDDAAFEYPDLSRIFPHKFEVDAAYKSSLPDLQNGPSSLIKGANRSIQHVGISNFRLPLRFHTRDNGDLTLEASVTGTVSLDADKKGINMSRIMRSFYRHAEATFSFGVIEAALDDYKSDLDSFDARINMAFRFPVKVQSLRSGLEGYQYYDISLELVETDGQRRKIMHLDYVYSSTCPCSLELSEHARRTRGQLATPHSQRSVARLSVEVQDGACLWFEDLIDLCRRAVPTETQVMVKREDEQAFAELNAANPIFVEDAARLFAQGLQKDARVGDFRVLASHQESLHSHDAVSVLTEGDLFAAGSLDPKLFSTLFHVG

SEQ ID NO: 15821 - protein, 366 aa, Thalassococcus sp.
  misc_feature (1)..(366): tr|A0A4P6MIV1|A0A4P6MIV1_9RHOB GTP cyclohydrolase FolE2 OS=Thalassococcus sp. S3 OX=2017482 GN=folE2 PE=3 SV=1
MNIHAPTIEHTPDRDEAEAALAVLRSWARKASDADIVELDPSVAGLLPGGGSAYPAFSRMYPTDFEVDADYKASLPDLQNGPSSLIRGARQQIQHVGISNFRLPIRFHSRDNGDLTLETSVTGTVSLDAEKKGINMSRIMRSFYKHADRTFSFEVIEAALDDYKSDLDAFDARIQMRFSFPVRVDSLRSGLSGYQYYDIALELVEQGGVRQKIMHLDYVYSSTCPCSLELSEHARATRGQLATPHSQRSVARISVEIDEKADCLWFEDLIDACRRAVPTETQVMVKREDEQAFAELNAANPIFVEDAARLFCEQLQADHRIGDFRVVASHQESLHSHDAVSVLTDGDTFAAKSFDPKLFNTLFHIG

SEQ ID NO: 15822 - protein, 183 aa, Thalassolituus oleivorans
  misc_feature (1)..(183): tr|A0A1L6KCW7|A0A1L6KCW7_9GAMM GTP cyclohydrolase 1 OS= Thalassolituus oleivorans OX=187493 GN=folE PE=3 SV=1
MSNLETLYQQVLSELGEDTNREGLLDTPKRAAKAMQFLTSGYETNLHEVVNNAVFTSDNDEMVVVQGIEFYSLCEHHMLPFIGRCHIGYLPNGNVLGLSKFARITDMFARRLQIQENMTKQIAEAVEEITGCRGVGVIVEAQHMCMMMRGVQKQNSMMRTSVMKGAFRENQATRDEFMRLVGL

SEQ ID NO: 15823 - protein, 183 aa, Thalassolituus oleivorans; identical to SEQ ID NO: 15822
  misc_feature (1)..(183): tr|W8G0M4|W8G0M4_9GAMM GTP cyclohydrolase 1 OS=Thalasso lituus oleivorans R6-15 OX=1208320 GN=folE PE=3 SV=1

SEQ ID NO: 15824 - protein, 183 aa, Thalassolituus sp.
  misc_feature (1)..(183): tr|A0A558NLS4|A0A558NLS4_9GAMM GTP cyclohydrolase 1 OS= Thalassolituus sp. C2-1 OX=2597518 GN=folE PE=3 SV=1
MSNLESLYQQVLAELGENVEREGLLDTPKRAAKAMQFLTSGYTTDLHEVVNKAVFTSDNDEMVVVQGIEFYSLCEHHMLPFIGRCHIGYLPSGKVLGLSKFARIVDMFGRRLQIQENMTKQIAEAVEEVTGCRGVGVIVEAQHMCMMMRGVQKQNSMMRTSVMKGDFRSNAATRDEFMRLIGL

SEQ ID NO: 15825 - protein, 180 aa, Thalassomonas actiniarum
  misc_feature (1)..(180): tr|A0A0D8D695|A0A0D8D695_9GAMM GTP cyclohydrolase 1 OS= Thalassomonas actiniarum OX=485447 GN=folE PE=3 SV=1
MEQEFKRIITAIGEDPSREGLVDTPSRAAKALKYLTRGYEQDLDTVINGALFSSECDSMVVVDHIELYSLCEHHMLPFTGRCHIGYIPNGKVLGLSKLARIVDMYARRLQIQENLTQEIANAIMEVTGAKGVGVVVEASHLCMRMRGVEKQNSEMKTSCMLGSFMKDKDTRAEFLQLIKA

SEQ ID NO: 15826 - protein, 308 aa, Thalassomonas actiniarum
  misc_feature (1)..(308): tr|A0A0D8CV39|A0A0D8CV39_9GAMM GTP cyclohydrolase FolE2 OS=Thalassomonas actiniarum OX=485447 GN=folE2 PE=3 SV =1
MPTSMPDIANHTTAQTEGTLDWVGMGNIEMPVMVASKDEAERMVSAHVDAFVNLKEPKAKGIHMSRLYLLLDELSSNQVLNYQNLVTLLDGFISSHQDLSDNAKVQFRFDYHLRRKSLISGKAGWKAYPVVITGRLNQGVLDIELAIDVRYSSTCPCSAALARQLIQKAFVDKFSDNGEANLADIHEWLGTTEGIVATPHSQRSVAEIKVKLNQKVNDFPITDLVDTIEDALQTPVQAAVKREDEQEFARLNGQNLMFCEDAARRLQHAMNLETVYDDFWLKINHLESLHAHDAVSVVTKGIAGGYQP

SEQ ID NO: 15827 - protein, 230 aa, Thalassomonas sp.
  misc_feature (1)..(230): tr|A0A553F9C1|A0A553F9C1_9GAMM GTP cyclohydrolase 1 OS= Thalassomonas sp. M1454 OX=2594477 GN=folE PE=3 SV=1
MNTAQAKKLASIANNTATSAEAKLVQQALISAGLETPMHKGSSLSSDEKYQKIKHAFTEISEALGLDLTDDSLQETPHRIAKMYVQEIFSGLDYSNFPKITVIDNKMANDEMIMVKDINLTSTCEHHFVTIDGLAKVAYIPNKTIIGLSKINRLVRFFAQRPQVQERLTKQILIALKALLATEHVAVTINAVHYCVKARGVMDSNSSTTTTALSGCFKTNSASRAEFISN

SEQ ID NO: 15828 - protein, 308 aa, Thalassomonas sp.
  misc_feature (1)..(308): tr|A0A553FF64|A0A553FF64_9GAMM GTP cyclohydrolase FolE2 OS=Thalassomonas sp. M1454 OX=2594477 GN=folE2 PE=3 SV =1
MPTSMPDIANHTTAQTEGTLDRVGMGNIEMPIMVSAKDEAEKMVSAHIDAFVNLNDAQAKGIHMSRLYLLLDDLSSGNTLNYQSLIELLNEFISSHHDLSDTAYVKFSFDYPMRRKALVSGKLGWRVYPVTIVGKLEKGVFDIELCVDIAYSSTCPCSAALARQLIQKAFTEKFAEQDSVAKEDIHQWLGTSEGIVATPHSQRSIAEIKVKLNESVSSFPITDVVDTVETALQTPVQAAVKREDEQEFARLNGQNLMFCEDAARRVQHAMNLVQGYDDFWVKINHLESLHAHDAVAVTTKGLANGYKA

SEQ ID NO: 15829 - protein, 308 aa, Thalassomonas viridans
  misc_feature (1)..(308): tr|A0A0D8DA32|A0A0D8DA32_9GAMM GTP cyclohydrolase FolE2 OS=Thalassomonas viridans OX=137584 GN=folE2 PE=3 SV=1
MPTSMPDIANHTTAQTEGTLDWVGMSNIEMPLMVTSKDEAERMVSAHVDAFVNLKEPKAKGIHMSRLYLLLDELSNNQVLNYQSLVTLLDGFISSHQDLSDDAKVEFRFDYHLRRKSLISGKQGWKAYPVVLTGRLNQGALNVELAIDVRYSSTCPCSAALARQLIQKAFMEKFSNNEEANLADIHEWLGTTEGIVATPHSQRSVAEVRVKLNQKLNDFPITDLVDTIEDALQTPVQAAVKREDEQEFARLNGQNLMFCEDAARRLQHAMNLETGYDDFWLKINHLESLHAHDAVSVVTKGIAGGYQP

SEQ ID NO: 15830 - protein, 196 aa, Thalassospira alkalitolerans
  misc_feature (1)..(196): tr|A0A1Y2LIR5|A0A1Y2LIR5_9PROT GTP cyclohydrolase 1 OS= Thalassospira alkalitolerans OX=1293890 GN=folE PE=3 SV =1
MCSQNSTDKRPSREEAEDAVRTLLRWAGDDPDREGLRGTPDRVVRSYGEFFAGYEQDPAEILRRTFEETDGYDEMVVLRDIRVESYCEHHMVPIIGVAHVAYLPRRRVVGISKLARVVEVYAKRLQIQEKMTAQVANTIQEELDPLGVAVVIDANHQCMSTRGIHKTGVSMVTSRMLGAFRDDPITRREFFAMIGR

SEQ ID NO: 15831 - protein, 196 aa, Thalassospira lohafexi
  misc_feature (1)..(196): tr|A0A2N3L706|A0A2N3L706_9PROT GTP cyclohydrolase 1 OS= Thalassospira lohafexi OX=744227 GN=folE PE=3 SV=1
MCSEHSAVKRPTREEAEEAVRTLLRWAGDDPEREGLLGTPDRVARSYGEFFAGYQQDPAEILRRTFEETDGYDEMVVLRDIRVESYCEHHMVPIIGVAHVAYLPRKRVVGISKLARVVEVYSKRLQIQEKMTAQVANTIQEELDPLGVAVVIDANHQCMSTRGVHQTGVSMVTSRMLGAFRDDPITRREFFAMIGR

SEQ ID NO: 15832 - protein, 196 aa, Thalassospira lucentensis; identical to SEQ ID NO: 15831
  misc_feature (1)..(196): tr|A0A358HU98|A0A358HU98_9PROT GTP cyclohydrolase 1 OS= Thalassospira lucentensis OX=168935 GN=folE PE=3 SV=1

SEQ ID NO: 15833 - protein, 196 aa, Thalassospira lucentensis
  misc_feature (1)..(196): tr|A0A154L3K9|A0A154L3K9_9PROT GTP cyclohydrolase 1 OS= Thalassospira lucentensis OX=168935 GN=folE PE=3 SV=1
MCSETSVAKRPSREEAEEAVRTLLRWAGDDPDREGLRGTPDRVVRSYGEFFAGYQQDPADILRRTFEETDGYDEMVVLRDIRVESYCEHHMVPIIGVAHVAYLPRRRVVGISKLARVVEVYAKRLQIQEKMTAQVANTIQEELDPLGVAVVIDANHQCMSTRGIHKTGVSMVTSRMLGAFRDDPITRREFFAMIGR

SEQ ID NO: 15834 - protein, 196 aa, Thalassospira marina
  misc_feature (1)..(196): tr|A0A2N3KSE9|A0A2N3KSE9_9PROT GTP cyclohydrolase 1 OS= Thalassospira marina OX=2048283 GN=folE PE=3 SV=1
MCNEETAANRPSREEAEDAVRTLLRWAGDDPDREGLRGTPDRVVRSYGEFFAGYQQDPAEILRRTFEETDGYDEIVLLRDIRVESYCEHHMVPIIGVAHVAYLPRTRVVGISKLARVVEVYAKRLQIQEKMTSQIANTIQEELDPLGVAVVIDANHQCMSTRGVHKTGVSMVTSRMLGAFRDDPVTRREFFSMIGK

SEQ ID NO: 15835 - protein, 196 aa, Thalassospira mesophila
  misc_feature (1)..(196): tr|A0A1Y2KUQ1|A0A1Y2KUQ1_9PROT GTP cyclohydrolase 1 OS= Thalassospira mesophila OX=1293891 GN=folE PE=3 SV=1
MCNDETAVNRPSREQAEEAVRTLLRWAGDDPDREGLRGTPDRVVRSYGEFFAGYEQDPAEILRRTFDETDGYDEIVLLRDIRVESYCEHHMVPIIGVAHVAYLPRKRVVGISKLARVVEVYAKRLQIQEKMTAQIANTIQEELDPLGVAVVIDANHQCMSTRGVHKTGVSMVTSRMLGAFRDDPVTRREFFSMIGK

SEQ ID NO: 15836 - protein, 196 aa, Thalassospira permensis
  misc_feature (1)..(196): tr|A0A074JAN1|A0A074JAN1_9PROT GTP cyclohydrolase 1 OS= Thalassospira permensis NBRC 106175 OX=1353532 GN=folE PE=3 SV=1
MCSETSAVKRPSQEEAEEAVRTLLRWAGDDPDREGLRGTPDRVVRSYGEFFAGYQQDPAEILRRTFEETDGYDEMVVLRDIRVESYCEHHMVPIIGVAHVAYLPRRRVVGISKLARVVEVYAKRLQIQEKMTAQVANTIQEELDPLGVAVVIDANHQCMSTRGIHKTGVSMVTSRMLGAFRDDPITRREFFAMIGR

SEQ ID NO: 15837 - protein, 196 aa, Thalassospira povalilytica
  misc_feature (1)..(196): tr|A0A2N3KI96|A0A2N3KI96_9PROT GTP cyclohydrolase 1 OS= Thalassospira povalilytica OX=732237 GN=folE PE=3 SV=1
MCSEHSAVKRPTREEAEDAVRTLLRWAGDDPDREGLRGTPDRVVRSYGEFFAGYQQDPAEILRRTFEETDGYDEMVVLRDIRVESYCEHHMVPIIGVAHVAYLPRKRVVGISKLARVVEVYSKRLQIQEKMTAQVANTIQEELDPLGVAVVIDANHQCMSTRGVHKTGVSMVTSRMLGAFRDDPITRREFFAMIGR

SEQ ID NO: 15838 - protein, 196 aa, Thalassospira profundimaris
  misc_feature (1)..(196): tr|A0A367WEU6|A0A367WEU6_9PROT GTP cyclohydrolase 1 OS= Thalassospira profundimaris OX=502049 GN=folE PE=3 SV=1
MCSEHSAVKRPTREEAEDAVRTLLRWAGDDPDREGLLGTPDRVVRSYGEFFAGYQQDPAEILRRTFEETDGYDEMVVLRDIRVESYCEHHMVPIIGVAHVAYLPRRRVVGISKLARVVEVYAKRLQIQEKMTAQVANTIQEELDPLGVAVVIDANHQCMSTRGVHKTGVSMVTSRMLGAFRDDPITRREFFAMIGR

SEQ ID NO: 15839 - protein, 196 aa, Thalassospira profundimaris
  misc_feature (1)..(196): tr|A0A199YNR6|A0A199YNR6_9PROT GTP cyclohydrolase 1 OS= Thalassospira profundimaris OX=502049 GN=folE PE=3 SV=1
MCSEHNPVKRPTREEAEEAVRTLLRWAGDDPDREGLRGTPDRVARSYGEFFAGYQQDPAEILRRTFEETDGYDEMVVLRDIRVESYCEHHMVPIIGVAHVAYLPRRRVVGISKLARVVEVYAKRLQIQEKMTAQVANTIQEELDPLGVAVVIDANHQCMSTRGVHKTGVSMVTSRMLGAFRDDPITRREFFAMIGR

SEQ ID NO: 15840 - protein, 48 aa, Thalassospira sp.
  misc_feature (1)..(48): tr|A0A3C0FNV0|A0A3C0FNV0_9PROT GTP cyclohydrolase 1 (Fr agment) OS=Thalassospira sp. OX=1912094 GN=DCM48_11380 PE=3 SV=1
GVAHVAYLPRRRVVGISKLARVVEVYAKRLQIQEKMTAQVANTIQEEL

SEQ ID NO: 15841 - protein, 196 aa, Thalassospira sp.; identical to SEQ ID NO: 15839
  misc_feature (1)..(196): tr|A0A2E3TJA7|A0A2E3TJA7_9PROT GTP cyclohydrolase 1 OS= Thalassospira sp. OX=1912094 GN=folE PE=3 SV=1

SEQ ID NO: 15842 - protein, 196 aa, Thalassospira xiamenensis; identical to SEQ ID NO: 15836
  misc_feature (1)..(196): tr|A0A367W5F2|A0A367W5F2_9PROT GTP cyclohydrolase 1 OS= Thalassospira xiamenensis OX=220697 GN=folE PE=3 SV=1

SEQ ID NO: 15843 - protein, 196 aa, Thalassospira xiamenensis; identical to SEQ ID NO: 15833
  misc_feature (1)..(196): tr|A0A154KRZ1|A0A154KRZ1_9PROT GTP cyclohydrolase 1 OS= Thalassospira xiamenensis OX=220697 GN=folE PE=3 SV=1

SEQ ID NO: 15844 - protein, 196 aa, Thalassospira xianhensis; identical to SEQ ID NO: 15833
  misc_feature (1)..(196): tr|A0A367U9K6|A0A367U9K6_9PROT GTP cyclohydrolase 1 OS= Thalassospira xianhensis MCCC 1A02616 OX=1177929 GN=fol E PE=3 SV=1

SEQ ID NO: 15845 - protein, 307 aa, Thalassotalea agarivorans
  misc_feature (1)..(307): tr|A0A1I0AW30|A0A1I0AW30_THASX GTP cyclohydrolase FolE2 OS=Thalassotalea agarivorans OX=349064 GN=folE2 PE=3 S V=1
MSSSMPDIANHSQALSEGTLDWVGMSNIEMPLQVSSEGQQPQVVTTSIDAFVNLLPPQAKGIHMSRLYLALDEMSGEQILCPAALQHVLNAFISSHSDLSDSAKVAITFDYHLRRKSLISGKEGWKAYPITVVGQIMQGNLSVELAIDVTYSSTCPCSAALARQLIQNAFTEQFSDEQISKDDVLAWLGTTDGINATPHSQRSVAQVKVKLPSDLAHFPIVQLIDLLENTLQTPVQAAVKREDEQEFARLNGQNLMFCEDAARKIQHSLNQQKSVEDFWVRINHYESLHAHDAVSITTKGVADGYTP

SEQ ID NO: 15846 - protein, 308 aa, Thalassotalea euphylliae
  misc_feature (1)..(308): tr|A0A3E0UEQ4|A0A3E0UEQ4_9GAMM GTP cyclohydrolase FolE2 OS=Thalassotalea euphylliae OX=1655234 GN=folE2 PE=3 S V=1
MPTSMPDIANHTTAQTEGTLDWVGMSNIEMPLMVASKDQPERMVSAHIDAFVNLKEAQAKGIHMSRLYLLLDELSNNNTLNYQSFAALLDGFISSHQELSDQAKVAIHFDYHMRRKSLISGKQGWKAYPVVLTGQLNKGQLSVELAIDVRYSSTCPCSAALARQLIQQAFLNKFDEQDSIDKQTIHEWLGTTEGVVATPHSQRSIAKVKVKLNSSVTEFPISDLVDAIEDTLQTPVQAAVKREDEQEFARLNGQNLMFCEDAARKLQHTMNQATQYDDFWVKVNHLESLHAHNAVSITTKGVEDGYQA

SEQ ID NO: 15847 - protein, 308 aa, Thalassotalea euphylliae
  misc_feature (1)..(308): tr|A0A3E0U2G6|A0A3E0U2G6_9GAMM GTP cyclohydrolase FolE2 OS=Thalassotalea euphylliae OX=1655234 GN=folE2 PE=3 S V=1
MPTSMPDIANHTTAQTEGTLDWVGMSNIEMPLMVASKDQPERMVSAHIDAFVNLKEAQAKGIHMSRLYLLLDELSNNNTLNYQSFAALLDGFISSHQELSDQAKVAIHFDYHLRRKSLISGKQGWKAYPVVLTGQLNKGQLSVELAIDVRYSSTCPCSAALARQLIQQAFLNKFDEQDNIDKQTIHEWLGTTEGVVATPHSQRSIAKVKVKLNSSVTEFPISDLVDAIEDTLQTPVQAAVKREDEQEFARLNGQNLMFCEDAARKLQHTMNQATHYDDFWVKVNHLESLHAHNAVSITTKGVEGGYQA

SEQ ID NO: 15848 - protein, 309 aa, Thalassotalea sp.
  misc_feature (1)..(309): tr|A0A516HF48|A0A516HF48_9GAMM GTP cyclohydrolase FolE2 OS=Thalassotalea sp. PS06 OX=2594005 GN=folE2 PE=3 SV= 1
MPTSMPDIANHTKAQTEGTLDRVGMGNIEMPIMLAAKDEAERMISAHIDAFVNLKEPKAKGIHMSRLYLLLDELASNNTLNYQSLVTLLDEFISSHHDLSDTALVKFQFDYPMRREALISGKLGWRVYPVTITGKLEQGRFDIELGVDIAYSSTCPCSAALARQLIQKSFTESFADQDQVAAEDVHQWLGTTQGIVATPHSQRSIAEIKVKLNSQVNNFPITDIVDTVENALQTPVQAAVKREDEQEFARLNGQNLMFCEDAARRVQHVMNQVSGYDDYWVKINHLESLHAHDAVAVTTKGIEGGYQPE

SEQ ID NO: 15849 - protein, 212 aa, Thalassotalea sp.
  misc_feature (1)..(212): tr|A0A1Q6CFS2|A0A1Q6CFS2_9GAMM GTP cyclohydrolase 1 OS= Thalassotalea sp. PP2-459 OX=1742724 GN=folE PE=3 SV=1
MISYEAALVRDTLIARGLETPMVVTELTSEEKYTRLKGLFTEVANTIGLDLTDDSLAETPHRIAKMYIHEVFSGLNYENFPAISVIENKMAVDEMVKVTDINLTSTCEHHFVTIDGLAQVAYIPNKKIIGLSKINRIVRFFAQRPQVQERLTQQILVAIQTLTETDNVAVSINATHFCVKSRGIMDVNSKTTTTALGGIFKTNPQTRAEFLS

SEQ ID NO: 15850 - protein, 268 aa, Thauera aminoaromatica
  misc_feature (1)..(268): tr|A0A5C7S991|A0A5C7S991_9RHOO GTP cyclohydrolase FolE2 OS=Thauera aminoaromatica OX=164330 GN=folE2 PE=3 SV=1
MNAPEKFFLPDVQSSADHRALAIQQVGVRGLRYPMAVRDLDGGVQHTVARLEMTVGLPAEVKGTHMSRFVELLEAERDALDLDGLRGLFADMLVRLEAESGRIEARFPWFMKKAAPVSGVESLLDIDARVVVEKTAGGEIRSTLEAVVPVTSLCPCSKKISAYGAHNQRSHITLSATLRGDLGLRELVRMAEEEASCEVFGLLKRPDEKWVTERAYDNPKFVEDLVRDIALRLRADARVASWRVQSENFESIHNHSAYALVEGENAPE

SEQ ID NO: 15851 - protein, 269 aa, Thauera aminoaromatica
  misc_feature (1)..(269): tr|A0A5C7SIV0|A0A5C7SIV0_9RHOO GTP cyclohydrolase FolE2 OS=Thauera aminoaromatica OX=164330 GN=folE2 PE=3 SV=1
MNTPNAIAIPDVQSSADSRRIAIDKVGIKSIRHPIKVADKRGGVQHTVASFNMYVGLPHNFKGTHMSRFIEILNGREREISVENFEPMLRTMVERLEAETGHVEMSFPYFINKTAPVSGVQSLMDYEVCFIGSIGEGGAYEFTMKVVVPVTSLCPCSKKISAYGAHNQRSHVTVTAVLNDHLWIEEMVQMVEAQASCEVFGLLKRPDEKWVTERAYDNPKFVEDMVRDVAGQLNREPRIDAYVVESENFESIHNHSAYALIERDKRGGA

SEQ ID NO: 15852 - protein, 210 aa, Thauera aromatica
  misc_feature (1)..(210): tr|A0A2R4BM28|A0A2R4BM28_THAAR GTP cyclohydrolase 1 OS= Thauera aromatica K172 OX=44139 GN=folE PE=3 SV=1
MSTHEHPPPPRPRAIGIARSGEFDPAAFEQAVVDLLRACGVAADTSHTGRTAQRVRELWQHRLLGGYDLDPAEVLGDGFEDPRRDMVVVRGIAVHGVCPHHLVPFRGVAHVAYLPGGRLHGFGRIARLVDAIGHRFTYQEWMTRDIAEALMTHGKAAGAACVIEAEQLCLLLGEDRRGDERVITQAFCGEFERSPQSRAEFLRAIEHRRS

SEQ ID NO: 15853 - protein, 280 aa, Thauera aromatica
  misc_feature (1)..(280): tr|A0A2R4BMU7|A0A2R4BMU7_THAAR GTP cyclohydrolase FolE2 OS=Thauera aromatica K172 OX=44139 GN=folE2 PE=3 SV=1
MHDAPNPQRTDMNAPTDHAIPDVQNSADSRRIAINKVGIKSIRHPVKVADKCGGVQHTVASFNMYVGLPHNFKGTHMSRFVDILNGNEREISVESFEPMLRAMVERLEAEAGHVEMSFPYFINKTAPVSGVQSLMDYEVCFIGSIRDDGHYEFTIKVVVPVTSLCPCSKKISAYGAHNQRSHVTVTAVLNDHLWIEDLVQLVENQASCELFGLLKRPDEKWVTERAYDNPKFVEDMVRDLAASLDQETRIDAYVVESENFESIHNHSAYALIERDKRSAA

SEQ ID NO: 15854 - protein, 210 aa, Thauera chlorobenzoica
  misc_feature (1)..(210): tr|A0A1H5S1X6|A0A1H5S1X6_9RHOO GTP cyclohydrolase 1 OS= Thauera chlorobenzoica OX=96773 GN=folE PE=3 SV=1
MDTHEPPATPRPRTIGIARSGDFDPAAFEQAVLDLLRACGVAPDTSHTGRTAQRVRELWQHRLLGGYDLDPAEVLGDGFEDPRRDMVVVRGIAVHGVCPHHLVPFRGLAHVAYLPGGRLHGFGRIARLVDAIGHRFTYQEWMTRDIAEALMTHGKAAGAACVIEAEQLCLLLGEDRRGDERVITQAFCGEFERSPQSRAEFLRAIEHRRS

SEQ ID NO: 15855 - protein, 269 aa, Thauera chlorobenzoica
  misc_feature (1)..(269): tr|A0A1H5XPJ1|A0A1H5XPJ1_9RHOO GTP cyclohydrolase FolE2 OS=Thauera chlorobenzoica OX=96773 GN=folE2 PE=3 SV=1
MNAPTDHAIPDVQNSADSRRIAINKVGIKSIRHPVKVADKCGGVQHTVASFNMYVGLPHNFKGTHMSRFVDILNGNEREISVESFEPMLRAMVERLEAEAGHVEMSFPYFINKTAPVSGVQSLMDYEVCFIGSIDDDGHYEFTIKVVVPVTSLCPCSKKISAYGAHNQRSHVTVTAVLNDHLWIEDLVQLVENQASCELFGLLKRPDEKWVTERAYDNPKFVEDMVRDLAASLDQEARIDAYVVESENFESIHNHSAYALIERDKRSAA

SEQ ID NO: 15856 - protein, 212 aa, Thauera humireducens
  misc_feature (1)..(212): tr|A0A127K4B1|A0A127K4B1_9RHOO GTP cyclohydrolase 1 OS= Thauera humireducens OX=1134435 GN=folE PE=3 SV=1
MSRHDHDEHDHPAPPRPRSVGIARTGDFDAPAFERAIGDLLRACGIDAATSHTSRTAQRVRELWQKRLLGGYDLDPAEVLGDGFEDERRDMVVVRGIAVHGVCPHHLVPFRGVAHVAYLPGGRLHGFGRIARLVDAIGHRFTYQEWMTRDIADALMQHGKAAGAACVIEAEQLCLLLGEDRRGDERVVTQAFSGEFERSAQARNEFLRAISG

SEQ ID NO: 15857 - protein, 268 aa, Thauera humireducens
  misc_feature (1)..(268): tr|A0A140IDP6|A0A140IDP6_9RHOO GTP cyclohydrolase FolE2 OS=Thauera humireducens OX=1134435 GN=folE2 PE=3 SV=1
MNTPTDAPMPDVQSSADTRQIAINKVGIKSIRHPVKVSDKTGGVQHTVASFNMYVGLPHNFKGTHMSRFVEILNSNERDISVESFEPMLRAMVERLEAETGHVEMSFPYFINKAAPVSGVNSLLDYDVTFIGEIREGDRYEFTMKIVVPVTSLCPCSKKISDYGAHNQRSHITVTAVLNDHLWIEDMVQLVESQASCEVFGLLKRPDEKWVTERAYDNPKFVEDLVRDVAGLLNAEPRIDAYVVESENFESIHNHSAYALIECDKRRP

SEQ ID NO: 15858 - protein, 268 aa, Thauera linaloolentis
  misc_feature (1)..(268): tr|N6YEZ4|N6YEZ4_9RHOO GTP cyclohydrolase FolE2 OS=Thau era linaloolentis 47Lol = DSM 12138 OX=1123367 GN=folE2 PE=3 SV=1
MNTPIDAFMPDVQSSADTRQIAINKVGIKSIRHPVKVSDKAGGIQHTVASFNMYVGLPHNFKGTHMSRFIEILNSNERDISVESFEPMLRMMVERLEAETGHVEMSFPYFINKAAPVSCVNSLLDYEVSFVGEIREGGRYEFTMKIVVPVTSLCPCSKKISDYGAHNQRSHITVTAVLNDHLWIEDMVQLVESQASCEIFGLLKRPDEKWVTERAYDNPKFVEDLVRDVASLLNAEARVDAYVVESENFESIHNHSAYALIECDKRSG

SEQ ID NO: 15859 - protein, 210 aa, Thauera linaloolentis
  misc_feature (1)..(210): tr|N6YG90|N6YG90_9RHOO GTP cyclohydrolase 1 OS=Thauera linaloolentis 47Lol = DSM 12138 OX=1123367 GN=folE PE=3 SV=1
MPRHDHDTHPAQPQPSTIGIARTGSFDAPAFERAIGDLLRASGIDADSSHTGRTAQRVRELWQKRLLGGYDLDPAEVLGDGFADERRDMVVVRGIAVHGVCPHHLVPFRGVAHVAYIPGGRLHGFGRIARLVDAIGHRFTYQEWMTRDIADALMQHGKAAGAACVIEAEQLCLLLGEDRRGDERVVTQAFSGEFERSAQARNEFMRAISG

SEQ ID NO: 15860 - protein, 268 aa, Thauera phenylacetica
  misc_feature (1)..(268): tr|N6YM79|N6YM79_9RHOO GTP cyclohydrolase FolE2 OS=Thau era phenylacetica B4P OX=1234382 GN=folE2 PE=3 SV=1
MNAPEKFFLPDVQSSADHRALAIQHVGVRGLRYPMAVRDLDGGVQHTVATLEMTVGLPADVKGTHMSRFVELLEAERDALDLDGLRGLFADMLLRLEASSGRIEARFPWFMKKAAPVSGVESLLDIDARVVVEKAERGEIRSTLEAVVPVTSLCPCSKKISAYGAHNQRSHITLSATLRGDLGLRELVRMAEEEASCEVFGLLKRPDEKWVTERAYDNPKFVEDLVRDIALRLRADGRVASWRVQSENFESIHNHSAYALIEGENAPE

SEQ ID NO: 15861 - protein, 231 aa, Thauera phenylacetica
  misc_feature (1)..(231): tr|N6YXR5|N6YXR5_9RHOO GTP cyclohydrolase 1 OS=Thauera phenylacetica B4P OX=1234382 GN=folE PE=3 SV=1
MPVRVPQGTAPDDAMSPPAHDPCGHDHPHAPRPGAVGIPRSGAFDASAFEKAVGDLLRACGIAPDNAHTGRTAQRVRELWQRRLLGGYELDPAEVLGDGFEDARRDMVVIRGIAVHGVCPHHLVPFRGVAHVAYLPGGRLHGFGRIARLVDAIGHRFTYQEWMTRDIADALMRHGHAAGAACVIEAEQLCLLLGEDRRGDERVITQAFAGEFERSEQARNEFLRAIEERRR

SEQ ID NO: 15862 - protein, 209 aa, Thauera propionica
  misc_feature (1)..(209): tr|A0A235F017|A0A235F017_9RHOO GTP cyclohydrolase 1 OS= Thauera propionica OX=2019431 GN=folE PE=3 SV=1
MSRHDHDHSALPHPRSVGIARTGSFDAPAFERAIGDLLRACGVDADTSHTGRTAQRVRELWQKRLLGGYDLDPAEVLGDGFEDERRDMVVVRGIAVHGVCPHHLVPFRGVAHVAYLPGGRLHGFGRIARLVDAIGHRFTYQEWMTRDIADALMQHGKAAGAACIIEAEQLCLLLGEDRRGDERVVTQAFSGEFERSAQARNEFLRAISG

SEQ ID NO: 15863 - protein, 268 aa, Thauera propionica
  misc_feature (1)..(268): tr|A0A235EVW4|A0A235EVW4_9RHOO GTP cyclohydrolase FolE2 OS=Thauera propionica OX=2019431 GN=folE2 PE=3 SV=1
MNSPTDAPMPDVQSSADTRQIAINKVGIKSIRHPVKVSDKTGGVQHTVASFNMYVGLPHNFKGTHMSRFVEILNANERDISVESFEPMLRAMVERLEAETGHVEMSFPYFINKAAPVSGVNSLLDYDVTFIGEIRDGGRYEFTMRIVVPVTSLCPCSKKISDYGAHNQRSHITVTATLNDHLWIEDMVQLVESQASCEVFGLLKRPDEKWVTERAYDNPKFVEDLVRDVAGLLNAEPRIDAYIVESENFESIHNHSAYALIKCDKRRH

SEQ ID NO: 15864 - protein, 269 aa, Thauera sp.
  misc_feature (1)..(269): tr|A0A290ZMS9|A0A290ZMS9_9RHOO GTP cyclohydrolase FolE2 OS=Thauera sp. K11 OX=2005884 GN=folE2 PE=3 SV=1
MNAPLANAMPDVQNSADSRQIAINKVGIKSIRHPVKVVDKSGGVQHTVASFNMYVGLPHNFKGTHMSRFIEILNGNEREISVESFEPMLREMVERLEAETGHIEMTFPYFIGKAAPVSGVKSLMDYEVTFTGEIRAGGGYEFTMKVVVPVTSLCPCSKKISDYGAHNQRSHVTVTAVLNDHLWIEEAVQLVESQASCEVYGLLKRPDEKYVTERAYDNPKFVEDMVRDVAGLLNKEDRIDAYVVESENFESIHNHSAYALITRDKRIEA

SEQ ID NO: 15865 - protein, 212 aa, Thauera sp.
  misc_feature (1)..(212): tr|A0A290ZM02|A0A290ZM02_9RHOO GTP cyclohydrolase 1 OS= Thauera sp. K11 OX=2005884 GN=folE PE=3 SV=1
MKEGQTDDAGDADLRGGVSREAAEDAVRTLIRWAGDEPGREGLVDTPSRVVRAYEEFFAGYSQDPAEILARTFSEVEGYDEMIVMNDIRFESHCEHHMAPIIGKAHIGYLPNHRVVGISKLARLVEIYAKRLQIQEKMTVQIADTLHSVLQPKGVAVVIEASHQCMTTRGVHKPGAGLVTSRMVGAFREDASTRREFLAMIGMGGPRGLPNT

SEQ ID NO: 15866 - protein, 238 aa, Thauera terpenica
  misc_feature (1)..(238): tr|S9ZTW8|S9ZTW8_9RHOO GTP cyclohydrolase 1 OS=Thauera terpenica 58Eu OX=1348657 GN=folE PE=3 SV=1
MKANAGMAADDRPNEKSVRHSASPPVSNSDHDSEHDHPVQARPRTVGIARSAQFDAPAFERAITDLLGACGIKTDSAHTGRTAQRVRELWQKRLLGGYDLDPAEVLGEGFADERRDMVVVRGIAVHGVCPHHLVPFRGVAHVAYIPGGRLHGFGRIARLVDAIGHRFTYQEWMTRDIADALMAHGKAAGAACVVEAEQLCLLLGEDRRGDERVVTQAFSGEFERSAQARNEFLHAISG

SEQ ID NO: 15867 - protein, 268 aa, Thauera terpenica
  misc_feature (1)..(268): tr|S9ZDD9|S9ZDD9_9RHOO GTP cyclohydrolase FolE2 OS=Thau era terpenica 58Eu OX=1348657 GN=folE2 PE=3 SV=1
MNAPDKFFLPDVQASADHRALPIQRVGVRGLRYPLAIAAAGGTVQHTVATIEMTVGLAADQKGTHMSRFVELLEAQHEALDLAGVRGLFADMLQRLEASSGRIEARFPWFVRKQAPVSGVASLLDMDATVIVEQTEGGSVHTRLQVVVPVTSLCPCSKKISAYGAHNQRSHITLDVRLRADMELDELLRIAEEEASCEVFGLLKRADEKWVTERAYDNPKFVEDLVRDIALRLGAEPRVAAWSVASENFESIHNHSAYAFIEGENLAQ

SEQ ID NO: 15868 - protein, 187 aa, Thermacetogenium phaeum
  misc_feature (1)..(187): tr|A0A101FHT5|A0A101FHT5_9THEO GTP cyclohydrolase 1 OS= Thermacetogenium phaeum OX=85874 GN=folE PE=3 SV=1
MDREKILQGVRLILEGIGEDPEREGLRGTPDRVARMYEEIFCGLHHDPKKELNVIFSENHNEMVLVKDIPMYSTCEHHFMPFYGKAHVAYIPRQGRITGLSKLARVVECLSKRPQLQERLTSQIADTIMEALNPLGVIVVIEAEHMCMTMRGVKKAGSKTLTSAVRGIFQTNEATRAEAFALIRGGN

SEQ ID NO: 15869 - protein, 187 aa, Thermacetogenium phaeum; identical to SEQ ID NO: 15868
  misc_feature (1)..(187): tr|K4LF94|K4LF94_THEPS GTP cyclohydrolase 1 OS=Thermace togenium phaeum (strain ATCC BAA-254 / DSM 12270 / PB) OX=1089553 GN=folE PE=3 SV=1

SEQ ID NO: 15870 - protein, 196 aa, Thermaerobacter marianensis
  misc_feature (1)..(196): tr|E6SML5|E6SML5_THEM7 GTP cyclohydrolase 1 OS=Thermaer obacter marianensis (strain ATCC 700841 / DSM 12885 / J CM 10246 / 7p75a) OX=644966 GN=folE PE=3 SV=1
MPRRAEEFDLERIQRAVLDILEAVGEDPTREGLVDTPRRVAEAYQELFSGLGRDPADELSVFFSTDHDEVVLVKDIPFYSICEHHLLPFHGRAHVAYLPRNGRITGLSKLARAVEVASRRPQLQERLTVQIADAIEQRLNPRGVVVVIEAEHLCMTMRGIQKPGSYAVTSAVRGLFRENVASRHEVFALIRSDLRP

SEQ ID NO: 15871 - protein, 196 aa, Thermaerobacter sp.
  misc_feature (1)..(196): tr|A0A4P7GV26|A0A4P7GV26_9FIRM GTP cyclohydrolase 1 OS= Thermaerobacter sp. FW80 OX=2546351 GN=folE PE=3 SV=1
MPRRAEEFDLQRIQRAVLEILEAVGEDPTREGLVDTPRRVAEAYQELFSGLGRDPADELTVFFETDHDEVVLVKDIPFYSMCEHHLLPFHGRAHVAYLPRNGRITGLSKLARAVEVASRRPQLQERLTCQIADAIEARLNPRGVVVVIEAEHLCMTMRGIQKPGSYAVTSAVRGLFRENVASRHEVFALIRSDLRP

SEQ ID NO: 15872 - protein, 196 aa, Thermaerobacter sp.
  misc_feature (1)..(196): tr|A0A371Z8N1|A0A371Z8N1_9FIRM GTP cyclohydrolase 1 OS= Thermaerobacter sp. PB12/4term OX=2293838 GN=folE PE=3 SV=1
MPRRAEEFDLERIQRAVLEILEAVGEDPRREGLVDTPRRVAEAYQELFSGLGRDPADELSVFFETDHDEVVLVKDIPFYSMCEHHLLPFHGRAHVAYLPRNGRITGLSKLARAVEVASRRPQLQERLTVQIADAIEERLNPRGVVVVIEAEHLCMTMRGIQKPGSYAVTSAVRGLFRENVASRHEVFALIRSDLRP

SEQ ID NO: 15873 - protein, 196 aa, Thermaerobacter subterraneus
  misc_feature (1)..(196): tr|K6PRZ0|K6PRZ0_9FIRM GTP cyclohydrolase 1 OS=Thermaer obacter subterraneus DSM 13965 OX=867903 GN=folE PE=3 S V=1
MPRRAEEFDLDRIKRAVLDILEAVGEDPRREGLVDTPRRVAEAYQELFSGLGRDPADELSVFFETDHDEVVLVKDIPFYSMCEHHLLPFHGRAHVAYLPRNGRITGLSKLARAVEVASRRPQLQERLTVQIADAIEERLNPRGVVVVIEAEHLCMTMRGIQKPGSYAVTSAVRGLFRENVASRQEVFALIRSDLRP

SEQ ID NO: 15874 - protein, 192 aa, Thermanaeromonas toyohensis
  misc_feature (1)..(192): tr|A0A1W1W0U5|A0A1W1W0U5_9THEO GTP cyclohydrolase 1 OS= Thermanaeromonas toyohensis ToBE OX=698762 GN=folE PE=3 SV=1
MMFEVDKIERAVRMILEAIGENPDREGLRDTPRRVAKMYQEIFAGLLQDPAAVFTVHYTEEHEELVIVKDIPFYSMCEHHLLPFFGKVHLGYIPRKGRVVGLSKLVRGIEVFTKRPQLQERLTKQIADAIMQYVRALGVIVVIEAEHMCMTMRGVKKPGSLTVTSAVRGVLHDDEALRSEALALIKGWRTAV

SEQ ID NO: 15875 - protein, 180 aa, Thermanaerothrix daxensis
  misc_feature (1)..(180): tr|A0A0P6YPF6|A0A0P6YPF6_9CHLR GTP cyclohydrolase 1 OS= Thermanaerothrix daxensis OX=869279 GN=folE PE=3 SV=1
MLIAFGENPERQGLIRTPERVASMYEELLAGYRVDPVELINEAIFDVNYDEMVVVRDIEFYSLCEHHMLPFIGRAHVAYIPRGKVIGLSKIPRVVDMFARRLQVQERMTRQIADFLNEVLHPLGVAVVVEAIHMCAMIRGVKKHNSRMTTSTMLGAFRTSMATRMEFLDNISRSAEPLHI

SEQ ID NO: 15876 - protein, 256 aa, Thermanaerovibrio acidaminovorans
  misc_feature (1)..(256): tr|D1B659|D1B659_THEAS GTP cyclohydrolase FolE2 OS=Ther manaerovibrio acidaminovorans (strain ATCC 49978 / DSM 6589 / Su883) OX=525903 GN=folE2 PE=3 SV=1
MRDLQSERDLRGIGLNRVGVRGIKRPMEVLSMEGPALHTVGRFCAFTDLPPDVRGSHMSRIAQLVLQWDGRVPCPSSARELLSSLSSSLGASASEAEVRFPFFVPKASPVTRIPCPLEVRCRVLASLRGEDLSFRLAVKVPVKTLCPCSREISSFGAHNQRAHVTIEVGSRRMIWIEELVAVAEENASSPVYPVLKRQDERFVTEGAYMRPRFVEDLARDCAARLLEDPRVESLRVRVVSHESIHDHDAVAEVIRP

SEQ ID NO: 15877 - protein, 259 aa, Thermanaerovibrio velox
  misc_feature (1)..(259): tr|H0UQ27|H0UQ27_9BACT GTP cyclohydrolase FolE2 OS=Ther manaerovibrio velox DSM 12556 OX=926567 GN=folE2 PE=3 S V=1
MRDLQSEADPRGVPIERVGIRGLTRPMMVMSKDGSPVPSVGTFSVFTDLPMNLRGTHMSRLAELASSWEGRVPCPRSAEEFLRSLIEALDARRGGMKVKFPYFVPKRSPVTDLPGVLQVQASVKAELDVEDPAGGLRFFLSVTTPVLTLCPCSKEISRFGAHNQRASVRIRVRSMDMIWIEELVEMAERNASSPLYPILKRRDERFVTESSYERPRFVEDLARDCALELKKHPAVRGFSVKVTSFESIHRHDAVAEVIG

SEQ ID NO: 15878 - protein, 228 aa, Thermasporomyces composti
  misc_feature (1)..(228): tr|A0A3D9V6S6|A0A3D9V6S6_9ACTN GTP cyclohydrolase 1 OS= Thermasporomyces composti OX=696763 GN=folE PE=3 SV=1
MSCDGDTHREGQVSNGSVHVDDVDEALTSGSADLFEATQARPYDSERVERAIRELLYAIGEDPDRPGLKDTPARVARAYAEMFAGLRMSPEAVLSTTFDLGHDEMVLVKDIEVWSVCEHHLVPFTGAAHIGYIPNTEGQITGLSKLARLVDVFAKRPQVQERLTTQIADALVRILKPRGVIVVVECEHLCMTMRGVRKPGAKTVTSAVRGQLRDPATRAEAMSLIIGA

SEQ ID NO: 15879 - protein, 188 aa, Thermincola ferriacetica
  misc_feature (1)..(188): tr|A0A0L6W565|A0A0L6W565_9FIRM GTP cyclohydrolase 1 OS= Thermincola ferriacetica OX=281456 GN=folE PE=3 SV=1
MFDQQKLEQAVKMILEAIGEDPTREGLVDTPKRVARMYQEIFSGLEEDPKDHLKVLFTEDHEEMVLVKDIPFYSMCEHHLLPFFGRAHVAYIPRRGKITGLSKLARAVETIAKRPQLQERLTCGIAEAIMESLNPLGVLVVVEAEHMCMTMRGVKKPGSMTVTSAVRGLFKTQEATRAEAFALIRSQK

SEQ ID NO: 15880 - protein, 188 aa, Thermincola potens; identical to SEQ ID NO: 15879
  misc_feature (1)..(188): tr|D5X860|D5X860_THEPJ GTP cyclohydrolase 1 OS=Therminc ola potens (strain JR) OX=635013 GN=folE PE=3 SV=1

SEQ ID NO: 15881 - protein, 187 aa, Thermoactinomyces sp.
  misc_feature (1)..(187): tr|A0A151Z1J6|A0A151Z1J6_9BACL GTP cyclohydrolase 1 OS= Thermoactinomyces sp. AS95 OX=1811386 GN=folE PE=3 SV=1
MVDHRKIEEAVRMILEAVGEDPNREGLLDTPKRVARMYEEIFSGLNKDPKDQFSVVFSEDHEELVLVKDIPFFSTCEHHLVPFFGKAHIGYIPRGGRVTGLSKLARAVETVARRPQLQERITSTVADSIVESLDPYGVIVVIEAEHMCMTMRGVKKPGSKTVTSAVRGVFAEDSAARAEAMSLIGLK

SEQ ID NO: 15882 - protein, 192 aa, Thermoactinomyces sp.
  misc_feature (1)..(192): tr|A0A1K1TK94|A0A1K1TK94_9BACL GTP cyclohydrolase 1 OS= Thermoactinomyces sp. DSM 45891 OX=1761907 GN=folE PE=3 SV=1
MKQVDHDKIEQAVRMILEAVGEDPQREGLLDTPARVARMYAEVFQGLDQNPKDHFSVVFGEDHEEVVLVKDIPFFSTCEHHLVPFFGHAHIAYIPRGGRVTGLSKLARAVDSVTKRPQLQERITSTIADSMMETLDPHGVFVVLEAEHMCMTMRGVKKPGSKTVTSVARGIYAEDTGKRDEVFKMIRMGSLT

SEQ ID NO: 15883 - protein, 187 aa, Thermoactinomyces vulgaris; identical to SEQ ID NO: 9562
  misc_feature (1)..(187): tr|A0A0N1K0N4|A0A0N1K0N4_THEVU GTP cyclohydrolase 1 OS= Thermoactinomyces vulgaris OX=2026 GN=folE PE=3 SV=1

SEQ ID NO: 15884 - protein, 188 aa, Thermoanaerobacter brockii
  misc_feature (1)..(188): tr|E8UUK8|E8UUK8_THEBF GTP cyclohydrolase 1 OS=Thermoan aerobacter brockii subsp. finnii (strain ATCC 43586 / D SM 3389 / AKO-1) OX=509193 GN=folE PE=3 SV=1
MIDKEKIKKAVRDILEAIGEDPDREGLLETPDRVARMYEEIFAGLHTDVKDVIKIFQEDEHQEIILVKDIPLYSMCEHHLLPFIGVAHVAYLPRKGRILGLSKLARIVDILAKRPQLQERLTSEIADTIMEAVNPLGVAVVIEAEHLCMTMRGIKKPGAKTVTSALRGIFRTDEKSRAEVMSLINSKK

SEQ ID NO: 15885 - protein, 188 aa, Thermoanaerobacter ethanolicus; identical to SEQ ID NO: 15884
  misc_feature (1)..(188): tr|C7ISL8|C7ISL8_THEET GTP cyclohydrolase 1 OS=Thermoan aerobacter ethanolicus CCSD1 OX=589861 GN=folE PE=3 SV= 1

SEQ ID NO: 15886 - protein, 188 aa, Thermoanaerobacter italicus
  misc_feature (1)..(188): tr|D3T4X9|D3T4X9_THEIA GTP cyclohydrolase 1 OS=Thermoan aerobacter italicus (strain DSM 9252 / Ab9) OX=580331 G N=folE PE=3 SV=1
MIDKEKIKKAVRDILEAIGENPDREGLLETPDRVARMYEEIFAGLHTNVKDVIKIFQEDEHQEIILVKDIPLYSMCEHHLLPFIGVAHVAYLPRKGRILGLSKLARIVDILAKRPQLQERLTSEIADTIMEAVNPLGVAVVIEAEHLCMTMRGVKKPGSKTVTSALRGIFRTDQKSRAEVMSLINSKK

SEQ ID NO: 15887 - protein, 188 aa, Thermoanaerobacter kivui
  misc_feature (1)..(188): tr|A0A097ATW6|A0A097ATW6_THEKI GTP cyclohydrolase 1 OS= Thermoanaerobacter kivui OX=2325 GN=folE PE=3 SV=1
MIDKEKIKKAVRDILEAIGENPDREGLLETPDRVARMYEEIFAGLHTDVKDVIKFFQEDEHQEIILVKDISLYSMCEHHLLPFIGVAHVAYLPRKGRILGLSKLARIVDILAKRPQLQERLTSEIADTIMEAVNPLGVAVVIEAEHLCMTMRGIKKPGAKTVTSALRGVFRTDQKSRAEVMSLINSKR

SEQ ID NO: 15888 - protein, 188 aa, Thermoanaerobacter mathranii; identical to SEQ ID NO: 15886
  misc_feature (1)..(188): tr|D7ASB3|D7ASB3_THEM3 GTP cyclohydrolase 1 OS=Thermoan aerobacter mathranii subsp. mathranii (strain DSM 11426 / CIP 108742 / A3) OX=583358 GN=folE PE=3 SV=1

SEQ ID NO: 15889 - protein, 188 aa, Thermoanaerobacter pseudethanolicus; identical to SEQ ID NO: 15884
  misc_feature (1)..(188): sp|B0KCE5|GCH1_THEP3 GTP cyclohydrolase 1 OS=Thermoanae robacter pseudethanolicus (strain ATCC 33223 / 39E) OX= 340099 GN=folE PE=3 SV=1

SEQ ID NO: 15890 - protein, 188 aa, Thermoanaerobacter siderophilus
  misc_feature (1)..(188): tr|I9ACT0|I9ACT0_9THEO GTP cyclohydrolase 1 OS=Thermoan aerobacter siderophilus SR4 OX=880478 GN=folE PE=3 SV=1
MIDKEKIKKAVRDILEAIGEDPDREGLLETPDRVARMYEEIFAGLHTDVKDVIKIFQEDEHQEIILVKDIPLYSMCEHHLLPFIGAAHVAYLPRKGKILGLSKLARIVDILAKRPQLQERLTSEIADTIMEAVNPLGVAVVIEAEHLCMTMRGIKKPGAKTVTSALRGIFRTDEKSRAEVMSLINSKR

SEQ ID NO: 15891 - protein, 188 aa, Thermoanaerobacter sp.; identical to SEQ ID NO: 15884
  misc_feature (1)..(188): sp|B0K5C1|GCH1_THEPX GTP cyclohydrolase 1 OS=Thermoanae robacter sp. (strain X514) OX=399726 GN=folE PE=3 SV=1

SEQ ID NO: 15892 - protein, 188 aa, Thermoanaerobacter sp.; identical to SEQ ID NO: 15884
  misc_feature (1)..(188): tr|A0A358W0I2|A0A358W0I2_THESB GTP cyclohydrolase 1 OS= Thermoanaerobacter sp. OX=1755 GN=folE PE=3 SV=1

SEQ ID NO: 15893 - protein, 188 aa, Thermoanaerobacter thermocopriae; identical to SEQ ID NO: 15884
  misc_feature (1)..(188): tr|A0A101D6F2|A0A101D6F2_9THEO GTP cyclohydrolase 1 OS= Thermoanaerobacter thermocopriae OX=29350 GN=folE PE=3 SV=1

SEQ ID NO: 15894 - protein, 188 aa, Thermoanaerobacter thermohydrosulfuricus
  misc_feature (1)..(188): tr|A0A1I1XRC5|A0A1I1XRC5_THETY GTP cyclohydrolase 1 OS= Thermoanaerobacter thermohydrosulfuricus OX=1516 GN=fol E PE=3 SV=1
MIDKEKIKKAVRDILEAIGEDPDREGLLETPDRVARMYEEIFAGLHTDVKDVIKIFQEDEHQEIILVKDIPLYSMCEHHLLPFIGVAHVAYLPRKGKILGLSKLARIVDILAKRPQLQERLTSEIADTIMEAVNPLGVAVVIEAEHLCMTMRGIKKPGAKTVTSALRGIFRTDEKSRAEVMSLINSKK

SEQ ID NO: 15895 - protein, 188 aa, Thermoanaerobacter thermohydrosulfuricus; identical to SEQ ID NO: 15894
  misc_feature (1)..(188): tr|M8DQY0|M8DQY0_THETY GTP cyclohydrolase 1 OS=Thermoan aerobacter thermohydrosulfuricus WC1 OX=1198630 GN=folE PE=3 SV=1

SEQ ID NO: 15896 - protein, 188 aa, Thermoanaerobacter uzonensis
  misc_feature (1)..(188): tr|A0A1M4YSM7|A0A1M4YSM7_9THEO GTP cyclohydrolase 1 OS= Thermoanaerobacter uzonensis DSM 18761 OX=1123369 GN=fo lE PE=3 SV=1
MIDKEKIKKAVRDILEAIGEDPDREGLLETPDRVARMYEEIFAGLHTDVKDVIKIFQEDEHQEIILVKDIPLYSMCEHHLLPFIGVAHVAYLPRKGRILGLSKLARIVDILAKRPQLQERLTSEIADTIMEAVNPLGVAVVIEAEHLCMTMRGIKKPGAKTVTSALRGIFRTDEKSRAEVMSLINSKR

SEQ ID NO: 15897 - protein, 188 aa, Thermoanaerobacter wiegelii
  misc_feature (1)..(188): tr|G2MX34|G2MX34_9THEO GTP cyclohydrolase 1 OS=Thermoan aerobacter wiegelii Rt8.B1 OX=697303 GN=folE PE=3 SV=1
MIDKEKIKKAVRDILEAIGEDPDREGLLETPDRVARMYEEIFAGLHTDVKDVIKIFQEDEHQEIILVKDIPLYSMCEHHLLPFIGVAHVAYLPRKGKILGLSKLARIVDILAKRPQLQERLTSEIADTIMEAVNPLGVAVVIEAEHLCMTMRGIKKPGAKTVTSALRGIFRTDEKSRAEVMSLINSKR

SEQ ID NO: 15898 - protein, 194 aa, Thermoanaerobacterales bacterium; identical to SEQ ID NO: 12545
  misc_feature (1)..(194): tr|A0A117L8L1|A0A117L8L1_9FIRM GTP cyclohydrolase 1 OS= Thermoanaerobacterales bacterium 50_218 OX=1635288 GN=f olE PE=3 SV=1

SEQ ID NO: 15899 - protein, 188 aa, Thermoanaerobacterium aotearoense
  misc_feature (1)..(188): tr|W9E9S8|W9E9S8_9FIRM GTP cyclohydrolase 1 OS=Thermoan aerobacterium aotearoense SCUT27 OX=1421016 GN=folE PE= 3 SV=1
MIDKEKIKKAVYDILEAIGEDPKREGLLETPDRVARMYEEIFSGLHENVMDVIKTFKEDEHQEIVIVKDIPMYSMCEHHLLPFMGVAHVAYLPRKGTILGLSKLARIVDILAKKPQLQERLTSEIADTIVKAANPLGVAVVVEAEHLCMTMRGIKKPGAKTVTSALRGLFKTDQRAREEVMLLINGKR

SEQ ID NO: 15900 - protein, 188 aa, Thermoanaerobacterium saccharolyticum; identical to SEQ ID NO: 15899
  misc_feature (1)..(188): tr|I3VTX8|I3VTX8_THESW GTP cyclohydrolase 1 OS=Thermoan aerobacterium saccharolyticum (strain DSM 8691 / JW/SL- YS485) OX=1094508 GN=folE PE=3 SV=1

SEQ ID NO: 15901 - protein, 188 aa, Thermoanaerobacterium sp.
  misc_feature (1)..(188): tr|A0A1X2FXY4|A0A1X2FXY4_9FIRM GTP cyclohydrolase 1 OS= Thermoanaerobacterium sp. PSU-2 OX=1930849 GN=folE PE=3 SV=1
MIDKEKIKKAVYDILEAIGEDPKREGLLETPDRVARMYEEIFSGLHENVMDVIKTFKEDEHQEIVIVKDIPMYSMCEHHLLPFMGVAHVAYLPRKGTILGLSKLARIVDILAKKPQLQERLTSEIADTIVKAANPLGVAVVVEAEHLCMTMRGIKKPGAKTVTSALRGLFKTDQRSREEVMLLINGKR

SEQ ID NO: 15902 - protein, 187 aa, Thermoanaerobacterium sp.
  misc_feature (1)..(187): tr|A0A285BGH8|A0A285BGH8_9FIRM GTP cyclohydrolase 1 OS= Thermoanaerobacterium sp. RBIITD OX=1550240 GN=folE PE= 3 SV=1
MIDKEKIKKAVRNIIEAIGEDPDREGLKETPDRVARMYEEIFSGLHTNVMDVIKTFKEDEHQEIVLVKDIPMYSMCEHHLLPFMGVAHVAYLPRKGTILGLSKLARIVDILAKKPQLQERLTSEIADTIMEAVNPLGVVVVVEAEHLCMTMRGIKKPGAKTVTSALRGIFKTDQRSREEVMLLINAK

SEQ ID NO: 15903 - protein, 187 aa, Thermoanaerobacterium thermosaccharolyticum
  misc_feature (1)..(187): tr|D9TRD0|D9TRD0_THETC GTP cyclohydrolase 1 OS=Thermoan aerobacterium thermosaccharolyticum (strain ATCC 7956 / DSM 571 / NCIB 9385 / NCA 3814) OX=580327 GN=folE PE=3 SV=1
MIDKEKIKKAVYDILEAIGEDPNREGLLETPDRVARMYEEIFSGLHTDVMDVIKTFKEDEHQEIVIVKDIPMYSMCEHHLLPFMGVAHVAYLPRKGTILGLSKLARIVDVLAKKPQLQERLTSEIADTIVKAANPLGVAVVVEAEHLCMTMRGIKKPGAKTVTSALRGLFKTDQRSREEVMLLINGK

SEQ ID NO: 15904 - protein, 187 aa, Thermoanaerobacterium thermosaccharolyticum
  misc_feature (1)..(187): tr|A0A231VJB3|A0A231VJB3_THETR GTP cyclohydrolase 1 OS= Thermoanaerobacterium thermosaccharolyticum OX=1517 GN= folE PE=3 SV=1
MIDKEKIKRAVYDILEAIGEDPNREGLLETPDRVARMYEEIFSGLHTDVMDVIKTFKEDEHQEIVIVKDIPMYSMCEHHLLPFMGVAHVAYLPRKGTILGLSKLARIVDVLAKKPQLQERLTSEIADTIVKAANPLGVAVVVEAEHLCMTMRGIKKPGAKTVTSALRGLFKTDQRSREEVMLLINGK

SEQ ID NO: 15905 - protein, 188 aa, Thermoanaerobacterium xylanolyticum
  misc_feature (1)..(188): tr|F6BGB7|F6BGB7_THEXL GTP cyclohydrolase 1 OS=Thermoan aerobacterium xylanolyticum (strain ATCC 49914 / DSM 70 97 / LX-11) OX=858215 GN=folE PE=3 SV=1
MIDKEKIKKAVYDILEAIGEDPKREGLLETPDRVARMYEEIFSGLHENVMDVIKTFKEDEHQEIVIVKDIPMYSMCEHHLLPFIGVAHVAYLPRKGTILGLSKLARIVDILAKKPQLQERLTSEIADTIVKAANPLGVAVVVEAEHLCMTMRGIKKPGAKTVTSALRGLFKTDQRSREEVMLLINGKR

SEQ ID NO: 15906 - protein, 206 aa, Thermoanaerobaculum aquaticum; identical to SEQ ID NO: 5246
  misc_feature (1)..(206): tr|A0A062XMS5|A0A062XMS5_9BACT GTP cyclohydrolase 1 OS= Thermoanaerobaculum aquaticum OX=1312852 GN=folE PE=3 S V=1

SEQ ID NO: 15907 - protein, 197 aa, Thermobacillus composti
  misc_feature (1)..(197): tr|L0EFQ2|L0EFQ2_THECK GTP cyclohydrolase 1 OS=Thermoba cillus composti (strain DSM 18247 / JCM 13945 / KWC4) O X=717605 GN=folE PE=3 SV=1
MAGVKDYANRHVAENRAELERLVREMLRMIGEDPDREGLLDTPARVVRMFEEIYAGYSVDPGDVLGVTFDEQHEELVIVKDIVYYSQCEHHLAPFFGKVHIGYLPSGKIVGLSKLARLVEAVTRKLQVQERITSQIADILEERLHPHGVMVVVEGEHLCMCARGVKKPGSKTVTSAIRGEFRESAALRDEFLQLIRM

SEQ ID NO: 15908 - protein, 197 aa, Thermobacillus sp.
  misc_feature (1)..(197): tr|A0A1Y3Q6S8|A0A1Y3Q6S8_9BACL GTP cyclohydrolase 1 OS= Thermobacillus sp. ZCTH02-B1 OX=1858795 GN=folE PE=3 SV =1
MAGVKEYANRHVQENRAELERIVREMLRLIGEDPDREGLLETPARVVRMFEEIFAGYSVDPGDVLGVTFDEQHEELVIVKDIVYYSQCEHHLAPFFGKVHIGYLPSGKIVGLSKLARLVDAVTRRLQVQERITSQIADILEERLHPHGVMVVVEGEHLCMCARGVKKPGSKTVTSAIRGEFRESAALRDEFLRLIRM

SEQ ID NO: 15909 - protein, 197 aa, Thermobacillus sp.
  misc_feature (1)..(197): tr|A0A3E0R115|A0A3E0R115_9BACL GTP cyclohydrolase 1 OS= Thermobacillus sp. OX=2108467 GN=folE PE=3 SV=1
MAGVKDYANRHVAENRAELERLVREMLRMIGEDPDREGLLDTPARVVRMFEEIYAGYSVDPGDVLGVTFDEQHEELVIVKDIVYYSQCEHHLAPFFGKVHIGYLPSGKIVGLSKLARLVEAVTRKLQVQERITSQIADILEERLHPHGVMVVVEGEHLCMCARGVKKPGSKTVTSAIRGEFRENAALRTEFLELLKV

SEQ ID NO: 15910 - protein, 207 aa, Thermobifida cellulosilytica
  misc_feature (1)..(207): tr|A0A147KI06|A0A147KI06_9ACTN GTP cyclohydrolase 1 OS= Thermobifida cellulosilytica TB100 OX=665004 GN=folE PE =3 SV=1
MTEYEYRAGEIDAGLEPAGIDQPRIEKAVREILLAIGEDPDRDGLVDTPARVARAFAEQYAGLHQRPEDVLTTVFEANHEEMVLVKDIELYSTCEHHLVPFYGVAHVGYIPNTDGRITGLSKLARLVDVYARRPQVQERLTSQVADALMEHLEPRGVIVVVEAEHLCMTMRGVRKPGAKTVTSAVRGSFRESDKTRAEAMGLIMGHR

SEQ ID NO: 15911 - protein, 207 aa, Thermobifida fusca
  misc_feature (1)..(207): sp|Q47KU5|GCH1_THEFY GTP cyclohydrolase 1 OS=Thermobifi da fusca (strain YX) OX=269800 GN=folE PE=3 SV=1
MTEYEYRVGDTDAGLAPAGIDQPRIEKAVREILLAIGEDPDRDGLVETPARVARAFAEQFAGLSQRPEDVLTTVFEANHEEMVLVKDIELYSTCEHHLVPFYGAAHVGYIPNTDGRITGLSKLARLVDIYARRPQVQERLTSQVADALMERLEPRGVIVVVEAEHLCMTMRGVRKPGAKTVTSAVRGAFRESYKTRAEAMDLILGRR

SEQ ID NO: 15912 - protein, 207 aa, Thermobifida halotolerans
  misc_feature (1)..(207): tr|A0A399G1K5|A0A399G1K5_9ACTN GTP cyclohydrolase 1 OS= Thermobifida halotolerans OX=483545 GN=folE PE=3 SV=1
MTEYEYQAGDIDTGLEPTGIDQPRIEKAVREILSAIGEDPDRDGLVETPARVARAFAEQFAGLHQRPEDVLTTVFEANHEEMVLVKDIELYSTCEHHLVPFYGAAHVGYIPNVNGQITGLSKLARLVDVYARRPQVQERLTSQVADALMEHLDPRGVIVVIEAEHLCMTMRGVRKPGAKTVTSAVRGAFRESDKTRAEAMGLIMGHR

SEQ ID NO: 15913 - protein, 194 aa, Thermobispora bispora
  misc_feature (1)..(194): tr|D6Y9V4|D6Y9V4_THEBD GTP cyclohydrolase 1 OS=Thermobi spora bispora (strain ATCC 19993 / DSM 43833 / CBS 139. 67 / JCM 10125 / NBRC 14880 / R51) OX=469371 GN=folE PE =3 SV=1
MTVPPPNFDRARIERAVREILIGIGEDPDREGLRDTPARVARAYAEQFSGLGQRPEDALTTMFDADHDEMVLVKDIEVMSMCEHHLLPFYGVAHIGYTPNEKGKVTGLSKLARLVDVYARRPQLQERMTSQIADGLMQVLEPRGVIVVIEAEHMCMTMRGVRKPGAKTITSAVRGDFRTCEATRAEAMSLILRR

SEQ ID NO: 15914 - protein, 256 aa, Thermobrachium celere
  misc_feature (1)..(256): tr|R7RT18|R7RT18_9CLOT GTP cyclohydrolase FolE2 OS=Ther mobrachium celere DSM 8682 OX=941824 GN=folE2 PE=3 SV=1
MKDVQSERDYRNIPLKHVGINNLKWPVIVKDKKNGTQNTIATVSLSVDLPHFQRGTHMSRFVEVIKELKSVSPKDIEGMLNDLKEKLDAQVAHCRMEFDYFIYKPSPVTKIESPYDVQCAFEATKNHEFDFILEVKVPVTTLCPCSKEISEFGAHNQRATVDIKIKSDKMIWIEDIVKVAEESASTPVFSLLKRKDEKWVTEMAYLNPRFVEDVAREVAVRLEANKDIKWYSVCVESIESIHNHNAFAYTEKGMME

SEQ ID NO: 15915 - protein, 186 aa, Thermoclostridium stercorarium
  misc_feature (1)..(186): tr|A0A1B1YJ06|A0A1B1YJ06_THEST GTP cyclohydrolase 1 OS= Thermoclostridium stercorarium subsp. leptospartum DSM 9219 OX=1346611 GN=folE PE=3 SV=1
MNTEKIKSLIRELIIEIGDDPDREGLIETPSRVAEMFKEIFSGYQDIPENTVKLFKETKHGDGIIIKDIPFYSMCEHHIMPFFGVIDVAYIPNNESILGLSKFSRIVDYYSKRLQLQECLGEQICDFIMKEVNARGAMVIIKAEHLCMSMRGVKKSGVNTITKTSKGVFNDNSELRMEYLSLLLNM

SEQ ID NO: 15916 - protein, 186 aa, Thermoclostridium stercorarium; identical to SEQ ID NO: 15915
  misc_feature (1)..(186): tr|A0A1B1YBL3|A0A1B1YBL3_THEST GTP cyclohydrolase 1 OS= Thermoclostridium stercorarium subsp. thermolacticum DS M 2910 OX=1121336 GN=folE PE=3 SV=1

SEQ ID NO: 15917 - protein, 185 aa, Thermocrinis albus
  misc_feature (1)..(185): tr|D3SP30|D3SP30_THEAH GTP cyclohydrolase 1 OS=Thermocr inis albus (strain DSM 14484 / JCM 11386 / HI 11/12) OX =638303 GN=folE PE=3 SV=1
MGIDREKIKQAVRLFLEGIGEDPDREGLKETPDRIARMWEEFERQREFNFKLFEEFGQYNEMVVVKDITIYSFCEHHLLPFFGKAHVAYVPDRVVCGLSKLVRTVKAFALRPQVQERLTAQIADFLMEQLKPKGVAVVLECEHLCMSMRGVMSPGHITTTSALRGIFLSDIRTREEFLKLIGKKL

SEQ ID NO: 15918 - protein, 186 aa, Thermocrinis minervae
  misc_feature (1)..(186): tr|A0A1M6QAI6|A0A1M6QAI6_9AQUI GTP cyclohydrolase 1 OS= Thermocrinis minervae OX=381751 GN=folE PE=3 SV=1
MAIDKEKIKQAIRLFLEGIGEDPDREGLKETPDRIARMWEEFDRQREFNFKLFEEFGDYNEMVIVKDIRFYSLCEHHLLPFFGKVHIAYIPDKVVCGLSKLVRTVKAFSLRPQVQERLTQQIADFLQEQLNPKGVAVVIEAEHLCMSMRGVMTPGHITVTSALRGIFLKDLRTREEFLKLIGKQGL

SEQ ID NO: 15919 - protein, 186 aa, Thermocrinis ruber
  misc_feature (1)..(186): tr|W0DD60|W0DD60_9AQUI GTP cyclohydrolase 1 OS=Thermocr inis ruber OX=75906 GN=folE PE=3 SV=1
MAVDKEKLKQAIRLFLEAIGEDPDREGLKETPERVARMWEEFDRQRSFDFKLFEEFGDYNEMVLVKDINIYSLCEHHLLPFFGKAHIAYIPNGIVCGLSKLVRTVRAFALRPQVQERLTNQIADFLMEQLKPKGVAVVLEMEHLCMSMRGVMSPGHITTTSALRGIFLSDLRTREEFLKLIGKSNQ

SEQ ID NO: 15920 - protein, 162 aa, Thermocrispum agreste
  misc_feature (1)..(162): tr|A0A2W4JJX5|A0A2W4JJX5_9PSEU GTP cyclohydrolase 1 (Fr agment) OS=Thermocrispum agreste OX=37925 GN=folE PE=3 SV=1
MAPREDSDSTFDLARAEKAVRELLIACGEDPDRPGLQETPARVARAFQEMFAGLHTDPDEVLDRTFDESHEELVLVTDIPMFSTCEHHLVPFHGVAHVGYIPDERGRVAGLSKLARLVDLYSKRPQVQERLTSQIADALDRKLNPRGVIVVIEAEHLCMTMR

SEQ ID NO: 15921 - protein, 260 aa, Thermodesulfatator autotrophicus
  misc_feature (1)..(260): tr|A0A177E8X1|A0A177E8X1_9BACT GTP cyclohydrolase FolE2 OS=Thermodesulfatator autotrophicus OX=1795632 GN=folE 2 PE=3 SV=1
MSELKDVQSLPDYRQIEIDKVGIKGIRYPVSVLDRHKGIQHTIAEINMYVDLPHHFKGTHMSRFVEILNEFRHEIHIKKILCILQEMRKRLTAKVAHIEMSFPFFMEKEAPVSKAVGLMGYNCRILGSMGENFRDLVLEVEVPIMTVCPCSKEISAKGAHNQRGIVRVKVRFKKFIWIEELIEIVEKCASSPVYPLLKRTDEKFVTEWAYDHPMFVEDVVREVCSRLTENQEITWFSVEAENFESIHAHNAYAFIERNKN

SEQ ID NO: 15922 - protein, 260 aa, Thermodesulfatator indicus
  misc_feature (1)..(260): tr|F8AC75|F8AC75_THEID GTP cyclohydrolase FolE2 OS=Ther modesulfatator indicus (strain DSM 15286 / JCM 11887 / CIR29812) OX=667014 GN=folE2 PE=3 SV=1
MDKLKDVQSLPDHRQIEIDKVGIKGIRYPISILDRRKGIQHTVAQINMYVDLPHHFKGTHMSRFVEILNEFRHEIHIKKILCILQEMRKRLTAKVAHIEMSFPFFMEKEAPVSKAIGLMEYNCRILGSMGEDFRDLVLEVEVPVMTVCPCSREISERGAHNQRGIVRVKVRFKKFIWIEELIEIVEECASSPVYPLLKRTDEKFITEWAYDHPMFVEDVVREVCRRFTENQKIIWFSVEAENFESIHAHNAYAFIERNKV

SEQ ID NO: 15923 - protein, 281 aa, Thermodesulfatator sp.
  misc_feature (1)..(281): tr|A0A432UHV1|A0A432UHV1_9BACT GTP cyclohydrolase FolE2 OS=Thermodesulfatator sp. OX=1874629 GN=folE2 PE=3 SV= 1
MKLKDVQSEPATCEIPVDKVGIKGIRYPVSVLDRRRGLQHTVAEINMFVDLPQEFKGTHMSRFIEILNEFREEIHIRNIPFILERMRKKLAAQVAHLEICFPYFLQKEAPVSRAPSLMEYRCLIAGAKDEKRLDLVLGVSVPVMTVCPCSQAISTLGAHNQRGEVNLRVRFKRFVWLEDLIEIVEASASSPVYPLLKRPDEKFVTEEAHRRPRFVEDVVREVAQRLLEHPDITWFAVSAENFESIHAHNAYAYIERFKETSEKALGTSPPHPSFTSKATTF

SEQ ID NO: 15924 - protein, 189 aa, Thermodesulfitimonas autotrophica
  misc_feature (1)..(189): tr|A0A3N5AXE9|A0A3N5AXE9_9THEO GTP cyclohydrolase 1 OS= Thermodesulfitimonas autotrophica OX=1894989 GN=folE PE =3 SV=1
MFDREKIERAVRMILEAIGEDPDREGLKETPARVARMYEEIFAGLGENPADHLEKYFNVAHEEMVLVRDIPVYSVCEHHLLPFFGVAHVAYIPRTGSITGLSKLARVVEGFARRPQLQERLTGQVADAIMERLHPRGVLVVIEAEHMCMTMRGVKKPGAKTVTSAVRGIFQQNPATRAEAFALIKGSLK

SEQ ID NO: 15925 - protein, 192 aa, Thermodesulfobacteriales bacterium
  misc_feature (1)..(192): tr|A0A524JUA5|A0A524JUA5_9BACT GTP cyclohydrolase 1 OS= Thermodesulfobacteriales bacterium OX=2528040 GN=folE P E=3 SV=1
MRRGITPMSVKKAIKEILLEIGEDPKREGLRDTPDRMEKMFKELTAGYHMDPKEVINEAIFHIKYDEMVVVKDIEFYSLCEHHMLPFFGKCNIAYIPNGKVVGLSKIPRIVEVFSRRLQVQERMTVQIADFLKKELDPLGVAVVVEAYHLCMAMRGIKKSGANMLTSSMRGVFKKDERTRGEFLSFIGRDLK

SEQ ID NO: 15926 - protein, 263 aa, Thermodesulfobacterium commune
  misc_feature (1)..(263): tr|A0A124FKR4|A0A124FKR4_9BACT GTP cyclohydrolase FolE2 OS=Thermodesulfobacterium commune OX=1741 GN=folE2 PE= 3 SV=1
MKPELIDVQSLPPEEKIDIDKVGIKGFKHPVTVLDREKGLQHTVAELNLYVDLPSKFKGTHMSRFIEVINEFKGEIHVKNVIKLLKKLAQRLSAKSAHLEMFFPYFLQKKAPVTQISSLMEYQGILLASYSEGKKDLVIGAKVPVMTLCPCSKSISQFSAHNQRSLITVKVRFKEFIWLEELIEIAEASASSPVYSLLKRPDEKFVTEFAYENPRFVEDVVRGVAKRLWEHPEVKWFFVEVENFESIHAHNAYACIERTKRGS

SEQ ID NO: 15927 - protein, 263 aa, Thermodesulfobacterium commune; identical to SEQ ID NO: 15926
  misc_feature (1)..(263): tr|A0A075WUE9|A0A075WUE9_9BACT GTP cyclohydrolase FolE2 OS=Thermodesulfobacterium commune DSM 2178 OX=289377 G N=folE2 PE=3 SV=1

SEQ ID NO: 15928 - protein, 259 aa, Thermodesulfobacterium geofontis
  misc_feature (1)..(259): tr|A0A2N7QFF5|A0A2N7QFF5_9BACT GTP cyclohydrolase FolE2 OS=Thermodesulfobacterium geofontis OX=1295609 GN=folE 2 PE=3 SV=1
MELEDIQSLTPEEKIPLDKVGIKGFKYPVTVLDQKKGFQHTVAEINLYVDLPSKFKGTHMSRFIEVLNEFGSEIHIKNVIKLLKRLREKLFSKSAHIEMYFPYFLEKKSPVSGIISVMEYEAFILASYSQRKRDLIVGVGVPVMTLCPCSKSISKYSAHNQRGKVTIKVRFKKFIWLEELIEIAESSASSPVYSLLKRPDEKFVTEKAYENPKFVEDVVRSVAKKLLEHPEITWFSVSAENFESIHAHNVYAFIERTKS

SEQ ID NO: 15929 - protein, 259 aa, Thermodesulfobacterium geofontis
  misc_feature (1)..(259): tr|F8C424|F8C424_THEGP GTP cyclohydrolase FolE2 OS=Ther modesulfobacterium geofontis (strain OPF15) OX=795359 G N=folE2 PE=3 SV=1
MKLEDIQSLAPENKIPLDKVGIKGFKYPVKVLDREKGIQHTVAEINLYVDLPARFKGTHMSRFIEVLNEFGREIHMKNVIKLLKRLKKKLSSRSAHIEMYFPYFLEKKAPVSGIASLMEYQAFILASYSQKKKDLIVGVEVPVMTLCPCSKSISKYSAHNQRGKVTIKVRFKNFIWLEELIEIAETSASSPVYSLLKRPDEKFVTEHAYENPKFVEDVVREVARKLLEHPEITWFSVEAENFESIHAHNAYAFIERTKS

SEQ ID NO: 15930 - protein, 188 aa, Thermodesulfobium acidiphilum
  misc_feature (1)..(188): tr|A0A2R4W2L8|A0A2R4W2L8_9FIRM GTP cyclohydrolase 1 OS= Thermodesulfobium acidiphilum OX=1794699 GN=folE PE=3 S V=1
MDQEKIKKAVYDILIAIGEDPNREGLKDTPERIARMYEEIFSGINEDPLSVLNVEYHENTDEMVLIKDIPFYSICEHHLIPFIGRAHVAYLPKDGRVVGLSKIARVVDILSKKPQLQERLTSDIAKTIMKGLNPLGVAVVVEAEHLCMSMRGIKKPGHTTVTSALRGAFKASSSTRSEVLSLIFGRLI

SEQ ID NO: 15931 - protein, 189 aa, Thermodesulfobium narugense
  misc_feature (1)..(189): tr|A0A2J6XBH3|A0A2J6XBH3_9FIRM GTP cyclohydrolase 1 OS= Thermodesulfobium narugense OX=184064 GN=folE PE=3 SV=1
MLDQEKIKKAVYDILIAIGEDPNREGLKDTPERIARMYEEIFSGINADPLSVLNVEYHENTDEMVLIKDIPFYSICEHHLIPFIGRAHVAYLPKDGRVVGLSKIARVVDILSKKPQLQERLTSDIAKTIMKGLNPLGVAVVVEAEHLCMSMRGIKKPGHTTVTSALRGAFKASSSTRSEVLSLIFGRLI

SEQ ID NO: 15932 - protein, 188 aa, Thermodesulfobium narugense
  misc_feature (1)..(188): tr|M1E967|M1E967_9FIRM GTP cyclohydrolase 1 OS=Thermode sulfobium narugense DSM 14796 OX=747365 GN=folE PE=3 SV =1
MDQEKIKRAIYDILVAIGEDPNREGLKDTPERIARMYEEIFSGINEDPLSVLNVEYHENTDEMVLIKDIPFYSICEHHLIPFIGRAHVAYLPKDGRVVGLSKIARVVDILSKKPQLQERLTSEIARTIMKGLNPLGVAVVVEAEHLCMSMRGIKKPGHTTVTSALRGAFKASSSTRSEVLSLIFGRLI

SEQ ID NO: 15933 - protein, 270 aa, Thermodesulforhabdus norvegica
  misc_feature (1)..(270): tr|A0A1I4S4L7|A0A1I4S4L7_9DELT GTP cyclohydrolase FolE2 OS=Thermodesulforhabdus norvegica OX=39841 GN=folE2 PE =3 SV=1
MNSMYYFRPSIVVDVQSRRDHRNIAIDKVGVKNIRYPLTVLDKSRGFQHTVGTINMYVNLPRRFKGTHMSRFIEILNEFYGNFDIRNLPRILETMQKRLDAESAHIEISFPYFIEKLAPVTKSTGIMEYGCRVIGALDCNLGYDLIVEVIVPITTVCPCSKEISNYGAHNQRGIVRLAVRYEKFIWIEDLIELVEDCASCDVYSVLKRPDEKYVTERAYDNAKFVEDVVRDVALRLKADPNITWFAVDVENFESIHNHSAYAFIERWKKA

SEQ ID NO: 15934 - protein, 187 aa, Thermodesulfovibrio aggregans
  misc_feature (1)..(187): tr|A0A0U9HR24|A0A0U9HR24_9BACT GTP cyclohydrolase 1 OS= Thermodesulfovibrio aggregans OX=86166 GN=folE PE=3 SV= 1
MFDREKIKKGVRLIIEGIGENPEREGLVETPDRIARMYEEIFKGLEPPEEELLKCIEGETHDEMVLLRNIPFYSVCEHHFLPFFGNAHIAYIPDGRIVGLSELPRALDYLAKRPQVQERLTKQLADLIVEKIKPKGCMVVIEAEHLCMSMRGIKKPGVKTITSAVRGIFRKSQTTRQEALELINKDK

SEQ ID NO: 15935 - protein, 187 aa, Thermodesulfovibrio aggregans
  misc_feature (1)..(187): tr|A0A2J6WNX5|A0A2J6WNX5_9BACT GTP cyclohydrolase 1 OS= Thermodesulfovibrio aggregans OX=86166 GN=folE PE=3 SV= 1
MVNREKIKKGVRLIIEGIGEDPERDGIKDTPERIARMYEEIFKGLEPPEEELLKCIEGETHDEMVLLKNIPFYSVCEHHFLPFFGYAHIAYIPDGRIVGLSELPRAVDYLAKRPQIQERLTKELANLIMEKLRPKGCMVVIEAEHLCMSMRGIKKPGAKTITSAVRGIFRRSQKTRQEALELINKDK

SEQ ID NO: 15936 - protein, 188 aa, Thermodesulfovibrio sp.
  misc_feature (1)..(188): tr|A0A1C3FD79|A0A1C3FD79_9BACT GTP cyclohydrolase 1 OS= Thermodesulfovibrio sp. N1 OX=1871110 GN=folE PE=3 SV=1
MFDRKKIEDGVKLILEGIGEQPERPGLKDTPLRIAKMYEEIFRGLLPAEDDLLKCIEGETHDEMVLIKDIPFYSMCEHHLLPFFGYAHIAYIPDGKIVGLSELPKALDYLAKRPQVQERLTSQLANLLMEKLKPKGCMIVIEAEHLCMSMRGVKKPGAKTITSAVRGIFRKSQATRQEALELINRKEK

SEQ ID NO: 15937 - protein, 188 aa, Thermodesulfovibrio yellowstonii
  misc_feature (1)..(188): sp|B5YJV0|GCH1_THEYD GTP cyclohydrolase 1 OS=Thermodesu lfovibrio yellowstonii (strain ATCC 51303 / DSM 11347 / YP87) OX=289376 GN=folE PE=3 SV=1
MFDRKKIEEGVRLILEGIGEDVERPGIKDTPIRIARMFEEIFRGLLPPDEDLLKSIEGETHDEMVLIKDIPFYSVCEHHLLPFFGNAHIAYIPDGRIVGLSELPKALDYLSKRPQVQERLTSQLANLLMEKLKPKGCMVVIEAEHLCMSMRGIKKPDAKTITSAVRGIFRKSQTTRQEALELINRRDK

SEQ ID NO: 15938 - protein, 200 aa, Thermoflavifilum aggregans
  misc_feature (1)..(200): tr|A0A2M9CTI1|A0A2M9CTI1_9BACT GTP cyclohydrolase 1 OS= Thermoflavifilum aggregans OX=454188 GN=folE PE=3 SV=1
MSYKKIEQYEEKITSHLVENYRETLILLGENPDREGLKKTPHRVAKAMQYLTQGYHMDPKAILESAKFQESYSEMVLVKDIELYSLCEHHLLPFFGKAHVAYIPNGYIVGLSKIARVVDCFSRRLQVQERLTHQILDAIQDVLHPLGVAVVIEAQHLCMMMRGVQKQNSVTTTSAFSGQFEDERTRAEFIRLISADLMHR

SEQ ID NO: 15939 - protein, 188 aa, Thermoflavimicrobium dichotomicum
  misc_feature (1)..(188): tr|A0A1I3SHA9|A0A1I3SHA9_9BACL GTP cyclohydrolase 1 OS= Thermoflavimicrobium dichotomicum OX=46223 GN=folE PE=3 SV=1
MQVDHQKIEQAVRMILEAIGEDPNREGLIDTPKRVARMYEEIFAGLKQNPEDYFSVIFSEDHEELVLVKDIPFFSTCEHHLVPFFGKAHVGYIPRGGRVVGLSKLARAVEAVARRPQLQERITATVADAIMTKLDPHGVIVVVEAEHMCMTMRGVKKPGSKTITSAVRGVFAEDPASRAEALSLMGLK

SEQ ID NO: 15940 - protein, 188 aa, Thermoflavimicrobium sp.
  misc_feature (1)..(188): tr|A0A364K2V3|A0A364K2V3_9BACL GTP cyclohydrolase 1 OS= Thermoflavimicrobium sp. FBKL4.011 OX=2137476 GN=folE P E=3 SV=1
MQVDHQKIEQAVRMILEAVGEDPNREGLLDTPKRVARMYEEIFVGLKQNPEDYFSVIFSEDHEELVLVKDIPFYSTCEHHLVPFFGKAHVGYIPRGGRVVGLSKLARAVEAVARRPQLQERITANVADSIMNKLDPHGVIVVVEAEHMCMTMRGVKKPGSKTITSAVRGIFAEDQTSRAEVLSLMGLK

SEQ ID NO: 15941 - protein, 246 aa, Thermoflexibacter ruber
  misc_feature (1)..(246): tr|A0A1I2JP36|A0A1I2JP36_9BACT GTP cyclohydrolase 1 OS= Thermoflexibacter ruber OX=1003 GN=folE PE=3 SV=1
MKQNEILLSSPHKGNGHTHNGHKHQESNHLHDDIGDGHILTSLNTPLREDAFQLDDDLKIELIEKHFEQIMHILGLDLTDDSLKGTPHRVAKMYVKEIFSGLNPANKPTAKLFENQYNYNQMLVEKNITFYSTCEHHFVPIFGKAHVAYFSSGKVIGLSKLNRIVQYFAKRPQVQERLTNQIGEELKKALATEDVAVIMDAYHLCVSSRGIQDTNSSTVTAFFSGKFEEESVKAELLKYIEMKTGN

SEQ ID NO: 15942 - protein, 192 aa, Thermoflexus hugenholtzii
  misc_feature (1)..(192): tr|A0A2A9HJQ5|A0A2A9HJQ5_9CHLR GTP cyclohydrolase 1 OS= Thermoflexus hugenholtzii OX=1495650 GN=folE PE=3 SV=1
MTTTAGPDQARIRAAVVELLKAIGDDPTRDGLADTPRRIAEMYAEIFEGLFYDPREHLRVGFEVAHDEMVILRNIPFYSMCEHHFLPFHGEAHVGYIPDGRVVGISKLARVVEGYARRPQIQEQLTSQIAEAIQDVLQPDGVAVVIEAEHLCMTMRGIKKPGSRMVTSAMRGDFKNSHVTRAEFLSLVHGHH

SEQ ID NO: 15943 - protein, 208 aa, Thermoflexus hugenholtzii
  misc_feature (1)..(208): tr|A0A212RTT4|A0A212RTT4_9CHLR GTP cyclohydrolase 1 OS= Thermoflexus hugenholtzii JAD2 OX=877466 GN=folE PE=3 S V=1
MEPEGWRMWAETRTSAPDPDRLAEAVGALLRALGEDPDREGLRRTPARVAAMLQEVLAGYWMDPAELINGAIFEAEDNDLVLVRDIEFYSMCEHHLLPFYGRVHVAYIPDGRIIGLSKIPRIVELFARRLQVQERMTRQIADFLERVLQPQGVAVIVEAAHLCTMMRGVRKSGARMVTQALTGAFRTDPRLRSELRAHLRHPDRDAAG

SEQ ID NO: 15944 - protein, 222 aa, Thermogutta terrifontis
  misc_feature (1)..(222): tr|A0A286RF81|A0A286RF81_9PLAN GTP cyclohydrolase 1 OS= Thermogutta terrifontis OX=1331910 GN=folE PE=3 SV=1
MNREVDHIEATRSCRDAKQAGQEPRDKLSATQEYQVDLPRIERAVREILLAVGEDPDREGLRETPARVARMYAELFRGLRLDPRRHLKKVFTEKYDEIVVVKDISFESVCEHHLMPFMGKAHIAYLPGGKVVGLSKLARVVEDVSRRPQVQERMTEVIADLLIEELDAKGVAVVVEAIHTCMTVRGIRKPGAICVTSALRGAFRTNPSTRAEVMTLIYNGRQ

SEQ ID NO: 15945 - protein, 188 aa, Thermohalobacter berrensis
  misc_feature (1)..(188): tr|A0A419T6C6|A0A419T6C6_9CLOT GTP cyclohydrolase 1 OS= Thermohalobacter berrensis OX=99594 GN=folE PE=3 SV=1
MDKKRIENAVREILEAIGEDPNREGLKDTPKRIANMYEEIFSGLKKDPKKHLEIYFEEENHEELVLVKDIPFYSMCEHHLVPFFGKASVGYLPRNGKLTGLSKLARVVETVARRPQLQERFTSTIADSIMEKLNPYGVIVVVEAEHMCMTMRGVKKPGSKTVTSAVRGVFDRDAKSRAEAMALINFGK

SEQ ID NO: 15946 - protein, 187 aa, Thermohydrogenium kirishiense
  misc_feature (1)..(187): tr|A0A4R4ARU9|A0A4R4ARU9_9FIRM GTP cyclohydrolase 1 OS= Thermohydrogenium kirishiense OX=937254 GN=folE PE=3 SV =1
MIDKEKIKKAVFDILEAIGEDPKREGLIETPDRVARMYEEIFSGLHTDVMDVIKTFKEDEHQEIVIVKDIPMYSMCEHHLLPFMGVAHVAYLPRKGTILGLSKLARIVDILAKKPQLQERLTSEIADTIVKAANPLGVAVVVEAEHLCMTMRGIKKPGAKTVTSALRGLFKTDQRSREEVMLLINGK

SEQ ID NO: 15947 - protein, 187 aa, Thermolongibacillus altinsuensis
  misc_feature (1)..(187): tr|A0A4R1QQV3|A0A4R1QQV3_9BACI GTP cyclohydrolase 1 OS= Thermolongibacillus altinsuensis OX=575256 GN=folE PE=3 SV=1
MSINHEQIEQAVRLILEAIGEDPNREGLLDTPKRVAKMYAEVFAGLNEDPKQHLQTVFSEEHEELVLVKDIPFYSMCEHHLVPFFGVAHVAYIPRGGKVTGLSKLARTVEAVARRPQLQERITATVADAIVEALDPHGVMVVVEAEHMCMTMRGVKKPGAKTVTTAVRGVLETDAEARAEILALIKS

SEQ ID NO: 15948 - protein, 225 aa, Thermomicrobiales bacterium
  misc_feature (1)..(225): tr|A0A524J1Q4|A0A524J1Q4_9CHLR GTP cyclohydrolase 1 OS= Thermomicrobiales bacterium OX=2482790 GN=folE PE=3 SV= 1
MPSHVQRLVDEIENEIGEESTRPEALIEGNGSNGQGSEGPVEAAVREILTEIGEDPRRQGLLGTPGRVHRMYTELTAGYHVDPDRLINGAIFDVAYSEMVLVKDISFYSLCEHHLLPFFGTAAVAYIPRGRVIGLSKIPRIVEMYSRRLQVQERLTQQIADFLQDRLDPQGVGVVMEATHLCAAMRGVRKPGTIMTTSAVLGLFRTRDRTRAEFFAHLERRSPEA

SEQ ID NO: 15949 - protein, 207 aa, Thermomicrobium roseum
  misc_feature (1)..(207): tr|B9L0Q6|B9L0Q6_THERP GTP cyclohydrolase 1 OS=Thermomi crobium roseum (strain ATCC 27502 / DSM 5159 / P-2) OX= 309801 GN=folE PE=3 SV=1
MHHHEELVHLEDTGLEFTTTCDLERLRSLVAQWLEIIGEDPHREGLVRTPQRVAEAWAFLTRGYRQNLHEIVNGAIFHVEQDTMVVVKGIEFYSMCEHHLLPFFGHVHIGYLPRGRILGLSKFARIVDLYARRLQVQERLTNQIAEAIAELLDPQGVAVVADGIHLCMMMRGVEKQHARTTTSAMLGVFRESAAAREEFYRLLSTSS

SEQ ID NO: 15950 - protein, 307 aa, Thermomonas haemolytica
  misc_feature (1)..(307): tr|A0A4R3NBC9|A0A4R3NBC9_9GAMM GTP cyclohydrolase FolE2 OS=Thermomonas haemolytica OX=141949 GN=folE2 PE=3 SV= 1
MHKPLTSPILPDVAFDTAAQARALDWVGMEGMALPIRVQGQDGQEMTVPASVDVAVDLRDPATRGIHMSRLYLQLQQGLANETLGAPMLRRLLEACIASQQGLSSRARLRLRYEQLLLRRALRSDNAGWKRYPVEVEAELADGHLRLVLAFALDYSSTCPASAALSRQANAQRFATDFAEAGAVPAEAVCDWLQSPRGLAATPHAQRSRAEVRVELKPAFDCLPLLALVDALEAALGTPVQTAVKREDEQAFAQANAANLMFCEDAARRVAAVLAADARIAAWSARVAHLESLHPHDAVASVSGRNS

SEQ ID NO: 15951 - protein, 202 aa, Thermomonas haemolytica
  misc_feature (1)..(202): tr|A0A4R3NDN9|A0A4R3NDN9_9GAMM GTP cyclohydrolase 1 OS= Thermomonas haemolytica OX=141949 GN=folE PE=3 SV=1
MSDSRPDDVRHGVARAQAEEAVRTLLKWAGDDPAREGLLDTPKRVAKAYEDWFSGYALDPDDYMARTFEEVDGYDEMIVLRDIEYESHCEHHMAPIIGKVHVGYLPDGKVVGISKLARVVEAYARRFQVQEKMTAQIAHCIQRALQPRGVGVVVVGTHECMTTRGIHKRGVSMVTSKMLGSFRDDARTRAEFLRFIEVGPGR

SEQ ID NO: 15952 - protein, 198 aa, Thermomonas hydrothermalis
  misc_feature (1)..(198): tr|A0A1M4TY96|A0A1M4TY96_9GAMM GTP cyclohydrolase 1 OS= Thermomonas hydrothermalis OX=213588 GN=folE PE=3 SV=1
MADDIRNQVTRAQAEEAVRTLLRWAGDDPTREGLLDTPQRVVKAYEDWFSGYALDPDEYLARTFEEVGGYDEMIVLRDIEYESHCEHHMAPIIGKVHVGYLPAGKVVGISKLARVVEAYARRFQVQEKMTAQIAGCIQRVLEPRGVGVVVVGTHECMTTRGIHKRGVSMVTSKMLGCFRDDARTRAEFLRFIEVGPGR

SEQ ID NO: 15953 - protein, 308 aa, Thermomonas hydrothermalis
  misc_feature (1)..(308): tr|A0A1M4UN06|A0A1M4UN06_9GAMM GTP cyclohydrolase FolE2 OS=Thermomonas hydrothermalis OX=213588 GN=folE2 PE=3 SV=1
MHKPLTSPALPDVAFDRVPQARALDWVGMEGIALPIRLPDGNGATLRVPASVDVAVDLHAAGARGIHMSRLYLQLQQGLADTLLTGPALRRLLDDCIASQQGLATRARLRLRYDQLLLRTALRSGHAGWKRYPVMLEAVLADGHLQLTLELALEYSSTCPASAALSRQANAERFARMFGASSDVAVADVCAWLESEQGLAATPHAQRSRAEFRLELRPSLDELPLVNLIDALEAALGTPVQTAVKREDEQAFAEANAANLMFCEDAARRLAAVLAAEARILAWQVRVAHLESLHAHDAVASVSGRNDR

SEQ ID NO: 15954 - protein, 307 aa, Thermomonas sp.
  misc_feature (1)..(307): tr|A0A5B7ZMD8|A0A5B7ZMD8_9GAMM GTP cyclohydrolase FolE2 OS=Thermomonas sp. SY21 OX=2202149 GN=folE2 PE=3 SV=1
MHNSPRPTPLPDVAADAVALARPLDWVGMDGMAMPIRLAGEGGPDLHVPASVDVAVDLRDADARGIHMSRLYLQLQQSLANEALSAPSLRRLLETCIASQQGLSTRARLRLRYEHLLLRKALRTDNAGWKRYPVEVEAELRDGHLQLSMGFSVEYSSTCPASAALSRQVNAARFAEDFAGLRPLSNDMVRDWLASDRGLAATPHAQRSRAEVRVELKPAFDELPLHALVDAVETALGTPVQTAVKREDEQAFAEANAANLMFCEDAARRVAAALAGDARVAAWQARVAHYESLHPHDAVASVSGRNA

SEQ ID NO: 15955 - protein, 308 aa, Thermomonas sp.
  misc_feature (1)..(308): tr|A0A5C7QXR0|A0A5C7QXR0_9GAMM GTP cyclohydrolase FolE2 OS=Thermomonas sp. OX=1971895 GN=folE2 PE=3 SV=1
MHDNTRSAPLPDVAHDLAALARPLDWVGMDAIALPICLHGEGGVSMHVPAMVDIAVDLHDAGARGIHMSRLYLQLQQSLANEGVSAPVLRKLLEACVASQQGLSTRARLRLRYDHLLLRPALASANAGWKNYPVILEAELRDGHLHLSLAFSVEYSSTCPASAALSRQVNARRFAEDFAGIRPLSNDALAEWLASERGLAATPHAQRSRAELLVALKPTFDELPLQSLVEMVEAALGTPVQTAVKREDEQAFAELNAANLMFCEDAARRVAATLAGNARVSAWKVRVAHFESLHPHDAVASVSGRNSP

SEQ ID NO: 15956 - protein, 210 aa, Thermomonospora curvata
  misc_feature (1)..(210): tr|D1A546|D1A546_THECD GTP cyclohydrolase 1 OS=Thermomo nospora curvata (strain ATCC 19995 / DSM 43183 / JCM 30 96 / NBRC 15933 / NCIMB 10081 / Henssen B9) OX=471852 G N=folE PE=3 SV=1
MTLPHDEAPRAGEPAHSGLPAFDHERLERAVREILIAIGEDPDREGLRETPARVARAYAEQFAGLRQRPEDVLNKVFEADHDEMVLVKDIEVYSTCEHHLVPFHGLAHVGYTPNAKGQITGLSKLARLVDVYARRPQVQERLTSQIADALMEILEPRGVIVVIEAEHLCMTMRGVRKPGAKTVTSAVRGDFRDHAETRAEAMALILGRPS

SEQ ID NO: 15957 - protein, 207 aa, Thermophagus xiamenensis
  misc_feature (1)..(207): tr|A0A1I1XZN9|A0A1I1XZN9_9BACT GTP cyclohydrolase 1 OS= Thermophagus xiamenensis OX=385682 GN=folE PE=3 SV=1
MKQTLNGENGYAKIESFDDKITSQLSYHYSEILKLIGEDITREGLEKTPLRVAKALQFLTQGYNMDPEKIIRSAMFKEDYQQMVVVKDIELYSMCEHHMLPFFGKAHVAYIPRHHITGLSKIARVVEAYARRLQVQERLTTQIKECIHKTLNPLGVAVVIEAQHMCMQMRGVQKQHSVTTTSDFTGAFLKNMATREEFFNIIGSSLH

SEQ ID NO: 15958 - protein, 203 aa, Thermopolyspora flexuosa
  misc_feature (1)..(203): tr|A0A543J3V9|A0A543J3V9_9ACTN GTP cyclohydrolase 1 OS= Thermopolyspora flexuosa OX=103836 GN=folE PE=3 SV=1
MDSELMPERRPEPPPFDAARIEKAVREILIAIGEDPDREGLRDTPARVARAYAEQFAGLRQNPEDVLTTVFDADHDEMVLVRDIEVSSVCEHHLVPFYGVAHVGYIPNDKGQVTGLSKLARLIDVYARRPQLQERMTSQVADALMRVLEPRGVIVVIEAEHLCMTMRGVRKPGAKTITSAVRGNFRSSDRTRAEAMALILGRR

SEQ ID NO: 15959 - protein, 261 aa, Thermosediminibacter oceani
  misc_feature (1)..(261): tr|D9S1R7|D9S1R7_THEOJ GTP cyclohydrolase FolE2 OS=Ther mosediminibacter oceani (strain ATCC BAA-1034 / DSM 166 46 / JW/IW-1228P) OX=555079 GN=folE2 PE=3 SV=1
MKDVQSERDERRVPLKKVGVKNIEWPLKVLDKSKGYQHTVARMSLSVDLKHYIRGTHMSRFVEVLNDLEMLSPKALDDILTDIKERLKAENSHLEISFPYFIWKVSPVSGLESPLKIEAMIEAEKRVEPVITMGVRVPVHTLCPCSKEISENGAHNQRAVVEIYVRSREMIWFEDLVEIAEKNASCPIYTLLKRPDEKFVTEMAYKNAKFVEDVTRDVALELERDERIEWYRVQVTSFESIHNHDAFACVEKGWIEDVARD

SEQ ID NO: 15960 - protein, 270 aa, Thermosinus carboxydivorans
  misc_feature (1)..(270): tr|A1HPY7|A1HPY7_9FIRM GTP cyclohydrolase FolE2 OS=Ther mosinus carboxydivorans Nor1 OX=401526 GN=folE2 PE=3 SV =1
MKDVQNAADMRGIAIQKVGVSDVDLPFLIKTKNGSFQSVLAKIKLTVDLPKEYKGTHMSRFIEVLNEWSQKPVSYREMECILSDIMHRLDAQRADIDINFKYFLEKRAPISGLKSYLDCDCLFSGTLLSGDHLKFVLGLAVPFTSLCPCSKEISRYGAHNQRGLMKVKIKHRPGHFIWIEDLAALMEEQGSCPVYPLLKREDEKYVTERAYENPKFVEDVLRDLVLALRRLKGVEWFEVECENYESIHNHNAYAAHREFVSEITSTERSL

SEQ ID NO: 15961 - protein, 259 aa, Thermosipho africanus
  misc_feature (1)..(259): sp|B7ICT4|GCH4_THEAB GTP cyclohydrolase FolE2 OS=Thermo sipho africanus (strain TCF52B) OX=484019 GN=folE2 PE=3 SV=1
MRDVQSERDERNVPLKHVGIKNLKYPVVVLDKKNKNQHTIAEINMYVDLPKDFRGTHMSRFLEVLNKFHLKIDPKNIKAILDDLKKTLKAQSASIEIMFPYFLQKKAPVTKIESYMEYKCGFKAYDTNEECEFYIVVEVPIQTLCPCSKEISKYNAHNQRALARIEVETSELIWFEDLIELAESSASVPLFTLLKRPDEKYVTEKAYENPKFVEDVARDIALSLKENKKIRWFKVEVESFESIHNHNAYACVNSDTMEV

SEQ ID NO: 15962 - protein, 259 aa, Thermosipho africanus
  misc_feature (1)..(259): tr|K2PHQ6|K2PHQ6_9BACT GTP cyclohydrolase FolE2 OS=Ther mosipho africanus H17ap60334 OX=1161912 GN=folE2 PE=3 S V=1
MRDVQSERDERNVPLKHVGIKNLKYPVVVLDKKNKNQHTIAEINMYVDLPKDFRGTHMSRFLEVLNKFHLKIDPKNIKAILDDLKKTLKAQSASIEIMFPYFLQKKAPVTKIESYMEYKCGFKAYDTNEECEFYIVVEVPIQTLCPCSKEISKYNAHNQRALARIEVETSELIWFEDLIELAESSASVPLFTLLKRPDEKYVTEKAYENPKFVEDVARDIALSLKENKKIRWFKVEVESFESIHNHNAYACVDSDTMEV

SEQ ID NO: 15963 - protein, 258 aa, Thermosipho atlanticus
  misc_feature (1)..(258): tr|A0A1M5QNV7|A0A1M5QNV7_9BACT GTP cyclohydrolase FolE2 OS=Thermosipho atlanticus DSM 15807 OX=1123380 GN=folE 2 PE=3 SV=1
MLKDVQNEKDLRNIPLKHVGIKNLRYPIIVLDKKNKIQHTVADINMFVDLPKDFRGTHMSRFVEILNNFHFKIEPKTIKEILDDLKKSLNAQSAKIEISFPYFLKKEAPVTKIESFLEYKCGFKAYDNDKKYNFYLVVEVPVQTLCPCSKEISKYNAHNQRAKILIEVETYELIWFEELIAIAEHSASSPLYTLLKRPDEKHVTENAYENPKFVEDVARDVALKLKEDKRIKWFKVEVESYESIHTHNAYACVDSLTL

SEQ ID NO: 15964 - protein, 259 aa, Thermosipho melanesiensis
  misc_feature (1)..(259): sp|A6LKE7|GCH4_THEM4 GTP cyclohydrolase FolE2 OS=Thermo sipho melanesiensis (strain DSM 12029 / CIP 104789 / BI 429) OX=391009 GN=folE2 PE=3 SV=1
MKDVQSEKDTREIPLKHVGIKKLKYPVQVLDRENKVQNTVADINMYVDLPKDFRGTHMSRFLEVFNKFHLKIDPKTIKKILDDLKQTLKAQSAKIEIMFPYFLKKKAPVTKIESYMEYLCGFSAYDGPQKCEFYTIVEVSVQTLCPCSKEISKYNAHNQRANVRIEVETSELVWFEELIEIAEDSASVPLFSLLKRPDEKFVTEKAYENPKFVEDVARDIAIRLKDNPKINWFKVEVESYESIHNHNAFACVDSTIMEV

SEQ ID NO: 15965 - protein, 259 aa, Thermosipho sp.
  misc_feature (1)..(259): tr|A0A1L7BFR1|A0A1L7BFR1_9BACT GTP cyclohydrolase FolE2 OS=Thermosipho sp. 1063 OX=1462747 GN=folE2 PE=3 SV=1
MRDVQSEKDTREIPLKHVGIKDLKYPIQVLDRKNKVQNTIAKINMYVDLPKDFRGTHMSRFLEVFNKFHLKIDPKNIKMILDDLKKTLKAKSAKIEIMFPYFIKKKAPVTKIESYMEYTCGFKAYDGPEKCEFFIVVEVPVQTLCPCSKEISKYNAHNQRAHVRIEVETSDLVWFEELIEIAEKHSSVPLFSLLKRPDEKFLTEKAYENPKFVEDVARDIALELKNNPKLKWFKVEVESYESIHNHNAFACVDSYNMEV
